United States Patent Application Publication US 2021/0199660 A1 - sequence listing, part 64

SEQ ID NO: 922175 - DNA, 120 bp, Artificial Sequence
  ENSG00000288079_6 (sequence is synthesized)
ttccttcctgtggctgcaaattgaagttcgattctgtttgaagtaagaagagaagtaagacgccaccatccgctggatgcttcatggagttaccaatatccccatatccatgagctctgc

SEQ ID NO: 922176 - DNA, 120 bp, Artificial Sequence
  ENSG00000288079_7 (sequence is synthesized)
tgaatgcttaaagaaactttggccttttacccctgcaggtacttctcatgcacagtcctgtcctaccctcctgcctgttcctggggatcacaggacaagcctgcattcctctacagaggt

SEQ ID NO: 922177 - DNA, 120 bp, Artificial Sequence
  ENSG00000288079_8 (sequence is synthesized)
ctggatgggatccattaggtcacggggcaccgcatggggctcatgtggcaatgctgccaggatgacttagcagcctcagggccactggcaggtttctggactgatggataattctattcc

SEQ ID NO: 922178 - DNA, 120 bp, Artificial Sequence
  ENSG00000288079_9 (sequence is synthesized)
ccaactgtcacaacctccaagcctcaacttgtccctgtggcagcttgctgcatctgtggctaatgctacaaggcacaaaggattctgctctactggagcactactcagtggcatgctgat

SEQ ID NO: 922179 - DNA, 120 bp, Artificial Sequence
  ENSG00000288079_10 (sequence is synthesized)
cctttggtccttccctgcacctcagtccctttttgagagacacccgaggtgcaggagaagtaaagtcactaagagttttctctggttgagcttctggctcatggctatcagacagacttg

SEQ ID NO: 922180 - DNA, 120 bp, Artificial Sequence
  ENSG00000288079_11 (sequence is synthesized)
gctgtagagtctgagaagacaaagggtccctgacactcctcactatgttgcccctggacaatatgggggctctcctgtgtcccaaactgcttcattgatggacaaaaagtcccaacacaa

SEQ ID NO: 922181 - DNA, 120 bp, Artificial Sequence
  ENSG00000288079_12 (sequence is synthesized)
ttctcaacccccaagtcacttgagggaccatagcttggcatgaccccaaggttattcctctgaaataaaatgatctgcaagtgaaacgccatggcagttttctgctgaggatgtgggaca

SEQ ID NO: 922182 - DNA, 120 bp, Artificial Sequence
  ENSG00000288079_13 (sequence is synthesized)
actacagaaacagaaggctggagcctcattgtgctctcatgaggtcagaaagcctggcacctggtgagtggttggggtttactgtgggctgggcaggcatctcagaagccatgcatttgg

SEQ ID NO: 922183 - DNA, 120 bp, Artificial Sequence
  ENSG00000288079_14 (sequence is synthesized)
ggtagtgactaagtattttagccctggcacatagaccccctgcagcccacaaagcgggacaaaaccagcatttggtaaaataccatccctctggtcatcattgagtcattcatttagcaa

SEQ ID NO: 922184 - DNA, 120 bp, Artificial Sequence
  ENSG00000288079_15 (sequence is synthesized)
gccaggtgctgcagaattgtctattatgccaagcactgcagaaaatacaaagaagaaaagacatagctcctaaccacagggagctttcaatcacatagacaaggcaggacacaataattc

SEQ ID NO: 922185 - DNA, 120 bp, Artificial Sequence
  ENSG00000288079_16 (sequence is synthesized)
acaagcgtggtgttctccagcgtagtcctcaccacctccaccagcactccagcctaagtcaacactgtaatctacagagacacttagaaacacagttggcagagtgagtactgctcctcc

SEQ ID NO: 922186 - DNA, 120 bp, Artificial Sequence
  ENSG00000288079_17 (sequence is synthesized)
ctttgcaggcagggagactggataaatatgtttgctgtctttgggatttttttctgcctgtccaattgcacaaataattttggctcccaagctctctcctgacaaccatggaaacatgac

SEQ ID NO: 922187 - DNA, 120 bp, Artificial Sequence
  ENSG00000288079_18 (sequence is synthesized)
caaacacactttctgatgaaagcaaggcatgctcttttttatttaaagaaaacagtttccatggggaggaagaagaagaattaaaaaaaaaaacaaacctttgtagatgccaagcacatt

SEQ ID NO: 922188 - DNA, 120 bp, Artificial Sequence
  ENSG00000288079_19 (sequence is synthesized)
agttgttaaatcttgtttctttcttttcctttcagttgaggtgggatttacacccagatttgagcagtggaagaaagctgggattggggaagagatgaaagagactgggggatgagggct

SEQ ID NO: 922189 - DNA, 120 bp, Artificial Sequence
  ENSG00000288079_20 (sequence is synthesized)
gaaaatcaaagtcaagacaggagagagaaatctgggggtgggcaggaggggaaagcaggccagaagggaggagtgggagaggaagaaggagagagactaaaaagaacctattttgcaatg

SEQ ID NO: 922190 - DNA, 120 bp, Artificial Sequence
  ENSG00000288079_21 (sequence is synthesized)
tcattaaatgatttgcaatgaattggcctgaggcttcaggaatttcttggcttgaaccaattaaaaatacttcatttttaaaaaagacataagagaacgagaaatgcgattaatcctcaa

SEQ ID NO: 922191 - DNA, 120 bp, Artificial Sequence
  ENSG00000288079_22 (sequence is synthesized)
agacaagtcaaggatggagccatgtctccactgggtctggcagccagatgaacacagatgtctggtctgtagaccatctcatctacccgacttcagggccgctctgaggtagggctggtt

SEQ ID NO: 922192 - DNA, 120 bp, Artificial Sequence
  ENSG00000288079_23 (sequence is synthesized)
agcagaactggggagtttcttttggactagatgaaggaatgaaatagttagaaaaaaaatatactgaagaaagagcagaaggaaaaaaagatttacttgccagcaacccacatcacacat

SEQ ID NO: 922193 - DNA, 120 bp, Artificial Sequence
  ENSG00000288079_24 (sequence is synthesized)
atttctctgatcaaccaaatacaaactataaacttagcagtgggaaaattaatgtgagtcctggtggtctggactcatcagagccagagctggatcctggcacaggctttggaagggctg

SEQ ID NO: 922194 - DNA, 120 bp, Artificial Sequence
  ENSG00000288079_25 (sequence is synthesized)
gcagcctgtgcaagaagagagggaggagagaaagcggaggctgaggagctgagagaaagaatggggatgagcactttggtgtggctgtgatgaacagaactccaggtgggagagacgggg

SEQ ID NO: 922195 - DNA, 120 bp, Artificial Sequence
  ENSG00000288079_26 (sequence is synthesized)
cagtggggcctgctttttcttcccacacacctggaaactgcatactcccatcagcctcggtggcaccaatcccatccacccactccaaaatgccccttgaggtatatgtgaggacagtgg

SEQ ID NO: 922196 - DNA, 120 bp, Artificial Sequence
  ENSG00000288079_27 (sequence is synthesized)
tccccaacctttttggcatcagggacgggtttcatggaagacaatttttccatggaccatgggtggggagactgggggggatggttttgggataaaactgttccacctcaaatcaataga

SEQ ID NO: 922197 - DNA, 120 bp, Artificial Sequence
  ENSG00000288079_28 (sequence is synthesized)
cattagttagattctcataaggggcgcacaacctcctaaatccctcgcatgcacagttcacagtagggttcaccctctaatggtgaaccctattctattgaatggtgaaaacctgttctg

SEQ ID NO: 922198 - DNA, 64 bp, Artificial Sequence
  ENSG00000288079_29 (sequence is synthesized)
ttctgttctgttctgttctgttcttctattctaatagaatctaatgccactgctgatctgacag

SEQ ID NO: 922199 - DNA, 120 bp, Artificial Sequence
  ENSG00000288079_30 (sequence is synthesized)
gaggtggtgttcagatggtaatgcttgctggtccaccgctcacctcctgctgtgtgaccctgttcctaacaggccatgcaccaccatggaacggtactggtctgctgcctgggggttggg

SEQ ID NO: 922200 - DNA, 120 bp, Artificial Sequence
  ENSG00000288079_31 (sequence is synthesized)
gacccctgtgttaggtcatggagccaaattcactggcatctccctgaggttccagaatttcctccaaacatctcagtttctttccaatgttgttttatgcttctgacattcatcaatttt

SEQ ID NO: 922201 - DNA, 120 bp, Artificial Sequence
  ENSG00000288079_32 (sequence is synthesized)
tctaagtctttcttgaatccatttgtatcttcaacctctttgtatcctgagtccctgctttatcctttcttatatacttcttgaaaactttaaatatatcagaatttgaaaaggaaattc

SEQ ID NO: 922202 - DNA, 120 bp, Artificial Sequence
  ENSG00000288079_33 (sequence is synthesized)
agaaattgttaatttaccctgtgtatgccctttttcatcttctagacctcaaacatgttttatctgggagtcttcctctttcatgacattcacagaaggcctatggtgtgccaggccccg

SEQ ID NO: 922203 - DNA, 120 bp, Artificial Sequence
  ENSG00000288079_34 (sequence is synthesized)
tggacagcactgtggacacagatgcataataacagttcctaccctccagatagagaggcaagaaagggctgtggaagcaaacccaaggtactaaggaagccgggaagagaacctactcta

SEQ ID NO: 922204 - DNA, 120 bp, Artificial Sequence
  ENSG00000288079_35 (sequence is synthesized)
gacttggaagttgaaggggtcaagaaacattcctagagaagatacctgagtcttgaaaactgagaaggaattagtaacccaacagaggtgggaactttctgaggacggagatggagagga

SEQ ID NO: 922205 - DNA, 120 bp, Artificial Sequence
  ENSG00000288079_36 (sequence is synthesized)
agatgctgccagctgagggaccaccattctgaaagctaggagaaagtgcgcgatggaaagtgggcctgagggaaaggctgtaagcacctcactattaatcacaattctccctataggaaa

SEQ ID NO: 922206 - DNA, 120 bp, Artificial Sequence
  ENSG00000288078_0 (sequence is synthesized)
agacctgctgttcaagatggccaagcaaactgatatcagcctttgctgaaacttggagttatgaatggccctcaccatacagatgctttctgactgagcttctctctaccctgaacacaa

SEQ ID NO: 922207 - DNA, 120 bp, Artificial Sequence
  ENSG00000288078_1 (sequence is synthesized)
gaaaccctcatagttcggcaggaatatcatcgctcctattcagcctgaagaagttacagaagatgaatcttcatccttctgcaattcttaggattaagggttcttttataaaaagggagg

SEQ ID NO: 922208 - DNA, 78 bp, Artificial Sequence
  ENSG00000288078_2 (sequence is synthesized)
aataggggctaggtaaaatgaggctgagatctgctaggctgcattcccaaatggctaaaaccttctaagtcacaggat

SEQ ID NO: 922209 - DNA, 85 bp, Artificial Sequence
  ENSG00000288078_3 (sequence is synthesized)
taaaacaggttgcagtaaagaagccgctaaaacccaacaaaaccaagatggtgatgatagtttgtgccatggcaacatcaggaag

SEQ ID NO: 922210 - DNA, 120 bp, Artificial Sequence
  ENSG00000275850_0 (sequence is synthesized)
attcattcatttactgccaaatttcttgatgaactgctattgacagatgattaaaattcaatcccagaaatattctgggcctttgaaaggtgtgtcctactggcctgaagaaggggctgt

SEQ ID NO: 922211 - DNA, 120 bp, Artificial Sequence
  ENSG00000275850_1 (sequence is synthesized)
gaccagatggtggttctgcactcgtaggtagggtgtggtccttgtttgcagtgaatctctgggagcgtggcagtttcttccgtgtgtcacgttctccctgtgtctgcatccagagtggcc

SEQ ID NO: 922212 - DNA, 120 bp, Artificial Sequence
  ENSG00000275850_2 (sequence is synthesized)
gcagtccccaggggatgaagggtgcacctatttctttaaatttccatggagggtcgaaactgctccttgagattttaaaatacgcttcatggtccccacggtgtcaggtagctagtttat

SEQ ID NO: 922213 - DNA, 120 bp, Artificial Sequence
  ENSG00000275850_3 (sequence is synthesized)
gggtcccatcctggttgtgataactcaggctgagctggatgataaacgaaagtgggacagagctgcaggataaatattgctacagggcatctccagcggcacaaatcacagggaaaatat

SEQ ID NO: 922214 - DNA, 120 bp, Artificial Sequence
  ENSG00000275850_4 (sequence is synthesized)
ctcccaggcttttcatttctcctcttcctccctggccctctggtagcagccagcaaagcaggatccatccgtcacccttcccccgcccccaccccagcctcagctctcagcgcactgctg

SEQ ID NO: 922215 - DNA, 120 bp, Artificial Sequence
  ENSG00000275850_5 (sequence is synthesized)
gggagcgagggatgcagattggtcctggtgcaggcggccctctctgtcttgcggccctctgcctccccgcccagctctggaggcagccccggggagccggcatggtcagggtcatgctgt

SEQ ID NO: 922216 - DNA, 120 bp, Artificial Sequence
  ENSG00000275850_6 (sequence is synthesized)
tttcagttgtggacgagtgcttagctttgcagacctgattctttatctctaaaacgagagagattaataactggtggttcttagtctggcgcgagcgggtgctcgtgtcactcaccgggg

SEQ ID NO: 922217 - DNA, 120 bp, Artificial Sequence
  ENSG00000275850_7 (sequence is synthesized)
gaacttaaacgccgcttgctgagtcccaccctagcgcatagaatcataaccgcgggggtctggtctggggtgttttcactgacgtttggttggccctgccagcggtgctcacgaggccca

SEQ ID NO: 922218 - DNA, 120 bp, Artificial Sequence
  ENSG00000275850_8 (sequence is synthesized)
ctcctggccaagagccactcctggtacaagtgaggactgagatgggcgatggggtgggcggtgcgatgggccagttcgttgaccagctcttgtactagatccatcagcaatgtcgcttag

SEQ ID NO: 922219 - DNA, 120 bp, Artificial Sequence
  ENSG00000275850_9 (sequence is synthesized)
cgaggctttcttcagctttggaggcatgctggcttcgtaatcagcgtcaccctgtaggtgttgattgagcctgcagggaataccaagcacgtaggcatggaaaggtaactaaccgcacgc

SEQ ID NO: 922220 - DNA, 120 bp, Artificial Sequence
  ENSG00000275850_10 (sequence is synthesized)
ggcaggcgagtctattaaacagagaggctggtcccagcgcaggttgttaccaccgctgggccctcccaccacctgaccttgaagcgcactcagaggtttctctcactccacgcccgggtt

SEQ ID NO: 922221 - DNA, 120 bp, Artificial Sequence
  ENSG00000275850_11 (sequence is synthesized)
ctgctgactgtgcctctgccttgtctctggatgccactttcccagttcaggtgctcaaggcgtcttacctgaacattaccacagcttcctgacaagtctctccaagctgtcctttgctgt

SEQ ID NO: 922222 - DNA, 120 bp, Artificial Sequence
  ENSG00000275850_12 (sequence is synthesized)
cctgcaaagtggctgtgcccactgacctggtcggctgtgcctggttggctgtgcctggcatgtggagggtgctcactgtgcccgggtggatgagttcagtggttccctgtcttcccgagg

SEQ ID NO: 922223 - DNA, 120 bp, Artificial Sequence
  ENSG00000275850_13 (sequence is synthesized)
aaagcccagagtctgtgtggctgcagccctgcccgtggccctcacgagctgtatgaccacccgctagactcttcttgtgctttcttgattctgccacgtccttgccgtccgctgggtctc

SEQ ID NO: 922224 - DNA, 120 bp, Artificial Sequence
  ENSG00000275850_14 (sequence is synthesized)
gcctgtgctatttgctctccctgcaatgccctttctcttccctctgccaggcagactgtactcacccgctgggcgtagcacaggtactcccatgggacacctcctcatctatgcccatac

SEQ ID NO: 922225 - DNA, 120 bp, Artificial Sequence
  ENSG00000275850_15 (sequence is synthesized)
tggcattgtagcacttaccacatgcttgtgctgttgaaagagtttgtttttgtgtatttttttatttttagagatgagggccaggctggagtgcggttgcatgatcatggctcactgtag

SEQ ID NO: 922226 - DNA, 120 bp, Artificial Sequence
  ENSG00000275850_16 (sequence is synthesized)
ccttgacctcctaggctcaagtgatcctccaacctcagccttccaagtacttagaactacaggtggacaccaccatgcctggctaatttttaagtttttgtagagatgggggtcttgcta

SEQ ID NO: 922227 - DNA, 120 bp, Artificial Sequence
  ENSG00000275850_17 (sequence is synthesized)
tattgcccctggtcttgacctcctggtctcaagtgatcctgttcctcggcctcccaagttgctgggggattacaggtgttagccactgtgcctggctctgccgtttgtttaaagatctct

SEQ ID NO: 922228 - DNA, 120 bp, Artificial Sequence
  ENSG00000275850_18 (sequence is synthesized)
ctctctcctttctgtcttcctccctccctccctcctcctccttaaattataagctgcttgaaaacaggaaccagctgagttgagcccatctaccaagtgaaatgcccagcagatctctgc

SEQ ID NO: 922229 - DNA, 120 bp, Artificial Sequence
  ENSG00000275850_19 (sequence is synthesized)
ctgataaatgtttgttgaatgactacagcgtggtgttaaggatgtggaccaggaagggatgtttgtatttgttgtgttctgaccttgctagatgaccctgaataaattcatttatcctcc

SEQ ID NO: 922230 - DNA, 120 bp, Artificial Sequence
  ENSG00000232245_0 (sequence is synthesized)
cgtcaaagtcccagctttcaaatacagagcccccagaacctgaaatccaagtcccagcccataagggttccgtgaacacgctcatgtgcttgttcttactagacaaagatgtgattgcaa

SEQ ID NO: 922231 - DNA, 120 bp, Artificial Sequence
  ENSG00000232245_1 (sequence is synthesized)
tcctactcctgaacatgccatggaaccacaactggtgatggagccaaaagccgtgaacagtgggacatttgaaacccctcagcaagcatgcttgctaacatgatttccagggaagtgtta

SEQ ID NO: 922232 - DNA, 120 bp, Artificial Sequence
  ENSG00000234168_0 (sequence is synthesized)
gggcggtttgagaccagcctgggcaatatagcaaccgtcctgctggcacacaaaccctcctgcctctaaacagaatttgatgggccccttggcaaaggcaggttttagaaactcctcggg

SEQ ID NO: 922233 - DNA, 120 bp, Artificial Sequence
  ENSG00000234168_1 (sequence is synthesized)
ggctggagcgcaaggagagtctgagccaggccaagcctccctgggggaacatggctgaaggaagacctacagacatctcccctgggtgggagcctgtgttcagaagcagcagatccaagt

SEQ ID NO: 922234 - DNA, 120 bp, Artificial Sequence
  ENSG00000234168_2 (sequence is synthesized)
tataacagctaagacagagatcagagccatgcagctgcaagccgaagcaggccaaggattgccagcaaaccaagagaggctggaagaagagagaaggatctttccctgctgatttcacag

SEQ ID NO: 922235 - DNA, 120 bp, Artificial Sequence
  ENSG00000234168_3 (sequence is synthesized)
ggagcatggcccttgatctcaggaccttgaccccagaactttctggctgccaataccaagttcctcctctccatctcacattcaaagagcacacagagaggctctaattgggtctttcta

SEQ ID NO: 922236 - DNA, 120 bp, Artificial Sequence
  ENSG00000234168_4 (sequence is synthesized)
catcctgtgtccgtacagagctctcgcgtttgggtggggactttgcaccgtgaccagtctaagatcagcaccagcccctggtccaatcagctgtggccaagacccttgaagacacaggca

SEQ ID NO: 922237 - DNA, 120 bp, Artificial Sequence
  ENSG00000234169_0 (sequence is synthesized)
agagaggtgcaggcaactctctgggggtccaagacatggtccctcgagggcctcccggtgggtattgagccaaggagcagccagtggtgatcacagactccaaccaagggctgggcccct

SEQ ID NO: 922238 - DNA, 120 bp, Artificial Sequence
  ENSG00000234169_1 (sequence is synthesized)
ccagagtgagcagagccctgctcagccagctcctgcaaatatcaatcctgcaggaagggttgtggggagaagacactgttccaaccaactgacctgctggattggaggatctagaaacct

SEQ ID NO: 922239 - DNA, 120 bp, Artificial Sequence
  ENSG00000234169_2 (sequence is synthesized)
ttgggcatgagctgaattgcaccatggctttctgtttgtctggggaacgctgactaatacaaggcatctcaacttgggcattactgaggctgtagggtcacggtaagccctgaaattgca

SEQ ID NO: 922240 - DNA, 120 bp, Artificial Sequence
  ENSG00000234169_3 (sequence is synthesized)
catgtctgtgcactgttatggggagaagatccacaaggtcacttaatcctccaaaaggtgaagagctgttgccttcaggagccccagggagaaaaaccaggcttgagggttttaggtaaa

SEQ ID NO: 922241 - DNA, 120 bp, Artificial Sequence
  ENSG00000267658_0 (sequence is synthesized)
tccgattctggaagcagggggagcggaacttagggtacctctctcccacaactagaatggacaggccagaggacagtcatagcggtttccttaaggctcaccaaaggcagccgctccgga

SEQ ID NO: 922242 - DNA, 120 bp, Artificial Sequence
  ENSG00000267658_1 (sequence is synthesized)
ggaggcactcttggccgacctacccagcggcgccggggcgtctgtgattgggaaggtgaggaaagcgctgcaggaagagttctctgcaggatgctgggtgagatcaaagggagagcttct

SEQ ID NO: 922243 - DNA, 120 bp, Artificial Sequence
  ENSG00000267658_2 (sequence is synthesized)
gccaccacctcctacttggtgtgtgcgggggccggcacaaagaccatctctgcctctgccttcccctgctcctagccagggtcagctcttctctctgacgcggaatacagagctggacaa

SEQ ID NO: 922244 - DNA, 120 bp, Artificial Sequence
  ENSG00000287959_0 (sequence is synthesized)
acacagcatccctggaagccgagacccaacaacccactatgcctacagggtggggccccaagggaaaccccaaacacagaggtttgggggagcacccagtcaatgctccacacatggatg

SEQ ID NO: 922245 - DNA, 120 bp, Artificial Sequence
  ENSG00000287959_1 (sequence is synthesized)
ctgggaaaggaatgctgccctgactctgcggggagaggaccagggaagatccacatttggtactttcttcatctctgcactgtgtgccgcttccttcggttgatttttatctgggccctt

SEQ ID NO: 922246 - DNA, 120 bp, Artificial Sequence
  ENSG00000287959_2 (sequence is synthesized)
tagctgtaataaaccatagatcaagtaaggccagccaagttcagcgtaacaggagttttatgagaaggaccaaggtaacctcaaagccaagagtgacttcagggggaacacaagtctgac

SEQ ID NO: 922247 - DNA, 120 bp, Artificial Sequence
  ENSG00000287959_3 (sequence is synthesized)
gggaaggccaagtacagcagggagactaaggaggcgagagggacaggcggcagaggcagaggccaaagatgaggcccatcggctcagttttttggaaggcaggcccagacatgaaaaaag

SEQ ID NO: 922248 - DNA, 120 bp, Artificial Sequence
  ENSG00000287959_4 (sequence is synthesized)
gatgccagtgctctctcttctccttccacacatcccggctgtgactctcaggctaacacaactgccacactgttcacacaggtttgcatggataccctgtgaatgcagctactgtttacc

SEQ ID NO: 922249 - DNA, 120 bp, Artificial Sequence
  ENSG00000287959_5 (sequence is synthesized)
catgtacagcagggcccctaagaaaacatttgttgtgaatctccagtcctttccctcagagcaaccccagaagtccacttccttaatggccaggcccctgcagccacctctggacaccca

SEQ ID NO: 922250 - DNA, 120 bp, Artificial Sequence
  ENSG00000287959_6 (sequence is synthesized)
ggacatcctggagaccagtgctcagaatgacaagcacggtctcctcagccgaccagacaagcttccacatacgcaggtacagattctgtaaccacctcctatccaggtggaaaatccaca

SEQ ID NO: 922251 - DNA, 120 bp, Artificial Sequence
  ENSG00000287959_7 (sequence is synthesized)
tttcaagttgacacacaagcatctatcccctggagacagctagccctcctcttccaggagagatggggctcccctcagccctccacccactctccagccctgacctcccagcccttccgg

SEQ ID NO: 922252 - DNA, 120 bp, Artificial Sequence
  ENSG00000287959_8 (sequence is synthesized)
ccatcacctcaccacgtctttgctccattacacttgtctcaatctaggctctgaggccctaatcaaatctggcatctccctagctctctttcagtctggctgcctcccatatggctggct

SEQ ID NO: 922253 - DNA, 120 bp, Artificial Sequence
  ENSG00000287959_9 (sequence is synthesized)
gatcaacatctttctgctttaaatactacagaagctacagatcaacttgtatttattttcaaacatgcatgcatgcaaagggaatttaattctgtgtgtgaaagaaatattgttaaatga

SEQ ID NO: 922254 - DNA, 120 bp, Artificial Sequence
  ENSG00000287959_10 (sequence is synthesized)
cagttgaatttgtggtacctgtttcagaaaggattccagggctgaaagtgcagcttttttcaattctacatttgtgtgggcacaccactttaacaagacttcaaatagagacacgtagtt

SEQ ID NO: 922255 - DNA, 120 bp, Artificial Sequence
  ENSG00000287959_11 (sequence is synthesized)
gtccagaaggcaggtgctaaactgagatgcatgcagggcaaataggcgcaagccagctgcaaatgcaaatgccattatatttaaaatcagacgacataacacagaacagaaaaccaacaa

SEQ ID NO: 922256 - DNA, 120 bp, Artificial Sequence
  ENSG00000287959_12 (sequence is synthesized)
acctgcagggatatgtcaaagtcaacactgtgctcaggaagatctagtaccattacactacagtaacccagggattcctgtcagagctctaacactaccaattaacaggcccataacttg

SEQ ID NO: 922257 - DNA, 120 bp, Artificial Sequence
  ENSG00000287959_13 (sequence is synthesized)
gctgacaaatcccaaaacaagggtcagaagtggaatcaggattcattgaggcaaagtcagaatcaaacagcctggatcccctgaaagataccctaaaataaagtgctttcaaccatgtaa

SEQ ID NO: 922258 - DNA, 120 bp, Artificial Sequence
  ENSG00000287958_0 (sequence is synthesized)
ggttggggtaggccatggaagttcttttctggttctatttcctcagtgaaataatgcgctttcaaagggaaactcatatagtagtgctggaagtgtaaatgagccttttgatattaggtt

SEQ ID NO: 922259 - DNA, 120 bp, Artificial Sequence
  ENSG00000287958_1 (sequence is synthesized)
tcccagtctggcagctgggcatcctcctccccaaagcaagagtaccgggatatgccaaggggttcttaaagctggaactcatggatttccctggctgattggagcatcactgctgccagc

SEQ ID NO: 922260 - DNA, 120 bp, Artificial Sequence
  ENSG00000287958_2 (sequence is synthesized)
aaagcccaaggtgtgagctctacattatgctgagatggctatgtacaagtatatccagaatgacggtggatacgttgaaagtccaatcaactgtgctaaatcttgaatcagttctctctg

SEQ ID NO: 922261 - DNA, 120 bp, Artificial Sequence
  ENSG00000287958_3 (sequence is synthesized)
ttgccttttgcagggcagccttaccatctccttttaagaacagaagtcttttctttctgcctcttaaagtcagtagctggtttgtcacccaataacaaaagcccacaatatcctgacctc

SEQ ID NO: 922262 - DNA, 120 bp, Artificial Sequence
  ENSG00000287958_4 (sequence is synthesized)
aaagactaggaagtaaataaggaaatatggagtaaaagagtaatcttcctgctgagcatgttttgcggttgccagcgctgccccgggtgtgtctggaggaacactccctgttgcctaaca

SEQ ID NO: 922263 - DNA, 120 bp, Artificial Sequence
  ENSG00000287958_5 (sequence is synthesized)
actgctgtaatgtaacggaaatagaagcacgatgccacacatccctcagaaaacgacttggcccttggccctcctgtggatgaagagtatattgaagagaaactggatatttctaaattt

SEQ ID NO: 922264 - DNA, 120 bp, Artificial Sequence
  ENSG00000287958_6 (sequence is synthesized)
gctaagactcgcttttctcacttgctctcagatcacactacttttgagtagcccaaaattttgttgccaactcagcaagttaagcaaacaatattacaaatcatgttgaaactgaagtgg

SEQ ID NO: 922265 - DNA, 120 bp, Artificial Sequence
  ENSG00000287958_7 (sequence is synthesized)
tccccatgggccagtgagtacggtgcaggtggagaaaaaattagctgctgagttaggacaaactgctccaattttgaaggcacaaatgggcatcatcttgggcccgggtactacccaagg

SEQ ID NO: 922266 - DNA, 120 bp, Artificial Sequence
  ENSG00000287958_8 (sequence is synthesized)
tggacctctcaatcaggctcttatgctcccaggtgtagttgttgggtgaactctctccctggatgctcagggacagcatctcagagagaggtgaatggaaaaaccatgagaccctgtaca

SEQ ID NO: 922267 - DNA, 120 bp, Artificial Sequence
  ENSG00000287958_9 (sequence is synthesized)
cactctaggtgcaatggattacaagggttgatagctcttcttagtaaccgaaagcctatatgctccatctttcttgatggcaaggtccctgggaaggagacattctcttagaatgtcatt

SEQ ID NO: 922268 - DNA, 120 bp, Artificial Sequence
  ENSG00000287958_10 (sequence is synthesized)
aaatgaccatagaataagcatgaagtgagtggaattatgtggaagggattcagcattttacccaagcactgggcagcccctgggtgtggctgtccctccacagtggcctgtctgtctaag

SEQ ID NO: 922269 - DNA, 120 bp, Artificial Sequence
  ENSG00000287958_11 (sequence is synthesized)
atctatcattgcagatacagatgtctccaaaaggcaattgccaaaggctgtgccacacagcacacacctgtccatgtgcagattgattctgttaaactcttcagctatcttgtgggctgc

SEQ ID NO: 922270 - DNA, 120 bp, Artificial Sequence
  ENSG00000287958_12 (sequence is synthesized)
ttttccctgcctcattatctgcctgcagaccttccttctgtgttctctgctcttagaggtcagattgatctgtatttttatcaagatgaggaaggagatggtagactgtgaatcaaggat

SEQ ID NO: 922271 - DNA, 120 bp, Artificial Sequence
  ENSG00000287958_13 (sequence is synthesized)
ctacctctcccagtaattcactgtggcatcttggggcacctgctggccctctctgagcctccattttcttacccacgaaatgtggatttggacccagttatctccaaccacccaagagtc

SEQ ID NO: 922272 - DNA, 120 bp, Artificial Sequence
  ENSG00000287958_14 (sequence is synthesized)
tgtgattctgctactaagaaaagcaaaaggcaagtacaagatagcatgtgtttagttgctggggaaagctcagtctaatattaaaaataataagtataaaaataatcaccaccattcact

SEQ ID NO: 922273 - DNA, 120 bp, Artificial Sequence
  ENSG00000287958_15 (sequence is synthesized)
cgagcttgctttgccagttctgcactgtgatctttgcaggggtaatcttactgaatcctctgctccaaccctaccaggtgggaactacttttatctttatttttctgatgaggagattga

SEQ ID NO: 922274 - DNA, 120 bp, Artificial Sequence
  ENSG00000287958_16 (sequence is synthesized)
gcctcagagatgttaagcaacctgccgaagcagagagttaatatgtcgggattcatcacaggcagatccctctgctcttgggaagcccagacctcagaagcaggagtgggtctgattcag

SEQ ID NO: 922275 - DNA, 120 bp, Artificial Sequence
  ENSG00000287958_17 (sequence is synthesized)
gtgtgctctgagggccagctgtcctttccaaaaatgccttcctttatttagacaccaacatccttgctattttggatttttcaatgagcttccttattttctccctattctgtcctattc

SEQ ID NO: 922276 - DNA, 120 bp, Artificial Sequence
  ENSG00000287958_18 (sequence is synthesized)
agcaaaatgaatgaataaatataggttcctaatgttacaaatttaattttcttctagaaatgaaagtgtttatttctcttcttttatttctcaagccaaaataattatttcctccttctt

SEQ ID NO: 922277 - DNA, 120 bp, Artificial Sequence
  ENSG00000287958_19 (sequence is synthesized)
agaagtccaggaataggttaaactttaattaaaagtcttatggttcaacagttggaatgaggatcaggtaataacgaagaaaccccgtaaacaccctgaggagaaccagcaccccctcca

SEQ ID NO: 922278 - DNA, 120 bp, Artificial Sequence
  ENSG00000287958_20 (sequence is synthesized)
ttggttgttttagctcagcccacagctaacagctcagctcagaaagttcctaccacccactccgcttctaacgccttttaatattcgcacagagttttctcacattgtggctctcacaca

SEQ ID NO: 922279 - DNA, 120 bp, Artificial Sequence
  ENSG00000287958_21 (sequence is synthesized)
cttcctttatacatgctgtttcctcagcctggaatgccacctctttctttacctggagaacccctgtcccttaaagacgcaggtcagaagtcacgtagtactcctctgctaccacctaat

SEQ ID NO: 922280 - DNA, 120 bp, Artificial Sequence
  ENSG00000287958_22 (sequence is synthesized)
gcaaagcgtgattattccttcacttctcttctgcatttaaattattgagggaagaggcttggtctcattgcctttggaatagctctggatctgcgttcatgttttgtatataatacgact

SEQ ID NO: 922281 - DNA, 120 bp, Artificial Sequence
  ENSG00000234160_0 (sequence is synthesized)
gaggggtagaatttagcgagggagagagactttggctcaattaagtaaaaagttagatgggctcagttttcttgggcaagtctggcctgttgtgcaaagcacccgcactccctgactctt

SEQ ID NO: 922282 - DNA, 120 bp, Artificial Sequence
  ENSG00000234160_1 (sequence is synthesized)
tccaaatgacctggagggaatttgtgtcccagctgttcccttccctgccacctttgctccaggtgggaggatcacctgagtgagcctgaggaggtcaaggctgcggtgaaccatgatcac

SEQ ID NO: 922283 - DNA, 120 bp, Artificial Sequence
  ENSG00000287956_0 (sequence is synthesized)
aaactcaagagaaaacaactgggtagtgaaaacagaaaaatgactgacatttgcggatttctgttgttgatcctgcactgattaggaccaagcaggagtctccagctgccacgcagaagg

SEQ ID NO: 922284 - DNA, 120 bp, Artificial Sequence
  ENSG00000287956_1 (sequence is synthesized)
aaagaggcagatctttgaaggatggtttctaacaacttgtgaagttacctggggttagacgggagttctggccaaaattgcaaatccttcaaatctcccagaagagcagaagaaaaacaa

SEQ ID NO: 922285 - DNA, 120 bp, Artificial Sequence
  ENSG00000287956_2 (sequence is synthesized)
ctcaacaatatttaagaaagttaactggtgaggttaactcagaacccccaggtgaattaggtcatctctgtcccctcccctgaagacctcgtgaactctgagggtatgaaatggaattga

SEQ ID NO: 922286 - DNA, 120 bp, Artificial Sequence
  ENSG00000287956_3 (sequence is synthesized)
ccctaaccccaaaaaacaatttacctcactagtacaaagccatttggtagaatctgtgttatagaatcaggtaacttgaagaaatgatgtgaagtcatccagtttatcccctactttcaa

SEQ ID NO: 922287 - DNA, 120 bp, Artificial Sequence
  ENSG00000287956_4 (sequence is synthesized)
ataactaacaaggttgcactgaattacttccttgccttcagacatgtactaggatgaactctatggcgttcttcaggacttgcattatttcaaaaagtcctttggtaatcctttccaatg

SEQ ID NO: 922288 - DNA, 120 bp, Artificial Sequence
  ENSG00000287956_5 (sequence is synthesized)
tctgaccaacaccaaccacccaattaatatctaacctaaacccttcctgttacttatttaagtcatttattttctttgataccttgggagacatgggacagcagcaggtctccttttcag

SEQ ID NO: 922289 - DNA, 120 bp, Artificial Sequence
  ENSG00000287956_6 (sequence is synthesized)
gaatctttctcaatgcgtgaactgcccttattataatgcagagtgagtgaaacattcgagggagaatctcaaaaacatgaattgtttaattctcaaataataaaggaaatctggtaaagt

SEQ ID NO: 922290 - DNA, 120 bp, Artificial Sequence
  ENSG00000287955_0 (sequence is synthesized)
cctttactccataatcagcaccctagacttagccaccactatctctcgcctgctctgtcttgccaccttctttctccgtctgctcctgctccctcttatcctcttatctgtctcaccctg

SEQ ID NO: 922291 - DNA, 120 bp, Artificial Sequence
  ENSG00000287955_1 (sequence is synthesized)
cagccgggagtcgttgctcgccatagatgtagcttgtgacaaagtggctggaccctgccagagaaggagcaatgttattggagagggacggagccagagcagcaggagagagccgctggg

SEQ ID NO: 922292 - DNA, 120 bp, Artificial Sequence
  ENSG00000287955_2 (sequence is synthesized)
ccatgccggtgggaggaggagccacggaaaggacagtgccccgggagccaccagcagcaaggacgccaccccagatgctcccggacagctagtgcactcacagcaaagttctcctggagc

SEQ ID NO: 922293 - DNA, 120 bp, Artificial Sequence
  ENSG00000287955_3 (sequence is synthesized)
cctgagtgcatggatttaatttttctttttgcttgtgatggtctctcccactggactataagcttcttgaggtcttctcagccatgaaaagaagtgacagcagtcactgcatggggttgc

SEQ ID NO: 922294 - DNA, 120 bp, Artificial Sequence
  ENSG00000287955_4 (sequence is synthesized)
tgtgaggactaagtgagagtgtggagctgaaatcctctgacaaactgtgcagtgctcttcagatgtcgggacctttgttgcagccctcacctactctccacctcggctgtgctttggaaa

SEQ ID NO: 922295 - DNA, 120 bp, Artificial Sequence
  ENSG00000287955_5 (sequence is synthesized)
attttgccacctctctatgttaacagctcgaaatctccagacacttctgattaccaggattttgagtacatgacggttttcttcctcaaaattcttaaatagcaaaaaggcttgaatgac

SEQ ID NO: 922296 - DNA, 120 bp, Artificial Sequence
  ENSG00000287955_6 (sequence is synthesized)
agtcaggactggcagaagttggactgtcattgtgaaccaaggaaggaggctgcaaaaggaaatgggaagaaagtggatatgctgatagccaggctggtgctcttccaggtaagtctacct

SEQ ID NO: 922297 - DNA, 120 bp, Artificial Sequence
  ENSG00000287955_7 (sequence is synthesized)
gccctggccccaggcggccctgtcctgggcttggctggtcctgcaggttcccaggatacagcagaactagtggatggcctggaaagcaagtatttaggcagatcgtatcttctgcctgga

SEQ ID NO: 922298 - DNA, 120 bp, Artificial Sequence
  ENSG00000287955_8 (sequence is synthesized)
gagaatgtgaatactgtggaaagagccaggccatgaattctgcagagcccagctccagttcctattctgtccccttactaacagggtacattgagcaagtctcctaatccattagaccct

SEQ ID NO: 922299 - DNA, 120 bp, Artificial Sequence
  ENSG00000287955_9 (sequence is synthesized)
cagttcttcattgctaaatagaaatcattttgatgagaatcaaaatcaaatgtgaccatttatgaaaattgtatgcatagtacctgtgatcaataaatggcaattgaaactaattctaaa

SEQ ID NO: 922300 - DNA, 120 bp, Artificial Sequence
  ENSG00000287954_0 (sequence is synthesized)
aggtgattgcacagcgccagccctcaaagccaggtctagggctccatcccacttcccaagatgccctgaagtcttgaggtgtctgctaggaaagcgttgcattactgggccaggaaagaa

SEQ ID NO: 922301 - DNA, 120 bp, Artificial Sequence
  ENSG00000287954_1 (sequence is synthesized)
ttgaccaagaagaactccagctgcttcagattgcttgattgtcactgaaaagtacactcaatatgaagaagattgcagttaactggagattaaaattagatgtcttaataaggcaaatca

SEQ ID NO: 922302 - DNA, 120 bp, Artificial Sequence
  ENSG00000287953_0 (sequence is synthesized)
gctctccataactgcaatctctttatttatatatgactttttaattacttttatctgacctttacatagagtcatttgtcttcatcccatatttgaaatatagatggtcttgactagtgt

SEQ ID NO: 922303 - DNA, 120 bp, Artificial Sequence
  ENSG00000287953_1 (sequence is synthesized)
gaatgcaagctaaggagatctgaatacgtaaaggatattttcagtttacttctgctctttgctgtcccacagttccagcagtgcatgtgcttgggggaaggaattcctctacaatcaagg

SEQ ID NO: 922304 - DNA, 120 bp, Artificial Sequence
  ENSG00000287953_2 (sequence is synthesized)
ggctcatggcaaggctcagaataggtgttccatctctacttgtttttgtaaaattggaagtgaaagaactctacacatttcttttcttgctgatgaagcttggatctggatcagaaccac

SEQ ID NO: 922305 - DNA, 120 bp, Artificial Sequence
  ENSG00000287953_3 (sequence is synthesized)
caccaaactcttggataggatcactggacctcccagcttgtgcatcaagactttttgtcttcagtctacttgcttgtttgggtttgcagtgatgagtctggctctaaaacccagtgctat

SEQ ID NO: 922306 - DNA, 120 bp, Artificial Sequence
  ENSG00000287953_4 (sequence is synthesized)
agataaatgtctgtttacatactttgagtcttaggattctcagtatagcttgaggctggattacagtcccaagcaaacagaggctgggacagagccatagaccccactgtgtgtaagagg

SEQ ID NO: 922307 - DNA, 120 bp, Artificial Sequence
  ENSG00000287953_5 (sequence is synthesized)
caagtttctgtaagaagcagaggctgggatagtgtcccaagtttttctgttctaagtttaaagaaactgtgtgttctcactctactgaaagctcttatcctcagccaagttgtgctgctg

SEQ ID NO: 922308 - DNA, 120 bp, Artificial Sequence
  ENSG00000287953_6 (sequence is synthesized)
taatggaatgccacagactggggaactgatagtgaacagaaatttattggctcatgattctgtagtctgggaaatccaaggttgaggggccagcatctcgagagggacttcttgctgtgt

SEQ ID NO: 922309 - DNA, 120 bp, Artificial Sequence
  ENSG00000287953_7 (sequence is synthesized)
cactcccatttttgggggagaatatgcttttattttcaaactcaggtgtgtgacactctaccgttcaatgctagcacacctgtgtgaggcttaacaacacgaggagctgacagccagtga

SEQ ID NO: 922310 - DNA, 120 bp, Artificial Sequence
  ENSG00000287953_8 (sequence is synthesized)
acaaattcagcacctccctctccatttattctgtcaggctatacatggggagcaacaaatacggctatgtgacagcaagaaagtgaaggtctttttaggaggtgacatcaacaatgacgc

SEQ ID NO: 922311 - DNA, 120 bp, Artificial Sequence
  ENSG00000287953_9 (sequence is synthesized)
aaacacaccactctgcaaccgaaagcaaggaaccagaatcctagggctacgcagagatgtcagacttcataggtgtttcaggacttttatttcagaccaacatcaccactggaaacccag

SEQ ID NO: 922312 - DNA, 120 bp, Artificial Sequence
  ENSG00000287953_10 (sequence is synthesized)
ggcttgtttctctccagttcactactgcttgggcagcagctccaactgcttggaaggacaaagagatggtgagagagagaaaaagggggacaaattcatcctttgaaaaggagcttactc

SEQ ID NO: 922313 - DNA, 120 bp, Artificial Sequence
  ENSG00000287953_11 (sequence is synthesized)
ctgtgataatggcattcacctcatcacgaaagcagagccctcctggcctaatcacagctcattaggccccacctcttaacattgtcacattggagattgtttctagcacatgaactttgg

SEQ ID NO: 922314 - DNA, 120 bp, Artificial Sequence
  ENSG00000287953_12 (sequence is synthesized)
gggacacatttaaaccacagtaccctctcttctcaaactcctgtggacaataccctttgccactgtggctgtggctgtaataccattggctttctttcaccctggaaaacctttactaaa

SEQ ID NO: 922315 - DNA, 120 bp, Artificial Sequence
  ENSG00000287953_13 (sequence is synthesized)
aaccctcttgacctacaatggcccttctggggatccttgtctgtcttgatattggttcacctagaagacacttagagtaacaagaaacaaaaatcttggatgcacaattcacttattctg

SEQ ID NO: 922316 - DNA, 120 bp, Artificial Sequence
  ENSG00000287953_14 (sequence is synthesized)
cttggtatgaagaagctgaaaaatgactaaataattcaagctgtactcaaaactctaaaacaagaagaacttcttaaacaaggtattcagaaaacattttctgacccagttagccctgta

SEQ ID NO: 922317 - DNA, 120 bp, Artificial Sequence
  ENSG00000287953_15 (sequence is synthesized)
tacccctcctatggtattcccggagtcccctcgcagccctcctctgtatctttctttctcaaaatgtcccctgcacgtctcacccctagtccttcagctccctagagctgtcaggctcac

SEQ ID NO: 922318 - DNA, 120 bp, Artificial Sequence
  ENSG00000287953_16 (sequence is synthesized)
tgggccctctctcctgtaggtgaagccagagacgcagcctgtacttgtttccaagtgcggaccaccgaagagataatacttaattacttgttatcaccaaggactctcctgacccccagg

SEQ ID NO: 922319 - DNA, 120 bp, Artificial Sequence
  ENSG00000287952_0 (sequence is synthesized)
actccgaagccagctgggttctcgagggtcccgcagcccacccggcttcggtggggccgtcgcaacccaccccggtccgtggtccgcccgccgccctccctcaggccgcagcggaagcgt

SEQ ID NO: 922320 - DNA, 120 bp, Artificial Sequence
  ENSG00000287952_1 (sequence is synthesized)
gagagagtagatgcgggagaggcctgaagctgcaccacggcggagacacacagtcacgactaaatccgaggcagagagaaagcgggagggtgccgttgtgacaacccgcagtgtcggggt

SEQ ID NO: 922321 - DNA, 120 bp, Artificial Sequence
  ENSG00000287952_2 (sequence is synthesized)
agggatgcaaaagggaccggactcacctcaacaccaacgtccttcctgactaaaggaaaaacgaaccgtgctgtagccgcgcgcaggcgcagaataagagtgcacagcgagaacgcggcg

SEQ ID NO: 922322 - DNA, 120 bp, Artificial Sequence
  ENSG00000287952_3 (sequence is synthesized)
acggtagccgaaggagttcaaaagacctctagtgcgcccaccgcaggtgacagccgaagttcatttcgtggtctgcttctttcctgtgtgaccttgcaaaacgggcttgacctccttatt

SEQ ID NO: 922323 - DNA, 120 bp, Artificial Sequence
  ENSG00000287952_4 (sequence is synthesized)
tatcgacctctttatcttcttagtaaattgaagatattagtcgtactcatacacagagtcccaaaccatgtgcacaaaccgacattttaattataaccaaccttacgcgaataaccgttt

SEQ ID NO: 922324 - DNA, 120 bp, Artificial Sequence
  ENSG00000287952_5 (sequence is synthesized)
ggcttgggtaaaagtgaaaaagctgacttctaggagctcacagcccagaagatgaaaaagacaaacagattaataccgatcccatgcagtgggcactaccacagagacgtggcccagcta

SEQ ID NO: 922325 - DNA, 120 bp, Artificial Sequence
  ENSG00000287952_6 (sequence is synthesized)
ctgcagaagcaattctctacctggcaaagctgaggacgttttgatagaggggcggtatttttgtgggtttcttaagaaaacaaggattttgaaggaaggcaactggaagttcgtggaaag

SEQ ID NO: 922326 - DNA, 120 bp, Artificial Sequence
  ENSG00000287952_7 (sequence is synthesized)
taaaagcattatttaagtcaacccatcaagccctgtggaaggtagctgggacacaacagatgcatgatattgagtcgatatatacactgagtacctactatgtgccagattctgctaaac

SEQ ID NO: 922327 - DNA, 120 bp, Artificial Sequence
  ENSG00000287952_8 (sequence is synthesized)
aagaggacagatcttcggggagtctcattctgatcagggagtctttgtcctcaacctattaaccaacactctggagggtgaaacctggccacaaagaaaggtgctcaattgaggttcaaa

SEQ ID NO: 922328 - DNA, 120 bp, Artificial Sequence
  ENSG00000287952_9 (sequence is synthesized)
agtaggtttggactttaccaacgtttttcaggcctcttatcaagggtctacccagctgaaaatctttgcatggaatttgtccagagagtaatttgtttctattctctttccatccccacc

SEQ ID NO: 922329 - DNA, 120 bp, Artificial Sequence
  ENSG00000287952_10 (sequence is synthesized)
cccagagaagaagtggtgaacttaagagttcacagggattagtgtatgtgaaaccatcagggaaagcttcagacaatacgtggaagagatggaagcagagctgagtttcagtctaatgga

SEQ ID NO: 922330 - DNA, 120 bp, Artificial Sequence
  ENSG00000287952_11 (sequence is synthesized)
aagcctggaaaactggagaaattggagagaaaacattggctgggagaacatggcaaagacaggcacactcagggcacagagcctgacctgagtgaaatactgagtgtttgttctgtgctt

SEQ ID NO: 922331 - DNA, 120 bp, Artificial Sequence
  ENSG00000287952_12 (sequence is synthesized)
ccctagctatccagtgaaccatagtgaatgactgagggtgacacgtgaataaaacctgagcgatagatgaagagagacatgttacatataggttctgttctagagccgaacagacctgga

SEQ ID NO: 922332 - DNA, 120 bp, Artificial Sequence
  ENSG00000287952_13 (sequence is synthesized)
tttgagtcccagctcatcaacttgtagcggcaaatttcttcatctttctaagtctgctttctcctctaaaaatagtacccattttgttgggttgtgatgtaaattaaatgggataatgta

SEQ ID NO: 922333 - DNA, 120 bp, Artificial Sequence
  ENSG00000234166_0 (sequence is synthesized)
taaagaactaatcaaatctctttaatgtttaagcctatttgtatctgatattttgttacttgcagccaaaagcagcctagctgatacacaatcgtccccctgccccctggtcacccttac

SEQ ID NO: 922334 - DNA, 120 bp, Artificial Sequence
  ENSG00000234166_1 (sequence is synthesized)
aataggactgtgggggtgggggcagcatcagatggatcacagactccaagcaaaggcatgataggagtttatttacagacaagacacagcaaccagcacccactcaggctctgaccaggg

SEQ ID NO: 922335 - DNA, 120 bp, Artificial Sequence
  ENSG00000234166_2 (sequence is synthesized)
gaggtggtagacaagaccccagatatatataaatatacatataggcaggattgaggacatagaaaggagagggccccagtctttgccaggtatcagtgatcacctgttatggtccccatg

SEQ ID NO: 922336 - DNA, 120 bp, Artificial Sequence
  ENSG00000287950_0 (sequence is synthesized)
attcctgatttggtggtgaaatttttacagtgtagaacatggagctgccagtggccccatgaagaaagcttgtggtaagaataagtgaaatgtgcagagaagcagaaatgaaggtggaga

SEQ ID NO: 922337 - DNA, 120 bp, Artificial Sequence
  ENSG00000287950_1 (sequence is synthesized)
cagggtcccggcgctgaactagtaccagtgtactgatgtattgctacaggttttctgaagctcaccctactcctctcctatcagtgttcttcagagatgttcctggcatgttggagacag

SEQ ID NO: 922338 - DNA, 120 bp, Artificial Sequence
  ENSG00000287950_2 (sequence is synthesized)
aggtagtatgattcctagtactggagcatcttagtcaaactccgctgcatttttaagcatgttctaaacatattgccagcccgatgacatttcatccatcctttggcaaccacctcagaa

SEQ ID NO: 922339 - DNA, 120 bp, Artificial Sequence
  ENSG00000287950_3 (sequence is synthesized)
acaaagcaagcagctgtggacatgctacaaagtaaccccacagtgcactgctgggagggcagcctacccagattattcccttccaggatgatcagcaattgattgcgatctcctcatgac

SEQ ID NO: 922340 - DNA, 120 bp, Artificial Sequence
  ENSG00000287950_4 (sequence is synthesized)
attagaagcaaatacaaattcatcttccgtaatttccaatgcttcatgtgaaatggaattcagctttctaaaaatattatccttactttgcttatagaaaaccttacatgtgtttttacc

SEQ ID NO: 922341 - DNA, 120 bp, Artificial Sequence
  ENSG00000287950_5 (sequence is synthesized)
atgccaggtaactaacagttatgcaggttacttagaaatcactcaaatgtcaggagattccctaaagagtagtatttttacactatttttaatattctgatgctatgttctagctccctt

SEQ ID NO: 922342 - DNA, 120 bp, Artificial Sequence
  ENSG00000287950_6 (sequence is synthesized)
attgactttgctgtaattgggatgtagtcaatgagctctcaacttctacctctctgggtcattacacctattgtatgaaacctaaaacctcaaatagttcttacagaacttttttcctat

SEQ ID NO: 922343 - DNA, 120 bp, Artificial Sequence
  ENSG00000287950_7 (sequence is synthesized)
atagaattttagttgggtgaaaattgtactaaactatcaagcaaacacttctaaatttaagaggacattcctgtaataccatctgtgctgcaaaaggaaaaaataaaatcattttcctct

SEQ ID NO: 922344 - DNA, 120 bp, Artificial Sequence
  ENSG00000287950_8 (sequence is synthesized)
tgtatcctttgttccattaaactggagtcatggatggagtgaaagagaacccactaccaatagggattgcgggtaaaagcaccaagatgtcagaaatgttgaaaaacacaaaccaccctt

SEQ ID NO: 922345 - DNA, 120 bp, Artificial Sequence
  ENSG00000287950_9 (sequence is synthesized)
cttgcatctgcctttatgaaactacttggctgaaacagacaaaggaagaacagaggctagaatgcctcattgccagcccttctccagtaaagggtgctgcaatggcttgaataaattatt

SEQ ID NO: 922346 - DNA, 120 bp, Artificial Sequence
  ENSG00000287950_10 (sequence is synthesized)
aagatacttttacttttttatcctaatttgaattttttcccttactctaattcctcagtttgtgctacaaattagatatgctgccagagcgtactaattcatgagtccaccgacatctat

SEQ ID NO: 922347 - DNA, 120 bp, Artificial Sequence
  ENSG00000287950_11 (sequence is synthesized)
taatgggcacaatggtgaaaacccagctctgtctgccacataagtattcatgtttataaaggaacatttgaaagcatgagggaatttgacccaaaggccaaaagtggcttcctcttttcg

SEQ ID NO: 922348 - DNA, 120 bp, Artificial Sequence
  ENSG00000287950_12 (sequence is synthesized)
gcagcatccagtttaggtcaaaacaatttcttggaaaatgactcaagtttccatgtcattcgatttaataaaaacttcctatttcaactgtctaattttttttccctgtgaaacacccaa

SEQ ID NO: 922349 - DNA, 120 bp, Artificial Sequence
  ENSG00000287950_13 (sequence is synthesized)
atagtgaggttctggttgtgaagaaagcatgagttagtatgccaaaataacgatgctcatgagtcctgttactttataatgaatttgatgtttggagtattaaatatccaaagactaggc

SEQ ID NO: 922350 - DNA, 120 bp, Artificial Sequence
  ENSG00000287950_14 (sequence is synthesized)
taaagagtcttactatatcttgagtaacagaataacttatcatctggacttgttaatacttttaagagtagaagtaaacaattaatttttgattattgatgactgataacttggttttat

SEQ ID NO: 922351 - DNA, 120 bp, Artificial Sequence
  ENSG00000287950_15 (sequence is synthesized)
tatattggacctataaaactattccatttttatttcacaaatacattattttcaaataaaaaatagatttttgtgcattaaaataaatttgatcatctggatatttaaaaatgacacacg

SEQ ID NO: 922352 - DNA, 120 bp, Artificial Sequence
  ENSG00000287950_16 (sequence is synthesized)
aagaatgattatttgtgatatatattcatatattttagtcagttactagctacaactgtctatataccgatgtcaggattacttttcaaaagaatgtactttttaatggcatctttttat

SEQ ID NO: 922353 - DNA, 120 bp, Artificial Sequence
  ENSG00000287950_17 (sequence is synthesized)
ttctaatattgcacgaaattgttattaatcaccttcagaggtgtcattaaattgacaccttaattgactccactgtagactatacttttaataatactttctgaagctgggcatggtggc

SEQ ID NO: 922354 - DNA, 88 bp, Artificial Sequence
  ENSG00000287950_18 (sequence is synthesized)
tcacgcctgtaagaacgaggtcaggagatggagaccattctgaccaacatggtgaagcccagtctctactaaaaaatacaaaaattag

SEQ ID NO: 922355 - DNA, 62 bp, Artificial Sequence
  ENSG00000287950_19 (sequence is synthesized)
aaaattagctgggcatggtggcgcgtgcttgcagtccaagctgaggcaggatgagcctggcg

SEQ ID NO: 922356 - DNA, 120 bp, Artificial Sequence
  ENSG00000284602_0 (sequence is synthesized)
tccggaagttgggacccttttagctatgaaatattttggattgcgtagggtcttgcgcagccgcgaaaagtagcgtgggccaggacagcgggaggtaagtcgccaagaaaagggttggga

SEQ ID NO: 922357 - DNA, 120 bp, Artificial Sequence
  ENSG00000284602_1 (sequence is synthesized)
agagctcagaatcggacggctaggaagaaatgaccaaaaggagcctgatagccccctattctgcacgctgttcctggaaaccgcctttgcaaagacagtgagagaaatctaacatggctc

SEQ ID NO: 922358 - DNA, 120 bp, Artificial Sequence
  ENSG00000284602_2 (sequence is synthesized)
actccatcttgcttctagcctcgcaggccggctgtcttcgctcattcctgggcataaaccaagctaaccatgggagaatttatagtttaacttttaagcaaggatgatcatagtcccttc

SEQ ID NO: 922359 - DNA, 120 bp, Artificial Sequence
  ENSG00000284602_3 (sequence is synthesized)
cttaaacagggcccctccttgtttgggggctgaaactgcctttataaaactaatgaaagaccgggaggttaggattatgaggggagaattctgctaaaatgtagtaaacgataaccagcc

SEQ ID NO: 922360 - DNA, 120 bp, Artificial Sequence
  ENSG00000284602_4 (sequence is synthesized)
attgtttcggaggacatcggatgtgtaacttccccaattattcctgtagataacgttatcgtagcacctaagattggtcttttgaggcatttttcagactttcgcattctggcaactaac

SEQ ID NO: 922361 - DNA, 120 bp, Artificial Sequence
  ENSG00000284602_5 (sequence is synthesized)
tgaccccacccagactcgtgacccatgacccaaccgcttcttctgtcccactcctcccccaagaggcggactcagctgttgaggagtgtagtccacacccctgtgattgcatctccaacc

SEQ ID NO: 922362 - DNA, 120 bp, Artificial Sequence
  ENSG00000284602_6 (sequence is synthesized)
aatcagcagcatccattccctagtgccctgcccacaccaaactatgaaataccctaacctctgagctgacccttcaggaaaacttacttgagtggtaacccttcttccctgaggccagcc

SEQ ID NO: 922363 - DNA, 120 bp, Artificial Sequence
  ENSG00000284602_7 (sequence is synthesized)
tcaggttaatacaactgtatactgcagtagcacttttcagtgaattggttttgtctgcagtaagcaggaaaaacctgcagtgccattcattcccatgagtggaaagttctttccatttag

SEQ ID NO: 922364 - DNA, 120 bp, Artificial Sequence
  ENSG00000284602_8 (sequence is synthesized)
agcttaaggtgttgtcactttctccaagaagcaggtcttgcccttggcctggtgtggtggttcatggctgcaatcccagcacattgcggggcggaggcgggaggattgcttgagcccagg

SEQ ID NO: 922365 - DNA, 120 bp, Artificial Sequence
  ENSG00000284602_9 (sequence is synthesized)
agaccagcctggacaacaaagtaagaatcagtctctaaattaaaaaataaaagtaatttttttttgtttttttgttttgagacagagtcttgcactatcacccaggctggagtgcagtgg

SEQ ID NO: 922366 - DNA, 65 bp, Artificial Sequence
  ENSG00000284602_10 (sequence is synthesized)
ggctggagtgcagtggcaccgatctcggcttactgcaacgtccggctcccgggttcagtgcccag

SEQ ID NO: 922367 - DNA, 61 bp, Artificial Sequence
  ENSG00000284602_11 (sequence is synthesized)
aaataaatttttaaaaatagaagcaggtcttccctgactaccctgtctcacttttagtact

SEQ ID NO: 922368 - DNA, 120 bp, Artificial Sequence
  ENSG00000284602_12 (sequence is synthesized)
agcaggtcttccctgactaccctgtctcacttttagtactgtcatttgacactattttaattctctccaattgcataagttttatttttgtctgttgattttctatttttctcatcagcg

SEQ ID NO: 922369 - DNA, 120 bp, Artificial Sequence
  ENSG00000284602_13 (sequence is synthesized)
ttattactggagaacagcagagtccacccatcttgtttactcttacatgctcagcagagaggcaatgccagaattactaacagtgctaaagttactaagataagtaaggtgctggatata

SEQ ID NO: 922370 - DNA, 120 bp, Artificial Sequence
  ENSG00000284602_14 (sequence is synthesized)
tactaagataagtaaggtgctggatataagaggaatatatgaaaattatttttttctgcactaacaactactagttagatacagaaatgaaaaagtaggccaggtgcagtggctcatgcc

SEQ ID NO: 922371 - DNA, 120 bp, Artificial Sequence
  ENSG00000284602_15 (sequence is synthesized)
aaaaaaaaagaaaagtaatccctaaaatgaaaagatacctaggtacaaaatttaaatggtaacataaaaataaaagataatttgaagtaaattaaatctgaataaatggtggataaccta

SEQ ID NO: 922372 - DNA, 120 bp, Artificial Sequence
  ENSG00000284600_0 (sequence is synthesized)
ggggcctggctgggagctgggccggccacctcggccgtcatcaatgatgtgcgctggcggacctgagtctgcatttccagaaacatcgagttgcctgtggtaaagcagggagccctctga

SEQ ID NO: 922373 - DNA, 120 bp, Artificial Sequence
  ENSG00000284600_1 (sequence is synthesized)
cgaagaaacagcagctcctgagtgctctggcagccatggagtctcctatacagtccaagatgctgcctccatggcctcggctggtcccgggggtgaggaatgccacaggctgttactcca

SEQ ID NO: 922374 - DNA, 120 bp, Artificial Sequence
  ENSG00000284600_2 (sequence is synthesized)
ttccccaagcctaacgttcaggctctgcagctgcaagtcactggggccacttccccaaatcccagacacccaggagtcctatgtggcaggcactccttgttttaaattctgggaacatcg

SEQ ID NO: 922375 - DNA, 120 bp, Artificial Sequence
  ENSG00000284600_3 (sequence is synthesized)
gctgtcgccatacatttaatatagtgattaaataacaggaggacctgaagtatcttggaaggaaaaccttcattgtttgcaggaacaggcgatcctctgaaaatgcctattcacaaatgc

SEQ ID NO: 922376 - DNA, 120 bp, Artificial Sequence
  ENSG00000284600_4 (sequence is synthesized)
caaacacacatgcagactgaaaacgagagaaccacggcccctgctacagcgaacactgccacggaatggtgtctgcggaagaccaatatcataaggtggaaaaataaaggaaataaaaga

SEQ ID NO: 922377 - DNA, 120 bp, Artificial Sequence
  ENSG00000284600_5 (sequence is synthesized)
gcaaataagaggaaacgacagctctcctaaaagctgatttcatgccatgtatctctggtataatggcgcgtgttagagctaaaattgagggcttcaaaaactgttacctgagttctgagt

SEQ ID NO: 922378 - DNA, 120 bp, Artificial Sequence
  ENSG00000284600_6 (sequence is synthesized)
ttaatcatatcggcttccatctgggaattggattcatttagctccttgatttcttcatctaactgtttgatttcttcatcattttctatacctgtaataatgaatattagtatgttaaaa

SEQ ID NO: 922379 - DNA, 120 bp, Artificial Sequence
  ENSG00000284600_7 (sequence is synthesized)
ctgttatatacaaaaatattagagttagaattttgggagctttctttgttccttttatattcgtaattgaatttgcttggaaaatagactcttgaattagaaaggaaaaaatcatcacaa

SEQ ID NO: 922380 - DNA, 120 bp, Artificial Sequence
  ENSG00000284600_8 (sequence is synthesized)
ttctcagccactggtttgtcgacgtcaggatgcgtctcagctcttcacagtgtatgtggcagatgtggctggcagcctccggggcaggaaggcacctctgcctccttttctgtcctgttg

SEQ ID NO: 922381 - DNA, 120 bp, Artificial Sequence
  ENSG00000284600_9 (sequence is synthesized)
tgcagtcccgtgcctcggcttcctcacaactcctcagtctccgaggggccttccctcccttccaggggctcctggacgtgctggtcaactggagtcctcactgtgctaaaggccaggggc

SEQ ID NO: 922382 - DNA, 120 bp, Artificial Sequence
  ENSG00000284600_10 (sequence is synthesized)
catctggcacttaactatggagtgagaaggcgtcgtccaccaaccagagagcagcagttgccagatgccgaatctgctggtgcctcggtctcggacttccagtctccagaacttggagga

SEQ ID NO: 922383 - DNA, 120 bp, Artificial Sequence
  ENSG00000284600_11 (sequence is synthesized)
ataaatttctggtttctatgctgcccaaggtatgtgggagaaggagcagcggggactttaaccccagcgtcatcagctccagcatcatcagctctggcgtcatcagctctggcgtcatca

SEQ ID NO: 922384 - DNA, 120 bp, Artificial Sequence
  ENSG00000284600_12 (sequence is synthesized)
gctccagcatcatcagctcccgcgtcctatcccatcccagggcaagccgcacgggaagccccaggagcagagaggcctctgggaactgggtggcctgacagggtgggcacggtgggcgcc

SEQ ID NO: 922385 - DNA, 120 bp, Artificial Sequence
  ENSG00000288380_0 (sequence is synthesized)
tagtgaaaaaaaaatgtctttaagtcccttttgtatgttattagtatagccacttagctcttttttgattattgtttgcatggtatcttttttcaccctttaactttcattgtatctctg

SEQ ID NO: 922386 - DNA, 120 bp, Artificial Sequence
  ENSG00000288380_1 (sequence is synthesized)
aatctaaagtgtgtttcttgtaaacagcatatagtgggatcatgtttcttatctgtcctgctggtctctgccgtgaatctaaagtgtgtttcttgtaaacagcatatagtaggatagtgt

SEQ ID NO: 922387 - DNA, 120 bp, Artificial Sequence
  ENSG00000288380_2 (sequence is synthesized)
ttctcatctgtctttctggtctctgctctgaatcaaaagtgtgtttcttgtagacagcacatagtgggatcatgtttttcatctgtcctgctggtctctgctgtttgagagggatgttta

SEQ ID NO: 922388 - DNA, 120 bp, Artificial Sequence
  ENSG00000288380_3 (sequence is synthesized)
atccatttacattcagtgtgattactgagaaagttggatttgtatctgccatttctaaatttgtttactatattgtcttttttgtctttcttcctttatttctccattacttttttgtgt

SEQ ID NO: 922389 - DNA, 120 bp, Artificial Sequence
  ENSG00000288380_4 (sequence is synthesized)
taaatggacatttaattctcttgtaacattgtaatttccttgtctgttttactgggtttttttaaaagtaactttcttagcagctgctctgagtattacagtaacaacgtaaaaccaatc

SEQ ID NO: 922390 - DNA, 120 bp, Artificial Sequence
  ENSG00000288380_5 (sequence is synthesized)
aagtgttcagatgaacttaatataatgtacaaaaaccttcacttcaagtagctttgtttcctctcagcttcttggtgctgtatttgtcatataaatgctaccttttagattgtaagtccg

SEQ ID NO: 922391 - DNA, 120 bp, Artificial Sequence
  ENSG00000288380_6 (sequence is synthesized)
tcagcagtcttgtaattattgctttatgcagttgtcttttaaatcacatagaagaagaaaagatgtacaaacagaaatgagtttctgctgtctctgttgctggctttgcagttgtctttt

SEQ ID NO: 922392 - DNA, 120 bp, Artificial Sequence
  ENSG00000288380_7 (sequence is synthesized)
ttggtgctctttgtgtggatttgagtgtggtgtcttggacttcagcctcaagtatttcttgtaggacagatcttctagcaatgaattctctttgtttttgtttatctgagaatgttgtaa

SEQ ID NO: 922393 - DNA, 120 bp, Artificial Sequence
  ENSG00000288380_8 (sequence is synthesized)
tttttccttctcttctgaagaataattgtgctggatatggctgacttggttggccctctttttctttcagtcctctatagatgtcattccactgcctctggcatctgtggtttccatggc

SEQ ID NO: 922394 - DNA, 120 bp, Artificial Sequence
  ENSG00000288380_9 (sequence is synthesized)
gggagcaccgcaccatgtctcagtctctttttagcttctgactgtttgactgtggtgtgtctaattgtggatctttcagtgtgtcctacctgcagttctttgagcttcttggatatagag

SEQ ID NO: 922395 - DNA, 120 bp, Artificial Sequence
  ENSG00000288380_10 (sequence is synthesized)
gttaatatttcttgtagtctgattgtttacatcttctcttcacttattgatcttctgcctagttatattgatattgaatgtgggtattgaatccttcggttttgtcagcttcatgttcag

SEQ ID NO: 922396 - DNA, 120 bp, Artificial Sequence
  ENSG00000288380_11 (sequence is synthesized)
ccagtgactggacaggggacccctttaagtgctttgcaccagtaactctcatggttctgctgacacacagttgatgtgtggtgagtatgccttcagcgctccattgtggttctgcaaatt

SEQ ID NO: 922397 - DNA, 120 bp, Artificial Sequence
  ENSG00000288380_12 (sequence is synthesized)
tgggaaattttaggttgtcgtttctcgaaatattttatgtccatgttctcttcccccacttggactccagctacgtgtgttgatgtggagctgggcacagccttggaggcctccttgact

SEQ ID NO: 922398 - DNA, 120 bp, Artificial Sequence
  ENSG00000288380_13 (sequence is synthesized)
ttcctttattccggaattttttcttcttctcagaatgggtcatctcagttgacctatcttcaaggtcacagatgcttttgccaaacaaaacctgatgtcaagctgctctagtgaattttt

SEQ ID NO: 922399 - DNA, 120 bp, Artificial Sequence
  ENSG00000288380_14 (sequence is synthesized)
catttcagttattgtacttttctactccaaacttccatttggctctctcctataatttctgtatctttactcatattctttgtttagtgaaacattctcatactttaattctgtagacac

SEQ ID NO: 922400 - DNA, 120 bp, Artificial Sequence
  ENSG00000288380_15 (sequence is synthesized)
tagtgaaacattctcatactttaattctgtagacacagtttcctttagttatttgaacatatgtgtagaagctgatttaaagtacttgtctaagccgggcgtggtggtgtgcacctgtaa

SEQ ID NO: 922401 - DNA, 73 bp, Artificial Sequence
  ENSG00000288380_16 (sequence is synthesized)
agccattgtactccagcctgggccacagagcgagacgctttcaaaactagatagatagatagattagatagat

SEQ ID NO: 922402 - DNA, 120 bp, Artificial Sequence
  ENSG00000288380_17 (sequence is synthesized)
agatagatagatagatagataggataagataagatagataggtgacttgtctactaagttcaacatcagggcttattcaggggaagttcctattgatgaccttttttcccatgtcagagc

SEQ ID NO: 922403 - DNA, 120 bp, Artificial Sequence
  ENSG00000288380_18 (sequence is synthesized)
agccaaggaaataacatactctttctttgtggtctcatatatatgtattttttgaagactggacactttaataatgtgctgtgcaactctggaaatcagataccctctccacgagtttat

SEQ ID NO: 922404 - DNA, 120 bp, Artificial Sequence
  ENSG00000288380_19 (sequence is synthesized)
tgttgttctgttgctgttaccttttgtttagtgtgtgttctggactaatttgaagtgtccacctcatcagcttcatgttcagccagtgactggacagaggacccctttaagtgctttgca

SEQ ID NO: 922405 - DNA, 120 bp, Artificial Sequence
  ENSG00000288380_20 (sequence is synthesized)
ccagtaactctcacggttctgccgacacgcagttgatgcatggtgagtgtgccttcagcgctccatcgcggttctgctgacacgcagttgatatgtggtcagtgctccagcaggcagctg

SEQ ID NO: 922406 - DNA, 120 bp, Artificial Sequence
  ENSG00000288380_21 (sequence is synthesized)
ccaactgtgcctttgccttcacttcttacttgcacacagccacaaagccagccagaggtgagggccagggcagctcaggttcctctcgggcacacacacagctctgtgcctgtgtgggca

SEQ ID NO: 922407 - DNA, 120 bp, Artificial Sequence
  ENSG00000288380_22 (sequence is synthesized)
cagccttccatgcctccaggagtgtggcagagcttctcagcggccactgtgggcatctcgttcctcagatcttcctttcatgagttatgtagttgaattatcaatctttcttggcttcta

SEQ ID NO: 922408 - DNA, 120 bp, Artificial Sequence
  ENSG00000288380_23 (sequence is synthesized)
agttttgtgttctacttagaatgctcttcccccttaaagattatatttgaaatgttttccatgttttcttctagtacttttatgggtttcattttcatattgaaatcattgatctacttc

SEQ ID NO: 922409 - DNA, 120 bp, Artificial Sequence
  ENSG00000288380_24 (sequence is synthesized)
tagtttttgatacaaaatgtgagccaggaaacccagtttttaaatttcaaatagctgtccaggtgtccctgcacctcttatgcatgagccctcgctttgtgccaatgtggagtgcccgcc

SEQ ID NO: 922410 - DNA, 120 bp, Artificial Sequence
  ENSG00000288380_25 (sequence is synthesized)
tgctcacacgtgcccatgtggagtgcccgcctgctcatgtgcccatgtggagtgcccgcctgctcacacatgtcgatgcggagtgcccgcctgctcacacatgcccatgtggagtgcccg

SEQ ID NO: 922411 - DNA, 120 bp, Artificial Sequence
  ENSG00000288380_26 (sequence is synthesized)
cctgctcacacgtgcccatgtggagtgcccgcctgctcacacacgtgtccatgtggagtgcccacctgctcatgtgcccatgtggagtgcccacctgctcacatgtgccgatgtggagtg

SEQ ID NO: 922412 - DNA, 120 bp, Artificial Sequence
  ENSG00000288380_27 (sequence is synthesized)
ccacctgctcacacacgtgcccatgtggagtgcccgcctgctcacgtgcccatgtggagtgcccgcctgctcacacgtgccgatgcggagtgcccgcctgctcacacgtgcccatgcgga

SEQ ID NO: 922413 - DNA, 120 bp, Artificial Sequence
  ENSG00000288380_28 (sequence is synthesized)
gtgcccgcctgctcacacgtgcccatgcggagtgcccgcctgctcacacgtgcccatgcggagtgcccgcctgctcacacgtgccgacgtggagtgcccgcctgctcacacgtgcccatg

SEQ ID NO: 922414 - DNA, 120 bp, Artificial Sequence
  ENSG00000288380_29 (sequence is synthesized)
tggagtgcccgcctgctcacacgtgccaacgtggagtgcccgcctgatcacacgtgcccatgtggagtgctcgcctgctcacacgtgccgatgtggagtgcctgcctgctcacacgtgcc

SEQ ID NO: 922415 - DNA, 120 bp, Artificial Sequence
  ENSG00000288380_30 (sequence is synthesized)
catgtggagtgttcgcctgctcacacgtgccgatgcggagtgcccgcctgctcacacgtgccgatgcggagtgcccgcctgctcacacgtgcccatgtggagtgcccgcctgctcacgtg

SEQ ID NO: 922416 - DNA, 120 bp, Artificial Sequence
  ENSG00000288380_31 (sequence is synthesized)
ccgatgtggagtgcccgcctgctcacacgtgcccatgtggagtgcccgcctgctcacgtgccgatgtggggtgcccgcctgctcacatgtgccgatgtggagtgcccgcctgctcacacg

SEQ ID NO: 922417 - DNA, 120 bp, Artificial Sequence
  ENSG00000288380_32 (sequence is synthesized)
tgcccatgtggagtgcccgcctgctcacacgtgccgacgtggagtgcccgcctgctcacgtgcccatatggagtgcccgcctgctcacacgtgccattgtggagtgcccgcctgctcaca

SEQ ID NO: 922418 - DNA, 120 bp, Artificial Sequence
  ENSG00000288380_33 (sequence is synthesized)
cacatgccgatgtggagtgcccgcctgctcacacgtgcccatgtggagtgcccgcctgctcacacgtgcccatgtggagtgcccgcctgctcacacacgtgcccatgtggagtgcccgcc

SEQ ID NO: 922419 - DNA, 120 bp, Artificial Sequence
  ENSG00000288380_34 (sequence is synthesized)
tgctcacacgtgcccatgtggagtgcctgcctgctcacacacgtgcccatgtggagtgcccgcctgctcacacaaagccctggcatggtggttctgtaggtttcctgtcctgccggccga

SEQ ID NO: 922420 - DNA, 120 bp, Artificial Sequence
  ENSG00000288380_35 (sequence is synthesized)
gtcagacgctgttaccgtacattctactcatggtggctttttaatacgtttttatgtcaaggatcccttttatatttctctgcacctcgagataacgtaggaatattagggatgagatgg

SEQ ID NO: 922421 - DNA, 120 bp, Artificial Sequence
  ENSG00000288380_36 (sequence is synthesized)
aagaggagagggtgtttttgtaaaattgaattcaggactgatttgttagcctggtgcttttcgtatcagaccttttaatgaattttcatggatgctgattaaaagacaaacctgtgactc

SEQ ID NO: 922422 - DNA, 120 bp, Artificial Sequence
  ENSG00000284607_0 (sequence is synthesized)
agagttctgaatcgttgcgagtcagttacaagctgaaccactagcgtctgaaccctatacatctgaagccgggatgaaattcaggagttctattcccccttctccttttaattgtcatgg

SEQ ID NO: 922423 - DNA, 120 bp, Artificial Sequence
  ENSG00000284607_1 (sequence is synthesized)
tggtgtctttcgaccctagcagagaatatgtggtcgatattagaatcacctggggagattttacaaagcatctatgcttgggtttctttggagccaataggaaaaaaatgaagaactgtg

SEQ ID NO: 922424 - DNA, 120 bp, Artificial Sequence
  ENSG00000284607_2 (sequence is synthesized)
tacaatggtgactaaagagcctcagcatgacttccgcccctcagcgccatctataacctgttttaccatgtcggatcccgtctggagaagcccaccgagtgcaggtgaaccagggaggcg

SEQ ID NO: 922425 - DNA, 120 bp, Artificial Sequence
  ENSG00000284607_3 (sequence is synthesized)
aagtccatagaaacagctgtcttgggggtccgggaagagtttaacactggaatcacatctgcggaaaccgggaactggaagcaaattgaggatgcggccagaagggaaaatcaagttttt

SEQ ID NO: 922426 - DNA, 120 bp, Artificial Sequence
  ENSG00000284607_4 (sequence is synthesized)
caagcaatgaggttcggccttggcctaaccaatagtttctaccactctccgcacccctaaaatttccatctattcatctggttccagaaacagattatccagcgtctttgtagatctacg

SEQ ID NO: 922427 - DNA, 61 bp, Artificial Sequence
  ENSG00000284607_5 (sequence is synthesized)
gaggagttcgaaaccagcctgccaatatggtgaaacccctgtctccactaaaaatacaaaa

SEQ ID NO: 922428 - DNA, 86 bp, Artificial Sequence
  ENSG00000284607_6 (sequence is synthesized)
gtaagactccctccgctttttgtctggctttgtcgctgccggaggaccttgtggccacaagggggcgtgcgtcccatttgatttct

SEQ ID NO: 922429 - DNA, 120 bp, Artificial Sequence
  ENSG00000284607_7 (sequence is synthesized)
ccttgtggccacaagggggcgtgcgtcccatttgatttctttattctggtttctgtagtcctgatttcgatccaggggtgtacaaattatttttctaaggtaaatattagcaagagaagc

SEQ ID NO: 922430 - DNA, 120 bp, Artificial Sequence
  ENSG00000284607_8 (sequence is synthesized)
gaatatacttatggctgcagacttagaggcagagtctttgcacaaagacaaatgctttagttgccactttttcttctgggcctattgagtaccagctactgtgccaggtgctaggtgcta

SEQ ID NO: 922431 - DNA, 120 bp, Artificial Sequence
  ENSG00000284607_9 (sequence is synthesized)
ggtactgttcagcagaagctagttgggaaaaggaggatccgttgggcattactagagtcccatcactctcaaaaaagccatacgaaagccgtcacccaacatctgcaccttcaactgctt

SEQ ID NO: 922432 - DNA, 120 bp, Artificial Sequence
  ENSG00000284607_10 (sequence is synthesized)
cttttccagaaattccatcattagaaacttcctctttttattttctagtctctatgaaattggggcaagatactaaaaattgaaagtggagaagacaaaatatcttatttaagaaagtaa

SEQ ID NO: 922433 - DNA, 120 bp, Artificial Sequence
  ENSG00000284607_11 (sequence is synthesized)
gctgcgcagggcatagtaggtcttttaaagaccttaagacaacctttaatacttgcttttctcttttgctttttcattgcaatcagggctgacaaaaagtggataactctgttggaagaa

SEQ ID NO: 922434 - DNA, 120 bp, Artificial Sequence
  ENSG00000284607_12 (sequence is synthesized)
aagtggataactctgttggaagaaaacctcccaatttcctgcccccaccattttagacaagagagttaaaaactcagatattagccaggcgtagtggctcactcctgtaatgccagcact

SEQ ID NO: 922435 - DNA, 69 bp, Artificial Sequence
  ENSG00000284607_13 (sequence is synthesized)
gaccagctgggcggtggcgggtgactgtaatcttggctacttcggaggctgagacaggagaatcgcttg

SEQ ID NO: 922436 - DNA, 73 bp, Artificial Sequence
  ENSG00000284607_14 (sequence is synthesized)
cagtgagcatcaacaaacaaacaaaaaaccaactcagatgttctaagcaagtgtagaaacccaccattcatct

SEQ ID NO: 922437 - DNA, 120 bp, Artificial Sequence
  ENSG00000284607_15 (sequence is synthesized)
tcagatgttctaagcaagtgtagaaacccaccattcatctcagaacttggctcaaagtcagccttgctttgaggctcacaccacctaggtgctttctccttcttcaaccctggacagaat

SEQ ID NO: 922438 - DNA, 120 bp, Artificial Sequence
  ENSG00000284607_16 (sequence is synthesized)
ttacccagtcagtttggcctccccttactcttttctgtttattttctatgactctattaggcgcgcaggtgtggaaatgaggtgaaagaaaattagcccaatcccatagttcagatccat

SEQ ID NO: 922439 - DNA, 120 bp, Artificial Sequence
  ENSG00000284607_17 (sequence is synthesized)
gggttgtgtattggcatgactgtaaactgggagcaattggtttgcctagggcttttgaattgggagttctggtttctagcaacattggattaggtatcaaattttacaacttcttagctt

SEQ ID NO: 922440 - DNA, 120 bp, Artificial Sequence
  ENSG00000284607_18 (sequence is synthesized)
tctctacaaaaagtacaaaaattagccgggcttggtagcatgtgcctgtagtagtcccagctactagagaatctgaggtgggaggatcacctcaggagggtgaagctgtggaactgtgat

SEQ ID NO: 922441 - DNA, 120 bp, Artificial Sequence
  ENSG00000284607_19 (sequence is synthesized)
tgcactccagcctgggtgacagagtgacagactgagacccttcctcaaaaaaaaaaaaaaaaatcttaaatttcacatggaagttttaacagttgttagcagttgttaaactattgactc

SEQ ID NO: 922442 - DNA, 120 bp, Artificial Sequence
  ENSG00000284607_20 (sequence is synthesized)
aagttttaacagttgttagcagttgttaaactattgactctcaactccaaacccactactatggactgaattgtgtttccttaaaattctgtgttgaatccctaatccttaaagtgactt

SEQ ID NO: 922443 - DNA, 120 bp, Artificial Sequence
  ENSG00000284607_21 (sequence is synthesized)
agttggagtaaggaagtagttaaggttaaataaggtcatagggatgcaccttgatccctaagattagtttccttatgagaggagacagagtactcaaaccatgtgaagacacagcaataa

SEQ ID NO: 922444 - DNA, 120 bp, Artificial Sequence
  ENSG00000284607_22 (sequence is synthesized)
agtactcaaaccatgtgaagacacagcaataaggtgtccatctgcaagccaggaagtgagcccttaccaagaaccaaatcagttggcaacttaatcttggacttcccagcctccagaact

SEQ ID NO: 922445 - DNA, 120 bp, Artificial Sequence
  ENSG00000267653_0 (sequence is synthesized)
gtagatttctgcagatcgcaacaagcctcgactgcttattggcacagtctgcaaagggcctcctccgttccaaagttgctcatcctaaaacctgaaaaaaaaaatgactcagaagtggtt

SEQ ID NO: 922446 - DNA, 120 bp, Artificial Sequence
  ENSG00000267653_1 (sequence is synthesized)
cccatctcaagaactacccacgagtctcagtggacacatgtgagtatgagattccccgatgcagccttccaatccagcagaggttccaaccaacttccaaacaggtgcaacttgatggca

SEQ ID NO: 922447 - DNA, 120 bp, Artificial Sequence
  ENSG00000267653_2 (sequence is synthesized)
ggagctaaaacatgtgggaccagctgtgaccaatgaacaatgatggacaggagacgataaccccattagttccttacagtgctgagataaatttcatgagtctcctagaagatctgatgg

SEQ ID NO: 922448 - DNA, 120 bp, Artificial Sequence
  ENSG00000267653_3 (sequence is synthesized)
gattgaacatcagttgtacctagcatggccgctgtactggctttccttccttccctatttcatcccccctcgtccctcctactccttgggatcacattgacaaataagtctcttgcatgc

SEQ ID NO: 922449 - DNA, 120 bp, Artificial Sequence
  ENSG00000232860_0 (sequence is synthesized)
cccagggttccccgttggcttcccttccatctaaaggcctcccccaagtttcgggccaaaaagctgaaataaagaacgaagtcaataataatatgaagtgtatgagaaatagctggaaaa

SEQ ID NO: 922450 - DNA, 120 bp, Artificial Sequence
  ENSG00000232860_1 (sequence is synthesized)
atgttcagttgaaacatcagacactgttctggttatgatggacaccacagtgaaagagacctggtccctgccttgaggaaacccaactgctggtagagagctcagagtaatgattaggat

SEQ ID NO: 922451 - DNA, 120 bp, Artificial Sequence
  ENSG00000232860_2 (sequence is synthesized)
gcaatatgagggatgcagtaattgggatctacttctgggaaccgtcacagcctgagaaagatggcatgccctgaatggaattcacagagaattattttaagtaaaagaagtttaaagtta

SEQ ID NO: 922452 - DNA, 120 bp, Artificial Sequence
  ENSG00000232860_3 (sequence is synthesized)
gtagcgctcccttttgggatcaacgagctgtgtggcgcctgtgcggcttctgagagaccggctggtggcgcttggcggcttcctgccaatccacccttctcctcccgcgcaagggggcaa

SEQ ID NO: 922453 - DNA, 120 bp, Artificial Sequence
  ENSG00000232860_4 (sequence is synthesized)
tcccaatcccaccaccgggaacacccaggccaaaagaacgggagttacactcaaagtcttcccccttcttatcactcctgccgatttccctcttcctttttgcacgcctccactcttccc

SEQ ID NO: 922454 - DNA, 120 bp, Artificial Sequence
  ENSG00000232860_5 (sequence is synthesized)
caccggaaacgccgccccttcctcctacagttcctcccagcagtccctcaacgcctgtcttccctcgcgcgtagagagtgactcgaaggaccccctctcctcttcgctgcagcccctccc

SEQ ID NO: 922455 - DNA, 120 bp, Artificial Sequence
  ENSG00000232860_6 (sequence is synthesized)
catgcacgctgggagactcttggaggggataaggtggggcccggagaggaagagaagacaatcggattggataggcagctgccatggcaactggaggctgtggttatattgtcatagtaa

SEQ ID NO: 922456 - DNA, 120 bp, Artificial Sequence
  ENSG00000232860_7 (sequence is synthesized)
ccgatgtgtgcggacagggtcaccctccccttggccaatggattcccaggaaaccacccagggttccccgttggcttcccttccatctaaaggcctcccccaagttaggaatcgatatag

SEQ ID NO: 922457 - DNA, 120 bp, Artificial Sequence
  ENSG00000232860_8 (sequence is synthesized)
ttctccccggtggtgaagtccacttcctcctcccttcccacttcccacagcaactggggggacaccccgaggcattcaccatgggcttttccacccgcctgcgagcgggaaccacctccg

SEQ ID NO: 922458 - DNA, 120 bp, Artificial Sequence
  ENSG00000232860_9 (sequence is synthesized)
tagtttcctctcagagccgggcgtggagagggctgggcctgcgaagaggatgcatggcctggaggctggcgggcggcgggctggagtcgggagggcgaggcgacagcgccaagcggcgag

SEQ ID NO: 922459 - DNA, 120 bp, Artificial Sequence
  ENSG00000232860_10 (sequence is synthesized)
gaagggcaaggggtttccccacaactgccttgggctctgggaggcgggatcccgcctggacggggtccctgagggaggagagcggcacacgacagccgcgatgccttccctgccgacggg

SEQ ID NO: 922460 - DNA, 120 bp, Artificial Sequence
  ENSG00000232860_11 (sequence is synthesized)
gatagccgacttctggcgagtcgacccctcccccaaatccaccccacccgcgtactccctcctgacctagctgtcgcgagcctgccgcgaggaggccagggtgagggtgggaacacatcc

SEQ ID NO: 922461 - DNA, 120 bp, Artificial Sequence
  ENSG00000232860_12 (sequence is synthesized)
cagtggggatcctgcttgattattaaaggcagacctccaagttcctccctgctctgcaacctttctcttctcacgggtctgcagtgttttaaaagtcgtcattctgtgtcgttgagttag

SEQ ID NO: 922462 - DNA, 120 bp, Artificial Sequence
  ENSG00000232860_13 (sequence is synthesized)
agaggaaaacatcggataaaagaggatcaagaagaacgaaccctagatacatctgtctggtgaaaggagtctaggaaaagaagtttcattcttagaacaaatctttttggatatttatta

SEQ ID NO: 922463 - DNA, 120 bp, Artificial Sequence
  ENSG00000232860_14 (sequence is synthesized)
ttttacaagttatattttcggttcgtattgtggagtcacttaaggagctatcccaaagtactttaggatatgtaactatataaaaccttccaagaatgcagccctcataggatagttaaa

SEQ ID NO: 922464 - DNA, 120 bp, Artificial Sequence
  ENSG00000232860_15 (sequence is synthesized)
ataaggattttaatgggctattttgatttggtttggtctggtttggctacctgattcctgctgtctttttctacgccaggtgaagaggcactttcaagatccttctctgagacctgcacc

SEQ ID NO: 922465 - DNA, 120 bp, Artificial Sequence
  ENSG00000232860_16 (sequence is synthesized)
aataagactataccaatgttcagttgaaacatcaggtataagtttagcggaaacgaaagtacaacctgctttgaaataaattccaaggacagattgtcattaacgaaatagaaagtggac

SEQ ID NO: 922466 - DNA, 120 bp, Artificial Sequence
  ENSG00000232860_17 (sequence is synthesized)
tatgcccctcatgctgccagcgcctggtatggtgcggcgtgacacgcagcgcttgcggcagtacaatgcccccaatcacccgccccgccccgacgcgccgcccactcacggcaaagagag

SEQ ID NO: 922467 - DNA, 120 bp, Artificial Sequence
  ENSG00000232860_18 (sequence is synthesized)
ccacctagtgagggattattctcatttccgcggtggggttctgcttttctttctaccatgagcgcccaaggatagacactcctactacctattacctcaaatagcctacatttctttccg

SEQ ID NO: 922468 - DNA, 120 bp, Artificial Sequence
  ENSG00000232860_19 (sequence is synthesized)
aaaatttattggttagatatttttcttttttttttttaatttaaagaccagtgtgatcgtgtattggttagattttttaattggttagatttcaaccagaataaaaattgtaataattac

SEQ ID NO: 922469 - DNA, 120 bp, Artificial Sequence
  ENSG00000232860_20 (sequence is synthesized)
cactaatacttatgtatgagcaaaaattgatgaggatgatcatgttttaatacaccagtacagaccaaaatgcctctttggtaattttcagatctacttctgggaaccgtcacagcctga

SEQ ID NO: 922470 - DNA, 120 bp, Artificial Sequence
  ENSG00000232860_21 (sequence is synthesized)
cttccacatttggttttttttttttcccccatttgtgggtaagaaagtaaaagaggcaggaaaactgaattgagaaagaagaaagaataggggaagagagaaagaaaaaagaaaaccatg

SEQ ID NO: 922471 - DNA, 120 bp, Artificial Sequence
  ENSG00000232860_22 (sequence is synthesized)
aagcctggaagaggagaaagaagagatagatgagcaaagaagcacattgcctggtggtagtaatagttgtcagacacccatctattataatctgttttccatgggagattttaagaagag

SEQ ID NO: 922472 - DNA, 120 bp, Artificial Sequence
  ENSG00000232860_23 (sequence is synthesized)
gctagatccccagtctgtcttaaaatcaagaaaagggactctgttgcctctaaagtatacttccagactcagcaatctctaaattctgagtggggcatccctagttttgctgcctaaaat

SEQ ID NO: 922473 - DNA, 120 bp, Artificial Sequence
  ENSG00000232860_24 (sequence is synthesized)
ctatgacagttggaaatgattccatttaagatccagttcaagaagctatacaccctgaggaactttatattgccatttagaggaccgatattctccagattgcttgagcccaggagtttg

SEQ ID NO: 922474 - DNA, 120 bp, Artificial Sequence
  ENSG00000232860_25 (sequence is synthesized)
catggcaaaactccatctctaccaaaaaaaaaaaaaaaacaaaattagctgggcatggtggtacacatctgtagaaccagctactctggaggctgagctgagagaaccccttgagcctag

SEQ ID NO: 922475 - DNA, 65 bp, Artificial Sequence
  ENSG00000232860_26 (sequence is synthesized)
acatctgtagaaccagctactctggaggctgagctgagagaaccccttgagcctaggagatcaga

SEQ ID NO: 922476 - DNA, 120 bp, Artificial Sequence
  ENSG00000276012_0 (sequence is synthesized)
atacaaatgacctttggatttctctatcacggcgcttatcctcctattaaggatcagaaagttaaactttacggaccacgaaagaacacaacagccgtcttgcccatgctctgctgagta

SEQ ID NO: 922477 - DNA, 120 bp, Artificial Sequence
  ENSG00000276012_1 (sequence is synthesized)
tgaaatggatttagacgcacttgtgcttttacttggcgtcaccccaggcttcgggaccgtttccccaacatcatgcaaagatggttctcggtacatggcaactagtgatgggaagaaagg

SEQ ID NO: 922478 - DNA, 120 bp, Artificial Sequence
  ENSG00000276012_2 (sequence is synthesized)
aggaggaaaagcaaacattgcttggttaggtgtgagaatggtccatccatacctgcatagaccactgcagtttgcccatttctgttttccctgaagtaaagcaattccattgagacagaa

SEQ ID NO: 922479 - DNA, 120 bp, Artificial Sequence
  ENSG00000271882_0 (sequence is synthesized)
gaattagcattactaccagctggtgtcctacttatgttatagaaatgtgacagcaaatgtgatatgaactccttagaagcatttttatacacattgctggctttaattgtgaatgctaca

SEQ ID NO: 922480 - DNA, 120 bp, Artificial Sequence
  ENSG00000271882_1 (sequence is synthesized)
ttaagatgcaataaacatgtgcctattttctatccaaaatctcaatcagattaaaatgcttctctaaagacctgaaaggcttatttgtttatttgtattcatgtaggatttggggggatg

SEQ ID NO: 922481 - DNA, 120 bp, Artificial Sequence
  ENSG00000271882_2 (sequence is synthesized)
aaagaattggtgattaatcaacatattattttcccaataaacagactattctgacaaatgtttagtggcaaataatagcaacagcaataatggcaacaataaacttagaacagaaatgga

SEQ ID NO: 922482 - DNA, 120 bp, Artificial Sequence
  ENSG00000271888_0 (sequence is synthesized)
ggcggcgcctgctgcttgtgccgtgcagccggtgtcacctcaggacagcgcctcgcgtctgtgtacagagcgtgctgcgggcgcctagggtagtccgaggtcacccctctccgcgccccg

SEQ ID NO: 922483 - DNA, 120 bp, Artificial Sequence
  ENSG00000271888_1 (sequence is synthesized)
gccgggggtcgccgagtggaaaggccacgcccccccacgcccgggctcggcacgctgcccctgggtcgcgaacgcgcctccgctcgacccgcttggaggacgtcgctggtggcccaggag

SEQ ID NO: 922484 - DNA, 120 bp, Artificial Sequence
  ENSG00000271888_2 (sequence is synthesized)
cgacccgcttggaggacgtcgctggtggcccaggagtgaagccccggcggctgcctcctgagaaaagatagccgtgtttaaagagactgaacgggatctttgctttgccgggcgtatttt

SEQ ID NO: 922485 - DNA, 120 bp, Artificial Sequence
  ENSG00000271888_3 (sequence is synthesized)
gtgataaaataccacaaaatgttgagacaaaaatgagtggaatatggagaccgagccgcacagacacgcaattgtaaggaaacatctcgaacaccgagtgccaggaatatcaactgtccg

SEQ ID NO: 922486 - DNA, 120 bp, Artificial Sequence
  ENSG00000271888_4 (sequence is synthesized)
actttgtcaagtctcgcatcgcgattctgccttgttaatttccttgtttttcgctgtggttttggagaagcaatgttttccatgatctctcaggctagcctcggaataaaacgtggcaga

SEQ ID NO: 922487 - DNA, 120 bp, Artificial Sequence
  ENSG00000271888_5 (sequence is synthesized)
agcgctcccgcgaacacatacccatatattttattctacctattccctagagtctgctaacttcaaaagtctagatactcacacagctgtttacttgcagcagtatttgaagagataacc

SEQ ID NO: 922488 - DNA, 120 bp, Artificial Sequence
  ENSG00000271888_6 (sequence is synthesized)
ttggtgtctagaaaggtctcagaaactggaggtaagagacctggattcaaatcgcgccttggccacttcccaaaaggcaaccgagagcctctctgagcttgtcagtttccgcatctgcaa

SEQ ID NO: 922489 - DNA, 120 bp, Artificial Sequence
  ENSG00000271888_7 (sequence is synthesized)
attagtggtgatcaaacctgtggggatgattatgtgataaataacagtaacctagtttaaaactaggcacgttattggaagctttcagtaaacgaaataaaaagccttttcgagagggta

SEQ ID NO: 922490 - DNA, 120 bp, Artificial Sequence
  ENSG00000271889_0 (sequence is synthesized)
accagagagccagtccaacccagtccatcacctggaggctggagaaccacgaggctgttgcctgttcgtccccctcttctgagaggtccagaccatgaacaattggtatacttccttctt

SEQ ID NO: 922491 - DNA, 120 bp, Artificial Sequence
  ENSG00000271889_1 (sequence is synthesized)
taccaaacatttaacaaagaactaacaccaatctttctcaaacctttcaaaaattgaagagggaacacttactagtcattctatggagctggcattaccctgataccaaagccactacaa

SEQ ID NO: 922492 - DNA, 120 bp, Artificial Sequence
  ENSG00000271889_2 (sequence is synthesized)
ccagtccaacccagtccatcacctggaggctggagaaccacgaggctgttgcctgttcgtccccctcttctgagaggtccaggtcacctgctctgggagaagccagttgccatgttgtaa

SEQ ID NO: 922493 - DNA, 120 bp, Artificial Sequence
  ENSG00000271889_3 (sequence is synthesized)
actcaagcagcccatggaatgactcacatgctgaagaactgagccctccctccttccaacagccagggaggaactagggcttcttgccaataaccatgtgaagaagcttggaaatggatt

SEQ ID NO: 922494 - DNA, 120 bp, Artificial Sequence
  ENSG00000271889_4 (sequence is synthesized)
ctcccccaaatgagtcttcagattactttagactaacatcttgactgcaacctctagaaagaccctgagccaggatcaccaagctcacagaagctaagagttaataaatgtttgaattaa

SEQ ID NO: 922495 - DNA, 120 bp, Artificial Sequence
  ENSG00000271889_5 (sequence is synthesized)
cctcttctgagaggtccagcctttaaagtatggccttctgaaaacctgaccctgggagacctgggagcctcaactttgtgcagactccaaatgagactcaccatgatgcgccagaaatct

SEQ ID NO: 922496 - DNA, 120 bp, Artificial Sequence
  ENSG00000271889_6 (sequence is synthesized)
cagggtggcctttgccacaatgtacctggactgaatttgtggagatcaatttggtgttggactttgtgatggttttaatattcctcccttcccttgagtgtggactggatttatagtagt

SEQ ID NO: 922497 - DNA, 120 bp, Artificial Sequence
  ENSG00000273011_0 (sequence is synthesized)
ctaaccaggttaggcataggcagatggggcaaatgtgctgggaaggtttctgggaaagggtctctaaattcttaaaaagtgcaagggaaatcttctatctctgtatagaaatgtccaaag

SEQ ID NO: 922498 - DNA, 120 bp, Artificial Sequence
  ENSG00000273011_1 (sequence is synthesized)
aggtgatctaggaatttggcagccaccctggacccagggggaacaaacagaagagctccagctagtgccctaggctgcatgtgcaattccatcactgagctgctaaaacaacagccctag

SEQ ID NO: 922499 - DNA, 120 bp, Artificial Sequence
  ENSG00000273011_2 (sequence is synthesized)
tcaaaaaagcagcctgattcatgcacatatctttagaagaaatttaaaacgccctagaaaagaatatcttcagtttaaaatctaagcaatttggaatttacaggaatatattcctcttag

SEQ ID NO: 922500 - DNA, 120 bp, Artificial Sequence
  ENSG00000273011_3 (sequence is synthesized)
ttccagttactcaccattaaaaaataatggtcctcaggttcagctcgaagatatttaaaaaccacttgctccatgaacctttccataagatcccagtcttcaatgattccatgtcgtatc

SEQ ID NO: 922501 - DNA, 120 bp, Artificial Sequence
  ENSG00000273011_4 (sequence is synthesized)
ggccactggaggaagagacaccagagttgtcaagcctcagttcgcaacaataagagcaacagtttaacagtggcacagaagaaactgtattattaagaataaaggtctccttctcattgc

SEQ ID NO: 922502 - DNA, 120 bp, Artificial Sequence
  ENSG00000273010_0 (sequence is synthesized)
agaaggtttgagtcacataagagcgtcggccatcttggttttcatctcccgtggagatctactcggtccgcctattaaacttgagacgctggggtcccgcggagccgctgtgtcaggctc

SEQ ID NO: 922503 - DNA, 120 bp, Artificial Sequence
  ENSG00000273010_1 (sequence is synthesized)
taaagaggttttacatttcccagaggaaagcgctctatgggctttaagcgccgcggagacaagcgcttcccgcctgggtggcgcactctgcgggctccaactcctctcaactacacagcg

SEQ ID NO: 922504 - DNA, 120 bp, Artificial Sequence
  ENSG00000273010_2 (sequence is synthesized)
tccggaaacgacggccgactccacatccctaagacggacagaggggcagccgtggggaggattcgaaaccggtacttaccaacgcgaggcgttgcctgaattttcctctgcgggtttcag

SEQ ID NO: 922505 - DNA, 120 bp, Artificial Sequence
  ENSG00000273010_3 (sequence is synthesized)
gaagaccctccgtaggttatttgacattttagtggggagaaaggggacacctcatccagaaaagtgggaagcgtggggccgagtttcccaatggggcgagaaccagagcgagggaatgtt

SEQ ID NO: 922506 - DNA, 120 bp, Artificial Sequence
  ENSG00000273010_4 (sequence is synthesized)
gggctggagttgcccacagcaactgtgaggggttcgaccttaacggagggcgacagcgggctctcgagagggtgtatccccaggcttcgggacgaggtcgcgcaccgcgcagaaaccgga

SEQ ID NO: 922507 - DNA, 120 bp, Artificial Sequence
  ENSG00000273010_5 (sequence is synthesized)
cagccctacgctgagagagaatcggcgtgagtctccgccctcagagcctacgacaactctccagactccgccggagcaggcgcagggggcgtggccttggtggcaccacccccaacagag

SEQ ID NO: 922508 - DNA, 120 bp, Artificial Sequence
  ENSG00000273010_6 (sequence is synthesized)
cctggtcagtgctgaagactgcgtcagtctggctctgccgccccgcccactgaagccgatagctggagcaaagctcggtcgggcgtcttccggggtcgtcacgtccggttgccaaggtga

SEQ ID NO: 922509 - DNA, 120 bp, Artificial Sequence
  ENSG00000273010_7 (sequence is synthesized)
ctggctcgctaaagcccaacccttatgatgcaatccaatggcaagtgatatttgctatcttttcttccggatcaaggaacaaatcgcaaaagaaagctctcccgacacctacgcaaaata

SEQ ID NO: 922510 - DNA, 120 bp, Artificial Sequence
  ENSG00000273010_8 (sequence is synthesized)
aaatgtttccggggtcaatcataaattttctgcttctgtgctcgccgctagcgtacgtttttctctcccgtcagtgcattaaaagacatcggcgcgcttttttggagtcatgcacttctg

SEQ ID NO: 922511 - DNA, 120 bp, Artificial Sequence
  ENSG00000273010_9 (sequence is synthesized)
gcctgagaaaacttaaaacgcctgcctgtggccagcgattattgttgctgcttctctgaaggtttcccatttactcctctttcctgaagctttgcctctagacttacttaactctttcct

SEQ ID NO: 922512 - DNA, 120 bp, Artificial Sequence
  ENSG00000273010_10 (sequence is synthesized)
ccagcctacgttcatcgaaactatcacttattgtcatatagacctttatttctgaagggagatctgggagttgcatcagaacatccattgtattcattaaatcatttattcagctgtcca

SEQ ID NO: 922513 - DNA, 120 bp, Artificial Sequence
  ENSG00000273013_0 (sequence is synthesized)
tgtgagtttggattacataggtcaaggatcagtaatctatggctcatggaccaaatccagcctcctgcctgtttttgtaaacaaagttttactggaatgcattcaagctgatgtgtttac

SEQ ID NO: 922514 - DNA, 120 bp, Artificial Sequence
  ENSG00000273013_1 (sequence is synthesized)
atattatctatagatgctttcacactacaccagcgtagctgagaagctgtgacacagatcacactaactgcaaaggcgaaaatattcactctcttagagaaaaactttgctttttgtagt

SEQ ID NO: 922515 - DNA, 120 bp, Artificial Sequence
  ENSG00000273013_2 (sequence is synthesized)
tagaaaactatggatagcactaatctacagcattaatgaaccagcaaaactcagaacatcttcagtatcaacataccttagatacggagtctttcctgacttcttgtacagcttcagagt

SEQ ID NO: 922516 - DNA, 120 bp, Artificial Sequence
  ENSG00000273013_3 (sequence is synthesized)
gtgaggctgacccaaactgagatttcggtgtcaaatacctaaaagaaaagtttaccaaagtttcaatgctttcaaagacagatggtatgtacccaacataataaagctatttataccgaa

SEQ ID NO: 922517 - DNA, 120 bp, Artificial Sequence
  ENSG00000273012_0 (sequence is synthesized)
tttgaaaattagtttgtgttttataaggtcaaatggcttctttaaattcatactgtgctattgtatctagcctggcatgtttctttactgtagttctttttctgaatttttaaacccctt

SEQ ID NO: 922518 - DNA, 120 bp, Artificial Sequence
  ENSG00000273012_1 (sequence is synthesized)
agagttagtaattatgttgggatgttggggcgtggactggatgtagctaaacatactcagatttgactcacattcaaatgtactcaaacattcaaatttaaagttgtctgccaaagcaaa

SEQ ID NO: 922519 - DNA, 120 bp, Artificial Sequence
  ENSG00000273015_0 (sequence is synthesized)
ggctgctgcgaggaagacccggtcagctgtcccttcccccatcggtcctcttaggggaagtggagatgtgggcctcggagctgcgtggcccgggctgtgcggattccctaaacgccgcac

SEQ ID NO: 922520 - DNA, 120 bp, Artificial Sequence
  ENSG00000273015_1 (sequence is synthesized)
ttgcgcacagccccttacgtaaccgtcagtgccggggattccctggagggggtcattctattcaaccattatacacaccccgggctcctgccgccgcgccgccgccgcctcacaaaatgg

SEQ ID NO: 922521 - DNA, 120 bp, Artificial Sequence
  ENSG00000273015_2 (sequence is synthesized)
cggcgcccatagaggagaccgcggccgcctccccggccccattttgtgggaggcgagagatctgtcaacatggaaaacctctgctgaggatgcatccgagtttggaaaccccacttaagg

SEQ ID NO: 922522 - DNA, 120 bp, Artificial Sequence
  ENSG00000273015_3 (sequence is synthesized)
gatggagcctgggggatcacattaaacggaaaatgccaacgacttctaccacctctacgcgtttttagtttttcattttctcgaaggaagcgccagaagcctgtggagtaattgtaacta

SEQ ID NO: 922523 - DNA, 120 bp, Artificial Sequence
  ENSG00000273015_4 (sequence is synthesized)
gagggagaacggaaagctgaggtgactgctccggggacttggcgcggcgccttggtggctttggttgctcttccacgctcccggcagctgaccagaatctcttggagggtctcctgggcc

SEQ ID NO: 922524 - DNA, 120 bp, Artificial Sequence
  ENSG00000273015_5 (sequence is synthesized)
acctcggccgcgccagtcgtgcagtgagacttctgtagttttaaaatgccacagtccacggcccggtcggcaccgctcgcctgaatcgtgggctttgggaaccttggaggctgctgctcc

SEQ ID NO: 922525 - DNA, 120 bp, Artificial Sequence
  ENSG00000273015_6 (sequence is synthesized)
aggaactcgcggtcggccgggagccggggagcttcgttgctgggagcgggcggtattcgcggactccggcggccctggcgggtcgcggccgggatccgagccggggatgacgatgctgat

SEQ ID NO: 922526 - DNA, 120 bp, Artificial Sequence
  ENSG00000273015_7 (sequence is synthesized)
ggagctgatggggcaagagtgggaacggaggcacgtacactgaaatttaagtcatccaagttgggacttaagatagcaggttaatattgtctcaggcgagacttagaacgtcttttctgg

SEQ ID NO: 922527 - DNA, 120 bp, Artificial Sequence
  ENSG00000273015_8 (sequence is synthesized)
tatcccagtctgcagtgggcaaatctattgtctttatttctcatttaagggcagaatggagggatgacatatttttacttttcaagaggcggttgccacttttaagtcactgttgtgtgt

SEQ ID NO: 922528 - DNA, 120 bp, Artificial Sequence
  ENSG00000273015_9 (sequence is synthesized)
gtgtgtgtacatacacaaacatacgatagtgtgttttcagagcaagtatcaaaggctaaagacttggagtgatactagtgtttaaaagcctttttaaaaaaattaagatgtgatgagaaa

SEQ ID NO: 922529 - DNA, 120 bp, Artificial Sequence
  ENSG00000273015_10 (sequence is synthesized)
ctggagaattgacttttaaaaatttcttttctgtagaagaggctatcttcaaaatggagtcctaaagtatatctgatggatagaatttaaattcttaacactgtatataccctgtggtca

SEQ ID NO: 922530 - DNA, 120 bp, Artificial Sequence
  ENSG00000273015_11 (sequence is synthesized)
aaagcatcaacgtaaaacttgatgtttatcagattacttatgtttcaattttcctgtggttagaaaaattaagacagaagtaagctattaacggtatttgcttgtaagagtaacgttaaa

SEQ ID NO: 922531 - DNA, 120 bp, Artificial Sequence
  ENSG00000273015_12 (sequence is synthesized)
ggtttaaggaaaggtttgttgaaatcgatatgcatcacacgaatcatttattttcaatgttgttttccagttgcagcaatcatttgtgtttacatgactttgaaaaagggtttagtttat

SEQ ID NO: 922532 - DNA, 120 bp, Artificial Sequence
  ENSG00000273015_13 (sequence is synthesized)
gttgattttgaccctcttatttaatctctagtgcagaagtgcagctttctgcaggctgcgcctcaatcgctaagttccactctccatcctctgccgcgctactcctggcatgtggatcac

SEQ ID NO: 922533 - DNA, 120 bp, Artificial Sequence
  ENSG00000273015_14 (sequence is synthesized)
caagatacaatttctggtcctgtctgttcttattgatgtcctttacagttaataaatttgattgccactaatcagtctgtatctcttgcaaaaacaccacatttagcatccaagtagagt

SEQ ID NO: 922534 - DNA, 120 bp, Artificial Sequence
  ENSG00000273015_15 (sequence is synthesized)
cagagtatgttttttatgagattgtactaaagtaaccttctattacatttcttattaccatattgcatttcctatagtgggcagcatagagcaggtggatcctgacaaagtaatgttaga

SEQ ID NO: 922535 - DNA, 120 bp, Artificial Sequence
  ENSG00000273015_16 (sequence is synthesized)
gatgtgctgacagctttacaatagatattctccaactaatttgacaagatataaaataaaatgtagttcgtagttttcaagcattaatggaaagtgttcctattaaaaaattaccaataa

SEQ ID NO: 922536 - DNA, 120 bp, Artificial Sequence
  ENSG00000273015_17 (sequence is synthesized)
cagtggaaattgttgcaatccaatttgtatagtttactgttttgatgacaaagcgcttatgatgggaaaaatgtagtgttgcttttgtaactgcaaacgctgcacgccgtaattagaggt

SEQ ID NO: 922537 - DNA, 120 bp, Artificial Sequence
  ENSG00000273015_18 (sequence is synthesized)
ttatgttattttatttgaatttttcattcttaccatcagttttcatattagtcaggaaattgtgataaattaaaaattccctcattcaactaaaccttaaaaaactgtacccagtttcaa

SEQ ID NO: 922538 - DNA, 120 bp, Artificial Sequence
  ENSG00000273015_19 (sequence is synthesized)
atcaagcattatcaggtgtatgattacaacagctgaaataaattgaggaattggtatgccaactcagtggagaaattttgggattttaggtcactctaagatttaaaaaaatagtttgat

SEQ ID NO: 922539 - DNA, 120 bp, Artificial Sequence
  ENSG00000273015_20 (sequence is synthesized)
tcgttaaacaaggctattgaagttaaattgatatttccttaaagatgattttagagaaaaattccttggcgagcttcgagaatgcgttcatggcttctgttgcctgtacctactgctata

SEQ ID NO: 922540 - DNA, 120 bp, Artificial Sequence
  ENSG00000273015_21 (sequence is synthesized)
cttttttatgtggactaatttgtcttatttgaaaatttgattacaatatcaaatcctagatgaagcccttccattcttagggtgattctaaggagtactgataactaagctcttaaaagg

SEQ ID NO: 922541 - DNA, 120 bp, Artificial Sequence
  ENSG00000273015_22 (sequence is synthesized)
cgaggaaatagtttattctactgcagattagggtaatcttaatacagacactctgatggtaattctaagcagtgttgataactaagcttttaaaagataaggaaatagtttattctactt

SEQ ID NO: 922542 - DNA, 120 bp, Artificial Sequence
  ENSG00000273015_23 (sequence is synthesized)
cagagtagggtaattttaatgccctgaatatactctgaatcttttatagatagatttctggatgatttggcccaaaaaatctgataagctttggggaattttttaatttttttttctctt

SEQ ID NO: 922543 - DNA, 120 bp, Artificial Sequence
  ENSG00000273015_24 (sequence is synthesized)
aaagagaaatcagaaatgtgggatttttttaaaaatttattttcagtagatattggagattatgctttgtacattaaatccagtttgatttttaagtgataattttcaattaaagacttt

SEQ ID NO: 922544 - DNA, 120 bp, Artificial Sequence
  ENSG00000273015_25 (sequence is synthesized)
ttaataagacaactaaaaaattaaattttagtcaattacaataatattttttggagaagcattcccagatgtgcttttgacggggagttgatttcattagttgtttgggttgtttaatcc

SEQ ID NO: 922545 - DNA, 120 bp, Artificial Sequence
  ENSG00000273015_26 (sequence is synthesized)
agaatttttaaaactgttatgggtttaatttgctacatttgtccattcttattcatttcatctgttttgatcactgaaaagttgtctaaaaactgtgctcattatacacagtttatagta

SEQ ID NO: 922546 - DNA, 120 bp, Artificial Sequence
  ENSG00000273015_27 (sequence is synthesized)
ctgtgctcattatacacagtttatagtattttaatactttgtttatagtatttaatagcttctgaaaactttaagagaacatactaaaccaaggaactatttattaatggtaatctatat

SEQ ID NO: 922547 - DNA, 120 bp, Artificial Sequence
  ENSG00000273015_28 (sequence is synthesized)
aaatgtaagtttactaaatgtagattactaaatcactgagtaaatatttcttgaatatttggacaagagatggggggagggagaatgacttgaccctcaagaaacttaactgctaccttt

SEQ ID NO: 922548 - DNA, 83 bp, Artificial Sequence
  ENSG00000273015_29 (sequence is synthesized)
ccttgagccgaggagttcgaggctctgtctcttaaaacaaaaaaagttataaaaatattcagactggagggttcctaactttt

SEQ ID NO: 922549 - DNA, 120 bp, Artificial Sequence
  ENSG00000273015_30 (sequence is synthesized)
aagttataaaaatattcagactggagggttcctaacttttaatacttaagcagggtctttaccacagagttaaatttaaaattctgtttagaatggtaacaaatttaattatgtacaaaa

SEQ ID NO: 922550 - DNA, 120 bp, Artificial Sequence
  ENSG00000273015_31 (sequence is synthesized)
cagcatcactttagtgttaggatcagtgttactcaaagtgttgtaatgttaataacaagcatttaaatcacattgtttgaaaactgggatctacaaaaaatatgattccaataattaact

SEQ ID NO: 922551 - DNA, 120 bp, Artificial Sequence
  ENSG00000273015_32 (sequence is synthesized)
ttttaattatgggaaaggcaagggaatgttcagtgaatgtaaaaaaaatatactactgagcaaacaaattgttttaatgaattttgattttctgttttaattttttggtacattgactct

SEQ ID NO: 922552 - DNA, 120 bp, Artificial Sequence
  ENSG00000273015_33 (sequence is synthesized)
tcttgacatggcactttgctattaattaaaaaaaattaaaccccaaagacaaattaattctgtatttaatgcagatttaattcttgactagctgtaatgcttaaggagttggcagtcttg

SEQ ID NO: 922553 - DNA, 120 bp, Artificial Sequence
  ENSG00000273015_34 (sequence is synthesized)
ttggcaaaacaataaaataggaattaagctgaaatgtaaaattgtgtaataattaggtttcattaaagtatatatagtttccttaataactacatgagtcagtagtgttgacttaataat

SEQ ID NO: 922554 - DNA, 120 bp, Artificial Sequence
  ENSG00000273015_35 (sequence is synthesized)
aagttatttagcttttgcttttctctgaaaacatatcaaactcttcatatatagcatcgaaatagatattcaacctgagccactgtaaattgttgaagcttattgctatacattaaggga

SEQ ID NO: 922555 - DNA, 120 bp, Artificial Sequence
  ENSG00000273015_36 (sequence is synthesized)
aattctatccaacagttcagtgtaaacaattttttaaaggtgctatgattctttaacatgatttgtagtatgtagaactcaagtattctagaataatctttgcatgataatgtatgagaa

SEQ ID NO: 922556 - DNA, 120 bp, Artificial Sequence
  ENSG00000273015_37 (sequence is synthesized)
acatttataaacagtccttcaggtgtacaaaataactgacataatattttgcatttaactacactgcctccaagtattttaaacaaagatgaaatttttagagtattgtgctatattttt

SEQ ID NO: 922557 - DNA, 120 bp, Artificial Sequence
  ENSG00000273015_38 (sequence is synthesized)
ataactgaatttccctcttattaacaatactcataacatttagccattaatgattactgatagcttaaataagagtgtagtttctgtttctaatgtctattaattttaaccccatttaaa

SEQ ID NO: 922558 - DNA, 120 bp, Artificial Sequence
  ENSG00000273015_39 (sequence is synthesized)
gatatttcctacttatcatactcaaagttaatcagaagttaaataaatgatggtccttctggttctctggaaactgaaaagaagcttctgtttctttagggtatgcaggaattttttttc

SEQ ID NO: 922559 - DNA, 120 bp, Artificial Sequence
  ENSG00000273015_40 (sequence is synthesized)
gctgaatccatcctttacgctgctatttgctaacctcagttgtttttctgctccattaaagttgaggccaccaaaaatagtagtaatatcacaactacaaaaccctgggtggatttgtac

SEQ ID NO: 922560 - DNA, 120 bp, Artificial Sequence
  ENSG00000273015_41 (sequence is synthesized)
ccattgcacatacacttcttgctgccaattcctaagagacttttgaaataatagtatattcccagctggacaatatattctacttgtggcctatgtatagtgttcaacaagtccaggagc

SEQ ID NO: 922561 - DNA, 120 bp, Artificial Sequence
  ENSG00000273015_42 (sequence is synthesized)
cctatgaaacggaatgtgtttactgcatttttctagggagaagttctcagcaggcacgggcatcttaaagaccctgtgatgcccaaaaggttaaagctctatttgctaatgacagatagt

SEQ ID NO: 922562 - DNA, 120 bp, Artificial Sequence
  ENSG00000273015_43 (sequence is synthesized)
aagtttggaggattgcttcaggtgcagcattttattttgtgggttgttggcctgtagggaaaaacattttgaaattgtagttaaggaataccacttcagttcatcaaattaaaaaaatta

SEQ ID NO: 922563 - DNA, 120 bp, Artificial Sequence
  ENSG00000273015_44 (sequence is synthesized)
tggcaaataagcaaaaatctatttctaaagaactacatacaatatattcttacagaaaattttagattaaatgcatgtaactgtttttttggtttgccatgtattgaaaatggatggatg

SEQ ID NO: 922564 - DNA, 81 bp, Artificial Sequence
  ENSG00000273015_45 (sequence is synthesized)
agcgcagtctcggctcgcaacctctgcaccctaggctcaagcaacactcgcacctccacctcctgaatagctaggactaca

SEQ ID NO: 922565 - DNA, 120 bp, Artificial Sequence
  ENSG00000273015_46 (sequence is synthesized)
gcgcagtctcggctcgcaacctctgcaccctaggctcaagcaacactcgcacctccacctcctgaatagctaggactacaggtgcacgcaccataccacacctggctaatttttgtattt

SEQ ID NO: 922566 - DNA, 85 bp, Artificial Sequence
  ENSG00000273015_47 (sequence is synthesized)
caggctggtcttaaactcctgagctcaagcaatctgcatgcccaagccattggcccatcttggccttgtcagcccatattaattt

SEQ ID NO: 922567 - DNA, 120 bp, Artificial Sequence
  ENSG00000273015_48 (sequence is synthesized)
cttcaaatataattattcactaattgggaatgcctggggatgtatatgaatgtattaccgttttgtgagtagtagtgtgtgcttgtgttcatggatggcattcatcagaatgtttgcaat

SEQ ID NO: 922568 - DNA, 120 bp, Artificial Sequence
  ENSG00000273015_49 (sequence is synthesized)
ggtgtagccaggttacactgccatcttcctgttctcctttgtgcttacttgctctgcctgtatttgctgcagtttctagcgagtgtatgtaggtgttggcccagaacttgcttttgtaga

SEQ ID NO: 922569 - DNA, 120 bp, Artificial Sequence
  ENSG00000273015_50 (sequence is synthesized)
gatcatacattgtgctaatttatcccaaatcagtttttgtgtattatctgtgggcccaatgtgtaatttgaactttaaggatactacttcagactgcagtgtagcataacctttaaaaaa

SEQ ID NO: 922570 - DNA, 120 bp, Artificial Sequence
  ENSG00000273015_51 (sequence is synthesized)
aaaaatgctagttttgccctaatctgtgcatattccagttgttcaatgggtattagtaatacatgaattacttctgtgccctttttggtgtagagtctcatatgaataattactgttatt

SEQ ID NO: 922571 - DNA, 120 bp, Artificial Sequence
  ENSG00000273015_52 (sequence is synthesized)
taaaacccacgactccatgcattgttttggtgggagagggtagtttcccatcatgttttacatatatgttagcattcagattttcctttttagcccactccctactgaactgaagggaaa

SEQ ID NO: 922572 - DNA, 120 bp, Artificial Sequence
  ENSG00000273015_53 (sequence is synthesized)
gggcgtatttgagagaaaacatatgctttactcaggttccaataattaagccaatgcacttgatttaagttatacatttagctcattcttaaagtgtaataaagactttaagcctcctgg

SEQ ID NO: 922573 - DNA, 120 bp, Artificial Sequence
  ENSG00000273015_54 (sequence is synthesized)
ctcccaaatcagtgctttttctactaaacattctttctgtcttgctaaaaaaatccaattttcagaatcaagttagttgctaagcaaatatgcataaaaccatacatttatctgaattgt

SEQ ID NO: 922574 - DNA, 120 bp, Artificial Sequence
  ENSG00000273015_55 (sequence is synthesized)
ttctaatttaaggagtagtatataaaagtttcaacagaaatcattgattagtaaaagtgatggaaaatcagcaaaataaaaatagaattagagtaggctaaaaggcccttctttagggta

SEQ ID NO: 922575 - DNA, 120 bp, Artificial Sequence
  ENSG00000273015_56 (sequence is synthesized)
atcggaaaactgagttcaaatatagggtctgggacttctcaggtgatattttatcttaaattagaatctgcatgaggtagggtggggccactcatgcctataatctcagcactttgagag

SEQ ID NO: 922576 - DNA, 120 bp, Artificial Sequence
  ENSG00000273015_57 (sequence is synthesized)
ttcgagaccagcctgagcaacatagcaagaccttctctctatttttaaaaaactaaaattggatttaaataaagaatctgcatgaactttcttgtcacttattcttacatattatttgcc

SEQ ID NO: 922577 - DNA, 120 bp, Artificial Sequence
  ENSG00000273015_58 (sequence is synthesized)
ttcttgtcacttattcttacatattatttgccagtgtgcgatacttaataaccaagtaagacacttgaaatgagtcttttaaggctacaacttaggtaacattttataaatattactgct

SEQ ID NO: 922578 - DNA, 120 bp, Artificial Sequence
  ENSG00000273015_59 (sequence is synthesized)
acatacataatacagtaactttttttagcctcacaataataccttgtacaatttataactgctaaagggcctatagaaggctacccacctatgtaaaaaaaaaaaaaaaaaaaaaaaggt

SEQ ID NO: 922579 - DNA, 120 bp, Artificial Sequence
  ENSG00000273015_60 (sequence is synthesized)
cctagctctgtctggtgtagcttggcaaattatttttgatatgaattgccaggaatataggggtatcattccttgctgataagagcacatacccttcctttgctggctaagctatgtgat

SEQ ID NO: 922580 - DNA, 120 bp, Artificial Sequence
  ENSG00000273015_61 (sequence is synthesized)
tctgtaggaccttagtgtcatggccatcctttcagtagtaagcagatttagagaagttgtcccattgttaccttatttcaatagtttttggtctttctatattgtgcataacctcactta

SEQ ID NO: 922581 - DNA, 120 bp, Artificial Sequence
  ENSG00000273015_62 (sequence is synthesized)
atcagattgttatgactgtttccccccaggaagtataggaagataaaaaaaaaaaaaagccaggccagatatatatgactgaacgtgagctcagcaaatgatataggtgtcttaaacata

SEQ ID NO: 922582 - DNA, 90 bp, Artificial Sequence
  ENSG00000273015_63 (sequence is synthesized)
gaacgtgagctcagcaaatgatataggtgtcttaaacatactttcttttttttttttttaaagggaggggttctgtcaatcatggctcac

SEQ ID NO: 922583 - DNA, 120 bp, Artificial Sequence
  ENSG00000273015_64 (sequence is synthesized)
tcagccttctgagtagctgagactacaggcatgcagccccacacccagttaatttttttatttttatttttgtggagacaccgtcttgctgtgttgcctaggctggtcttgaactcctga

SEQ ID NO: 922584 - DNA, 120 bp, Artificial Sequence
  ENSG00000273015_65 (sequence is synthesized)
aatgctgggattacaagcatgagccagggcacttggtccatattttgtttcttaaagtcacaagttaaagctggaggtttcacccagaatcaaagtgccaggtagcattttagtccagcc

SEQ ID NO: 922585 - DNA, 120 bp, Artificial Sequence
  ENSG00000273015_66 (sequence is synthesized)
atcaaagtgccaggtagcattttagtccagcctaggataagcagctgagtttccatgaacacagtacaagaattcagggatatcacttgctaaatgtaaaccagttacctccgtaatttc

SEQ ID NO: 922586 - DNA, 120 bp, Artificial Sequence
  ENSG00000273015_67 (sequence is synthesized)
ccaaaaattttattgtgacaaacgagtgccatactctgaacattaaaggcttttacctccagctgtccaaacattgtgcatgttattcgggtagaggcactggtatggtaggagtttctc

SEQ ID NO: 922587 - DNA, 120 bp, Artificial Sequence
  ENSG00000273015_68 (sequence is synthesized)
ctttagtgtcttgtaattgacaacagatccagcatttatggaatgtattgttattgtaacttttgagtttccatagccaagaacgtaagagtaataactaggtatagtccattattttta

SEQ ID NO: 922588 - DNA, 120 bp, Artificial Sequence
  ENSG00000273015_69 (sequence is synthesized)
gtaaagttagttttagttagcctttgatggtagacacttctcaggttataattcagactcaataacaaagccagaaagttcaggaagggtagggtagtgctgtggtctgaatgttgaaat

SEQ ID NO: 922589 - DNA, 120 bp, Artificial Sequence
  ENSG00000273015_70 (sequence is synthesized)
cctaactatcaaggcattaggaaatggaacctctaaaaggtgattagatcatgagggcagaaccctaatgaattagtacccttataaaagagaccccagagaactggtttgccccttctg

SEQ ID NO: 922590 - DNA, 120 bp, Artificial Sequence
  ENSG00000273015_71 (sequence is synthesized)
ccttgtgaggttacagcaaaaagaccatcatataggaagcaggacctcaccagacaccaaatctgccaacgccttaatcttcgacttcccagactccagaactgagagatataaatttat

SEQ ID NO: 922591 - DNA, 120 bp, Artificial Sequence
  ENSG00000273015_72 (sequence is synthesized)
taagtttataagctacccagtctttggtattttgttataacagcccaaactaaggtaacaagaagcaatcctcacagtgcttgcttaatgtcatgcacctgtcattctagtggtgctcat

SEQ ID NO: 922592 - DNA, 120 bp, Artificial Sequence
  ENSG00000273015_73 (sequence is synthesized)
ttgccagtcttttttttttatgaaagaaattagcagtcctgctttctcttgttttgagtgacaggtctcaggtaaggatttattttccagaaagaaagtgactaaatagattccctccag

SEQ ID NO: 922593 - DNA, 120 bp, Artificial Sequence
  ENSG00000273015_74 (sequence is synthesized)
aaagattttcagatcagtagatctgccttaaactaatgtagtctttggacccagttcagaagtggccaaggccaatcctcaatgcatgaaagtaaaagttagactgtatttaagggagac

SEQ ID NO: 922594 - DNA, 120 bp, Artificial Sequence
  ENSG00000273015_75 (sequence is synthesized)
aaattactagttaggaaccatcgaatgaggtcagaggcaagaccttactaacagatgggcaagttaaatgctatcttctgaaaattttagttgcttcatgatggactcatttggagcata

SEQ ID NO: 922595 - DNA, 120 bp, Artificial Sequence
  ENSG00000273015_76 (sequence is synthesized)
tctggaaagttttttggacatgtctaaaacacggggttgaattttccttacaagccagggttaggacaggaggtcgacctgctgtctagatagtctcagcactaccagaagctatttgta

SEQ ID NO: 922596 - DNA, 120 bp, Artificial Sequence
  ENSG00000273015_77 (sequence is synthesized)
agctgtactactagtctggtgactcaagtaggaagtgtccaggaacctttcttctagacactgcgagaaaccaaagattagtaataagaaattgtttgatagacaagatgaacatcttaa

SEQ ID NO: 922597 - DNA, 120 bp, Artificial Sequence
  ENSG00000273015_78 (sequence is synthesized)
agcatagattcaagacagaggacctttgtacctgacaagtactcaggaagacttgaaaagggcccccgcaggtgagtttcaggctctgtcttccactcatgaacctgcaaaatccaatcc

SEQ ID NO: 922598 - DNA, 120 bp, Artificial Sequence
  ENSG00000273015_79 (sequence is synthesized)
ttgctgctgaagatttcttaagaaaaatgaacagtgtacctggccacttcagtgtctttagaatcccatcttggtgttatactttgcctattgattctagatggagaggtatcaaatgct

SEQ ID NO: 922599 - DNA, 120 bp, Artificial Sequence
  ENSG00000273015_80 (sequence is synthesized)
ttacaaaatctcaaggagttataaactacttttacaatctgtgttataaagtgtattccctggttattataaataggcaaaatgctattccaaatctaacaataaagacttttgccaata

SEQ ID NO: 922600 - DNA, 120 bp, Artificial Sequence
  ENSG00000273014_0 (sequence is synthesized)
gcaagactgtctcaaaaaaaaaaaaaaaagttatttcactagcaacatataattaccataaaacaaaggagggttttaaatgaactacacatgcaaaatacactagaaaagctagatatt

SEQ ID NO: 922601 - DNA, 120 bp, Artificial Sequence
  ENSG00000273014_1 (sequence is synthesized)
cacatatgaggtttgtaaaaaagcaaaatatatgtataaaatggcgtacataaagatgttctacaaatatagccagaagttattgttttactgtatgcaaagagtgatggcaatttttaa

SEQ ID NO: 922602 - DNA, 120 bp, Artificial Sequence
  ENSG00000273014_2 (sequence is synthesized)
ttcaaatgtttttaaatatttcgaactgaaactaaatcttaccaatgtaaaattgccacaaagacggctggaaaagagaaaagttattaaaagctgctttattataaaataccattaaaa

SEQ ID NO: 922603 - DNA, 120 bp, Artificial Sequence
  ENSG00000273017_0 (sequence is synthesized)
cagacacagtaattgtatgccaaggaatccatcctgaagaacaataatcttaaattttaggactattattaatccataataataataataaaaatttcttcttatatcaagatgtccatc

SEQ ID NO: 922604 - DNA, 120 bp, Artificial Sequence
  ENSG00000273017_1 (sequence is synthesized)
gacactgtactcggctctttttataatttttcccttaatcctcacagtaaaatcaaatgtttgacacaatgattgtctctttatgagtttttagctaacaaaatgtttatggtaaacatg

SEQ ID NO: 922605 - DNA, 120 bp, Artificial Sequence
  ENSG00000273017_2 (sequence is synthesized)
gaataaaatgaaaaatactcatgacagatgctaaacatgaaagcaagtgatttatgtatctagtatgattataaccaggtatatcgaaatctctctgtgaataaaaaaaattgaagtcca

SEQ ID NO: 922606 - DNA, 120 bp, Artificial Sequence
  ENSG00000273018_0 (sequence is synthesized)
catttagttgtcatgactctttcagtctggaacagttcctcagtttttctttgacctttatgaccttaaatcttttgaagagtaaagtccaataatacagaatgtccctccattggattt

SEQ ID NO: 922607 - DNA, 120 bp, Artificial Sequence
  ENSG00000273018_1 (sequence is synthesized)
ctctgaactttttttatgataagatttagatgataattttttttttggcaagagtatcacagaagttatcccatgatcttctcactgcattctatcaggtgacctgcaattattattatt

SEQ ID NO: 922608 - DNA, 120 bp, Artificial Sequence
  ENSG00000273018_2 (sequence is synthesized)
ttcaggggtacatgtgcaggatgtgcaggatgtccaggtttgttacatagcttgccattctgtgtctttcattggaaaacacattgagatttaagaaagatcatcttcaagctctgagat

SEQ ID NO: 922609 - DNA, 120 bp, Artificial Sequence
  ENSG00000273018_3 (sequence is synthesized)
tgctgggattacaagcgtgagctaccacacccagcgaggaagccaagtttaacgtgtgtgctccactcctccaacctggccaaagggcagtcatcatcactggccactgctgaccacagc

SEQ ID NO: 922610 - DNA, 120 bp, Artificial Sequence
  ENSG00000273018_4 (sequence is synthesized)
tggccactgctgaccacagcctttagaaactccccttgaacgtgctgggctgaccttcctctgatcacaggcaaggttgtagatgagcatgagagtgtggagcagagttggcgagtgcaa

SEQ ID NO: 922611 - DNA, 120 bp, Artificial Sequence
  ENSG00000273018_5 (sequence is synthesized)
gtcgagcccatcaacctggacagctgtctccgtgctttcaccagtgaggaagagctaggggaagatgagatatactactgttccaagtgtaagacccactgctttagcaacaaagaagct

SEQ ID NO: 922612 - DNA, 120 bp, Artificial Sequence
  ENSG00000273018_6 (sequence is synthesized)
ggatctctggaggcttccacccttcctgattattcaccttaagcgatttcaatttgtaaatgatcagtggataaaatcacagaaaattgtcaaatttcctcgggaaagttttgatccgag

SEQ ID NO: 922613 - DNA, 120 bp, Artificial Sequence
  ENSG00000273018_7 (sequence is synthesized)
actgccagctgtccccttggatctcccagacagacaacagggtacatctctggtttctcggtgccccctagaaacctcgggtcatttcaaggcattatgcaaatgagaagctttccttct

SEQ ID NO: 922614 - DNA, 120 bp, Artificial Sequence
  ENSG00000273018_8 (sequence is synthesized)
tcaatttccatatagttgtgtggttttaagtgaatttcttaatcttgagttctaatttgattttgctgtggtctgagagactctttgttatgatttcagttatttttcatttgctgagga

SEQ ID NO: 922615 - DNA, 120 bp, Artificial Sequence
  ENSG00000273018_9 (sequence is synthesized)
gtgtttttcttcctaatttatgattagttttagggtaagtgtcatgtggctatgagaagaatgtatattcgcttgttttttgttggagagttctgtagatatctatcatgtctacttgat

SEQ ID NO: 922616 - DNA, 76 bp, Artificial Sequence
  ENSG00000273018_10 (sequence is synthesized)
agatatctatcatgtctacttgatccacatgatgtgtctaatattgtcattgtggtgttaaagtctcccactatta

SEQ ID NO: 922617 - DNA, 80 bp, Artificial Sequence
  ENSG00000273018_11 (sequence is synthesized)
tgtataattgaaccctttaccaacaggtagtgctcttctttgtcttttttgatctttgttaatttaaagtctgttttgtt

SEQ ID NO: 922618 - DNA, 120 bp, Artificial Sequence
  ENSG00000273018_12 (sequence is synthesized)
agtgctcttctttgtcttttttgatctttgttaatttaaagtctgttttgttaggaactaggattgcaagctctgtttttttctgctttctgtttgcttggtaaattttcctccatccct

SEQ ID NO: 922619 - DNA, 120 bp, Artificial Sequence
  ENSG00000273018_13 (sequence is synthesized)
ggacctacagctgtcaccttcatctcttctcaacactgccagctgtccccttggatctcccagacagacaacagggttgtagatgagcatgagagtgtggagcagagttggcgagtgcaa

SEQ ID NO: 922620 - DNA, 120 bp, Artificial Sequence
  ENSG00000273018_14 (sequence is synthesized)
gctctctgccagcatcaaccactcacaccccagggggatgagctctccaagcccaggattctggcaagagaggtgaagaaagtggatgtgcagagtttggctggggaagaggacatgctc

SEQ ID NO: 922621 - DNA, 120 bp, Artificial Sequence
  ENSG00000273018_15 (sequence is synthesized)
acatcagcagcagcccaaaaggttctccttcttcatcaagaaaaagtggaaccagctgtccctccagcaaaaacagcagccctaatagctgcccacggactttggggaggagcaaaggga

SEQ ID NO: 922622 - DNA, 120 bp, Artificial Sequence
  ENSG00000273018_16 (sequence is synthesized)
ggctccggctgccccagattggcagcaaaaataaactgtcaagtagtaagaagaacttggatgccagcaaagagaatggggctgggcagatctgtgagctggctgatgccttgagctgag

SEQ ID NO: 922623 - DNA, 120 bp, Artificial Sequence
  ENSG00000273018_17 (sequence is synthesized)
ggcatatgcgggggggcagccaaccagagctggtcactcctcaggaccacgaggtagctttgggcaatggattcctttatgagcatgaagcatatggcaatggctacagcaatggtcagc

SEQ ID NO: 922624 - DNA, 120 bp, Artificial Sequence
  ENSG00000273018_18 (sequence is synthesized)
ttggaaaccacagtgaagaagacagcactgatgaccaaagagaagacactcatattaagcctatttataatctatatgcaatttcatgccattcaggaattctgagtgggggccattacg

SEQ ID NO: 922625 - DNA, 120 bp, Artificial Sequence
  ENSG00000273018_19 (sequence is synthesized)
tcacttatgccaaaaacccaaactgcaagtggtactgctacaatggcagcatctgtgaggaacatcaccctgatgaaattgacaccgactctgcctacattcttttctatgagcagcaga

SEQ ID NO: 922626 - DNA, 120 bp, Artificial Sequence
  ENSG00000273018_20 (sequence is synthesized)
ggatagactacgcacaatttctgccaaagattgatggcaaaaagatggcagacacaagcagtatggatgaagactttgagtctgattacgaaaagtactgtgtgttacagtaaagctacc

SEQ ID NO: 922627 - DNA, 120 bp, Artificial Sequence
  ENSG00000273018_21 (sequence is synthesized)
gcaacttactgtggagaaagagcagaccagatccagatctctattcactgcttatgctacaaggccagtcctaagtcaccttgcgttggaaatcttaatgatagtgaaggtctcaacaga

SEQ ID NO: 922628 - DNA, 120 bp, Artificial Sequence
  ENSG00000273018_22 (sequence is synthesized)
aaacatattccaagaaaaaagaggtctgctcttaaggacatggagagctacttgttgaagatgcagcagaagttgcaaaatgatctaactgcagaagtagcagctgctactaaatatgaa

SEQ ID NO: 922629 - DNA, 120 bp, Artificial Sequence
  ENSG00000273018_23 (sequence is synthesized)
cctctgatcacaggcaaggcaaaggaaaacgacaggcccttgccttcccggtcctcaagggtcagctgtaagatgatgtcataaagccagatcaggtcctggggccgggggaagcacttg

SEQ ID NO: 922630 - DNA, 120 bp, Artificial Sequence
  ENSG00000273018_24 (sequence is synthesized)
ctgtcatcctctggctgctgctgcagcagagccctctgcagacctttggccatgctctcattacgcttgattgccattgacagcttgatgttgtagatgagcatgagagtgtggagcaga

SEQ ID NO: 922631 - DNA, 120 bp, Artificial Sequence
  ENSG00000273018_25 (sequence is synthesized)
tgtctcagggatgatctcctcgtggagtatctcactggagttctctggatttcttgaatttgagtgttggcctgtcttgctagaactaacctggggaagttagttctcttggatcctgtg

SEQ ID NO: 922632 - DNA, 120 bp, Artificial Sequence
  ENSG00000273018_26 (sequence is synthesized)
ctgaagtatgttttccaacttggttccattctccttgtctttttcaggtaccccaatccatcatagattcgttctctttatgtaatcccatattttttgatggtatcgttcattcctttt

SEQ ID NO: 922633 - DNA, 120 bp, Artificial Sequence
  ENSG00000273018_27 (sequence is synthesized)
aatattggttcccagtatcttctgacttgtagggtttccactgagaggtcggctgttcatctgatggggttccctttgtaggtgacctggcctttctgtctgactgcccttaacattttt

SEQ ID NO: 922634 - DNA, 120 bp, Artificial Sequence
  ENSG00000273018_28 (sequence is synthesized)
gctgggattacaggcgtaagccactgagcctggcccattttatacatttttaatgtgtattcttgcttttggaaaatgtgaccagaggactattaaactcttttagcatcggtatagcaa

SEQ ID NO: 922635 - DNA, 120 bp, Artificial Sequence
  ENSG00000273018_29 (sequence is synthesized)
gttggattgagcacttaccaagcaactgtgccaggcatttgtgtccttcatttaattcttacaagcctgagtgttcggtattttaattttataggtgaacaaatagaagctgagggtgaa

SEQ ID NO: 922636 - DNA, 120 bp, Artificial Sequence
  ENSG00000273018_30 (sequence is synthesized)
acaactggcctgaccttcaaaggccttcacagctcctgccttcatgttaccgtctactatgttcctcgtgcaccttccactcagcacaaacaggctgcactgcctccgaaacacatcact

SEQ ID NO: 922637 - DNA, 120 bp, Artificial Sequence
  ENSG00000273018_31 (sequence is synthesized)
tgaatcctacctctgctcctttgtccatctgaatcaccctctccacatttctgaccgtgtaatcctgatctcacttcatgaggcagttcgcttctcttttgcatttagctttccccgggg

SEQ ID NO: 922638 - DNA, 120 bp, Artificial Sequence
  ENSG00000273018_32 (sequence is synthesized)
tacactgtcaatagcctactgtctgatgtcatcagtcagcacttcatcagaggcaattatgtccacagagcttttggctaattactgtcactcctctttacatgtgtgcatatgcatatc

SEQ ID NO: 922639 - DNA, 120 bp, Artificial Sequence
  ENSG00000273018_33 (sequence is synthesized)
atctttccctaatgagactggaaatcatgattcattccctggagcagtggtttccataagtgaccaacccacagaccagtgcaaactggctgcaaaagagcttcctctgaggaacttatt

SEQ ID NO: 922640 - DNA, 120 bp, Artificial Sequence
  ENSG00000273018_34 (sequence is synthesized)
agaatgcagattctttgactgcatgggagaggaggatctcataaatctgggtgtaataggcacagaacgttaggtgtaatatgggcgggactctggactcagcatatccaacaagctgct

SEQ ID NO: 922641 - DNA, 120 bp, Artificial Sequence
  ENSG00000273018_35 (sequence is synthesized)
ggctgattccgacgatgccgatgaattgccaggttgggaactgctgcccccagagaacctagcagagagctctgtacgtggtaggtgctcactcccctattgtttgggtgtatgcctcct

SEQ ID NO: 922642 - DNA, 120 bp, Artificial Sequence
  ENSG00000273018_36 (sequence is synthesized)
gataatgaacttgatcgtaactttattgttgtattatgcctgtattgtttccttaagtgaaggaagaatgcttttgagtacctaataggtggcaagctctgtgcctacttacatacatga

SEQ ID NO: 922643 - DNA, 120 bp, Artificial Sequence
  ENSG00000273018_37 (sequence is synthesized)
actattccttttaataacctttggaaataaagtggcatttccattgggcattagaaatctgaagactttcgtttacagctgttgcaacagcagaactagaattcgacctccgacatttct

SEQ ID NO: 922644 - DNA, 120 bp, Artificial Sequence
  ENSG00000273018_38 (sequence is synthesized)
gctcaccagagggcatgaactgctggtttgtacctggcttgcagataccttctttgggcagcacaatgttcaaaattaaaaaaactaccaacacttctaaactggatactttgtatcaat

SEQ ID NO: 922645 - DNA, 120 bp, Artificial Sequence
  ENSG00000273018_39 (sequence is synthesized)
tctgggtttctggcttctcttcacgggaaaaaaacaaacaaacaaaaaggtttggtgaacactggggcccacattcctgcagggcaacagtcacatggagactttagatgggcacgtgcc

SEQ ID NO: 922646 - DNA, 120 bp, Artificial Sequence
  ENSG00000273018_40 (sequence is synthesized)
cagaacacactagagtccccatcgctccccattctcttacattctgttcccaactaggttcttataggcctgggtttgtgcctgttgcacacttatctactctcttgcttcccactggtc

SEQ ID NO: 922647 - DNA, 120 bp, Artificial Sequence
  ENSG00000273018_41 (sequence is synthesized)
aggaagtctggcaaacttaaaaggcctctttttgttgctctcttctgtatggatctctcatcatagaggtgtgtgcatttctgactttgtgatttcaatactaaggaagctgtcggcaga

SEQ ID NO: 922648 - DNA, 120 bp, Artificial Sequence
  ENSG00000273018_42 (sequence is synthesized)
ttatcaaggaaaacggggatcgctgctccccaacgtacacattctggtgtgccccagtaaaattctatattcagcctccaaactagctgggaaaaatgtggcaaatcatctacttgctcc

SEQ ID NO: 922649 - DNA, 120 bp, Artificial Sequence
  ENSG00000273018_43 (sequence is synthesized)
aattcaatggtgtttagaagtaggaagtcactgtgagcaatgccaccaagtggtggagagactccatgcagaatcgccaccttcagccagagaggctgggaggccgaagacctctctcaa

SEQ ID NO: 922650 - DNA, 120 bp, Artificial Sequence
  ENSG00000273018_44 (sequence is synthesized)
tgcacagggccattcagaaactagaaacaaaatgcttgctcatctccctaggccactccttccgaggctttttgagacgaggtctcactgtcacccaggccggagtgcagtggcacaatc

SEQ ID NO: 922651 - DNA, 120 bp, Artificial Sequence
  ENSG00000273018_45 (sequence is synthesized)
aaggctcactgcaacctcaaccttctgggttcaagcgatcctcccacttcagcctttcaagtagctgggatgactacaggcatgggccaccacagccagctgattttttttttcttttta

SEQ ID NO: 922652 - DNA, 120 bp, Artificial Sequence
  ENSG00000273018_46 (sequence is synthesized)
gtagaaatgaggtctcgccatattgctcagactggtcttgaaccaacacatctttagctttttaaaagacagccttggccagccatggcagctcacacttgtaatcactgcactttcgga

SEQ ID NO: 922653 - DNA, 68 bp, Artificial Sequence
  ENSG00000273018_47 (sequence is synthesized)
agccatggcagctcacacttgtaatcactgcactttcggaagctgaggtgggcagatagcttgagccg

SEQ ID NO: 922654 - DNA, 88 bp, Artificial Sequence
  ENSG00000273018_48 (sequence is synthesized)
gccgtaaccaatttttgtttttcttgcaattacttttggcatctttgtcatgaagatcatttccaggtcctatgtccgcaatggtatt

SEQ ID NO: 922655 - DNA, 120 bp, Artificial Sequence
  ENSG00000273018_49 (sequence is synthesized)
catgaagatcatttccaggtcctatgtccgcaatggtatttcctaggttatcgtccaaggttttaatatgttttcattttagatttaagtttttaatcctgcctttgcctcccaaagtgc

SEQ ID NO: 922656 - DNA, 120 bp, Artificial Sequence
  ENSG00000273018_50 (sequence is synthesized)
taaccatgcctccaccgaaaagcctacagtatcgagacaaaactgggataggtatccctcttgcattccaatagtgccctgttttatacctgtcagggtatctatgacttgctgctacta

SEQ ID NO: 922657 - DNA, 120 bp, Artificial Sequence
  ENSG00000273018_51 (sequence is synthesized)
aacgtgctgggctgaccttcctctgatcacaggcaaggcagcctaaggttcccatcgtgagtttcaggaagggaaattcatggaggaagttcacctctggaagggttgtagatgagcatg

SEQ ID NO: 922658 - DNA, 120 bp, Artificial Sequence
  ENSG00000273018_52 (sequence is synthesized)
actaaacaagtttaaattcccaccagaagtgcataaacatccccttttctccacaaccttgccagcttctgttagtttttgaccttttaataatagtcattctgactggtgtgagatggt

SEQ ID NO: 922659 - DNA, 72 bp, Artificial Sequence
  ENSG00000273018_53 (sequence is synthesized)
gatttgcatttctctaatgattagtgagtttgagcatttttttcatagccttgttggccacatggatggggt

SEQ ID NO: 922660 - DNA, 120 bp, Artificial Sequence
  ENSG00000273018_54 (sequence is synthesized)
aaataatgtttcttggcctcttcagctaacttttaagtggattttgcaaatgaaaaccagtattactgagttttacatactcgaactgcccaaatgtttgctgtttaaacagccaaataa

SEQ ID NO: 922661 - DNA, 120 bp, Artificial Sequence
  ENSG00000273018_55 (sequence is synthesized)
tcaagttgccattagtaatttagtggagccaattgatggcttgtttgtattttataattttatctttatacatagtgatagatttaagtttagatagacatcattttggtatactggtac

SEQ ID NO: 922662 - DNA, 120 bp, Artificial Sequence
  ENSG00000273018_56 (sequence is synthesized)
tgtggtcattgtcaatgtttggatgtattacgattgttatagtgcaatcaaacttagataattttaattttaagcactgatttatttagatctttccttgtggaaaaataaggtttgcct

SEQ ID NO: 922663 - DNA, 120 bp, Artificial Sequence
  ENSG00000273018_57 (sequence is synthesized)
aaggctttttgcttttttatttattgtttcatttctttattagattaacttttgggaaacagtcttaaaattggagaaaatttccacattttaggaaaaacagcttcccccctgtgggcc

SEQ ID NO: 922664 - DNA, 120 bp, Artificial Sequence
  ENSG00000273018_58 (sequence is synthesized)
atttgagagtaaattgctgacattatgccatcacatctggtatgtgggtattcccacaagtcaggacattttatataactacttcataatcagaaagttaacatcaatacacttgatcat

SEQ ID NO: 922665 - DNA, 120 bp, Artificial Sequence
  ENSG00000273018_59 (sequence is synthesized)
gcttggtggggagggagatgactccttgtagctgatacttggcaaaagtgtcactgagaggcaagctaaatgtagttattttatcctgttagaatacaaattctaattaaaatagttaac

SEQ ID NO: 922666 - DNA, 120 bp, Artificial Sequence
  ENSG00000273018_60 (sequence is synthesized)
tttaagagtagtagtaattttattttgaagtctcatgcaagttgtctgatagagaactttcaggcagatcccaccattagcctgtaaacaaaaagtttggcaccagccacctgggaccaa

SEQ ID NO: 922667 - DNA, 120 bp, Artificial Sequence
  ENSG00000273018_61 (sequence is synthesized)
ataagaattcaattgtgcttgtccagatatgaacaaatatgtagtgagtatagagtttatcaataatcataacaaatattaaagatttccttggagtcaaagtaaaaaacaaaaaattgt

SEQ ID NO: 922668 - DNA, 120 bp, Artificial Sequence
  ENSG00000273018_62 (sequence is synthesized)
aatgttgtctagggatgacatgatatgctacctcctttttcctgaagttttattccattctgttgacaagatggagaaagcaagatcatgaaggtgtgcaaatgattcttacggcatggg

SEQ ID NO: 922669 - DNA, 120 bp, Artificial Sequence
  ENSG00000273018_63 (sequence is synthesized)
cgaggatttttcaatttattttttaaagtttccataccctttctttgtctttcttgctttttgtttttgccgttgtgtttatgtttgagatacaaccagtcattggtggcaggggcatag

SEQ ID NO: 922670 - DNA, 120 bp, Artificial Sequence
  ENSG00000273018_64 (sequence is synthesized)
agtggtcagtctgaaagggaggctctcttaagagctatgtgccttccacccagagggagacccagtagaaagaaaaacatcctgggaaatccagctaccatggccctcccagtggaggca

SEQ ID NO: 922671 - DNA, 120 bp, Artificial Sequence
  ENSG00000273018_65 (sequence is synthesized)
tcttacatttaggatacttcaggtatcctcagaaatgtattctgcaccccccggccccgcccatgctgagggaaggggagcagttgccaatatttgcaccatcttcacatgcacatgttg

SEQ ID NO: 922672 - DNA, 120 bp, Artificial Sequence
  ENSG00000273018_66 (sequence is synthesized)
caacaagagcttctgggaaggtaagcggcatcggagctagatcacgtttcacaattagtggtggttcttttccatgtttgttttgcactttaaaaaagagagaacacatgcaaatgaact

SEQ ID NO: 922673 - DNA, 120 bp, Artificial Sequence
  ENSG00000273018_67 (sequence is synthesized)
tgcttgtgtgtatttgatggctccaagggctataaattacaaacaaaacacatcccagacattaggagttcataagtatatttaatgaaattggtggttttaggaagtcaactttagttt

SEQ ID NO: 922674 - DNA, 120 bp, Artificial Sequence
  ENSG00000273018_68 (sequence is synthesized)
tgctttgtttgcatgtccactaatttttttattttgatattagtcttttttaaaaaattttacagtagtcattgaaagttatgtttctttgtttacttcattttttcctctaaatattca

SEQ ID NO: 922675 - DNA, 120 bp, Artificial Sequence
  ENSG00000273018_69 (sequence is synthesized)
agactgggacaaaagtataaatattatttatttcaggtagaatttttttggtgtagttttttaatatatacttgaaggaaatgtttcaccttatttttggtctttgtttattcatttaga

SEQ ID NO: 922676 - DNA, 120 bp, Artificial Sequence
  ENSG00000273018_70 (sequence is synthesized)
ccctgcaagttgattctcattaattgtcagattccactacactttcttcctcataggtagtaattaccagtgtaactaagcatttgtgttctgatatctgaggccagtaactattaatat

SEQ ID NO: 922677 - DNA, 120 bp, Artificial Sequence
  ENSG00000273018_71 (sequence is synthesized)
ctagttctcagagcatttggaaaggttatcttaaatggctacctaaattgaaatccttttcagaaaaaatataattgcaaataggtaggagtggcctaaattatctaatgtaataaagtc

SEQ ID NO: 922678 - DNA, 120 bp, Artificial Sequence
  ENSG00000273018_72 (sequence is synthesized)
agacaaaatgcatactttatagttcaagattttcggtatataaaatctgtcctttcctacctggacatgtcccattaaaaagtggaagattttaaataatttctttacagatgttttatt

SEQ ID NO: 922679 - DNA, 120 bp, Artificial Sequence
  ENSG00000273018_73 (sequence is synthesized)
taagcaggtagcacaatctactaatgttgtttgatctgtgtttgttatactggttgtaattaatttttttaattcatgaactagcggaaaatttattaaattaactattaaccacattca

SEQ ID NO: 922680 - DNA, 120 bp, Artificial Sequence
  ENSG00000273018_74 (sequence is synthesized)
ccttgtaaatgactgtataaaacttgttgacaatgcactgactttagaaagatgttaatgtgcataaatagagtgtaaataaaatagtgttgatgtactgaaatatgaactgtataaaaa

SEQ ID NO: 922681 - DNA, 120 bp, Artificial Sequence
  ENSG00000273018_75 (sequence is synthesized)
gtattagtaattgtatatggggtgtacctgtttatctgtaactgttatccaaacaaattaaatactgtggatgcctttatgtactgtttttcctcatacaagtaaacacagaaagtcaaa

SEQ ID NO: 922682 - DNA, 120 bp, Artificial Sequence
  ENSG00000273018_76 (sequence is synthesized)
tatagcttctcctctaggatttacacacaaggaaaatctgaatcaagatccagttttggaagtaacaaaagaaaagatcatcttcaagctctgagattcttttcttggcctattctgctg

SEQ ID NO: 922683 - DNA, 120 bp, Artificial Sequence
  ENSG00000285559_0 (sequence is synthesized)
ctgatttcaagatttattataaagctacagtcgtcaggacagtatgatattaacattaaaatagacaaatgcatcagtaggacagaaaaaagagcacagaaatagaaccacacaaatatg

SEQ ID NO: 922684 - DNA, 120 bp, Artificial Sequence
  ENSG00000285559_1 (sequence is synthesized)
aaaaactgattttttatacacgagaaaaggcaattcggtggtgaaagtaaagtcttttcagcaaataagactaaaacaatctgatacctttatatgaaaaaaatgaacttgtatccatac

SEQ ID NO: 922685 - DNA, 120 bp, Artificial Sequence
  ENSG00000285559_2 (sequence is synthesized)
ttgcaccatatacaaaatttaacttaaaatgaatcacagacctaaatgtaaaacataagactgtaacacttttagaggaaaatctttatgaccctaggttaggtaaagatttttcagata

SEQ ID NO: 922686 - DNA, 120 bp, Artificial Sequence
  ENSG00000285559_3 (sequence is synthesized)
ccacaccaaaagcataatccatgacagaataaaaataataaattagacttcatcaaaattaagaacttctctttgaaaggcactgttaataataaaataagccacagaggagaaaaattt

SEQ ID NO: 922687 - DNA, 120 bp, Artificial Sequence
  ENSG00000285559_4 (sequence is synthesized)
aaaaatttgccaattatatatctgaaaaagcacttgtacccaaattatatacaaagaactctcaaactcaacaatagtatactaacacaaatttttttcttttcttttcttctctttttt

SEQ ID NO: 922688 - DNA, 120 bp, Artificial Sequence
  ENSG00000285559_5 (sequence is synthesized)
tggtgtgatcatagctcactgtaacctcagactcttgggactcaagtgatattcctgcctcagcctcctaagtagctggaactacaggtacaggccaccacgcctggctatttgtgtgtg

SEQ ID NO: 922689 - DNA, 120 bp, Artificial Sequence
  ENSG00000285559_6 (sequence is synthesized)
tacaggccaccacgcctggctatttgtgtgtgtgtgtgtagaggcatggtcttgctatgttgcccaggtgtggtggcatgcacctatcgtccagctgaggtgggaggatcacttgagcac

SEQ ID NO: 922690 - DNA, 120 bp, Artificial Sequence
  ENSG00000285550_0 (sequence is synthesized)
gattcttctcagcacctccaaaaagcagcacagccttcctacacctctattttaacccagtgagatctgcattacacttctgacctctacaactgtcattaatcatcatatttattctac

SEQ ID NO: 922691 - DNA, 120 bp, Artificial Sequence
  ENSG00000285550_1 (sequence is synthesized)
ctcatccgattatgaaaaacttttcctggattgagtaaagagcagagtctctctctatctgctgagctgcctgaagctagacataaacacctctgtggccactaccactgagactgcact

SEQ ID NO: 922692 - DNA, 120 bp, Artificial Sequence
  ENSG00000285550_2 (sequence is synthesized)
gggtcagaactgaagccaacacagcacttggtctcacccaaagcccagtgtaaccactacctggctactgcttctgtttgctcaaggccctaggactctataatcagcaggcagaggagc

SEQ ID NO: 922693 - DNA, 120 bp, Artificial Sequence
  ENSG00000285550_3 (sequence is synthesized)
aagccatcaggcctgcgactcacccttcagggcaatgggttcccctttggcccagaacatgttgagaaatgccacccaagagccaaggcctagaatcagggaagtcaatagccctctttg

SEQ ID NO: 922694 - DNA, 120 bp, Artificial Sequence
  ENSG00000285550_4 (sequence is synthesized)
tgctctacccaatgtggccaagctggtgcctgaagccagcatatctcagagactcacccaaggcccatgactaactatgtaggtattgctgctggttcttcaaggcccaagggcattttt

SEQ ID NO: 922695 - DNA, 120 bp, Artificial Sequence
  ENSG00000285550_5 (sequence is synthesized)
gtcagcaggtgattaatcctgccagactggcttctttccttaaggtagcaagttctcatctggtctagggtatgtctagatatgttgttcaggagctagggcctggaatgggggactcat

SEQ ID NO: 922696 - DNA, 120 bp, Artificial Sequence
  ENSG00000285550_6 (sequence is synthesized)
gactcttcccagtgccctatcctaatatgactgacctggtaaccaagatgcaagacaaagtcccccttactcttctttccctcctcctctcctcaagtaaaataaaggagtcatttttgt

SEQ ID NO: 922697 - DNA, 120 bp, Artificial Sequence
  ENSG00000285553_0 (sequence is synthesized)
gcagtttctccatctgtcaaacgtgtctctcttagggctgtgaggattaaatgagtctacacggatgcagcccctggtaccataatgttctatcacaccttaaagaatggggcctcactt

SEQ ID NO: 922698 - DNA, 120 bp, Artificial Sequence
  ENSG00000285553_1 (sequence is synthesized)
ctctcaaaccttcccttccacatgccctgggtgaggagacatggaatcagtgactcaaaggacaagtggcaccattgccactatcactcaggaggtgaattgatgcaaaaataagacaga

SEQ ID NO: 922699 - DNA, 120 bp, Artificial Sequence
  ENSG00000285553_2 (sequence is synthesized)
tcagaagcaggtgatacgctgctattcataaacccgttcatccgaaaattgaatgcctctctccagacgtcacccctaatgggtagctgtacctgggcatgctcacccagcttttggatg

SEQ ID NO: 922700 - DNA, 120 bp, Artificial Sequence
  ENSG00000285553_3 (sequence is synthesized)
aaactcttcctccgagggtgacagggagtggagaaatgatgctggccacgggacaggcatggagagcctgcccttccaacttgcttctgtgagtgctcgtctggggatccctgcagcacc

SEQ ID NO: 922701 - DNA, 120 bp, Artificial Sequence
  ENSG00000285553_4 (sequence is synthesized)
tccgactcaccacgtccaggactcaatgcaccacctgcgtctcctgtgttctccagtgctgaaaacggcatcaccatcctaacacccaagcttctcagtcatttttgaatcatcttcttc

SEQ ID NO: 922702 - DNA, 120 bp, Artificial Sequence
  ENSG00000285553_5 (sequence is synthesized)
tctgcagcccatacttaatgaactcttcagtcttgctgattttaaggtgccaacttctcaggctttttcctcctctccattatcctggtgcaaacccttgagaatggcccttgagcccct

SEQ ID NO: 922703 - DNA, 120 bp, Artificial Sequence
  ENSG00000285553_6 (sequence is synthesized)
gacctaagccctagaaatagtgccatgagcaaacatctacactcgtttctttcaaaagacctttgctaagccatggctaacattttcatttccgtcatacctggactgctgtcgctggtc

SEQ ID NO: 922704 - DNA, 120 bp, Artificial Sequence
  ENSG00000285553_7 (sequence is synthesized)
acactgttgttctgactctctcaatcactccaaatatataaaagactcacttccacccagacacatcccccccatttgatacagtttggacctatttccctgcccaaatatcacgtcgaa

SEQ ID NO: 922705 - DNA, 120 bp, Artificial Sequence
  ENSG00000285553_8 (sequence is synthesized)
gggcctggtgggaggtgattggatcatggctgcggatttccccctcagtactgtcctcacgatagtgtatgagttcatctgagatctggtcatttaatagtgcgtagtatctgctcccta

SEQ ID NO: 922706 - DNA, 120 bp, Artificial Sequence
  ENSG00000285553_9 (sequence is synthesized)
atagtgcgtagtatctgctccctaatctcgctcctgctccaaccatgtaagacgggcctgcttctccttcgccttttgccacgattgtaagtttcctgaggcagaagcccaggagcagaa

SEQ ID NO: 922707 - DNA, 120 bp, Artificial Sequence
  ENSG00000285553_10 (sequence is synthesized)
cctgtacagcctgcagaaccatgagctcatcaaaccttgtttctttataaattacacagtctcaggtatttccttacaactgtgtgagaatgcactaatacacccctcaggaagtttccc

SEQ ID NO: 922708 - DNA, 120 bp, Artificial Sequence
  ENSG00000285553_11 (sequence is synthesized)
aggaagtttccctgtcctctagaagtgtaactatatctcagcttgggagggcaagcagggattaaggtcctataggccccaaatgcccataggcatgaatagcttttcttccagcattgg

SEQ ID NO: 922709 - DNA, 120 bp, Artificial Sequence
  ENSG00000285553_12 (sequence is synthesized)
aatagatgcagcagctgaagtggctcgcttctgttagggcgtggttgcactggagggccatgacgtaattactacacttcagaggcaggtgaagagctgaaactgacagaggaatgcagg

SEQ ID NO: 922710 - DNA, 120 bp, Artificial Sequence
  ENSG00000285553_13 (sequence is synthesized)
attcttatgtttgatctcatggtctctccagagtgtggacccaagagtagcgtggaaggtggagtggacagaagggggcctggcctgctctctgggcctggttggatttgaataaattac

SEQ ID NO: 922711 - DNA, 120 bp, Artificial Sequence
  ENSG00000285554_0 (sequence is synthesized)
acttcagacaccagtagccagttcaggggttggttccactacccctgcaggtttgataatttgctacaatgactcacagaactcaggaaagcactatacttatgataagttaaactttta

SEQ ID NO: 922712 - DNA, 120 bp, Artificial Sequence
  ENSG00000285554_1 (sequence is synthesized)
ttgcagcaaaagggtacaaatcagaaccagccaagagaagagatacagagggcaaagtctgggaagagctacacgggaagctttgggcaccttctcctgtggagttccagacatcactgc

SEQ ID NO: 922713 - DNA, 120 bp, Artificial Sequence
  ENSG00000285554_2 (sequence is synthesized)
ccctccctgctacgaggtgtggcagtgcttgcgagtgctgccaccaggaaagcttgcccgagtctttggtgtccagagcccttgctggagcttgaccacatgctgcctgcatgactgacc

SEQ ID NO: 922714 - DNA, 120 bp, Artificial Sequence
  ENSG00000285554_3 (sequence is synthesized)
tttgctctccagtccctatgggggctggaactgatatggcgtgtttcggagcccccattataaatcacatcatttgagcatctggtggccaaactcctcaggcaaacaatgacattccta

SEQ ID NO: 922715 - DNA, 120 bp, Artificial Sequence
  ENSG00000285554_4 (sequence is synthesized)
gcttcaggtcacatgttgctctggagaaccgagaagggtgagcagacaccaatcatgaccccaaacagcaagaggacagaagtctgcaggatgctcagcaggggcactccctgaacacgc

SEQ ID NO: 922716 - DNA, 120 bp, Artificial Sequence
  ENSG00000285554_5 (sequence is synthesized)
ctgctcccacagcatgtgcaaaggcttcacacttggattgagggttatacatttcttcatggacatccccaaacaacacagaacagagacaaggtttctggtccttttggaatgtccaca

SEQ ID NO: 922717 - DNA, 120 bp, Artificial Sequence
  ENSG00000285554_6 (sequence is synthesized)
ccattcccattcttcaaaatctgtcacacttccagatagttccagtgaacaatgaactctccccctatgcagtaacagttgattattcaatttaacactgaattatatattctctggaac

SEQ ID NO: 922718 - DNA, 120 bp, Artificial Sequence
  ENSG00000285554_7 (sequence is synthesized)
tgttctctaacaactatgaggcgttttcaacggtagttgaatggaaaaataccaaactgggagtaaaaagatctggcttccaggccaggcgcggtggctcatgcatgtaatcccagtact

SEQ ID NO: 922719 - DNA, 120 bp, Artificial Sequence
  ENSG00000285557_0 (sequence is synthesized)
caccatgttaggacacggtgagaagtcaacatgaaaaaccagaaatcgggccctcaccagaccctgaatctactggagccttgatcttgaacttcccagcccccagaactaaaatgcaat

SEQ ID NO: 922720 - DNA, 120 bp, Artificial Sequence
  ENSG00000285557_1 (sequence is synthesized)
tcttgacttgagatgaatcagttccccaatttatacttcattcgtggaaactgggtcttgggcaacatctcagcaattccttccaatctgaagttctctcatctgctggtaaccggtcca

SEQ ID NO: 922721 - DNA, 120 bp, Artificial Sequence
  ENSG00000285557_2 (sequence is synthesized)
cggttttatgggcaatagaattattttactgattcctggaatcatggctcctatacatctgcactctatgagcactttggaaattaaaggattgccagcttttccactttgggacaaaaa

SEQ ID NO: 922722 - DNA, 120 bp, Artificial Sequence
  ENSG00000285557_3 (sequence is synthesized)
acatttgtgctaaacagccgttctggatgctgggaagtgtaagatcaagatggtggcaggttcgactggtgagagttgcattctccagatggaagaaacattgtgtcctcatctggtgga

SEQ ID NO: 922723 - DNA, 120 bp, Artificial Sequence
  ENSG00000285557_4 (sequence is synthesized)
aggtggaaggttaaactgagaagctcttcagagacaattctggtaatatgccatttcaggcacgtctttgtgttttgcttttggatttttaatgaactagattacatctgaaaataccaa

SEQ ID NO: 922724 - DNA, 120 bp, Artificial Sequence
  ENSG00000285556_0 (sequence is synthesized)
caggacagggatgctgtttgctcagatctcatgtctataagaagattaatagtgctacgactaatgggatcatgattttaacaggcgattgcaaccagcttcagtagaagtgcatcatga

SEQ ID NO: 922725 - DNA, 120 bp, Artificial Sequence
  ENSG00000285556_1 (sequence is synthesized)
attttacttcatggagctgaactcaggttggtgagttgcctctagggcatcttctagactccacttagtgcaacttcagattcctcttcagtaaccatcgcattgttgaagcactgttgc

SEQ ID NO: 922726 - DNA, 120 bp, Artificial Sequence
  ENSG00000285556_2 (sequence is synthesized)
tacctggagtgctggcctagttctgccagcaatcccacctgctgctgctattcctcatcatctgtcctaaagaaagcaagtgtatttatcttcaaagcctgggcagatttatgttaactg

SEQ ID NO: 922727 - DNA, 120 bp, Artificial Sequence
  ENSG00000285556_3 (sequence is synthesized)
aggaaaacatagcagcaaacaccaggatctgtcctaagtgatgtcagagaaggaatatatttgtgtaaactgcactgatggaacaaatctttctggaaaatttggggcatgaacttggag

SEQ ID NO: 922728 - DNA, 120 bp, Artificial Sequence
  ENSG00000285556_4 (sequence is synthesized)
ttgaagattaatataattaagaaatatcatcagtatattccaggtgggaagaattaaaaaaacaagtgcagcaaatgtttactgcaagctgtctgaggaccagctgccgttctagcactg

SEQ ID NO: 922729 - DNA, 120 bp, Artificial Sequence
  ENSG00000285556_5 (sequence is synthesized)
ggaatacagtgtgaacaaggctgggtttatggagctgatgttcttttaggaagaagctgcccagaaaataggggcaacggagaacagaaagatgaaacaaactatcctggtaataatatc

SEQ ID NO: 922730 - DNA, 120 bp, Artificial Sequence
  ENSG00000285556_6 (sequence is synthesized)
atgtgaatacctagatcgagctattcttgaagaggagacatgctcaggctttttagttacaaaagccaacacattcccctttctgactcaaaccagttcaaattcttcgtcacaagagtc

SEQ ID NO: 922731 - DNA, 120 bp, Artificial Sequence
  ENSG00000279298_0 (sequence is synthesized)
aattagttgcatttcaacatattagaaatgaacaattgaaaaggaaactttagaagttccatttacaataatatcaaaaagaataaaatacttaggcataaatttaaccaagaaggtgca

SEQ ID NO: 922732 - DNA, 120 bp, Artificial Sequence
  ENSG00000279298_1 (sequence is synthesized)
cataaatttaaccaagaaggtgcaggatttatacattgaaaaccacgaactactactgaaaaaaaatttaagaaaatctaaataaatgaaaaaacatggctgggcatggtggctcacacc

SEQ ID NO: 922733 - DNA, 120 bp, Artificial Sequence
  ENSG00000279298_2 (sequence is synthesized)
aaaaaaaaaaggaaagaaaagaaaagacatttaatgttcatggattcaaacacataatattgtgaagatggctatattcccccagataaagctacagattcaacaacatttttgaagaaa

SEQ ID NO: 922734 - DNA, 120 bp, Artificial Sequence
  ENSG00000279298_3 (sequence is synthesized)
gaaatggaaaagcatatgctaaaatgcatatgaaattgcaaaggacccaaaaatttaaaaagctcatgcttcctgatttcaaaacttaccagaaaggtacaataataaaaaaataaaata

SEQ ID NO: 922735 - DNA, 120 bp, Artificial Sequence
  ENSG00000279298_4 (sequence is synthesized)
aaataactgtggtattgatacaaagacatacagataagtggaatagacttgagagtctagaaatcaaattatgcatctatagtcaagatcattcaatggagaaagaagtttcctcagcaa

SEQ ID NO: 922736 - DNA, 120 bp, Artificial Sequence
  ENSG00000279298_5 (sequence is synthesized)
atggtactgggagaactggatatctacatgcaaaagaatgaaactgaggcctggtgcggtagctcatgcctgtaatttcaacactttgggaggccatcgtgggtagatcacttgagctca

SEQ ID NO: 922737 - DNA, 74 bp, Artificial Sequence
  ENSG00000279298_6 (sequence is synthesized)
acactttgggaggccatcgtgggtagatcacttgagctcaggaattctggacccaactgggtacatcgtggctt

SEQ ID NO: 922738 - DNA, 120 bp, Artificial Sequence
  ENSG00000261193_0 (sequence is synthesized)
actaggtgactggcctcggttcatccatcacactcacggctgctggatgctgatggtctcagatccaaccccccggggaagatgggccgggcaatccatcatccatccgagccttcgagc

SEQ ID NO: 922739 - DNA, 120 bp, Artificial Sequence
  ENSG00000261193_1 (sequence is synthesized)
cggatgcggcgaaggtctagtctgactccagggaccagagatggaggggagcttgccacagcccccatgccattctgctgaggggcacccctgccccgtgccaggctgacgtccacaccg

SEQ ID NO: 922740 - DNA, 120 bp, Artificial Sequence
  ENSG00000261193_2 (sequence is synthesized)
ccggctgctgggggagccaggcaggcacccgcctatgtgggagagcagaggcgggcacctcccctggattcatactcctgctcttcaagaaaaattcctaacaattcccggtaaaggagg

SEQ ID NO: 922741 - DNA, 83 bp, Artificial Sequence
  ENSG00000261193_3 (sequence is synthesized)
ctcttcaagaaaaattcctaacaattcccggtaaaggaggtgtcatcggaaatgacagcttttttttcttttgcggtggtata

SEQ ID NO: 922742 - DNA, 89 bp, Artificial Sequence
  ENSG00000264880_0 (sequence is synthesized)
gagaatatgccatactgttttttttttcacttgaaagagtatctgccattgaagattggatatcttgttgtgataaaggcatgacatta

SEQ ID NO: 922743 - DNA, 120 bp, Artificial Sequence
  ENSG00000264880_1 (sequence is synthesized)
tgaagattggatatcttgttgtgataaaggcatgacattatacaaaaattgataaacgacagaaaatcggccaacaaaaatgaaagtgtggaaaataaatgaaagtgtcaacaccgaaag

SEQ ID NO: 922744 - DNA, 120 bp, Artificial Sequence
  ENSG00000264880_2 (sequence is synthesized)
attgcgagaatgctgacacaactaccatccaagagatttcatatgtgcagtcaggggaacttacggaagacatatttacaacttaaatgaagaagctgattgcagggaaaagacgaatgt

SEQ ID NO: 922745 - DNA, 120 bp, Artificial Sequence
  ENSG00000264880_3 (sequence is synthesized)
tttcccagaagatgtgatgctgagaaaaaaaattacattgaagaaattctccaagatgtttaaagacaatgaacgcacaaacaataaaatgttggacaaataatcgaatttataaagaag

SEQ ID NO: 922746 - DNA, 120 bp, Artificial Sequence
  ENSG00000235663_0 (sequence is synthesized)
cgggctctaaagggatgggtctccagcactattttcaacctgccccattggggagaatgaggacatgagacaccaagaagatgaagttttcaggagcagaggagaaactttacaccaaca

SEQ ID NO: 922747 - DNA, 120 bp, Artificial Sequence
  ENSG00000235663_1 (sequence is synthesized)
ggggagtgagaggagggtttagacacgggtagggcctcttggccccttggtgcagccccgctgagccatctcctcctttggctgggtgactcctttctgctgccttgacaactcctggag

SEQ ID NO: 922748 - DNA, 120 bp, Artificial Sequence
  ENSG00000235663_2 (sequence is synthesized)
gagaaacagatggggcctctgggctcctcccagccctgtagggtggggctcctgccctccttcttgaagtttacctgttgctgccacaagttctgctcccttcgtctttcctttgaatcc

SEQ ID NO: 922749 - DNA, 120 bp, Artificial Sequence
  ENSG00000273906_0 (sequence is synthesized)
gtgctaagattacagttgtgagcaactatactccactaaagcagatagaattataatgcttggagcccaatatgcttatattttcctattttctgagtttggatttgggtctggaaaggt

SEQ ID NO: 922750 - DNA, 120 bp, Artificial Sequence
  ENSG00000273906_1 (sequence is synthesized)
ctgagtttggatttgggtctggaaaggtatctttatcagttaggatgtctagtaacttgcttgcttttttttcctgttaccttttctcccttaaatatttttttttttttttttgagaca

SEQ ID NO: 922751 - DNA, 120 bp, Artificial Sequence
  ENSG00000273906_2 (sequence is synthesized)
aggctggattgcagttgcgcaatcatgatctcggctgactgcaacctttaccttctggattcaatcaattctcctgcctcagcttcctgagtagatgggactacaggcgggcaccaccat

SEQ ID NO: 922752 - DNA, 79 bp, Artificial Sequence
  ENSG00000273906_3 (sequence is synthesized)
accgtgttggtcaggctggtctcaaactgctgatctcatgatccacttgcctcggcggctttccctcttaaattttagg

SEQ ID NO: 922753 - DNA, 120 bp, Artificial Sequence
  ENSG00000273906_4 (sequence is synthesized)
catgagccaccacgcccggctttccctcttaaattttaggactataactgtatacttttattttttaaattaccatatagtaaaattggctctttggttgtgtagctttatgtgttttga

SEQ ID NO: 922754 - DNA, 120 bp, Artificial Sequence
  ENSG00000273906_5 (sequence is synthesized)
tgtgtgtatagatggatgtcataatcaggagagagaacattcccctaagcccagagatgtccatggtgctatcctccacagcatgtttctcggcagtcactctgcccccagccccaaaca

SEQ ID NO: 922755 - DNA, 120 bp, Artificial Sequence
  ENSG00000273906_6 (sequence is synthesized)
tggggcacctgcctgtaggtgccacagaaggcaacatcatggcctgttaaatacagtaagacattcttcttcaaagggttaacttgttgaactttccttgtcctttgttccctgctttca

SEQ ID NO: 922756 - DNA, 120 bp, Artificial Sequence
  ENSG00000273906_7 (sequence is synthesized)
aggccagactcccttactctctgtgttcctttgccctgggaaacaaccttcctcttggtctttatctatagagtccacattccacatctgctcctcactctgtaaatcatccctccggtc

SEQ ID NO: 922757 - DNA, 120 bp, Artificial Sequence
  ENSG00000273906_8 (sequence is synthesized)
gccaattgggttcagcttagattgtgcagtccaactctagccaacagatactggacatggcagtaggagcccaatgaattaaagataaagtgactgctttcctttgttcagagtgctttc

SEQ ID NO: 922758 - DNA, 120 bp, Artificial Sequence
  ENSG00000273906_9 (sequence is synthesized)
atggtgaccaaactaatgagcagcacccttctgcagaggtaaactttgccttgctgagaaaccaattgttggcgtgtttatttcatttatgactttgagctttatttctaacatggccca

SEQ ID NO: 922759 - DNA, 120 bp, Artificial Sequence
  ENSG00000273906_10 (sequence is synthesized)
aagtaatcctcttttcttgaacacatggtagaatgccctaggtgaatccctccagtcttccagtaccatccttgactcctctctctgatgacacatgaactttatgcttttgcacacttc

SEQ ID NO: 922760 - DNA, 120 bp, Artificial Sequence
  ENSG00000273906_11 (sequence is synthesized)
aggcaacaccaaaagaaaggaaaagaacagcttagcttcttaatgtgtgtaagaaaccacagtgaaaaaaaatcaggtgtgttgttgaggctgctaaaagctttccttttttttctgtgc

SEQ ID NO: 922761 - DNA, 120 bp, Artificial Sequence
  ENSG00000273906_12 (sequence is synthesized)
cagttctcgctgcctcattggttgagatgggatgtcttttttgatgtcctctttagagagtgttatcctcacctttttgcatagtcctaccaaaagacacctcacatgcaaagtgtaaca

SEQ ID NO: 922762 - DNA, 120 bp, Artificial Sequence
  ENSG00000273906_13 (sequence is synthesized)
gaaaattacagtcatgactttagttttaaaaacaggacgtatattcatgaagaatgtttgctgttttcccagtgggttaatcatatgaatataaaacagactaaaaatatcaagttgttt

SEQ ID NO: 922763 - DNA, 120 bp, Artificial Sequence
  ENSG00000273906_14 (sequence is synthesized)
ttgcatttatttattgtagaaataaaatggattgctacctctgagcttctgagaagctgttaacctgtgttttactttgggtcataatgtcgctttctgtgatctcatatgaagtgacgt

SEQ ID NO: 922764 - DNA, 120 bp, Artificial Sequence
  ENSG00000273906_15 (sequence is synthesized)
tttctagaataatccttattctggtatttcggggtcttttattctgcctgaagtggttgtgtgaagtcacagaatatgtgcatgtcctcctatgtagagttaaagggctgaaagagtggc

SEQ ID NO: 922765 - DNA, 120 bp, Artificial Sequence
  ENSG00000273906_16 (sequence is synthesized)
ctcaagccttcccctccctcccaggtgtgaaaatttggatttcaaggtctgggaggccatgtttttttcagaccggttaaggatgatcattttatgttaaataaacattgggataaactt

SEQ ID NO: 922766 - DNA, 120 bp, Artificial Sequence
  ENSG00000273901_0 (sequence is synthesized)
cactcactcggaggaggcagctcatcttgcccagggccccgcagcgccccacatagttgactaagcccatgttgccttctgtggagccgtagacttcccagatccgaataggaccgaagc

SEQ ID NO: 922767 - DNA, 120 bp, Artificial Sequence
  ENSG00000273901_1 (sequence is synthesized)
gctgctggaaggtctcccacacatcagcccgtagtccattgcccattgccaggcggactgtatgtgtccggtcctctggttgctacaggaatgtccccagaagggtgaggaggaggtgct

SEQ ID NO: 922768 - DNA, 120 bp, Artificial Sequence
  ENSG00000273901_2 (sequence is synthesized)
gggtgttatcctgggtccttaccttgggagttacctggaaggtgatgggggacctctacctaagggatctacctgggttacttacatgagagtagttactggagtcttaaatagagggtt

SEQ ID NO: 922769 - DNA, 120 bp, Artificial Sequence
  ENSG00000273901_3 (sequence is synthesized)
acctgcaggggcgacctcagagctttgcctgggggacgttaccagaggtgactggaggcctcatctggggtctcacctaagagtagttacctagaactttaatttaatggaaatttaatt

SEQ ID NO: 922770 - DNA, 120 bp, Artificial Sequence
  ENSG00000273901_4 (sequence is synthesized)
ttaattaattaatttttaatggaaattctcatgataggggtaggggctattatccctgttttccaaatgaggacactgaggctcaaggtagcacagctatcaaagaaaccattattggaa

SEQ ID NO: 922771 - DNA, 120 bp, Artificial Sequence
  ENSG00000129816_0 (sequence is synthesized)
tgtctgtcagagctgtcagcctgcttaagcagagtaaaatggtacaggcagtgcagcctggtagcgagaaaaaaggctgcctgtgaaatcccactgtgggaccataagtggggacctcag

SEQ ID NO: 922772 - DNA, 120 bp, Artificial Sequence
  ENSG00000129816_1 (sequence is synthesized)
ggccccttcatggcatctccatggccatgtcatgctggagaaggaggcgtttcaagaatgtgagctgatcgctggaaactgctcatctgactccagtctcaaaagaggctatgtgcaaga

SEQ ID NO: 922773 - DNA, 120 bp, Artificial Sequence
  ENSG00000129816_2 (sequence is synthesized)
atcgggtgaagttgtgagaccccatccacccctcacaagattgtatccccaccctgtctgaccttactgctgctcaaactatctgtccaaggatgaaaacccaggacaaaggaggagtaa

SEQ ID NO: 922774 - DNA, 120 bp, Artificial Sequence
  ENSG00000129816_3 (sequence is synthesized)
acagagaagacagacgagaagacaccgctgacacttctccacggaggtctccttttccaccaagatgcagatgcttcttgcaaggactatcctgtgaatcccacagagaagacaggtgtg

SEQ ID NO: 922775 - DNA, 120 bp, Artificial Sequence
  ENSG00000129816_4 (sequence is synthesized)
gttccaatgccggtgcacctccagggaattctccttttctaccaagctccaggccttctgccatgatcatgagactatttgtggatttcacagagaagataggtgaaggtacagcatggc

SEQ ID NO: 922776 - DNA, 120 bp, Artificial Sequence
  ENSG00000129816_5 (sequence is synthesized)
atccacccctcaccagaggggtatccccacccctatctgaccttattaccttattgctgttcaaagtctctatcccagactgaaatcccaagacaatggagaagttccccctgatgatgt

SEQ ID NO: 922777 - DNA, 120 bp, Artificial Sequence
  ENSG00000129816_6 (sequence is synthesized)
gaagcaccaactcctctgggaatcaaattcgaggtaaatttaataggcccggtagagatgaatgatagtgtctctccttggattggctgaaagacaattaaacactggtatatttctgtt

SEQ ID NO: 922778 - DNA, 120 bp, Artificial Sequence
  ENSG00000248668_0 (sequence is synthesized)
aggaacgcgtcgccgcgtgtccgtgaccagggcaccgcgccacggatgccagatcccaggctggagagagcgggttgccccagatccgcgggcagaggcgcagagccgaagcccggagga

SEQ ID NO: 922779 - DNA, 120 bp, Artificial Sequence
  ENSG00000248668_1 (sequence is synthesized)
gaggagtttgagagccgccatcttcgggcggtgaggcaggaggaggctgcgggttggagcgcgcgtttgagcgtcggtgcgcgactgcgaaggaaacccgggcgggctggaggctcgaca

SEQ ID NO: 922780 - DNA, 120 bp, Artificial Sequence
  ENSG00000248668_2 (sequence is synthesized)
ccggcctttcgagccgcacgccaccggcgcgctgctggctgctgcttttaaaagaagtgaggctgggcggggccccggcggggagaagaggctctgtgcagccggggcggatcgcgggga

SEQ ID NO: 922781 - DNA, 120 bp, Artificial Sequence
  ENSG00000248668_3 (sequence is synthesized)
agttcctctcagcgcctcaggtgtctgggcgtgtgcagctgtgttggcgcacacttgccgctacagcccttctgtcagccctttagcttcgatggggcgctggtggccgcctccccctag

SEQ ID NO: 922782 - DNA, 120 bp, Artificial Sequence
  ENSG00000248668_4 (sequence is synthesized)
agaccctcagagtccctatccaagggcgggtgccaggagggaagccgacgagcgccaaagggctcgggagcgctgccaggagtcctcccgccccttctcagcctctccgcgcgcttcttt

SEQ ID NO: 922783 - DNA, 120 bp, Artificial Sequence
  ENSG00000248668_5 (sequence is synthesized)
agggccctccggccgcgggaggatctcccgccaagcttgttgcttttccaagttagtgcctggcgtgtgtgtgggctgcataggggcacccctcgaggcccccttctcttctcccgcctg

SEQ ID NO: 922784 - DNA, 120 bp, Artificial Sequence
  ENSG00000248668_6 (sequence is synthesized)
gactgcgttcacgtttctaacatttctcagccccttctccccacatctggccttggcttacatagagtaagtttgctgtgagcacttgcctcgaactgtcggtcaagaggtgtgagcaac

SEQ ID NO: 922785 - DNA, 120 bp, Artificial Sequence
  ENSG00000248668_7 (sequence is synthesized)
aaggcttgcagaggaacaagattaagactggacctctgtgacctgagtttagcacaccttttcttccccatcatccaagtttgcgaatttcgggctctttctcgcactggagtcccagca

SEQ ID NO: 922786 - DNA, 120 bp, Artificial Sequence
  ENSG00000248668_8 (sequence is synthesized)
agtatattgctttaaccttaggcaagttagataacttccctaagcctcagtgtcctcatctgcaaattaggattgcttgtgatacaacgtcataacgtttctatgagttaattcatgcaa

SEQ ID NO: 922787 - DNA, 120 bp, Artificial Sequence
  ENSG00000248668_9 (sequence is synthesized)
agtttatggccttattatgaggagtcaataaatgttaggcattattataagtttattccattgtagcagttcattgacatggcacgtacatattcgccaagccttgtcttttgaccaact

SEQ ID NO: 922788 - DNA, 120 bp, Artificial Sequence
  ENSG00000248668_10 (sequence is synthesized)
ccttgaggacatgagccacgactgatttctccagaactgtctttgcacttagcagagtggaaagaccaagtggaagctcaatagcattttatttgattaaggcctgaccaagttctgaga

SEQ ID NO: 922789 - DNA, 120 bp, Artificial Sequence
  ENSG00000248668_11 (sequence is synthesized)
atgtgatgttagttttgaaccaaagcaaagcacacaaaaattaaatgagatcttagcttccttagcaaatacagtaaggtaatgaacagtgaagatgcagttcaaagtttgtccataaaa

SEQ ID NO: 922790 - DNA, 120 bp, Artificial Sequence
  ENSG00000248668_12 (sequence is synthesized)
tcatttgccctttcatggtattcttttaactctgaacttttttttttcctgtaaatattataattttagtcaaaatcagttaaggagtaagataccaagttagactattcaattacactg

SEQ ID NO: 922791 - DNA, 120 bp, Artificial Sequence
  ENSG00000248668_13 (sequence is synthesized)
gagaaattaacttattgctagttggtatttcaacacattttaagaagttggattggggggaaattcaagtactgtaactaaagtcccataactagtgataatttagcatatagcagctgt

SEQ ID NO: 922792 - DNA, 120 bp, Artificial Sequence
  ENSG00000248668_14 (sequence is synthesized)
tgtacctttaacttacacaatgtgaaaaaaactagcattccaattgagtctgcttttccacttttgcccattgcgattgggtctgcttttccacttttgcccttccacagggcacatgaa

SEQ ID NO: 922793 - DNA, 120 bp, Artificial Sequence
  ENSG00000248668_15 (sequence is synthesized)
atggaaaaactgcattggcaactttgccggtggtcatatgactgactcttggctggtctcactttgttgctcttggctgaggaagacacattttaaatgttgcatgctatgtgactaagt

SEQ ID NO: 922794 - DNA, 120 bp, Artificial Sequence
  ENSG00000248668_16 (sequence is synthesized)
ctcctgagaaaatcaccctaattactgtatggtcaaaacacactgtactgtatttttgatgactgtgacttcattttatactttttaaataatgtgcaagtctcttcaacttgaataaat

SEQ ID NO: 922795 - DNA, 120 bp, Artificial Sequence
  ENSG00000272050_0 (sequence is synthesized)
cttgtggaggcgtccagggtccctgcgtctgggaaggcagcaggctgaagcccctggtctgtggtggacttgggaccccacagacggttccgcagcaggttcaggcctgtgcaggagagg

SEQ ID NO: 922796 - DNA, 120 bp, Artificial Sequence
  ENSG00000272050_1 (sequence is synthesized)
gtgcagcgcggcaggctggggtgggggtcggctgccattggggtagggagctaggcgaccttccgttacccctttaccagctcccagcccctcctcgccagcttcccaccagatgctccc

SEQ ID NO: 922797 - DNA, 120 bp, Artificial Sequence
  ENSG00000272050_2 (sequence is synthesized)
tcctttcctgtcctcagaagcctggttgctgcttgccctgtgtggactcccctgccttctgctctcccggcactctgggtctccgcgagggtctctctttgaccccacacgtgcagactt

SEQ ID NO: 922798 - DNA, 120 bp, Artificial Sequence
  ENSG00000272050_3 (sequence is synthesized)
gtggatggcagtgcactccacgaaggggtggagaggtgccggggcctcggtgcgggcgagagggcgcagtgcagtccaagcggctgcagagggctctagcgcagcaaagctggttggacc

SEQ ID NO: 922799 - DNA, 120 bp, Artificial Sequence
  ENSG00000272050_4 (sequence is synthesized)
caagctctgacccctctgccctcaaagcccgggttaccgagccctcatgagcaccaagaacgaagagaagtaaaaagggacacttgtgacctgctgggggctgagccaccgctaacccca

SEQ ID NO: 922800 - DNA, 120 bp, Artificial Sequence
  ENSG00000272050_5 (sequence is synthesized)
agaaaagtctagagaacaagaaaagaaccacagcaaacctgggaccctgcaggacgaatcggggagggattcgtgctttttacttgcaataaaatctgtaaagttcttgaataggaaaca

SEQ ID NO: 922801 - DNA, 120 bp, Artificial Sequence
  ENSG00000272056_0 (sequence is synthesized)
tgggcaggtgaaagagtggagggcaggtgtcgatatgctgagatcagggtcatacagaaacatagttttcaaaggtacccaaagtcctgtctgtacattctgtacagaaaaaagacggat

SEQ ID NO: 922802 - DNA, 120 bp, Artificial Sequence
  ENSG00000272056_1 (sequence is synthesized)
gaaagtatggttcagagctctaagagcaaattccagaagtagtggaggtgctgtctgatccaggactgtgtggcaggagtaagaatggggctggcacctgctatgggtagggtggttctc

SEQ ID NO: 922803 - DNA, 120 bp, Artificial Sequence
  ENSG00000272056_2 (sequence is synthesized)
agcagaaggcgaagaaggtggtggccccacggccctccacgaaacgatgaacaaaggataacacaaactgcgtctctgtcatctgaagagcagaggaggaagagggaggggcaacatgcc

SEQ ID NO: 922804 - DNA, 120 bp, Artificial Sequence
  ENSG00000272056_3 (sequence is synthesized)
attgtcagaactgagctcctactgggaccaccaggaactgacctcacacccttatcacctttaccaacttccctccctgtgacactttctatatgaaaagtggctccttctaggcttcct

SEQ ID NO: 922805 - DNA, 120 bp, Artificial Sequence
  ENSG00000272056_4 (sequence is synthesized)
gaggcaggggctcatcttggactctagctaacactggagaaaaagctgatacttaaacctgttgtcccacctgcttcatacttgtatcaaggaaaaaaaaacgctttactttcctctcta

SEQ ID NO: 922806 - DNA, 120 bp, Artificial Sequence
  ENSG00000272057_0 (sequence is synthesized)
ccgggctggcggcgggcggggactgcggaggaggcagcttgcgccggggctggggcctgcttcgggggactagcggcccgggaggtatggaggtgccgctccggggggggcgaaagaaac

SEQ ID NO: 922807 - DNA, 120 bp, Artificial Sequence
  ENSG00000272057_1 (sequence is synthesized)
agcctgtcccccagggtttccaggggcaacggtggcccgtgtccctggaggacatgcgccagggcagcagggagtggtccccgcaggctcccaggctggggccggccgccttctggggcg

SEQ ID NO: 922808 - DNA, 120 bp, Artificial Sequence
  ENSG00000272057_2 (sequence is synthesized)
ctcagacctgtctgctgcagtttgcaaacagtacgcccgaattcttttcattgtaaaaaatttctattaaaaataactcgtaaagcctatcatctcttttaaataaaggggaagaaagag

SEQ ID NO: 922809 - DNA, 120 bp, Artificial Sequence
  ENSG00000272054_0 (sequence is synthesized)
catacctagaaaaccctaaagactcatccaaaaagatcctagatctgataaataaatccagcaaagtttcaggatacaaaatcaatgtgcgcaaaccagtagcattgctatacaccaaca

SEQ ID NO: 922810 - DNA, 120 bp, Artificial Sequence
  ENSG00000272054_1 (sequence is synthesized)
gcaaccaagctgagaatcaaatcaattactctaccccccttacaacacctgccaaaaaaaaaaaaaataataatacttaggaatacacctaatcaaggaggtgaaagatctctaaaagga

SEQ ID NO: 922811 - DNA, 89 bp, Artificial Sequence
  ENSG00000272054_2 (sequence is synthesized)
tctctaaccacagacacacacaaatggaaacgcatcccatgttcatggatgggtagaatcgatattgtgaaaatgaccatactgccaaa

SEQ ID NO: 922812 - DNA, 120 bp, Artificial Sequence
  ENSG00000272054_3 (sequence is synthesized)
atttaatgtaattcccatcaaaatgccatcatcattcttcacagaactaggaaaaaaaatcctgaaattcatatggaacaaaataagagcctgcatagccaagcaagactaaacaaaaag

SEQ ID NO: 922813 - DNA, 120 bp, Artificial Sequence
  ENSG00000272054_4 (sequence is synthesized)
aacaaatctagaggcatctcattacctgacttcaaactatactactaggctattgttaccaaaatagcatggtacttgtacaaaaacaggcacgtagaccaatggaacagaatagagaac

SEQ ID NO: 922814 - DNA, 120 bp, Artificial Sequence
  ENSG00000272054_5 (sequence is synthesized)
ccagaaataaagccaaatacttacaaccatctgatctttgacaaagtaaacaaaaacaaagtggggaaaggacaccctattgaaccattggtgctgggataactggcaagccacatgtag

SEQ ID NO: 922815 - DNA, 120 bp, Artificial Sequence
  ENSG00000272054_6 (sequence is synthesized)
gagaattaaactggatcctcatttctcaccttatgcagaaaactcaagatggatcgaagacttaaagataagacctgaaactgtaaaaattctagaatataacattggaaaaactcttct

SEQ ID NO: 922816 - DNA, 120 bp, Artificial Sequence
  ENSG00000272054_7 (sequence is synthesized)
agacattggcttaagtagagttcatgaccaagaacctaaatgcaaatgcaacaaaaacaaatagatgggacttaattaagctaaaaagcgtctgcatagcaaaataaataatcagcagag

SEQ ID NO: 922817 - DNA, 120 bp, Artificial Sequence
  ENSG00000272054_8 (sequence is synthesized)
taaatagacaacccatagagtgggagaaaatcttcgtaaactatgcatctgagaaaggactaatgtccagaatctataaggaactcaaaaaagtcagcaagaaaaaaacaatcccatcaa

SEQ ID NO: 922818 - DNA, 120 bp, Artificial Sequence
  ENSG00000272054_9 (sequence is synthesized)
aaagtgtgttaaggatatgaacagacaattctcaaaagatatacaaatggtcaagaaacatatgaagaaatgctcaacatccctgattatcagggaaatgcaaatcaaagccacagtgca

SEQ ID NO: 922819 - DNA, 120 bp, Artificial Sequence
  ENSG00000272054_10 (sequence is synthesized)
tcaaagccacagtgcaataccaccttactcctgcaagaatggccgtaatttaaaaataaaaaaaatttcagatgttggcatggatgtggtaataagggaacacttctacattgctggtgg

SEQ ID NO: 922820 - DNA, 120 bp, Artificial Sequence
  ENSG00000272054_11 (sequence is synthesized)
aaccactatggtaaacagtatggagagtccttaaagaactgaaagtagaactatcatttgatctagcaatcccaccactgggtactacccagaggaaaataagtcattatataaaaaaga

SEQ ID NO: 922821 - DNA, 120 bp, Artificial Sequence
  ENSG00000272054_12 (sequence is synthesized)
caaacacacagatttatagtagcacaatctgcaattgcaaaaatatggaaccaacctaaatgcccatcaactaatgagtggataaagaaaatgtggtatacatataccatggaatgctac

SEQ ID NO: 922822 - DNA, 120 bp, Artificial Sequence
  ENSG00000272054_13 (sequence is synthesized)
tcatccataaaaaggagagaaataatggcattcgcagcaacctgaatacagctggagaccattattctaagcgaagtaattcaggaatggaaaaccaaacattctatgttctcagttata

SEQ ID NO: 922823 - DNA, 120 bp, Artificial Sequence
  ENSG00000272054_14 (sequence is synthesized)
aatgggagctaagcaatgaggatgcaaaggcttaagaatgatataatggactctggggacttggggggaagagtgggaggcagtgggggataagagtacacattgggtgcagtgtactgc

SEQ ID NO: 922824 - DNA, 120 bp, Artificial Sequence
  ENSG00000272054_15 (sequence is synthesized)
aacaactgaaataatgataacaaatttttaaaaagtgaatgaaaagatgatccagagatatctgaatgcgagaaacaattcaaaatgtggaaaataatttccacttaacatctttcttaa

SEQ ID NO: 922825 - DNA, 120 bp, Artificial Sequence
  ENSG00000272054_16 (sequence is synthesized)
aaagaaccccccccacccctgaattttattaatcaaatttaggagagttcatttcccaaaatgataatgacacctttcacatggacactgcttttaaaagatattaaatgtattttctta

SEQ ID NO: 922826 - DNA, 120 bp, Artificial Sequence
  ENSG00000272054_17 (sequence is synthesized)
ccttgaaatgagccagcaaagtcaaaatcatctgtaccttttctcttgcttttcttagtactgactttggagtggacttcaagttctgttacacgaaaaaatttgctaataagcaattta

SEQ ID NO: 922827 - DNA, 120 bp, Artificial Sequence
  ENSG00000272054_18 (sequence is synthesized)
aaaacaataagactggaaaatattactccaagatatgctaaaatctttattctgatggtaaggcactatactgctattccatgtgggttttgtaattccactagcataggcttgaggaca

SEQ ID NO: 922828 - DNA, 120 bp, Artificial Sequence
  ENSG00000272054_19 (sequence is synthesized)
gactgagaaaaagactctaagaattggcacagttctaatattttgtgcaagtacaaaattttctaaatagcttcattaataagaccaaataatataaaaccccttaaaacaagaaacttc

SEQ ID NO: 922829 - DNA, 120 bp, Artificial Sequence
  ENSG00000272054_20 (sequence is synthesized)
tgctgtggttcagaataagtaagaagaatgttgggcaggcatgtgcatgctggaggtatgtgaaaggacagaaaggtcagacaacagtctagagacaattctgggtgttccttgctaatt

SEQ ID NO: 922830 - DNA, 120 bp, Artificial Sequence
  ENSG00000272054_21 (sequence is synthesized)
tacaagataaaatattcaccttcatctatgctgggctatgatgaatactgattaacttttataaactgctaattactatcaaaaaatggcagcatttcagctcaacatgtattgtacaga

SEQ ID NO: 922831 - DNA, 120 bp, Artificial Sequence
  ENSG00000272054_22 (sequence is synthesized)
gaagctagctgctggttaaagtaaaagtccaaagctcaaaaagctgcttaaaagaaaacacacataacacacaataaaaacccttcagctccaaacgagaagggaaaaggtccttttaag

SEQ ID NO: 922832 - DNA, 120 bp, Artificial Sequence
  ENSG00000272054_23 (sequence is synthesized)
tttctggctgacatgagtattaatttgaatacagggctatattaaaaacctttagcagaaaaacaaacttaaggctaaggaagtgaggaagacacagtttatgtcttattttaaaaaatg

SEQ ID NO: 922833 - DNA, 120 bp, Artificial Sequence
  ENSG00000272054_24 (sequence is synthesized)
cttacctggaacgctctcactttcatcatctaacacatccatgaatgttcctccatcttcatcaacttcagcaaattcttcatcatccatacttcctaaagaaacttcatcgtcatccag

SEQ ID NO: 922834 - DNA, 120 bp, Artificial Sequence
  ENSG00000272054_25 (sequence is synthesized)
gttaccaagttcatcatcactaccttctgaatcttcatctaatgtgttatccttagctccttttgttctctttttcacgtttctggaaaaaaacacaacttgtaatacaagaggaggcag

SEQ ID NO: 922835 - DNA, 120 bp, Artificial Sequence
  ENSG00000272054_26 (sequence is synthesized)
tattttctaaagtagtgttttgctgactactagggcagtaggctattaaatgactcagaaggagaaagctttgcagactgctcagagtaaataataacgtgctttataaatgtcaaagat

SEQ ID NO: 922836 - DNA, 120 bp, Artificial Sequence
  ENSG00000272054_27 (sequence is synthesized)
gaaagtactgtatccacttcccaaacttacttgactacatttcccctttatcatatagttctgtggtctactgttctgagggacaacaatttgggaaatgctagaaaaataggaaggaga

SEQ ID NO: 922837 - DNA, 120 bp, Artificial Sequence
  ENSG00000272054_28 (sequence is synthesized)
agatagaagtatgttacccagcaaaatccatatcatcctttccagagctgaaacagttatcatcttcaaatgtgtctgccagacaatacagaaatgtgagatacaacaaagaatgacaag

SEQ ID NO: 922838 - DNA, 120 bp, Artificial Sequence
  ENSG00000272054_29 (sequence is synthesized)
cttgacatatatcttgtatctgaatcaattattctaagtcatgattctgctgtttatgacaagtgaacaccaaaacaatgtaaatgttactgttgctagtgtgccttaataatgtataca

SEQ ID NO: 922839 - DNA, 120 bp, Artificial Sequence
  ENSG00000272054_30 (sequence is synthesized)
aacctgtgaaatactgatcttagttaaatcccaaaactaaagaaggatccagttaatttcggctctttctacagttcttttatggaaagaggataaatatcaaataaaatgatatttagc

SEQ ID NO: 922840 - DNA, 120 bp, Artificial Sequence
  ENSG00000236154_0 (sequence is synthesized)
tcctcctcctcctcctcttcttcttcttcttcttcttctcctccttcttcttctttctccttctccttctcctcctccttctccttcttcacacttgtctgcctcataggccagccttgc

SEQ ID NO: 922841 - DNA, 120 bp, Artificial Sequence
  ENSG00000236154_1 (sequence is synthesized)
ctgatttatttaactgcaagttagaaactgggagagaaccaacttggagcttttttggtctgggaaagaaaatccaaaccatgcttctctagggcctcctgacctggctaagcaccttgg

SEQ ID NO: 922842 - DNA, 120 bp, Artificial Sequence
  ENSG00000236154_2 (sequence is synthesized)
ccaagcaccgctctggtttcccagaagcctgtggatgactctcatctggcggtggacctcagatggggctcagcagtgaaagaggggaagacaaaaatctggcgagcgagctgcccgggc

SEQ ID NO: 922843 - DNA, 120 bp, Artificial Sequence
  ENSG00000236154_3 (sequence is synthesized)
cgagactggccacttcaaacagcccttcaaacaaaaggagacgacgaaaagaaagccccacctgtctccagtgtttgctaaaataataataaatagatttcgtttaataaataattacaa

SEQ ID NO: 922844 - DNA, 120 bp, Artificial Sequence
  ENSG00000236153_0 (sequence is synthesized)
agaagagctgccacttgcccctcgctctccaggtggactctgcggtttttaccccacggcacaaagtagccagaatacaaaaacttcctgtttgccacccaggccttctccagctactga

SEQ ID NO: 922845 - DNA, 120 bp, Artificial Sequence
  ENSG00000236153_1 (sequence is synthesized)
aaaggaatttgtggattcctctcccacaagtgtccaggggcaggggtgctgtgagaatgtgcagttcacaaagggagtgagaatggcagtcaaaagatgtatagagttaagggaaagaag

SEQ ID NO: 922846 - DNA, 120 bp, Artificial Sequence
  ENSG00000236151_0 (sequence is synthesized)
gaaagacagagaggcaaatgcagcgggttgggggtggtcagcagagaggggtcggtccattccagcttcctgtggacactgctggctgagggttggaggtggggcaggaacagactgcac

SEQ ID NO: 922847 - DNA, 120 bp, Artificial Sequence
  ENSG00000236151_1 (sequence is synthesized)
ctggcacacaggccagaccccctcaagcccctccatggcaggaactggtattgatcccattttaaagctgtgaaaactgcggggaaaaaaatgaagtgacttgcttgaggtcccagagct

SEQ ID NO: 922848 - DNA, 120 bp, Artificial Sequence
  ENSG00000236151_2 (sequence is synthesized)
gaccctcagttccaacgattcgacctcattcagcatcatctgctgtgctgatgtccaggggccagagcagttattgcaaaggaagatttctctaaggctcttcctatttttctgttagcc

SEQ ID NO: 922849 - DNA, 120 bp, Artificial Sequence
  ENSG00000236151_3 (sequence is synthesized)
atgcaaagtttataaacttttattaggatagcagtaaattgcagagcagtgacaatatgtgaaaaaggtcttgcttcactcaattaagtatgttctggatggttacagacttcatgtagg

SEQ ID NO: 922850 - DNA, 120 bp, Artificial Sequence
  ENSG00000233384_0 (sequence is synthesized)
gcagcgccgggggctgaggaaaggtgggtggcgaagcgccgccgggcgcttggtggccgctgccgccgccactgcagctgtgcacgcccgcctctcggaggaaacttgaagccagcagta

SEQ ID NO: 922851 - DNA, 120 bp, Artificial Sequence
  ENSG00000233384_1 (sequence is synthesized)
caagcagggctggaggccgagcggagccatccgaccttgggactagggaaacgtggacttggtgggctattctgcgctgaagaggcagcaacgagggctcggtggtattggtgttggtcc

SEQ ID NO: 922852 - DNA, 120 bp, Artificial Sequence
  ENSG00000233384_2 (sequence is synthesized)
tagtggaattgtcaagaggatgcttttgaagtggcccagcatcttggaagttcaccatgcttgctttgcaagagattcctgacgctgcagtgaaagaggtccagtcattccagagagaac

SEQ ID NO: 922853 - DNA, 120 bp, Artificial Sequence
  ENSG00000233384_3 (sequence is synthesized)
ttcagtttcagacaagtcatcaaatccagaaagcaaggaaaaataccctgaaagacgactggcaaatctcggtgaaagagtagacgcacttcatggattggagtgaatcttagagcacct

SEQ ID NO: 922854 - DNA, 120 bp, Artificial Sequence
  ENSG00000233384_4 (sequence is synthesized)
ggtaccttgcacaggacctgatgcctggaggtacagcagccatcttgtgaccataaggaggaaatcaacgcattaagaagggaaaagctaagaagatacagagagcagggaccactgaca

SEQ ID NO: 922855 - DNA, 120 bp, Artificial Sequence
  ENSG00000233384_5 (sequence is synthesized)
acatgatcaagccactctaccaggccttaacttcctattccctgacttcttattgaaagagacaataaaacttctcatttgttttaacccatagaagtaaggcattctgttacttatggg

SEQ ID NO: 922856 - DNA, 120 bp, Artificial Sequence
  ENSG00000233384_6 (sequence is synthesized)
tgaacacaattcttaactgatgccatggtttaatgggagtagggatcctggtatgacaggaaattgagataatcagtttatggctagtgtagcagctccaagacacgattaatgtcccaa

SEQ ID NO: 922857 - DNA, 120 bp, Artificial Sequence
  ENSG00000233384_7 (sequence is synthesized)
gctcttttgccctcctgacttgctagcctcagtatgtggattttgttctcccagtctgaaggcataacttttggggaagagtaaaagaagccctctccagagatctgctacatctcattg

SEQ ID NO: 922858 - DNA, 120 bp, Artificial Sequence
  ENSG00000233384_8 (sequence is synthesized)
gccagaactctaacatttggccgccactacctagttgcaagtgaatctgagaaggtgagtgttttttcatttcaggctttatgaaatagaaaggcaaaggaaggggggtttgagcagcct

SEQ ID NO: 922859 - DNA, 120 bp, Artificial Sequence
  ENSG00000233384_9 (sequence is synthesized)
ttgaacagccagttcacgtttttgctatactgctctagtcaggttttctattaccagcagcctaatacaatttccaggtgccccaagttgtgctgacaacttggtgtataagagagacag

SEQ ID NO: 922860 - DNA, 120 bp, Artificial Sequence
  ENSG00000233384_10 (sequence is synthesized)
tgctttggggttagtatgatcagggaaagttcactgacaaagtggcaacctaaggcaaattacatcacactttttctctgcttgtaagtaagtctgaatgttccatgttttcctgaccta

SEQ ID NO: 922861 - DNA, 120 bp, Artificial Sequence
  ENSG00000233384_11 (sequence is synthesized)
ttcttaaccgattcctgctcctcctgagttgttatacataaattagttttggttttctgccttcttctaatatatagcaatacctctgtttattgaaggtgaaggcaaatacagtttgca

SEQ ID NO: 922862 - DNA, 79 bp, Artificial Sequence
  ENSG00000233384_12 (sequence is synthesized)
aggaaacttacaatcacagcagaaggcaaaagagagagagagtgaaagggaattgccaaacacttttaaaccatcagat

SEQ ID NO: 922863 - DNA, 120 bp, Artificial Sequence
  ENSG00000233384_13 (sequence is synthesized)
atcaggagaatagcagggggaaaccacccccgtgatccagtcatctcctaccagattcctccctcgacacatggaaattacaattcaagatgagatctgggtgggaacacagaaccaaac

SEQ ID NO: 922864 - DNA, 120 bp, Artificial Sequence
  ENSG00000233384_14 (sequence is synthesized)
catatcacagatgctccttatgatagggttacatcccaataaaccctttgtaaattgaaaatagtgtacatcaaaatgcatttaatacatcgaacctatcacacattataacttagccta

SEQ ID NO: 922865 - DNA, 120 bp, Artificial Sequence
  ENSG00000233384_15 (sequence is synthesized)
accaaaagtgaaaaaacagaatggttttatgggtacttgaaatgtaatatctattgaatgtgtatcgctttggcactattgtgaagttgaaaaatcttaagatgaacagtcataagtcgg

SEQ ID NO: 922866 - DNA, 120 bp, Artificial Sequence
  ENSG00000233384_16 (sequence is synthesized)
ggactgtctgtaaagtgtacccacacaactgaagacttggtttatcatgaagctttttccaaccttatctcctatctgctctccccttacattcctgtctccaccctaccctcaagcatc

SEQ ID NO: 922867 - DNA, 120 bp, Artificial Sequence
  ENSG00000233384_17 (sequence is synthesized)
catcagagaaatggtcaaagcgtaaaggggaatgcctttggattcatgggaagctcagttaagtgggctgtgagcctcctcttgccccatcactcatcctgttctgcccacaggaaaatc

SEQ ID NO: 922868 - DNA, 120 bp, Artificial Sequence
  ENSG00000233384_18 (sequence is synthesized)
tgaccatatgtttcatttaacacaaaattcgagagtatctcctaaacagtattttcccccataaatgaactctgtaaacttttcagtgccataaataactggtatgatatatcaagttac

SEQ ID NO: 922869 - DNA, 120 bp, Artificial Sequence
  ENSG00000233384_19 (sequence is synthesized)
tctcttgcttcccagccaagccctgttgaaatcccagaaagctttccccatcctccagcttaaatccagctcaccaagttctcactcccacctctcaacacccccatccaaacactccct

SEQ ID NO: 922870 - DNA, 120 bp, Artificial Sequence
  ENSG00000233384_20 (sequence is synthesized)
ccagtccccaccacaaagatactctgccctggctaagcaaccacccctaatactgtttctctcttggtggggtttggatgtttagaatgtcctgagaattggggttctttgagtgtttat

SEQ ID NO: 922871 - DNA, 120 bp, Artificial Sequence
  ENSG00000233384_21 (sequence is synthesized)
tataaaattttaaaagatgtagaagaatagagagtttagtgaacattcatctacctatctggattcagcaactgttagcatttttgtgctttgagttgtttcaaaattgtgttttacagc

SEQ ID NO: 922872 - DNA, 120 bp, Artificial Sequence
  ENSG00000233384_22 (sequence is synthesized)
tggtttgttcaaaccaggatctaaagattttctcacccctcagtgttacagtagctaggcaggcagagatgagcagggcaggagaggacctccctccaacaacaggcatgccaggcaacc

SEQ ID NO: 922873 - DNA, 120 bp, Artificial Sequence
  ENSG00000233384_23 (sequence is synthesized)
atcaggtcatggtcaggtgattgttaactgtctctctaaaataataattggttgtggccccgtgccagagagaggcagtctcccaacagatagaaacacctgaaactggtaatcagcagc

SEQ ID NO: 922874 - DNA, 120 bp, Artificial Sequence
  ENSG00000233384_24 (sequence is synthesized)
ttcccaataagatttcaggagttgggcgagtgggctcaaacatgtgcactaagaggcaaaatggcagagtttaaagggtatatgaacactgggtaaaggaagaattcctcaagtgagcac

SEQ ID NO: 922875 - DNA, 120 bp, Artificial Sequence
  ENSG00000233384_25 (sequence is synthesized)
gtgtacaacttcagtaaacacactgtgcatgtggcccctcccaactgctggcaggccactgtgcatgtggacagcccaccccaagggaagcatcagggtaagggaggagaccacccctca

SEQ ID NO: 922876 - DNA, 78 bp, Artificial Sequence
  ENSG00000233384_26 (sequence is synthesized)
agtaaaaactaaaaggcagaaatgaaattctcaggcagacagcccggcgccgtgccctgggcctggttaaagatcatt

SEQ ID NO: 922877 - DNA, 120 bp, Artificial Sequence
  ENSG00000233384_27 (sequence is synthesized)
accagttatgttatctatagattccagatattgtatggaagagcattgtaaaaatccctgtcctgttctgttccgttctgattaccagtgcatgcatcccccagtcacgcaccccctgct

SEQ ID NO: 922878 - DNA, 61 bp, Artificial Sequence
  ENSG00000233384_28 (sequence is synthesized)
ccgttctgattaccagtgcatgcatcccccagtcacgcaccccctgcttgctcaatcgatt

SEQ ID NO: 922879 - DNA, 120 bp, Artificial Sequence
  ENSG00000233384_29 (sequence is synthesized)
acactcccggccgaataaagcccttccttctttaacttggtgtctgagaggttttgtctgtggctagtcctgctacaaggggagaagggatgcaactcccaagaaatatgccctcatata

SEQ ID NO: 922880 - DNA, 120 bp, Artificial Sequence
  ENSG00000233384_30 (sequence is synthesized)
aaatcccaagtcaaaggtcaaactgtgcccttgactggctcaagtcgttagcttggccctctttcaaatgtactttatttccttttgtttctgctctaaagctttttaataaacgttctc

SEQ ID NO: 922881 - DNA, 120 bp, Artificial Sequence
  ENSG00000233384_31 (sequence is synthesized)
gcttggatggattttaccaaactgtagcatactcagtgcttagggctgcgtttactgctctgctcccagaccctgcaaaattctccattaacgtccttccgttgcatcctctaccctccc

SEQ ID NO: 922882 - DNA, 120 bp, Artificial Sequence
  ENSG00000233387_0 (sequence is synthesized)
gaaaagtgaagctaagagatctagcattctgcagaaaagtactggagatgactcaggactgaaaatgatcatgaagcccctttgcaaatatcaaagtggtgatgaagcagtcatgaactt

SEQ ID NO: 922883 - DNA, 120 bp, Artificial Sequence
  ENSG00000233387_1 (sequence is synthesized)
tgaccagaagccgtgttttgtgggattgccactttaatcgctcctgttcatcattaggactgcagccagagtgtggaaggagggactccaaatatataagaagatgctaccacaccctgg

SEQ ID NO: 922884 - DNA, 120 bp, Artificial Sequence
  ENSG00000233387_2 (sequence is synthesized)
agagctttgctgtaaaacagatctggggtaaagtgggtcttaaaaatcctttctctatacatccatgtagatagagaccatctccattaacagaagagggaatgatgccattcttataaa

SEQ ID NO: 922885 - DNA, 120 bp, Artificial Sequence
  ENSG00000233387_3 (sequence is synthesized)
gaagctgtactgtgggcacatttattcctaagttgatagtagctattttaactatgaaaaggatctgcccagatgaaagaggggctgcctgtggagcacagctggatgggggaagcaagg

SEQ ID NO: 922886 - DNA, 120 bp, Artificial Sequence
  ENSG00000264265_0 (sequence is synthesized)
gtgataatagttaagcctagagccatgagaggcctgtgctccgtgggacaggaggctaagagcggaacagggcccactgttggatgctactgatcaccagactgtggcctttatacacat

SEQ ID NO: 922887 - DNA, 120 bp, Artificial Sequence
  ENSG00000264265_1 (sequence is synthesized)
caacttgcttcatctccaccagaacaaatgaatgacaaaacccgatgaaagacaaagccagagtaaatcccttctcatctatgtcacggcaaaagatatagtaacagcaaaaacaagctc

SEQ ID NO: 922888 - DNA, 120 bp, Artificial Sequence
  ENSG00000264262_0 (sequence is synthesized)
gaggaaaatggtgcaggcagagcgcacctggtctcgggaaaatgctgcccgcgacaacccactgcgggaccctaaatgtctcgacaataaggcctcctcggcacgtctctgaggtcgggt

SEQ ID NO: 922889 - DNA, 120 bp, Artificial Sequence
  ENSG00000264262_1 (sequence is synthesized)
aggcgtttcgaaactgtgaggttggaaccactcttttggtaccatcttcaaagagacatttcagatcccattgaggcgtacagaggaaaaccaaatatcctgcaattaaaaactagaaac

SEQ ID NO: 922890 - DNA, 120 bp, Artificial Sequence
  ENSG00000264260_0 (sequence is synthesized)
agagatcaaccgatggatcggatcacctggatgttgagccatccacatgcaaaccaaggaaggagagtgtgagctcctggctggagaattcgctcacaagggtgatgtgatcatcttacg

SEQ ID NO: 922891 - DNA, 120 bp, Artificial Sequence
  ENSG00000264260_1 (sequence is synthesized)
tgtaaaagaaaaccgaatttcacttctggtggtgactattgtctgattcatcattacagtaaccacccaaggaaaccctgcccacaaaaagcattcttctggagaagtaacagtttttgg

SEQ ID NO: 922892 - DNA, 120 bp, Artificial Sequence
  ENSG00000264260_2 (sequence is synthesized)
tgacctctatgaaaaagagagatatacaggttttgcttttgttcactcaactaattaccaacctttcattatacctctactcggacatctaaacttcagttaagctctatgtttaagtgg

SEQ ID NO: 922893 - DNA, 120 bp, Artificial Sequence
  ENSG00000264260_3 (sequence is synthesized)
gatggatcttcaatttgcctacctaaggggttcagcttacaagatcctcctcaattaaagtgttgatgtcttgtttgaaacacagcttccggcagggtctgctgtgtgcacggagcaccc

SEQ ID NO: 922894 - DNA, 120 bp, Artificial Sequence
  ENSG00000264260_4 (sequence is synthesized)
gtcagcctggagcagacctgagacgctggcacaagaactgtcatctggagaagcgtcacctcctgtccggctgaggttccacggggcttctgccagagacctgaataaatgttatagaac

SEQ ID NO: 922895 - DNA, 120 bp, Artificial Sequence
  ENSG00000264260_5 (sequence is synthesized)
acactgtgttaatataaactcagatggaacaaaatcttcctctgaaaatgagctagctcctaatgatgccaccatcggttacttctgtggaaattgctaagcttattttgtggataagct

SEQ ID NO: 922896 - DNA, 120 bp, Artificial Sequence
  ENSG00000264260_6 (sequence is synthesized)
tgtgggatccaatgggaatagtatccccagaggaaaggcaagaaattgcatggatattagcttggccaaatcttcatgcgtccttctctgatttgcaaaaagtcactatcacagttgctc

SEQ ID NO: 922897 - DNA, 120 bp, Artificial Sequence
  ENSG00000264260_7 (sequence is synthesized)
tttgaagtcaggtttacagaggcatcattttacaattatcaactttgataaatgcagattgtcatggaactaccaccagaatccagatagagaacatgctatcatccctgttatatccct

SEQ ID NO: 922898 - DNA, 120 bp, Artificial Sequence
  ENSG00000264260_8 (sequence is synthesized)
ttgtggctaatccaccacactgttccatccaccaaagtccctagaagccactgatctgttttatgtccctctggttttgtctttttcaaagtctgaaataaatggaattgtggagtgtgt

SEQ ID NO: 922899 - DNA, 120 bp, Artificial Sequence
  ENSG00000264260_9 (sequence is synthesized)
ctcaactggaagcatgatttaggatgcagtacatgcaccacatcatttttctaaaatcaaaaagattctgaattccaacacccgtatggccttgatggttttagctcaggcattggaaac

SEQ ID NO: 922900 - DNA, 120 bp, Artificial Sequence
  ENSG00000264260_10 (sequence is synthesized)
tcactctctccgtcacctcggatctgaagggattctgcacatttctgtctagacatctgctgacatcccatcattcctacagaagacaaaacaactacaaaaaaatacatggtttgcatc

SEQ ID NO: 922901 - DNA, 120 bp, Artificial Sequence
  ENSG00000264269_0 (sequence is synthesized)
cctttcttcacctctcagccccattccagccttctcgggatggacagctctgctgggtgagaagaaagctcaggctggcggggatggcaaaggagctgctctcggacccccaatcctgtg

SEQ ID NO: 922902 - DNA, 120 bp, Artificial Sequence
  ENSG00000264269_1 (sequence is synthesized)
tatgggtaacgggaatggcaggactgtggttgagctttgggagcccgggaaggaaggatactggagctgggctgatccaggacagcttcctggaggaggcgggatttaaactggtcaatg

SEQ ID NO: 922903 - DNA, 120 bp, Artificial Sequence
  ENSG00000264269_2 (sequence is synthesized)
ggaccacattcaggctccacgaaacccttctgggtgtgaggtacagagctcagcacgctgctggtccttaaaaaaagaaccacatgagggcaataatcacgagaggactgtggtgctatg

SEQ ID NO: 922904 - DNA, 120 bp, Artificial Sequence
  ENSG00000264269_3 (sequence is synthesized)
tgaagaagaaatgaaactcatccatgataatggagatgaaaatcctagttcttaggacggcctcaaactttagaaaacctcacacggactcagggagaagagaggggctaggtgggtgtg

SEQ ID NO: 922905 - DNA, 120 bp, Artificial Sequence
  ENSG00000264269_4 (sequence is synthesized)
cagagtcccccagtggcttgttttcattggaataataacatcttacatttcgatgtggtaatgtcgctgttaaaacgcacttctcattgttagaaataaaaatgactcaaagatgtgaaa

SEQ ID NO: 922906 - DNA, 120 bp, Artificial Sequence
  ENSG00000258355_0 (sequence is synthesized)
cgcatccctggaagcctcaggcaaggccccacctcagctctgcctgtgggagacatccgagcggggtttttaatagacccggagctggcattcttactcatttgcaggtccaaatgaaat

SEQ ID NO: 922907 - DNA, 120 bp, Artificial Sequence
  ENSG00000258355_1 (sequence is synthesized)
tcagcttttttgggttttcttttgagagggagtctggctctgtcgcccaggtggaggttgcagtgagcggaaatcctgccagtgcaccccagccggggcaacagagtgagactccgtctc

SEQ ID NO: 922908 - DNA, 120 bp, Artificial Sequence
  ENSG00000225992_0 (sequence is synthesized)
ctcatcaggccggagcagctggcccatgtcctggggcactagggaagcttggtcatcctgcagtgcgtggtccgcaccaggatcagctacacccactggtaccagcagaagggccaggtc

SEQ ID NO: 922909 - DNA, 120 bp, Artificial Sequence
  ENSG00000225992_1 (sequence is synthesized)
tgggattccatcctgaaagcagataaaatcatagccaaggatggcagcagctctatcttggcagtactgaagttggagacaggcatcgagggcatgaactactgcacaacctgggccctg

SEQ ID NO: 922910 - DNA, 120 bp, Artificial Sequence; identical to SEQ ID NO: 806692
  ENSG00000233651_0 (sequence is synthesized)

SEQ ID NO: 922911 - DNA, 120 bp, Artificial Sequence; identical to SEQ ID NO: 806693
  ENSG00000233651_1 (sequence is synthesized)

SEQ ID NO: 922912 - DNA, 120 bp, Artificial Sequence
  ENSG00000233651_2 (sequence is synthesized)
ttgtctttaattcattgataaggagatgatttcagtagattttctaacattggactaaatttgtattactaaccgagcttgttcatggtttttatactttgctaggtatacttcctagta

SEQ ID NO: 922913 - DNA, 120 bp, Artificial Sequence; identical to SEQ ID NO: 806695
  ENSG00000233651_3 (sequence is synthesized)

SEQ ID NO: 922914 - DNA, 120 bp, Artificial Sequence; identical to SEQ ID NO: 806696
  ENSG00000233651_4 (sequence is synthesized)

SEQ ID NO: 922915 - DNA, 120 bp, Artificial Sequence; identical to SEQ ID NO: 806697
  ENSG00000233651_5 (sequence is synthesized)

SEQ ID NO: 922916 - DNA, 84 bp, Artificial Sequence; identical to SEQ ID NO: 806698
  ENSG00000233651_6 (sequence is synthesized)

SEQ ID NO: 922917 - DNA, 120 bp, Artificial Sequence; identical to SEQ ID NO: 806699
  ENSG00000233651_7 (sequence is synthesized)

SEQ ID NO: 922918 - DNA, 120 bp, Artificial Sequence; identical to SEQ ID NO: 806700
  ENSG00000233651_8 (sequence is synthesized)

SEQ ID NO: 922919 - DNA, 120 bp, Artificial Sequence; identical to SEQ ID NO: 806701
  ENSG00000233651_9 (sequence is synthesized)

SEQ ID NO: 922920 - DNA, 120 bp, Artificial Sequence; identical to SEQ ID NO: 806702
  ENSG00000233651_10 (sequence is synthesized)

SEQ ID NO: 922921 - DNA, 120 bp, Artificial Sequence
  ENSG00000233651_11 (sequence is synthesized)
gggaaccactgatttttttttctatttctatagtattaccttttccagaaggtcataaagttggaagtgacatatgtagcctttttagattggcttctttcattctgcaatatgcatgta

SEQ ID NO: 922922 - DNA, 120 bp, Artificial Sequence; identical to SEQ ID NO: 888438
  ENSG00000233651_12 (sequence is synthesized)

SEQ ID NO: 922923 - DNA, 120 bp, Artificial Sequence
  ENSG00000233651_13 (sequence is synthesized)
gggtatataccaaaaaacaagattgcagggtcgtataataagagtagatttagttttctaagatgccacaaaactattctccattttgtatttccatcagcactgaatgagagttcctgt

SEQ ID NO: 922924 - DNA, 120 bp, Artificial Sequence
  ENSG00000233651_14 (sequence is synthesized)
atcctcatcagcatttggtgttgtcagagttctggatttttgccattctaatatgcatgcagtagtatctcattgcagtgctgtgtttgagaatgtgagtagctgcaattcattcactct

SEQ ID NO: 922925 - DNA, 120 bp, Artificial Sequence; identical to SEQ ID NO: 806706
  ENSG00000233651_15 (sequence is synthesized)

SEQ ID NO: 922926 - DNA, 120 bp, Artificial Sequence; identical to SEQ ID NO: 806707
  ENSG00000233651_16 (sequence is synthesized)

SEQ ID NO: 922927 - DNA, 120 bp, Artificial Sequence; identical to SEQ ID NO: 806708
  ENSG00000233651_17 (sequence is synthesized)

SEQ ID NO: 922928 - DNA, 120 bp, Artificial Sequence; identical to SEQ ID NO: 806709
  ENSG00000233651_18 (sequence is synthesized)

SEQ ID NO: 922929 - DNA, 120 bp, Artificial Sequence; identical to SEQ ID NO: 806710
  ENSG00000233651_19 (sequence is synthesized)

SEQ ID NO: 922930 - DNA, 120 bp, Artificial Sequence; identical to SEQ ID NO: 806711
  ENSG00000233651_20 (sequence is synthesized)

SEQ ID NO: 922931 - DNA, 120 bp, Artificial Sequence; identical to SEQ ID NO: 806712
  ENSG00000233651_21 (sequence is synthesized)

SEQ ID NO: 922932 - DNA, 120 bp, Artificial Sequence
  ENSG00000233651_22 (sequence is synthesized)
accacaataaaagctgtgttacaaaatatgtttccaagtatgtgtgaaaaatatatttatctttatgattctactcagattaattagctctcaggactgctgtgtccagagttgattcct

SEQ ID NO: 922933 - DNA, 120 bp, Artificial Sequence
  ENSG00000233651_23 (sequence is synthesized)
tctggtgggttcgtggtgttgctgacttgaagaatgaagctgccgaccttcacgagcgctgattggtgtgttttacagagcatggattggtgcgttttacagagcgctgattggtacatt

SEQ ID NO: 922934 - DNA, 120 bp, Artificial Sequence
  ENSG00000233651_24 (sequence is synthesized)
tcacagaactcgtgagacagtcgcaggtggcatgatttgatttgtgtgaaggcaatgaaatgatacacagatacaccgaagcctcccaaaagaatcctggttccaagattcaagaagatg

SEQ ID NO: 922935 - DNA, 120 bp, Artificial Sequence
  ENSG00000233651_25 (sequence is synthesized)
gattaatgtttttccattaattgttggaatttatgccatttttttactatgtgccatcaattttaaagcacttctgaaaagagataacaatctacaatagctggcattttaaattcataa

SEQ ID NO: 922936 - DNA, 120 bp, Artificial Sequence
  ENSG00000233651_26 (sequence is synthesized)
aaatatagtattttcttctatttttatacatttatgatgcattatttcttatttcccaggaattttactacctttgttttgaatgattaaaaaggaaacatagcaccttttttcaacaca

SEQ ID NO: 922937 - DNA, 120 bp, Artificial Sequence
  ENSG00000233656_0 (sequence is synthesized)
ggttcccgcccgcgcctctccctccacacttcgccgcaagcagagggagccggctccggcctcagctggcccagagaggggctccctcagtgcagtggcgagctgaagggctcctcaagg

SEQ ID NO: 922938 - DNA, 120 bp, Artificial Sequence
  ENSG00000233656_1 (sequence is synthesized)
gcggctggagtggacgctgaggccgaggagacgccaagagcaaacgagggctgctagtacattgtcacctctcactggttgatattctggaagcaagatcttggaaggccaaggacaggt

SEQ ID NO: 922939 - DNA, 120 bp, Artificial Sequence
  ENSG00000233656_2 (sequence is synthesized)
catttcttaggactgtgcaaaagagaatcagtctttacagtaagctatttgattctagtagttctttcatctcagtcttttgaaagcaacttcccctctttaaccaacacctgccatggc

SEQ ID NO: 922940 - DNA, 120 bp, Artificial Sequence
  ENSG00000233656_3 (sequence is synthesized)
cagattcttatgacctgaaacagcacctcaactcttaccttggatatttctacatgaagaatctgctctgaaactatagcaaacaatcacagagtgtttgagtgtgagtccagactggtt

SEQ ID NO: 922941 - DNA, 120 bp, Artificial Sequence
  ENSG00000233656_4 (sequence is synthesized)
cgggaagaccaagaagcaatgatgatgtctgtttttgtcaaatgtctgaaaactatttttatttttctaaaactttgttcagaagtctcaatattgtagtgtatagagatgtacactaat

SEQ ID NO: 922942 - DNA, 120 bp, Artificial Sequence
  ENSG00000233656_5 (sequence is synthesized)
ttagtgatatgaagatgaagggctttaagcctgtgttccttgcaggcatctcagtacctaggaactccaaagaacaaactgttgctcgtgcaaaattaaatttcataaaacagcaaagaa

SEQ ID NO: 922943 - DNA, 120 bp, Artificial Sequence
  ENSG00000233656_6 (sequence is synthesized)
gtctgtaagatggattctattttccatttgtgcacgaaataccttgttatccacattatttgaagttctagcctacagagagataaggacatttgattgagtgtgaaaggaaagacagga

SEQ ID NO: 922944 - DNA, 120 bp, Artificial Sequence
  ENSG00000233656_7 (sequence is synthesized)
ggagcactctccacagctgctggtccaggtgctaagtccctcactgcccagcacctgcagcgccgaccggccgctcttgagtgcggggcctgcagagcccacgcccacccggaactcgcg

SEQ ID NO: 922945 - DNA, 120 bp, Artificial Sequence
  ENSG00000233656_8 (sequence is synthesized)
agccgaagaaggtgagtgctgatggaaatcccagatgtggccaaaactccccagcagcagacaggtcaaaggtcttttgtaccctttcccgtaacgggtggcacttgatcttcagagtgg

SEQ ID NO: 922946 - DNA, 120 bp, Artificial Sequence
  ENSG00000233656_9 (sequence is synthesized)
cttacactgttcaagagggtttgaatcataagacatttggggttaaaaaaaaaaacctgtcattttgcattttgatttttgtagagccaactacaacgtatttgaaaattgtgttcttga

SEQ ID NO: 922947 - DNA, 120 bp, Artificial Sequence
  ENSG00000233656_10 (sequence is synthesized)
aataagcctgtaatagtaggtgtcaaaagtatcagagataaaatgtctactcttttagtggcgtaagttgtcgttgtttcaaattacatttccttgtactatatgatggatgtactatgc

SEQ ID NO: 922948 - DNA, 120 bp, Artificial Sequence
  ENSG00000233656_11 (sequence is synthesized)
acacacactttatcacacacgtgtgtgtgtgggagtggaaatgtgtaggtagtcagagagggaagaataaagaattcatgctaatgtctaaataaatgaattaattagtgaaataaatag

SEQ ID NO: 922949 - DNA, 120 bp, Artificial Sequence
  ENSG00000233654_0 (sequence is synthesized)
cccaggccggaggagctttcggtggcgcgaccccgctggcatgctcccggcctcggcctcggcctcggccttggcctccgggcctccagcgcacgcggggcgtccagggcctcatcttcc

SEQ ID NO: 922950 - DNA, 120 bp, Artificial Sequence
  ENSG00000233654_1 (sequence is synthesized)
ttcccctggggaccgcccggccgtgtcccgctgccctcggcgcaggggtgggagttgcagagaggaagagtcgctaacccggagtgtttcttaaaacttggctgacctgtgacctgcgga

SEQ ID NO: 922951 - DNA, 120 bp, Artificial Sequence
  ENSG00000233654_2 (sequence is synthesized)
tttggaggctgaattctccgagcacctgtgcggtgtgcacttgcttcttgcaagacagcttttgtacctaaccacattcattttgatttggtttaattttggatggcactatggaaagta

SEQ ID NO: 922952 - DNA, 120 bp, Artificial Sequence
  ENSG00000233654_3 (sequence is synthesized)
gctaaaataaacaggaagctactgcaggatataatctaagaaaataaggggaagaaaacaagaaagaggaagacattggatccaagaaatgggggatctatcaccttacagatgaaaaga

SEQ ID NO: 922953 - DNA, 120 bp, Artificial Sequence
  ENSG00000233654_4 (sequence is synthesized)
gaatctacatgatctttgtgaaggtgatttgagcatagcagctctgcaggaaacctggagagcaacaagtgagattaatacaggacacacagctctagtaaggatgtcactaaggaaatt

SEQ ID NO: 922954 - DNA, 120 bp, Artificial Sequence
  ENSG00000233654_5 (sequence is synthesized)
aaaatcatttgttgtagaatactttatgaatcaatgcagtaagaggaggtttacacttctggtgaagaatagggaatgaatttgtgataggcatgtagaaaattatgcaaacaaataaaa

SEQ ID NO: 922955 - DNA, 120 bp, Artificial Sequence
  ENSG00000233654_6 (sequence is synthesized)
taataatcaactcctgggaaaataggaatttgtaccaaaagtgtcaatataatcttatatatatatgcctcagttttgaataatatttgtcattttaattatgtaaaaactgaataatta

SEQ ID NO: 922956 - DNA, 120 bp, Artificial Sequence
  ENSG00000233654_7 (sequence is synthesized)
catctcaaaacaaaacaaaacaaaacaacaaaaaactcaataattatcagagaaaaacactgtaatataactatattgaaagaataagaagagaatgtaagagactaaatccgtatctcc

SEQ ID NO: 922957 - DNA, 120 bp, Artificial Sequence
  ENSG00000233654_8 (sequence is synthesized)
cacagaagggagtcatagataataatatctggaactgaaaaaaaaatcaagaaacagcagtttaaaatgtggagataaacaccaaaagaaacagctgaggccaggtgtggtggctcacac

SEQ ID NO: 922958 - DNA, 120 bp, Artificial Sequence
  ENSG00000233654_9 (sequence is synthesized)
tgaaagacttgagcaagtttgcttttgggaatggaaatggaattagaacatgcaggttgtacagggaaaagggctgctctttgtcttttagactttgaggagctatttggcttttaaagc

SEQ ID NO: 922959 - DNA, 120 bp, Artificial Sequence
  ENSG00000233654_10 (sequence is synthesized)
tctgtgcatttataacttagatggaaaatataaacaattttagaaagaaaaatgacaatatatgtatttttgagatatggaggcaaacattctaaacgctaaaaagagaaaagcttgaga

SEQ ID NO: 922960 - DNA, 120 bp, Artificial Sequence
  ENSG00000233654_11 (sequence is synthesized)
gtggtttcttttggggagcaggacaggagttgattttcactgtaattattactaagccattgattttatagagttgtgaggccattaccttgagacaaattttaaataaaaaaaggaaag

SEQ ID NO: 922961 - DNA, 120 bp, Artificial Sequence
  ENSG00000233654_12 (sequence is synthesized)
tccaggaaggaattcaggcatgaggacatttaagaactttgaattttagctttgttgcttgtagtttcccaattttaaaaatctttaacatcttccataccaggagataagcagtaaatg

SEQ ID NO: 922962 - DNA, 120 bp, Artificial Sequence
  ENSG00000233654_13 (sequence is synthesized)
agagaacacatttggaagctcttggtagactgaaaataactaagggaggttcccttctttcctcttacagataaaacttggttttcaatagtataaactcaatctttgaaaaacccacct

SEQ ID NO: 922963 - DNA, 120 bp, Artificial Sequence
  ENSG00000233654_14 (sequence is synthesized)
cttttcctagactcacaagggtgcttccatgacatcttggatataaaaggaatacttagtgtacatgtgaataattaagtcattttttaaaatgccctatgtgaaataagaaattacctc

SEQ ID NO: 922964 - DNA, 120 bp, Artificial Sequence
  ENSG00000275438_0 (sequence is synthesized)
agaaacgggaaccacgtgaccccgcaactccacatctgcatgtagacccgggagagcgggaaacggggacctgggtgtgcttgcaccggaacgtttgcagcagcccagaggtggggacag

SEQ ID NO: 922965 - DNA, 120 bp, Artificial Sequence
  ENSG00000275438_1 (sequence is synthesized)
cccagatgaacagaccaggtgtgctcacccatgagcattacgcagccgcaaagaggagcgaggccccgacgctcagatgagccttgagaacctgatgcccagtgaacccgccagacacag

SEQ ID NO: 922966 - DNA, 120 bp, Artificial Sequence
  ENSG00000275438_2 (sequence is synthesized)
ctgggcagggagaaggtggacggctctcggggctgctggcaggaacagggagagcgggcatgacggctcacaggtccagaaggttctctggcgggtgatgaaaatatctggaattaggca

SEQ ID NO: 922967 - DNA, 120 bp, Artificial Sequence
  ENSG00000275438_3 (sequence is synthesized)
gagatgctggttgtgcgtgtggccaatgtgttacgtgcaccacactgctgacctttaagtggttaattttatgtaaatgtcaacttcacctcaatgttttgaaatacagcaaagcaaagc

SEQ ID NO: 922968 - DNA, 120 bp, Artificial Sequence
  ENSG00000256884_0 (sequence is synthesized)
gttgtggggagaatcactgcaagccgcatgacgcaccggagaaacctggccctgcctgggacctgggcaggggctgggaccccccctacaatgacactaatggaattcccagcatactcg

SEQ ID NO: 922969 - DNA, 120 bp, Artificial Sequence
  ENSG00000256884_1 (sequence is synthesized)
gctccatgaaagcaggacccttgggagtcctgttcacagtagcatccccagcgcctagagggagcctgctgcactgtagaagcccagcatatcttggatgagtagatgatgtcgtatcag

SEQ ID NO: 922970 - DNA, 120 bp, Artificial Sequence
  ENSG00000256884_2 (sequence is synthesized)
cgggcaccaaggtttcccaagcgtgctctttttaattttcatcacagccccctagaggttttatactatcattattccctttttacagatgaggaaactgaggcaaaagacatgaggtga

SEQ ID NO: 922971 - DNA, 120 bp, Artificial Sequence
  ENSG00000256884_3 (sequence is synthesized)
cctgcctgaggccaccagcttatggattctgaacccaggtctgtctgaactttaagcccaggcctcttttctctgccacacaccccagcaagaatgaataaataaacaaaataaaacaaa

SEQ ID NO: 922972 - DNA, 120 bp, Artificial Sequence
  ENSG00000275431_0 (sequence is synthesized)
ctggggctgagagttagcggtgggaggaagaagggaatggcagccacggagatcttcatgctgtgggaagctgttgtgggaggagagctggcctggtgggagcttcagaggctcctgcgg

SEQ ID NO: 922973 - DNA, 120 bp, Artificial Sequence
  ENSG00000275431_1 (sequence is synthesized)
atcctgttttccagctccattccaggcagcatcctcacgatccaaagaacggcataaggggcccctgtttcctgagacccagtcagagctcctatactctcccaccttgttcctctgagc

SEQ ID NO: 922974 - DNA, 120 bp, Artificial Sequence
  ENSG00000275431_2 (sequence is synthesized)
tgacaaatgacatcggagagggctctaggttggaaggaagacaaggcattgcactcacgtgaggaggattcagtcttggtccctagggcgatggtgatgaggaggaagaagggaatggca

SEQ ID NO: 922975 - DNA, 120 bp, Artificial Sequence
  ENSG00000275431_3 (sequence is synthesized)
gccacggagatcttcatgctgtgggaagctgttgtgggaggagagctggcctggtgggagcttcagaggctcctgcggtgaggaattgttgagaaatgatcattgaggccaaatattttt

SEQ ID NO: 922976 - DNA, 120 bp, Artificial Sequence
  ENSG00000275431_4 (sequence is synthesized)
taaaataagggagctgagacttggaagggaagtaggaaagcagtgatgcctcagcaatttcatatcctgcacatgtgttgttggtggcctgaaggaagcagggagagccaaggtttaagg

SEQ ID NO: 922977 - DNA, 120 bp, Artificial Sequence
  ENSG00000275431_5 (sequence is synthesized)
gaggaaatggtcttccatccccagtgggaagaagttcaactcttttgatagaagcctttccctaggcatgaacatgagcacagggctgggggcactgtgtcacacttagcaaaagatctc

SEQ ID NO: 922978 - DNA, 120 bp, Artificial Sequence
  ENSG00000275431_6 (sequence is synthesized)
aaggctggatgtgtcctgtatccaattccatctcaggccttagaacaggccacgtggggcctggacattcaggatctgttcatctagagactagagggtgtttggggtaatggaatgagg

SEQ ID NO: 922979 - DNA, 120 bp, Artificial Sequence
  ENSG00000275431_7 (sequence is synthesized)
ccaggactcctccaagtcaggtctcattggtcaagggaaatcctaacttaaactcgaagcagaacctgcagttctctgtctcatctccattctggtcaccacaccatggagtgaagaagt

SEQ ID NO: 922980 - DNA, 120 bp, Artificial Sequence
  ENSG00000275431_8 (sequence is synthesized)
gctgtggtgctcagtagataattcacttatataatggttgctatacacacaagccactgtcccagttgccttatgaatattagcctatttaatctttagaacagcagttgaggaaacagg

SEQ ID NO: 922981 - DNA, 120 bp, Artificial Sequence
  ENSG00000275431_9 (sequence is synthesized)
ctcagaatcaaagcctaagcttttgacagttggtaaatggaactggggttcaaattcaggtggtttggcttccaagtctgtgttctcacccattatgccataaagaaacatgggactccc

SEQ ID NO: 922982 - DNA, 120 bp, Artificial Sequence
  ENSG00000275431_10 (sequence is synthesized)
aacggagctctgtaaaagcttatgggttttctataaagcctttagtcttagtcctttctgaaatcagatagtggatctctttgggaccttctcctggtttctctgacttttgctgcaaag

SEQ ID NO: 922983 - DNA, 120 bp, Artificial Sequence
  ENSG00000275431_11 (sequence is synthesized)
aagcttggtgggaaccctagaaaatgtctaattcagggatagctagtaggtttcattgattagtggtggactggagctctgtgttggaaatgattctgaggccatatccaggcacattgg

SEQ ID NO: 922984 - DNA, 120 bp, Artificial Sequence
  ENSG00000275431_12 (sequence is synthesized)
gaagatacgctgtgaccaacgtgcagtttctgttgcagtgcagcttgcatgctatgtatctgccatttgatttgtctaaactggccatttactgaatggaagctgggaatcagaaaggac

SEQ ID NO: 922985 - DNA, 120 bp, Artificial Sequence
  ENSG00000275431_13 (sequence is synthesized)
cagtgactttctcatgtgcacacagtgatttggatgcaggacagatctcatctccgcaggctctcagcttagtgccctcaccatgctgttcttggaggtacatcccccattctgcttgct

SEQ ID NO: 922986 - DNA, 120 bp, Artificial Sequence
  ENSG00000275431_14 (sequence is synthesized)
gatgtggttagatggttatttaatctcctctcctcatctgaatcatcaggatggagaacatctattatttatctttgcccattcacgcagaacctagtgtataccaggtgctttatgaat

SEQ ID NO: 922987 - DNA, 120 bp, Artificial Sequence
  ENSG00000275431_15 (sequence is synthesized)
atacattttaaaagaaggatgaataaacaaattgagccaggtctacatatgtgtatcttataggaaatggctgaaatctcatggttagttgtggagacagtcatcaattaaaaattttct

SEQ ID NO: 922988 - DNA, 120 bp, Artificial Sequence
  ENSG00000275431_16 (sequence is synthesized)
atatttcttatcatcaataacaacattatgtaaacccttcaagttaaatgataataattgttatcaggaacaatctcaggaaacaagttgtttataggaaaagtgagttggaaagaaata

SEQ ID NO: 922989 - DNA, 120 bp, Artificial Sequence
  ENSG00000275431_17 (sequence is synthesized)
ccaagttgtttctaggagacttacaggaagttcctgtacttttccagcaagtattgagttcctacctacattagtctgtgtgtgccaactgctatcataaacaatccagcagactaatta

SEQ ID NO: 922990 - DNA, 120 bp, Artificial Sequence
  ENSG00000275431_18 (sequence is synthesized)
aataaaagtttatttcttgctcatgttacagtccagtgtgggtcagtagtgggatgatggtgtgtgtgttgggatcctccatgtactcattcaggaaccaggcctttttctaccttggat

SEQ ID NO: 922991 - DNA, 120 bp, Artificial Sequence
  ENSG00000275431_19 (sequence is synthesized)
gccaccattttcagcacaaggcctccaagcttgatacaaaaagggagaagcagaggaggattgggagatttttgtggatcagttctgaaaatggtacaaattactttcacccacattcca

SEQ ID NO: 922992 - DNA, 120 bp, Artificial Sequence
  ENSG00000275431_20 (sequence is synthesized)
tggccagcatcaagtaacctggctccaacataatgacaaagggatggaaaatatacatcatctgtatgcttaggaagaaaaaggaataggttttgtgaccacatcacttctttgacacag

SEQ ID NO: 922993 - DNA, 120 bp, Artificial Sequence
  ENSG00000275431_21 (sequence is synthesized)
tatcatatgccaagtcctgggctaggcttggagggagggattgaagatgaccctgatcccagaggtctcagaactcaaagagggactaaaaaaagtaaaggagaattgcaatacaaccag

SEQ ID NO: 922994 - DNA, 120 bp, Artificial Sequence
  ENSG00000275431_22 (sequence is synthesized)
atgaatgaaatttgatggcaacataattagagaccttaaatgtcctcctgttgccccctgttgagtatgaagagcctattttaaaaatatttaaaatgtttttcaaagcaacacatacat

SEQ ID NO: 922995 - DNA, 120 bp, Artificial Sequence
  ENSG00000275431_23 (sequence is synthesized)
atattggtttaaaaaactgaatagtacaggaaggatctgtaggacataaaccttctgagttcatgcttgcctgaagaagtcattatttagccttcatacttgattgatatttttgttggg

SEQ ID NO: 922996 - DNA, 120 bp, Artificial Sequence
  ENSG00000275431_24 (sequence is synthesized)
tatagaattctacaatggaatataagaatatgtttcttctgaaactcatttgtggtgatctggtgtttcccctctctagaaaattttagggtttattctttaatcttgttttcttacttt

SEQ ID NO: 922997 - DNA, 120 bp, Artificial Sequence
  ENSG00000275431_25 (sequence is synthesized)
ttggcacaaatagatgttccagactcatcttgtactttccttggcccagctctggaattagccatttcttccatgagtctcagtttcttttactgaaaaatgattttgagaaaccaaaat

SEQ ID NO: 922998 - DNA, 120 bp, Artificial Sequence
  ENSG00000275431_26 (sequence is synthesized)
ctgagtgcttggtgtgttcattgctatgggaatggcatcacttttagatctgagcttttagtggctagaacctggaaatatatgtaagcatatgtgtataagtatgtatttaaatttatg

SEQ ID NO: 922999 - DNA, 66 bp, Artificial Sequence
  ENSG00000275431_27 (sequence is synthesized)
gtgaggtggtgcattctcagctcactgaaacctctacctccggggttcaagtgatcttcctgcctc

SEQ ID NO: 923000 - DNA, 120 bp, Artificial Sequence
  ENSG00000275431_28 (sequence is synthesized)
cactgaaacctctacctccggggttcaagtgatcttcctgcctcaccctctggagtagctgggactgcaggtacaggtcaccttgcccaggtaatttttgtatttttagagatggggttt

SEQ ID NO: 923001 - DNA, 120 bp, Artificial Sequence
  ENSG00000275431_29 (sequence is synthesized)
tcctctttctagctatatgaaaaaacaaaagtttataccactatgtccaattccaagtaaacaccacagagttatttcagtctttcctgtttctatgtttccctccctcctctaacaatg

SEQ ID NO: 923002 - DNA, 120 bp, Artificial Sequence
  ENSG00000275431_30 (sequence is synthesized)
gggactcctgctcccattaacctcaatgtatgtacttatttgctgagttccctgtatgtaacaaatctcctggccacactggctgtattctggcctctggtcccactggcctcaaccatg

SEQ ID NO: 923003 - DNA, 120 bp, Artificial Sequence
  ENSG00000275431_31 (sequence is synthesized)
tgcatcatcttctctgccctggccctggttgagccctcagttgaggggatgagttatattacttttaaatcttgtctctggttctaaaaagaataaaaatatgaatgtttctatttccta

SEQ ID NO: 923004 - DNA, 120 bp, Artificial Sequence
  ENSG00000275437_0 (sequence is synthesized)
agaccacaggacctgggtgaccctgcctcccacagccctcacctccaggagtgactgtgggctctgggcccaggactggctgcttgttgcggttccttctcaaagggagccactgtccac

SEQ ID NO: 923005 - DNA, 120 bp, Artificial Sequence
  ENSG00000275437_1 (sequence is synthesized)
aggtccaagtgcctgctgggcggctgttcccagaggcagcccctgcaggtgtgcagcaaaggggccgacacagagctcttgggtcaaggctggcacgtgctccttgcttacctggaggtc

SEQ ID NO: 923006 - DNA, 120 bp, Artificial Sequence
  ENSG00000275437_2 (sequence is synthesized)
atcagagttgccccacgcccctggccttcgggcaggtggaggcattgggttcctctaaggtctttggttggggaagtttgggcccagaacacagcactctgtcctcaaagactatgacgt

SEQ ID NO: 923007 - DNA, 120 bp, Artificial Sequence
  ENSG00000275437_3 (sequence is synthesized)
cacatgcaggttgcgtcacacgcaggtcgcggtgcactccatccttggaagtgttcctggccgtagccaggctgagggtgcctgcagacccaggcctgtccacaagatgtccccccacgg

SEQ ID NO: 923008 - DNA, 120 bp, Artificial Sequence
  ENSG00000275437_4 (sequence is synthesized)
acatgcctggccgctgctccagggagggtcagagggatgattggggcagagggatggatttgcccaaatgtggcagccaggccccatgcatttggcatggccagctccttcaggaaggcg

SEQ ID NO: 923009 - DNA, 120 bp, Artificial Sequence
  ENSG00000275437_5 (sequence is synthesized)
ggagagatggaacaaggtggtgactctccagggcagagcggcaaggccctaaggtgtggactccaggggaagcgggctcaccccaacgggccgagctccgcaggtgtggtgggcttttcc

SEQ ID NO: 923010 - DNA, 120 bp, Artificial Sequence
  ENSG00000275437_6 (sequence is synthesized)
ctaaccccgggccctgttgtttgacatggaaacagctttctccctcagtcctgcatgttgagtgtccagaaccggatggtgacaccaggcagactgggtgctgtcataggccctccttcc

SEQ ID NO: 923011 - DNA, 120 bp, Artificial Sequence
  ENSG00000275437_7 (sequence is synthesized)
acagagttcatgcacccctgtgtgcaccaggcctggcgtggagtggagcccacttgagtggagggaggcagagcgtggcgacgcgcagggaagtgcctgtgactgagaaggcaccccctg

SEQ ID NO: 923012 - DNA, 120 bp, Artificial Sequence
  ENSG00000275437_8 (sequence is synthesized)
caggcccagagcctccatggtgacagttctgagcgcagcatgctgcccacgtgcagcacatccctgccctgtgggattgttagaaggtgcgctgtggccggcatccctgggacaggatgg

SEQ ID NO: 923013 - DNA, 120 bp, Artificial Sequence
  ENSG00000275437_9 (sequence is synthesized)
gacgtggcatgggctgggtgcctgcagtcctcctgccgtacccaccatgggcccaagcgccaccaccccttgccttgcccagggctgtctcctcccttccctcctccttggcccccatgt

SEQ ID NO: 923014 - DNA, 120 bp, Artificial Sequence
  ENSG00000275437_10 (sequence is synthesized)
ccctgttcaggtctttcctgaaccccactctgttcctggagggggaggcgtccctcctggggctctgctgccaagttcgtggtgctgaccttgtttctgagggccatggcccctccctga

SEQ ID NO: 923015 - DNA, 120 bp, Artificial Sequence
  ENSG00000275437_11 (sequence is synthesized)
taggtagaccccagcgtgaggacgtccatttcaccctgcgttccctgggcctggctgctgatcgagggaagggtggctgccccggcaaaaggggctgctagctcctggcttgagagttct

SEQ ID NO: 923016 - DNA, 120 bp, Artificial Sequence
  ENSG00000275437_12 (sequence is synthesized)
aggatgagttggtttcaggaaatggagagaattctgaaagtcctgaaggcagccctgatgttggtcttgtgagtgtggtggtttgacctgggctctgggaacagacttggcttggaatcc

SEQ ID NO: 923017 - DNA, 120 bp, Artificial Sequence
  ENSG00000275437_13 (sequence is synthesized)
cagctgcactgttcagtacctctgtgaccttgagcaggtgacatggcctctctgagcctcaatctcctctgagaagcgggttcacactaagcactaagcatggcctccctgaggtcagag

SEQ ID NO: 923018 - DNA, 120 bp, Artificial Sequence
  ENSG00000275437_14 (sequence is synthesized)
actaagcatggcctccctgaggtcagaggtcagatgcgtgcccagggcttggtgaggtatgtggcaggagtcagtgtgagatgagcagagcctctttttttttgagacagggtctctctc

SEQ ID NO: 923019 - DNA, 120 bp, Artificial Sequence
  ENSG00000275437_15 (sequence is synthesized)
tttattttagcagacatggggtctcactatattgtctaggctggtcttaaactctggctcacgtgatccgtcttggcctcccaagtgctgggatttcaggtggcagccgccacacccagt

SEQ ID NO: 923020 - DNA, 120 bp, Artificial Sequence
  ENSG00000275437_16 (sequence is synthesized)
caaatggagcctcctgttacaacaaggctgctcagggaacagtaacttctcggtcctaatacttattctttcccagggaggctcagcctggtgtggcactttgtgttgaaccagtgagtg

SEQ ID NO: 923021 - DNA, 120 bp, Artificial Sequence
  ENSG00000275437_17 (sequence is synthesized)
aatcattagaatccttgttttcctcatagaacttccaaccaggtttattttcacttttaactttgccattgcctaatgcccaaaagcaagtgggaactctgggcctccccagctgggttt

SEQ ID NO: 923022 - DNA, 120 bp, Artificial Sequence
  ENSG00000275437_18 (sequence is synthesized)
gagcaggtgctggggtgttccgcctgcagcctcctccccgccgccccctcctcccaaacccggtggcttacggcaccagcgtggcctctcccagctctggaggccagaagcccaacctca

SEQ ID NO: 923023 - DNA, 120 bp, Artificial Sequence
  ENSG00000275437_19 (sequence is synthesized)
aggtgtggacagacccacgctccctctgcaggctccagggaggatccttcctgccttttcccacttctggtggctccacgcactcccgggcttgtggctccagtttctgcctccgcctcc

SEQ ID NO: 923024 - DNA, 120 bp, Artificial Sequence
  ENSG00000275437_20 (sequence is synthesized)
gtgccgcactgttcctgcgtgtctgtgtctccatgtggtgatttcctcacagggacaccagtcattggattaggacttaacctgtgacatcttaacttgatgacatctgctaagaccctc

SEQ ID NO: 923025 - DNA, 120 bp, Artificial Sequence
  ENSG00000275437_21 (sequence is synthesized)
agggggcgacacagttcaactaagaccctctttccatccgaggtcccattcacaggtactggggttaggacttcaccctgtcttctgggggcgatacccttcaacctacaacagcccttg

SEQ ID NO: 923026 - DNA, 120 bp, Artificial Sequence
  ENSG00000275437_22 (sequence is synthesized)
gtgagtgtccacaacgctaatgaggtgagagtggcatcccctcaagcgaacaactttccccaaattgcagccagatgtggcccagcaaagagccagggtgcagccatcagcaagcagagc

SEQ ID NO: 923027 - DNA, 120 bp, Artificial Sequence
  ENSG00000275437_23 (sequence is synthesized)
cccccagttctggagggtgtgtgccgagatgcttctggggaaaggcctgggcctggggctgggctgcagctgtgggacaagctgctgtctgggccaggagccactcagcgtcgccaagct

SEQ ID NO: 923028 - DNA, 120 bp, Artificial Sequence
  ENSG00000275437_24 (sequence is synthesized)
gctgtccaagttaaaccaattcagcatctggcaccttgtttacaagcgtgatttgggggtttcttgctctccagctggcaagcagctggcagtggtcagctgaggccagagcctgggggc

SEQ ID NO: 923029 - DNA, 120 bp, Artificial Sequence
  ENSG00000275437_25 (sequence is synthesized)
acatctcccatggcagcccagagggcaatggacaccccccactccgcccagccctgtgaccccatatggatgctttcgctgggtgaggctgcagcccccgcagggagtgctggacttggg

SEQ ID NO: 923030 - DNA, 120 bp, Artificial Sequence
  ENSG00000275437_26 (sequence is synthesized)
cgcttttgctttacctgggacttgatgagatggggcacccgagaccagccacgcattccacagctgtgccccagggtccaggggatggggctgggggtggtcggacaaaaccactgccca

SEQ ID NO: 923031 - DNA, 120 bp, Artificial Sequence
  ENSG00000275437_27 (sequence is synthesized)
cacttggagctgggggcagccgaacaacaccactgcccacgccttcctggcgagagacggttccagtctccccggtgctggcgtgggcacgccgtgggacagaagcgcagtcattcggca

SEQ ID NO: 923032 - DNA, 120 bp, Artificial Sequence
  ENSG00000275437_28 (sequence is synthesized)
gaggctcccggctgttctcacattgtcagacccaccgtcaaggtcatttcaacggcccctttgcccggccgggcctcctgagttccctctgagcctcagagcagctcgtacacacagctt

SEQ ID NO: 923033 - DNA, 120 bp, Artificial Sequence
  ENSG00000275437_29 (sequence is synthesized)
tgggtttctaatggggatggggtcttcaggcctcagccccttctgggcatttcttccgttacaaaggaaaggaaatgtaccgaacactagaaacagtgtttaataaatagcagatttctc

SEQ ID NO: 923034 - DNA, 120 bp, Artificial Sequence
  ENSG00000233577_0 (sequence is synthesized)
ggtgcacctcagcgcacagtcccagcggccaggcttgtcccgcgcctctcgaccaagtctctacggtaatgatgaagcccctgctctggtccaagctacctgtgaacagcgcccagcggg

SEQ ID NO: 923035 - DNA, 120 bp, Artificial Sequence
  ENSG00000233577_1 (sequence is synthesized)
ggctggagaaagttgcgtgtctcaggctaagcagagcaaagtggggtgagggcttcgccgctaggaacagagatgcccttagggagccccctgatggaagagctctctgcttaagaaggt

SEQ ID NO: 923036 - DNA, 120 bp, Artificial Sequence
  ENSG00000233577_2 (sequence is synthesized)
cagcacgcccttacactcagttttaccacgtttttcaagatccaaggcacaataggcataaagttatcctgaaaaggacaagaggagtgtcagaagtaggaatggcagtcgaaggagctt

SEQ ID NO: 923037 - DNA, 120 bp, Artificial Sequence
  ENSG00000233577_3 (sequence is synthesized)
tatattgctaacgacttgaaaggaaaaaagctaactagagaactgactggtcttatttgttttagatttcgggctttactaagacttcctacactcaatctctggactgtaaatgctggg

SEQ ID NO: 923038 - DNA, 78 bp, Artificial Sequence
  ENSG00000286385_0 (sequence is synthesized)
aattttttgtatctcaatctcctgtgtctttaactcttcttaattccccactgatgacgaaaatgatagaaagcaata

SEQ ID NO: 923039 - DNA, 120 bp, Artificial Sequence
  ENSG00000286385_1 (sequence is synthesized)
cttaattccccactgatgacgaaaatgatagaaagcaataaaccagatttgaaattcagagtgaaacatctaagatcggtttatatgtgcaacttgacattccaaacaaatacttcaagt

SEQ ID NO: 923040 - DNA, 120 bp, Artificial Sequence
  ENSG00000286385_2 (sequence is synthesized)
gcatgcgttcaactccagtaaacacactgcgcatgctcctctcccaagtgctaccaggccactgggcgtgaggacagcccagcccaagggaagaattagaggagaagtaacacaagaccc

SEQ ID NO: 923041 - DNA, 120 bp, Artificial Sequence
  ENSG00000286385_3 (sequence is synthesized)
cagaagtatgccaaagtagaaaaccacaaatctaagggtcaaattgtgcgcttgatctttcaagtcgcccagcattgccttgtgctggtctgtgcgtttccccaggcttctctaggcctg

SEQ ID NO: 923042 - DNA, 120 bp, Artificial Sequence
  ENSG00000286385_4 (sequence is synthesized)
gtttaacttcatgaacttttcctgtagattctttgctgacttgcgatggaactggatcacgctactttctttcatttttgctctaaagctttttaataaactgtcgctcctgctctaaaa

SEQ ID NO: 923043 - DNA, 120 bp, Artificial Sequence
  ENSG00000286387_0 (sequence is synthesized)
gaccaagtcatcttctccttcaggcaagaggcttctaaactgagactggagttgactgctgatggatcatgattgaattccctctgaggatggctctctgaagaagataactgccttgcc

SEQ ID NO: 923044 - DNA, 120 bp, Artificial Sequence
  ENSG00000286387_1 (sequence is synthesized)
caaggtcataccccaaggggagcctgcatccaagaaaacatcagtagggaagaataaagacgtagccatcttggcagagctggggacaattctgaagggccttcctgtcccacagctctc

SEQ ID NO: 923045 - DNA, 120 bp, Artificial Sequence
  ENSG00000286387_2 (sequence is synthesized)
tttgagatcagctgatgcctttgttgcaatgcttgctgttcagcattttcttctgttcctgctcctctcattccttcaaagatatcccaggagctctccaataaacttagtgcatgcaca

SEQ ID NO: 923046 - DNA, 120 bp, Artificial Sequence
  ENSG00000286387_3 (sequence is synthesized)
tctccaccttggagtctggttcctgaacaacagaagccaagtcaatgttaaaatagttagaagatgatcaggctgtttctgaagccgtctgtcagaagtatggaatataattctaaatga

SEQ ID NO: 923047 - DNA, 120 bp, Artificial Sequence
  ENSG00000286387_4 (sequence is synthesized)
gaaggacaactttaacagaccatggtacaagtttctccagcttcctattgtaacgacagctagatggacaactttctataaacatctcttaaagaccatgaaagttggaaagaaggtgag

SEQ ID NO: 923048 - DNA, 120 bp, Artificial Sequence
  ENSG00000286387_5 (sequence is synthesized)
aggaactaagatgctatcaggatttcgtgaacttgctgagatccaagttctatcgtttggcagcaacatttgctttggatagttgattgcagcaggacggtgacccagggcaatgtttct

SEQ ID NO: 923049 - DNA, 120 bp, Artificial Sequence
  ENSG00000286387_6 (sequence is synthesized)
cagacaagggacactcgctaaaaattcggaatcccagaccctccttaggggtcagaatctgcagggcagggtctggtgatctgtacttagcagtcattccaggacgttcttataaatagg

SEQ ID NO: 923050 - DNA, 120 bp, Artificial Sequence
  ENSG00000286387_7 (sequence is synthesized)
gaagactgggaaaattaaactatgacaaaaagtccatccaatgcagctattgagagaaactatttttatagaaatgaaaacaacaacaaaatctctgcatagagccatcttttgttatga

SEQ ID NO: 923051 - DNA, 120 bp, Artificial Sequence
  ENSG00000286387_8 (sequence is synthesized)
gctgccttagtcacagtctcggaggcccaaacaactacttctcccatgttggttaccaagaaaaccacactaatgaaaacagtcaacaaattagatgttcagtctttcaaagcaccattt

SEQ ID NO: 923052 - DNA, 120 bp, Artificial Sequence
  ENSG00000286387_9 (sequence is synthesized)
tgatagagcaatagaatccctttggattctggaaaggcagattactttgtgccttccctttgtgtccaggatttgggatagataatgataaagtaactcgagtcttggaatctgaagata

SEQ ID NO: 923053 - DNA, 120 bp, Artificial Sequence
  ENSG00000286387_10 (sequence is synthesized)
ggcatggcaaggtcatcttctcagtgtttcctgaggatcctgtatttcttccagatgaccggtgttctttcttactttgttccctgtattacaaaaggcatagtcaaatactggttgatg

SEQ ID NO: 923054 - DNA, 120 bp, Artificial Sequence
  ENSG00000286387_11 (sequence is synthesized)
tactacacacatagccacatgctaagctaattcagtgctacagaacattatggtatttttatttgcaacctatcaggataaattatttagatgttatttcaatagtgttaggtcagaaat

SEQ ID NO: 923055 - DNA, 120 bp, Artificial Sequence
  ENSG00000286387_12 (sequence is synthesized)
atcttttctcctattcctttaaactataacaatttttttaatataacaagttgcttttcgttaaaagcatgaaaatagtcattcatgtaattcctgttgggtttgctaggaagttagcaa

SEQ ID NO: 923056 - DNA, 120 bp, Artificial Sequence
  ENSG00000286387_13 (sequence is synthesized)
ttttagactcaataattagatttagctactccacgtttcatgagaatattgggactatcagcatttcaccacttttaaatagtgataaccaagaagtcggcagaaaataagctttattac

SEQ ID NO: 923057 - DNA, 120 bp, Artificial Sequence
  ENSG00000286387_14 (sequence is synthesized)
atctatggtaatgaggcttgctgttcagagtctctaataattcctttgggtatcccaaggagtcagagccaacgaaggcaaaagtatgtctttttgacagtctaaagactttgcagatat

SEQ ID NO: 923058 - DNA, 120 bp, Artificial Sequence
  ENSG00000286387_15 (sequence is synthesized)
tgatttcctatccttttgacactcgtatggggttgatgtttccttcataaatgtacttggtttccctcagggtcactcagtgggtttctctgacaaatttacagttctggatagatttgt

SEQ ID NO: 923059 - DNA, 120 bp, Artificial Sequence
  ENSG00000286387_16 (sequence is synthesized)
gatcacatgataaagtctttgacaagtttctttccccccctcacccatgacttgaaaccattctttgctaattaaaaagtttcagtccgcttacaaaggctttatgaccaattaaggaaa

SEQ ID NO: 923060 - DNA, 120 bp, Artificial Sequence
  ENSG00000286387_17 (sequence is synthesized)
tctctactgaaaaacatttcagaaggtatgctacttagtttgcacaggaaaaacgtacaccgctcacgttgttgctcagaacttcagatatatataatggacaatttcactaagtatttg

SEQ ID NO: 923061 - DNA, 120 bp, Artificial Sequence
  ENSG00000286380_0 (sequence is synthesized)
cttttggggagacacaggccgagtagggaaggtctgagccggcagctcttgagacagaaagagaagggaactgttctcccgcaggctgcactatgcatgttacatgccgtgagcacaagc

SEQ ID NO: 923062 - DNA, 120 bp, Artificial Sequence
  ENSG00000286380_1 (sequence is synthesized)
agacgctgcgtaaacaggctggctctgcagggcatgaagaaggctgctctgagctagggccacacggcacctgctgggacacagggaggggtggggagtcctggaagatgagtgaccctc

SEQ ID NO: 923063 - DNA, 120 bp, Artificial Sequence
  ENSG00000286380_2 (sequence is synthesized)
agggagaggaggagactcctgttggagagcacacagatttcctggggtctatgccgggctggaaggctggccatcttaaggctgcatttgttcccgaacctaaggaccatgggagccacg

SEQ ID NO: 923064 - DNA, 120 bp, Artificial Sequence
  ENSG00000286380_3 (sequence is synthesized)
tccacgatggcagaggaagcaggtgccatgggagaaggaccttggatacatgcccaggaagtgaatcctcacaaccacgggcagcgcacagatgagcaaacaggatcaggacaatgaagt

SEQ ID NO: 923065 - DNA, 120 bp, Artificial Sequence
  ENSG00000286380_4 (sequence is synthesized)
gtttatagccaagtaattccaacctcttagccaagaccagagctaaaagggcaccttcatcacaccgccgacgttgaccccaggctgacaaatgtgacctgcttccgttggtctttgaat

SEQ ID NO: 923066 - DNA, 120 bp, Artificial Sequence
  ENSG00000286380_5 (sequence is synthesized)
cctcatttctatttgcttttcaactttattgtatatatcttttatgtaacttacttcaagttattttgtagggaaatgtgtaaaaaacccctgctttttgggatcatgaaaatatttcaa

SEQ ID NO: 923067 - DNA, 120 bp, Artificial Sequence
  ENSG00000286380_6 (sequence is synthesized)
agttagattatggtgatggttgcccaactttgtaaatatactaaagatcgttcaatggtacgctttaaacggatgaacttaatggtatataaattatctcaataaaacgatttgaaaaaa

SEQ ID NO: 923068 - DNA, 120 bp, Artificial Sequence
  ENSG00000260695_0 (sequence is synthesized)
ttaaagtaccatcctagcacatagtagatgcttaattaaaatgtctatgaagaagaaggggtcaattctgtcacttggcattcagattccctttttgctcactatagccttccactttaa

SEQ ID NO: 923069 - DNA, 120 bp, Artificial Sequence
  ENSG00000260695_1 (sequence is synthesized)
gaagagaaccaacatccctgttgaactggattcatctgcaaaccaggccagcaatcctggctcaggcaggccttccaggagggcaaactgtatagttctatagcaaagggggcattgtcc

SEQ ID NO: 923070 - DNA, 120 bp, Artificial Sequence
  ENSG00000260695_2 (sequence is synthesized)
tttctgaaatgccagatcctttataagctggagagttacagtcactgtttggtaattgccctgccccctgctagtgcttccattcttggctcttataataaagttcagtctcatgctcat

SEQ ID NO: 923071 - DNA, 120 bp, Artificial Sequence
  ENSG00000260695_3 (sequence is synthesized)
tttttatcttcctaaatggggcctgccatggagcagccatttgtattacgatcttaggcaaccatgactgttcccagccacagcatccctaatgccactgccttagttcagacccgtatc

SEQ ID NO: 923072 - DNA, 120 bp, Artificial Sequence
  ENSG00000260695_4 (sequence is synthesized)
atttctcccctggataattacaacagcccctaacaagtctcctagcattttggcatacactcctctattccattctctgtagcaggcagtaggccatttctaaagtacaaactaaatcat

SEQ ID NO: 923073 - DNA, 120 bp, Artificial Sequence
  ENSG00000260695_5 (sequence is synthesized)
ttcaccatgctttttaaaaccttccaataggctccccattgcctcaaagcaaaatttctcagactggattaatgagtgagtgttccacagggtgtgggctaggaatgagaatatagttta

SEQ ID NO: 923074 - DNA, 120 bp, Artificial Sequence
  ENSG00000260695_6 (sequence is synthesized)
acacatttgggaaaccctgggttaaacatggttaaccaggtatttttgtgtgtttgttacaggatttctcagagcctttaatatgctgatgcaaattgtgaatcttatcacaagagtgat

SEQ ID NO: 923075 - DNA, 120 bp, Artificial Sequence
  ENSG00000260695_7 (sequence is synthesized)
ataaaatcaacatttaccaaacttgctttcttggcagactatctttggttccactgagttgcagtttagaatttttcaagtatttccaagtcccttagtctggtagacaagtttcttcat

SEQ ID NO: 923076 - DNA, 120 bp, Artificial Sequence
  ENSG00000260695_8 (sequence is synthesized)
aatctgacccctgcttatttcttcagcacaagtctctacatttctcccaggtccttgcttcttgacaatttggttcctatgtacctgctttcctttatctaaagtcaaccatcctgttct

SEQ ID NO: 923077 - DNA, 120 bp, Artificial Sequence
  ENSG00000260695_9 (sequence is synthesized)
ttcatagccctggttaattcttattcatcctttgaatctcaggtcagtcttctctcctctgggaaatcttatcctatccccaccatacctcatcccaccccaccctcccttgggctgagt

SEQ ID NO: 923078 - DNA, 120 bp, Artificial Sequence
  ENSG00000260695_10 (sequence is synthesized)
tatacattcaccctatgacatcccatgctttttcctattatattaactttcacacaaccttagagtttcctgcttgtctctccttgtagattgcatgttcctttgggcagggctgtcagc

SEQ ID NO: 923079 - DNA, 120 bp, Artificial Sequence
  ENSG00000260695_11 (sequence is synthesized)
tgagtaaatgagtactgagaaatagaatgcattttgtgaaaacagttgttgactaagaattttctgaatgcagtcacactgatagtagataccttttcaggtgccaatccatctatggtg

SEQ ID NO: 923080 - DNA, 120 bp, Artificial Sequence
  ENSG00000260695_12 (sequence is synthesized)
taaacatgtctcttatactgaccatactctacaggtgttctctgtgatactatctcctgggaccatttaaattcacatgaagaaaactgagccgacctgactcattctctgaggattcga

SEQ ID NO: 923081 - DNA, 120 bp, Artificial Sequence
  ENSG00000260695_13 (sequence is synthesized)
acttaggaattgttagaagtttattcaaactgcagaatcataaactgcagagctctggtggccgttttgtgtatgagtaaatgggagcgatggaagcagttctgtagaaagagagggaga

SEQ ID NO: 923082 - DNA, 120 bp, Artificial Sequence
  ENSG00000260695_14 (sequence is synthesized)
gaagtgaagggcattgggctacagatgttcctcgatgtcccaataaacccatcatagagttgcatgatgttgaaaatattctaagtcacaaatacatttaatacacctaacctactgaac

SEQ ID NO: 923083 - DNA, 120 bp, Artificial Sequence
  ENSG00000260695_15 (sequence is synthesized)
atcataacttagcgtgccttcagtgtgctcagaacacttagattagcttacatttgggcaaaatcatctatttaacacaaagcctattttataataaaatattgaatagctcatgtaatt

SEQ ID NO: 923084 - DNA, 120 bp, Artificial Sequence
  ENSG00000260695_16 (sequence is synthesized)
tattgaaaactatactaaaagtgaaaaacagaatggttgcatgggtacctgaaatatggtttctaccaaatgtgtattgcctttgcaaccatcttaagtcaaaccatcataagctgggaa

SEQ ID NO: 923085 - DNA, 120 bp, Artificial Sequence
  ENSG00000260695_17 (sequence is synthesized)
ctgtctgtatttagaaaaaagcaaagatggagaggtattcctaaccccctgggttcctaatttctcacagatttctcatttcagcactagctgaggtctggctatcagcctgtcacagag

SEQ ID NO: 923086 - DNA, 120 bp, Artificial Sequence
  ENSG00000260695_18 (sequence is synthesized)
ttaggagtatgtcatcacagtgatttttctttcccctcctccagcctatttgaaggaggccctgttatgtgttaccaatagggtctttactaagcaatgtctagtttttttccttgaaaa

SEQ ID NO: 923087 - DNA, 120 bp, Artificial Sequence
  ENSG00000260695_19 (sequence is synthesized)
acttgaaatgtgaatggctctctcaacatgcttctctttgtaacagccacattgtgaatattaatggcagtacttaagcaggtcgattgtgcactgagaatatgaaatatgcatgtcact

SEQ ID NO: 923088 - DNA, 120 bp, Artificial Sequence
  ENSG00000260695_20 (sequence is synthesized)
taaaaacaaatgattgtccatacagtgcttgggctgaattattctccctcaggttgtcacacctgatgcagagggaagctaaggcaatgcatctgtgccagactttatagatcccaaggt

SEQ ID NO: 923089 - DNA, 120 bp, Artificial Sequence
  ENSG00000260695_21 (sequence is synthesized)
caggatcaaaatgtgcagattcaggaagatgctttttcactaatgatttgttaccgttaacttgacgcactgggtggatttatatagagaaaaatgttaataaaatgttcttcgagctac

SEQ ID NO: 923090 - DNA, 120 bp, Artificial Sequence
  ENSG00000286382_0 (sequence is synthesized)
gggacggaggggcgggcatcagcagggcttgaaggttgggcttcaggggcgggagagagcatgcggaggcaggaagccaggccctggggcagcaggtcgtgcgtatgggtgtgtgtcagc

SEQ ID NO: 923091 - DNA, 120 bp, Artificial Sequence
  ENSG00000286382_1 (sequence is synthesized)
cgggcctccgcccccgccctccgcggacgcctgtttatagtgataatcaggcccagcgcgccgcagccaaggaggccgtaaatccgcatccatcaccgcgcagccattcggtctgaatta

SEQ ID NO: 923092 - DNA, 120 bp, Artificial Sequence
  ENSG00000286382_2 (sequence is synthesized)
gccagtcactacggccttaattactttgtcaaagatgaaaaatagtaattgattttgtcctcgatcactttgttccctcctctcctgccttgcagataagcaaataaatatttttgaaaa

SEQ ID NO: 923093 - DNA, 120 bp, Artificial Sequence
  ENSG00000251298_0 (sequence is synthesized)
agaaagaagagcaggtgcgtggaagtgggtggaattgccgcagatggtccagcgggctattgcaaggattctggaagctgcgggaattatttgaggacacttgaagcacacctactacat

SEQ ID NO: 923094 - DNA, 120 bp, Artificial Sequence
  ENSG00000251298_1 (sequence is synthesized)
aattatttgaggacacttgaagcacacctactacattcttctgctggcgttattccagtttaaagaaagcttggggtcttgctgtgttgaccaagttggagtgcagtggcatgatctcag

SEQ ID NO: 923095 - DNA, 120 bp, Artificial Sequence
  ENSG00000251298_2 (sequence is synthesized)
aatatttaattatatagaataaagggagagaaatagtgaggggggatatggaaatgagttttacttttcctcccaaagtggaagaaaataacaacaatctgtgaacatgtttaaatgctg

SEQ ID NO: 923096 - DNA, 120 bp, Artificial Sequence
  ENSG00000251293_0 (sequence is synthesized)
gagtaaaggatattgttcattctgagcaattactcaaattgtttcacagtgtgttctatttatttgtatgagcatggttaatatgcaaactggatcatcccttggaaacctgaaagtgaa

SEQ ID NO: 923097 - DNA, 120 bp, Artificial Sequence
  ENSG00000251293_1 (sequence is synthesized)
acaataaaaaggaggaagaaggagccaggaagattggatgcagtagccaccaaggaaccctggtgatggcatctgcttggcttctagggaggcctcaggaagtttacaatcatggtgaaa

SEQ ID NO: 923098 - DNA, 120 bp, Artificial Sequence
  ENSG00000251293_2 (sequence is synthesized)
agtgaagctggagcaggcacttcacatggtgaaagcaggagcaagacacagtgaaatggtacaagtgccaaacactttaaaatgaccagatcttacaagaactcactatcacgaagacag

SEQ ID NO: 923099 - DNA, 120 bp, Artificial Sequence
  ENSG00000251292_0 (sequence is synthesized)
ccaactttttgttcattctaactcttaccacaccgagctttccttggtgtcagccacaggggtcactaagccatcagctgatcaagaaagtctcccgagtagctggactacaggtgcccg

SEQ ID NO: 923100 - DNA, 72 bp, Artificial Sequence
  ENSG00000251292_1 (sequence is synthesized)
aggaacatctcaccaattttaaatcaggttcccacgccgaccctaattcaccccccaaaaatttttgccacc

SEQ ID NO: 923101 - DNA, 120 bp, Artificial Sequence
  ENSG00000251291_0 (sequence is synthesized)
ggagaagaatccagccagaaacagccgaacttcagggggaaacaagaagaatcctagatgtctcaatgagatgaagaattgcctactgtttatcaccctgacccagtctttctccccaag

SEQ ID NO: 923102 - DNA, 120 bp, Artificial Sequence
  ENSG00000251291_1 (sequence is synthesized)
acaagtctcacaacaccgggaacctattctatgtctggaacctctatagtgtcctgcatagcttgcaatacacgtgcccatttactattttctaaaatgaagcataaaacatgaaaccat

SEQ ID NO: 923103 - DNA, 120 bp, Artificial Sequence
  ENSG00000251291_2 (sequence is synthesized)
taacatgaaagcagtgttggaagaagacaggaacgtggaagaataagacataaagagagagagagagaatgagggaactaaagattgtactgactggactgaaaaacagttgtgacaatt

SEQ ID NO: 923104 - DNA, 120 bp, Artificial Sequence
  ENSG00000251291_3 (sequence is synthesized)
tgggactttaaatcatcctcgcactcctatacttgagcaggcttgaaacaagctgagacaaccagatgcccaacctccaggaagccatattatctactttacctgtttaaatatggcaaa

SEQ ID NO: 923105 - DNA, 120 bp, Artificial Sequence
  ENSG00000251291_4 (sequence is synthesized)
aaaagtcttctccagagagcagcttgagagccatgaaagcaatggaccatggagctcctctcaagaggggataatcctcatccccaaggagtgggcactcataatttctgcctaggagac

SEQ ID NO: 923106 - DNA, 120 bp, Artificial Sequence
  ENSG00000251291_5 (sequence is synthesized)
aaatacagaacatttgttggttgctgtgtcttccattactctcctctctcagtgtgtattactgatattccctccctgctctctccccatatatcagatggatgcagtcagaatacttat

SEQ ID NO: 923107 - DNA, 120 bp, Artificial Sequence
  ENSG00000251291_6 (sequence is synthesized)
tttggtgtacagagcaaaataagctatattcagactcaagttagagactgctgagcataacccctgagacagaaacaatcatacatcataaaacaatcctgggctttgagctagatgccc

SEQ ID NO: 923108 - DNA, 120 bp, Artificial Sequence
  ENSG00000251291_7 (sequence is synthesized)
tgaccagagagagccggcttctctcacttggaaagtatctccttattttctaactacaggaaagaaagttagctgaatatgtggggcactgtagtagccattaaagctgttcaccaaata

SEQ ID NO: 923109 - DNA, 120 bp, Artificial Sequence
  ENSG00000251291_8 (sequence is synthesized)
gttggagagcaagaaaagaggatgttttcctgtcacttcctataagggtgctaatcacagtcatgtgagctccactcttatgacctaattatctcccaaaggctccatctcctaatatca

SEQ ID NO: 923110 - DNA, 120 bp, Artificial Sequence
  ENSG00000251291_9 (sequence is synthesized)
tcatattgaagaaatgaagcataaaacatgaaaccattaacatgaaagcagtgttggaagaagacaggaacgtggaagaataagacataaagagagagagagagaatgagggaactaaag

SEQ ID NO: 923111 - DNA, 120 bp, Artificial Sequence
  ENSG00000251291_10 (sequence is synthesized)
ttatagagctgagatgctcaagagttagccaccagccacaagtgactattgaatacttgggatggggctagtgtaacaaaggtaataaatttttaattctaatttattttaattaaaaaa

SEQ ID NO: 923112 - DNA, 120 bp, Artificial Sequence
  ENSG00000251291_11 (sequence is synthesized)
cacagctgattttgaagacttaagaaaaatggatttaatatatctcactaataatttttatgttgattacaagtggaaataaaaatattttggatatgttgcagtaaataaaatgttatt

SEQ ID NO: 923113 - DNA, 120 bp, Artificial Sequence
  ENSG00000251294_0 (sequence is synthesized)
aggacagagtgagagtgagagcaggcgtgaaagagcaagacacagagagagagagagagaggagagacagagagagagagaaggggaggtgggcgggggggggagagagagagacattca

SEQ ID NO: 923114 - DNA, 120 bp, Artificial Sequence
  ENSG00000251294_1 (sequence is synthesized)
atcagccctcaggaactctagcccctcacctaccatttgactgcaacttcatctctcctataccttttccggcctggctggagtcatcctcacaactgctgatactctcctaattcccca

SEQ ID NO: 923115 - DNA, 120 bp, Artificial Sequence
  ENSG00000251294_2 (sequence is synthesized)
ctagctggcttcgcatcgatgatcaggcacccgtcagaatgactaatcgtgctgctcactgcctgtcggatgttcatccaagtcttcccctgccattcacagaattcacgctacagcatc

SEQ ID NO: 923116 - DNA, 120 bp, Artificial Sequence
  ENSG00000251294_3 (sequence is synthesized)
tggtcaccattacaacgtgcaagccaagcttgcatgctttgatgcacaagccaccatgttgaagaggatcatggagtcaagaactgactgtggctgaaggccaatagccatcaagaaact

SEQ ID NO: 923117 - DNA, 120 bp, Artificial Sequence
  ENSG00000251294_4 (sequence is synthesized)
gaggacctcagtccaacgacccatagaaacaggaacctgccaacaaccacccattgagcaacacctcagatgaaaccttaattgcaaccggcaagaaatcttaaagcagtggatccaagc

SEQ ID NO: 923118 - DNA, 120 bp, Artificial Sequence
  ENSG00000251294_5 (sequence is synthesized)
aaagcctgcctgcattcctgacctacagaacttgtgagataatggatgtaggttgttttaaagagctaaattttgtgatagtacgttacacattaataggaacctaacacaataacaatc

SEQ ID NO: 923119 - DNA, 120 bp, Artificial Sequence
  ENSG00000251294_6 (sequence is synthesized)
aaacaaattaataagaattcaatatcatagatatctttttcttttaataagaattagatattctacattttagcaaaaggtatcagttgcttatgatcatatgtgtgtgaagggacaaag

SEQ ID NO: 923120 - DNA, 120 bp, Artificial Sequence
  ENSG00000251294_7 (sequence is synthesized)
tttacaattttgttttggtgaaaaatttattgcttatcaccttatctcacagatatacttcttttctgcatatttacgactgtgaatatagaaaatgtatttcaactgacagtacggttg

SEQ ID NO: 923121 - DNA, 120 bp, Artificial Sequence
  ENSG00000251294_8 (sequence is synthesized)
aattaaaaatagtttactcagtgtcacaaaataatggaggttatccaattgagaaacctcaataattgatcaatgcgttaatggtacacattaatgctttttgtatttctttattattgg

SEQ ID NO: 923122 - DNA, 120 bp, Artificial Sequence
  ENSG00000251294_9 (sequence is synthesized)
gggtaaaactacagaaacacacttgccattagaaagtcagaagtcaactgagaaaagctctcaggtttatatacataattcttatggcaaaaataacttttggaggagttatttgtttca

SEQ ID NO: 923123 - DNA, 120 bp, Artificial Sequence
  ENSG00000251294_10 (sequence is synthesized)
tttgttcacatttactggtgtgctcctatttaatcaatacagtaagattgattaatagacataaatggaacttttgaaatgtaaggcagtttttcaatctatcataaaatatttgtggta

SEQ ID NO: 923124 - DNA, 120 bp, Artificial Sequence
  ENSG00000251294_11 (sequence is synthesized)
atcagagcccctgatggaatattactattgtattttcaattttttaaaagatgactagacttcttctcaagattgtgcagtatgctatttgcaacacattgaggacacagccctctgaga

SEQ ID NO: 923125 - DNA, 120 bp, Artificial Sequence
  ENSG00000251294_12 (sequence is synthesized)
gatgtaatccaaaccgactgcttcagaaacatactagtaactgatttgagtgtcattgtcattatctaggataattctagagtacttccatatagaaaaaaatgttaaataatgcaatat

SEQ ID NO: 923126 - DNA, 120 bp, Artificial Sequence
  ENSG00000251294_13 (sequence is synthesized)
agtgattttcattccattcctactgaaggtacctctttcttaagagaaaaaaaaaatggataactgaagtgcaaatcagccatagggaatatgtggagagtatcagcactgcctgtagct

SEQ ID NO: 923127 - DNA, 77 bp, Artificial Sequence
  ENSG00000269349_0 (sequence is synthesized)
taaggtttctctccagtatgaattctcctatgtcttttaaggcgtgatctgtgactgaaaactttgtcacatgacgt

SEQ ID NO: 923128 - DNA, 90 bp, Artificial Sequence
  ENSG00000269349_1 (sequence is synthesized)
gtcttcccactatgaagtctacgatggcatggaagagatgacctgtgactgaaggtcttgtgacactcattacacttgtaaggtttctct

SEQ ID NO: 923129 - DNA, 120 bp, Artificial Sequence
  ENSG00000269349_2 (sequence is synthesized)
tgtcacattcttcacatttgtaagatttctctccagtatgaagtctatgatgacgtgcaaggcttgactgatgaataaaagccttaccacagtcattacacttgtaaggtttctctccag

SEQ ID NO: 923130 - DNA, 67 bp, Artificial Sequence
  ENSG00000269349_3 (sequence is synthesized)
gattaaaaatgaattacaagggttgaattttgaccaaacatcttgccacactcattacacttgtaag

SEQ ID NO: 923131 - DNA, 90 bp, Artificial Sequence
  ENSG00000269349_4 (sequence is synthesized)
tgccacactcattacacttgtaaggttttattccagtatgaagtctacgatggcatctaagggatgacttgtaactgaaggactttccag

SEQ ID NO: 923132 - DNA, 79 bp, Artificial Sequence
  ENSG00000269349_5 (sequence is synthesized)
gaaggactttcctatgatggcatgtaagggatgacttgtaactgaaggactttccacattcattacacttgtaaggttt

SEQ ID NO: 923133 - DNA, 120 bp, Artificial Sequence
  ENSG00000260995_0 (sequence is synthesized)
acctagacagatctcaaaaatgggagaccacatgcaaaggaaactacgttttcacaacacatggttggagaggtcaaagaaaatgtgatgtattactttcagttttatcatcagcgggac

SEQ ID NO: 923134 - DNA, 120 bp, Artificial Sequence
  ENSG00000260995_1 (sequence is synthesized)
catctggggctagtggtggggctcgaagaaggaagaagaaaataaagaagagaatcagatccccaaagtagagagactgaattacagcaatgacctcgacttgcatttactaggatgagc

SEQ ID NO: 923135 - DNA, 120 bp, Artificial Sequence
  ENSG00000260995_2 (sequence is synthesized)
tgttgtgagagtaaatatgaaagctggaattcataattcattcaacctgtgtttcatccacttaccccaaaccaaaacataacaatcattgagcatccaccattcacatgtaactgtggt

SEQ ID NO: 923136 - DNA, 120 bp, Artificial Sequence
  ENSG00000260995_3 (sequence is synthesized)
ggagagagagatgaaaaaacacaatgcctaacctcaaggagtttacacactactcagagagataaataccatagacaaataattatactatactgtaaggctacttgggctaaacctata

SEQ ID NO: 923137 - DNA, 120 bp, Artificial Sequence
  ENSG00000260995_4 (sequence is synthesized)
ccaaaatcacaaggacattgaggctcagtaaggtgagatgacttgctccagatcacacagggttgaagctgaaattttaatctagagtccagttccagaatctgtgcttataaactgtgc

SEQ ID NO: 923138 - DNA, 120 bp, Artificial Sequence
  ENSG00000260995_5 (sequence is synthesized)
tgtgctgtatttgctttaagaatataagggtcatttcctgcttgaataatcaaggaaggcatgatggaaaagttaggggcatcataaaacccaaagacaattctgatcatatttttactt

SEQ ID NO: 923139 - DNA, 120 bp, Artificial Sequence
  ENSG00000260995_6 (sequence is synthesized)
caacacttctacaggaaagaaagccttcccatcactaatagtgagttctctggcagcaagcctcagtcattgcagcaggaatactgcttaaatattatactggtatgtgtggggtaattt

SEQ ID NO: 923140 - DNA, 120 bp, Artificial Sequence
  ENSG00000260995_7 (sequence is synthesized)
gaagtctaccatccatcaccatcaccaccaaacctaatgtatgagttgcctattccttcccgggatagcacactgcactactgaggatcactgttctatggaagtagttttcaaacttga

SEQ ID NO: 923141 - DNA, 120 bp, Artificial Sequence
  ENSG00000260995_8 (sequence is synthesized)
gcatgcataaaaagaagagcgaagaggcttgttaaatacagctctctttcagcaggtctggggtacttactactaatgagcagtttttaggaagcatcctagatgattccgtgtatccag

SEQ ID NO: 923142 - DNA, 120 bp, Artificial Sequence
  ENSG00000260995_9 (sequence is synthesized)
gtgggccacagaaacatttgcaaaaacattacatcggagccattgttgactatccctaatctgtaagaagccaatagtcatcgagacccaatggagcaatgcagcagaatgggggaagcc

SEQ ID NO: 923143 - DNA, 120 bp, Artificial Sequence
  ENSG00000260995_10 (sequence is synthesized)
gaaaagcaagatggtaaggcagaagggaatggggaaacccaaacaatgaagaaatagatatcatctatatatctatatctttcaatttatctatatatccgattaccaacttcatcagga

SEQ ID NO: 923144 - DNA, 120 bp, Artificial Sequence
  ENSG00000260995_11 (sequence is synthesized)
aaacctatttcagtttggtgaatggaaagggaaccagccaaaaaatagttattattttcatacatcttagtattttattttcctaaggactatcctcatgaaatatatacatacattata

SEQ ID NO: 923145 - DNA, 120 bp, Artificial Sequence
  ENSG00000260995_12 (sequence is synthesized)
catttacacatatgcatatacatatttgagaatacacacactttggcttcttaggccatcttagctttattttaaatataaagaaactggtgctgattctgcatatcatatatatttgac

SEQ ID NO: 923146 - DNA, 120 bp, Artificial Sequence
  ENSG00000260995_13 (sequence is synthesized)
tatacttctataaagcagaagtcaagagccatgattattgtgcaacagtatctgcacaattagaatattagcaatagcacagttttacttttgttttacagttttcgaactataaatcaa

SEQ ID NO: 923147 - DNA, 120 bp, Artificial Sequence
  ENSG00000260995_14 (sequence is synthesized)
gtatgaatggctgatggaaagccgaggctagcaaatagatgataaaccatgttaccatgggaggtacagattcatttttaattttagtttctatgttatccccaagcagcttttttgtat

SEQ ID NO: 923148 - DNA, 120 bp, Artificial Sequence
  ENSG00000260995_15 (sequence is synthesized)
attgatacggaaaataatgccatctatatgctgcacaacagaagtgttgatttgtttctgtaccccttggcttgcatccctgttgtcatcacccagctgatatcattgtgacattttgac

SEQ ID NO: 923149 - DNA, 120 bp, Artificial Sequence
  ENSG00000260995_16 (sequence is synthesized)
attgccttgtgacacagtgacctggtgcttccaggagcctagaaggacaagttgactaagacacatggtgcattaggaagcaatgaagcaattcattacggctacagagagagtctgctc

SEQ ID NO: 923150 - DNA, 120 bp, Artificial Sequence
  ENSG00000260995_17 (sequence is synthesized)
tggagacaagaattcttatctaaagcacaaaatactctcgattctatttgctgttctgctactgatttactatgagatctgtaacaaataatctcaattcatttgtaacttagatttccg

SEQ ID NO: 923151 - DNA, 120 bp, Artificial Sequence
  ENSG00000260995_18 (sequence is synthesized)
tctgtaaaatggaaatgacccaacatatgtgatttttttaaaatcctagggcagtgattgcatttgcaacccattcttgccaaagagaaattcggaagcacacttcaaggaactaagttc

SEQ ID NO: 923152 - DNA, 120 bp, Artificial Sequence
  ENSG00000260995_19 (sequence is synthesized)
agtgataatcacacttgattgattttcagtactgtcacagtttgagaactatttattgccctgatttgctcttttctctgccctgtattaaagatcttgcatgacagttgatccatgaaa

SEQ ID NO: 923153 - DNA, 120 bp, Artificial Sequence
  ENSG00000260995_20 (sequence is synthesized)
aatggagaaggagacacctgaccgagaaactgttcttcactaagtaggaagatggtgccagccgctacccattcttactcacctatttagtatgggttaagagtaagggaaactctaatc

SEQ ID NO: 923154 - DNA, 120 bp, Artificial Sequence
  ENSG00000260995_21 (sequence is synthesized)
ctgaccccttggcttcatcattgtgaagattcgcttcagattaaagtgtttaatttttgcaagaacactatagagctgatgtggcctcagtgtatcacagcaagggaacagactgttaat

SEQ ID NO: 923155 - DNA, 120 bp, Artificial Sequence
  ENSG00000260995_22 (sequence is synthesized)
tatcacagcaagggaacagactgttaatttattccattaaaggtttttcaagacttactactattgtaaggagtttaagaattaataaataacggaggaggagccaagatggccgaatag

SEQ ID NO: 923156 - DNA, 80 bp, Artificial Sequence
  ENSG00000260996_0 (sequence is synthesized)
gggctcccaccgacctcgcccgggcgcaagggccggagcccccgggttcccgagcctcggagccgccgcggctgtgctgc

SEQ ID NO: 923157 - DNA, 80 bp, Artificial Sequence
  ENSG00000260996_1 (sequence is synthesized)
cttcctgccagcccctcggccccagggaggcggggcgggcgccggggtagacggcggggccatgtgggctttgctagctc

SEQ ID NO: 923158 - DNA, 120 bp, Artificial Sequence
  ENSG00000260996_2 (sequence is synthesized)
gggagcggggcggggtgggaggctgcggggagccgggccccaatgcccggaggtcaggggcgccctggggcagaggaagcggcaggtaccccttagcgactcgtggcttctgcagcccct

SEQ ID NO: 923159 - DNA, 120 bp, Artificial Sequence
  ENSG00000260996_3 (sequence is synthesized)
agaaggacccccagacgagggtctggaaaagtgaccccttcatagtcctaaacaagcagttggcaatggtgtgccgttctccacgcggtccgatgggaaagggaggccctgagccgcaac

SEQ ID NO: 923160 - DNA, 120 bp, Artificial Sequence
  ENSG00000260996_4 (sequence is synthesized)
gagtaagtagatagtcagcaggaccacgtggacgcgaccaaccacaggtcacacttcggacgggagcaggacccggcgcccatccctcaggaccgccgagagccgggccctctgggccgc

SEQ ID NO: 923161 - DNA, 120 bp, Artificial Sequence
  ENSG00000260996_5 (sequence is synthesized)
aggtgccgctaccttagccatggagccgcagcagaggaggccggcgctggaattgcaggctcgtcctggctgccccgccgcactcctctcacggaagtggctgtgccggaggcgcgagaa

SEQ ID NO: 923162 - DNA, 120 bp, Artificial Sequence
  ENSG00000260996_6 (sequence is synthesized)
tcacacccgctatgtgtttaaatggataaaacgctcctcaggtctgtgagcctgcaaacaaggtccccactgccatctgctggccccacagacaagaacccacacaggaatgaagcccaa

SEQ ID NO: 923163 - DNA, 120 bp, Artificial Sequence
  ENSG00000260996_7 (sequence is synthesized)
aatatcccataaactttccaaagagaaatgacaaaactgaaatagtagtggtgtcaaaacacagtgtacttctcagcccaatgaagctgggatgggtggcccagggagccccagacttca

SEQ ID NO: 923164 - DNA, 120 bp, Artificial Sequence
  ENSG00000260996_8 (sequence is synthesized)
tggataggcttttcgttcacatggctcaaaatggcaccccagatccagccatcacatctgcactccagccagcagaaaggaggcagggccctcttcttcaaggatgcctcccaaaagttg

SEQ ID NO: 923165 - DNA, 120 bp, Artificial Sequence
  ENSG00000260996_9 (sequence is synthesized)
tgttgccacagctgctcacatcccattggctagaacgtagtcatacgacccacctcactgcaagggaggctgggaaatgtagtctttaatctgtgaaatgtgcccgcttaaaacggagcc

SEQ ID NO: 923166 - DNA, 120 bp, Artificial Sequence
  ENSG00000260996_10 (sequence is synthesized)
atggaggaagaaggactagcgatctggggggtaggggttgggtgggcgaaaggctgtgcctccctcggtggcgtcaacatcctggccatgttgtcacatgcacttgctggcaaaattccc

SEQ ID NO: 923167 - DNA, 120 bp, Artificial Sequence
  ENSG00000260996_11 (sequence is synthesized)
aagccatgcgctcacagtttgtgcagtgatgagtgtggcaaacacagctcagttaaaaataaacatcattttatagattagctgaagaatacaatgtcccacgagactatgtggccatca

SEQ ID NO: 923168 - DNA, 120 bp, Artificial Sequence
  ENSG00000260996_12 (sequence is synthesized)
ggaaattaacttttctgacctaatggcccaggaagcactgcgggcagcgtctcgccccgtgtaacgcagcacccgcagaagtgcccgggatcagcctttgcctcggcgggatcctggttc

SEQ ID NO: 923169 - DNA, 120 bp, Artificial Sequence
  ENSG00000260996_13 (sequence is synthesized)
ctggttcttccaagggcatggcgaggtccccgctcccttatcttgaggaaagtaataagtaacccagctctttcaactcccaaggttactttgtcaataaagtgcgccttctcaagtctt

SEQ ID NO: 923170 - DNA, 120 bp, Artificial Sequence
  ENSG00000260997_0 (sequence is synthesized)
agccccatcagcccctcagcccttagccctcagcccctcagccctcagccccctcagacccctcaatcccctcagccctcagccctttagctccttcctcttttccatcagttggtgttc

SEQ ID NO: 923171 - DNA, 120 bp, Artificial Sequence
  ENSG00000260997_1 (sequence is synthesized)
tctgtgcccccagagctgtgctctccttcttatggggcaacctaaattcagagagcaccctggcttggtttgccactttgttgtgtgggcaggttcacgtcttccaccagggcctttggg

SEQ ID NO: 923172 - DNA, 120 bp, Artificial Sequence
  ENSG00000260997_2 (sequence is synthesized)
tggcatatgacagtttgggactgtccagtctctgtactttctggggcctctcctgttgaatggctaggcacctgcaggtgtaggggctcagggtcacctccggcctgcaggtcaatgtct

SEQ ID NO: 923173 - DNA, 120 bp, Artificial Sequence
  ENSG00000260997_3 (sequence is synthesized)
tgctgctcctgtcctggggagggcagctctctcctagcccaacccaaaagcccccagaagcctccacacagccagctccggagtctgtccttggcttaggtggcttcaggactgggccag

SEQ ID NO: 923174 - DNA, 120 bp, Artificial Sequence
  ENSG00000260997_4 (sequence is synthesized)
gcacctccctcacaggacaatcagacatgaagggtacctttcaatcacacaatcctacacagtcctagacattaggtgggtcctctgccctctgcaggtgacctcatcagagagcccagc

SEQ ID NO: 923175 - DNA, 120 bp, Artificial Sequence
  ENSG00000260997_5 (sequence is synthesized)
agcatctgcccatttcctgtctacattctcctccctagtgcactgggagtgggaggagagcccaaagctcccccagatctttaggaagccccactgtcaggctgagtggagggccttagt

SEQ ID NO: 923176 - DNA, 120 bp, Artificial Sequence
  ENSG00000260997_6 (sequence is synthesized)
gacaagtgataacttcagggaagtccagagtgggagacacatctggggtccagcttgctggtgggcactccctgctcatgcccacagcctcgaggggaaaaggtcataattgacaggtgg

SEQ ID NO: 923177 - DNA, 120 bp, Artificial Sequence
  ENSG00000260997_7 (sequence is synthesized)
ttcactatagtgaatagaaaaactcacgaagcaccatagttccagcactttgcaaatatcccccacccaatacctttgaggtgagagttaccatcattgcctagttactggtgagaaaac

SEQ ID NO: 923178 - DNA, 120 bp, Artificial Sequence
  ENSG00000260997_8 (sequence is synthesized)
agaggttccatgacgtgcctgaggcactgagggggatgatgtcagcacttgtggccgcacgtgcaggcacacgccctccatgtcacaccagtgcactcactttgcagatgaggagcgatg

SEQ ID NO: 923179 - DNA, 120 bp, Artificial Sequence
  ENSG00000260997_9 (sequence is synthesized)
cctgagcactgggatggcatcattggcttgtgttggacagtgcctatataggagtccagcttctacccacttgttccagtctatccacattttccaccaacagaacgagtttactagaaa

SEQ ID NO: 923180 - DNA, 120 bp, Artificial Sequence
  ENSG00000260997_10 (sequence is synthesized)
cctctcctcaaattggtacaaggactacatgacatggcatgtgatgacacacacacagaggagatcctttttccagcatgcaggaagaggagatcccatacatgggcttgggggtggctt

SEQ ID NO: 923181 - DNA, 120 bp, Artificial Sequence
  ENSG00000260997_11 (sequence is synthesized)
ccctcactgcagtgtccggtcccccagcagctctgggagcaggagtgactatctccgttttgcagatgaggaagcagaaccataaaggtgaccttttttctttttcttttttacatttaa

SEQ ID NO: 923182 - DNA, 120 bp, Artificial Sequence
  ENSG00000260997_12 (sequence is synthesized)
agttaaattggtctcccctcaaaaaatgcttagacttaattattttaattatcctcacatatactcctccggcttctttactgaagtgtaatttacacaccataaaacttaccatttgaa

SEQ ID NO: 923183 - DNA, 120 bp, Artificial Sequence
  ENSG00000260997_13 (sequence is synthesized)
aacgtgcaattcggtaatctttagtatattcataaggttgtgcaaccaaccaacaccattatctaattttagaacattttcatcaccccaaaacgaaacccatacccatcagcagtcact

SEQ ID NO: 923184 - DNA, 120 bp, Artificial Sequence
  ENSG00000260997_14 (sequence is synthesized)
cttcgttacctggtagtaattacctacccctaccctcagcccttggaaaccactaatgtactttctgtttcttcagttatgcctattttggatatttagtataaatgggatcatacaata

SEQ ID NO: 923185 - DNA, 120 bp, Artificial Sequence
  ENSG00000260990_0 (sequence is synthesized)
agtgtgtgccttactatgtgtgaggaggtgctgtcttgctttcagtgtgtaaatatcatgccttgatggagaaactgcagcagagaggccccgctgccccagcacatctgtcacagccca

SEQ ID NO: 923186 - DNA, 120 bp, Artificial Sequence
  ENSG00000260990_1 (sequence is synthesized)
cacaacacctccagagtgagagcaacaaattcaacgaactgccaagttgtctgtaccacctgggtgcaagcaggaatgaagaaactggcccagagaggtgaaacaacccagccgatgtca

SEQ ID NO: 923187 - DNA, 120 bp, Artificial Sequence
  ENSG00000260990_2 (sequence is synthesized)
tgtcgtagctaagatgacagctgttggcctgtacctcggccctcaagtttcccatgcaatgtgcttcctactattcattgttgccccgtctctaggttgttatcaaatggaccctgccag

SEQ ID NO: 923188 - DNA, 120 bp, Artificial Sequence
  ENSG00000260990_3 (sequence is synthesized)
ttcttcctgcaaagaggacagtccaggtctgctgatgggtttccaacacaggaaactcaggggttctaatacctcctcttgacccagtaactgacaagccctgagcctcaggattcctgg

SEQ ID NO: 923189 - DNA, 120 bp, Artificial Sequence
  ENSG00000260990_4 (sequence is synthesized)
ccctgtcccctctcacctcctctgccaaaccatggtactagaagaaaattacaagagaaaatatgacacaaattgtgaaaatggtatacagcagctcagctttgggaaacgtgagtcctg

SEQ ID NO: 923190 - DNA, 120 bp, Artificial Sequence
  ENSG00000260990_5 (sequence is synthesized)
tctgcttatggatgtatcgattcatgggtattacacttgtctcccaagttgcttgctgatgctttcaaggtcaggtaataacattctccaaggaactaagcggagtggctgtcctcattt

SEQ ID NO: 923191 - DNA, 120 bp, Artificial Sequence
  ENSG00000260990_6 (sequence is synthesized)
ctcccctgacctgcaggctggctggctggttgccttgcttctgggagatggccaggcagcctgttgctccctgtgcccctcaccgaccaggcagctcactccctttgtggcagcctcatg

SEQ ID NO: 923192 - DNA, 120 bp, Artificial Sequence
  ENSG00000260992_0 (sequence is synthesized)
ccgatggacagttccttacctgccgggtcggcctccgcagagagtggtggtcttgaaaacccagttttgggagaatacctgccgcgcctcccgcccaaatacccagaggtttcatagccg

SEQ ID NO: 923193 - DNA, 120 bp, Artificial Sequence
  ENSG00000260992_1 (sequence is synthesized)
ccatcgctgcggtggaggaggccgcctgttgcgtcccaccccaccagaaagcctaacactggcctgaagcgtaatcttaaagtggtaggggaaaataccgatctagcgcagagagcaaaa

SEQ ID NO: 923194 - DNA, 120 bp, Artificial Sequence
  ENSG00000260992_2 (sequence is synthesized)
cacctccgttctgggtttaatgggcaggtctggaggtgaggtatgccgtccgcactcaataattacttgcaggatcggattgtttctccagtgggtggggactgcaggatgtagcattga

SEQ ID NO: 923195 - DNA, 120 bp, Artificial Sequence
  ENSG00000260992_3 (sequence is synthesized)
atggcccagacattttccagacctcttctgtcctaagagtggagctgggtgacagagcaggtgcaagccggcctttccctgcctccccggggaacgcactctgttcggtgagagcaactc

SEQ ID NO: 923196 - DNA, 120 bp, Artificial Sequence
  ENSG00000260992_4 (sequence is synthesized)
agctcgcattgactcctttcagctgcaggagtgtggccgttcagttctcatttgaactgttgacaacagttgtcttctgagaatcatgagttagagcctccctttaggcttctgactccc

SEQ ID NO: 923197 - DNA, 120 bp, Artificial Sequence
  ENSG00000260992_5 (sequence is synthesized)
tcaaaagtaccagacaacacaaacttttcccctcttgttaccttggctctctaagctgtatctacttctatacaaggcgaacaattttgtctttttaaattaaaaacaacaacaaaagca

SEQ ID NO: 923198 - DNA, 120 bp, Artificial Sequence
  ENSG00000260999_0 (sequence is synthesized)
tggaaagtgaaaatagctaacagtgaagtagccggttcatcttttacttacatatcttttctgttcagtgtactttgggcagccatgctgacggcctcagtggcaaaggctccatgggta

SEQ ID NO: 923199 - DNA, 120 bp, Artificial Sequence
  ENSG00000260999_1 (sequence is synthesized)
aacagcgagttcttggatgaccggatcagggtatgtgttggataccttctccaacagaggcaacaactgcttcagaacagcaaaatcacttgacttcaactacaaaatgaaataaaaaat

SEQ ID NO: 923200 - DNA, 86 bp, Artificial Sequence
  ENSG00000261642_0 (sequence is synthesized)
gacctgcagcccaccatgcctgagcctccgccccctccgtgggctcctgtgcctcccgagcctccccgactagtgtggcccaaggg

SEQ ID NO: 923201 - DNA, 87 bp, Artificial Sequence
  ENSG00000261642_1 (sequence is synthesized)
gctccacggcgcccagtcccatcgacggcccaagggctgaggagtgcgggcgctcggcgcgggactgtacactgggtgaagccagct

SEQ ID NO: 923202 - DNA, 120 bp, Artificial Sequence
  ENSG00000261642_2 (sequence is synthesized)
gccctgtcaaaacagaccactcagctgttgtgaccctgtcaaaacagacccatcagcaggatgcaggtggggccagataagaaaataaaagcaggctgctcgagccagcagtggcaacca

SEQ ID NO: 923203 - DNA, 120 bp, Artificial Sequence
  ENSG00000261642_3 (sequence is synthesized)
ggggccagataagaaaataaaagcaggctgctcgagccagcagtggcaaccagcttggtccccttccacactgcggaagctttgttcttttgctctttgggtccacgctgcctttatgag

SEQ ID NO: 923204 - DNA, 120 bp, Artificial Sequence
  ENSG00000261642_4 (sequence is synthesized)
ttcttgaagtcagtgagaccaagaagccaccaattccggacacataatggtgaatgagaactacaaagttaaagatggctgatgacggttttcaggaagtggtcttggcttttttttttt

SEQ ID NO: 923205 - DNA, 120 bp, Artificial Sequence
  ENSG00000261642_5 (sequence is synthesized)
ttttcctcctaggaagttgttgtttaggatcctaattctaattcagaggtgcattctaaagagtattctccattgccttgcctactggtattaatttcgattggcttgtttgcgtatttg

SEQ ID NO: 923206 - DNA, 120 bp, Artificial Sequence
  ENSG00000261642_6 (sequence is synthesized)
catgaggaaccgaactgtcgttttcataaacaaacgaaaaactgagttttctcagctctgaagaaaaagggcattttgctcctcccagctgaaaggcgcccctgggtaaccaggggccaa

SEQ ID NO: 923207 - DNA, 120 bp, Artificial Sequence
  ENSG00000261642_7 (sequence is synthesized)
gtgggagtgtctgggggggttgacctcccccgcccccccccacaatgtgcagtgtccctacagggaactcctaacaaaattagttttaaaatgctcatacaggaagtgcatatagaagct

SEQ ID NO: 923208 - DNA, 120 bp, Artificial Sequence
  ENSG00000261642_8 (sequence is synthesized)
gatcactccacactttgagccctcctggaggtgctagaccaatggagagagaaactgaggcaagtaagagggcggaaatgaatcagtggtgacacactatgaagtcccacacagaatcag

SEQ ID NO: 923209 - DNA, 120 bp, Artificial Sequence
  ENSG00000261642_9 (sequence is synthesized)
cacacacgactcactccactaaaaaccttggccacagctcagttcctcattttgagaaaaaaaaaatgtgaaaaacaaatcgtctatgaataatgaaagacaagaagagtgacccctctc

SEQ ID NO: 923210 - DNA, 120 bp, Artificial Sequence
  ENSG00000261642_10 (sequence is synthesized)
ccctatttggttttatggtgcccctacttgcaggtggttgtgtaaatggaagggcacgccaggtttttcagttctccaggtggttacacattaggtctgttcttgtgaacattttaaatt

SEQ ID NO: 923211 - DNA, 120 bp, Artificial Sequence
  ENSG00000261642_11 (sequence is synthesized)
gacaggtaaattgcattaaggaaaattcagagcctgaaggtcgacctgcacctataaagttcccaagttctccatcactctgttttcttttctgcctgttttaagtctgctgtgacttct

SEQ ID NO: 923212 - DNA, 120 bp, Artificial Sequence
  ENSG00000261642_12 (sequence is synthesized)
ctactgagataaaaatccactgtttgcatccaaccatttattttgctatagtttttgcaaaccaatgagtttgtattaatatcttatggctagggttctgaagtaaaagctataggatct

SEQ ID NO: 923213 - DNA, 120 bp, Artificial Sequence
  ENSG00000261642_13 (sequence is synthesized)
ttgcatgagtttatatgtgtgggtttatgtatatgtacacatattttgtaacatgtttttggccactaggtacaaaatttggcttaaagaatactcaaaaactaaataatcccaaatgct

SEQ ID NO: 923214 - DNA, 120 bp, Artificial Sequence
  ENSG00000261642_14 (sequence is synthesized)
tttcaagttcatgtgaattaggtaaaatctttaataagctagctttaaagttatttgtaaaggaatattacaaatgtgttaagaaatgtctgcacacatttttgtttgcatttattgatc

SEQ ID NO: 923215 - DNA, 120 bp, Artificial Sequence
  ENSG00000261642_15 (sequence is synthesized)
aagagatgtcatacttattattgtcaaatactataagtcgtcaaaatttgacataagggttattaaactataaactcagcccaaaacagaattatcttcgcttgtattttttataaataa

SEQ ID NO: 923216 - DNA, 120 bp, Artificial Sequence
  ENSG00000261642_16 (sequence is synthesized)
gacattaatattggtttaatgaaaacagcccagtctttaattatttagtaaaataaccatatgttgactcttaagtttcttatgtaaacacttgaaattcacaggctataaaatggctga

SEQ ID NO: 923217 - DNA, 120 bp, Artificial Sequence
  ENSG00000261642_17 (sequence is synthesized)
caggcaaataactttaaatgatcactatctcagttttcataaattaggtaaactagtaaaataaaacaattaggaaaaggtaatgggataaatacttgtagaaaaatttgtcataattta

SEQ ID NO: 923218 - DNA, 120 bp, Artificial Sequence
  ENSG00000261642_18 (sequence is synthesized)
gaacctaaagttaaattaaataatggattttttaaatgggtattttccaattaaaaaatatatataatagaaaagcattttttcctacaaaaaactgtgttgatgctaaaaggtgaataa

SEQ ID NO: 923219 - DNA, 120 bp, Artificial Sequence
  ENSG00000261642_19 (sequence is synthesized)
ataaaacaaggtaaaaggaaccaggaattaagaaataagaaagacgtaaagaaagttatagaaatatggagggcatttttggtaaagaaagcttaaagaaaaataattttatgagaaaga

SEQ ID NO: 923220 - DNA, 120 bp, Artificial Sequence
  ENSG00000261642_20 (sequence is synthesized)
aagaaagcttaaagaaaaataattttatgagaaagaaacttgtacggtaaaattttgccctagaataaaatgattgtctaagaaagagggatgttcagggcaaaccatgtaccaagcatg

SEQ ID NO: 923221 - DNA, 120 bp, Artificial Sequence
  ENSG00000261642_21 (sequence is synthesized)
tcatgtgtggtctgtgagagacataataagaggatttatattaaaaaaaaaaccaaaaaacttctctatgatctagttgtctataattaaaggaaaattatttattatggtctttctaga

SEQ ID NO: 923222 - DNA, 120 bp, Artificial Sequence
  ENSG00000261642_22 (sequence is synthesized)
gattgggttttgatatgtaaagaaaacccacttatatgctaaataattgcttagaacaataagactttttaaggaattgttttactcttaataaaattacaaaacataatatatattacg

SEQ ID NO: 923223 - DNA, 120 bp, Artificial Sequence
  ENSG00000261641_0 (sequence is synthesized)
tgagaggatttctttatttcgcgttcagacccaacacactcggacaccttggggccctgtgagggctaagcagggtggtggcgtcagctcccggggaggccccactccctggggaggaaa

SEQ ID NO: 923224 - DNA, 120 bp, Artificial Sequence
  ENSG00000261641_1 (sequence is synthesized)
tacacggcagggggccgcacccagccccccacggagggacccgtgttgctctaacagggacactgaagttgcctctgccgccccgtgaggggcctgtggcggccccagacccagcccagc

SEQ ID NO: 923225 - DNA, 120 bp, Artificial Sequence
  ENSG00000261641_2 (sequence is synthesized)
caggccagaggagcctcccaggggccctcaggtggtgaggtgggggcttcccggccccggtgcccaccggcccttctagctgcctgtgctgggccaggtgtcctctgaggccggcaggag

SEQ ID NO: 923226 - DNA, 120 bp, Artificial Sequence
  ENSG00000261641_3 (sequence is synthesized)
tctggcccccgctgcacctgcgcttggtggctggcaggggcggggtagggaggtcaccctcgaggccggggtccccatgtgctaggggaagacctgccttcccagccagtgtccacaggg

SEQ ID NO: 923227 - DNA, 120 bp, Artificial Sequence
  ENSG00000261641_4 (sequence is synthesized)
gcatggggctcagggccttggaggtttttctcagctctcaacatcacagcacagggcccgtgagtcaccccagtcctctgggcctgtgtacccaagccggatgcaggccggggagtgcac

SEQ ID NO: 923228 - DNA, 120 bp, Artificial Sequence
  ENSG00000261641_5 (sequence is synthesized)
gtggggctcctctgtggcgccagtgtgaagctgctctccggggcggtcgcagcctccaaaccctggtgctacgagtccgtgcctcaggcccagggaccacaggccgtctgctcatggctg

SEQ ID NO: 923229 - DNA, 120 bp, Artificial Sequence
  ENSG00000261641_6 (sequence is synthesized)
aaaatgaggccaagcagctcccaagtctcgaagactccactggtgtggaggcagaggggcccttccagggcagggcagccctcggggcagcagcaggggcaagggctctgtctcacgcac

SEQ ID NO: 923230 - DNA, 120 bp, Artificial Sequence
  ENSG00000261641_7 (sequence is synthesized)
acgggcacaggcacgcaggtgccggccctgccgctggctcccaagaggccgatagcccggtagggaggtcacacacacacagctgatccctggaggtaaagaaacctagacgaggagagt

SEQ ID NO: 923231 - DNA, 120 bp, Artificial Sequence
  ENSG00000261641_8 (sequence is synthesized)
ggaggctgggcctgcgcaaggaggcgccaaggggggagaccactgcccacaacagggtcagtcccgcgagagggtcagttccgcgcctgccgcctgcccgcccagctgcagggtgctcgc

SEQ ID NO: 923232 - DNA, 120 bp, Artificial Sequence
  ENSG00000261646_0 (sequence is synthesized)
ctgactctgtctgggcattcttcctgggctagagatgctctgcctcccagcagaagacaagagccctagaaagactgtcattcatttactggagagagaaatggttcatctacacacaca

SEQ ID NO: 923233 - DNA, 120 bp, Artificial Sequence
  ENSG00000261646_1 (sequence is synthesized)
ctcagagcctggctagctacaaagccgtggtccgtggtaggatgtacgtcttagtggaataagtaaccttgagcagacaatggatccagcagtaacaagcctgccctgatgccggcgtaa

SEQ ID NO: 923234 - DNA, 120 bp, Artificial Sequence
  ENSG00000261646_2 (sequence is synthesized)
attccgaaggagctggagaacgattcttcccttcactttatctaaatcctctgaaggatgagtgggaggatggtttcttctcccttcctgaagcttgttttgttggtgccttatgctaag

SEQ ID NO: 923235 - DNA, 120 bp, Artificial Sequence
  ENSG00000261646_3 (sequence is synthesized)
agaactcagcagatacaaatttattattttcttttagacagcattttccctgcagttagaagaaaacagcagctcacattgaaaaatatctaattcccaaaatacgtgtttccaataggg

SEQ ID NO: 923236 - DNA, 120 bp, Artificial Sequence
  ENSG00000261646_4 (sequence is synthesized)
agtttatagaatttgcttcttaccaaagcaaaatcttgaatacatgaaatctaaaatcttgccaatttaatgaatgcctaataatttttaaatagcatatatcattttaatacattaaac

SEQ ID NO: 923237 - DNA, 120 bp, Artificial Sequence
  ENSG00000261646_5 (sequence is synthesized)
attctgagtctgttatattatccaaatcctaaaaagatttaattgattacagaaaaatttattgggaaaaattgctttgcccctcttttttctctaagcaattcctgagttttaaaaata

SEQ ID NO: 923238 - DNA, 120 bp, Artificial Sequence
  ENSG00000261646_6 (sequence is synthesized)
ctccttaaaggaactaatttatttttcatggcccatcaccaatatccaagagagtatccaatttttaaattctgaaccctgtcttgtgtgactttcaaactaaatgaaatgaagaggcct

SEQ ID NO: 923239 - DNA, 120 bp, Artificial Sequence
  ENSG00000261646_7 (sequence is synthesized)
caggcagtctgtgtttacacagggtggcaaaattaaccttaagttacttggatcactgcactggggacacttcagagcctctactcaggctacttttgagcatactatgtatgtcgctgt

SEQ ID NO: 923240 - DNA, 120 bp, Artificial Sequence
  ENSG00000261646_8 (sequence is synthesized)
ttactctgagcaaagcacggtgccgcaagtacaaaggtggataagactcagtccttgatttgatggtctttgttggaataggttttcaaactgtaatgtcactgtgtctcccaggggcca

SEQ ID NO: 923241 - DNA, 120 bp, Artificial Sequence
  ENSG00000261646_9 (sequence is synthesized)
aaagtttgctttcattgatgggtttcaaagtagggatgagtttacttataagtacacattgtgtcattagtatgcttgactctccatggtgcaaaatttctttctaatgctgatcaattg

SEQ ID NO: 923242 - DNA, 120 bp, Artificial Sequence
  ENSG00000261646_10 (sequence is synthesized)
caaacatgatagaacaatgaaatacttccaggacattctaaatcactctcctccttgtgagaaaatagggtagagagcctagcctggtacaggcagccatccatgtctgatgtgggtcat

SEQ ID NO: 923243 - DNA, 120 bp, Artificial Sequence
  ENSG00000261646_11 (sequence is synthesized)
ctctgagaatgacactcctcaaagggccagagggtgctctttcttcatttcccttacacatgggtgttattcaatacttatctagagccatgtgtcacttaacaactggaatatgttcca

SEQ ID NO: 923244 - DNA, 120 bp, Artificial Sequence
  ENSG00000261646_12 (sequence is synthesized)
agaaatctgtcattaggctattttgttattgtgtgatcacagagtgtacttacacaaacctagggtggtatagttcactgtaccaccaaggccatatagtgtagcctaggctacaatata

SEQ ID NO: 923245 - DNA, 120 bp, Artificial Sequence
  ENSG00000261646_13 (sequence is synthesized)
cctaggctatatagtatagcctgtagctcctaggctacaaacctggacagcatgttactgcactgagtactgtagcaattgttacacagtggtaactatttgtgtatctaaacatatcta

SEQ ID NO: 923246 - DNA, 120 bp, Artificial Sequence
  ENSG00000261646_14 (sequence is synthesized)
aacatagaaaagatacagtaaaaatacagcagtataatcttatgggaccaccgttgtatatgtggtccatcgttgatggaaacattgttatgtggcacatgactgtatatgcttcgtata

SEQ ID NO: 923247 - DNA, 120 bp, Artificial Sequence
  ENSG00000261646_15 (sequence is synthesized)
tagtgaacattcagcaaaggttttcatcaatgaatggataaattggcaacttttatgggcttaattgggctaaaatatatacggagtcactatttgacttaacacctagacattatttta

SEQ ID NO: 923248 - DNA, 120 bp, Artificial Sequence
  ENSG00000261646_16 (sequence is synthesized)
ctgatatttttcaataattctgtttttgtaaagccttccttccatttgggtgcaatttccacttggggaaaatctcattccccatcctcttgtaattaaaaagcatggtttgtttgtttt

SEQ ID NO: 923249 - DNA, 120 bp, Artificial Sequence
  ENSG00000261645_0 (sequence is synthesized)
gccttccaccattattgtgagactttcccagccacgtggaactgcatttatgaagtagggacctggaattgaagagactcctaaaggagagacagaagtttgaaagagcaagaagagtgg

SEQ ID NO: 923250 - DNA, 120 bp, Artificial Sequence
  ENSG00000261645_1 (sequence is synthesized)
atgtggatccagacagaaaaagagaacagcaaatatttgaaagagcttaagacgtactcctcaaggtaccacagatagaagccttgagaagcttactttggtcagaaattttgcctttgt

SEQ ID NO: 923251 - DNA, 120 bp, Artificial Sequence
  ENSG00000261645_2 (sequence is synthesized)
ctgcaggcttctaccagttcgattccatctgtgggtcttaggtttcagttacctgaagtcaaatgtggtccaatacacagactggaataagagacattggagactccaaaaggtgggcag

SEQ ID NO: 923252 - DNA, 120 bp, Artificial Sequence
  ENSG00000261645_3 (sequence is synthesized)
gaagatatcttttctgaagatggccatctacaaagtacacagaggatacccacctgtcaccggatctgccagcaccttgattgtggactttcttgtctccagaatcgtgagacttgtttc

SEQ ID NO: 923253 - DNA, 120 bp, Artificial Sequence
  ENSG00000261645_4 (sequence is synthesized)
tgatctgcgtgggaaagaattcagtatttctccatttaatatgacattagctatagattttttatatgatattagctatagattttttatagatgccttgcattaaagtgaagaagcttc

SEQ ID NO: 923254 - DNA, 120 bp, Artificial Sequence
  ENSG00000261645_5 (sequence is synthesized)
tgaagaagcttcattttcttcctaatattctgatttttttatcatagatatgttttatctaatttattgaaaaaataatttcaaaaatgtgtggccaggcacgatggctcacacctgtaa

SEQ ID NO: 923255 - DNA, 120 bp, Artificial Sequence
  ENSG00000261645_6 (sequence is synthesized)
aaaaaattctattttaataattataataatttttaaaaactgcccaactaccaaagtggggcgctgatctttttctggtctaataacctgagtaaaatataagaaaacaatacatccagg

SEQ ID NO: 923256 - DNA, 120 bp, Artificial Sequence
  ENSG00000261645_7 (sequence is synthesized)
cattgtacaatatccaatagaagaatgtgacaactgaaagaaggagaactcatgaggtaagctgcaaaatcatcctggctttctgtagaagattctccaatggctgcaacatgctaaagt

SEQ ID NO: 923257 - DNA, 120 bp, Artificial Sequence
  ENSG00000261645_8 (sequence is synthesized)
aaaatgaatgggactgatttctgtgcactgcacctgctgaatgtagcaaaatgatcatacaattttttaacattattatgttgaattgcattgatttttggaagttaaacactgttttgg

SEQ ID NO: 923258 - DNA, 120 bp, Artificial Sequence
  ENSG00000261645_9 (sequence is synthesized)
tgttttggaatataaatctaacatgaatatgatatattatcctttttaatatagttctttgatttgctaagatggttagaatttacatctattttatgaatgacacaatttttctttctt

SEQ ID NO: 923259 - DNA, 120 bp, Artificial Sequence
  ENSG00000261645_10 (sequence is synthesized)
ttttatgtttttgtattaatgataacctcacaaaataagtttgaagtattttctctttctatattctctagaatattttctggtagactgatatatttctcctaaaaaatttggaaaaat

SEQ ID NO: 923260 - DNA, 120 bp, Artificial Sequence
  ENSG00000261645_11 (sequence is synthesized)
tttgtgatgaagaagctacctgggcctgaagatatcttttctggtaagattcaaattacaaattcaattgctataatagatacgtagattttctaattctttttgcatcatttttgatat

SEQ ID NO: 923261 - DNA, 120 bp, Artificial Sequence
  ENSG00000261645_12 (sequence is synthesized)
atatgttgggtactttgagacattaatcaatttcatccaaagaaaaatgtttgtaaaaatataaaaagaaagtacactatataattttcatgcattaatacatatgataaattttcattt

SEQ ID NO: 923262 - DNA, 120 bp, Artificial Sequence
  ENSG00000261645_13 (sequence is synthesized)
gttacatatgattttcaaatgcatatttataacaatacctgttctgttacagagatgactcatgttgggtcttgatttcaaaggttgatttatattcaaagaaaattttcttcatagaaa

SEQ ID NO: 923263 - DNA, 120 bp, Artificial Sequence
  ENSG00000261645_14 (sequence is synthesized)
gaatttttaattacactttggaaaacactcttgtttcagtcataaaacaaatgatattagctgttgatagaatgagagagcatttcaagaaacataatctatagaattagataaattatt

SEQ ID NO: 923264 - DNA, 120 bp, Artificial Sequence
  ENSG00000261645_15 (sequence is synthesized)
aaagggtagttcctaattaggcttataaacatcaataattaataattccccaaactcataacaaaagtgctttattcttttcaaagagttttctttttatttccgtattagatgctcaca

SEQ ID NO: 923265 - DNA, 120 bp, Artificial Sequence
  ENSG00000261645_16 (sequence is synthesized)
tcaactctctgaggtaacttgggaaaacattaccctcatttattgggtgagaaatgaattcttggggatgtgtgcagtttgtttattatataaatactatgagaagaaaggttctctgaa

SEQ ID NO: 923266 - DNA, 120 bp, Artificial Sequence
  ENSG00000261645_17 (sequence is synthesized)
tcccagggcagcttcatcatcagagggctagcgtggaattaatgtaaaattctaacatttcactgtgtgaaccatgcttttctccaggtccttacaacgtataatagtttataaatccaa

SEQ ID NO: 923267 - DNA, 120 bp, Artificial Sequence
  ENSG00000261645_18 (sequence is synthesized)
gctaacaaatgtgctacaattaaagtaaaccaaatgaatcaaaataaataaaacaaaacaaacaacaacgagaatacaactatcatgacagaaatctcattaggagagaatctgtgaatc

SEQ ID NO: 923268 - DNA, 120 bp, Artificial Sequence
  ENSG00000261645_19 (sequence is synthesized)
atttagggagaaaaatgatggagtgctctgtattgaaataatacgcatctctacagtcaacagttaaaataggaaagaaggaagggagggagggagaaaagaagggagaaaggtaaggtg

SEQ ID NO: 923269 - DNA, 71 bp, Artificial Sequence
  ENSG00000261645_20 (sequence is synthesized)
tgaaagagcttaagacgtactcctcaaggggtttctccttttgcgtctttctcatttcttttgctgccacc

SEQ ID NO: 923270 - DNA, 120 bp, Artificial Sequence
  ENSG00000261645_21 (sequence is synthesized)
aaatttggaaaaattttgtgatgaagaagctacctgggcctgaagatatcttttctggacaaagtaaatgaatgattgaagacctgcaaactgtgtttgtaacgactttctaagattgat

SEQ ID NO: 923271 - DNA, 120 bp, Artificial Sequence
  ENSG00000261645_22 (sequence is synthesized)
agcctccgtgtttcaatgctcatggagcagatggatatgactgacactgcccttaatactacagcatgatccaaagcatcaccaaagtcttcaaagagaaagtaaaaaaaaaaaaatgcc

SEQ ID NO: 923272 - DNA, 88 bp, Artificial Sequence
  ENSG00000261645_23 (sequence is synthesized)
cggtctctttcctgtcctgccatggtaaagaagtgcttatttccccttcgctttccaccacgaatattttgcctgcagaactttctag

SEQ ID NO: 923273 - DNA, 120 bp, Artificial Sequence
  ENSG00000261645_24 (sequence is synthesized)
aatatgaccttcatgttggttccagtttcaattgccttttaagtcatacagagtgacacagaatgactttggaggatgctgtgcacacaaatattttctggtagactgatatatttctcc

SEQ ID NO: 923274 - DNA, 120 bp, Artificial Sequence
  ENSG00000261645_25 (sequence is synthesized)
tgcaggcttctaccagttcgattccatctgtgggtcttagggtgagtaaagtgcatctgctagtcccatatgggtcgccaaattgtagagaagaaaaaatactttttctttgtttttaga

SEQ ID NO: 923275 - DNA, 120 bp, Artificial Sequence
  ENSG00000261645_26 (sequence is synthesized)
caaaagtcagattaacaacaacaacaatagcaacaacaccccagaagtttattaatgtgtgccgtacctgtcatgtgggagaagcctcagcttaaaagtatttttctcttaaggcggtag

SEQ ID NO: 923276 - DNA, 120 bp, Artificial Sequence
  ENSG00000261645_27 (sequence is synthesized)
ttaggggccttgtttaagtagtagtttagtaaagagtcataactcatattaatgacaaagaagagagcatcttgaggcttttcaatggcaagaaaatgtgtgaaggtaaatttaggggaa

SEQ ID NO: 923277 - DNA, 120 bp, Artificial Sequence
  ENSG00000261645_28 (sequence is synthesized)
gactaaagtctgttcttagatcctctggtgccattgtctctgagctctgtttctgagctcatcagcaagtgttgtaaatggaattacatttagatgggaaaggcagagaagagtggcaga

SEQ ID NO: 923278 - DNA, 120 bp, Artificial Sequence
  ENSG00000261645_29 (sequence is synthesized)
gtgtgtccctgcattttagcctttctttttagctaaacaatctccagtattttagagagtaatattttggtttcctttgataatagttattttaacatcattttgattctagcaatgaaa

SEQ ID NO: 923279 - DNA, 120 bp, Artificial Sequence
  ENSG00000261644_0 (sequence is synthesized)
ccgttctcatctacatctggattctccaacaaagctgggaaaaaaacgatccaagggaagccaatcaaagagcctggattgccagtcttccctgctgcgatctccgcctgcgattctcca

SEQ ID NO: 923280 - DNA, 120 bp, Artificial Sequence
  ENSG00000261644_1 (sequence is synthesized)
ggggaaatgtcctttatgaccttacagctcacctggaaccctccacctagggcccgaggcagcacatcctctcgtgcccgggcacttccaggcattgccctgagtactgggcacttcaca

SEQ ID NO: 923281 - DNA, 120 bp, Artificial Sequence
  ENSG00000261644_2 (sequence is synthesized)
cactgggctggaccactcaccggagtgaataaggaggcttgaagctgtcctggtacaacaatggaatgaagcgctagtctcagctcagccacttggaatatgactccaactctcacattt

SEQ ID NO: 923282 - DNA, 120 bp, Artificial Sequence
  ENSG00000261644_3 (sequence is synthesized)
ctgtggggtgtattcatttcagctttttgtttggtgctatggggagggaagggccctcagactggcatcctttttcttccaggatgatgatgaatattatgaaagtctgaggctgttttt

SEQ ID NO: 923283 - DNA, 120 bp, Artificial Sequence
  ENSG00000261644_4 (sequence is synthesized)
cgtctgctcatggataaacttctggccatgagcatgtacctttcaggtaacttccctatcagagaagcttacaatcaagaatcctacttccctagttccctacacaggcccaggaggctt

SEQ ID NO: 923284 - DNA, 120 bp, Artificial Sequence
  ENSG00000261644_5 (sequence is synthesized)
ttggtggtatccgctggacttttgaaaattagggaatttctcctactctgaactctaccaggaatcacatatcaagatctcagtaccatcttacctagaccctcttgacctcttctttct

SEQ ID NO: 923285 - DNA, 120 bp, Artificial Sequence
  ENSG00000261644_6 (sequence is synthesized)
ccataatctctttctagctcatgtcatccagactcgagggccccattctcagtttgacactgaggacacccacgctattatctctggctgtgacctttcccacgagctccaaattcacac

SEQ ID NO: 923286 - DNA, 120 bp, Artificial Sequence
  ENSG00000261644_7 (sequence is synthesized)
catcttttgacgtctccacttaacttccccatttcggtgtctcaaacttgacaattcaaaacagaactccctcccacttccaaactggtttcctacccaactttcccaggcccccagttt

SEQ ID NO: 923287 - DNA, 120 bp, Artificial Sequence
  ENSG00000261644_8 (sequence is synthesized)
ctcaagtcagaaatctatgagtcatccttgatgtttgccattccctcatccctcccatccaacccattcgtaggctcttgggaatctacctccaaaatgtctctggaatccatcctcttc

SEQ ID NO: 923288 - DNA, 120 bp, Artificial Sequence
  ENSG00000261644_9 (sequence is synthesized)
ctaaggaactccgggtggctgtgtagaaccatcctcaccctagaaagggggaaactgaaagaaaaagcagaacacgccattaacaaggccagaaccccgactgccattcctggacgggag

SEQ ID NO: 923289 - DNA, 120 bp, Artificial Sequence
  ENSG00000261644_10 (sequence is synthesized)
ccaccaacacccgcaaaatcgatcgattcagcctgggacgcttgctgtttccgaacctctgttgccacctatcccagtttggagggaattttcccaaggatggtgaagaagggatttcca

SEQ ID NO: 923290 - DNA, 120 bp, Artificial Sequence
  ENSG00000261644_11 (sequence is synthesized)
cacgccgcctcactcagccccgcacccctggccaccagccaggacttagggtgtagttaaggatctttcaattagaagggaggcttctgattcccaaaagcactcaaaatatttaaggaa

SEQ ID NO: 923291 - DNA, 120 bp, Artificial Sequence
  ENSG00000261644_12 (sequence is synthesized)
gtgctttttataatcagtcctagagccttgctgcactggatactcctgttaattaatttcttctcctttgacattttaagtgctaattataggagaaggtgattaacactgagaaaggag

SEQ ID NO: 923292 - DNA, 120 bp, Artificial Sequence
  ENSG00000261644_13 (sequence is synthesized)
tgtgtgtgtgtgtgtgtgtgtgtttttaatcatgacacaaatttcccccagtggaaagtgacatgtttctggagatccagggaatttaaaccaatgaatacataaaaacagtcacatgag

SEQ ID NO: 923293 - DNA, 120 bp, Artificial Sequence
  ENSG00000261644_14 (sequence is synthesized)
aaaacagtcacatgagtgatgactaacagtagcagtagacaggccaccactcttccttgccatagtcatccaaaatgaaatgagcatcttttgaaaacctaagcctcattctactcctgt

SEQ ID NO: 923294 - DNA, 120 bp, Artificial Sequence
  ENSG00000261644_15 (sequence is synthesized)
ccctcttttgtcactcctatcttcctgttttccaggcttcatgaccacactgctgtaggaagccataagttggaaatcaacgggcctggcttgaagtgtggccttaggcaacaccgttct

SEQ ID NO: 923295 - DNA, 120 bp, Artificial Sequence
  ENSG00000261644_16 (sequence is synthesized)
catctacatctggattctccaacaaagctgcctcagaggaaggagcgtgtgcaggagtccaggaggaggggaggaaccagagacggggaatggcctggatggatgagtcgagacatgggg

SEQ ID NO: 923296 - DNA, 120 bp, Artificial Sequence
  ENSG00000261644_17 (sequence is synthesized)
aaagctgcttcctgaattatgtgttctgtgtactcctcttcatcagagcagtgatagaaaaactgaggttcggagagctaaaacaggcctgcccaggggccttaccagacttccaggatg

SEQ ID NO: 923297 - DNA, 120 bp, Artificial Sequence
  ENSG00000261644_18 (sequence is synthesized)
gggcctgcaggagggcttctgcccctagtaaataagtttcatgatatctgatggttttaaaaaggggagtttccctgaacaagccctcttctcctgtctgctgccatgtgagatgtgcct

SEQ ID NO: 923298 - DNA, 89 bp, Artificial Sequence
  ENSG00000261644_19 (sequence is synthesized)
ggaactactatgaaattttcttatttgaattcaaaatgggttgtaaagcagcggagacaactcacaacatcagcaatgcatttggccca

SEQ ID NO: 923299 - DNA, 120 bp, Artificial Sequence
  ENSG00000261644_20 (sequence is synthesized)
agcggagacaactcacaacatcagcaatgcatttggcccaggaactgctaactaacgtatagtgcagtggtggttcaagaagttttgcgaaggagataagagccttgaagatgaggagtg

SEQ ID NO: 923300 - DNA, 120 bp, Artificial Sequence
  ENSG00000261644_21 (sequence is synthesized)
tactggcaggccatcagaagctgacaatgaccaattgagagcaatcatcaaagctgattttcttacaactacttgagaactcaacatcgaccattccatggtcattcagcatttgaagca

SEQ ID NO: 923301 - DNA, 120 bp, Artificial Sequence
  ENSG00000261644_22 (sequence is synthesized)
aattggaaaggtgaaaaacctcgataagtgtgtgcctcatgagctgagtgaaaaccaagaaaatcgtcattttgaagtgtcatcttctcttattctacacaacaacagcgaaccatttct

SEQ ID NO: 923302 - DNA, 120 bp, Artificial Sequence
  ENSG00000261644_23 (sequence is synthesized)
tgatctgattgtgacgtgcgatgaaaagtggattttatacaactggcaatgactagctcagtggttggaccgagaagaagctccaaagcacttcccaaaggcaaattcgcaccaaaaaaa

SEQ ID NO: 923303 - DNA, 120 bp, Artificial Sequence
  ENSG00000261644_24 (sequence is synthesized)
aaaggtcatggtcactggtggtctgctgctagtctgatcccctacagctttctgaatccctgcgaaaccattacatatgagaagtatgctcggcaagtcaatgagatgcactgaaaactg

SEQ ID NO: 923304 - DNA, 120 bp, Artificial Sequence
  ENSG00000261644_25 (sequence is synthesized)
caacacctgcagccggcattcgtcaacagaaagggtccaattctccacgacaacacccgactgcatgtcacacaaccaaagcttcaaaagttgaatgaattggactatgaagttttgcct

SEQ ID NO: 923305 - DNA, 120 bp, Artificial Sequence
  ENSG00000261644_26 (sequence is synthesized)
catccgccatatttacctgacctctagccaactgactaccatttcttcaagaatcttgacaactttctgcaggaaaaatgcttccacaaccaggaggatgcagaaaatgctttccaagag

SEQ ID NO: 923306 - DNA, 120 bp, Artificial Sequence
  ENSG00000261644_27 (sequence is synthesized)
gctttccaagagtttgttgaatcccgaagcatgaatttttatgctacaggaataaacaaacttatttcttattggcaaaaatgtgttgattttaatggttcctattttgattaataaaga

SEQ ID NO: 923307 - DNA, 120 bp, Artificial Sequence
  ENSG00000261648_0 (sequence is synthesized)
atttaccagcgtgttcagaatccagcacaggaccaggatgttgaaggacctgatgtatctgggagcatgtagtttaagctgtgcccacctgaattcgctggggctgatggtgatgacctg

SEQ ID NO: 923308 - DNA, 120 bp, Artificial Sequence
  ENSG00000261648_1 (sequence is synthesized)
gaagacactcaggaggcaggcattgccaacgcacacagccctgcccactctgtgaacataaaacacaagtttgcatccaatatcactgagggaatctttcgacccaaaagcagccattgt

SEQ ID NO: 923309 - DNA, 120 bp, Artificial Sequence
  ENSG00000261648_2 (sequence is synthesized)
gatctgtggaccataacatacctctggtgaaacaaaggaaactatagtggtaaagaagaaagaaattccccaggaatccaactatgatctgagataagaagatcatgcctattgaaaaat

SEQ ID NO: 923310 - DNA, 120 bp, Artificial Sequence
  ENSG00000261648_3 (sequence is synthesized)
ccctggaggccatttgtcatttttcagtgtctgataattacattcaaagtgagagaaccctgcgtggaaacataaactctgtttcacttttgcaaataaaatccactattgtccacttac

SEQ ID NO: 923311 - DNA, 120 bp, Artificial Sequence
  ENSG00000234446_0 (sequence is synthesized)
attgtaatattgcaggtaggagatcatgagcctcggtggcttgagtggacatggaaagaggaaatgtgtaatgtgaagttaacctcaatgtgatgtgccaagggcatgtgaaatcacaag

SEQ ID NO: 923312 - DNA, 120 bp, Artificial Sequence
  ENSG00000234446_1 (sequence is synthesized)
gagaaagtgcagtatttactgagtgagcagctattccagtcaatgccattcacagcatccaaagacaacagagttgctggatcactgccaggccccaggcattgaagccttgcttgctgc

SEQ ID NO: 923313 - DNA, 120 bp, Artificial Sequence
  ENSG00000234446_2 (sequence is synthesized)
aattctctttggctaagttaggcacatactaaaatggatacaaggatcccatagcaattgccttgtaagacacttaaaggcaactgatcacaaggtggacaagggaaagctttcaagaac

SEQ ID NO: 923314 - DNA, 120 bp, Artificial Sequence
  ENSG00000234446_3 (sequence is synthesized)
cctgaaattgaatttggagtcactaatacagctagggaatgatagcgtggaatgtctcaaggtcgcttgcaacagagaaagggggccttatttcaaagaaattgccctgtctgccaggat

SEQ ID NO: 923315 - DNA, 120 bp, Artificial Sequence
  ENSG00000234446_4 (sequence is synthesized)
agtgggaaggagaatgaggaacaccacgaatttcttccatcactggacaagaagcgctctctcctctaattcataggataaaaagaaagctggctccaaatggccatttaagcccagtag

SEQ ID NO: 923316 - DNA, 120 bp, Artificial Sequence
  ENSG00000234446_5 (sequence is synthesized)
ggccctttgcaagaatgcgaaagagagaagataacatgattttctccactgtgtcaagatgcaatggctacatatacctcctgcagctgaattataaaggctggagcgtgcttgcgacca

SEQ ID NO: 923317 - DNA, 120 bp, Artificial Sequence
  ENSG00000234446_6 (sequence is synthesized)
tttggaccacatggttcccgctgtcaaaaggtaccccccagagacatcattttccactgcctatggatcagacgtccaacagattccaggaggcacaatgttaatagactgaaattgtct

SEQ ID NO: 923318 - DNA, 120 bp, Artificial Sequence
  ENSG00000234446_7 (sequence is synthesized)
ttgcttctggaggcaaaagtgaagataggcagggcaaagattttctcttgtgctttcttctagaacttttatagtttcaggtttcacattgtgtatgatcccctttgagttaattttttt

SEQ ID NO: 923319 - DNA, 120 bp, Artificial Sequence
  ENSG00000234446_8 (sequence is synthesized)
atgtgatgcaagatatggatcaagatttggatttgaatatggataaccaattgttccagcaccatttgctgaaaagactatcttttcttcactaaattgcttttttaactttgaaaagaa

SEQ ID NO: 923320 - DNA, 120 bp, Artificial Sequence
  ENSG00000234446_9 (sequence is synthesized)
attctcatgtaacaatctaaggagcctggatatctagaagctcagctatgctgggactgaggctccttccttctcaatatctgaaattctgaaggcaatactcttgtcctaaaggaaatg

SEQ ID NO: 923321 - DNA, 120 bp, Artificial Sequence
  ENSG00000234446_10 (sequence is synthesized)
aaatcacaaggagaaagtgcagtatttactgagtgagcagctattccagtcaatggtaagtgattttttttttttttttttttgacggaatccggctctgtcgcccaggctggaatgcag

SEQ ID NO: 923322 - DNA, 120 bp, Artificial Sequence
  ENSG00000234445_0 (sequence is synthesized)
caggagccatcttgaaggctggcgaccacagatccacacctaactccaaaccaccaaattactcggagtgtgtgtcgggttgcagaaaatgaaatgaccataataactccaagacagagc

SEQ ID NO: 923323 - DNA, 120 bp, Artificial Sequence
  ENSG00000234445_1 (sequence is synthesized)
cagccttttggaagtcattcaaaagtgctgcaatgctacttcaaagaagataattcaaatttaaatgtcactcttcagtgttgtttatcaacagctgagtattaaaattggtgagcttga

SEQ ID NO: 923324 - DNA, 120 bp, Artificial Sequence
  ENSG00000234445_2 (sequence is synthesized)
catgaaccccaagaggcaaggatgacaggagccatcttgaaggctggcgaccacagatccacacctaactccaaaccaccaaattactcggagtgtgtgtcggcctgcccacggtgcggt

SEQ ID NO: 923325 - DNA, 120 bp, Artificial Sequence
  ENSG00000234445_3 (sequence is synthesized)
aagttccgggctgaggccttaagaacccatgcactcttctcctgttacttttccctgcggcaacaagcaaggagtcctcattccagggagtgtgaccgcatcgtggtgctaattcccttc

SEQ ID NO: 923326 - DNA, 120 bp, Artificial Sequence
  ENSG00000228160_0 (sequence is synthesized)
ctcattctctcttgctgcctttcgccctccaccatgattgtgagaccttccccagccacatggaactaagtgccttttgccctccactatgattgtgagaccttccccagctacatggac

SEQ ID NO: 923327 - DNA, 120 bp, Artificial Sequence
  ENSG00000228160_1 (sequence is synthesized)
gggacttacagtatcataagaaagatagacatttaaatcatctcaacaaggacaatggacatcatggaatcacacagcaggagaacctcgcctagtctaccgatcagatactccatgcag

SEQ ID NO: 923328 - DNA, 120 bp, Artificial Sequence
  ENSG00000228160_2 (sequence is synthesized)
cctctatgaagcctctcctgccccttccaagtagaactgtccattccatctgtggcagagtctggctacatgttcatcaaaccctgtttcaaatatcctcctctgcatgtcattacactg

SEQ ID NO: 923329 - DNA, 120 bp, Artificial Sequence
  ENSG00000228160_3 (sequence is synthesized)
tatctcccagcccccttgcatctacatgaggccgcatgaccacatgctgggtcacttctgggccaaaatggtattggagagtccatcttctccactctggctctctttccatgcaccaga

SEQ ID NO: 923330 - DNA, 120 bp, Artificial Sequence
  ENSG00000228160_4 (sequence is synthesized)
taggtgatttttagtgatctttagtggaagatgaaacaggtctgtatctctaaatgactttgtggagtggagcttcccttcccaagctgacccacaataaactctgatgtgagcaagaaa

SEQ ID NO: 923331 - DNA, 120 bp, Artificial Sequence
  ENSG00000228162_0 (sequence is synthesized)
ttagcagatcagacactcaggtctgggacaacatgtcctgaagggcatctctgggttccccctccagggccttgggtgctgccctgcctcctctgctgaaggctgcctaccccccaccgc

SEQ ID NO: 923332 - DNA, 120 bp, Artificial Sequence
  ENSG00000228162_1 (sequence is synthesized)
cagagcagcagagttcccttcagtagctttcagggactggaaggatagtgggctgcctctccccacagattcccaggaatttgcagtacaagactgtggtttactaattcttggatcatt

SEQ ID NO: 923333 - DNA, 120 bp, Artificial Sequence
  ENSG00000228162_2 (sequence is synthesized)
tgatggagagcagaaacataaccaccacgatggatgaaccagtaagaagtggctataacttctaaagggctgagcacagcccaggactgcgtctgggagagcaccagttgaattgttcac

SEQ ID NO: 923334 - DNA, 120 bp, Artificial Sequence
  ENSG00000228162_3 (sequence is synthesized)
ccccgaaacaacacaggaggacattcattggtcaggctcatgcaagtttccaatctgcttgactggtatggctcttcctacaaaccagctcatcggcattatagtcttgatcagttcttg

SEQ ID NO: 923335 - DNA, 120 bp, Artificial Sequence
  ENSG00000281005_0 (sequence is synthesized)
aaggtgctccgcccttccactccccgccccgtgctgctgtcattcccacgcctcaccctgttttgcaacttcttgtttatgagcctggaagccacgaagtggtgggaaatacgagattca

SEQ ID NO: 923336 - DNA, 120 bp, Artificial Sequence
  ENSG00000281005_1 (sequence is synthesized)
aatatctggtggccgtgtgacgtgagtaaattactcgatttttctcagtttccatttcctatcaaatgggttgttctgggaattcggggaagtaacagtgccgggaaccgcgggaggaac

SEQ ID NO: 923337 - DNA, 120 bp, Artificial Sequence
  ENSG00000281005_2 (sequence is synthesized)
cgccagctgcgtcctcggacgtccccaaagcccagggcggcgactggcacgactgtcaggggcgcgtctgttaagaggacagggggtcccgccccggcacagccgtctcctccaggaccc

SEQ ID NO: 923338 - DNA, 120 bp, Artificial Sequence
  ENSG00000281005_3 (sequence is synthesized)
gacgccccacggaccccacgcccgagcggagaccggcgcgagtccggggtctccggtccggcagcccctccctggcccggcgccccaaagggaagcggcctgggggaggagacgtgtgga

SEQ ID NO: 923339 - DNA, 120 bp, Artificial Sequence
  ENSG00000281005_4 (sequence is synthesized)
cgtgtggaaagagcggcagaagataaagaggaagtagcggtagagaataaaaaggaactgtccgcagtgtgcccggacgcggggaggcgctggggtcaagcgagacccgacctgcacgca

SEQ ID NO: 923340 - DNA, 120 bp, Artificial Sequence
  ENSG00000281005_5 (sequence is synthesized)
attcccgccggggtcccggcctgcctgcgggagggaaaggacccagggcggcttctgccaaaagtgcggcttctgccgaaagtgcgtcttctgccgaggggcccacataaggcgcgacag

SEQ ID NO: 923341 - DNA, 120 bp, Artificial Sequence
  ENSG00000281005_6 (sequence is synthesized)
acactccagcccgaccccgacgccccgccctcacgcatgcacatgcgcggaacactcccagaaacacatctcccagagcgccccgggagcacgcgagccaattggagggcggattagcgg

SEQ ID NO: 923342 - DNA, 120 bp, Artificial Sequence
  ENSG00000281005_7 (sequence is synthesized)
gggcccacgtctcccagaggtctccgagtcgcggctctgttggtctgattggcagccgcaacagcctatagctgcttttcgccggaggggccacgcgccgtttgccgggactgagccgct

SEQ ID NO: 923343 - DNA, 120 bp, Artificial Sequence
  ENSG00000281005_8 (sequence is synthesized)
gttgtcgctggtatcccgggagcagcgccggcaagtggagtcgtcgtattccgggcggcccgcggcccacggggatgggacgtcccggggctgtgctgaccccaaaacccttccacactt

SEQ ID NO: 923344 - DNA, 120 bp, Artificial Sequence
  ENSG00000281005_9 (sequence is synthesized)
tattagcctgtcgcccttctttcatgtttacagcaaatattttccgagtgcctaatgtgtcccacttactgtgccacgtgcgagggtgcacgtgtcaggcaagatcgctgttccaaggag

SEQ ID NO: 923345 - DNA, 120 bp, Artificial Sequence
  ENSG00000281005_10 (sequence is synthesized)
aacagcagcactgccgttttctcccttataatcagcagaggcgggctagagcaaggattctcaaactctgccccctcagaaccctagagtacggttgctgaaacttctgttttttccttt

SEQ ID NO: 923346 - DNA, 120 bp, Artificial Sequence
  ENSG00000281005_11 (sequence is synthesized)
gttttttccttttgaacaaatctagtaacatgctgtgagccagagaggtaatggtttggctcaaagaaggcacatgcatctggtttctttcttcttttttgagacggagtctcgctctgt

SEQ ID NO: 923347 - DNA, 120 bp, Artificial Sequence
  ENSG00000281005_12 (sequence is synthesized)
gcgtgagccaccgcgcccggcccaggtttcttatttcaggagcttcataggcatagacctccctccttccctcctaccccctcccccctctcccaactaatgccagaccggccactactt

SEQ ID NO: 923348 - DNA, 120 bp, Artificial Sequence
  ENSG00000281005_13 (sequence is synthesized)
actttttaactgttttacatatttaaccttcaagaaagatttcctttgatccaagtgtattgcagcccacaaaaaagcttggaaacccagctagatggtctgtttttctagttcctacat

SEQ ID NO: 923349 - DNA, 120 bp, Artificial Sequence
  ENSG00000281005_14 (sequence is synthesized)
tggatttaagtcctacccatcgagactactgtcttcagagggcatcttcatgtgtgggcaccagggctgcggctggaaccacagtggacaccccacgctccaaggacaatcctctgcaga

SEQ ID NO: 923350 - DNA, 120 bp, Artificial Sequence
  ENSG00000281005_15 (sequence is synthesized)
aaccagcagctggaaacaattcttaatgctgcaggaagtagttaggagaaaacgactgtgtaagtcagagctaaaactggagttcaaaaaccacagaaaatatttccaaggctgtctgtg

SEQ ID NO: 923351 - DNA, 120 bp, Artificial Sequence
  ENSG00000281005_16 (sequence is synthesized)
aagtggggatgtcaaaataccaaaaattacagctttggaactgcagtggatgacctttaattgatgcagtttataggtgctaagtattgtgtgtgctttacgttgcctcatgtgagtgct

SEQ ID NO: 923352 - DNA, 120 bp, Artificial Sequence
  ENSG00000281005_17 (sequence is synthesized)
tcatagcagggtgtgacgctggccaagtgatatacctaccctctttgtccctgtttctatcaactgtaaaatgggggttctagagttgttgtgaagattaaatgagctaatacacacaaa

SEQ ID NO: 923353 - DNA, 120 bp, Artificial Sequence
  ENSG00000281005_18 (sequence is synthesized)
ctgttttgcaacttcttgtttatgagcctggaagccacgaagtggtgggaaatacgagattcaaatatctggtggccgtgtgactgtattgcagcccacaaaaaagcttggaaacccagc

SEQ ID NO: 923354 - DNA, 120 bp, Artificial Sequence
  ENSG00000277245_0 (sequence is synthesized)
gcttacattttctggttgaaaagtactgctctgttctattacattcatctgtttgcttatcctgtgtcaataccacactatctcaactgctgtaaattataatacgtctacatatcatgg

SEQ ID NO: 923355 - DNA, 120 bp, Artificial Sequence
  ENSG00000277245_1 (sequence is synthesized)
ataagtctccaattttggtcatcttcttagagactgtcttagccattcttgatactttcatttccatatacattttagaatcagcttgtcagacttcacaataaacaaaactggctgtga

SEQ ID NO: 923356 - DNA, 120 bp, Artificial Sequence
  ENSG00000277245_2 (sequence is synthesized)
aaaagtctatcgatgtttatatctgtgttttattttggtagttttatacttttcattaggtatttttcatatccttctgtagattatttttcaaatctcactttctaattgttgataatt

SEQ ID NO: 923357 - DNA, 120 bp, Artificial Sequence
  ENSG00000247925_0 (sequence is synthesized)
gtctggtgtctggtggtctcctgactgccaggcaggccagagaaaattaggggtatgttttcatttaacatcattccctgctgactcttgtctctctggaaaattgacagttaggagaca

SEQ ID NO: 923358 - DNA, 120 bp, Artificial Sequence
  ENSG00000247925_1 (sequence is synthesized)
aaaacgttgccatctccagcaaagagcgcttgaacagctgggcatttctagaaaggaatgggcctggaagacctggctaaaacctttgaatcatttcctgccaacatttggccgtgaccc

SEQ ID NO: 923359 - DNA, 120 bp, Artificial Sequence
  ENSG00000247925_2 (sequence is synthesized)
aactacaggttgcaggttctgaactacctgaagccatgcaagtcataacacatcattactgacttctagctctttccttcaagtctctggcattgcagatgttatttctgtcctaagaag

SEQ ID NO: 923360 - DNA, 120 bp, Artificial Sequence
  ENSG00000247925_3 (sequence is synthesized)
agcaagaggagctgcaatatgaaaccagaaaacagacacacttcatttctctctgctgttggtgttttctggggagaccagtggagtcactctgggcaggactgagggggacctgggtat

SEQ ID NO: 923361 - DNA, 120 bp, Artificial Sequence
  ENSG00000247925_4 (sequence is synthesized)
atgaccaagccctggacagttcatgtgaaggagcaggacccagcttccaggtcaggagggaaacatgcctgacctttgtgctgctctgccaggtgaggtgtcctttcctctcctcaccca

SEQ ID NO: 923362 - DNA, 82 bp, Artificial Sequence
  ENSG00000283538_0 (sequence is synthesized)
attctcctctggccctttcctctgttcttcagccccaacagcttctcaagaggtgagctcaaacagtcctcctacctcagct

SEQ ID NO: 923363 - DNA, 120 bp, Artificial Sequence
  ENSG00000283538_1 (sequence is synthesized)
tctcaaagtgctgggattacaggatttagaaagaatgaaaaactatgctgctgatgctgtcagcttcccagaatcctctcccaagttaattcaattaggcatgctcactctctgtcaccc

SEQ ID NO: 923364 - DNA, 120 bp, Artificial Sequence
  ENSG00000283538_2 (sequence is synthesized)
aggctggagtgcagtggtgcaagatcataactcattgcagcctcgaactcctggactcaggcaatcctcctgcctcagcttcctgtgtgcatgagtcttcaatcacctgcccagaagaga

SEQ ID NO: 923365 - DNA, 120 bp, Artificial Sequence
  ENSG00000283538_3 (sequence is synthesized)
catgtatcacttccgctcacattgcattgactaaagacgacaaacttggaaactacatttccctgatcttgccaacagtattcagcccggactccaccaatgagaggcacttgcatgaga

SEQ ID NO: 923366 - DNA, 120 bp, Artificial Sequence
  ENSG00000283538_4 (sequence is synthesized)
catggaattttgcctaaaacttttgggtgttctcctgaaaatactccaactggctctacaggcagctgagagcaatggcagtggcttccttgtgattcctgcactaccagatttcctgaa

SEQ ID NO: 923367 - DNA, 120 bp, Artificial Sequence
  ENSG00000283538_5 (sequence is synthesized)
agaggtgtcccgatcactatcactcttgcagctttcctagagttatttaagcctctaattccctgtataagcctccttctatctgagatacctagaggggtatctgtttttctgactgta

SEQ ID NO: 923368 - DNA, 120 bp, Artificial Sequence
  ENSG00000283538_6 (sequence is synthesized)
ccatagcagataaaaggacctagtctgcaagcttccactggaaattctaggagagtgaaacttgaggtagaggtcccctaagtcccttagagcagttgcaatggtacctttggaattgat

SEQ ID NO: 923369 - DNA, 120 bp, Artificial Sequence
  ENSG00000283538_7 (sequence is synthesized)
ggttcttgactttagggattgtgagctttttccaagtagtcacccaaacctgtgcttgttggatctaagaaaatagagttcatgtatgaaatgaaaacaattaacattgaatctataaag

SEQ ID NO: 923370 - DNA, 120 bp, Artificial Sequence
  ENSG00000283538_8 (sequence is synthesized)
ctgtataatctactgagacgaaagaaatgggatagaaaaagtttaatgttttactacacacatgtaactgcataaaatgtatctgaagagcacacaagaaacagacaacagaacagagaa

SEQ ID NO: 923371 - DNA, 120 bp, Artificial Sequence
  ENSG00000283538_9 (sequence is synthesized)
attctcctctggccctttcctctgttcttcagccccaacagcttctcaagatattttcacctgtgtaaaaatcaggaaaagggcacatacgaaaaatacttccctttgcctaatgatctt

SEQ ID NO: 923372 - DNA, 120 bp, Artificial Sequence
  ENSG00000283538_10 (sequence is synthesized)
taactcataattatggtcaagacgtttggggttttgtttgtttcttttcctggagaggagcagagaagagagtgaaagacacccgaaacaccaaatcttcttcctaatgttaattatcat

SEQ ID NO: 923373 - DNA, 120 bp, Artificial Sequence
  ENSG00000283538_11 (sequence is synthesized)
tgtttatgttttgtgaagaccattctaaacattccacacctggaaatgaagactggatacaattgtaccaatgctctacacgctgatggcaaaacctggaattattttagccctattttt

SEQ ID NO: 923374 - DNA, 120 bp, Artificial Sequence
  ENSG00000283538_12 (sequence is synthesized)
aatagcttatcatagctcctcccgatttcctatggcaaaatatctagcaatgagccttattaatcttttattatgctacacctcctttcccagaggaattattaatatcgctaataacac

SEQ ID NO: 923375 - DNA, 120 bp, Artificial Sequence
  ENSG00000283538_13 (sequence is synthesized)
ttcgaccatgaatttcaacgccacagaggccagcccatcctgtgccttacctggcacatttcgcaactacttttatgctgcattctgggggcacattttgcaactcgttctgcaccacat

SEQ ID NO: 923376 - DNA, 120 bp, Artificial Sequence
  ENSG00000283538_14 (sequence is synthesized)
tccctgccacgtttagcaatccgcctcgcatcttatccttggtccccgtcatccagagacgctctaggtaccaaattccatgacatcttcggtgacagccaagtggcgaccccacacgcc

SEQ ID NO: 923377 - DNA, 120 bp, Artificial Sequence
  ENSG00000283538_15 (sequence is synthesized)
tctgaagcccgccttggtgtcatattcggagccagccttccccacgccttggacaccgaggcacttcgctgcccatttcgccgtctccccgctcgcccccgcccctctccccggagccga

SEQ ID NO: 923378 - DNA, 120 bp, Artificial Sequence
  ENSG00000283538_16 (sequence is synthesized)
cggtgctcctgtcagcggcggctcgggggccagctctcgcccctcggctcggctcggcggcggcgggcgcctcgctccgcctagcgcgcggcacagccgggagaggcagggtcttgctat

SEQ ID NO: 923379 - DNA, 71 bp, Artificial Sequence
  ENSG00000283538_17 (sequence is synthesized)
cacaaaatcgtgtcttttgcagcaacatggatgcatctgaaggccattatcctaagcaaactaatgcagaa

SEQ ID NO: 923380 - DNA, 120 bp, Artificial Sequence
  ENSG00000283538_18 (sequence is synthesized)
cttatcgtggtgactttaaaggcatggggacttttaggaggtaatcaggtcatgagggttcttccctcatgaatgggattaaggtctttataaaagaggcttcacacagagcttgaccct

SEQ ID NO: 923381 - DNA, 120 bp, Artificial Sequence
  ENSG00000283538_19 (sequence is synthesized)
ttcttgccctctgtctctgtctcacacgaggacacactgttcctcctctccagaggatgcagcaacaaggcaccagcttggaagcagagatcaaacccttatcagatgccaaacctgctt

SEQ ID NO: 923382 - DNA, 120 bp, Artificial Sequence
  ENSG00000283538_20 (sequence is synthesized)
atgccttgatctgggacttcccagcctccagaaccatgagaaataaatttctattgtttgtgaattacccggtctatggtattttgcacaaacgaactaagacaggggctagagggcagg

SEQ ID NO: 923383 - DNA, 120 bp, Artificial Sequence
  ENSG00000283538_21 (sequence is synthesized)
ggctgagggaggacttgctttccattgtatatgctcctgtagcttctgaattttatactgtgtgcatgtattatctactccaaaattatattaatgtttaataacatgagttgcatacca

SEQ ID NO: 923384 - DNA, 120 bp, Artificial Sequence
  ENSG00000283538_22 (sequence is synthesized)
ttttataatcatcacattttcaaaaaccacaaactctgacaatataaaatgttgaacacggaacaaggaaatgagaatttacacctactgtttgtgggagtctgtagaactacttaccag

SEQ ID NO: 923385 - DNA, 120 bp, Artificial Sequence
  ENSG00000250529_0 (sequence is synthesized)
aaactttctaggatcgcaccctcccaaacggcatgctaacagttgtttcttgatcgaagatatctgtgatcaaacaagttccagaaatgcaggattggaccgagcaaggcagcaaaccct

SEQ ID NO: 923386 - DNA, 120 bp, Artificial Sequence
  ENSG00000250529_1 (sequence is synthesized)
cttgtgaaggtggaaccaccgtggcttggaagcttcgcagatgtcgctgtctccaaggatcaattgcaaacacaatgacctgatgagcagagaaatcccatcttagaaaaaaagagagag

SEQ ID NO: 923387 - DNA, 120 bp, Artificial Sequence
  ENSG00000250529_2 (sequence is synthesized)
ctgagtctacagagccgctacttaggagtctgacttcataatcaattgtgaaatgtggaatataatagaaatttaaattctatctacattatgttagggttaataaaaaaaaagggcata

SEQ ID NO: 923388 - DNA, 120 bp, Artificial Sequence
  ENSG00000250522_0 (sequence is synthesized)
aatgtgtgcccatgggtgtgtgcaggtgcactcagggcactgtgttgtggtctgctgcctggaggcagaccagggcttgtgcgtggcttttggctagagttactcacaggtgacccacgg

SEQ ID NO: 923389 - DNA, 120 bp, Artificial Sequence
  ENSG00000250522_1 (sequence is synthesized)
agtcagtgcaggggctatgagaatttgcatttgcatcaaaacgatgcagaatcaagactgaaagaagttaagtaacttcactctagatcatctggtagagggtataaaggagatctagcc

SEQ ID NO: 923390 - DNA, 120 bp, Artificial Sequence
  ENSG00000250522_2 (sequence is synthesized)
ctatttttcagacttctgatctctttggggattgccaaaatgacctcaagtagtgaagatatagtggaataatctgtatttctgctgaccttgatgacatttggatctcatttgaggtac

SEQ ID NO: 923391 - DNA, 120 bp, Artificial Sequence
  ENSG00000250522_3 (sequence is synthesized)
taagaagaataagcaattggtttgaaaaaagcccttttaagagcaaaatgaattctgctaaagttgaagcaggaacaaatatcaaatttatggtgaagctcaggtggaagaatgatgaaa

SEQ ID NO: 923392 - DNA, 120 bp, Artificial Sequence
  ENSG00000250524_0 (sequence is synthesized)
ataaactccaaaacaatgcaacttttttctctctagttttatcttcagcacagcttgactcatcataattttacctttaagtatcacctgcattaataaacatacaactaggtatcaata

SEQ ID NO: 923393 - DNA, 120 bp, Artificial Sequence
  ENSG00000250524_1 (sequence is synthesized)
aatttctgtggaaaaggaaattatcacaagatcaaaattgaagaaccagtctcatttcatctaatatgaaaatgatcaacatatataaaattaaatgcataaccccatctaactgcaacg

SEQ ID NO: 923394 - DNA, 120 bp, Artificial Sequence
  ENSG00000250524_2 (sequence is synthesized)
tcacaatccagaggagcccaagaagatatgacaactaaatattaggtagccacctggatgggatcctggaatagaaaaacggcagtagggaaaaactaatgaagtaaaattaaactctgg

SEQ ID NO: 923395 - DNA, 120 bp, Artificial Sequence
  ENSG00000250524_3 (sequence is synthesized)
agtttagttaacagtgatgtacttaaattggttctttcacagtgacaagtatactatagaggttcttaaaattgacattttattgaagagagtacaataaaattataatcaccaaaccaa

SEQ ID NO: 923396 - DNA, 120 bp, Artificial Sequence
  ENSG00000239715_0 (sequence is synthesized)
aggcttgtgatgataaatgatcattgggctgcatttgtccttagctaatttatccttggcctagagagaaagtttctgcctttttttttttttaagaggaaagctggaaaggtgcttgag

SEQ ID NO: 923397 - DNA, 120 bp, Artificial Sequence
  ENSG00000239715_1 (sequence is synthesized)
gcctaataactttgcttggtcttttttgggcactgggccctgcattttccacctggcaatgctgtgtggggcttcttccaggcactctgtgggcctcatgccgcctgtgctggccggagc

SEQ ID NO: 923398 - DNA, 120 bp, Artificial Sequence
  ENSG00000239715_2 (sequence is synthesized)
aagcacccctgggaggccattagtgtcagcaagaaaggtgcgaaaactgcgttttcttcttgagttccgtgtttcagggagagaatcgtgaagaaacagactaaaggactttgttgcaag

SEQ ID NO: 923399 - DNA, 120 bp, Artificial Sequence
  ENSG00000239715_3 (sequence is synthesized)
ctacagtcatgaagaaggacacgtgggctctgcaccagtccccggcgctgcctgcggcatctgattctgccggcgctgcccgcttagcttatgggtatgcagaagatctgcatcatggtt

SEQ ID NO: 923400 - DNA, 120 bp, Artificial Sequence
  ENSG00000239716_0 (sequence is synthesized)
gatatctgtatctttgtcacttgagagttcatgggaaatttagagacccaagagcctgaattccggtagttcagaagtgctcataagcaaggaaaggagagtaagatgatttggacacca

SEQ ID NO: 923401 - DNA, 120 bp, Artificial Sequence
  ENSG00000239716_1 (sequence is synthesized)
tactgcaagctactgaaaatggtgtggaactggtataaactggtataatctacttggtgcgaaggcaatagtatatgcaacttaaatcaagaaaccaaatgctcagggaaatgcaacgta

SEQ ID NO: 923402 - DNA, 120 bp, Artificial Sequence
  ENSG00000239716_2 (sequence is synthesized)
caaagaagcaatggcaaatatatatgtgttgttctacttcatcaatttttcttagctgctagagcatttgaaattattctgttcacactaaatattcttaaaattatgtaaactctttaa

SEQ ID NO: 923403 - DNA, 120 bp, Artificial Sequence
  ENSG00000239718_0 (sequence is synthesized)
gacatggcgctgagtgggatgacaagaggagcgcctcggctcccctggatcgttttcgagccgcctcgatacgcctccttccaggccccgcagccctgaagccggggacaaattccgagc

SEQ ID NO: 923404 - DNA, 120 bp, Artificial Sequence
  ENSG00000239718_1 (sequence is synthesized)
caggtctttgaggaatcaccacagtcttccacaatgattgaactaatttatactccgaccagcagtgtataagcattcctttttctctacaaccttgccagccacctgtttccttctcct

SEQ ID NO: 923405 - DNA, 120 bp, Artificial Sequence
  ENSG00000239718_2 (sequence is synthesized)
agataaactccaccaaagcaagaacttatattgttcacagctgatcctatagcacctagaagaggatctagtaaatattaaatatttgttgattaaataaagtaaatcacttttccttgc

SEQ ID NO: 923406 - DNA, 120 bp, Artificial Sequence
  ENSG00000259293_0 (sequence is synthesized)
ttccacagtatcagatggtgtgggctgcaggtctctgcaggtgagggcttctggctcagctgctggggagtaagcaccaagtaggcacttgggccagaaaaaccagggttgctaaggaaa

SEQ ID NO: 923407 - DNA, 120 bp, Artificial Sequence
  ENSG00000259293_1 (sequence is synthesized)
tcagatgaagggaggacattcagatgaagaaacagatcatttccaagcaagaactagcaagaactccagattccttatgtgcattcagatggtcttttttgaaaggtatttgggcttgaa

SEQ ID NO: 923408 - DNA, 120 bp, Artificial Sequence
  ENSG00000259293_2 (sequence is synthesized)
aagcacatgtactttatcagctgtgtacctctgctattgtacaaggaaagcctcattctcttctgtccggataccatccttcaacaccctactcaaatgccgcctcctccaagaagcctt

SEQ ID NO: 923409 - DNA, 120 bp, Artificial Sequence
  ENSG00000259293_3 (sequence is synthesized)
cttccctccacttggaagtaaaatctgcttctctactcattcctctctcatggtcctcatctcatgccatgttctgttctagctgataacatttacatatgtgactcagtggtatacctc

SEQ ID NO: 923410 - DNA, 120 bp, Artificial Sequence
  ENSG00000259293_4 (sequence is synthesized)
atgtatttgacacacagaacggatcattttaatgaccctctgctctataagacaaaagtattttcagtcatatttatgtaaaaatcagcaatcatcactactttctcgatttcttcttta

SEQ ID NO: 923411 - DNA, 120 bp, Artificial Sequence
  ENSG00000259293_5 (sequence is synthesized)
gttataaagcagtgaacaatttttaaaaagacaaatacattttaactttaagatattcaaatgcagtaaaaatatttttcgtatgagtccaaatttttacctatcaaacaagatgttaca

SEQ ID NO: 923412 - DNA, 120 bp, Artificial Sequence
  ENSG00000259293_6 (sequence is synthesized)
actcattgttcacaatctgttttgttgctttaaattttaaacacatatgagaagcttacaggggtcacctaggatgagagaattgaaataattcaagttctggttttttgtttgtacaac

SEQ ID NO: 923413 - DNA, 120 bp, Artificial Sequence
  ENSG00000259293_7 (sequence is synthesized)
cactacgctatcattttttgtttcaaatctactgtttacatgcagaagcaggtaataagtgccactgaggttggagacataaggacgtcaaaggatctgaaccatcgcacacttactctt

SEQ ID NO: 923414 - DNA, 120 bp, Artificial Sequence
  ENSG00000259293_8 (sequence is synthesized)
gcaacaagaacacgcccctgagtctgtgcatgttggggccaagtgcataaccgggagttctccagattaatgtcaatgtagaacacaatatttatgaaaggataaataataaagatgtga

SEQ ID NO: 923415 - DNA, 120 bp, Artificial Sequence
  ENSG00000259293_9 (sequence is synthesized)
ccataaaaccatttttttctggaaagagctttgcctttatcgctgatactctttcttttgggatggagtttcactttgttgcccaggatggagtgcgacggcgccatctcggctcattgc

SEQ ID NO: 923416 - DNA, 85 bp, Artificial Sequence
  ENSG00000259293_10 (sequence is synthesized)
gttcaagcaattctcctgcctcagcgtaccaagtagctgggattacaggtgcccatgaccaacattttaccatgttggccaggct

SEQ ID NO: 923417 - DNA, 120 bp, Artificial Sequence
  ENSG00000259293_11 (sequence is synthesized)
gataatgacaggcagatcagcttttggttatatttgtatttaaattctccacagacggttgctcttttattgatggcacatcccccctccacccagtcccatggccccctattccctccc

SEQ ID NO: 923418 - DNA, 120 bp, Artificial Sequence
  ENSG00000259293_12 (sequence is synthesized)
caccccactcccaccccatttgactgtaaattcctgcaaggtggggacggctgtgcagccccctgttgtacagtgcccactgcacaagcgcagtggtttgcaggccaaggccccagggag

SEQ ID NO: 923419 - DNA, 120 bp, Artificial Sequence
  ENSG00000259293_13 (sequence is synthesized)
atcgccttaggatgtcctcccttttcctctatgggaggccagattttcttcctacatttcaaacaaagcaatacatcacaacagactgagtacagaaacaggtaagataatccagctgtc

SEQ ID NO: 923420 - DNA, 120 bp, Artificial Sequence
  ENSG00000259293_14 (sequence is synthesized)
ttgggaagccagatattagagagatttgcaacatttctttgtaaaacaatgtcactcttctccatttaaaacttatttggaaaatacaagttatttttcataaaattacattatatgtgt

SEQ ID NO: 923421 - DNA, 120 bp, Artificial Sequence
  ENSG00000259293_15 (sequence is synthesized)
taatatgcaagggtttattatcattttaaaaagtgttagcagattttaaagatttctcagttttaatttctaatgaaggaaatattgatatctcacataataaacactgtttggggtcct

SEQ ID NO: 923422 - DNA, 120 bp, Artificial Sequence
  ENSG00000259293_16 (sequence is synthesized)
cagtgatttttaagagaggaaacgtgtgaacagagtgtgtgagttgtactcaggcactgcgttacgtatggcaggtgctcatgtatgcttgtgacactcatgagggactgactgaatagg

SEQ ID NO: 923423 - DNA, 120 bp, Artificial Sequence
  ENSG00000259290_0 (sequence is synthesized)
aggacactctccagtcaccacaggctactgcctgtgtgttgattttattttgtgagtgggttgcattcattttcaagggtgtgtaggaatttagaaagcagaataaaccaaagagagcaa

SEQ ID NO: 923424 - DNA, 120 bp, Artificial Sequence
  ENSG00000259290_1 (sequence is synthesized)
gggaggaaatgaatgctaagagagtgaggtgattcatacagctgtgaaactgcaggttcctgaggacaggagccgcatctttttcatcttttcattccttatggcaccaagtgcctaata

SEQ ID NO: 923425 - DNA, 120 bp, Artificial Sequence
  ENSG00000259296_0 (sequence is synthesized)
tgctaacagagccttccatatgcaagcaccagagttctatgcttcaccaggggtttaggtcaaggagagcaggtgcggatgaggttccaggaggaagaatcaagttggagctgtaaagca

SEQ ID NO: 923426 - DNA, 120 bp, Artificial Sequence
  ENSG00000259296_1 (sequence is synthesized)
aaagccttatgagagtcgactttggaaagctggactattttctccctcaatttatttcagcttcctttggaaaaaaaaaatagctcatggctgaggtaatagagcacaagccttaaaaca

SEQ ID NO: 923427 - DNA, 120 bp, Artificial Sequence
  ENSG00000259296_2 (sequence is synthesized)
taggctgaagcagatgggaggagggccagagtcgagatgcagccttgcttttctggctgttctggtttttacactgtgagaaaaatatcttttctaaacatgaatttgtccttcctctac

SEQ ID NO: 923428 - DNA, 120 bp, Artificial Sequence
  ENSG00000259294_0 (sequence is synthesized)
tgtcacaacacaggaagggacaggcttggcagggcaggagaagggcgagaagtgacaggccgtcctgacagcaagggctccaggtaacacccggaggctaggctgagggcggctccaagc

SEQ ID NO: 923429 - DNA, 120 bp, Artificial Sequence
  ENSG00000259294_1 (sequence is synthesized)
cggcccttccctcactgcagcccacggctttaccaatgctcacagcttcaggctcttcaagacaaagatttacctttggtatcatctgctaccttttatcaaattattttttatctaaat

SEQ ID NO: 923430 - DNA, 120 bp, Artificial Sequence
  ENSG00000259294_2 (sequence is synthesized)
ggaggggaaagtggtaataagccagagaaacttacaggcccaaaacaacaactcaacaaaggtgtctaaaaagagtggaggccaggtgcttcaaagctgtttcaggcgcaggacaaatga

SEQ ID NO: 923431 - DNA, 120 bp, Artificial Sequence
  ENSG00000259294_3 (sequence is synthesized)
ggggaacggcacaggttcccctcagtcctggttcatttcctgcagggaaacctccatccccgccaaagaccactctcctccatcaaccttctcagaagacagcagagaagctggactgat

SEQ ID NO: 923432 - DNA, 120 bp, Artificial Sequence
  ENSG00000259294_4 (sequence is synthesized)
tacagctcagcaaatccaaaactgctccataccaaaccttagctgtcctcagcaggaaaatccaacactgacacaccatcgaaacttggttctgaaacacatcccaaaaccagggtgatc

SEQ ID NO: 923433 - DNA, 120 bp, Artificial Sequence
  ENSG00000259298_0 (sequence is synthesized)
tcaaagagatacttactgaaacagaaaacaaattatatttcttcaaattgttctttggaccaataacatactgtgacaagtcaagattttctaacgggaagtccacagatgtctgtaatt

SEQ ID NO: 923434 - DNA, 120 bp, Artificial Sequence
  ENSG00000259298_1 (sequence is synthesized)
tttgtttccacctgccatcgtaggaaaaactgcagaacaaaacattacaattacactgacagaggaagataccaggatgaatcctcattcattaacatctagatttttagccaggactgt

SEQ ID NO: 923435 - DNA, 120 bp, Artificial Sequence
  ENSG00000259298_2 (sequence is synthesized)
tcatttccattttacaaacaagaaaactgaggcatatggatatttaatgatgtgcctaaggtcaaacagccagaatggtagaggtaggactatactctggtccagctacaactgctacat

SEQ ID NO: 923436 - DNA, 120 bp, Artificial Sequence
  ENSG00000259298_3 (sequence is synthesized)
gagtcttctaggaaggactagatcttttccatcaattggaaaaatctggatgaaattatttctgcacttaatgatctactgtaaccagataatcgccctttgttatgtgcccatggcagg

SEQ ID NO: 923437 - DNA, 120 bp, Artificial Sequence
  ENSG00000259298_4 (sequence is synthesized)
cagtacaacaagtataaattacacagaacttaaaattccctcatttaatttcactgaacaggaggacaaactttcccctttaccgtttcagatgcactaaaagcacaggtggtaacttcc

SEQ ID NO: 923438 - DNA, 120 bp, Artificial Sequence
  ENSG00000267779_0 (sequence is synthesized)
atgggtcatttcttccaggctccaacttgcttctgctttgccatatggtaacacgccgtattatggaagcaccatcattaccgccatttgcaggggaagcctaaagagataaatgccagc

SEQ ID NO: 923439 - DNA, 120 bp, Artificial Sequence
  ENSG00000267779_1 (sequence is synthesized)
cagcatccctgtctctggggccctggagaggccttcaacacacctggcctcactgccctgtggcttcaacaaagaggccgagcatctcctataaaccttgaggtccatggatgacatagc

SEQ ID NO: 923440 - DNA, 120 bp, Artificial Sequence
  ENSG00000267779_2 (sequence is synthesized)
ggaatgatggatttcagaaaaggcaggtgcttcccactctttaaatttttgtttattctttccaagtttcccatcaacagccctgcagtaaaaattcagggcttcagagacaaatatttc

SEQ ID NO: 923441 - DNA, 120 bp, Artificial Sequence
  ENSG00000267779_3 (sequence is synthesized)
atgagtacagactgtgatgaggaaaagcaagccattccctctctatcaggatccagagcacactgctgttacgactccagaaccgataaggaagctatgtgtggaagtatgagctcaggt

SEQ ID NO: 923442 - DNA, 120 bp, Artificial Sequence
  ENSG00000267779_4 (sequence is synthesized)
taaaaccaaacccagcttgggtcagatgcacctttccagcaaccaccatctcagcaacaacctgccagctgtcaactggaagttcagcttctgggaacttcagcccccttctcagaggag

SEQ ID NO: 923443 - DNA, 120 bp, Artificial Sequence
  ENSG00000267779_5 (sequence is synthesized)
caaggtcctagcaccaacagcacctgcagtggagcccaagtatggctgcttcatggagaaggcagatattgaaatgtgatcactgaggctcagtgggaatccctttgctctcaaactccc

SEQ ID NO: 923444 - DNA, 120 bp, Artificial Sequence
  ENSG00000267779_6 (sequence is synthesized)
cgatgcaatgccttctgatttcaacagaaaagcaagaggctccaggcaccccattcagggactgccaccaaagtacccgcaaatccttcatgaaaggggagacattgacacattcttttt

SEQ ID NO: 923445 - DNA, 120 bp, Artificial Sequence
  ENSG00000267779_7 (sequence is synthesized)
ttattctctggtaggtatctgtttgcgtgcaaatccgtgagtgcttgcatctcgtgtatttgaaaatcctgtttaagaatgcagaggtccatatagtgtcattaaaacaaatgagtataa

SEQ ID NO: 923446 - DNA, 120 bp, Artificial Sequence
  ENSG00000267779_8 (sequence is synthesized)
cggtctatttcaggcagttatggatagataacattacagacactgggatctttaacaagtgacacaaacaagagaagaagcagacaggaccatttaacttcaaactccaccgaagagagc

SEQ ID NO: 923447 - DNA, 120 bp, Artificial Sequence
  ENSG00000267779_9 (sequence is synthesized)
tgaattgtaagcttcctacagcaagcccggctggcggctatgtggcagtcttcatttctcagcggaaaagccactcccttgagactctccaggcaccccccaaccgcattttttatcaag

SEQ ID NO: 923448 - DNA, 120 bp, Artificial Sequence
  ENSG00000267779_10 (sequence is synthesized)
tgctattgctatatataaatgtaacgtatagcaataaccgtagaaagatactgtgcccttgtgtatggataattaaaataggaacatctctggactaaattaaaatgtgtaaaaaccaaa

SEQ ID NO: 923449 - DNA, 120 bp, Artificial Sequence
  ENSG00000267779_11 (sequence is synthesized)
ccgttttcatacctggcttggcttagctgcacgagagaagaaaaggccgtggctgaatccatctccaggagcagctgtccccctgcaccgtttgaattgcgaggaaagagttacagtttt

SEQ ID NO: 923450 - DNA, 120 bp, Artificial Sequence
  ENSG00000267779_12 (sequence is synthesized)
tggtaattaaaacaacactaattttgtctctgtggtcacgctttgttgttagaagccatctatcatggccttcacgcatcacgcaatgagaagacatttgtctacgtacattgtgcttgg

SEQ ID NO: 923451 - DNA, 120 bp, Artificial Sequence
  ENSG00000267779_13 (sequence is synthesized)
tcaacggttttacggatttccccgcgtacctggacacccaggcacttttaaagacgtactgccttcatttctactctattactctgattaataaaacattttgcatgcttcatcaaaaca

SEQ ID NO: 923452 - DNA, 120 bp, Artificial Sequence
  ENSG00000267779_14 (sequence is synthesized)
gtgccatctcttgagtcaggagccacagacctcatccaggacttacagcctgacagattaaggagtccgataaatccacacattctgagttgttatgctgggcaaaagccatgcccatcc

SEQ ID NO: 923453 - DNA, 120 bp, Artificial Sequence
  ENSG00000267779_15 (sequence is synthesized)
acaagccagactcttggcctccactggaagctttggaactttattcccatcaaacactgacctaatccttgcactgagactgctatttacattaaaattggtcacataatgaaaaaaaaa

SEQ ID NO: 923454 - DNA, 120 bp, Artificial Sequence
  ENSG00000267779_16 (sequence is synthesized)
tttattaacgttagaagaacctggcgcaggtcggtccgtgcatccgaatctgccaaaacgcttccaaatctcttccctggcatttaaaagaaatctatttttatacattctcatgaattt

SEQ ID NO: 923455 - DNA, 120 bp, Artificial Sequence
  ENSG00000267779_17 (sequence is synthesized)
gccatttgcaggggaagcctaaagaggctgataaaatgactagctacacaggacccagagggatgtgccgctccacctggttcccgccgcatcttcccccgaggagccactagtcccttc

SEQ ID NO: 923456 - DNA, 120 bp, Artificial Sequence
  ENSG00000267779_18 (sequence is synthesized)
gcttcatggagaaggtatctgtttgcgtgcaaatccgtgagtgcttgcatctcgtgtatttgaaaatcctgtttaagaatgcagaggtccatatagtgtcattaaaacaaatgagtataa

SEQ ID NO: 923457 - DNA, 120 bp, Artificial Sequence
  ENSG00000267779_19 (sequence is synthesized)
tggagaaggcagttccttgctaatgcatatagactgagtccaatacgatagttaaaatgtcacattcctccaaatggatttccagatattgaaatgtgatcactgaggctcagtgggaat

SEQ ID NO: 923458 - DNA, 120 bp, Artificial Sequence
  ENSG00000267779_20 (sequence is synthesized)
caatcctcctgtctcagcctcccaagtctctgggattacagacacttccaataagaagactgagccaccaggcagatgttataagcaatgtgagcttgtgctggaagaagagagaatcca

SEQ ID NO: 923459 - DNA, 120 bp, Artificial Sequence
  ENSG00000267779_21 (sequence is synthesized)
ccagtgtcctgggccctccaaggcctctctgagggaaagacatttggacagagatgccaaggacaaggaagaggcagtcacccacctctgggcaaggtgcaaaagcccaagattcacgtt

SEQ ID NO: 923460 - DNA, 120 bp, Artificial Sequence
  ENSG00000267779_22 (sequence is synthesized)
catgtgttgcaagcacaaaaagaagatcctgtggctggagtagagtgaggaacagtgagaatggtaggagcagagggcagagaaagtggcaaaaacaaggtcgcatgaggccttgtaagc

SEQ ID NO: 923461 - DNA, 120 bp, Artificial Sequence
  ENSG00000267779_23 (sequence is synthesized)
ggccttgtaagccatggtcaagaggtgatattttattttaaatgaatccaaagtaattgcaagtttttgagcaagtaagcaaaatgctcctttgcaaaaaacaaaaaaaaaaaaaaaaaa

SEQ ID NO: 923462 - DNA, 120 bp, Artificial Sequence
  ENSG00000267779_24 (sequence is synthesized)
aagaaattctcttttggattggaagagagaaagaaaaattcaaatatggaaatatttgtcttccctgtaaaacagagtccagcctaatgaaaagcataatattaaaacacacacacaatg

SEQ ID NO: 923463 - DNA, 120 bp, Artificial Sequence
  ENSG00000267779_25 (sequence is synthesized)
ccaagcatctcctttaaggctacacgtatttttgactatatgtatcgttagttcttttctgtgcattcatttgcttgatttatggacactcaatttcacttcaccttttattacaagatc

SEQ ID NO: 923464 - DNA, 120 bp, Artificial Sequence
  ENSG00000267779_26 (sequence is synthesized)
tacagttacattaagagtaatagcaagtcaaatgtttttatatttgggcaattaaaaaaaaagaaaagatctattccttgggcccttataagaaattagggatagctgaaatgcaagatg

SEQ ID NO: 923465 - DNA, 120 bp, Artificial Sequence
  ENSG00000267778_0 (sequence is synthesized)
agggacgcagctgggggtgtcctggaattcacgactctgcagcccgaggtcccctctggcactgtggaggactcgccatgcctctcctgccccctcccctgtgtgacagcgatcacagac

SEQ ID NO: 923466 - DNA, 120 bp, Artificial Sequence
  ENSG00000267778_1 (sequence is synthesized)
cccggcacaaagctgagcagagcccatcggggcccaaacgtgcactcacagaggcctgctcctcgtggggtgacatcagaacgacacccgcagaaacccaaagcccaaagctgcccccgc

SEQ ID NO: 923467 - DNA, 120 bp, Artificial Sequence
  ENSG00000267778_2 (sequence is synthesized)
ttctccctcttagaccatcgaacctcatcctgcagatactcaggccacacacctgccaccagcctggcccgagcgccaccccaacccctctgagcccacgcctaacaccccacagcgcct

SEQ ID NO: 923468 - DNA, 120 bp, Artificial Sequence
  ENSG00000267778_3 (sequence is synthesized)
tttctcgtcccaaagaaaggctgacaccgctctggcacgtggctggcccagctcagcctccccgcctctgcccttgcaggtgccctgtacccaggcctctgtccatgcagccagagattc

SEQ ID NO: 923469 - DNA, 120 bp, Artificial Sequence
  ENSG00000267778_4 (sequence is synthesized)
accccggtttccttcaactccttccccagcttcacagtctcggcgcttctgctcttggcttccagcccatgcctgggtcccctcctctgctacgtccctccaaggccctatgccttgcgc

SEQ ID NO: 923470 - DNA, 120 bp, Artificial Sequence
  ENSG00000267778_5 (sequence is synthesized)
cttgcctgttcctgtgtgctgtggggccaccactccgatagctgtgaactccaagggcagccccagggaacctggtgccagagatggaatcttgctatgttgtccgggctggtctcgaac

SEQ ID NO: 923471 - DNA, 120 bp, Artificial Sequence
  ENSG00000267778_6 (sequence is synthesized)
ttctgggctcaagagatccttctgtctcagtctcctaaattgttgggactacaggtgtgagcccccacaccccgccaggtttctgatttttaataaagactccctctggctgtgtgaaga

SEQ ID NO: 923472 - DNA, 120 bp, Artificial Sequence
  ENSG00000267774_0 (sequence is synthesized)
cgatccaaccaaccctcaaagattcgcaccgcgcggcacgcacccagcaggttccagcgtaaaagctgctccggtcccaagcgcgtctccaaacccctcctttacagcgccgcctcccca

SEQ ID NO: 923473 - DNA, 120 bp, Artificial Sequence
  ENSG00000267774_1 (sequence is synthesized)
gccagccccggtgcgcagtggcgaacagcccgcagagcccccaggcttacctgtagcatgtggtgagctcgcctgaagacttcagacacgggtccacgtgtgtcccaacgccaggagcag

SEQ ID NO: 923474 - DNA, 120 bp, Artificial Sequence
  ENSG00000267774_2 (sequence is synthesized)
cagcagcggacccaggctcctgcccagctggcccctggcagctcctccccggctcggaggcggcggcaccatcagggaagctcccggcttcttcccagcgccgagctccgtccggaccaa

SEQ ID NO: 923475 - DNA, 120 bp, Artificial Sequence
  ENSG00000267774_3 (sequence is synthesized)
gcgtcctgctcctccgcggccgccgccgccttccctcttcccggcagggggcgccggagagcaggggcgtttgcaccacctgcacggggagcaggggtccggaatattatggggctgggg

SEQ ID NO: 923476 - DNA, 120 bp, Artificial Sequence
  ENSG00000267774_4 (sequence is synthesized)
gaaaatgaggctaggagttggggtatcggatgcaaacccagcagagaagcaggtaaagggggtacctgcggtgtccggctggcgcgagggccctgaggttcaagttgtctcgtcgggacg

SEQ ID NO: 923477 - DNA, 120 bp, Artificial Sequence
  ENSG00000267774_5 (sequence is synthesized)
ttcacgtccgattgacagacttgctggactcggcttggggctgcgccctcgcctcttccctctccctcctctgggagaagcgcgcagggtggggaaagcgggcggttgtttgcattttgc

SEQ ID NO: 923478 - DNA, 120 bp, Artificial Sequence
  ENSG00000267774_6 (sequence is synthesized)
accagggtctcacgaccgggaggaggaggagctgattctccaccggggagaagagggagggggaagagaggggttaataagcttccttcctgttgtccatgggtttctaaagcccagggt

SEQ ID NO: 923479 - DNA, 120 bp, Artificial Sequence
  ENSG00000267774_7 (sequence is synthesized)
caggccagtgttcgtctttcctccgtgaggacctaccctgagatttgcaactatcttagtcttcttttctcttagattatgtgaggaaggaggagttgaaaggctacaacgggcctctca

SEQ ID NO: 923480 - DNA, 120 bp, Artificial Sequence
  ENSG00000267774_8 (sequence is synthesized)
aattgttcaaacctgaaatagcgctatttatatagtgtaatcactcttccttaaaacctttagaagaaagttctctggttgtttcattggtcaataaaccatgcgctgtcttcttcataa

SEQ ID NO: 923481 - DNA, 120 bp, Artificial Sequence
  ENSG00000267777_0 (sequence is synthesized)
agagcaagtccagcaagagttgaacacaggctgccagaattccacccttgtctcattccgagattgtgtgctgagggttttcaactgcatctctaaagggaaggccaaagaaagagcaac

SEQ ID NO: 923482 - DNA, 120 bp, Artificial Sequence
  ENSG00000267777_1 (sequence is synthesized)
aggaaaggatggtaaaaagggggtagaaaggaagaaggaagggaagaaaaaagggaaaacagcaagctctctttccagagccacacatttttttctgtttgctcagtggcagtctgttaa

SEQ ID NO: 923483 - DNA, 120 bp, Artificial Sequence
  ENSG00000267777_2 (sequence is synthesized)
agaaatacttcattgtcactgaacacagagtcattaaaggcaccttggaaatttggacccttttactagaatcagggcttaaatagcaacttaatttatgacacttctcgaggctgatgg

SEQ ID NO: 923484 - DNA, 120 bp, Artificial Sequence
  ENSG00000267777_3 (sequence is synthesized)
ggaagaaaccaaaggagaaataagtgaaggcatggaaaccttgttccacacattgcctggtgccctgtccagcgctgcaaggtgcactgcgtctcctctgcccagcaagccacaagcccc

SEQ ID NO: 923485 - DNA, 120 bp, Artificial Sequence
  ENSG00000267777_4 (sequence is synthesized)
tccagggtgagaggagagccttcccttcccttggtcctcccttcgacacagggagctggagctggacagccccataggcactcagggcttgaagaagatatctagaaatgtcaaagcaga

SEQ ID NO: 923486 - DNA, 120 bp, Artificial Sequence
  ENSG00000267777_5 (sequence is synthesized)
agagcctcggagataatctgaactatttctgagtttatataagggaaaactgagactggagagaactaacatgtctaatattacaatggaaacttgtaataaaaccacaaattgagtcaa

SEQ ID NO: 923487 - DNA, 120 bp, Artificial Sequence
  ENSG00000267777_6 (sequence is synthesized)
attccgagattgtgtgctgagggttttcaactgcatctctaaagggaaggccaaagaaagagcaacaggaaaggatgacctgccttgcaagaaatgttaaaagaagtgctttagagagca

SEQ ID NO: 923488 - DNA, 120 bp, Artificial Sequence
  ENSG00000267777_7 (sequence is synthesized)
ctgcattatctgtcattttcattagattcaagctacagctgggccaaaaagacttagttctagcatatgtgctcaaaatggccaagctgcgattgtccaaattcaccctttcaagattgc

SEQ ID NO: 923489 - DNA, 120 bp, Artificial Sequence
  ENSG00000267777_8 (sequence is synthesized)
attactgaacaactggagccaaagctagaaattggagagagcaaagcgcctgaattccacttggaaaatggcaaacaccataggctctgaagattgaagcgtattatcatgactaactca

SEQ ID NO: 923490 - DNA, 120 bp, Artificial Sequence
  ENSG00000267777_9 (sequence is synthesized)
agggtcagaggagacactggcttccaccagcaagctcaacgtcttttggcacatctgaggaattcacagggcaaaaggtacagaaggaaactgtgctccagggtgagacatgtcatcaga

SEQ ID NO: 923491 - DNA, 120 bp, Artificial Sequence
  ENSG00000267777_10 (sequence is synthesized)
tgtacccaggtcttgacctgggccagctggtcttgagccccgtaggacgtagtctgtggcctgctgcatacttggatagtgtggggtgtataaaaagcaactcatcctgagggagaaaag

SEQ ID NO: 923492 - DNA, 120 bp, Artificial Sequence
  ENSG00000267777_11 (sequence is synthesized)
catccaactgtcataagcttgagtctccatgcaagtctccactattttataaattcagttctttatgtgaacatgcgaagaagacatattgaaaaattagccccacaaagaaataaatac

SEQ ID NO: 923493 - DNA, 120 bp, Artificial Sequence
  ENSG00000267777_12 (sequence is synthesized)
aaaaatccccactccaggttgctggaaatgggagaaccacagggctggggaagatggtcactccacccagtggacttcatgttatttgaagcagacattgaaaaaaaaaagagagagaga

SEQ ID NO: 923494 - DNA, 120 bp, Artificial Sequence
  ENSG00000267777_13 (sequence is synthesized)
gagagagactagttgttcaagcagagaaaaagaaagtaaaaaggccagtgggaatgtaaaatagtgcagccactgtggaaacagtacaggggttcctcaaaatattaaacatagaataac

SEQ ID NO: 923495 - DNA, 120 bp, Artificial Sequence
  ENSG00000267777_14 (sequence is synthesized)
tacaggggttcctcaaaatattaaacatagaataaccatatgacccagcaactccgctattgggtctataccctgaagaattgaagagatacttgtacacccatgttcatagcagcatta

SEQ ID NO: 923496 - DNA, 120 bp, Artificial Sequence
  ENSG00000267777_15 (sequence is synthesized)
attggtagatgaataaatgaataaataggcaaaatgccatagagacaaagtagaacagcactcccaagggctgagaagaagggggaatggagaattactgtttaattcagggttactggt

SEQ ID NO: 923497 - DNA, 120 bp, Artificial Sequence
  ENSG00000267777_16 (sequence is synthesized)
acagggttccagctggggaagatgaaaggattctggagatggatggcagtaatgattatacaacaatatgaatgcacttaataccactgagttgtacacttaaaaatggttaaaatggca

SEQ ID NO: 923498 - DNA, 120 bp, Artificial Sequence
  ENSG00000267777_17 (sequence is synthesized)
gaggttcttacttgcagaaggagatgcttcaggtacatgtttgtaccagagcattagtaaggctgcatcacagagtgagatgtgcatatcttcaggctctaaagacttaagggaagttct

SEQ ID NO: 923499 - DNA, 120 bp, Artificial Sequence
  ENSG00000267777_18 (sequence is synthesized)
tcgaagctgacagtgaggcctttatgctttcaccatacgtataaaatcagtgtttctggattggaccccaaaaattcattagttctctgctctcagacaagacacttctcccagtggagc

SEQ ID NO: 923500 - DNA, 120 bp, Artificial Sequence
  ENSG00000267777_19 (sequence is synthesized)
ttgtttttcactgcctatggagagacaggtgaacaaaatgattccgtgtcttgacctatgacctctgtatcagagaatgactcagtagctactgtgaataaataaacccctaaatccaaa

SEQ ID NO: 923501 - DNA, 120 bp, Artificial Sequence
  ENSG00000267777_20 (sequence is synthesized)
aatactggccgtttatggctcctgaaacttgggatgggaggacccagagagctcttttcaccaagagtgtgacctcagcagctttcattccttcctggccccagctggctctgggctgag

SEQ ID NO: 923502 - DNA, 120 bp, Artificial Sequence
  ENSG00000267777_21 (sequence is synthesized)
cccgcttcaccagggagcaccatgtgaagatgagtctcaacctggagtctgccatttgtttccagtccttcactgccattccaaagagaggaatgactgcccgaccctccatctggggca

SEQ ID NO: 923503 - DNA, 120 bp, Artificial Sequence
  ENSG00000267777_22 (sequence is synthesized)
gactcagcccaaaacagaggctgttggcccctttccccacctctcagctccttagcactttgaatccaatcctactctttggaacttagctgataaatacaaggctgccttttccaaaaa

SEQ ID NO: 923504 - DNA, 120 bp, Artificial Sequence
  ENSG00000267777_23 (sequence is synthesized)
aaaaaaggaagaaaccaaaggagaaataagtgaagtccaaagagtccatgacagagagactcagtgggatctaaaataaggattcattcttcagacaactcctgctcatggtttccccct

SEQ ID NO: 923505 - DNA, 120 bp, Artificial Sequence
  ENSG00000267777_24 (sequence is synthesized)
atctttacaaaatcgatctcagattcattcaacatgcattcaacagctttctatcaagaaaagacattgtgctcaagagctggaggtgataaagtccaatgtgaatttcttaaatggcaa

SEQ ID NO: 923506 - DNA, 120 bp, Artificial Sequence
  ENSG00000267777_25 (sequence is synthesized)
attaccagccaggatgaacacacaaaggcttcagcttttatgtacggcctagaagccccagggcccctgttccccctgagcacccaagagcagcttctgaacactgcaatgtgctggctg

SEQ ID NO: 923507 - DNA, 120 bp, Artificial Sequence
  ENSG00000267777_26 (sequence is synthesized)
gaggcctctggagaagaggaggccagacctgtgaattatggcaaattctactgcaccctgacttcagcaacctcctaaatcagaaaagggggcattaaaaatgtttttccttcatgcaaa

SEQ ID NO: 923508 - DNA, 120 bp, Artificial Sequence
  ENSG00000267776_0 (sequence is synthesized)
ctcgtatgtgtagtctgatgctgtgtgagatgagtcatctggctgaaggttttcctgcattccttacatttgtaaggtttctcaccagtgtgaattctctcatgctaggtaaggtgtgcc

SEQ ID NO: 923509 - DNA, 120 bp, Artificial Sequence
  ENSG00000267776_1 (sequence is synthesized)
ctctggttgaaggttttaatacattcgttacatttatagggtctctctcccgtgtggattctttgatgctgaatgagagttgattgacgagtgaagtatttcccacaatctaaacactga

SEQ ID NO: 923510 - DNA, 120 bp, Artificial Sequence
  ENSG00000267776_2 (sequence is synthesized)
cactgtgtcaaactgcgataatacttcattaatagccctctttgcagataactccttaatctctgcacctggcacatctgaaaggggaaaaaaaatcaatgaacagaagcaaattaaact

SEQ ID NO: 923511 - DNA, 120 bp, Artificial Sequence
  ENSG00000267776_3 (sequence is synthesized)
aatgtaatatacctatcttttatcttttcaatcccactttaggcacctactcaagaaactaagataccagtttttaaggttatattgataagaatgcttattgaaataggctttatattg

SEQ ID NO: 923512 - DNA, 120 bp, Artificial Sequence
  ENSG00000267772_0 (sequence is synthesized)
ttaacccaaaacaaagggccttgatcccctgtatggcctgcattccatgggatgagatggggattcctatgttcctcataggatctctataaaagtagagatcaggcctgagctcccatg

SEQ ID NO: 923513 - DNA, 120 bp, Artificial Sequence
  ENSG00000267772_1 (sequence is synthesized)
agtgttcacaggagatggtgccatgcatgcacagaagttcccaaaccagcatccaccatatcaaacccggaatctgtgtgagaaggcatgccttcatacttcaggcagtttacaagacag

SEQ ID NO: 923514 - DNA, 120 bp, Artificial Sequence
  ENSG00000267772_2 (sequence is synthesized)
gaagcgagtgactggaaacttcttcattcccatctctctcctggcatctcaccattgtcacaatgactgccagttcccaggcctcaacctggaatctcagaagcaactctttttgtacag

SEQ ID NO: 923515 - DNA, 120 bp, Artificial Sequence
  ENSG00000267772_3 (sequence is synthesized)
ctgaggggcacctggaacatagaagttaagaagagatctggctgggatcaagaaacctcttttcactgcacctgaggctcagttgtgccctctgctgacactaggtcaggaggctggaca

SEQ ID NO: 923516 - DNA, 120 bp, Artificial Sequence
  ENSG00000267772_4 (sequence is synthesized)
gctccaactggaaacttggagcagggttttaagacctctgctttctcactttgaagaattggaatagaaaaatagaaaatacaaaaatgatgagtccttggaattgataggacacgtaga

SEQ ID NO: 923517 - DNA, 84 bp, Artificial Sequence
  ENSG00000266775_0 (sequence is synthesized)
gacaccaggagtccaggccctgactcctcctggaggtttatgccagcggtgagctggaatcctacctcctatatcctggtgggt

SEQ ID NO: 923518 - DNA, 120 bp, Artificial Sequence
  ENSG00000266775_1 (sequence is synthesized)
ctaactttaaaagaagcaacgacactcccaccagacacccactcctgtgaatatggaaatacggcctgggaacctcactgccaggaatactcactgggttatacttcgaatatgccagga

SEQ ID NO: 923519 - DNA, 120 bp, Artificial Sequence
  ENSG00000266775_2 (sequence is synthesized)
tgccaggaggatgtagaatagttcctgctgcctgggaaacagagaaagggggctttggtttgtgttgtgcagatgctgttagtttcactttgtctacaaaccctaacaacaaatcccatt

SEQ ID NO: 923520 - DNA, 65 bp, Artificial Sequence
  ENSG00000266775_3 (sequence is synthesized)
ttttttttttcagtttgcacacacgccaattcagtctttgggtgtacaggtcctccatggttcta

SEQ ID NO: 923521 - DNA, 120 bp, Artificial Sequence
  ENSG00000266775_4 (sequence is synthesized)
cacacacgccaattcagtctttgggtgtacaggtcctccatggttctaaaccaatgtgcagagtctcccggctaccactccagcccctcctggagcgactccttcatcctccaagtctcc

SEQ ID NO: 923522 - DNA, 120 bp, Artificial Sequence
  ENSG00000263644_0 (sequence is synthesized)
cggagtttcgctcttgttgcccaggctctgtttaaaaaaaaaaaaaaaaaaaggtttattattgctaatactatggaggggctcagagatgtgaggaataagacaaagctgctttatttg

SEQ ID NO: 923523 - DNA, 120 bp, Artificial Sequence
  ENSG00000263644_1 (sequence is synthesized)
tttggtgaatggcagtcattagtgacttttaaaagagcagcttggtagaatgtagggaggttgggttattttcttttttacagatactatttattaggcactatataagattaaaagaga

SEQ ID NO: 923524 - DNA, 120 bp, Artificial Sequence
  ENSG00000263644_2 (sequence is synthesized)
tcaagcccttgtataaattaagtatggacacaggatttaacccagttgtgtctgatcctaaagcttatcattttaatgagttgcctcctctctcattcatggaagccagaatgcaagtgg

SEQ ID NO: 923525 - DNA, 120 bp, Artificial Sequence
  ENSG00000263644_3 (sequence is synthesized)
ttaaggagtaataaagaggtgaatgtagccagtatagaggactcttaggacaggtttggcagaggtgaaagggaagagatgggatgttgcttctggttagcaagggagaggaacatttct

SEQ ID NO: 923526 - DNA, 120 bp, Artificial Sequence
  ENSG00000229692_0 (sequence is synthesized)
ctcgatgtgctaatcaagttccccctaatttgacatactagaatctaatactagaggcagcatgacattattatgggggaggaggttgagaagcactaacctcgaagttagaatttctgg

SEQ ID NO: 923527 - DNA, 120 bp, Artificial Sequence
  ENSG00000229692_1 (sequence is synthesized)
tttgtcatcccagtctgctaattagctttctgatttaagacaaaatactttttctgtgccttctgggggtcaaattcgatttttaagattctctcagttggaagaaatctaactaaaaat

SEQ ID NO: 923528 - DNA, 120 bp, Artificial Sequence
  ENSG00000229692_2 (sequence is synthesized)
ttcctgtagtatacatacgtctgtagttacccagtagtctttgttgtctttgggccatctaaagtatatttgggctgggcatggtgtctcacacctgtaatttcaacactttggaaggcc

SEQ ID NO: 923529 - DNA, 120 bp, Artificial Sequence
  ENSG00000229692_3 (sequence is synthesized)
aaggtgggaaaatcacttgaggctgatctcaaacttctggcctcaaacaaacctcctgccttaaccttccaaagtgctggggttatagatgagccactgtgccccgccatggagtcatgt

SEQ ID NO: 923530 - DNA, 120 bp, Artificial Sequence
  ENSG00000229692_4 (sequence is synthesized)
gatacacatagtaagctgtcagatatttttgataagttcaaatagacaccaagtaaaaaaagattcccatttattctccccagcttgccaaccccctaaattaagtaatgaaatgaaacc

SEQ ID NO: 923531 - DNA, 120 bp, Artificial Sequence
  ENSG00000229692_5 (sequence is synthesized)
attttttccctagagcagacagctataggcctgtatcattaaggattctcaaataagtgaactattgaaaccacataaaagccatcagttgcaaattctacttctctttgtttaagtagc

SEQ ID NO: 923532 - DNA, 120 bp, Artificial Sequence
  ENSG00000229692_6 (sequence is synthesized)
taaaaatgaaagtggtggaaaaaacaggagataagcatattaagttctctactagtgctgaatctttaaatgactagctaagcagcgaagaagaaatcattctagaatgcagtgctctgg

SEQ ID NO: 923533 - DNA, 120 bp, Artificial Sequence
  ENSG00000229692_7 (sequence is synthesized)
atcctgctttgttataaacagttataatagcattaagttaacagtatttcacttaaacagctggacaggtggagaaaacattgtttcaggagttaggctttgtaatcttagacttgaggg

SEQ ID NO: 923534 - DNA, 120 bp, Artificial Sequence
  ENSG00000229692_8 (sequence is synthesized)
ttttctcaatttctctttgtttatgataaagaaaaaccctattactactccctttgtttttggttaaaaactgaaaataactgattttgaaatcaaataaaccagtgtaatataaagcca

SEQ ID NO: 923535 - DNA, 120 bp, Artificial Sequence
  ENSG00000229694_0 (sequence is synthesized)
ggatttcacgtgggagagagagcaaattagaatgcaggctcaagagcgatttaagaggggcccttcaaccacggaaagaaagggagagggagaagggaggagaaagagagagtctgattg

SEQ ID NO: 923536 - DNA, 120 bp, Artificial Sequence
  ENSG00000229694_1 (sequence is synthesized)
attgattatggccaactgtgagaagcagaattccacactgaggtctggcagcaccctaacaggcacttctgctctccccccacgatgtgcccaccccacctcttgcagccgagcaatgca

SEQ ID NO: 923537 - DNA, 120 bp, Artificial Sequence
  ENSG00000229694_2 (sequence is synthesized)
acctcaataggaaaacaatctgacttcagtgcaatttcactcctaaggattttccacatatttaaagatgctttgcatattttttttctaaaatcccccatgagactctacagtatgttc

SEQ ID NO: 923538 - DNA, 120 bp, Artificial Sequence
  ENSG00000229694_3 (sequence is synthesized)
cctgccaggcattttcaagtttgatttttgtggggaggacatcaacaagttaaaacctaaatgagcaacaaacgaggtgacgtgcgttatcagttttgtcttccatgtcttcctcatcct

SEQ ID NO: 923539 - DNA, 120 bp, Artificial Sequence
  ENSG00000229694_4 (sequence is synthesized)
gctgtttgctccacggctcttgacaggatggagacgaggaaagaacttccacatccacattcaaaacgtctgccagaactccctcaggcaagtaagagatgatttctcttcgagagcttt

SEQ ID NO: 923540 - DNA, 120 bp, Artificial Sequence
  ENSG00000229694_5 (sequence is synthesized)
gcatgttgatgagacagtgagtcaggaagagattggattgaacttgcttgaatataaagctgcttgagattttcaaattggagtcttgtaccctttctatagaaaaagtcactggcttgt

SEQ ID NO: 923541 - DNA, 120 bp, Artificial Sequence
  ENSG00000229694_6 (sequence is synthesized)
cactactcggagcatgaatttccacgttactagagtttctttgatctttagagagaaagtgtgaaatagttaaaggcttgaaagtggccagaaaattcataaacatgcattcaaaaataa

SEQ ID NO: 923542 - DNA, 120 bp, Artificial Sequence
  ENSG00000229694_7 (sequence is synthesized)
gatttttatgtgtatggtcatttcaagtgaattttgtatacagagcaagagtccagcatccacgtgcactcctgaccaggacgtagagagaggccctccaggaggtgtgcaaagtggcgt

SEQ ID NO: 923543 - DNA, 120 bp, Artificial Sequence
  ENSG00000229694_8 (sequence is synthesized)
ggatttgggacagcgatttgacagtatctgagaaagttaaaactctgcatccccaacacacagcaagccctgcagcgatcaggaaactgaggcaagcgaccaacctaagttgaattctga

SEQ ID NO: 923544 - DNA, 120 bp, Artificial Sequence
  ENSG00000229694_9 (sequence is synthesized)
ttaaaacatgaaagaaattgcaccttttccttaagggcaagatggtgctgtgggctttcctctctcctgatgagatgatgcaaatggactccatagagaaacgctgcccgtgtaacaatg

SEQ ID NO: 923545 - DNA, 120 bp, Artificial Sequence
  ENSG00000229694_10 (sequence is synthesized)
cagttacgcaacccggtgcatgacacatgaattgcagcgcacctgagatcctgatgaaatcctgggagcctggagctgtcaaacatggttttaaaaaataaagggaatacacccagccca

SEQ ID NO: 923546 - DNA, 120 bp, Artificial Sequence
  ENSG00000229694_11 (sequence is synthesized)
gtgggtgcatggtgcgtgtgttcctgtttgtgtctatgcatgtgtgtgtgtgcatgtgtcttttgtaagtacaggaagaagtcaggagtcgtcatggtagtgaggatagcagtactgtgt

SEQ ID NO: 923547 - DNA, 120 bp, Artificial Sequence
  ENSG00000229694_12 (sequence is synthesized)
cctatcagggccagacacggcacctttcagatactgtagtcatgcacttaatcctcaactgggttaccactgttatctccaattcacagatcaggaaactgaggcaagcgaccaacctaa

SEQ ID NO: 923548 - DNA, 120 bp, Artificial Sequence
  ENSG00000229697_0 (sequence is synthesized)
tgggcacccccagtctttccatcctcctcattcgtctaggggcacccgaatcccctattccttatttcccctatcactcaggcactggcagggtcctttgcccactcctgttggccgctg

SEQ ID NO: 923549 - DNA, 120 bp, Artificial Sequence
  ENSG00000229697_1 (sequence is synthesized)
caaagcaaaggtatgaaaggaacacacgtccctgactgactaggaggaacagagctgcctgctatctggaacaacttcctcccagactaagtgagaaataaacttctgttttctatatgc

SEQ ID NO: 923550 - DNA, 120 bp, Artificial Sequence
  ENSG00000229697_2 (sequence is synthesized)
gcgagggtcactgccactagctcctttgaaagcagaattaagaggcagtgcaggaaggcacagcaggaaggcttatggttagactacagagaaggaaacagccactgctggggacctacc

SEQ ID NO: 923551 - DNA, 120 bp, Artificial Sequence
  ENSG00000229697_3 (sequence is synthesized)
ctgtgctggtcactgacaagctgtctcattaaaccttcccagaccctcaacccctcctagtatcttatcctcattttacagatgagaagactgtggcccagagaggtccaatgccagtgg

SEQ ID NO: 923552 - DNA, 120 bp, Artificial Sequence
  ENSG00000229697_4 (sequence is synthesized)
gatcagctttgatgggatgcacacagactgacctcttctccccagccccttcaacttcccagagctgcagggggcctgggagttcttggtaacagcacattaaacctctgtttgtgggaa

SEQ ID NO: 923553 - DNA, 120 bp, Artificial Sequence
  ENSG00000226412_0 (sequence is synthesized)
ctccataagggcaggaacatctgtctttttcaacaatgcatttttggggcataatgctaagtaaatgatcctcaatataaatgtgctgaatgaaagaattaatggatgaatgaataaaag

SEQ ID NO: 923554 - DNA, 120 bp, Artificial Sequence
  ENSG00000226412_1 (sequence is synthesized)
tgaattgtgactacctaggaactatggaaaagatgaaaagagagttcaggcagttggcttaagttgctgaatacctgaaaattctcctgtgataaagacccagccagcatcctcgagtgt

SEQ ID NO: 923555 - DNA, 120 bp, Artificial Sequence
  ENSG00000226412_2 (sequence is synthesized)
ggaccacgttaagggaaagcttgaaggaaaagagagactttgcggaccccaattaaatagtttaccctagaagaatagaacctatttggggtggggtgagtggctgcaagagggacgttt

SEQ ID NO: 923556 - DNA, 120 bp, Artificial Sequence
  ENSG00000226412_3 (sequence is synthesized)
ggggcttcaaatgtagtcttttgacttatctccaaatgaagatttctatgttggatgcatgtagaaagctttcatattgaagcagagttttcagtgaagttggaaaaagaagaacaaagg

SEQ ID NO: 923557 - DNA, 120 bp, Artificial Sequence
  ENSG00000226412_4 (sequence is synthesized)
tgaagatatccacttagcaactctcatcatttgtgtgtcaccatggcttcagagacagggatacacatttagtatgaaaaggaggcttggaggttagcggagagttggtggtggtataga

SEQ ID NO: 923558 - DNA, 120 bp, Artificial Sequence
  ENSG00000226412_5 (sequence is synthesized)
gtaagaagaccttttcaaagtttgctttcttgaagagcactagcttccctggcatggccaatggggtgtttgctgttcagtagctataacttaaagtgcttaaaaccacaagatttactg

SEQ ID NO: 923559 - DNA, 120 bp, Artificial Sequence
  ENSG00000226412_6 (sequence is synthesized)
ctcctaaaggtaccgaatacagctattcagtatgcatgcacatttgtttacagttcttcagtgctgaggttataaaacaatatggaccctcaaatctcatggaaaaaccagtctaatacc

SEQ ID NO: 923560 - DNA, 120 bp, Artificial Sequence
  ENSG00000226416_0 (sequence is synthesized)
ggtggcagcatggcctgggggtcctggcaccgctgctcctctgcccaccctaacttcccggcatggcggctgccccctctgagcgtccccaaccaaactgcaggggatatgaagcaagct

SEQ ID NO: 923561 - DNA, 120 bp, Artificial Sequence
  ENSG00000226416_1 (sequence is synthesized)
ggacttggggagacatctctgctcgagtgcacgttggcctgatgacgactgctcttgggttcacgggttccaggctctgcccgggagcctcatgcaaactggtcccgttctacagacgag

SEQ ID NO: 923562 - DNA, 120 bp, Artificial Sequence
  ENSG00000226416_2 (sequence is synthesized)
gaaactgaggcacagagtgattacggctgtccctgagctcctgcagccagtaagtgtctctgaggatgaactgccatgtgcccggcggggatgccgtccctggcccttgctgagtgcctc

SEQ ID NO: 923563 - DNA, 120 bp, Artificial Sequence
  ENSG00000226416_3 (sequence is synthesized)
tgggacgaggtcagctgagcctgccatcctaactcagacaccatctcactctccaagtcccttctcggcccagcaaattctcacctccagaggccaggtctgccccgcaggtcttaggaa

SEQ ID NO: 923564 - DNA, 120 bp, Artificial Sequence
  ENSG00000226416_4 (sequence is synthesized)
atacagccctacttccatccagcacaccaacccaaggaagtgcctcggagccctggggcccgaggggggcctggccttggtctcacggcggcagctccacctggagaggagtgaactcaa

SEQ ID NO: 923565 - DNA, 120 bp, Artificial Sequence
  ENSG00000226416_5 (sequence is synthesized)
gccaggacgccccgtctccacagcggaaaccgtgttgccggctgctccctcctggggactctgggcctgaggttcctgtgggagttggggggatagctgagtcctatggaggtgcccctc

SEQ ID NO: 923566 - DNA, 120 bp, Artificial Sequence
  ENSG00000226416_6 (sequence is synthesized)
tcctccccgcccagtggagcttggggtggggacaggcgaagacagggtgagaagcacggggcattccccctccacacagcgctgagaaagtaagggagcatccagaaaacggtgcccact

SEQ ID NO: 923567 - DNA, 120 bp, Artificial Sequence
  ENSG00000226416_7 (sequence is synthesized)
cgcaaagcccgtgtccgctccctcccgcctgggaccactgtggcgaggggaagggagcgtggtggccctctcctgactcctgaggcctgaagtccaagctcccggccctcaggcaggcca

SEQ ID NO: 923568 - DNA, 120 bp, Artificial Sequence
  ENSG00000226416_8 (sequence is synthesized)
gggtctagacaccgctgccccaaacacaccccccagtccccgcccgcaggcttcctgcaggatcccccagtgcacctgggggctgaggagagtgagcagggcgcaaagaagcttcgtcgg

SEQ ID NO: 923569 - DNA, 120 bp, Artificial Sequence
  ENSG00000226416_9 (sequence is synthesized)
gagggcggtccccacccgccttggacccccggggatagtgtcctggggcctgggctcagatgcaccctgggaggaatggtgcggaggctgttttttgctccaagaggacattgcctcagc

SEQ ID NO: 923570 - DNA, 120 bp, Artificial Sequence
  ENSG00000226416_10 (sequence is synthesized)
agagggctgccgagctgggaggacccacagtgcaaggccgcagaaccccctaggaagcctcagagccttcaggttccgggctgaggctgtgggcgtggacccttgtgcaaaccccactgg

SEQ ID NO: 923571 - DNA, 120 bp, Artificial Sequence
  ENSG00000226416_11 (sequence is synthesized)
aagaaaaaccttacagctcaggaggaggaggggccccacccgctcccagagcccgtaaacgaggggtggtgcccacatgaggcctggggaagggctggggctgggacaccccctcaccac

SEQ ID NO: 923572 - DNA, 120 bp, Artificial Sequence
  ENSG00000226416_12 (sequence is synthesized)
ccccagataccccaggcagcccctccctccacagagagacccactgggcctgaccctgccctgggcacagggtcgagccagggacggcccgtgggagaaagacggcttcatgggccgctg

SEQ ID NO: 923573 - DNA, 120 bp, Artificial Sequence
  ENSG00000226416_13 (sequence is synthesized)
gccgggccaggtgcgtccttccccagttctaggtggcaaatggggtggggccagagccttctggctagggaagacactggcctggttggtgtggcaggggcagcgaaggagggtcaaagg

SEQ ID NO: 923574 - DNA, 120 bp, Artificial Sequence
  ENSG00000226416_14 (sequence is synthesized)
ccactctggcctggaagagtccccagccacctggacgggggtagccaggcctggtccctgcccccactctccaaggggtcggggcagccgggcagagccagtaagtgtttgttttcagat

SEQ ID NO: 923575 - DNA, 120 bp, Artificial Sequence
  ENSG00000260528_0 (sequence is synthesized)
gcagcagcagcagcagcagcagcaactggatttgctttttcaccagaggatccagatttccctgtggcctcgcaaacaaaaaagaaggaagacggagcagcacagtcattcctttgtgaa

SEQ ID NO: 923576 - DNA, 88 bp, Artificial Sequence
  ENSG00000260528_1 (sequence is synthesized)
caccagaggatccagatttccctgtggcctcgcaaacaaaaaagaaggaagacggagcagcacagtcattcctttgtgaaaaaggcat

SEQ ID NO: 923577 - DNA, 120 bp, Artificial Sequence
  ENSG00000260528_2 (sequence is synthesized)
caggcgtgagccaccgcgcccggcttcagctggtttttcaaaagtcatggcgtgtaactgtccgaacagtgaacttcggagatccaccggaggggcgaggccacagctcgaccgcgagca

SEQ ID NO: 923578 - DNA, 120 bp, Artificial Sequence
  ENSG00000260528_3 (sequence is synthesized)
ccacagctcgaccgcgagcacctgagcatcctgcaccgcctgcgacggccgtcagggggcgcgatgccgcctcacagaacctcaagaggcgcccgggttccggcacagacggcctgcggc

SEQ ID NO: 923579 - DNA, 120 bp, Artificial Sequence
  ENSG00000260528_4 (sequence is synthesized)
tccagggggcggaaccgagccgtctcctcaggacctacgcaggaggcgccgtcatccctacagggacacctgagagggcccagcctcctcctcctcaggacctactcgggagacgccgct

SEQ ID NO: 923580 - DNA, 120 bp, Artificial Sequence
  ENSG00000260528_5 (sequence is synthesized)
ggctctctaggaacacctggggaccgtggccagggacgacccagcctccttctcctcagctcctcaggaacgactggggaagctgtggcttcatggtccccgaggctgcccgaggaaagg

SEQ ID NO: 923581 - DNA, 120 bp, Artificial Sequence
  ENSG00000260528_6 (sequence is synthesized)
tatttcaggacagccaggagggggcgcacatccgccgcgaaactgtgagcaagagcgtctgtgctgaaccatggcgccaccagagggcgcgcgatcccgccccaaccaacttcccgctga

SEQ ID NO: 923582 - DNA, 120 bp, Artificial Sequence
  ENSG00000260528_7 (sequence is synthesized)
caaccaacttcccgctgaagtgccagaagcagcgaggagcttcaacttcctcagggcagcacgggggtcgtgttaatttggtgttcttcattgatgatgattattccccaccttctaaga

SEQ ID NO: 923583 - DNA, 85 bp, Artificial Sequence
  ENSG00000260528_8 (sequence is synthesized)
gcttccgaggctctgcgggagaatccgtttcctggccgtagaggtggcctgcactccgcagcttgtgctgcccgtctcgaatgac

SEQ ID NO: 923584 - DNA, 83 bp, Artificial Sequence
  ENSG00000260528_9 (sequence is synthesized)
acctgctctgctcttacaaggatccgaagaaatggaatcatcgtatcgctgatctaacatgaacttatgaattcaacaggtga

SEQ ID NO: 923585 - DNA, 88 bp, Artificial Sequence
  ENSG00000260528_10 (sequence is synthesized)
cctcccggcagcctctccaggccccgaactttctctcaatggcctatttaggcccataccctatcacggcagcctccgcagatgaggc

SEQ ID NO: 923586 - DNA, 120 bp, Artificial Sequence
  ENSG00000260528_11 (sequence is synthesized)
ttcattggttgttggaacgtaataagagttaatgtgtggtctctgctgcagtgtcctgaaacagagcgctaagccttgggaatgtacgaagtaatgtgtctttcgtacgctaatgaaatg

SEQ ID NO: 923587 - DNA, 120 bp, Artificial Sequence
  ENSG00000260528_12 (sequence is synthesized)
attgatggctgggggcacctggacagcctcagtggggctggctgccaagggaagcaaccttgtcatgagagaatttgaaatttcttcccccgtcccgtctctgtgaaggggagaggtgct

SEQ ID NO: 923588 - DNA, 120 bp, Artificial Sequence
  ENSG00000260528_13 (sequence is synthesized)
gatggttgagttgatcacctatggccacagacgtaaccaatctgcctgtgtaataaaggacagggttgggagagcatctgtgttgctctcccaacacaagagatactgggaggatcatat

SEQ ID NO: 923589 - DNA, 120 bp, Artificial Sequence
  ENSG00000260528_14 (sequence is synthesized)
aggaatagtaagtacactgctttcatgggttgtgtaatgtgatgtagcaaattgctgaacccaataagggtgttgtgggagtctccaatctgtaggaaagtcagacagaaggtaacctgg

SEQ ID NO: 923590 - DNA, 120 bp, Artificial Sequence
  ENSG00000260528_15 (sequence is synthesized)
gaacctactgtttgtggttggcatcttaagtggttacagtcttgtaacttagtacccatattttcttaaagaagaaatgaattagttttaccattttgctgttcctgcacttagctcttt

SEQ ID NO: 923591 - DNA, 120 bp, Artificial Sequence
  ENSG00000260528_16 (sequence is synthesized)
aggaatgcaattataagctttactgtctctccaccagacacttcctatactgcaaacttttccaactgtgtgattacttataagttccagggaccaaaccttgaaacaaactggcacttc

SEQ ID NO: 923592 - DNA, 120 bp, Artificial Sequence
  ENSG00000260528_17 (sequence is synthesized)
catatctctcccccaccagtagattggcagcagacaacagtcagtttacaacctggctctgcccgtggtggtgctagcaagaccacctaatggagaaaacatcagagcatgtcccataga

SEQ ID NO: 923593 - DNA, 120 bp, Artificial Sequence
  ENSG00000260528_18 (sequence is synthesized)
ccccgcacctcctcacctcatcccctgcatgccattctggcaagtccgaaagcccagctttctgcccagaaagtggaagcgcttcccttaaggcaagagcctgtatgttcccttcagcta

SEQ ID NO: 923594 - DNA, 120 bp, Artificial Sequence
  ENSG00000260528_19 (sequence is synthesized)
agctctggcataaagtcactttctttttaccatccttgtgtttgtcatttaaatttgcaagcgacaaggggcatgacgtgtattcctaggactgagcccttagcctgtggggtctgatgc

SEQ ID NO: 923595 - DNA, 120 bp, Artificial Sequence
  ENSG00000260528_20 (sequence is synthesized)
tttctccatttactgtcacaattggattgcactgtaggacacgcagctggtacccaagatttggtctgtgtggggaaaaaacccatgtatctggtaacagaagtgttctgtgttgagtgt

SEQ ID NO: 923596 - DNA, 120 bp, Artificial Sequence
  ENSG00000260528_21 (sequence is synthesized)
tgagagtatactataagacagttgtttttcctattataacattttgtctttcaacttttttcttcatgtcttctgagacgtaaaagttgtgaattttgaggaaataaattgatttatttt

SEQ ID NO: 923597 - DNA, 83 bp, Artificial Sequence
  ENSG00000260528_22 (sequence is synthesized)
aggttcatgggcgtttacacatcccagggctgccggcgagtcatgccatccttatatgtttctccttgtaaggtgctttgtag

SEQ ID NO: 923598 - DNA, 120 bp, Artificial Sequence
  ENSG00000260528_23 (sequence is synthesized)
ctcaagttgtatttattttatttgacaaagtggcccgtcattaagtggctttgctattcattattgcagcatacctgagttgtttcattttttaatttttgaccaatttgggtttgtttg

SEQ ID NO: 923599 - DNA, 120 bp, Artificial Sequence
  ENSG00000260528_24 (sequence is synthesized)
gggtggatccgggacagagaagggagaaaccctgagggcaacatggagagccccagggagacgcgcaccccacgacttgcttttatttgcgttccagtggctcgtttttcttagagtgtt

SEQ ID NO: 923600 - DNA, 120 bp, Artificial Sequence
  ENSG00000260528_25 (sequence is synthesized)
aaagtacttgaaaaatattgaagagcagatgtagatgtgagttttcacaaccgtgttttaagtgtaaatactggattttgtctgttaaaaggattttaggtaaaataaatttaagcggac

SEQ ID NO: 923601 - DNA, 120 bp, Artificial Sequence
  ENSG00000225850_0 (sequence is synthesized)
cgtcctggcacccggagctgtgcgggcttcgctgggggcttggttgcccgcgggcgcggagctgcgggcgaagccggagcaggggcggacgcggaagccggagcccgccaggcactcgag

SEQ ID NO: 923602 - DNA, 120 bp, Artificial Sequence
  ENSG00000225850_1 (sequence is synthesized)
ccgccaggcactcgagccacgcgcctgcagccgctggagccggaatcctgccggctcgggttgatttgtaaacaatgggtgacgtcgcgccgggccctaccaccgcaccggggcgggggt

SEQ ID NO: 923603 - DNA, 120 bp, Artificial Sequence
  ENSG00000225850_2 (sequence is synthesized)
gacgcgcgagcaggcacgggggcaaagggcggcgcgggcggtgaccgaagccgtcccgcgcctgtgttcgttgtccctccaggagggggtccggggcgtggggactgatttccgacctcc

SEQ ID NO: 923604 - DNA, 120 bp, Artificial Sequence
  ENSG00000225850_3 (sequence is synthesized)
agcgctgatctcatccacagagggatcacatgacctcatctgggaaaatataaaccctacccacctgcctgcccatttggaaatgcagactggaggacgctaagttcattcttacctatg

SEQ ID NO: 923605 - DNA, 120 bp, Artificial Sequence
  ENSG00000225850_4 (sequence is synthesized)
tactaacaagtacacaagaagatgctcaatatcattagtccttggggaaatgcaaattagattataatgagattccagtgtacacccactagaaggctattaaaaaggacaataccaact

SEQ ID NO: 923606 - DNA, 120 bp, Artificial Sequence
  ENSG00000225850_5 (sequence is synthesized)
gttggcaacaatgtggagaaatggaacccctcctacgtttctgatgagaatgtaaaatggtgcagatactttggaaaacagtttggcaatttattaaaagattaaataagcataaactta

SEQ ID NO: 923607 - DNA, 120 bp, Artificial Sequence
  ENSG00000225857_0 (sequence is synthesized)
gagagagctctctggggtctctttttgtcaggatgctaatcccatcctgggggcctcaccgtcatgacctcctctaaccctaatcacctcccaaaggccccgcctcctaatactatccca

SEQ ID NO: 923608 - DNA, 120 bp, Artificial Sequence
  ENSG00000225857_1 (sequence is synthesized)
gactgaccgggcctcaacatcacctgggaatcctggaaggaaacaggttcctgggccttgctccaacctaaggaacccgaatctgcatagctcacatggcgccgtatttccaacgttcag

SEQ ID NO: 923609 - DNA, 120 bp, Artificial Sequence
  ENSG00000225857_2 (sequence is synthesized)
agcacattggaaagttgggaggaaggatgaggcttgtgttttcactcacaaactccctccagaagatgataatgaaagtgtctgacgcataaggaaataaataagatggttatgtgccca

SEQ ID NO: 923610 - DNA, 120 bp, Artificial Sequence
  ENSG00000225857_3 (sequence is synthesized)
catccttcccctgtctttcctgggttaaattttacacttagtaacactgaaaccaggcagtttcacacctccgagcctgcatctatgctcatctctttacctgaaacgtcttctctcacc

SEQ ID NO: 923611 - DNA, 120 bp, Artificial Sequence
  ENSG00000225855_0 (sequence is synthesized)
ggcccgagctgcacaggccaaggaattccacagagggtgtgacccaaagcccctaacaacagactcgctgggaccccctagacttggcatggaggctgggtgcagacctagaagacagag

SEQ ID NO: 923612 - DNA, 120 bp, Artificial Sequence
  ENSG00000225855_1 (sequence is synthesized)
gtggtgaagcccggccagtgaggacaagagctgcggggaaggacaccgaggtgacttgacggcagcagcaggcctgaaggctctggctgctttggaagatatttcaatgagatgcaaatc

SEQ ID NO: 923613 - DNA, 120 bp, Artificial Sequence
  ENSG00000225855_2 (sequence is synthesized)
gcaatcgactgaccattagtttccactgcagtgtttgcagatggagtcgaatgtaaccccccgggaatggagccgggagggtcagagaacgcggctgcgctctggatctccgaagggggg

SEQ ID NO: 923614 - DNA, 120 bp, Artificial Sequence
  ENSG00000225855_3 (sequence is synthesized)
cgggggcctggaagaggtccgggcccagaatggacctccaggtccctgctgccgcaatctggccctgccctccagcctaccccttactcccagaggaagggacccagggagacccaccca

SEQ ID NO: 923615 - DNA, 120 bp, Artificial Sequence
  ENSG00000225855_4 (sequence is synthesized)
gatgccctgaaaggaggtggaggatgggggtggggcaatacgcagagtttgtctggtgaatgcaggaaaggggtgggggctggagaggaaaaggatggagcagccgtcagcttgtcaact

SEQ ID NO: 923616 - DNA, 120 bp, Artificial Sequence
  ENSG00000225855_5 (sequence is synthesized)
ccgcatctgctggctgcctcggccgggctccagcctgcgccctcgcccctcggaacagcggtatgtccattctctccgcattcgtctccatcgttcagccaccaccgcaccctttctcta

SEQ ID NO: 923617 - DNA, 120 bp, Artificial Sequence
  ENSG00000225855_6 (sequence is synthesized)
tcctcaccagggtcctcctggaaccgctccggccttgggcttgtccgcggctcccacggtccccgcccggcggggcacagagcgggaggggaggggcactagcacaacctaccctgcgct

SEQ ID NO: 923618 - DNA, 120 bp, Artificial Sequence
  ENSG00000225855_7 (sequence is synthesized)
gcgcagctgcaccccttcgcgcatgggcgtggcgtagctcagacccgcccccagcgtttagcgtcttttgtcacccacctagagggtttgatatatcctaagcttttggcccctgggtcc

SEQ ID NO: 923619 - DNA, 120 bp, Artificial Sequence
  ENSG00000225855_8 (sequence is synthesized)
tggttccgtgcagcgagtcctcccagcaccccaccctgcacattctggaaagagccagactctggctgggccgagcaagaacagaaccacaagaaggttacacgattatttattgagagc

SEQ ID NO: 923620 - DNA, 120 bp, Artificial Sequence
  ENSG00000225855_9 (sequence is synthesized)
ctcctctccccgcccttgcaatctctaggtcactttctccgcttgtagattttgcgcgcaagccccagaaagacggctgggggcaggggtgctgcgtactgttcaatgagagccataatg

SEQ ID NO: 923621 - DNA, 120 bp, Artificial Sequence
  ENSG00000225855_10 (sequence is synthesized)
tggctgtaactgtcttcctcatattgcaagaacactgctggcagatccagctcctcatatagcgccttcacccgggccactttctcagcctccttctgcccgtaattttcctggaagagg

SEQ ID NO: 923622 - DNA, 120 bp, Artificial Sequence
  ENSG00000225855_11 (sequence is synthesized)
ttgaaagacaggaaaacgggcttggccttccccagagcctccaggacccctccactcccctcattcacatattccagaacatctccaaagccacccactcctttcctccctccaattttc

SEQ ID NO: 923623 - DNA, 120 bp, Artificial Sequence
  ENSG00000225855_12 (sequence is synthesized)
aagtgtctctacgtagctaaaatcccaagcttcccttccctatcccaaatattgcctcataccaggcatcctctactccagggtttctccaccttggcactattgaaatttgggaccaga

SEQ ID NO: 923624 - DNA, 120 bp, Artificial Sequence
  ENSG00000225855_13 (sequence is synthesized)
ctgcacaggccaaggaattccacagagggtgtgacccaaagcccctaacaacagactcgctgggaccccctagacttggcatggaggctggcgtcgattttcccatcatccgcctctaag

SEQ ID NO: 923625 - DNA, 120 bp, Artificial Sequence
  ENSG00000225855_14 (sequence is synthesized)
agctcagaggtagggagatcctgctccgccctctcgtcctcttcctccaagcctggggaagggacgtcctggcaggtggtcagggcgttgcagttcgagtccaggccaggatcgggtgaa

SEQ ID NO: 923626 - DNA, 120 bp, Artificial Sequence
  ENSG00000225855_15 (sequence is synthesized)
ggccagtgaggacaagagctgcggggaaggacaccgaggcaccttcaggatctggtactgttctggagtggcccgttgcagacactgaaccaccagccagctgcatttgttgtcctggat

SEQ ID NO: 923627 - DNA, 120 bp, Artificial Sequence
  ENSG00000225855_16 (sequence is synthesized)
gtcagtgccaattttgccggtcacactggggtccccaaagaggtcaaggcacgctgcaatcctgtaccctgaaaccagctagatgagcatgtcctatagaggccaaggctaccatgggca

SEQ ID NO: 923628 - DNA, 120 bp, Artificial Sequence
  ENSG00000225855_17 (sequence is synthesized)
ccctctgggcatcgggccctgtctgcaatacacctgcaggaagagctcgatcaggttcagatctgtccccggcgggtaagggatgaatccatgatgtcatctgccaccaggaagaaagct

SEQ ID NO: 923629 - DNA, 120 bp, Artificial Sequence
  ENSG00000225855_18 (sequence is synthesized)
gctcccggcaatagagcttcagcaggcggtagatacatgcttccaggaggttagcatcattgatggcatccaaacccacgcccggctgtcatgacagacagaaaaacaagcaatcaatct

SEQ ID NO: 923630 - DNA, 120 bp, Artificial Sequence
  ENSG00000225855_19 (sequence is synthesized)
ctagtctcggttcatactaagagccatcaccccaacacctcaaccaggccatatataaccacctccctgtggcctgtccccatacccactgctattttcctgcccacattaccttctgat

SEQ ID NO: 923631 - DNA, 120 bp, Artificial Sequence
  ENSG00000225855_20 (sequence is synthesized)
tctatcagcaacagagctgctactttatatctgtatatagttttgcttttttttggtaggggacagagtctcactattatccagtgcagtggtgcagtcacagctcactgtagcctctaa

SEQ ID NO: 923632 - DNA, 120 bp, Artificial Sequence
  ENSG00000225855_21 (sequence is synthesized)
ataccccatgcctggctattttttttttttaatttattttttgtagagacagggtcccactatgttgctcaggctggttttgaacccctgggttcaaatgatcctcctgcctcagcctcc

SEQ ID NO: 923633 - DNA, 120 bp, Artificial Sequence
  ENSG00000225855_22 (sequence is synthesized)
ttactgggattacaggcatgaggcatcacagccggccagagctgctgcctttgacagtccctatgagctgggaaagtcaggatggggagacagaagacttctgtgctatggagacttgga

SEQ ID NO: 923634 - DNA, 120 bp, Artificial Sequence
  ENSG00000225855_23 (sequence is synthesized)
aagtgacataacatgtttggctcagactccccgcctataaaatggaactaaaacactcttgttttaggttaagaaactagaacagatctttgacatctctaatgagccctagattattcc

SEQ ID NO: 923635 - DNA, 120 bp, Artificial Sequence
  ENSG00000225855_24 (sequence is synthesized)
tggtgtcagggagattaggaaacaccttcatataccgtactctattcttgccaaaaacctcaatgaatgcttaaagtaagatctattcatgaaactgacttcacattacttcctaaataa

SEQ ID NO: 923636 - DNA, 120 bp, Artificial Sequence
  ENSG00000225855_25 (sequence is synthesized)
aagaaggctattcccacattgcccccagcactgtgtttgaacaccctggtgactaggaacacagccttacctaaagcagctccttagcagtgcaggtctaataaggtggaactgaaatct

SEQ ID NO: 923637 - DNA, 120 bp, Artificial Sequence
  ENSG00000225855_26 (sequence is synthesized)
gactttgacctatgagtctcagacatctttaaacatctttaaacattaactaagggcttactcttctgagtgcccatctgaaggtacctgaacgtgtcgggtttcccactagaccatgat

SEQ ID NO: 923638 - DNA, 120 bp, Artificial Sequence
  ENSG00000225855_27 (sequence is synthesized)
ctccttggaagcagggacagtaacttccccctcttagcatttgcagagcctagcacagcattaggcctggagtgagagtttcctaaacacttgtctgacaaagaaattaataaaacactc

SEQ ID NO: 923639 - DNA, 120 bp, Artificial Sequence
  ENSG00000229348_0 (sequence is synthesized)
cgaagtgctgtaaaaacccgggccttcacgaaaagcgcctacggttagcgagagagggatcacggggagaggcgaaggggcggagcgagggcggccggaaaaggagcaggacccgcgcct

SEQ ID NO: 923640 - DNA, 120 bp, Artificial Sequence
  ENSG00000229348_1 (sequence is synthesized)
ggagaaggacaatatatgaagagcttagtgaagtttgattggaactgaaaaacatcagtatgaaagcatcaagtggataaatctcagaaacataatctctagaggaacaagcaaatcaca

SEQ ID NO: 923641 - DNA, 120 bp, Artificial Sequence
  ENSG00000229348_2 (sequence is synthesized)
gtgtaggaatatggacatctctgataaaacaatgaagaacaagtgaataattatcacaaaattcagcataatggtgaccacctctagaggaggacagaagagggtagcattggagccttc

SEQ ID NO: 923642 - DNA, 120 bp, Artificial Sequence
  ENSG00000229348_3 (sequence is synthesized)
gagccttctcttacgttggatagcacattcatgtatgttaattttactactcttctttagagctaacatatattttataaatatcattttttatctgtcttatatttaataaaaacacat

SEQ ID NO: 923643 - DNA, 120 bp, Artificial Sequence
  ENSG00000260520_0 (sequence is synthesized)
caaaaacaaaaaaaaacctttgttctgtaagacagtatagaaagttgggagaaaggtctactccaggatcaagacctcctgaaagggtctcgaggaccccaatggttcctggaccacact

SEQ ID NO: 923644 - DNA, 120 bp, Artificial Sequence
  ENSG00000260520_1 (sequence is synthesized)
ggaccaacaggacccaagggagagtatcaaaggcaaaacaaaggaaaatgaggacaacccaatactcagaaaaaaaaacgagtaattcatggattcacaacgggcaacaaactagatgac

SEQ ID NO: 923645 - DNA, 120 bp, Artificial Sequence
  ENSG00000260520_2 (sequence is synthesized)
tattaggaagagaagagcaaaccttatgatctcaaaatgatttcttgttcatttgcatcctcgcatcaatctagactttaagaaatatgtgatttttaaataaatgggtatatctgcata

SEQ ID NO: 923646 - DNA, 120 bp, Artificial Sequence
  ENSG00000250538_0 (sequence is synthesized)
ccttccacgaatctctccctttgctctctaccccccagttccgcgagagctggcccggcgaagacagacctcctggacttgaggccgacttcaccaaatccgccccgggaaaaggcgagg

SEQ ID NO: 923647 - DNA, 120 bp, Artificial Sequence
  ENSG00000250538_1 (sequence is synthesized)
gcaaaggcggggcggacagacccagctgcggctgagggactgcggtccctagcaaggagcagagatggggagctggatccgcgcagaaccccggaaaagcgccagcaggattgcaccgag

SEQ ID NO: 923648 - DNA, 120 bp, Artificial Sequence
  ENSG00000250538_2 (sequence is synthesized)
aacaaatcctccgcaccctcgcccagggctggggcgcagtgcgctggtgctcctctagctgggcggtccctgtgctccaaacgagaagatagctgacttccgaatccttcactctttgat

SEQ ID NO: 923649 - DNA, 120 bp, Artificial Sequence
  ENSG00000250538_3 (sequence is synthesized)
cctgacccaagccactcgtgccactaggagcgcatgcctatggaatactcgctcctgtctccttgtggtgaagccttccgctaatgcccagagcctcccaggctggattagtgggtagga

SEQ ID NO: 923650 - DNA, 120 bp, Artificial Sequence
  ENSG00000250538_4 (sequence is synthesized)
gcaaaacaggatagtggagacaatcagcagagcagcagcgtctatttcctcgggattcctcccaggaaccctattcgaagccattccttctaaaagtttgcagccagtctctctttcctt

SEQ ID NO: 923651 - DNA, 120 bp, Artificial Sequence
  ENSG00000250538_5 (sequence is synthesized)
tgttggttttaagaggaggcagtagagctacctacatacaaaaacgaaagcctgatactggtaacctaagtctttacttaaccatcctcttcggaggctttgcacacattacttttcctc

SEQ ID NO: 923652 - DNA, 120 bp, Artificial Sequence
  ENSG00000250538_6 (sequence is synthesized)
ctgaaatatactcctaaaagattagattaagattagattccgctactctaaaatgaaaaaaaatatttatctgtttaaaaaggtaatacatattctccaagatgttaattaaaggcttcc

SEQ ID NO: 923653 - DNA, 120 bp, Artificial Sequence
  ENSG00000250538_7 (sequence is synthesized)
ctcaaatggattggattttcagttccttcagggttttccacaccctaatagtattgcatttgtaaggcatttttacagtgtaacctgaaattaatcttcagttaatatagaattatgccc

SEQ ID NO: 923654 - DNA, 120 bp, Artificial Sequence
  ENSG00000250538_8 (sequence is synthesized)
acaggagtataggaattgtttataaaacaaagcagcctgggcttttcaaatacctagaaacaaaggtaaacagaaatggaaatatttaacatgttctacacagttccacttaaagtcttt

SEQ ID NO: 923655 - DNA, 120 bp, Artificial Sequence
  ENSG00000250538_9 (sequence is synthesized)
ttgttttgttttgttttgtttgttttttccttaagaaagtactctttgcccaaatatgtgttatatgtgacaggttccattcttctcaatatatctgcattggtgaagaatgaaccatat

SEQ ID NO: 923656 - DNA, 120 bp, Artificial Sequence
  ENSG00000250538_10 (sequence is synthesized)
aatgaaccatataccaataagttataactttaaaagagtagaaatggatttaaacaacgaccacaaaaacaaatcaaatatccagcaaaacagatgagtgttgtcttttagagcaattgc

SEQ ID NO: 923657 - DNA, 120 bp, Artificial Sequence
  ENSG00000250538_11 (sequence is synthesized)
tttggaaaattcaactgatttcactgacattgattgcacaaaacacattttatcttctttaaaattgcctttcagaagcgtattagcagccataaccaactatttgcctcactctcttat

SEQ ID NO: 923658 - DNA, 120 bp, Artificial Sequence
  ENSG00000250538_12 (sequence is synthesized)
agacgtgtgtttgtcttagtagattcatatagttccacagacatctagtcagcaacctcaaaagagtaaatggtctctatgattaatgtcctttaataaagttcagaattggatgagaaa

SEQ ID NO: 923659 - DNA, 120 bp, Artificial Sequence
  ENSG00000251632_0 (sequence is synthesized)
aatgaatgatggtctgtagtgtgctgtcagatcctccagtgttctactcaccacattggattttcttttaatgcttttggattgaaactaaaaatcctgatgagttcaatagtaccctag

SEQ ID NO: 923660 - DNA, 79 bp, Artificial Sequence
  ENSG00000251632_1 (sequence is synthesized)
attgaaactaaaaatcctgatgagttcaatagtaccctagttaagcagtaatgcaagctgaagaaaattcttccactgt

SEQ ID NO: 923661 - DNA, 70 bp, Artificial Sequence
  ENSG00000251632_2 (sequence is synthesized)
taggagttcgagaccagcttggccaacgtggtggaaccccgtctctgctcacttggggggctgaggtggg

SEQ ID NO: 923662 - DNA, 84 bp, Artificial Sequence
  ENSG00000251632_3 (sequence is synthesized)
gccattgcacaccagcctgggagacagagcgaagaaaattcttccactgtgtagaaaatgcatcaacattattctaagactttc

SEQ ID NO: 923663 - DNA, 120 bp, Artificial Sequence
  ENSG00000251632_4 (sequence is synthesized)
cactgtgtagaaaatgcatcaacattattctaagactttcttcaggaaatcccaggcatttaaagtcagccctttaatactatggttcttattaaaaccagagattaatgtataaccaaa

SEQ ID NO: 923664 - DNA, 120 bp, Artificial Sequence
  ENSG00000251632_5 (sequence is synthesized)
actgaaagcttcataggttacattgtgtgaacataaatgaaataaaattactgtgatagaaatatgctttagtttctctctacaattacaaaaacggaagttgaatgaggaatttaaaag

SEQ ID NO: 923665 - DNA, 120 bp, Artificial Sequence
  ENSG00000251632_6 (sequence is synthesized)
ataacaatacacttttatcttgtaacagtgttaatcacagtgaaatatacttttcaggataacattttcaaatggagcaaatatcgttacagattgatggcatagcctttatttgccttg

SEQ ID NO: 923666 - DNA, 120 bp, Artificial Sequence
  ENSG00000251632_7 (sequence is synthesized)
tcaacattaaggtaggaagacttctgagatacaaatgtcagactgacagtagtgactcagaagcagaaattcaaaaaatgcacttgctgtaaattctgctacactgcccagggcacttct

SEQ ID NO: 923667 - DNA, 120 bp, Artificial Sequence
  ENSG00000251632_8 (sequence is synthesized)
tggtctgtatgtgtaacatgtattcagctattgtaaagtttctttaacagtcctggaagtactatgacagtaacaaggaagattgatagcagattccatgcctctttgttaatcacatta

SEQ ID NO: 923668 - DNA, 120 bp, Artificial Sequence
  ENSG00000251632_9 (sequence is synthesized)
tcagtttaaaggcaaaaaatgggtgatgggggtgtgaaagtcaaagatttgccaagcataccgtttttctactactcattcttctaattaccttttgggaaatgagagaacctaaccata

SEQ ID NO: 923669 - DNA, 120 bp, Artificial Sequence
  ENSG00000251632_10 (sequence is synthesized)
taacattttgaaatgtttccttagggaatctgaataatattttatgtagcttgagttacatgataatgacaagcatgtcttcaaacattagaattaaacccatggatgtggcatagtgcc

SEQ ID NO: 923670 - DNA, 120 bp, Artificial Sequence
  ENSG00000251632_11 (sequence is synthesized)
tgttgtttttcatcataagagtttatgataaaactgagtactggagtctgcagtttataaaaagatgtttccttctatttagctggaggagtttcttatactggtggattggttcccagc

SEQ ID NO: 923671 - DNA, 120 bp, Artificial Sequence
  ENSG00000251632_12 (sequence is synthesized)
gcctacagtcagataaataaaaagttgcagcagggggaccaactagtagggagtacatttcatcggttggagagaggaaatttatttcttcaattactttagaacatctgcatgttacaa

SEQ ID NO: 923672 - DNA, 120 bp, Artificial Sequence
  ENSG00000251632_13 (sequence is synthesized)
agaggaatgtgcattaacacaattaaccatttcttttttttaattgaattcatggattcattcctaagttttctaatcagttttgctctggtgtcataagttaagggagaatcaatacca

SEQ ID NO: 923673 - DNA, 120 bp, Artificial Sequence
  ENSG00000251632_14 (sequence is synthesized)
aactaattttcctgcataaagagattacttggataatagattttttccagtgcttttggaaatattgagtctaataaaataactctaacagagatacaattattcatatcagtaagttgt

SEQ ID NO: 923674 - DNA, 120 bp, Artificial Sequence
  ENSG00000251632_15 (sequence is synthesized)
tcatcagaaatatttcacaaagactagacctgaatctaaattggaggcaaaatcattcaattcaatagagcagttgcacttttctcatatagtaaaatgaccagttgcacctagtaaaca

SEQ ID NO: 923675 - DNA, 120 bp, Artificial Sequence
  ENSG00000251632_16 (sequence is synthesized)
gtacagcacaacccctaagtgcaggggatctggaggcaaaacatgagggtcaaagcctcactgtaccactttccagctgtgtaatcttgggaaagattcttcatctgtaaaatgatgctt

SEQ ID NO: 923676 - DNA, 120 bp, Artificial Sequence
  ENSG00000251632_17 (sequence is synthesized)
aaaagctatacctgacttttaggattgttgtaaacattaaatttgtaaatgagaatgatcttataactgtacatgttaaccattgtttaaacctatatgaataaaattctagatgagtca

SEQ ID NO: 923677 - DNA, 120 bp, Artificial Sequence
  ENSG00000260209_0 (sequence is synthesized)
ggggtcagtccagaagccttcagataacaccagggtgtagtcctggcgagaaatcttcagttgcttcaggaccttttctagccccacgcgacggctaggtcctccgtgagagaaaactgg

SEQ ID NO: 923678 - DNA, 120 bp, Artificial Sequence
  ENSG00000260209_1 (sequence is synthesized)
ttcgagaagcatggccaacattcccaatgatccgcagatgtggtttccacctggccggtgccatgacacccacacacatggcgacaaggagaagggagaagaaaacctatttgttgtata

SEQ ID NO: 923679 - DNA, 120 bp, Artificial Sequence
  ENSG00000260209_2 (sequence is synthesized)
tacctggcttttggcacagctgccgggattcacctgtgcaagtttccagcttgcttatctatgcttgcagcttgatttttcaggctactttctgttagaaaagaaatgatttgggggctg

SEQ ID NO: 923680 - DNA, 120 bp, Artificial Sequence
  ENSG00000260209_3 (sequence is synthesized)
tctgcctaaataatttcttaacgcctatattattccctttaaataaatttttttgtggtgtttgtcttattgttattaggttatgagaattcattatacattcaagaaatatataattca

SEQ ID NO: 923681 - DNA, 120 bp, Artificial Sequence
  ENSG00000260209_4 (sequence is synthesized)
aatatataatttattacatagtcaggaaatatattcagtcctttttgggaaatattttctctcagtctatagtttgtcctttcttatacttaacagtatgttttttagagcagaaggttt

SEQ ID NO: 923682 - DNA, 120 bp, Artificial Sequence
  ENSG00000260209_5 (sequence is synthesized)
tactttaaaaaattattaatattattttgactgatatctttgactagaacattactggtgtatagaaatggcactgatatctgtacattaattttgtatctttaaactttaactgaattc

SEQ ID NO: 923683 - DNA, 120 bp, Artificial Sequence
  ENSG00000260209_6 (sequence is synthesized)
gtaaaaattctcaaacactgcatacacagagaggataggagacatggcctttgcggataggaaatgaggaaattttgcgataggacagctgtagatcctgttgcggacacccagccgggc

SEQ ID NO: 923684 - DNA, 120 bp, Artificial Sequence
  ENSG00000260209_7 (sequence is synthesized)
agcatttaggtggctataggatgcccattgtttgaacttaagatggaggccgagagcctccaaatgaaaggacagagttgaaagttaagttctgcgcctgtactcacccctctgatgaat

SEQ ID NO: 923685 - DNA, 120 bp, Artificial Sequence
  ENSG00000260209_8 (sequence is synthesized)
ataccttctgttctgattctgatcctgggcgagtccccacaatgaagtggtgttgtctgtctggggaaataactgaggttcgttgtctcgcgctaaggagaacaaagatgtgggcacaca

SEQ ID NO: 923686 - DNA, 120 bp, Artificial Sequence
  ENSG00000260209_9 (sequence is synthesized)
gggaatgggtttaagagcagaaagtttaataggtgaaagaaacaagaggaaagctcccctgtgcagagggagggggttccgaagggatctcccgggttgcggtgggaagcggctggtttt

SEQ ID NO: 923687 - DNA, 120 bp, Artificial Sequence
  ENSG00000260209_10 (sequence is synthesized)
atagagggcttgaggaggcagtatctgatttacatagggcctagggatttagttggaccaagtgtgccatttacatagtccacaaagaggctggccatcccaccctaatctttcttttat

SEQ ID NO: 923688 - DNA, 90 bp, Artificial Sequence
  ENSG00000254528_0 (sequence is synthesized)
aagttctaatctacatcttgcggtaggagggccacagcacctggggtcccagaaggcagactgacctattcctacagcagggagacaagg

SEQ ID NO: 923689 - DNA, 71 bp, Artificial Sequence
  ENSG00000254528_1 (sequence is synthesized)
aaaaacagagaggtaggagggccacagcacctggggtcccagaaggcagactgacctattcctacagcagg

SEQ ID NO: 923690 - DNA, 90 bp, Artificial Sequence
  ENSG00000254528_2 (sequence is synthesized)
gttcaagcaatcctcctgcctcagcctgccgagtagctgtgacaacaggtgcgagccaccatgcccagctaagatttcaccatgttgccc

SEQ ID NO: 923691 - DNA, 120 bp, Artificial Sequence
  ENSG00000254528_3 (sequence is synthesized)
gctcccaagttgctggaattacaggctgcctcctctgagccttcccagattctcagtctgtgatgaaatagacagaacaccaagctaccaggaagggcacctgcctcctagatcggaatc

SEQ ID NO: 923692 - DNA, 120 bp, Artificial Sequence
  ENSG00000254528_4 (sequence is synthesized)
ttcgtccattcgcacttaggtgatcacttgccttcgagagccccatccagaagacgggagtaatgagccctgctctgcccatcacgggccgctatgaggatgcaaaagcacttaggaaag

SEQ ID NO: 923693 - DNA, 120 bp, Artificial Sequence
  ENSG00000254528_5 (sequence is synthesized)
aatttaaatgctacacaggcacacgatattgttacgcacagtcaaagctggtgcatcgggcacttcatcatccagaaacctcttttaccttacaatgtgagataaacttatatacctttc

SEQ ID NO: 923694 - DNA, 120 bp, Artificial Sequence
  ENSG00000254528_6 (sequence is synthesized)
gagcagccaggaacaaggtggggtgaaccagacagagctggagtgctctcccacccctgctttgcccagcctccccgccaagcccatgattccaagcaagagacaaggtctcattctgtt

SEQ ID NO: 923695 - DNA, 120 bp, Artificial Sequence
  ENSG00000254528_7 (sequence is synthesized)
ccatcccggtgtgctggccccaacggaacaggagtccttcaactattgcctgccagagacccaattgcagggactgtagtctgcatctggatgagctgggctgtagattgaagtctcaga

SEQ ID NO: 923696 - DNA, 120 bp, Artificial Sequence
  ENSG00000254528_8 (sequence is synthesized)
agcagggaaggttggaaggggtagggtcccagagcccatggagttattgctgagaagatatgcaggggacacattccccaggggcagagtagaagccctgggcctggaatccccgggcgc

SEQ ID NO: 923697 - DNA, 120 bp, Artificial Sequence
  ENSG00000254528_9 (sequence is synthesized)
tctgtgaaggggcggggcagatggggactcctcgtggaagcccctgggaagaaattaaccacggaagggcatagcctgcctgacgtcaacgctgggctcaccagctccttgctttgtatc

SEQ ID NO: 923698 - DNA, 120 bp, Artificial Sequence
  ENSG00000254528_10 (sequence is synthesized)
tccagttgctaagagaccttcagactgggatcaggtgggataaggaagcaaggtttttgttaaaggagtgaaaggagtccatgaagaatgatgacaaagtgctgcaaaccttcccaggtc

SEQ ID NO: 923699 - DNA, 120 bp, Artificial Sequence
  ENSG00000254528_11 (sequence is synthesized)
ggagcctgctgagtctccaacccacctcgctcaccgctctgaccactgacaggcagagcaaaggatgcgggagttgcctctgctgcccatctaaggggacgtaggcagagaagcaaaggc

SEQ ID NO: 923700 - DNA, 120 bp, Artificial Sequence
  ENSG00000254526_0 (sequence is synthesized)
ggagaagaaggagaatggtatggtttggctttgtgtctccacccatatctcgcctgcaattgttgtcttcataaatccccacgtgtcaagggtgggaccaggtggagtgaggaagatgcc

SEQ ID NO: 923701 - DNA, 120 bp, Artificial Sequence
  ENSG00000254526_1 (sequence is synthesized)
tgcttctcctctgccttctgccaagatggcaagtttcctgaggcctccccagcaagatggatctgcacttcatcaccaaagcaacaagatgtggagcatgagcagttcaacctttgaaga

SEQ ID NO: 923702 - DNA, 120 bp, Artificial Sequence
  ENSG00000254526_2 (sequence is synthesized)
atttggccagcctctccgtctgagggtctgagatcataagaaggttttatattgggctgtgcacttcaacctacaggccagtagatgaagcttgtgagtaagagctagctgtgacactag

SEQ ID NO: 923703 - DNA, 120 bp, Artificial Sequence
  ENSG00000254526_3 (sequence is synthesized)
cagatgggtttggataaatggtaccaaagcaatcctttgggcaagcaaaatgaacttctcaattgttacatattattcattagactgtttctatttaaataaaatatcgcttgaaagcaa

SEQ ID NO: 923704 - DNA, 120 bp, Artificial Sequence
  ENSG00000260205_0 (sequence is synthesized)
aaatccacccccatgatccaatcacctcctaccagtccctgcctcaacagttgggattacaattcaaggtgagatttaggtggacacagccaaaccatgtaactgcatagcaaaatctct

SEQ ID NO: 923705 - DNA, 120 bp, Artificial Sequence
  ENSG00000260205_1 (sequence is synthesized)
atgtaactgcatagcaaaatctctgtcgtttaaatataaatcttaatgactttgctgttttttaaaaaattaaagtatacaaagcaaatgtgtaacaaaaaagaaaaaaacaacaacaat

SEQ ID NO: 923706 - DNA, 120 bp, Artificial Sequence
  ENSG00000260205_2 (sequence is synthesized)
gacctaaaaagacaggaagaaataatacatataaaaggaaaaataataagaaaagaaaccactcctaggagacttgtgccatggatactatggcccctcacccagtcccccttcaggttc

SEQ ID NO: 923707 - DNA, 120 bp, Artificial Sequence
  ENSG00000260205_3 (sequence is synthesized)
aaggctgttgctgggagtaattattggctgttgatggctcacagctgaatccattttctggaattgaccttggttaaaggaagttgcctcaatacatttatgtctcttcttcaagggtag

SEQ ID NO: 923708 - DNA, 120 bp, Artificial Sequence
  ENSG00000260205_4 (sequence is synthesized)
cccacaatccaatgactgaattcaatgcagcgattcaaagacccagccctggtgccttggattggtacatctctgaatgctctttcagcctcaatgctccccctggagccagctgaggct

SEQ ID NO: 923709 - DNA, 120 bp, Artificial Sequence
  ENSG00000260205_5 (sequence is synthesized)
actgatgcagctgcatttcagtttggctttttcctctgctcagtactattttctccctggcttcctcaaaggagttgtttctgagagcactcttcaataaactgtacatgcaaatctcag

SEQ ID NO: 923710 - DNA, 120 bp, Artificial Sequence
  ENSG00000260205_6 (sequence is synthesized)
agtctccgggcatctgacctgcagcagctagtgctggaagtgatcctaggaaagtggctttaaaatgagaccgcaggcacagccagatcacccactggcaggcaggtactgaagacccat

SEQ ID NO: 923711 - DNA, 120 bp, Artificial Sequence
  ENSG00000260205_7 (sequence is synthesized)
cactggggatagatggagcatggatacctctggcatgagacagtggtgcaagtattaaaacattcccggtgtgagctggcgttggataccagtaaaagggaatgcactggcaggtgcagt

SEQ ID NO: 923712 - DNA, 120 bp, Artificial Sequence
  ENSG00000260205_8 (sequence is synthesized)
atcaggattttgagagctagagaaagtggtaattacaaggattagggaattggctgctgctgacaacagtggatgccctagaggaagacaacaaaaggctgaggttaattaatcaccaat

SEQ ID NO: 923713 - DNA, 120 bp, Artificial Sequence
  ENSG00000260205_9 (sequence is synthesized)
taaaggcaagcagcaaagtcagacagcctcttccacaccatataaagagattctcatcttctatgagccaacaccaaaagaggctaagaatcaagcccgagcctcaacaataagagtaac

SEQ ID NO: 923714 - DNA, 120 bp, Artificial Sequence
  ENSG00000260205_10 (sequence is synthesized)
agagcttcggaagaggttgaatgaggagagggccttgttgggaagaagttgaccttaaggcatggcatggtggcatcctgaattcccacattctcccagactctgggcctatagaagtgg

SEQ ID NO: 923715 - DNA, 120 bp, Artificial Sequence
  ENSG00000260205_11 (sequence is synthesized)
cccacttcatcctgttaaagaccagcactgctcgctcacttgaagatgatgcagtcatctgccttgcaaggccacaggcattcctttcagatccacttctacctcctgtttgagccatca

SEQ ID NO: 923716 - DNA, 120 bp, Artificial Sequence
  ENSG00000260205_12 (sequence is synthesized)
ataccatcacaaaccaagacaggatatttggtgttggatcaaagtgagtagaagataaggctggataaaggagggtcaatcaagacagagcattgtcctgtgaaacaggatttaaccctg

SEQ ID NO: 923717 - DNA, 120 bp, Artificial Sequence
  ENSG00000260205_13 (sequence is synthesized)
acaagcaacctaggagttggtgacaacacactacaagatcttagaagcttgtagaaaacatggccacattatgtgagagaaagtgctggaacttccatggcagacaggaaaataaaggat

SEQ ID NO: 923718 - DNA, 120 bp, Artificial Sequence
  ENSG00000260205_14 (sequence is synthesized)
caaaaggttaggaaaatgttctagagtgaatataccctgttgagtgccagaaaacccactcaccaatgacagactgtgggaggggccagaggacactgtttaataaagcaataaagtcat

SEQ ID NO: 923719 - DNA, 120 bp, Artificial Sequence
  ENSG00000260205_15 (sequence is synthesized)
cgggatgaggggcaccagcatctctgtgaaggtcagtgtggctgtcccctgtggccttgggctgatattggtgatactagtacagaactgggctccctgataacaatggggatgatagtg

SEQ ID NO: 923720 - DNA, 120 bp, Artificial Sequence
  ENSG00000260205_16 (sequence is synthesized)
tcctgcagtgataagggcagattgtgggctattattctaatggctggcaagtttggattgaaagagggagaggtgtctgactcacagagatgtgaagctggttaatggaacatagcatct

SEQ ID NO: 923721 - DNA, 120 bp, Artificial Sequence
  ENSG00000260205_17 (sequence is synthesized)
atggaacatagcatctgtagggacatcttggatgagcagccaataagcatattactcaaattatacaatcaggataaatcgaggccaagaggggtggctcgcacctgtaatcccaacact

SEQ ID NO: 923722 - DNA, 120 bp, Artificial Sequence
  ENSG00000260205_18 (sequence is synthesized)
ggaggattgtttcaagatcagcccaggaaatgtagtaagaccccccgcatccctatagaaaatttaaaaattatccaggcatggtggcatgcatctgtactccaagctacttgggaggct

SEQ ID NO: 923723 - DNA, 120 bp, Artificial Sequence
  ENSG00000260205_19 (sequence is synthesized)
tcacttgagcccaggagtttgagactgccacgagccatgacgatgcacgccactgaacttcagcctggcaaagaaaagaaaagaaaagaaatcaaccacggatcttcaggagattgagac

SEQ ID NO: 923724 - DNA, 120 bp, Artificial Sequence
  ENSG00000260205_20 (sequence is synthesized)
ggagattgagaccaatcaacccaataaaaatgaccatattctgcctcatttctggatccgagccactactccggctaggaactcgttaactgaaggatagaccaggtcccaggaagaatt

SEQ ID NO: 923725 - DNA, 120 bp, Artificial Sequence
  ENSG00000260205_21 (sequence is synthesized)
ctatcacccacagcaagtacatatgatagattcccccagtcctttttccaaagggacatatagccatttgtgtgggtgaactgggggaataggaattcctgacttttcaagggtttgaat

SEQ ID NO: 923726 - DNA, 120 bp, Artificial Sequence
  ENSG00000260205_22 (sequence is synthesized)
tcacattgatactaaaggatccaaagcgtcatcacatccccatttgccatagttagagtgggcacattccacaagccaggtaataaatgcagtcctgggttcaacaccagcttgggcaac

SEQ ID NO: 923727 - DNA, 120 bp, Artificial Sequence
  ENSG00000260205_23 (sequence is synthesized)
gtagggagtcctcgactctacaaaaaatttaaaaaatagctgggcatggtggcacacacctgtggtctcagctacttaggaggctgaggtgggaagatcgcttgacctcaggaggttaag

SEQ ID NO: 923728 - DNA, 120 bp, Artificial Sequence
  ENSG00000260205_24 (sequence is synthesized)
gctgcagtgaattatgatcgtgccactgctctccagcctgggcgacaaagcaagacccgatctcaaaccaaataataaaaaatttgaaaaattttaaaaaccaagacatatgataaaaaa

SEQ ID NO: 923729 - DNA, 120 bp, Artificial Sequence
  ENSG00000260206_0 (sequence is synthesized)
actcctgggctcaagcaatccacctgcatcggcctcccaaagtgctaggattacaagagtgagccaccacgcccagccttcaaaacattatcatcacccaaaacagaaactctgtaccat

SEQ ID NO: 923730 - DNA, 120 bp, Artificial Sequence
  ENSG00000260206_1 (sequence is synthesized)
aaacagaaactctgtaccattaaacagtaattccacacccccctccaatattaccacatttttatgatgaggaaaacggaggcacagagaggctcggtaaaacaatcaatgttacacagc

SEQ ID NO: 923731 - DNA, 120 bp, Artificial Sequence
  ENSG00000260206_2 (sequence is synthesized)
ctaggctggagtgcaagactccgtctctagagaaaaaaagaaaaccagacagattaaaaagttgcacttacaaagcagttggggcatttattgacatttaaacaagggaggagatcctga

SEQ ID NO: 923732 - DNA, 120 bp, Artificial Sequence
  ENSG00000260206_3 (sequence is synthesized)
tattgacatttaaacaagggaggagatcctgaacactagtctcgctcagtttataaaaacttgaggccaaactctccatcatctgtacacagcttaaccacggccaggagcaagaattcg

SEQ ID NO: 923733 - DNA, 120 bp, Artificial Sequence
  ENSG00000260201_0 (sequence is synthesized)
atttggctaagctcctgcagctgttgggggctgcatctgacaagtggccgtggtttcaagtctctggagtcccatttttttctcttccatggagtttgtttgctgcagtttgaggagccg

SEQ ID NO: 923734 - DNA, 120 bp, Artificial Sequence
  ENSG00000260201_1 (sequence is synthesized)
caattcccatcataaatcccctctcctatgtctatatatgtcctattgcttctccttctctggagaatgctgactaatacagacataatacagcagtctttggggttgatgtatgagtat

SEQ ID NO: 923735 - DNA, 120 bp, Artificial Sequence
  ENSG00000260201_2 (sequence is synthesized)
gtggaggaagaactagacatgaagcagagtatgctttctttaacataactttttcattaaaatagttatatgtgcttagtacaaaaacttggaaaatacagaaatgtagtgaaaaaggaa

SEQ ID NO: 923736 - DNA, 120 bp, Artificial Sequence
  ENSG00000260201_3 (sequence is synthesized)
ccgtggtttcaagtctctggagtcccatttttttctcttccatggagtttgtttgctgcagtttgaggagccgaggcatatgataaataccaggtgtccttagaagaagaggagattggg

SEQ ID NO: 923737 - DNA, 120 bp, Artificial Sequence
  ENSG00000260201_4 (sequence is synthesized)
accaaccttgccaatccctgatcctagacctccagcctccacaacggcctttggactcagatggaattataccacggggtttcctggatctccagcatgcagatggtagattgtggaact

SEQ ID NO: 923738 - DNA, 120 bp, Artificial Sequence
  ENSG00000260202_0 (sequence is synthesized)
gacactggccctcagaaggccatgggctcaccaagggctgccagttcgcagaagtccctcacctttgttccacacctgctgactttctaaactgctgtcctctggactgtgctaggtaca

SEQ ID NO: 923739 - DNA, 120 bp, Artificial Sequence
  ENSG00000260202_1 (sequence is synthesized)
catgacagcaccttggcagccatgtctttcagagccccgttatgcaatgccatggccctagaagcagaaggaaccatcaaagaaccaggctaaaggactttgggaccaacaggcattcag

SEQ ID NO: 923740 - DNA, 120 bp, Artificial Sequence
  ENSG00000260202_2 (sequence is synthesized)
ctggcaatggccatgccagcctaagctacctctgtggagtgaacaatgtagcccagaagagccagcacagatccctcccacctatcagccctgtcttcccccatcttgatgcatgtccca

SEQ ID NO: 923741 - DNA, 120 bp, Artificial Sequence
  ENSG00000260202_3 (sequence is synthesized)
ggccacttaatgactgacccaaatccagagaggtttctccaggaaacaagatggactcctggattctggctgatcttggatattgacacattattcaaagctctactggtttgaggtcat

SEQ ID NO: 923742 - DNA, 120 bp, Artificial Sequence
  ENSG00000260202_4 (sequence is synthesized)
gacacctgtctgctcaagccaggttccatggaggagcagaacttcatcctgctctgcatttagggcctgcctcggagacagtaggggagctcccaagaactcacaagtttggaaattaat

SEQ ID NO: 923743 - DNA, 120 bp, Artificial Sequence
  ENSG00000260202_5 (sequence is synthesized)
atttctctttgcaagataaaatacagatcagcccaaagtacatcagacctgaggtccaattccaaacagaaagtcggccctgataatccctgggttaaaggcccaagtgtttgaaactga

SEQ ID NO: 923744 - DNA, 120 bp, Artificial Sequence
  ENSG00000260202_6 (sequence is synthesized)
attgcacgctcgactagggagccctttctaagctggtacaacacacagaggccaacagtaaagaataataaatctggctatacattttgtatagtgtgcacatgtgcacaaacacacaca

SEQ ID NO: 923745 - DNA, 120 bp, Artificial Sequence
  ENSG00000260202_7 (sequence is synthesized)
ccggacacacacaccacaaagaccaaagaggaaagggaacacacaataagtcatttagaacatatttggtaaagggctaaattcccttttatggaaacagctctttaaaagccaacagaa

SEQ ID NO: 923746 - DNA, 120 bp, Artificial Sequence
  ENSG00000260202_8 (sequence is synthesized)
aaacagttggcctgtggcgatgcctcactccaactgccacactgatccacacatcttgtgtccaaagcagaacacaagtgtccatgggaggttgcacaacacagagccaagagatgcctg

SEQ ID NO: 923747 - DNA, 120 bp, Artificial Sequence
  ENSG00000260202_9 (sequence is synthesized)
tgtcctccactgagcattccacaggggaaggggcctggtaaaaggaaaaggatggaggcagtgtttgttgagcgctgtggtgggtgtgaacccacaagcccgcaggggaaccagaactct

SEQ ID NO: 923748 - DNA, 120 bp, Artificial Sequence
  ENSG00000260202_10 (sequence is synthesized)
catgggctccttcagggctggggtggggcctcttagaggtcccagggcctgtgcacgggcccccatggcatagggacaggaggcagccctcctctcctcttggcatagttcctccccccg

SEQ ID NO: 923749 - DNA, 120 bp, Artificial Sequence
  ENSG00000260202_11 (sequence is synthesized)
tcaatgttcacatcaccaaacacattctgtctaaggtggggtcatcaggaccacaggcactggttgctctgggaactactgcctcatagcattttattttgctcatgactcaagataatc

SEQ ID NO: 923750 - DNA, 120 bp, Artificial Sequence
  ENSG00000260202_12 (sequence is synthesized)
aggattttaggaaagacccagctaggaaggtcccaggaggtgcaggccgggagtggctgggaccaccatcatctacaccatgactgggctccctgataatgaggagggggttttataatg

SEQ ID NO: 923751 - DNA, 120 bp, Artificial Sequence
  ENSG00000260202_13 (sequence is synthesized)
gatttattcagaggtaattcacacactgtaggattcacccatttaagcatacaagtcaatgactttagtatattcatagaattttatatccaaaccacaatcaattttacaacatttttg

SEQ ID NO: 923752 - DNA, 120 bp, Artificial Sequence
  ENSG00000260202_14 (sequence is synthesized)
ttaccctaaaaagaaacctcaaactttttagcctttatatgccaatttctccatcccctttcagccctagggaggagccactaacgtgctttctccacagatgtccctcttctgggcatt

SEQ ID NO: 923753 - DNA, 120 bp, Artificial Sequence
  ENSG00000260202_15 (sequence is synthesized)
gcacgtaaacggaatcgctgtgtgtgatctcctgtgtctggttcctctcacttagcatgttcccaaggttcctcctgtctgtagcctgtatcactacttcatttatttttattacaaata

SEQ ID NO: 923754 - DNA, 120 bp, Artificial Sequence
  ENSG00000260202_16 (sequence is synthesized)
ataacctgttgtatgcatataccatattttatttatccactcattaattaatgagaagtagggttattttggctactgttttggctttttggctgtttttaataaatactgttacgatca

SEQ ID NO: 923755 - DNA, 120 bp, Artificial Sequence
  ENSG00000259129_0 (sequence is synthesized)
gtgttaccgtgagaaaatatcttgaacttctactctgttgtcccagagtcgatgtattctacctttgtcgaccagaacttctccatcatacagtccaaacttgtgggtctggaaagcaca

SEQ ID NO: 923756 - DNA, 120 bp, Artificial Sequence
  ENSG00000259129_1 (sequence is synthesized)
tatttatattttaagtccctgattttagactcatgtattttacctactcggaaaaaatcatattatggttgttgatttagaatacacatcctaaaaagtgacatcccatctttgtatggt

SEQ ID NO: 923757 - DNA, 120 bp, Artificial Sequence
  ENSG00000259129_2 (sequence is synthesized)
tttatgattacttaaagccattctttataaattttgcacctctgctggtcaggtggcctaactttggaagactcagaccttcatctgtgacagttctatagtcacagtcgctatgccttc

SEQ ID NO: 923758 - DNA, 120 bp, Artificial Sequence
  ENSG00000259129_3 (sequence is synthesized)
tcaggtcctggctgctgtattattacattgattctcaaagttgtacaagagaatatcaaaagacaccaaagtggattaagattagttactgttaaaaatattcctcctgctttacgttct

SEQ ID NO: 923759 - DNA, 120 bp, Artificial Sequence
  ENSG00000259129_4 (sequence is synthesized)
gtgttaccgtgagaaaatatcttgaacttctactctgtacttcaccatacaagaattgagcctggtgttttctttaaattattttatgattacttaaagccattctttataaattttgtg

SEQ ID NO: 923760 - DNA, 120 bp, Artificial Sequence
  ENSG00000259129_5 (sequence is synthesized)
ctctgcagtagatcttgggctgtaactgatattcaacattaccatccttgttgtaaactgaatgtcatatccctcaaaattcatatgttgaacccctaacttcccctgtgatggcattta

SEQ ID NO: 923761 - DNA, 65 bp, Artificial Sequence
  ENSG00000259129_6 (sequence is synthesized)
taccgtgagaaaatatcttgaacttctactctgttggagacttattaaatgaagaaaccacacag

SEQ ID NO: 923762 - DNA, 120 bp, Artificial Sequence
  ENSG00000259129_7 (sequence is synthesized)
tccttataagaagtgaaagaccaaagctctcactctctccccaccatgggaggacacagcaagaaggcagctatctgataaccaggaagagggccctcactaggaactgactgccagcac

SEQ ID NO: 923763 - DNA, 120 bp, Artificial Sequence
  ENSG00000259129_8 (sequence is synthesized)
ctcaaccttgatctttccatcctccagaactgtgagaaataaagttttgttgtctaacccacccacagtattttttacagaggcctgagctaagatacttcttagttacgcattttcacc

SEQ ID NO: 923764 - DNA, 120 bp, Artificial Sequence
  ENSG00000259129_9 (sequence is synthesized)
tccgaagttcagatcaattatccctatcaggatagtgacttctcttcaagtcacttgggaaaagtcccctgaagtacactggaagaagccataacttaagttcattgaaatttttgcagt

SEQ ID NO: 923765 - DNA, 120 bp, Artificial Sequence
  ENSG00000259129_10 (sequence is synthesized)
gagacagggaacccatgctactgaatttatgcatagtcttccttacatcaccatggttaccatgtctacatgcacctcatgctcacacttgggttgcgtgatggttaatattgagtgtca

SEQ ID NO: 923766 - DNA, 73 bp, Artificial Sequence
  ENSG00000259129_11 (sequence is synthesized)
tcctgtggactgagaaagccagatccacaatcaatccgggtggggacaatctaatcagctgccagcatggcca

SEQ ID NO: 923767 - DNA, 120 bp, Artificial Sequence
  ENSG00000259129_12 (sequence is synthesized)
gctgccagcatggccagaataaaagcagacagaaacacgtggaaagaccagactggctaagccttctggcctccatctttcttccatgctggatgctttctgcccttgaacatcagactc

SEQ ID NO: 923768 - DNA, 120 bp, Artificial Sequence
  ENSG00000259129_13 (sequence is synthesized)
tcagactccaagttcttcagcttttggattcttggactcacaccagtgatttgccaggggctcttgggccttccaccacagactgaaggctgcactatcagcttccctacttttgaggtt

SEQ ID NO: 923769 - DNA, 120 bp, Artificial Sequence
  ENSG00000259129_14 (sequence is synthesized)
ggttttgggactcggactggcttcctggctcctcagcttgaagacaaccaatggtgggacttcaccttgtgatcctgtgagtcatttctcctaataaattccccttcatatagacactat

SEQ ID NO: 923770 - DNA, 120 bp, Artificial Sequence
  ENSG00000259129_15 (sequence is synthesized)
ctatcctattagttctgtccatctagagaaccccgacaaacatgggttgctatcaactggacaaatcattgccaactaagttttttagtgcttcagcacttctaccatagttagtgtgca

SEQ ID NO: 923771 - DNA, 120 bp, Artificial Sequence
  ENSG00000259129_16 (sequence is synthesized)
ctaatgaatgcaaacatttgtattacctaatacatggtctggtacagcatcctcagatgtgaactatgctgcctcctgtatccaaaaaggactaccaaatgttgtacttccatcttattg

SEQ ID NO: 923772 - DNA, 120 bp, Artificial Sequence
  ENSG00000259129_17 (sequence is synthesized)
cagtgcagtaagaaatattttgtcctttattttgtagatgtcccatcatgccctcaaccacaaaacacctaaattttacggttataatcgctgtcagtggttgtacgttgatattctatt

SEQ ID NO: 923773 - DNA, 120 bp, Artificial Sequence
  ENSG00000259129_18 (sequence is synthesized)
gttccagcaccattcttttcctattaaattacactggcaaatttgattaaaaaaaacaactgactatatatgcttgtaaacatttccagattatgttattcttttaatctaaatatgtgt

SEQ ID NO: 923774 - DNA, 120 bp, Artificial Sequence
  ENSG00000259129_19 (sequence is synthesized)
ccttatgccaataccccactccatctattactgcagtgtatgataagtcttgaaatctagtagtgtaagttcttcaacgttgcccttaatttttaaaatcactcttgctatttaaaattg

SEQ ID NO: 923775 - DNA, 120 bp, Artificial Sequence
  ENSG00000259129_20 (sequence is synthesized)
tttgtattacatggaaattttataatcagcttgccaatttctacaaaagtcctgctgagattttaattggtattttgcttgttctgcagcttaatgcaagaaaattatcttaacaatatt

SEQ ID NO: 923776 - DNA, 120 bp, Artificial Sequence
  ENSG00000259129_21 (sequence is synthesized)
gaatttttcaatctattaacatgttatatattactgtttacttaggattttttcacttttcctgccttgttttgaactgatattgtggttttaagtaattttttttatttctactattgg

SEQ ID NO: 923777 - DNA, 120 bp, Artificial Sequence
  ENSG00000259129_22 (sequence is synthesized)
cttagtaactatgccccactttttgattttgtagcacagttgaccattgaacaacacaagtttgaattgtgcatgtccaattgtctatggatatttttcaataaaagttacactgagtgc

SEQ ID NO: 923778 - DNA, 120 bp, Artificial Sequence
  ENSG00000259125_0 (sequence is synthesized)
gtgcacccctgctgcatgaggctcagccccaggggtccaacagaggtcacagtcacagcacagaatggaaggcttgcagggagggctgccctggagggcagagtgaaagcaggggaaagc

SEQ ID NO: 923779 - DNA, 120 bp, Artificial Sequence
  ENSG00000259125_1 (sequence is synthesized)
tgcagcctttcttcttcgtcctccttggggagctaattacaggccagcagccactgtgcaggagcggttatccggctgcaggaggtatccttcaacacagccacatatgaaggagccgtc

SEQ ID NO: 923780 - DNA, 120 bp, Artificial Sequence
  ENSG00000259125_2 (sequence is synthesized)
atcaaaatctgccgaggaaagggcaagaatgtggtcatttccagtgtgacaagggcaacgaagtgggtgatcatcagacatgatcaacatgtccatccttacagctaccttgaaggacag

SEQ ID NO: 923781 - DNA, 120 bp, Artificial Sequence
  ENSG00000259125_3 (sequence is synthesized)
ttcggcagaatctattacagcatgaaatgtgcaaaccttaacacccagcaagtccagtcttggaatccactctagagaaacactcgtgtacatatcactcatccacgcagggaagattta

SEQ ID NO: 923782 - DNA, 120 bp, Artificial Sequence
  ENSG00000259125_4 (sequence is synthesized)
ttgagtccctactatgggtcaggtgccaggggtgcatcagtgaactttaaaatagacccacattgctgtcctcatgaaacttatattcagataataaatgaaatatagttactataataa

SEQ ID NO: 923783 - DNA, 120 bp, Artificial Sequence
  ENSG00000259125_5 (sequence is synthesized)
ctggagggcagagtgaaagcaggggaaagctgcagcctttcttcttcgtcctccttggggagctaattacaggccagcagccactgtgcaggtgagctgtggacagcagcagcccaagga

SEQ ID NO: 923784 - DNA, 120 bp, Artificial Sequence
  ENSG00000259125_6 (sequence is synthesized)
cccctgctcgccaccatcccggggaggggcctttctctctcccagaatgaatcccttgtaacctcctgggatctttcttttcatcacaagaaccaaataaagaaacttgaagatcttcta

SEQ ID NO: 923785 - DNA, 120 bp, Artificial Sequence
  ENSG00000259124_0 (sequence is synthesized)
gaaacagcagcagctggaagtcaagaggagtgctctgtggaggaacacacccacaggcaccagcatgccggcaggccactgactggcaaaacaacgcggtgtttggctggggcagtcgga

SEQ ID NO: 923786 - DNA, 120 bp, Artificial Sequence
  ENSG00000259124_1 (sequence is synthesized)
ccatctcccttctggctcccccatctgctaagagccatgtaagatatgcctgcttcccctttgccttctgccgtgattgaaagcttcctgaggcctccccagaaggcaagcagatgccaa

SEQ ID NO: 923787 - DNA, 120 bp, Artificial Sequence
  ENSG00000259124_2 (sequence is synthesized)
atgcttcctgtacagcctgtggaactgccctcccctctgcttctcactggtcctgagtgtgtcctggaataacatgtgggctgtgctatccggtgttgtgtgtgtcacagatgcaattca

SEQ ID NO: 923788 - DNA, 120 bp, Artificial Sequence
  ENSG00000259124_3 (sequence is synthesized)
agatgcaattcaaaatcctaaggctggaaaaccattacttaaaaaaaaaaaaaaaaaaagactagccagcctgctttctgagcatctacttgatagcaagagggcctcatgctcaacccc

SEQ ID NO: 923789 - DNA, 120 bp, Artificial Sequence
  ENSG00000259124_4 (sequence is synthesized)
tccgtgctgggaaggaagcattcccctcatcaaggactgcggctctctggaataagcaacgtgtgttccctcttgggggtcagccaaggccctgaacatcacaaactcctcctccacctc

SEQ ID NO: 923790 - DNA, 120 bp, Artificial Sequence
  ENSG00000259126_0 (sequence is synthesized)
gaattatgagagtgatttatgaaagaaagacagtggagaattgcaatcgatggagacattcaaagaaaagactttggcactacatcaaaagagagtagaataaatgacgaaactaaagca

SEQ ID NO: 923791 - DNA, 120 bp, Artificial Sequence
  ENSG00000259126_1 (sequence is synthesized)
aaggtcatgcagctggaaagaagtggatttgggattgtgaacatcacaatttcacaaactacatttcatgatgggtagagctagtcaaacgtctgaaaataaagtttggtttaaagatga

SEQ ID NO: 923792 - DNA, 120 bp, Artificial Sequence
  ENSG00000259126_2 (sequence is synthesized)
aagatgaattatgagagtgatttatgaaagaaagacagtggagaattgcaatcgatggagacattcaaagaaaagactttggcactacatcaaaagagaatgacgaaactaaagcacaaa

SEQ ID NO: 923793 - DNA, 120 bp, Artificial Sequence
  ENSG00000259123_0 (sequence is synthesized)
atgaatcattgcaggacagtatttcctggcatcgagctctgtgcaccagagaccacgctgcaagcagataggagctgactgaccttaagtgactctcaatctaataaagtcaaggccaga

SEQ ID NO: 923794 - DNA, 120 bp, Artificial Sequence
  ENSG00000259123_1 (sequence is synthesized)
ggctttggcagaatcgggtgctattagcccaaagaatgaagctcatgacttaagagtttccatcacgactcttgtcaggggaagcattctttcccaggcacacctctctttgtctctggg

SEQ ID NO: 923795 - DNA, 120 bp, Artificial Sequence
  ENSG00000259123_2 (sequence is synthesized)
tttcaggagcaaaagttctgcaagagtctctaaggtgagtcagtgcctgtgagccctggttgctcttccaatttaagacctcagggttgaaataaagccagactatggagcaaaccctaa

SEQ ID NO: 923796 - DNA, 120 bp, Artificial Sequence
  ENSG00000266696_0 (sequence is synthesized)
cgaattcttacatttggaagaagtttgcagtggagtaagacttctatctatagcattctgttgaagaaaatctctcacctgcagggactacactccacctggccatgtgtcactgtgtat

SEQ ID NO: 923797 - DNA, 120 bp, Artificial Sequence
  ENSG00000266696_1 (sequence is synthesized)
tccaagaaaagtctctgtcaacttacacaccagactgctttcctttcctagcaatcaagtattttcacttagatattatgtatagtctcaagttttatatgtttcatcatctgaaaaggt

SEQ ID NO: 923798 - DNA, 120 bp, Artificial Sequence
  ENSG00000266696_2 (sequence is synthesized)
ctattttaaattctaaatgtttgctaatttctggttaaggttgtcatggagttttctccttcttcatctaaatcatctggcagtgaagttattgccttaaatcaccatatctagctaaca

SEQ ID NO: 923799 - DNA, 120 bp, Artificial Sequence
  ENSG00000242781_0 (sequence is synthesized)
cacccagaactggccgctcagttttcaggttttaaactgccgttgacttgaaggttgagtttcactggggacctacctctatctgcctagtaatctgtgtctcctgtagctatcatcatc

SEQ ID NO: 923800 - DNA, 120 bp, Artificial Sequence
  ENSG00000242781_1 (sequence is synthesized)
actgattttctacgtacagatttcaattccaaacaaaaatatatgagaacgttcatttctccatacaactgcatcatggatggagatggagcccattatttgaagcaaactaacacagga

SEQ ID NO: 923801 - DNA, 120 bp, Artificial Sequence
  ENSG00000242781_2 (sequence is synthesized)
gtgagagtatggaggctgaagccatagaaaggagaaattattccagctgaggccaaaacatgaaccaaggctgggtcattggccttatcccgcaccgaagttgaaacttacaccatctgt

SEQ ID NO: 923802 - DNA, 120 bp, Artificial Sequence
  ENSG00000242781_3 (sequence is synthesized)
tcacatcatcagttcttctggttctcatgcttttgaacttcaactggcacaattccactggctctccttagtctccaggttgcagatggcagattataaatctccttagcctccaccttt

SEQ ID NO: 923803 - DNA, 120 bp, Artificial Sequence
  ENSG00000242781_4 (sequence is synthesized)
ataatcctaactattactgacacctctttgaggacaaaggaagtagctttctgcaagccaaaaagacctcagaaaaacaacaaatcttccaaactcttgattttgactttttgcctccag

SEQ ID NO: 923804 - DNA, 120 bp, Artificial Sequence
  ENSG00000242781_5 (sequence is synthesized)
gctcctctcaacgtgcgctcctcttaacgtgcgtctgcacagctgcttgtgtggcacagctgcttgtgtgttcttccgccaatgtgtgcaactgcttgtgtgttcttccgccaatgtgtt

SEQ ID NO: 923805 - DNA, 120 bp, Artificial Sequence
  ENSG00000242781_6 (sequence is synthesized)
cctctcgacgtccagccacttctgtgcctgcctgcctgtcttggggtttttacaggcacaggataggggacgtggcaggccaggtggtcttggaaaatgcaaacttgggcatgaaaacag

SEQ ID NO: 923806 - DNA, 120 bp, Artificial Sequence
  ENSG00000242781_7 (sequence is synthesized)
gagcgcttgtcctcccctatatgcgtgtgcacaggacctgaggtgaagccctagccagggacctgcccttctctacccagcgctttccttctctcatcccgagtcagtactgaagtcact

SEQ ID NO: 923807 - DNA, 120 bp, Artificial Sequence
  ENSG00000258658_0 (sequence is synthesized)
gctttactgggagccagtggtcgtttaggtctctgttccctcacctgcaaaattaagttgactctaaggtcaactttggtcacctcctagttcacattgtctaacagtagcccgtactcc

SEQ ID NO: 923808 - DNA, 120 bp, Artificial Sequence
  ENSG00000258658_1 (sequence is synthesized)
tccaaggtccaagggaggaattcagaagcaacactgtttaatctagaaaaatacgttaaattgctgggctgagactgacagtcaaaggtcccaaagcaaaaacaactgagagtcccatga

SEQ ID NO: 923809 - DNA, 120 bp, Artificial Sequence
  ENSG00000258658_2 (sequence is synthesized)
tactggcctagctgcttttctaatatttgccttactcagcggacacagcagaaagaaagaaggaattaaaaactgctggacttggagcacaatggtcaaggccacacatgacacgtcact

SEQ ID NO: 923810 - DNA, 120 bp, Artificial Sequence
  ENSG00000258655_0 (sequence is synthesized)
gtcctcgctcgcgtccccgctccctcctcccctctgcttctccctcccctccactcccccattggcttctacccctcccccttcttcctccgcctctcccaccattggttccctccccta

SEQ ID NO: 923811 - DNA, 120 bp, Artificial Sequence
  ENSG00000258655_1 (sequence is synthesized)
ctccattccttctcaccttttcccttttacccattggcgtgagtatttttcctcagcttccctctttctccgtattctgctcctcctcagtcccatcctccacgctttggaagctactgc

SEQ ID NO: 923812 - DNA, 120 bp, Artificial Sequence
  ENSG00000258655_2 (sequence is synthesized)
cttactgcccggagcgccgtcgtccccgaacctcccctgcttctccctttccttctgttccggtttctggtcgtaactcaagagcaaaccaccgtactgcaaaggaaccagatattgtgc

SEQ ID NO: 923813 - DNA, 120 bp, Artificial Sequence
  ENSG00000258655_3 (sequence is synthesized)
tcgcggttccaaaccgggcatgggcaccgaatgcttctcgataaatccccttatggtctctgagcattaaagaaagcaagggaggaaaacatgcgcccaagctcgttcgcaggaacatgt

SEQ ID NO: 923814 - DNA, 120 bp, Artificial Sequence
  ENSG00000258655_4 (sequence is synthesized)
tcgcgtgtctgcgcctgtgtgcgcagccagttttctggctgaggatcgctcgccaactacagacatcacccgcccaggacccggtgccacactcacccagaagacgaaactccacaggag

SEQ ID NO: 923815 - DNA, 120 bp, Artificial Sequence
  ENSG00000258655_5 (sequence is synthesized)
cgagaagaggagtccatttctccgtcggctcggcacggcacggggatgcaggcccctgattcagtacgttctgtgaaagtggagcgagaagccaagacgtggatcgagaagccccgtggg

SEQ ID NO: 923816 - DNA, 120 bp, Artificial Sequence
  ENSG00000258655_6 (sequence is synthesized)
gcgggtctcagggtggcccaaaagacccctgttcacgccactaccagcctaactttaggaactgtcgtccacctggcttttattatactgccttaaacatattcacttttttgagactct

SEQ ID NO: 923817 - DNA, 120 bp, Artificial Sequence
  ENSG00000258655_7 (sequence is synthesized)
ttctcatgagggcactgacgctgaatggtgcagtgagaaaggacggtagaaaccactgcctttgcttttaccattgaagaaactgaggtcctgtgactttcccgaggtcatcggaatctg

SEQ ID NO: 923818 - DNA, 120 bp, Artificial Sequence
  ENSG00000258655_8 (sequence is synthesized)
ccttgcacaggagacttaaaatagttgccagcagataaaagaatgagcaaaaccacatctactccaatttgttaagtctgaaagaaagtaattgaggggggattcctctttggggaaata

SEQ ID NO: 923819 - DNA, 120 bp, Artificial Sequence
  ENSG00000258655_9 (sequence is synthesized)
tttatttcctgcattgaaaatagtttaatgttagtaaacatataaaaagtattttaaattcaagttattctttatttcttatgttacataaggtactgaagttagccaaggttgcttttg

SEQ ID NO: 923820 - DNA, 120 bp, Artificial Sequence
  ENSG00000258655_10 (sequence is synthesized)
tgttataatgatgcagctgctgccaaccagaagtacatttacggtctgtcagtaaagaaaacaaaaactgcctgttggtaaaaatctattagaaaatatttgtcagtaaatttgtcacaa

SEQ ID NO: 923821 - DNA, 120 bp, Artificial Sequence
  ENSG00000258655_11 (sequence is synthesized)
tattccagcagaagttctgttcgtttttccgtcttcctgcccttcatatttctcaaaggtagacttaataaaggtagaagagacatttctaatttttctatatatctcttgctccctaat

SEQ ID NO: 923822 - DNA, 120 bp, Artificial Sequence
  ENSG00000258655_12 (sequence is synthesized)
ttctaaaaggcataactaaaatgctttattcgagccactcccttgcatctgaaccctacctaccaagtaggttaagagtaggttaggtaaggtctgtagctacttctttctttcagttac

SEQ ID NO: 923823 - DNA, 120 bp, Artificial Sequence
  ENSG00000258655_13 (sequence is synthesized)
aaattgtaggtgggaaagaaggatgcggaaggaaacttgcaaggaaagcaaacagaaagaaaaagaagtaaaaaaggagagaagggaatttggtgggtggtccaaccatcaaaatgtggt

SEQ ID NO: 923824 - DNA, 120 bp, Artificial Sequence
  ENSG00000258655_14 (sequence is synthesized)
actaatgccataggtatctacaccacttatgtaagttggaatgttgatgcattccaacgcatgtttttatctttgtactgaaagcccttaagaatacccgaagtaaacatataaaaagta

SEQ ID NO: 923825 - DNA, 120 bp, Artificial Sequence
  ENSG00000258657_0 (sequence is synthesized)
agttcttccccaggctgtggagtctgcacactggattcatgacctcccccaagttctggccaggaagcttcttgcccaattcaaattgttgcaaagttcagctggagatttccttcttcc

SEQ ID NO: 923826 - DNA, 120 bp, Artificial Sequence
  ENSG00000258657_1 (sequence is synthesized)
tgtggcattttcctgttgctcctctggccaccctcccaatggatccgtgtggtccctggcaggaatgtcttgcttggggaccgagtgagctcttagagcctttctgctgcttcctctacc

SEQ ID NO: 923827 - DNA, 120 bp, Artificial Sequence
  ENSG00000258657_2 (sequence is synthesized)
ccaggtctgctgcagtttgctggaggtccactccagactctatgtacctggatatcaccagcggaagctgcagaatagcaaagattgcttcctggtccttcctctggaagcttcatccca

SEQ ID NO: 923828 - DNA, 120 bp, Artificial Sequence
  ENSG00000258657_3 (sequence is synthesized)
gaggggcactggcctgatgtcagctggagctctcctgtatgagattttctgtaaatgctgcccacccccactgcctctgcctgatgacgtcctctgggtgcttgtgtgagaatcatgcag

SEQ ID NO: 923829 - DNA, 120 bp, Artificial Sequence
  ENSG00000258657_4 (sequence is synthesized)
tgaccacatcatcacccacagctgatgactcagagtggaccacctattcagcccagagcaggaacccaagcctatgaagtgaattgtaggatgtggtatcagccagtagaggtactggag

SEQ ID NO: 923830 - DNA, 120 bp, Artificial Sequence
  ENSG00000258657_5 (sequence is synthesized)
atctataccaggttgctacttcatgtttggacttggatgaaacagcatactataaggcatgaaacctggcttcctgagtgacagctgagaggagagatgtagctgaaccaatcagctaca

SEQ ID NO: 923831 - DNA, 120 bp, Artificial Sequence
  ENSG00000258657_6 (sequence is synthesized)
acgtcattccagtgtccatacttacatagtggaaaatcctctaaagcccacttctgagagaacactaatttctagatttcacatttcccgaatcccgtataagatcagttctttcttggt

SEQ ID NO: 923832 - DNA, 120 bp, Artificial Sequence
  ENSG00000258651_0 (sequence is synthesized)
cagtccgtggcaccgcaatcaggggtggcgccaccccgccccgggcctcagcgaagacctccgcccggccaacatggctggcgccgcctctgccacgtcaagaggaggggacggggcgtg

SEQ ID NO: 923833 - DNA, 120 bp, Artificial Sequence
  ENSG00000258651_1 (sequence is synthesized)
agggcaggaagggggcaggaaggggcgggcgcagagttaccagggcaggccaccggacccctgagcttgcttaataaccggaggatttgagaaaggcgcgcggcgggcgaaggtcgcaga

SEQ ID NO: 923834 - DNA, 120 bp, Artificial Sequence
  ENSG00000258651_2 (sequence is synthesized)
actcggacaccttagctcaccgagagaaatggagacggcctccaggacatcttaggaccctggttgattccgagaatcacaaatcacatctctgaaaaaagtgaaaagttcattctttca

SEQ ID NO: 923835 - DNA, 120 bp, Artificial Sequence
  ENSG00000258651_3 (sequence is synthesized)
cttagtgcaacaaatgtttactgaaacttactatgtgccagacacaattgagatgctggtaatatgatgcaggcaaagtaggcccagatccctggcccgaaagaattcacgtactattta

SEQ ID NO: 923836 - DNA, 120 bp, Artificial Sequence
  ENSG00000256969_0 (sequence is synthesized)
gagcagggaagccaggaggtgtgctccgcttttgtgctactggcatatgaagaaactggggctctgaatggcatattaacgcgtgcagctccagacagcgaggaagtgatggcaactcta

SEQ ID NO: 923837 - DNA, 120 bp, Artificial Sequence
  ENSG00000256969_1 (sequence is synthesized)
gagctagctgtcttgaactgaaaacagacactcaaagatgggctgtgggatcccagagaggtggcagaatggtcaaagctatgaagccaacagctgctgccaacaagaaagtcctgagcc

SEQ ID NO: 923838 - DNA, 120 bp, Artificial Sequence
  ENSG00000256969_2 (sequence is synthesized)
ctgagtgattgtaatttaaacttaatgctgggagtgggtgtttattttggaggagtgggctgcttatttttggtttggggacttgttcattcatcttttctcagcggcgcctactgctgc

SEQ ID NO: 923839 - DNA, 90 bp, Artificial Sequence
  ENSG00000256969_3 (sequence is synthesized)
cgacgctgagcttcgggtaactctcacagtggaagatgaagaaactggggctctgaatggcatattaacgcgtgcagctccagacagcga

SEQ ID NO: 923840 - DNA, 90 bp, Artificial Sequence
  ENSG00000256969_4 (sequence is synthesized)
agaaagaccctgtcgaagaagaagaagcagcagcagcagaaaaagaagaagaagaagaagcagaagaagcagaagaagaagcagaagaag

SEQ ID NO: 923841 - DNA, 120 bp, Artificial Sequence
  ENSG00000256969_5 (sequence is synthesized)
gaagaagaagcagaagaagcagaagaagaagcagaagaagaagaagcagaagaagaagaagaagaaacaaaggggaggatgcaacttggagaggcccagcccctaggagaaagcctaact

SEQ ID NO: 923842 - DNA, 120 bp, Artificial Sequence
  ENSG00000256969_6 (sequence is synthesized)
aactgcagtaaaggagtcctggagacaggacaagaatgaagtcaatgaagcatagcaggagtggagataaagacgcgcatgaaatttggtgctgtgactcggattgggggacctcccttg

SEQ ID NO: 923843 - DNA, 120 bp, Artificial Sequence
  ENSG00000256967_0 (sequence is synthesized)
ggagagtttcaaggctccttcccctggctgcaattttgggggagccgaggaactgcgggggctggggaggaagctggagagccacggagggggtgggaaagaagagggacgtggggagaa

SEQ ID NO: 923844 - DNA, 120 bp, Artificial Sequence
  ENSG00000256967_1 (sequence is synthesized)
agaagccagaagccagggggtggggaagagagacgtcagcgggacctgagggcggccaggaggggtggcaccgcgtcaccccgccccccaactctgccataacctgtttccacagcccct

SEQ ID NO: 923845 - DNA, 120 bp, Artificial Sequence
  ENSG00000256967_2 (sequence is synthesized)
tccatccacagatccgtgctgcgtgccctctgggaagggtgaagtaaaaccctcagtctgagcctgagaaatcctggcatttgtagcccagggctgcgaggaagccacagggcggtccgc

SEQ ID NO: 923846 - DNA, 120 bp, Artificial Sequence
  ENSG00000256967_3 (sequence is synthesized)
gaggggcaggacgtcgtgcacccctcgcgcacgcacctgtcgggaccggccgcctcctcctgcctacctgtcctgcctccttcgccccgaatttcaccttaaaccatgatgaaccaagcc

SEQ ID NO: 923847 - DNA, 120 bp, Artificial Sequence
  ENSG00000256967_4 (sequence is synthesized)
cagtggattctgaagcccgggacgatggcagtcccaggatctcaggatattgttggaactcatctccacctcacacagccagaccagcctcaggtgtctcccaggaaagactgcccctca

SEQ ID NO: 923848 - DNA, 120 bp, Artificial Sequence
  ENSG00000256967_5 (sequence is synthesized)
ggccctgggacggttcccaagcctgccagaaatgaggtggaggccaacactgacctttggatggctgagttttggatgactgacagccccagatcctgctccaggttccttcctcaggaa

SEQ ID NO: 923849 - DNA, 120 bp, Artificial Sequence
  ENSG00000256967_6 (sequence is synthesized)
cgcaaaaaacatacgtgctccgaattgctgaactgcagcaaatactttctccccaggatgggatggaggcgaagcagatggatctgccacacacccttagcatgcgccagtgaaagggag

SEQ ID NO: 923850 - DNA, 120 bp, Artificial Sequence
  ENSG00000256967_7 (sequence is synthesized)
agcatgggctgtcctagggctggggactgggggttacggtctcatcgatgactcagagggagagaaaaccccctgggtcccaagccaaaaagaataaaattctccagaatagccaacaaa

SEQ ID NO: 923851 - DNA, 120 bp, Artificial Sequence
  ENSG00000266963_0 (sequence is synthesized)
ccggcagctcgtacgcggactcgaggttgtagatcttttcgtagctgtccatttctatggacacgccgcccgcgcttcgccaattgctcgccaagaagaagtagtaatcctggggtaccg

SEQ ID NO: 923852 - DNA, 120 bp, Artificial Sequence
  ENSG00000266963_1 (sequence is synthesized)
cccaccagcgccaggtggggtcgtgcaccgggtccgcgtacggctgcagggatcgcccggcaccgtgaagggattgggcagcggggcgagagcctccaggcctcgccctctaagccagct

SEQ ID NO: 923853 - DNA, 120 bp, Artificial Sequence
  ENSG00000266963_2 (sequence is synthesized)
cccggctgccccagtcccgtctcaggcctgcccgcccgccgccggacgcccaccttgtcgtacacggagtgcagccacagcaggtagtagaccaggccctggtagatggcgagcgagttc

SEQ ID NO: 923854 - DNA, 81 bp, Artificial Sequence
  ENSG00000266961_0 (sequence is synthesized)
tgatagagatttgagtgataactaaccttttatttgacattaatatctaagaaacagcttgtgtcctctttaacctcactc

SEQ ID NO: 923855 - DNA, 79 bp, Artificial Sequence
  ENSG00000266961_1 (sequence is synthesized)
aacctcactcatcctcatgtatctgctgggcagttgggtgattttattctctaaaatatgcactcaggagggccaaggc

SEQ ID NO: 923856 - DNA, 120 bp, Artificial Sequence
  ENSG00000266965_0 (sequence is synthesized)
gataactaagctagatgggaaagaaattaccagttgggtgtgacatgctggtaggcatttttaaaaagttaaatttggggtgcattttgagaaatggaaggaggtggggaatgtgtattt

SEQ ID NO: 923857 - DNA, 120 bp, Artificial Sequence
  ENSG00000266965_1 (sequence is synthesized)
gagagagagagggtgctgcgaaaactaaggaaaacagcagagagtttggagagaatttaggatactgattttaaatatagagattagggtagattatgttggagaagaacaaagcacaaa

SEQ ID NO: 923858 - DNA, 120 bp, Artificial Sequence
  ENSG00000266965_2 (sequence is synthesized)
gaggctttcacagtcaatgggggtttatctgagccctgaactagaaaaactcttttccccagagaccccaaatgggagctctgactgtagcttgattcagattgggtcaaaaaggtggaa

SEQ ID NO: 923859 - DNA, 120 bp, Artificial Sequence
  ENSG00000266965_3 (sequence is synthesized)
ataggtagacaagtcaaaatagacggggttctaggaggctatggtaataataatatcattcctggaaaaaattgttgaaggctttaaacctgaagcaagccagctgggtaacttttatat

SEQ ID NO: 923860 - DNA, 120 bp, Artificial Sequence
  ENSG00000266965_4 (sequence is synthesized)
tcttctctcacttctgaatgttctttgcctttaaatgctattgaactataatagagtttcattatgaacttgaaccttatgtatgctaaaaaagtgtgttgagctagagaggtgggagtt

SEQ ID NO: 923861 - DNA, 120 bp, Artificial Sequence
  ENSG00000266965_5 (sequence is synthesized)
agggggaagggcatagaaacttggttcttcgtgaaaggtctccaccctagtgtacttgtagatacctgagagtgagtgtttttttctttctttatttttttacagaactctttgaaaggg

SEQ ID NO: 923862 - DNA, 120 bp, Artificial Sequence
  ENSG00000266965_6 (sequence is synthesized)
actttataaaaatacaccctagaatttcaccgggcagaaatttcaggtcagatataggtgggcccacttcctcccatgcaactcaactccacaccatagttcctcacatctctaggggaa

SEQ ID NO: 923863 - DNA, 120 bp, Artificial Sequence
  ENSG00000266965_7 (sequence is synthesized)
ttgctcatcacatcttagcctctggctttctcactgtatttactagaacatctttccaagacttgctgttcttatcctcagcagagcctccagttccaacatgagccccagcacagtatg

SEQ ID NO: 923864 - DNA, 120 bp, Artificial Sequence
  ENSG00000266965_8 (sequence is synthesized)
ttcatgttgtactccactgactgttcttcattcactactcaattggattcttcagttgtaggcagtagaatccacctccgcctaacttagcaggagttaatttattggaaaggaattaga

SEQ ID NO: 923865 - DNA, 120 bp, Artificial Sequence
  ENSG00000266965_9 (sequence is synthesized)
agctcacagaaccgatggaattctagagaaccagccttgggaacagattagtggaaactaaggcaactcttgggggctaggaagcagaattgcaggagtgacctgatcaacagattacca

SEQ ID NO: 923866 - DNA, 120 bp, Artificial Sequence
  ENSG00000266965_10 (sequence is synthesized)
ctgggatgattgaacccagtctgttctttcatccttgaatgttacttgcccaagatttaagagtcctggagaaagcatctagttggtgaaacctaggtcatgctggatgtaccaggggtg

SEQ ID NO: 923867 - DNA, 120 bp, Artificial Sequence
  ENSG00000266965_11 (sequence is synthesized)
agagtagggatttatagtatttgcaagaacctccaggaatccctttggcatccattagtgggagggtagtcatatggagttacattctcactgggattatacaagggcaggtaattctcc

SEQ ID NO: 923868 - DNA, 120 bp, Artificial Sequence
  ENSG00000266965_12 (sequence is synthesized)
aacaggaaattaggacgtggggagagatggatgctgagcagccaaaatgaaatacctcctccagaccccttgtcaacattaaataacttaatgactctttacattctagtagtttactta

SEQ ID NO: 923869 - DNA, 120 bp, Artificial Sequence
  ENSG00000266965_13 (sequence is synthesized)
tataagacaaataatgacagtttgtttagtgcttttctcagtagaatttgtattgtgtctgatattggccctttacatgctgctcctttaattatctcaacagtcttgtgatataggcag

SEQ ID NO: 923870 - DNA, 120 bp, Artificial Sequence
  ENSG00000266969_0 (sequence is synthesized)
tttgaagcgaggaagccgcgcgccctgcgagtccggaggaggaaatggagctctgcgctgcgtgggacccgggggacggctcccgttggcgccgccttcaaggtaagggattaagaggcc

SEQ ID NO: 923871 - DNA, 120 bp, Artificial Sequence
  ENSG00000266969_1 (sequence is synthesized)
atctcgatccagcccgtggggaatccagaggggataacaagaggatataaccacaggacaattcattaggctgtgttttgacgtttcctgaattctattccaaattattcacaaaggcat

SEQ ID NO: 923872 - DNA, 120 bp, Artificial Sequence
  ENSG00000266969_2 (sequence is synthesized)
gcatattaaaataattttatcttacaaattcacatatttaaaatttgaacatggaaacagactctagatgacatcaaatattccttattatgatatacaagaatgtaacatatgctaaat

SEQ ID NO: 923873 - DNA, 120 bp, Artificial Sequence
  ENSG00000266968_0 (sequence is synthesized)
cactcttctccaacctctcactctgttgttctctcatctgccagaaagcacaccactcttggacaaagaaaaactgatgacccttcagtgctggagttttccaggcaggaaggacaggga

SEQ ID NO: 923874 - DNA, 120 bp, Artificial Sequence
  ENSG00000266968_1 (sequence is synthesized)
ggttcagagaatcccaacgtttgaagggagtgtgaagatcaggtggtccgatcccatgatgcatgaaaacctctataatattaggataagggcttcagttctctgccgggtttccagaac

SEQ ID NO: 923875 - DNA, 120 bp, Artificial Sequence
  ENSG00000266968_2 (sequence is synthesized)
agattcaattacccaaaatggaggcaaggctcccaaagtattttaacaacagataaccagaaccagagaccccactcattgccctagaaaatcccctcctgtcttcattaagctctttga

SEQ ID NO: 923876 - DNA, 120 bp, Artificial Sequence
  ENSG00000266968_3 (sequence is synthesized)
ggctgtccacccaaagcattgggtctgattggggactgtcttttagccatgcttactggatccccaggagaggaaaactatttggatataaaaaattatttcagctgatttggacaagat

SEQ ID NO: 923877 - DNA, 120 bp, Artificial Sequence
  ENSG00000266968_4 (sequence is synthesized)
tatcgctttcttttcccaccaactccccccatctcccccacccctgccaactcttcacctcatctcacgagactggagagctcctggagtgatcttgtcccaccttccccagggcttccc

SEQ ID NO: 923878 - DNA, 120 bp, Artificial Sequence
  ENSG00000266968_5 (sequence is synthesized)
cacctcatctacctgctgaatgggtaggtaaaagatctctaaacttacagattcacagcaccaacatgaggttgcatgggggcaggccatgatgagagaagaagaagggtttggggaccc

SEQ ID NO: 923879 - DNA, 120 bp, Artificial Sequence
  ENSG00000266968_6 (sequence is synthesized)
atattctggcagtttttctaccatcaccccaaactacaagcaacagctcttggctgtacaaatgagagtgtctatgttgaacataaatatgcaatcattaaagatgtgtcagtttggaga

SEQ ID NO: 923880 - DNA, 120 bp, Artificial Sequence
  ENSG00000266968_7 (sequence is synthesized)
ttatctcctctcatacaacactgatgaattctatcagccatgacagtcttgtcctgctgcactttaaaatggcagatcttaaatcatctttccagtttcttccataattgacatagtcaa

SEQ ID NO: 923881 - DNA, 120 bp, Artificial Sequence
  ENSG00000266968_8 (sequence is synthesized)
gttttctgcttcatcttgagtcaagcttgagcatttgctaagatataatcaattttctttagctttaaatgtttgtggccatagagttacttataatgttctcataaaacaatttcagtc

SEQ ID NO: 923882 - DNA, 120 bp, Artificial Sequence
  ENSG00000266968_9 (sequence is synthesized)
tctcctgtatgcatggttttatccccttctcatttctactcttacataattttgttatctcttttctttaatcaggtttgcaaggagttcgttaattttattgactttttcaaagaagcg

SEQ ID NO: 923883 - DNA, 120 bp, Artificial Sequence
  ENSG00000266968_10 (sequence is synthesized)
attttggatttatttgtcctttctacttgttttggtttgttttctattgatttatttttcctgttttcttaaggtttaaatgttattttctaatgttttaaaattgatgtagaattcctt

SEQ ID NO: 923884 - DNA, 120 bp, Artificial Sequence
  ENSG00000266968_11 (sequence is synthesized)
cattttaggtctttctaacaacaaagccatttacagctattaattttctcctgagtacagctttagctggatactataggttttagaataaaggagtctacatttatcatttttaaaata

SEQ ID NO: 923885 - DNA, 120 bp, Artificial Sequence
  ENSG00000266968_12 (sequence is synthesized)
gtttgtaattttaatttttattcctctttggttgtttgaggattatttaataatgggtttcttaatttctagcatttaggaatcttgatttttttaactttgtatatctagttttattgg

SEQ ID NO: 923886 - DNA, 120 bp, Artificial Sequence
  ENSG00000266968_13 (sequence is synthesized)
attatgagcagaaaacatggcctgtaaaaatctttattttaaaattgtgtgaatttttcttcattgtcaagtacctgattgattttggacatataaaattaaattttactttgaaagaaa

SEQ ID NO: 923887 - DNA, 120 bp, Artificial Sequence
  ENSG00000228906_0 (sequence is synthesized)
cgcaggatgtcttttatagctgctttcttcaaaccaggatctattcggagaccacacattgcatttgatttttatgtcttttgagccttttaaaatttagagcagttccctataacccct

SEQ ID NO: 923888 - DNA, 120 bp, Artificial Sequence
  ENSG00000228906_1 (sequence is synthesized)
tcttttgtttgttttatgaaattggcttgttgaacttcacaaaacacgagttggggtcatgccaactgtaccgttagtgattagtttacatatagggaaaataatttgtgaatgttggtc

SEQ ID NO: 923889 - DNA, 120 bp, Artificial Sequence
  ENSG00000228909_0 (sequence is synthesized)
ggtcaagtcagtcaaaccagtcaagcggacaagaaagagggactcagatcacctggaattatggcaatgtcttgcaaggatacttctgaaaatcgggtgtcacgggaagctgaactttgc

SEQ ID NO: 923890 - DNA, 120 bp, Artificial Sequence
  ENSG00000228909_1 (sequence is synthesized)
atcccagttctgaaacatacagcaacctcatggagacagatgcatcactcggcattttggggcggtagcgagttcagtgacctgccagatttcttagcattaacttgaaagagaagacac

SEQ ID NO: 923891 - DNA, 120 bp, Artificial Sequence
  ENSG00000228909_2 (sequence is synthesized)
ttatttgatttgatttgatttctactagtcaagtgggcacctggattaagcagactctcccccaggcaccccggaggcctctgacatcccttatgtccagcccagacatggcctttctgt

SEQ ID NO: 923892 - DNA, 120 bp, Artificial Sequence
  ENSG00000228909_3 (sequence is synthesized)
tttcccagctactttcctgctaaccagggcagaggctggtctacatccccctatccaggtggcccctgcagtcatggcttttctgcttctagaagccatccctgagaacatcattgcaga

SEQ ID NO: 923893 - DNA, 120 bp, Artificial Sequence
  ENSG00000228909_4 (sequence is synthesized)
actcaaaatacattgcatcatacaaaatgaagtggagaattaaggtaattatccaattattaaaaaccatttcttattcgttagctaaataactcttcaagtctccattttacatgtgtt

SEQ ID NO: 923894 - DNA, 120 bp, Artificial Sequence
  ENSG00000228909_5 (sequence is synthesized)
cctctgatgtgaatttgaccctggcctatttgtttttcagtaaagtccaaaatccaaaatagcccaacagaaagaccccctcccagtattccacagcatcagtaataaagctccttatca

SEQ ID NO: 923895 - DNA, 120 bp, Artificial Sequence
  ENSG00000283098_0 (sequence is synthesized)
accaatcagttgcagctgtgacattgcgccgaggctctgaagtgggtaattgcagaccacagctaggctggaatgctgtgtttggggtggtcattagagtcgtggtctctttagcgttat

SEQ ID NO: 923896 - DNA, 120 bp, Artificial Sequence
  ENSG00000283098_1 (sequence is synthesized)
gaagcctaccttgactcctaggtgttcattgtgaatcttgttggtgctggtatcgctgtacctctcaaatagcttccccattttgactaagaatgaagaacttcttggacaaagaacttg

SEQ ID NO: 923897 - DNA, 120 bp, Artificial Sequence
  ENSG00000283098_2 (sequence is synthesized)
taaaaatcagaattcttgaacactatttggacagtctatataccggaagcccatcagtcacagagcaacaagccatgggcagggaatgaaaggagttgatcctgactccaagatgcattc

SEQ ID NO: 923898 - DNA, 120 bp, Artificial Sequence
  ENSG00000283098_3 (sequence is synthesized)
caaagaaagaaaacgcaactgtagcccggactccgcggaggaaggccaactgactccactacgtgcacttccgagccacttgggcccagctagctgtgttaattatgggttctaatttta

SEQ ID NO: 923899 - DNA, 120 bp, Artificial Sequence
  ENSG00000283098_4 (sequence is synthesized)
ttgcaactcggcacctcctggtttgttcccactatagtggtcttaaaaagaaacacacacaggcataccccagaatgaatccccgggaaggcaaaggtagattttttcggtgcttgagtt

SEQ ID NO: 923900 - DNA, 120 bp, Artificial Sequence
  ENSG00000283098_5 (sequence is synthesized)
gatgctctgagagcgcgctgagagtctcgggcatgtcttggcactcttggaaacaaattgcagccaagagcacggttcttccggtcctctccttgctcctctgtgcgccgctcggccgcg

SEQ ID NO: 923901 - DNA, 120 bp, Artificial Sequence
  ENSG00000283098_6 (sequence is synthesized)
ggactcctggaacatgttgtgcaccgcccgagtggctgcggacctcacctcgacgccctggatagccggggccaggaggagacgagcaggcagtctcccgccctcacctagtcagctgcg

SEQ ID NO: 923902 - DNA, 120 bp, Artificial Sequence
  ENSG00000283098_7 (sequence is synthesized)
ttgctgcgggttctgggtccggccttgggcggcattctgtcttctaaagtgtggaggtgggtagaagagtgtccactttcagtgtagacacctgaggtatgggggcttctttgggggctc

SEQ ID NO: 923903 - DNA, 120 bp, Artificial Sequence
  ENSG00000283098_8 (sequence is synthesized)
cagcgtgagctgctcctgcagattagggaaatggagagaacaacaatggggacatggtggaattcagatttccccctgttaattaacaatatgatttcgcttagtccaagtgtcttctgt

SEQ ID NO: 923904 - DNA, 120 bp, Artificial Sequence
  ENSG00000283098_9 (sequence is synthesized)
gttcttatttaatgtctcttgtaaaatgggaactagaataatacctccttggtatggttgttgtgtttgacgtgagccctcaacaaatggtaggatgaactggagaagaatgggtccatc

SEQ ID NO: 923905 - DNA, 120 bp, Artificial Sequence
  ENSG00000283098_10 (sequence is synthesized)
actccccacacccttccctgcagagcttctttgctgtctccagctctcccgccctgacgcaaggacagctcacaaccagtgtccttgagtagcccctgggggccgcaagagaatccgccc

SEQ ID NO: 923906 - DNA, 120 bp, Artificial Sequence
  ENSG00000283098_11 (sequence is synthesized)
ggtagggcatagaagatgggttttcggtgaatcgtgaaaagacatgatcgggtttcccttggagcatggtggagaatgatgcggagccttggggtcaatggagagttgagggtgcagagg

SEQ ID NO: 923907 - DNA, 120 bp, Artificial Sequence
  ENSG00000283098_12 (sequence is synthesized)
gatctgaaagggggaaccaaaaatatcgggctttgaaattctgtggattttcaaaggcggttcccaaccttgtcaaaaactacagtgggtgcgcgatctaatctggctcctataggtggc

SEQ ID NO: 923908 - DNA, 120 bp, Artificial Sequence
  ENSG00000283098_13 (sequence is synthesized)
gctgtgacaaggtgcggtggccgggagaggcggctgggggactcgaagactgcgggaaattttctgcgactccgacgctaacccgctgctcccagcctccgcttcctgttttcgagggat

SEQ ID NO: 923909 - DNA, 120 bp, Artificial Sequence
  ENSG00000283098_14 (sequence is synthesized)
tgaagttgggatcttggcattagggttggatgtcactgaggatagtcactgacatggattacaaacactgtggactctgccccacccctatctttaaattctgaacctgccctgtagaat

SEQ ID NO: 923910 - DNA, 120 bp, Artificial Sequence
  ENSG00000283098_15 (sequence is synthesized)
attggttggagccgtgcaagacaatggaagcaagcttggcaatcacttctgtctgcttttctgtccagtgtgaagtgtctactgctttgttacactgatccttcttcataagaaaaaaaa

SEQ ID NO: 923911 - DNA, 120 bp, Artificial Sequence
  ENSG00000272800_0 (sequence is synthesized)
gaccctgtttgcctgggtatcaacagcagaggcctcagaacatcaaagattgctgcctgcttcttcctctagatgccctgcccagtgaggaggaatctaaagaggaagtctggccacagt

SEQ ID NO: 923912 - DNA, 120 bp, Artificial Sequence
  ENSG00000272800_1 (sequence is synthesized)
ggaggaatctaaagaggaagtctggccacagtcgcttttctgtgctggggtgaattccacacagtctgaacttcccggttgcttccttaacactgtgtggggaaaaccgcctactcaagc

SEQ ID NO: 923913 - DNA, 120 bp, Artificial Sequence
  ENSG00000272800_2 (sequence is synthesized)
ctcagtaatggcagacttcccaacccccaccaagctcaagcatctcaggaccagaaaccagaaatgcaatttgccaagcatatgaagaatatgtttttactggtttttgataacttaaaa

SEQ ID NO: 923914 - DNA, 120 bp, Artificial Sequence
  ENSG00000272800_3 (sequence is synthesized)
tacttcttcatctaaaaccaggctgatcttgagaaagattttaaaggagattagaaaattcactttaacaaaccactatcatatagtcacatcaatctttcgtagatatttttgcaaaca

SEQ ID NO: 923915 - DNA, 120 bp, Artificial Sequence
  ENSG00000272800_4 (sequence is synthesized)
attaccagaattcttagagtttattacagatattttgttcttgacctttgacacttgccatttagcaattgcatggttttacttttgtggttgtagagtttctgtttttctttcattaga

SEQ ID NO: 923916 - DNA, 120 bp, Artificial Sequence
  ENSG00000272800_5 (sequence is synthesized)
atgatgtaagtagaggaatagaaactgttatatttgcaaaaaaagagcaaagatgctttgtgaccttgggaattatatttgaaggttactcacaagagaataccttgtttaggaaagatg

SEQ ID NO: 923917 - DNA, 120 bp, Artificial Sequence
  ENSG00000272800_6 (sequence is synthesized)
caaaattagttaatggcaaatgtgttctttgctgaatattaatctatagtatcatttaagatgttcttaatttatgtttctggactttgtttaaatgtcaaactctagaaagggtaaact

SEQ ID NO: 923918 - DNA, 120 bp, Artificial Sequence
  ENSG00000272800_7 (sequence is synthesized)
agctcaccccactgctaggtaatagctagtattgtcttcgctgcagggcattttacagtaaaattttgaagtatattgaaaaaagttaccagttcacttactatacaatagcttggaatg

SEQ ID NO: 923919 - DNA, 120 bp, Artificial Sequence
  ENSG00000272800_8 (sequence is synthesized)
tgaatgtctgaaagaagaaaaattcaataaatgactatgtagttatttggtggaattcacaacataataacaagaaaaggttttcagctttgatcataatggaaatgagtcatttaattt

SEQ ID NO: 923920 - DNA, 120 bp, Artificial Sequence
  ENSG00000272800_9 (sequence is synthesized)
taccctcagtcctggtacacagtttcagcacctgctaagaagtcggcttgcatttaaatgacttaggcaattattaaaagcaagtttcaagaaataaatggcatttatataaaaaggaga

SEQ ID NO: 923921 - DNA, 120 bp, Artificial Sequence
  ENSG00000272800_10 (sequence is synthesized)
ctgggctcaaactgctagtgctttaaatttccataaaagcaaattcaagttcagaacaggattcaggatttagtaacaattcaaaggttttcaatcccttaatctctttgtgataactat

SEQ ID NO: 923922 - DNA, 120 bp, Artificial Sequence
  ENSG00000272800_11 (sequence is synthesized)
attcatcatgtagccatttttaaaaggaagagaataaaaatgttaacattgatgtctaccagcacttgtgactgaaaaattgattatatatggtaaatacttatggctccaaatagctat

SEQ ID NO: 923923 - DNA, 120 bp, Artificial Sequence
  ENSG00000272800_12 (sequence is synthesized)
ttgatttataattttggtattgaaatgtaatgaaatacttctattgtatttgcaatcgctggaagagtagtatgaatcatacttcaaataaaaatgcttctttttatcatttttcccaaa

SEQ ID NO: 923924 - DNA, 120 bp, Artificial Sequence
  ENSG00000272800_13 (sequence is synthesized)
ctcagcgtttcaagcacctgggaccacaggtaggaggatcacttgaggccaggatgaagaaagcctacttaatataacaagaccctgtctctacaaaaaaataaaataaaataaattagg

SEQ ID NO: 923925 - DNA, 120 bp, Artificial Sequence
  ENSG00000272800_14 (sequence is synthesized)
ctgtctctacaaaaaaataaaataaaataaattaggcatggtggcatgtgcctgtagtcacagctactgggaaggctgaggcagaggatggcttgaacccaggagttcaaggctgcagtg

SEQ ID NO: 923926 - DNA, 120 bp, Artificial Sequence
  ENSG00000283096_0 (sequence is synthesized)
aggtaggcagccagtgcaggcccagcagcaagagaaggagcaggagaggctggaatattctggcttgaaaacagcagctgtgtaataaagccgggctggtttgtctcagggccccgctgt

SEQ ID NO: 923927 - DNA, 120 bp, Artificial Sequence
  ENSG00000283096_1 (sequence is synthesized)
cccttctccccgcctcaaagtagcagcatgaatcagttcactgcggcaatggtccaggcgatgtgacttgcatccccatcagctacctgattgcggtccctggatgcatgaggcgctgga

SEQ ID NO: 923928 - DNA, 120 bp, Artificial Sequence
  ENSG00000283096_2 (sequence is synthesized)
tgtgcctggcataccaaactgcccgcctctgtgccgcagctactggtaatgaagatcaccggccccgcccagcactgcggacagagccgggcattcttcaaggccaccactggtctttta

SEQ ID NO: 923929 - DNA, 120 bp, Artificial Sequence
  ENSG00000283096_3 (sequence is synthesized)
tcttgtccaaggctctgggatagtcaccgaaatccttgggctgcttttgacgggggccaccagcctgtctcaaagatgccctgacaagcccctccagccctgggcagacaaaggcttgaa

SEQ ID NO: 923930 - DNA, 120 bp, Artificial Sequence
  ENSG00000283096_4 (sequence is synthesized)
aggagaggaattgcacacggtccagacgctgctgtttctaatacgttattttgacacacaattaactgcaaaatttgctctaagctaagagctcgggccctcacaggattcgtacagcac

SEQ ID NO: 923931 - DNA, 120 bp, Artificial Sequence
  ENSG00000283096_5 (sequence is synthesized)
ggctccccacggtgatgccacccctctcagggctggctgtgggcaccgatcagagaggaagcatcagcccgcccacagcccagcatggggccaggggaaccatggcacgagtcatgggag

SEQ ID NO: 923932 - DNA, 120 bp, Artificial Sequence
  ENSG00000283096_6 (sequence is synthesized)
ggggtggataaagcttgcacaaaaccgtccaacagagctccctgaacaacaacccttcctaaaatggtgtcgcttatcctccgctgacaaaagcctgatttgagctctccccggaggtgg

SEQ ID NO: 923933 - DNA, 120 bp, Artificial Sequence
  ENSG00000283096_7 (sequence is synthesized)
gatgaagcgaacacattgccttttatctccccgtcgctttgagaggggaagacaactggtacagagcatggtggggagccctggagaaggcactcttgaatgaaaggcataatctccggc

SEQ ID NO: 923934 - DNA, 120 bp, Artificial Sequence
  ENSG00000283096_8 (sequence is synthesized)
tcccccaaaccaggaggggaggcagctttcatcccccaccgcggcccgctccccccgtcctggaggcatctgaatgggagtggggagcttggaaggagaggctcctgccgctgcacaatg

SEQ ID NO: 923935 - DNA, 120 bp, Artificial Sequence
  ENSG00000283096_9 (sequence is synthesized)
ccacacaatattgcttctctccaggagcccagaggaggccatgggtgtacagcatcttactttgaaaccaattctccaatcagctatttaaataagaaatataatctcattgaacaccca

SEQ ID NO: 923936 - DNA, 120 bp, Artificial Sequence
  ENSG00000265717_0 (sequence is synthesized)
tgttcaccgttcctttgagttcctcgtagattctggatattagtcctttgttggaggtatagattgtgaagattttctccaattcatcgccgttttttagagtttttctcactaaatatt

SEQ ID NO: 923937 - DNA, 120 bp, Artificial Sequence
  ENSG00000265717_1 (sequence is synthesized)
gactaacggaacctagccctgtaatgttgatagtcgggcgggtcggaagtggctgaggtggagtatctgcaggagaagaactgaggctcctaagtgcagcatcttgtccaagaggtttcg

SEQ ID NO: 923938 - DNA, 120 bp, Artificial Sequence
  ENSG00000265717_2 (sequence is synthesized)
gtcactgaaaagcccgacaacttcccctgccaacccattggaattaaaaaaacctcgataacctcttaaacacatggaaatggaaccctgagcagagattgtggtgggtatctgtacagc

SEQ ID NO: 923939 - DNA, 120 bp, Artificial Sequence
  ENSG00000265717_3 (sequence is synthesized)
ctaaggaccttgggtggacctggccagcaatgggactgttactgatgatgcatcacatggtgtcactaggaaaagcatagatcagctgaggatcaatcttcccaccaggtgtgtgtgaaa

SEQ ID NO: 923940 - DNA, 79 bp, Artificial Sequence
  ENSG00000250069_0 (sequence is synthesized)
agaacactttcatcaccccaaaaagaaaccctttagcaatctctccccatttccttccactcttccccccggccttttt

SEQ ID NO: 923941 - DNA, 73 bp, Artificial Sequence
  ENSG00000250069_1 (sequence is synthesized)
cagaacactttcatcaccccaaaaagaaaccctttagcaatctctccccatttccttccactcttccccccgg

SEQ ID NO: 923942 - DNA, 66 bp, Artificial Sequence
  ENSG00000250069_2 (sequence is synthesized)
ccccttccccaccattaatctactctgtctctatagatttgtctgttctggacattttgtataaat

SEQ ID NO: 923943 - DNA, 120 bp, Artificial Sequence
  ENSG00000250069_3 (sequence is synthesized)
gtctctatagatttgtctgttctggacattttgtataaatggaaccatacaatatttggtcttttgttacatgcttctttcacttagcttgatatttccagggttcatctatgttgtagc

SEQ ID NO: 923944 - DNA, 120 bp, Artificial Sequence
  ENSG00000250069_4 (sequence is synthesized)
atgtatcaatactttattccttcctattgccaaataatattccattgtggatataccacgttttagttatcctttcattggttgatgggcatttaggttgtttctactttatggctatta

SEQ ID NO: 923945 - DNA, 120 bp, Artificial Sequence
  ENSG00000250069_5 (sequence is synthesized)
ggaataatgaataatggctgttataaacatttgtataaaatagactccatcctggaggaatggcatgtgaatacagggtgagaggaattggtgaccgtctgtgcaaacagtccaccacat

SEQ ID NO: 923946 - DNA, 120 bp, Artificial Sequence
  ENSG00000250069_6 (sequence is synthesized)
tctgccctttgctctcaacaatttacatccccctcatatgcaaaatatatccacccccttccaccaccactagatgtctcatccaataattacatcagcttgaaatccagaatattatca

SEQ ID NO: 923947 - DNA, 120 bp, Artificial Sequence
  ENSG00000250069_7 (sequence is synthesized)
tctaggtagtctatatgtaggtaaggcctctaacctgccatactggtccatataccctaactttgttcatgctgcttcctttacttcccacctctcattcccactctgccacaacctacc

SEQ ID NO: 923948 - DNA, 120 bp, Artificial Sequence
  ENSG00000250069_8 (sequence is synthesized)
ctacacatctctggcgatcaaaagaaaatatctcttcttccttgaagcttttgcttacctatactatacctccagtagaatttaccactcctatttgcttcaactgcaccctatacagac

SEQ ID NO: 923949 - DNA, 120 bp, Artificial Sequence
  ENSG00000250069_9 (sequence is synthesized)
ccagattcaatagtgtctaccttatgtacagtccattttagcttttttatgtctgaattcaatcaaccttgctcttagtgtttaggctttcactgtttgttttggtcaagactcttaagg

SEQ ID NO: 923950 - DNA, 120 bp, Artificial Sequence
  ENSG00000250069_10 (sequence is synthesized)
ctacaagtgatagaaccttagccttagatattaaccagcaacggaggttcaccagacatctgagtaaagaaagcctccaagataaaagatgatgatccaaacagaaaaaagggattctga

SEQ ID NO: 923951 - DNA, 120 bp, Artificial Sequence
  ENSG00000250069_11 (sequence is synthesized)
aaagatgatgatccaaacagaaaaaagggattctgagggaacaaacattgcagggagaagaaaaccctcctaccagaaagtgggggaatcctctaatactcttttttttttttttttttt

SEQ ID NO: 923952 - DNA, 81 bp, Artificial Sequence
  ENSG00000250069_12 (sequence is synthesized)
cggcctcctaaagtgcagggattacaagcatgagtcactgcgcctggcctgctaatattcttaagttatactgaagataaa

SEQ ID NO: 923953 - DNA, 120 bp, Artificial Sequence
  ENSG00000250069_13 (sequence is synthesized)
gcctggcctgctaatattcttaagttatactgaagataaatcttattgaaataagagcagtggtactgtataaaatgaactctggaaacaaaagcacttagcaaagaacaatgtgaaact

SEQ ID NO: 923954 - DNA, 120 bp, Artificial Sequence
  ENSG00000250069_14 (sequence is synthesized)
gatctcaccctaaggattagatccaaaaggtccatttggcagccagatcttgccagagcagaatttaaggcatttgccataggtggaaggttgatgtatgttttggttatctattgttac

SEQ ID NO: 923955 - DNA, 120 bp, Artificial Sequence
  ENSG00000250069_15 (sequence is synthesized)
gtcacaaaccacccccaatcttagaggttccataatttggacagggcttgagcagaaagattgattcatctctgctccttgttggcacctactgaggctggaacgtagataatgataagc

SEQ ID NO: 923956 - DNA, 120 bp, Artificial Sequence
  ENSG00000250069_16 (sequence is synthesized)
aatttgctgggttggatttgtacactttctaccgtccaatatgatccatcaactttcttcttggctttgtattatgtccaaaagggtactcttggattgacttacacttgcaatacagag

SEQ ID NO: 923957 - DNA, 120 bp, Artificial Sequence
  ENSG00000250069_17 (sequence is synthesized)
aaagaagccatttggtttggccagtgctttagaagggagaaaggggtgggagcatgatgtccaactgctgggaggggtcaggaggcacctacatgctagtatttctgtgtgcattccaaa

SEQ ID NO: 923958 - DNA, 120 bp, Artificial Sequence
  ENSG00000250069_18 (sequence is synthesized)
ccagtgttgggtttctccacttctactggctttgtttgatcttattgtccttgaagatttgattaacttcaaccctattctgtcagctgtttcagttccaatggaaccttgtaattctgg

SEQ ID NO: 923959 - DNA, 120 bp, Artificial Sequence
  ENSG00000250069_19 (sequence is synthesized)
ctcattataacaagaaattatctcaaatccaaaaagaaaaaaaaatcacgtctggtatttcagctgacatgattgaaacagcgtagggttggttgtctctgtccctctgcatggtctctc

SEQ ID NO: 923960 - DNA, 120 bp, Artificial Sequence
  ENSG00000250069_20 (sequence is synthesized)
agtgctgctgtcacagcatgagagtttcagagtaggtgggttttttccatgttacaatgcaagaatggaatctgccaggccttcctgcacatgtacccctgaacataaaataaaagcctt

SEQ ID NO: 923961 - DNA, 120 bp, Artificial Sequence
  ENSG00000250066_0 (sequence is synthesized)
aaagcccaaatcccataaaaccctcttggctggactgattacagtttactacagcaaaaagcggggaaaaagagaggatacaagaacttttttcggctcttccatagttcatggataatc

SEQ ID NO: 923962 - DNA, 120 bp, Artificial Sequence
  ENSG00000250066_1 (sequence is synthesized)
tgtcagacagtttggaagacgttgtaaacaacctaaatgtccgtcaaaagaaaatgagtagataagaaagctgaggtcacaaaaaggaaagtgactggtccaagttgaaattgatcgtaa

SEQ ID NO: 923963 - DNA, 120 bp, Artificial Sequence
  ENSG00000250066_2 (sequence is synthesized)
ttagcagagccagaagttgaaaccagttctgttttattataaatccacaccacactttggatcacacatcatcagtggcccaaactctcagctcttgcaaataaaaataaatcaacagtt

SEQ ID NO: 923964 - DNA, 120 bp, Artificial Sequence
  ENSG00000250064_0 (sequence is synthesized)
gcagatggacaagctttataacattgaaactgcaaaccaggaaattctgtcagtttgccactgcctgctctgctccagctgaaaatactttagctcaggttcagaaatcttctcagtgag

SEQ ID NO: 923965 - DNA, 120 bp, Artificial Sequence
  ENSG00000250064_1 (sequence is synthesized)
ctgctattcagactcagaaagtagcttggagaatactccagacgttaggctttgcgagtttttgtttgtttacatagaaaagtctcttttaaatttccttattcttacactgcaaagaga

SEQ ID NO: 923966 - DNA, 120 bp, Artificial Sequence
  ENSG00000250064_2 (sequence is synthesized)
agtcctggaactgagtcctggggcaaggttctggaagttgggacaagaagattcctagaaaagaggaaaacaatcactctagaactgttataagcatgctaaccaggacttcagagaaag

SEQ ID NO: 923967 - DNA, 120 bp, Artificial Sequence
  ENSG00000250064_3 (sequence is synthesized)
gaaaaaaaaaggctgaacctcgctggtgattcagatggatcatgaggatctttcaacaaagctaagttcccgtcttttaacgcagttattctcatacttttatactgaaatatccagaat

SEQ ID NO: 923968 - DNA, 120 bp, Artificial Sequence
  ENSG00000250064_4 (sequence is synthesized)
agcaaatgagttaaatatgttttctgtggggttctgtacaaagaagatttagagctttatgaacctaaaataacatatcacaaggagaaaatttacttgaagtgggagacttggcttaaa

SEQ ID NO: 923969 - DNA, 120 bp, Artificial Sequence
  ENSG00000250062_0 (sequence is synthesized)
agctttgattgtatgttctggaaatctgatggttctaggatactctcagaggtgttggcccccaaaatacttcctaataaatctcctgcatgaaatcaccatctcaaagtgtaccttctg

SEQ ID NO: 923970 - DNA, 120 bp, Artificial Sequence
  ENSG00000250062_1 (sequence is synthesized)
gagaatacagtgtttggaaagcagtaagtcatggctaaatacagcaatatgctctggagttcacttggatacttccctaggcaaaaggcaagtccaattatggataaacatggctagact

SEQ ID NO: 923971 - DNA, 120 bp, Artificial Sequence
  ENSG00000250062_2 (sequence is synthesized)
acgagctcaacatcaagaaaagccatttcacctatgtaaccaactaacctagatgaccaagcctaattatagagttttcattcaaaaccactttgtgcttggtagacactaaattgaagc

SEQ ID NO: 923972 - DNA, 120 bp, Artificial Sequence
  ENSG00000250062_3 (sequence is synthesized)
aagcaggaacttcttaaaacactagaaactgaactagtactttacaacccatcagcaaactaaagacggggaagaccacacaaagattattcaccttaatcaaaaacatgggaccagctc

SEQ ID NO: 923973 - DNA, 120 bp, Artificial Sequence
  ENSG00000250062_4 (sequence is synthesized)
agcagctcatcaccacagaaaatagatgaatggaaagaaaatggctgctctagacacgaggcaatttctggaaatcaggatggtgacattggagaagaaactgaagattcttggagaaat

SEQ ID NO: 923974 - DNA, 120 bp, Artificial Sequence
  ENSG00000250062_5 (sequence is synthesized)
attaacttcatctcagtaaaatggaaggcttgccatgtttctcctgtggctttgactactcctggcacattgtacctgcaacttccctgcctggccctcaccctgaggcacaaagactcc

SEQ ID NO: 923975 - DNA, 120 bp, Artificial Sequence
  ENSG00000250062_6 (sequence is synthesized)
tgtgctgccagcagacagcctctcagctcttagccccctttgaggatgacctcagctgacaaaagctgcctaacctagcctacacactcttcataggtagccttcattcaatgactgatg

SEQ ID NO: 923976 - DNA, 120 bp, Artificial Sequence
  ENSG00000250062_7 (sequence is synthesized)
tttaatatctgttaacataaaccaaagcaagttatagttatgggctggtaagaagagaacaaccatctattgaaaaccgtctacagataagtgctttgtataataaattatttgctttaa

SEQ ID NO: 923977 - DNA, 120 bp, Artificial Sequence
  ENSG00000250060_0 (sequence is synthesized)
agtgcaagagaggctgccatgagtgtgctaagtttctgatttctgtgatcatagcaagattgtcctaaattagacacaaggccacatcatttgcaatctcaagcaaaatgatggtgatcc

SEQ ID NO: 923978 - DNA, 120 bp, Artificial Sequence
  ENSG00000250060_1 (sequence is synthesized)
tcttccagcacggacaaagtcagttcacctggctgattcataaacgcgtcgcagatccattccttctcagttcgggggtatttggtgattgggaagtaacgctcaagctctactgaaagc

SEQ ID NO: 923979 - DNA, 120 bp, Artificial Sequence
  ENSG00000250060_2 (sequence is synthesized)
tgagtttggctttgaatgcagctgcttaatctactgactatctgccgacttgaacacagttgccgttctcccctgaagtgacagattaagtttgtggagcaggttgaatgtgtcacacaa

SEQ ID NO: 923980 - DNA, 120 bp, Artificial Sequence
  ENSG00000250060_3 (sequence is synthesized)
actttgaatgtttgagactaccttggccaccagattgtgttacctggaagtttggtcccaagcaagaagccacagggagagacagcgaggcaactctatgcacatgcaatgaacactgag

SEQ ID NO: 923981 - DNA, 120 bp, Artificial Sequence
  ENSG00000250060_4 (sequence is synthesized)
actgatatcactgagactttcagaggacaatggactcattatggatctcacatctttcctagactctgttctttgctcttgggtcttctctactcagactacctgcccccaaatgctcca

SEQ ID NO: 923982 - DNA, 120 bp, Artificial Sequence
  ENSG00000250060_5 (sequence is synthesized)
tcctcaccaaaatataaagattgagaagaaagtgggacaaagggtgtggaataaaaaatgtaagattggctatcaccccaaggtgatcaaatctaatgttggctttgctccagcggatct

SEQ ID NO: 923983 - DNA, 120 bp, Artificial Sequence
  ENSG00000250060_6 (sequence is synthesized)
gtgaccaattttgtatcagtcccagagcacagcgagcctgttcaggctcttgtaagtgaggacctgtggttgaagagtaaaatttttgtgactttaatccttcttttctccagactggag

SEQ ID NO: 923984 - DNA, 120 bp, Artificial Sequence
  ENSG00000250060_7 (sequence is synthesized)
ggtcatgatggtacagtgggaataccttgggcctggctgccaggccgacctgcacaaagatggttgtccctgtgggaggggcacagacattgtgcaggttgcacacaaaaacagaactag

SEQ ID NO: 923985 - DNA, 120 bp, Artificial Sequence
  ENSG00000250060_8 (sequence is synthesized)
caaattggaacaacagtgacagtgttgattatgaagcaaatgaagaagctcaaaaggaaggcattttcttggagtgcctcaaagaattctgccctttaattatctgccctctcagtgtag

SEQ ID NO: 923986 - DNA, 120 bp, Artificial Sequence
  ENSG00000250060_9 (sequence is synthesized)
agagagtgagatatcactggaaaacactggagggccatttgtggtgacacagaagcctctcatacagacaggaagcaaatgaatggcaggggatgtgagtttggatggaagggctgtcat

SEQ ID NO: 923987 - DNA, 120 bp, Artificial Sequence
  ENSG00000250060_10 (sequence is synthesized)
ggggattcagattggattctagagtcaggtgcattgtggtccttgcctgatgcaggaggtttggactcagatttttctgaagacaacataagcagagaaacaaggtgtgaagacaagctt

SEQ ID NO: 923988 - DNA, 120 bp, Artificial Sequence
  ENSG00000250060_11 (sequence is synthesized)
gtttgaggatgttggcaccatgacaaagttatttactgtaccccatcccagtgcccagatgaacaatatgaacatgatagggatgcagttcacatgtgttccattttagagtttgcttta

SEQ ID NO: 923989 - DNA, 120 bp, Artificial Sequence
  ENSG00000250060_12 (sequence is synthesized)
aaaatttatatccatgtcataaccttctgattaggatttgagagaactgattgtcaaagtgaactatatttttaggaaagtgttattttatattattctgatgctataaaagccaagatt

SEQ ID NO: 923990 - DNA, 120 bp, Artificial Sequence
  ENSG00000250060_13 (sequence is synthesized)
gctaaactgaaggactctgtaacgtgagaagcatatcatattctaagtatccctaaggtgtctctcttgacctcagcactaacagctggtaatggcagggattgctgttatttcacatgt

SEQ ID NO: 923991 - DNA, 120 bp, Artificial Sequence
  ENSG00000250060_14 (sequence is synthesized)
gacccacgatggtgagacatactcacccacccagggcgagggggaagaggggagattgccacatatttccagctggcatagcaattgtagtattaagaaggtgaaagattcatatctaat

SEQ ID NO: 923992 - DNA, 120 bp, Artificial Sequence
  ENSG00000250060_15 (sequence is synthesized)
caaataacctcagataagtgtgtcctgggctgttgtccctgtggctttaacaagtcacttggtgatgcacaaactgaatgcagctgaactctgcccagggctgtgatgactgcttttcat

SEQ ID NO: 923993 - DNA, 120 bp, Artificial Sequence
  ENSG00000231460_0 (sequence is synthesized)
tagtatgtggacttgcctttcaccgaaaggggggaaaagttgtgaaaattgacaccagtgtgaatttataccgtggcaaccacgcaagagaaagaggcaggaattagcaccatggacaga

SEQ ID NO: 923994 - DNA, 120 bp, Artificial Sequence
  ENSG00000231460_1 (sequence is synthesized)
gacgagcagccctcaaattaagatttgcaaagcttgagacggtgttttctgtccctttctgtgagacacggaaactgcgtgtcttgggaatgttttattccacgggactttgcggaaaag

SEQ ID NO: 923995 - DNA, 120 bp, Artificial Sequence
  ENSG00000231460_2 (sequence is synthesized)
actgtcctactccacagaaactcatttattttgaattaggctggcatttcttaggactcagccatcatgacaaactgtcaggagacttagagccccgaactcgctgtgcaccttccactg

SEQ ID NO: 923996 - DNA, 120 bp, Artificial Sequence
  ENSG00000231460_3 (sequence is synthesized)
tcctgttttacatacactcccttgccggcgtgagctcgcctttcttcagagtgttcatgaaaaataaatgcaaatccaggtagtcttcgaaaagtctggtaaacctgctccagagttttt

SEQ ID NO: 923997 - DNA, 120 bp, Artificial Sequence
  ENSG00000231460_4 (sequence is synthesized)
aatcctcgaatatcccagctggaattgcagcaaaaatgcctgcctgctcacccttgctccctccccccgttcttctccctgctccctccaccccctagcaaaggggtaaagccttttact

SEQ ID NO: 923998 - DNA, 120 bp, Artificial Sequence
  ENSG00000231460_5 (sequence is synthesized)
ccgctgcagagatggagatggcttgagaggtcctcaacagataatcacttgaatagtgatagggccacgggagagattccagaatgatttttagaatagcctaagaagttgtcatccaca

SEQ ID NO: 923999 - DNA, 120 bp, Artificial Sequence
  ENSG00000231460_6 (sequence is synthesized)
ggaaagaatctacatagctacttacaggaataacagttatttttcaactccctcctccctttacccaggtacattgcatgccctggatatggtacaaaggacaaaacctgcaatgtaccc

SEQ ID NO: 924000 - DNA, 120 bp, Artificial Sequence
  ENSG00000231460_7 (sequence is synthesized)
attagataacctggctgccatccaccgccacttcctacatctcacttttctcttttatgcatgaatactttttcacttaaagattttgatcaggagtgacccggctaatgtgccgagttc

SEQ ID NO: 924001 - DNA, 120 bp, Artificial Sequence
  ENSG00000231460_8 (sequence is synthesized)
aggaagtcagagctgcaaggttcttttgaaaccagacaataacgtagttcccttcgcctcccttccctgcacctctcccctgcttactgccaactcccacccactttaaatgcatcaagc

SEQ ID NO: 924002 - DNA, 120 bp, Artificial Sequence
  ENSG00000231460_9 (sequence is synthesized)
ctattaccatcccaagagtatcaaacatataaatacagaacttgtccactgaccatagtagagagaaaaacaaaattagcactactggtttgtacgggtttctttttgttgttgtttaac

SEQ ID NO: 924003 - DNA, 120 bp, Artificial Sequence
  ENSG00000231460_10 (sequence is synthesized)
gaccccctcctcccagcccccaaccctttgtgtgtgaggattccccttcaaaccacccacagaccgagcagacgagaagaaatggtaattttcggtttaaaagttcacttaccacggcaa

SEQ ID NO: 924004 - DNA, 120 bp, Artificial Sequence
  ENSG00000231467_0 (sequence is synthesized)
ctggcaggaggcaggttcccggaaagggggaagcccgtgcttcggtggcagcccgtgagagtggcttctgcgaaatggagcagccatggccagatctcacgggccaagtccctctaccac

SEQ ID NO: 924005 - DNA, 120 bp, Artificial Sequence
  ENSG00000231467_1 (sequence is synthesized)
ccctgcgggttcctgtgagcgggggtgaagccagccatccccagcctagacagcacaggcctgacatcactgaaccagcatgtcaccccagcagcacaggcctgatgtcacactccatca

SEQ ID NO: 924006 - DNA, 120 bp, Artificial Sequence
  ENSG00000231467_2 (sequence is synthesized)
gcatatcaccaccaaatgcaaagccctgaaggcactgcttcgccatatcacccccaacagcacaggcccaaagtcactccccatgttacccccaacagcatagccctagatcatgccatg

SEQ ID NO: 924007 - DNA, 120 bp, Artificial Sequence
  ENSG00000256381_0 (sequence is synthesized)
atttctactattatgccataatatagaatcagtgggagtcctgtcttcctgcaactagatggtctcatctggggatggtgggagacagcgacagatcatcaggcactagattctcataag

SEQ ID NO: 924008 - DNA, 75 bp, Artificial Sequence
  ENSG00000256381_1 (sequence is synthesized)
ggagacagcgacagatcatcaggcactagattctcataaggagtgcacaacgtacactttccacaatagggttca

SEQ ID NO: 924009 - DNA, 120 bp, Artificial Sequence
  ENSG00000256381_2 (sequence is synthesized)
atacgggaaggggacattttgccaatggattccacttaaagcagcagagcgacacttcagtaaacagtaggggcaagatagagtggaaacagccaagatttcaagcctagtaataagcaa

SEQ ID NO: 924010 - DNA, 120 bp, Artificial Sequence
  ENSG00000256381_3 (sequence is synthesized)
cttctacatccctactcatcacaggcctttttgtctatcccagaaacacatacttttcctgaaaaaacaaagcactggaaggattaccaagtctagaaagaacccgccctccccaaacta

SEQ ID NO: 924011 - DNA, 120 bp, Artificial Sequence
  ENSG00000255727_0 (sequence is synthesized)
atcctgttacaacatcacctccacaaggacagggaatttgcctgtgttgttcactgttatacccactccacttcctaggaaatgcctagaaatagaaggaactcagtaaatacttcctgg

SEQ ID NO: 924012 - DNA, 120 bp, Artificial Sequence
  ENSG00000255727_1 (sequence is synthesized)
aacagaaaccccaatcgttcatgaattctcagagcatccctttctgtgataatagagtggagaaaaacttcctgtgggtctgcaatcctatccccgcacagaaaggctgtcaccatttga

SEQ ID NO: 924013 - DNA, 120 bp, Artificial Sequence
  ENSG00000255727_2 (sequence is synthesized)
ccaaaagggaggaccaggacagaaggaccataagtcaatggttttctttagtgtgctgccagcagaatcagaatcacctggaagctggggacatggatggacttggaagccattatcctc

SEQ ID NO: 924014 - DNA, 79 bp, Artificial Sequence
  ENSG00000255727_3 (sequence is synthesized)
tgcatcagggggaacaagacacactggggcctgttggggcatgggaggaggaagagcatcaggaataatagctaatgga

SEQ ID NO: 924015 - DNA, 120 bp, Artificial Sequence
  ENSG00000255727_4 (sequence is synthesized)
ggaggaagagcatcaggaataatagctaatggattctgcgcttaaaacctaggtgatgggttgatctatgcagcaaaccaccagggcacacattcacctatgtaacaaacctgtacagcc

SEQ ID NO: 924016 - DNA, 120 bp, Artificial Sequence
  ENSG00000255727_5 (sequence is synthesized)
tgcacaggtacccctgaacttaaaattaaagttgaagtaaaaataaaaagaaaaagtctgtgaaccctttaacccctgaccaaagggaaaaagaataaaagaaggtagcaaaaattagag

SEQ ID NO: 924017 - DNA, 120 bp, Artificial Sequence
  ENSG00000255727_6 (sequence is synthesized)
gaaggtagcaaaaattagaggagagctgactcataattctaaatgatgtaagaattcaaaactaaacaatcctaataattattctaaataaaataattctaaataataagtgtagtaaca

SEQ ID NO: 924018 - DNA, 120 bp, Artificial Sequence
  ENSG00000255727_7 (sequence is synthesized)
tgatctcttatgatgtcctacgtcctgttttagtcactttaattgtattaacttgcttaatctttataacttccatccattttataaataaaaaaactggcacaaattgtccaaatgaaa

SEQ ID NO: 924019 - DNA, 120 bp, Artificial Sequence
  ENSG00000284376_0 (sequence is synthesized)
tcactatcactaccaacatgtaatagctcaccaaaatgttgtatttcaactgggcagataaaacagatgctaataacctcaagagaagaatgttccttacagaagaaggaatatttccca

SEQ ID NO: 924020 - DNA, 120 bp, Artificial Sequence
  ENSG00000284376_1 (sequence is synthesized)
aactatacaaaagcattacaaggaaagagaactacagaccattattcctgatgtacaggccctgtcttcttccaagtcttttgtcttcagtggtgtctgcatgaagtggaatcattttcc

SEQ ID NO: 924021 - DNA, 120 bp, Artificial Sequence
  ENSG00000284376_2 (sequence is synthesized)
caagcctgccaaatcaagaataaactcatctaagaagggtggagaagcctatctgaagggatggttacccatattgtgaaaaaactgtaaatgctttcaattaaatgatgatataatata

SEQ ID NO: 924022 - DNA, 120 bp, Artificial Sequence
  ENSG00000284376_3 (sequence is synthesized)
ccgccaggcttgtagctcagtcaccaccgcaccgcgcccaagcagctgccgccaccgccgccatgagttgtccggtccagcatttcttgtaatgcacatctggtgtgatggttcttctgc

SEQ ID NO: 924023 - DNA, 120 bp, Artificial Sequence
  ENSG00000284376_4 (sequence is synthesized)
cagcctgccgccatgggattgctctgtataagaagacaggtgcattctggaaacttgaatcactaaggggaggagcttcaattttgatcccagatataagaatgttccttacagaagaag

SEQ ID NO: 924024 - DNA, 120 bp, Artificial Sequence
  ENSG00000284376_5 (sequence is synthesized)
aatttctaagcagcaaagtgttcaagaagtgacatggctgcttctaacagcctacgcttatatgtgtgagcaaaaaatcaacctaagttggaacttatgtttaaaggggaagtaaagcaa

SEQ ID NO: 924025 - DNA, 120 bp, Artificial Sequence
  ENSG00000284376_6 (sequence is synthesized)
acctaagttggaacttatgtttaaaggggaagtaaagcaaaagtttggagaatttgcagcctggtaatgtggtaagaaaagaaaagcccattttcaggggaagaattcaagcagggctta

SEQ ID NO: 924026 - DNA, 120 bp, Artificial Sequence
  ENSG00000284376_7 (sequence is synthesized)
gaaatttgtgtaagtaaaaaagagccaattgctaattgccaagacaatggggaaaaggtctggaaggcatttcagagacctttgcagcagcccctcctatcacagacccagaggcctagg

SEQ ID NO: 924027 - DNA, 120 bp, Artificial Sequence
  ENSG00000284376_8 (sequence is synthesized)
aggggaggatggttttgtggtccaggcccatgaccctggttaccctgcatggcctcaggacactggtccctgcatcgtagccactccagcttcagccatagctcaaagggcccaggtatg

SEQ ID NO: 924028 - DNA, 120 bp, Artificial Sequence
  ENSG00000284376_9 (sequence is synthesized)
gtttgggctgctgcttcaggaggtacaaactgtaagacttgggaacttccacatgatgttaaacttgtgagggcaaaacgtgcaagagttgaggcttggacacctctgcctagatttcag

SEQ ID NO: 924029 - DNA, 120 bp, Artificial Sequence
  ENSG00000284376_10 (sequence is synthesized)
gagggtaaacgtggggttggagcaccccccaacagagtccccactgggacactgcctactggagctgtgagaagagtgccatcgtcctccagaccccagaatggaggatccactgacagc

SEQ ID NO: 924030 - DNA, 120 bp, Artificial Sequence
  ENSG00000284376_11 (sequence is synthesized)
ttgcaccatgcacctggaaaagctgcaggcattcagtgccatcccatgaaagcagctgcaggggctacaccctaaagatccacaggtgcagagctgcccaaggccttgggagatcatccc

SEQ ID NO: 924031 - DNA, 82 bp, Artificial Sequence
  ENSG00000284376_12 (sequence is synthesized)
cacaggtgcagagctgcccaaggccttgggagatcatcccttgcataagtatgccctagatatgggacatggagtgaaagga

SEQ ID NO: 924032 - DNA, 120 bp, Artificial Sequence
  ENSG00000284376_13 (sequence is synthesized)
tggttgatttctcccttttggaatgggagtacctacccaatgcctatacccccattgtatgtttaaagtaactaacttgtttttgattttgtaggctcatatgtggaagagagtagcctt

SEQ ID NO: 924033 - DNA, 120 bp, Artificial Sequence
  ENSG00000284376_14 (sequence is synthesized)
tcatatgtggaagagagtagccttgtgtcagatgagactttggacttttgagttaatgcagaaaagagttaagacttagagggactgttgaggagggatgattgtattttgcaatgtgag

SEQ ID NO: 924034 - DNA, 120 bp, Artificial Sequence
  ENSG00000284376_15 (sequence is synthesized)
ggagtggaataatatggtttggatctgtgtccccatcaaatctcatgtcaaattctagtccccactgttggaggtgggaccttggaggtggatttctcatgagtggtttagcaccatcca

SEQ ID NO: 924035 - DNA, 120 bp, Artificial Sequence
  ENSG00000284376_16 (sequence is synthesized)
atctggttgtttaaaagtgtgcagcaccttcccccttgctctgtattctttctgctctggccatgttatgtgtttgtttcccctttgccttctgacatgattggaagcttcctgaggtct

SEQ ID NO: 924036 - DNA, 83 bp, Artificial Sequence
  ENSG00000284376_17 (sequence is synthesized)
ctgtattctttctgctctggccatgttatgtgtttgtttcccctttgccttctgacatgattggaagcttcctgaggtctccc

SEQ ID NO: 924037 - DNA, 120 bp, Artificial Sequence
  ENSG00000284376_18 (sequence is synthesized)
aacctgaccagtgatggttcttctgccagcctgccgccatgggattgctctgtataagaagacaggtgcattctggaaacttgaatcactaaggggaggagcttcaattttgatcccaga

SEQ ID NO: 924038 - DNA, 120 bp, Artificial Sequence
  ENSG00000284377_0 (sequence is synthesized)
cctggggctgggaggaaagttatttgcagaggagaacaagatcaggactcttcctaacaaaggctgagtaagaaactgggtttctgacctctctaccccagcaagctcagagtcccctgc

SEQ ID NO: 924039 - DNA, 120 bp, Artificial Sequence
  ENSG00000284377_1 (sequence is synthesized)
ctttcctctgttctggctctgtgtgtttgcattactcactctgtggttagaagttcaggcccacagacagaagggattagccttatctcagatgagattttggacttggacttttgaatt

SEQ ID NO: 924040 - DNA, 120 bp, Artificial Sequence
  ENSG00000284377_2 (sequence is synthesized)
aatccttcaatgaccatagtttaagaagagatatcttgaaaacacggaaagagaaaagtcaatacaatatttcctaattttttaagaggtcagagaagggagttactgtgtggcctggag

SEQ ID NO: 924041 - DNA, 120 bp, Artificial Sequence
  ENSG00000284377_3 (sequence is synthesized)
caggtgattctgactaccaagggaaaattggagtactactccacaatggagggtctgcaggatggacccggcagctggtgccctgtgtgaggaacgctgcaacggactgcgacagaaccc

SEQ ID NO: 924042 - DNA, 120 bp, Artificial Sequence
  ENSG00000284377_4 (sequence is synthesized)
tcgaaaacgaaggtgaagagactgtgcagtcatgtgacagacacatcaaaccataccatggcgtggctaagacccaagctggtatcaaaaataaaggaaacgacgctgcaggacccgcag

SEQ ID NO: 924043 - DNA, 120 bp, Artificial Sequence
  ENSG00000284377_5 (sequence is synthesized)
ccccagacgatgtggcttcctccgatgacacaggccccagacattacctgggggaagctgaagaagacaactcaggaggccgagtgaatccttctctggacacagacaccatcactccag

SEQ ID NO: 924044 - DNA, 120 bp, Artificial Sequence
  ENSG00000284377_6 (sequence is synthesized)
ttctctcactttgcctgcaactcatacctgctacattctattgggcccatcttctaagatctgcctttcttccaacctgttaccttggcagacacccccttcccatcctctaataatgta

SEQ ID NO: 924045 - DNA, 120 bp, Artificial Sequence
  ENSG00000284377_7 (sequence is synthesized)
actgcttagctgggaggggttgacatgcccccagtggggttccttaataatggcacacattgaactgaggtgccaagtaacactacatatctctccttgattggaaaagaataatagtga

SEQ ID NO: 924046 - DNA, 120 bp, Artificial Sequence
  ENSG00000284377_8 (sequence is synthesized)
ctatactaatgtttgacttatgttatttactaattctaggatgcaaagccggaacacgagctgtaaccgctgcgcctgtcaaatctgtcactgcacacatctgtactattcaatcaacaa

SEQ ID NO: 924047 - DNA, 120 bp, Artificial Sequence
  ENSG00000284377_9 (sequence is synthesized)
aacccgatgctaaaaacagaaaagggggagacgcgggagatcggtcagagtggtaggagaaggtatagggaaaggaacagaccttctgaaaggcgggaaggctctggatagcttcaggga

SEQ ID NO: 924048 - DNA, 120 bp, Artificial Sequence
  ENSG00000284377_10 (sequence is synthesized)
tgaataagctgaaggcagctgttctcttaccctgaggcagagggcaaggggtaggtaaggaagtataggggaatttggcataaacaggcttgtttacttacattgtccggaaaccgactt

SEQ ID NO: 924049 - DNA, 120 bp, Artificial Sequence
  ENSG00000284377_11 (sequence is synthesized)
tgatcatcagggcaggagactgctccctgaaagggggaataataatgttaattacccacagattgtgttggctccaggctttcattattttgtctgtactgaataaaagcaagcagctcc

SEQ ID NO: 924050 - DNA, 120 bp, Artificial Sequence
  ENSG00000183822_0 (sequence is synthesized)
cacccagaccggcaggctgagcaggctctgtgtgggtgagacagcagaaccggtggggtagtcagcagaaagatctggacaccccagcctagatgtcccgtccccgagccctgacatcag

SEQ ID NO: 924051 - DNA, 120 bp, Artificial Sequence
  ENSG00000183822_1 (sequence is synthesized)
ccctcctctctttactaatgcatgatgcctgataacagaaatgcgttgtttaaaagaataagaaaactcagcatgctgaaggtaacacttcacaagctctgctcctgggtccaaggtcag

SEQ ID NO: 924052 - DNA, 120 bp, Artificial Sequence
  ENSG00000183822_2 (sequence is synthesized)
gagagggaccaggggcttgagaagagtccatttggaaaagacttaaagttctccagaaacagcagtaatggtgatgacaactaacatgacccggcggtgactttaccagtattcctccca

SEQ ID NO: 924053 - DNA, 120 bp, Artificial Sequence
  ENSG00000183822_3 (sequence is synthesized)
cagatgaggaaactggagcttggagggaatgaattgctggacgtcacagagatgagctgggacttgagtttcatgcttctcattccagagggtgccctagcttcgcctccatcacatggc

SEQ ID NO: 924054 - DNA, 120 bp, Artificial Sequence
  ENSG00000183822_4 (sequence is synthesized)
gggaccttgggctggccaggtactttccctttgcccatgcagtgctgctggtggcaacagcttccatgtcatacaggagggaacggaggctcggaactgccaaagctccacacggataca

SEQ ID NO: 924055 - DNA, 120 bp, Artificial Sequence
  ENSG00000183822_5 (sequence is synthesized)
cccttgtagagagactccccccatggaagggtcacctcaaccactttctgctggttcccttgcagacatttcaaactttgtcacctattcaaagatggctttctacggactacatgagca

SEQ ID NO: 924056 - DNA, 120 bp, Artificial Sequence
  ENSG00000183822_6 (sequence is synthesized)
accaacaagctaacccattgggtgccatgaaaaaacatgaagcaacagccacataggagaggggattccgcacttggagatgctggtcctacctgacggatgaagacccctggtgggagg

SEQ ID NO: 924057 - DNA, 120 bp, Artificial Sequence
  ENSG00000183822_7 (sequence is synthesized)
tcacctggctcccatctgtcgagggctgtcagtcctacacctgtcctctcacaggctaagccaatctgcaagcccatttgaatgaaggtgtcatgtggtgaaccactgttttacatgcca

SEQ ID NO: 924058 - DNA, 120 bp, Artificial Sequence
  ENSG00000183822_8 (sequence is synthesized)
gaatcttttttggataagtgcaaagaaatgcctgaagtgacctctcacttatggagacctgatttttgataacctccacatcccacagcctgtgaataaaccaaaaaaagagaaaagcca

SEQ ID NO: 924059 - DNA, 120 bp, Artificial Sequence
  ENSG00000257386_0 (sequence is synthesized)
ggctgtgcagctcctcctgcccagggcttcagagcttgctccagcttactcctcgaagccacaggaccagtctatgttattgtcctggccactttcagactctcattttgcagctactgg

SEQ ID NO: 924060 - DNA, 120 bp, Artificial Sequence
  ENSG00000257386_1 (sequence is synthesized)
cgctgcagctgctgatcaggcccattcccaggttctccgggaagggagcaaagcgggaggcggcacgctcctttgtcttccactggctgaatgccaaaatccttcacgctaccagtctct

SEQ ID NO: 924061 - DNA, 120 bp, Artificial Sequence
  ENSG00000257386_2 (sequence is synthesized)
gcgaactccaggtagaagtagccacacttgactgcccggtgcacctcaaagcagaatcccaaacaagaatcctctatcaggtctacgtaaatctcctgagcgatggcctctagcttgtta

SEQ ID NO: 924062 - DNA, 120 bp, Artificial Sequence
  ENSG00000256034_0 (sequence is synthesized)
caccgctttgctcccccaggaacaccagcttgaatttcctcagcggattcccgaagtctccgcccgtggacattgtggaactagaggagcggccgccgcctcagcctagagacctcccgg

SEQ ID NO: 924063 - DNA, 120 bp, Artificial Sequence
  ENSG00000256034_1 (sequence is synthesized)
agtagcctagcaccgagcgaggcccgcggctgggaagggaaggagggcggtgtcggcaggagccaggggtgtcctctggcttcccaaagctagggccgttccctccttccgcactcggct

SEQ ID NO: 924064 - DNA, 120 bp, Artificial Sequence
  ENSG00000256034_2 (sequence is synthesized)
cccagacctggggaagagaagctgagggtggcggagccggaaccgcagacgtatctgggacctctcacgcgcagcgcctgagcttccacagctgccgccgccgccgcagcccaacctgct

SEQ ID NO: 924065 - DNA, 120 bp, Artificial Sequence
  ENSG00000253608_0 (sequence is synthesized)
gggaggctgcgtcgtcctatcacagtttgtcttctcctgaggaagtggatgccatgtgtcactttgcagatggatcaagtgcaggaggtgcctgttggagacgcagagctctgcagcagc

SEQ ID NO: 924066 - DNA, 120 bp, Artificial Sequence
  ENSG00000253608_1 (sequence is synthesized)
tgcacatggctctcaggctccgtgaaaagcttgcagtgagctcagccactgaaaagtcactacgaagatggaaagcaaaatgaaaaccgagtcctcggtaccctatgtttatctgtctct

SEQ ID NO: 924067 - DNA, 120 bp, Artificial Sequence
  ENSG00000253608_2 (sequence is synthesized)
aagagaacatccttgggtttatttatgatttgagtacttcataagaaaagtagtataaaatagaaaataatgtgttgatgtcctatataagtgaatctactcaatacaatttataaagca

SEQ ID NO: 924068 - DNA, 120 bp, Artificial Sequence
  ENSG00000253608_3 (sequence is synthesized)
gaggaaattctggagggcagacacgttctgtctctagcttagctctcactcgttaagaatcaacatcgtcatcccaagtaggagaccagagtctgtaatctcagagaggctgagatgctg

SEQ ID NO: 924069 - DNA, 120 bp, Artificial Sequence
  ENSG00000253608_4 (sequence is synthesized)
ccctccagtgtgatgtttgtcttctcctgaggaagtggatgccatgtgtcactttgcagatggatcaagtgcaggaggaagtgagttcactcccagactctcctaggacctcagtcttaa

SEQ ID NO: 924070 - DNA, 120 bp, Artificial Sequence
  ENSG00000253608_5 (sequence is synthesized)
gagcgatcacagctgcctgttaaccagcctgaatgcaaaaagtgaaaaagcattgccttcaactggaaaagaagggcacctttgaaggagctgctgcagagaggtcattggaggaaatct

SEQ ID NO: 924071 - DNA, 120 bp, Artificial Sequence
  ENSG00000253608_6 (sequence is synthesized)
agtctagaccactgatgggctgaattcctatgagtggggatgagaccctcaatctccctgtgccactcgggggctcttcgccttgtgccttgccttgagaatgcgagcttctccagagaa

SEQ ID NO: 924072 - DNA, 120 bp, Artificial Sequence
  ENSG00000253608_7 (sequence is synthesized)
gctgtggcttcccgtgtctcagcacccagtgcgcttcccagcgcccagcacgctgatttgaaactctctcaataagtgtgccaatgaagttttgttgataaataattaagaaataaatga

SEQ ID NO: 924073 - DNA, 120 bp, Artificial Sequence
  ENSG00000253608_8 (sequence is synthesized)
gaatagtctctctggtgcacgagccttcctattcgctctcagtgaattcttggtttgaaaatgcagtggtgtggtagaccagaaacaaggtcagaactccagtacagaatagacaggttt

SEQ ID NO: 924074 - DNA, 120 bp, Artificial Sequence
  ENSG00000253608_9 (sequence is synthesized)
tggaagtggctccagccagcgccaagagaccctgggaggtttgcactgtgtgctctgcaggggccaggtatccttcatcacagcagcagcctgcgtggcccagcacagcctgcaactgca

SEQ ID NO: 924075 - DNA, 120 bp, Artificial Sequence
  ENSG00000253608_10 (sequence is synthesized)
gaaacagagctcaccgtggctgctccccatttacagtttatgccaaaatctaggtcacttgagttctcaagtgagttcttaatcagggagtacatggataaggcctattttaatgttttt

SEQ ID NO: 924076 - DNA, 120 bp, Artificial Sequence
  ENSG00000253608_11 (sequence is synthesized)
acaggccaagaaccccaaacatgccatcggagagcagccagggcccccaggattgaccctgatccctgtctctcttcaggccactgcctcccccaaccccaggatacctcaggcctggca

SEQ ID NO: 924077 - DNA, 120 bp, Artificial Sequence
  ENSG00000253608_12 (sequence is synthesized)
cttaggcccacagcggagggcatgttcccccacttcgacctaccccaagacaggcctctccttgtgaatactgacaatggaaaatgtttccttctgccaagggaatcccgtggccctcac

SEQ ID NO: 924078 - DNA, 120 bp, Artificial Sequence
  ENSG00000253608_13 (sequence is synthesized)
aggagtgtgggtttggccttgggtctgaatagatggctgcatgactgcctggggtcatgccgctcagaggctgagtgctctagcctgcaggaatagtggggatgggggtctacacaccaa

SEQ ID NO: 924079 - DNA, 120 bp, Artificial Sequence
  ENSG00000253608_14 (sequence is synthesized)
gccctggtggactgtgttgggtggggcagtgtcttcctcagtctgttgtcaaggaggctgtaaaaatactgtggctcaatctcgtccatggctacagagctgcatgcagaagccaaaggt

SEQ ID NO: 924080 - DNA, 120 bp, Artificial Sequence
  ENSG00000253608_15 (sequence is synthesized)
gcctggttttgccttagtatttttcacgtagaaagagaagagacaagtacattcgtttagaagaaactcaccaggaaaagcaagcacggactgactttttaggcatgtgagctggatggg

SEQ ID NO: 924081 - DNA, 120 bp, Artificial Sequence
  ENSG00000253608_16 (sequence is synthesized)
aggaaaggcagtggttgggtggaggaggggatgactgttttgctcagagcctccttcagttcaattagtccgtcttccatcttcacctgcacctgtagacaccgcttcctggagctgttc

SEQ ID NO: 924082 - DNA, 120 bp, Artificial Sequence
  ENSG00000253608_17 (sequence is synthesized)
tgtgcagaagttgagtgaagatactgcagcgagccctgggtctgaacgcctgtgtgctgactctagacctgctcctcagccccagttttctctgaaaaaccaggattctagcacaactcg

SEQ ID NO: 924083 - DNA, 120 bp, Artificial Sequence
  ENSG00000253608_18 (sequence is synthesized)
tacccccattcttttcagtcctgcacccaccagcgagccgcaaggcccaggagctactggccctgttttcctgtctccagtactggcctttgatttatgagatgtcccctgtctcccctg

SEQ ID NO: 924084 - DNA, 120 bp, Artificial Sequence
  ENSG00000253608_19 (sequence is synthesized)
cttctgacctcccaggatggcatttggtgatttcttgatgttctcttgctttggcattaaaatatggatgggagtgtcatttccagatcttttccagacctgtgcaattctttccattct

SEQ ID NO: 924085 - DNA, 120 bp, Artificial Sequence
  ENSG00000253608_20 (sequence is synthesized)
tcataacagcccatgacccaccttcctctgtttcagccacaaagctagccatgcctgtgtgcgcactgctgtttctcattgttaatattttaactgttattaaaaaaaaaactttctttt

SEQ ID NO: 924086 - DNA, 120 bp, Artificial Sequence
  ENSG00000253607_0 (sequence is synthesized)
aggccccacttccttctgaggagagctcccttctggccaggcctatttcaagtttgagggatgaagaatccacacaatggggctgacagtgaccaaactagaggagacatatatactcca

SEQ ID NO: 924087 - DNA, 120 bp, Artificial Sequence
  ENSG00000253607_1 (sequence is synthesized)
gcccaattctgcactgaaggacaaggactgctgcaaaagaaatgagtgagaccctcaaaataaatgaaaggcacacagctcagccactaaggagatggacaagccatgtcaacctctgat

SEQ ID NO: 924088 - DNA, 120 bp, Artificial Sequence
  ENSG00000253607_2 (sequence is synthesized)
ggtaacactgctacttatacctcaggatgttgtgaggattaaaaattgagtaagctaagtgcctggtgcagtcctggcacagtcactaagcatttactatctttatgcagtttctttttg

SEQ ID NO: 924089 - DNA, 120 bp, Artificial Sequence
  ENSG00000253607_3 (sequence is synthesized)
taatgctaactgccctccaaattcctccaaagtaaacacatggattagtaaatgagaaagaaacaatgcttaaaacaactatgggtaacatacctgtttcaagtcgcgtagaatactgat

SEQ ID NO: 924090 - DNA, 120 bp, Artificial Sequence
  ENSG00000253607_4 (sequence is synthesized)
ataagaaatataaattgaccaaataaagaaatccagttcctggacccacagggaaataaaaggtggcagtgattggcctccaaatctgtccagatcaaaataaacacagctgttagtttc

SEQ ID NO: 924091 - DNA, 120 bp, Artificial Sequence
  ENSG00000253604_0 (sequence is synthesized)
attaaaggaggatctggtaggtgcaaagctttctgctaacaccttcagcactttgcattctttattttctcatttatctcttggcattttgttgttgcccgtatccccacgacccacgaa

SEQ ID NO: 924092 - DNA, 81 bp, Artificial Sequence
  ENSG00000253604_1 (sequence is synthesized)
ttggcattttgttgttgcccgtatccccacgacccacgaatccagagagtctcgctctgttgccaggctggagtacagtga

SEQ ID NO: 924093 - DNA, 120 bp, Artificial Sequence
  ENSG00000253604_2 (sequence is synthesized)
ggaaagagagaaagagagagagggaaggaagagagagaaggaaggaagggagggagagagagagacaggaaggaaggaaggaaggaaaagaaaagagaaagagaaagaaagaaaagaaag

SEQ ID NO: 924094 - DNA, 69 bp, Artificial Sequence
  ENSG00000253604_3 (sequence is synthesized)
gattgattttaaggaattggatcacacagttgtggaggccagcagatccaaagtctgcagagtccagag

SEQ ID NO: 924095 - DNA, 120 bp, Artificial Sequence
  ENSG00000253603_0 (sequence is synthesized)
agaggcggtcgcacaagggcgagctggagcactagtggagttggcgggaaaggcacggctgcgggcgccccctgtccgcacggaggagccgaagtcccgcagggtggggtccccgcctgc

SEQ ID NO: 924096 - DNA, 120 bp, Artificial Sequence
  ENSG00000253603_1 (sequence is synthesized)
gccgagagggccacctggtcgagagaacaggcgacacggaaacctgagaaactcctctgtctggtgcacctaaccctcttcctcataaagtgcacacgaactctggtttttccgttgcaa

SEQ ID NO: 924097 - DNA, 120 bp, Artificial Sequence
  ENSG00000253603_2 (sequence is synthesized)
tctacatctatttctggaaaggacctgaacttggcttctcgtccttctggaaagtgaggcgaaaatgccaggctgcgcagctatcctgaggcccggcctggaacctggctagccacccag

SEQ ID NO: 924098 - DNA, 120 bp, Artificial Sequence
  ENSG00000253603_3 (sequence is synthesized)
tcctgatacctcatctcctttctgttggataaagtcattggataagatcccccagggtcttcttaatactgaacatctgttcataatcacataagtgaccaagtatagtggaaaacccga

SEQ ID NO: 924099 - DNA, 120 bp, Artificial Sequence
  ENSG00000279622_0 (sequence is synthesized)
tacatgccaggcaatggaagcccagacagggtaagaggcatcagccaaggcgtggagatggccattggccagtgggctctgtggatctgggcctcagagaggcaagagctgaagacgtgg

SEQ ID NO: 924100 - DNA, 120 bp, Artificial Sequence
  ENSG00000279622_1 (sequence is synthesized)
cgtggggcagggggcacacatgcagatggcgtgaaacaaggggagaaagccatgtgaaggtgaggtggagacttgagtgtcctgggatacgtcggcatctatcatccatcatctgtctat

SEQ ID NO: 924101 - DNA, 120 bp, Artificial Sequence
  ENSG00000279622_2 (sequence is synthesized)
agtcgaggcagaagagcttggccttccatgcatggacagccacctcccatgcctaatgacagctctgggctctgggagcaagaactcaactaaagccctacacttggtggctgagtccca

SEQ ID NO: 924102 - DNA, 120 bp, Artificial Sequence
  ENSG00000279622_3 (sequence is synthesized)
gcctggtgcagttggaggactcaaaggcacggggcggtgccctagaaagacgcagctgtcagtcagcggtgcggaggtagagctttcgctgctccctgcctccccccacccaccccgttt

SEQ ID NO: 924103 - DNA, 120 bp, Artificial Sequence
  ENSG00000279622_4 (sequence is synthesized)
tgggagcggctgggtttgtctcccctggaatgcatctgtgttcttcctgatggctcctggatgtcaggaagcaccacgccatttccagcttctcaggctcatggcttaaaaggaccccag

SEQ ID NO: 924104 - DNA, 120 bp, Artificial Sequence
  ENSG00000279622_5 (sequence is synthesized)
ccaactgttcttcccaagcaagcagacgggatttatggtggcggtttcttcaaagtgcttcttctctacccaaatccagaagcgaaacaaaacagaacacccctttaccttttcgaagcc

SEQ ID NO: 924105 - DNA, 120 bp, Artificial Sequence
  ENSG00000279622_6 (sequence is synthesized)
aggaaaaggaactcctcttattttttaaaaggcccaagagctgcaagcaaatgtcaacttcatcctgtggtttgatttacatgtttctttgggagaaatggacaaaatacagcattgaac

SEQ ID NO: 924106 - DNA, 120 bp, Artificial Sequence
  ENSG00000279622_7 (sequence is synthesized)
ttaaaaaaaaacttacaatgaactgttataactcagaacatgatgcacaaacccagatttaacaaatggagcaaaaaaaaaaaaaaagttcttctgagaggctcctcgtgtgaggctgtg

SEQ ID NO: 924107 - DNA, 120 bp, Artificial Sequence
  ENSG00000279622_8 (sequence is synthesized)
cctgtctggcgaatcatcttggaaatggatgaggttaaaccaagggtcattgagtcccagcactgggattgtctgctccctgctctgaaaaaatggaaaagctacgtccataagaggcat

SEQ ID NO: 924108 - DNA, 120 bp, Artificial Sequence
  ENSG00000279622_9 (sequence is synthesized)
ggatgtctctagagctggccaaatatacgacgcttttttcgagtgcgattttccctaattgtaatattgtacatgatcatgaatgaaaatttgggaaatggagaaaagtagaaagaaaac

SEQ ID NO: 924109 - DNA, 120 bp, Artificial Sequence
  ENSG00000279622_10 (sequence is synthesized)
aatcccctgttcagagagaacctctgttaatctgccgtaaatttcttgtcagccttttttccgtatattttaaaaccaaggtgctgtcatattgtagattatgctttgtattttttaaga

SEQ ID NO: 924110 - DNA, 120 bp, Artificial Sequence
  ENSG00000279622_11 (sequence is synthesized)
aatttaccatggccacgatttttctttctacctccttcctcaacccgaaggtacctggattgattgacaacaccaccggtccagcttcatgaagccaggtaaccgggaagcatctgaccc

SEQ ID NO: 924111 - DNA, 120 bp, Artificial Sequence
  ENSG00000279622_12 (sequence is synthesized)
gcttctctccatcccagtggccaccaccccagtctgagctgctgaaatctctcacccaggctgggaaacagcctccacctggtctccttgcctccacgctggacctgtctacccattttc

SEQ ID NO: 924112 - DNA, 120 bp, Artificial Sequence
  ENSG00000279622_13 (sequence is synthesized)
catgctgccatcagaaggagccttggagatgcaaatctcatcccagcacccttgatgaacacttccatgactgtggccgttgctcctaagataaagaccagattcctcctccaggaagcc

SEQ ID NO: 924113 - DNA, 120 bp, Artificial Sequence
  ENSG00000279622_14 (sequence is synthesized)
tccctgtctttacacacaaaatcccctgcttcaaagccacatgccactgactaccgctgctatttgtgagactcttgtttactccttccctgactctgggaaccactctgtctccagtac

SEQ ID NO: 924114 - DNA, 120 bp, Artificial Sequence
  ENSG00000279622_15 (sequence is synthesized)
tcaatcctgagcattcacttgagaacctcatttgttgatagaatgaatgagaaagctctcattgcacatccgaaaacatgatgttagggcggcattgtgactcccatgatgcatctctga

SEQ ID NO: 924115 - DNA, 120 bp, Artificial Sequence
  ENSG00000279622_16 (sequence is synthesized)
acacccacacaattctggcatctgccatcctaagtgctgaggacggtaccatcacccgcattttgttatcggagaaatagagctggttcttagtctaaagagagatactggggaaacagc

SEQ ID NO: 924116 - DNA, 120 bp, Artificial Sequence
  ENSG00000279622_17 (sequence is synthesized)
tgagcagaaagtaggactagagacagcagtccccgaaaatcccttcaggccttgcttcctgagctgggaggggaactgcggttgccaaaggcagccccggcccccagtgttcttctgctg

SEQ ID NO: 924117 - DNA, 120 bp, Artificial Sequence
  ENSG00000279622_18 (sequence is synthesized)
cgtgactcccggcctgcagtgacgcccacaccctcccactcttatgattgtcgaattgtctattgtcaccactgactggtgagcgagccacccggggcagttttgaaagacagctggcga

SEQ ID NO: 924118 - DNA, 120 bp, Artificial Sequence
  ENSG00000279622_19 (sequence is synthesized)
ggtaagctgaggccacagagccagcccggagacactggcagcatctaaactccctttccttgactacgctttggggctaggtccccaagtccctggaggcagtgcagaaattccacacga

SEQ ID NO: 924119 - DNA, 120 bp, Artificial Sequence
  ENSG00000279622_20 (sequence is synthesized)
aggggtaactggggtgtcaaacgggagcgcctgctgccactccaagctgggacccatctctgccgacacctcggggtgtccctgctgtattcggtgtccttttgtttcaaaaaaataatt

SEQ ID NO: 924120 - DNA, 120 bp, Artificial Sequence
  ENSG00000279622_21 (sequence is synthesized)
ttcctcttagtacatggcaggtggtggggtttgttgctcttgaattggcaaagcaactagaggaaaaaccaacccacgccgtctggaagggaaggaactgtcgaaggctgagacttggat

SEQ ID NO: 924121 - DNA, 120 bp, Artificial Sequence
  ENSG00000279622_22 (sequence is synthesized)
tatccctccttagcatctgggaggcaggcggggagtgaagtgtctcatccgtgaagtggtcatcactctgatccacatcagtcccgttgtgatgaagtttgctgagcacagagccggtga

SEQ ID NO: 924122 - DNA, 120 bp, Artificial Sequence
  ENSG00000279622_23 (sequence is synthesized)
gctgagcacagagccggtgatctggggactgcattgaattgaattgaattgattatcattttcttgagacaggatcttgctctgtcacccagtctctattaaaaatacaaaaaattagcc

SEQ ID NO: 924123 - DNA, 60 bp, Artificial Sequence
  ENSG00000279622_24 (sequence is synthesized)
taattttgagatcactgccatcacactccagactgaactataagagtaaaactccatctc

SEQ ID NO: 924124 - DNA, 120 bp, Artificial Sequence
  ENSG00000171671_0 (sequence is synthesized)
ttttggatcctttgggattcccccacgggagtagtcaactgggcagcaggacacagtctagagtctagtaaactggagctgatctaagcaccagaacctgagctgatggcacaactgccc

SEQ ID NO: 924125 - DNA, 120 bp, Artificial Sequence
  ENSG00000171671_1 (sequence is synthesized)
agtgcccagatgccggctccccgaacacagcccgacctcatcctggttcatccagtgctggccctgtctggacgagccccaagcatcctctgctcggtgccctgggacgcctgtgaactc

SEQ ID NO: 924126 - DNA, 120 bp, Artificial Sequence
  ENSG00000171671_2 (sequence is synthesized)
ctggccacggctatgtggtggaagacacggattctgtggggggttttccttatctctaggactcgcccacctgctcccatgcaaatcctcattttaactctggatcccagtgaaggagag

SEQ ID NO: 924127 - DNA, 120 bp, Artificial Sequence
  ENSG00000171671_3 (sequence is synthesized)
gtgtgttgtaagaagaggaaacctggacagacaggaagaaaccgagtgaggatgacgacagccacctgcaagccaggaggagaggcctcaggagaaaccagccctgggacaccctaatca

SEQ ID NO: 924128 - DNA, 120 bp, Artificial Sequence
  ENSG00000171671_4 (sequence is synthesized)
caggcgtccgcccccacaacggtgagagaatgtttctgataaaaccacccagtttttgatactttcttatggcagccccagcaaacaaaaactggctccatggcctcccctgtcctggcc

SEQ ID NO: 924129 - DNA, 120 bp, Artificial Sequence
  ENSG00000171671_5 (sequence is synthesized)
cctcagtctctacgacctgggcaccttgcaagcacaagaaagggaccctccagttcggggtgcccacacaccttgctttcttccttgagctctggtcaccaaggaggcaaaggggagaga

SEQ ID NO: 924130 - DNA, 120 bp, Artificial Sequence
  ENSG00000171671_6 (sequence is synthesized)
ggcttccaaggggcccatcatttggaaagggaaaaccagcttctgttgccgtggcaactccactgggatgctctgctatttgcacattttgaaattggaggtgggtagtgagaagggaaa

SEQ ID NO: 924131 - DNA, 120 bp, Artificial Sequence
  ENSG00000171671_7 (sequence is synthesized)
gaaagaaaaattgagggagatgagagtatccagggcaaaagaaaggagagaaaagcaaatgaagtttaggaaaaatccagcttcggacaggtgaccctgacagtgcttaatgacctcaga

SEQ ID NO: 924132 - DNA, 120 bp, Artificial Sequence
  ENSG00000171671_8 (sequence is synthesized)
tgagtcccagggccgcggggacttccccattaagtcatggtggctccagccaatgtcagcccaggtcccccactgtcagagaggaaacagaggctcgaagatgagaagtgccctgcacaa

SEQ ID NO: 924133 - DNA, 120 bp, Artificial Sequence
  ENSG00000171671_9 (sequence is synthesized)
ggtcaccttgtgacttggaggattctccaggtaaaagcagccgtattgggggaaggcctctattcttgtaatgaaccaaacgtttgtgccaaccccccaaattcatatgttgaagtccta

SEQ ID NO: 924134 - DNA, 120 bp, Artificial Sequence
  ENSG00000171671_10 (sequence is synthesized)
actcccaacgtgatggttttatgaggtggggtctttgggaggtaagcaagtcataagtgtagaaccttcataaataggattaatgtccttataaaagggacccccaggacctggatatgg

SEQ ID NO: 924135 - DNA, 73 bp, Artificial Sequence
  ENSG00000171671_11 (sequence is synthesized)
taatgtccttataaaagggacccccaggacctggatatggtggtgtgaacctgccaagtttgagaccagcctg

SEQ ID NO: 924136 - DNA, 120 bp, Artificial Sequence
  ENSG00000171671_12 (sequence is synthesized)
agcctggaaaacggagtgagagtgtcttaaagaaaaaggggccctagagagttctctggtaccctggtttcagacttctagcctccagaatggtgagaaataaatatgtattttttacga

SEQ ID NO: 924137 - DNA, 120 bp, Artificial Sequence
  ENSG00000269958_0 (sequence is synthesized)
tgtgtttacagtattggagggattcacatcgttgttttctggattaagctgctaggagtatcatgtacttagaaattcagtgtttatagtaagatgtattaaacattgctaatgatgtat

SEQ ID NO: 924138 - DNA, 120 bp, Artificial Sequence
  ENSG00000269958_1 (sequence is synthesized)
cgttacaatgtataacaggttttccattgtcataactgtatggaattttcttggaggatgtcattagcttctgtttgcactgacttgtgagctgtgtgtacgctgtggtcagatttctga

SEQ ID NO: 924139 - DNA, 120 bp, Artificial Sequence
  ENSG00000269958_2 (sequence is synthesized)
atgctgtagagcacttaccagctctgaccgtgtcttgctggggccagcaggctgcgtgtgcagcggggccagctgtctcagggctgatatgtagacgtgtattctgtttacaattagttc

SEQ ID NO: 924140 - DNA, 120 bp, Artificial Sequence
  ENSG00000269958_3 (sequence is synthesized)
tcttcagggcaagacccatggccctggcctggaactgtgctccccagggcgtggtgcctccctaaggggatggtcagtgttctgggactgactgccaggccagcccgtctgcagactcct

SEQ ID NO: 924141 - DNA, 120 bp, Artificial Sequence
  ENSG00000269958_4 (sequence is synthesized)
gtggtgggagttccctgggacgggaagcccctcggccccttccctccaggggcaggaactgagccagcatgggcggggccggccgagcttccaggcgtgttttctctgttaaatgtacct

SEQ ID NO: 924142 - DNA, 120 bp, Artificial Sequence
  ENSG00000269958_5 (sequence is synthesized)
ctgtctttaagctgtctcattttctaatcgctggcatgtcttgcctagaaaagcatttggaattgcttatgttcaattacagaaataaaatgtcttacttgccattgtagaattcctgca

SEQ ID NO: 924143 - DNA, 120 bp, Artificial Sequence
  ENSG00000230731_0 (sequence is synthesized)
actttggctgaggcaaagacagggaagcttagagaggatgatggagaggaagaggatgagagttggaagaatgaactaaagatcagaaacttttcttctcagagtccaactggtccatga

SEQ ID NO: 924144 - DNA, 120 bp, Artificial Sequence
  ENSG00000230731_1 (sequence is synthesized)
tggtttggggaagaacctgcagaaagagagggcaggaaattagcaagattctaaaatcagaacaaagtgaaccagcatgttcaaaggaactgaaattttgagagccaggacacatagatg

SEQ ID NO: 924145 - DNA, 120 bp, Artificial Sequence
  ENSG00000230731_2 (sequence is synthesized)
ggtttctcgacaagcggctttgcagcagtctttccaaagtttcatccacacatcctgacggcgagtaaccattgggaaattacatggtgactttagggccacagagaggagaatcagaag

SEQ ID NO: 924146 - DNA, 120 bp, Artificial Sequence
  ENSG00000230731_3 (sequence is synthesized)
atgacaggaactcacttgggaatggagaagtgatgttatggctgccagtgtcaaagtcagacccactgtataaacacagacattcacacatatgagaaccatgggactgaacattggtaa

SEQ ID NO: 924147 - DNA, 120 bp, Artificial Sequence
  ENSG00000230731_4 (sequence is synthesized)
agtccgttcctccttgggccactccatcttggaaactcaaaggaggaacactttacagtagtgttccacacactctacctctaactcccagtactgaatttagtggaagtccaaccacag

SEQ ID NO: 924148 - DNA, 120 bp, Artificial Sequence
  ENSG00000230731_5 (sequence is synthesized)
ttcctcccacccaaacagacagttccttgtgagtgtctcagagggacacttagacaggacagcctcctcattcactggtgaaagattttccagagccaaagctcttgcttccatggctgt

SEQ ID NO: 924149 - DNA, 120 bp, Artificial Sequence
  ENSG00000230731_6 (sequence is synthesized)
cacctgtaagggttgctggtaccagctgcttttctgaagccactgcaccctccccattcccctgcagtagtctccattgtgagacctcagccagagtgaccttgtgctctatttcccttc

SEQ ID NO: 924150 - DNA, 120 bp, Artificial Sequence
  ENSG00000230731_7 (sequence is synthesized)
aatggctgatgttctggtgtcactccctgtgctgaaagccaagctgatttctccacatctctgagtaattcagatcattttacaatgaattagcaagtgagtttgttattgcagtgcgga

SEQ ID NO: 924151 - DNA, 120 bp, Artificial Sequence
  ENSG00000230731_8 (sequence is synthesized)
ggaggagggatgggaagcactttcagagtttcttttagttttccctgagtctactgagacccctgaaagaaaacttactgcctgtagcttggaaatgttgctgtgtatccaagaagctgc

SEQ ID NO: 924152 - DNA, 120 bp, Artificial Sequence
  ENSG00000230731_9 (sequence is synthesized)
cactctgctcattggcaaggctacatctatggctatatcaatccacctttctcatcattgtcctcataccgtggaactaggacagagtcacccagaaggaagcatgggtactgtagttta

SEQ ID NO: 924153 - DNA, 120 bp, Artificial Sequence
  ENSG00000230731_10 (sequence is synthesized)
tccaaggtcactaggctagtcttttggtcctgtgtagctaggattggctgcgtaatatgtagggtgcagtgcaaaataaaaatgtcaggcctctgttgaaaaattattaataatttctaa

SEQ ID NO: 924154 - DNA, 120 bp, Artificial Sequence
  ENSG00000230731_11 (sequence is synthesized)
atggcaacaggtgagcatcaaaccaaactcaggccctatacaatcatacaagtcatgtgcttatgaagccaaagccattctcagcatagcttttatttgaagcctctagttttcacagtg

SEQ ID NO: 924155 - DNA, 120 bp, Artificial Sequence
  ENSG00000230731_12 (sequence is synthesized)
gagtggctaaaagaggtaagttctttgagggttgtgcaagaaagtttaggaaggagagatgacagctggctgcttttagcaggacattctttgtaagtgggtagcacctgtgggtcacta

SEQ ID NO: 924156 - DNA, 120 bp, Artificial Sequence
  ENSG00000230731_13 (sequence is synthesized)
ctcacaacaaccatttaaagtgggtgctgttgtttttctatgcttttataggtaaggaaaccgaggcacaatagagttaaatgaaatgctgatttaaagtttggttctcaactttctaat

SEQ ID NO: 924157 - DNA, 120 bp, Artificial Sequence
  ENSG00000230731_14 (sequence is synthesized)
agaaaccctctattgttgaagtgaacttggagcttactagaccatgagggactgaatcatgctaaactcacagaaaattgatgtatatgcaacaaaacaaatttattcctataaaatgag

SEQ ID NO: 924158 - DNA, 120 bp, Artificial Sequence
  ENSG00000230731_15 (sequence is synthesized)
aggcactaccgtcccagtaactgagatatttatttctatgacccaagataccccttttgagtattaaggtgcctggggtgactgaagtaacagtcagaagcttgctcagtgatcacagaa

SEQ ID NO: 924159 - DNA, 120 bp, Artificial Sequence
  ENSG00000230731_16 (sequence is synthesized)
tcaaaacaaagcgaattgcaaaatctcaggggagatgctgaccaaacagatagagtctgagaaatcatccctgtgcttaatacttttcttcctggtggatgaagtactcttgtctgctaa

SEQ ID NO: 924160 - DNA, 120 bp, Artificial Sequence
  ENSG00000230731_17 (sequence is synthesized)
atacagggtcttaattcatgcatggtgtttagttctcctttgcaggagtcatccccaccacctcatgtcaagtcagttacagcacaactgaatatgctgcccccttcttaatgttgctgt

SEQ ID NO: 924161 - DNA, 120 bp, Artificial Sequence
  ENSG00000230731_18 (sequence is synthesized)
gctctggtctggggtgtgatcccaaacatcatgatcccagcagtagctggtttacaaaccaactctgaggatgccacatccatagaaaacctgtcgttttcttctggtttccacttcaaa

SEQ ID NO: 924162 - DNA, 120 bp, Artificial Sequence
  ENSG00000230731_19 (sequence is synthesized)
gtgtgaactgaatctgggccaccatgtgctccctaaacttagcatttaagtagctctgatgagcagaatgttaatgtgttaaaatgagattatgttcgttcccttacaaatttaggataa

SEQ ID NO: 924163 - DNA, 120 bp, Artificial Sequence
  ENSG00000230731_20 (sequence is synthesized)
agatgctaggctggccctttgaaggtaaattaactcctcagaagcacctgcttgtgtggcattaagtaatcaaacaacaaaactacacttggatgggtttaaagtgggactgaaaaagta

SEQ ID NO: 924164 - DNA, 120 bp, Artificial Sequence
  ENSG00000230731_21 (sequence is synthesized)
gacaaaaagtagatgacttttgcatcatcagggaattgattttttgctttgtttgtaactctccacttgaaagttgtctttttcctgccaaattcagggtgattcataaaaccatcttct

SEQ ID NO: 924165 - DNA, 120 bp, Artificial Sequence
  ENSG00000230731_22 (sequence is synthesized)
cttaatgtgaagagaaattgctggaggttgttttgaagggcatctttgggaaccaccttaacaagtagctgaataaggaagaggaggatgatgatcgctgacataaaaaatgcttactat

SEQ ID NO: 924166 - DNA, 120 bp, Artificial Sequence
  ENSG00000230731_23 (sequence is synthesized)
ataggtggcaggcattgtgctaactggattaaatattattttttaacaaccctatgagactattctcattgtactgagagaaaacggatttggggccagcaatggtgagagaaaatggtg

SEQ ID NO: 924167 - DNA, 120 bp, Artificial Sequence
  ENSG00000230731_24 (sequence is synthesized)
atgattcttaaactctgaacttcaagcattaagaattggctgcaatagaaaactggtcctagatggtcccaagtggcccatcatgagccagatactagtgggggatatagggaggaccag

SEQ ID NO: 924168 - DNA, 120 bp, Artificial Sequence
  ENSG00000230731_25 (sequence is synthesized)
aggccacagagaaccacgtgatgaatgtagaagaaagagggttttaaaagggccagggcagaggtgttcctgtaggattaggcacacatagaccaagctctcctgagatccctcactgag

SEQ ID NO: 924169 - DNA, 120 bp, Artificial Sequence
  ENSG00000230731_26 (sequence is synthesized)
aaggaattggaaagaacaccagaatcatgtactccctagttcgatgtggatattaattgtaactgattatgtgtatacatttatgctgaagttaactgtgagtaaattggttgtatgtca

SEQ ID NO: 924170 - DNA, 120 bp, Artificial Sequence
  ENSG00000230731_27 (sequence is synthesized)
agacagcaggcagcctgaatgaaccacaagctgtgtggacgtggagaaggtgggaagtctgtccattccatggagattatcagctgaaacaaggctgtttcccgtcagacctgcttaagc

SEQ ID NO: 924171 - DNA, 120 bp, Artificial Sequence
  ENSG00000230731_28 (sequence is synthesized)
catgtcaaggtgtaagagtaactggatgctttacgtaaacaaaaggacaaatgaaggccaagctggagtctcacctacctgacttttacagcattgctgaaatgcctttccataaagaag

SEQ ID NO: 924172 - DNA, 120 bp, Artificial Sequence
  ENSG00000230731_29 (sequence is synthesized)
acaacttcattcaactcttcaatctcaagattacagccattttctgcacagagaagggtacacactgaggcatccacaagaccttgatttcaaacaaatttgtcttcctttcagttaaca

SEQ ID NO: 924173 - DNA, 120 bp, Artificial Sequence
  ENSG00000230731_30 (sequence is synthesized)
ctaacaaagctaccattgatggaaactaaaggcattaaaacccagagcacatcccccagcatgagaaaatgaatcagacgatgaccgctttgagaaatgggctctgtgctgggacacact

SEQ ID NO: 924174 - DNA, 120 bp, Artificial Sequence
  ENSG00000230731_31 (sequence is synthesized)
gggctgtctcctcagtacagtcccaggcaggacttcattataaaccgcagccccacctcacacagcgcctcctcagcatgactcactcacaaaatcatccctgctggtgggatggccggc

SEQ ID NO: 924175 - DNA, 120 bp, Artificial Sequence
  ENSG00000230731_32 (sequence is synthesized)
ctctaacgatggatttgctgtgctgtttcatggaaaacaacaacaacaacaacaaaaaacacaccataaaccaaagacttaatgtccagctggtggctgggacaccttggtgaagaggac

SEQ ID NO: 924176 - DNA, 120 bp, Artificial Sequence
  ENSG00000230731_33 (sequence is synthesized)
ccagtaaactcagggaggctagtggtgctgtttgtgtctcatgtggcccacaccagcccactggctgttcacaatacattcatctagtgttacttcagggggcctccaggccgacctcct

SEQ ID NO: 924177 - DNA, 120 bp, Artificial Sequence
  ENSG00000230731_34 (sequence is synthesized)
aactgaaaacatcatagacctttcacgcaagtgttcaacgtgctggtgtttactcctgctgctgggcattcaaaacaactgctgatccctcatgttctccttacctttgttcccctcctt

SEQ ID NO: 924178 - DNA, 120 bp, Artificial Sequence
  ENSG00000230731_35 (sequence is synthesized)
gcgagttgggtgtaggccccaatcagcctctgcaggcctctctgaacctcatggtctgagtttgaggggacccaagagcttgccttcttattttacagatggggatacagaggcccagag

SEQ ID NO: 924179 - DNA, 120 bp, Artificial Sequence
  ENSG00000230731_36 (sequence is synthesized)
actctgtgcaccttgtcaaggtcccagcgctaagtctagaaactagctgtcatgtcatatcccttggtctcgggatattttcacttatccattcaacacgtgacaagcatttcaataagc

SEQ ID NO: 924180 - DNA, 120 bp, Artificial Sequence
  ENSG00000230731_37 (sequence is synthesized)
cagctctttgaggagctgggaacagggagatgaaatgggcctctgccctgagcagcccctggtctttgatgttatgatggcaagaagcactgggagctaacatcaaagggagagaggcct

SEQ ID NO: 924181 - DNA, 120 bp, Artificial Sequence
  ENSG00000230731_38 (sequence is synthesized)
tcggatgcttagaaagagtctccccacagttgctatcctcctctgaatgcggctcaaaccaaatcagcacaaatccgctaaataaaaccactggaaaacaaggtcaaagtgacagaggcc

SEQ ID NO: 924182 - DNA, 120 bp, Artificial Sequence
  ENSG00000230731_39 (sequence is synthesized)
aagagcaccaacaaaagtgccttcttatccatcttggagccaagctgaagagcggccccaagtgaccaacggtgggactcacggctgggccttgtccccccaccccagcacagccttgga

SEQ ID NO: 924183 - DNA, 120 bp, Artificial Sequence
  ENSG00000230731_40 (sequence is synthesized)
tgaatcacacaccagagaacaacagggctatttctcaccagtcatttgtcaagctgacatccctgcctagagttatttagggctttctaaagacacttctttccctccctgccgcaggaa

SEQ ID NO: 924184 - DNA, 120 bp, Artificial Sequence
  ENSG00000230731_41 (sequence is synthesized)
gcacctgcacggctgttgagttgtggttttgctcaatagcgctttgatatcccttaaggccttcatcaattactcttctgtccctgatgggttggactttggctgaggcaaagacaggga

SEQ ID NO: 924185 - DNA, 120 bp, Artificial Sequence
  ENSG00000230731_42 (sequence is synthesized)
gctcttattgatttctgtgggggaaccttcaggagaggacagtctgagttcttggccagctggacttggaccataactgccatgttcccatgaggacaggtccccctcctggaacagagc

SEQ ID NO: 924186 - DNA, 120 bp, Artificial Sequence
  ENSG00000230731_43 (sequence is synthesized)
tatgctcctgccagctacttagaggaaaagagcaggcctgtcagatgagtgtgactggagcaaacctggtcttccgattcagctaaatgacataaggcagaggggacttggagcgggatc

SEQ ID NO: 924187 - DNA, 120 bp, Artificial Sequence
  ENSG00000230731_44 (sequence is synthesized)
agggaagaaaaacggaaataatgagaagactcagtgaatggatctctgaaagcagttaggagaatttgagttgttgagtctagaggaggcaagagtgaactaagaattagctttgattat

SEQ ID NO: 924188 - DNA, 120 bp, Artificial Sequence
  ENSG00000230731_45 (sequence is synthesized)
aggcagaaaaactgtgcataaattagtggtcatttctactgaaaatatggtgtgggttggattcttgcttccatggctgcccgaggattttgctccagtgtgctggcctgtctgggttat

SEQ ID NO: 924189 - DNA, 120 bp, Artificial Sequence
  ENSG00000230731_46 (sequence is synthesized)
tgcattattcttattcatgaggtggtgggtctccttccttggagatttgcatgaatggaaatgacatcctcccagatggaatggtttagggaaagtcttcacgacacatatgtttcttcc

SEQ ID NO: 924190 - DNA, 120 bp, Artificial Sequence
  ENSG00000230731_47 (sequence is synthesized)
cttcagtttgcactgcccaacatcccagcttgacccttatgtctgaatcagtttagcagcctcttgactagtatacagatgttccatctctgcctccttcagtccactctgcctatggag

SEQ ID NO: 924191 - DNA, 120 bp, Artificial Sequence
  ENSG00000230731_48 (sequence is synthesized)
gtcccacttatcttccttaaattcatcttggataatggcaatgtcctgctaaaaatatgttgatgcctatttatttattcatccaacaaatactgagcacctattgtcttgagcaccgat

SEQ ID NO: 924192 - DNA, 120 bp, Artificial Sequence
  ENSG00000230731_49 (sequence is synthesized)
tatgtgcctgctgcttactcccgggcatacaacatggcacaaagtgtagtagggcctcatcaaggcattcactcagccttcctgtccttgtcctggaaccttttaaggcctcatcatctg

SEQ ID NO: 924193 - DNA, 120 bp, Artificial Sequence
  ENSG00000230731_50 (sequence is synthesized)
cttttaacagatctttctgaccttttgcccacacaaaaccttttcttccagcctagcccattcaccatgataacccacctggtgtctttcttgtcaccccaacttctggatagactatcc

SEQ ID NO: 924194 - DNA, 120 bp, Artificial Sequence
  ENSG00000230731_51 (sequence is synthesized)
ttattcggagcccatctctcctgtgaagctaacacaagtctccttgcctttaggaggatttccatggccgcttgggttttagaattctctagcacctctgtccccacagtgtttcttcct

SEQ ID NO: 924195 - DNA, 120 bp, Artificial Sequence
  ENSG00000230731_52 (sequence is synthesized)
tagcactgggtatgttcttcctgagtggagagaactggcagctgctgtgcctgccctgacctcctgtggcctcactcgccgtggacaagtcctgagagagctggaacctgtggacattct

SEQ ID NO: 924196 - DNA, 120 bp, Artificial Sequence
  ENSG00000230731_53 (sequence is synthesized)
ttccctgtccgtgctctgctgtggatgatgacaggggcagctcaggtgtttgctggggcttccagagcatttgacaccattaagaagacggagagtatactgaatgtctaaacttaaagg

SEQ ID NO: 924197 - DNA, 120 bp, Artificial Sequence
  ENSG00000230731_54 (sequence is synthesized)
gggagaggctttggggatcatttaataaaacgaccttgttttgcagatatggaaactgagaaccagagaaactgatttacccaaaaccacaaggtgacgtagtagcagagtcaaatcttg

SEQ ID NO: 924198 - DNA, 120 bp, Artificial Sequence
  ENSG00000230731_55 (sequence is synthesized)
tccactgttaagtttagcctaaagctccctccttatatattttaagttcatcctaaaggtttcttcatacatagtgagctgtaacctaatggatgtgtgaacagactgtaacttgctgtt

SEQ ID NO: 924199 - DNA, 120 bp, Artificial Sequence
  ENSG00000230731_56 (sequence is synthesized)
gtgccaatcatcaagttttggccagtcaaggccgtccaactgtttaaatggtgttcaataaggtaaacactgagctgtgatcaatctggctgtttctgtacctcaattctgttttctgtg

SEQ ID NO: 924200 - DNA, 120 bp, Artificial Sequence
  ENSG00000230731_57 (sequence is synthesized)
catcactttcctttttctgtccataaatcttctttgtcaccgtggcagcaacagagtccctctgaacctattctggttctggggctaccaagtcatgaattattctttgctcaagtaaac

SEQ ID NO: 924201 - DNA, 120 bp, Artificial Sequence
  ENSG00000230730_0 (sequence is synthesized)
gtcagcagcttaattctttctctgggcacgagcagcctgagctgtgtcctggctcccctctgttcatctgcaaagacggacagctctgtctctctctttctctgggttccagcacgcctg

SEQ ID NO: 924202 - DNA, 120 bp, Artificial Sequence
  ENSG00000230730_1 (sequence is synthesized)
tacagtgtcagcaaggcaattatgtctttacagacaatagtggcttagagccaagtgataagccttcccgtgttatggctacatggctgtgataacaggtggagttatacgcctgcactg

SEQ ID NO: 924203 - DNA, 120 bp, Artificial Sequence
  ENSG00000230730_2 (sequence is synthesized)
tgtattccagtacctgtaacctaaacagctttctgtgccctgctattcaacgaggtgtcttcaggggaaggtgtcatgatgaatgtccagtgctctgggcatctccgagttcagccagat

SEQ ID NO: 924204 - DNA, 120 bp, Artificial Sequence
  ENSG00000230730_3 (sequence is synthesized)
gttgatacaggtggccagagagatcgtttgcccaaggtcacacagtacgaggtagaagttggtattttcatctagccaacctatctgattacaaagggatcccctcgcagtacctgggca

SEQ ID NO: 924205 - DNA, 120 bp, Artificial Sequence
  ENSG00000284954_0 (sequence is synthesized)
aatgcatcgcctcagccatgaacaacgcggagttctttaatacccgtgagcagcagcccaggccccttgaagagtgcagactcccacctggcctgggcgtctggctccgcagcagaacac

SEQ ID NO: 924206 - DNA, 120 bp, Artificial Sequence
  ENSG00000284954_1 (sequence is synthesized)
gaagtttgcattccccaaggggcggccagggggcggaccagggaaaggtagtcctctgcattttgccgtgtgctggaatggtgtagagtgacgatgaggtggcggtaaggggttgagcgc

SEQ ID NO: 924207 - DNA, 120 bp, Artificial Sequence
  ENSG00000284954_2 (sequence is synthesized)
ctgtactgctctgtagtctctgctaggacatggacgaaaagggacgcagccgggagagcgactgccccaggtgggggctggggggacgtaagggaagaataataattatctggctgtgtt

SEQ ID NO: 924208 - DNA, 120 bp, Artificial Sequence
  ENSG00000284954_3 (sequence is synthesized)
tttgtttaaaaaaaaaaaaaaactggtgtaaatctccatagacttcctatcctcgctcccttcacccacccacgcgctcccaagatgcaataagcaaataaaaagactaataacgctgta

SEQ ID NO: 924209 - DNA, 120 bp, Artificial Sequence
  ENSG00000284954_4 (sequence is synthesized)
cgcctcagccatgaacaacgcggagttctttaatacccgtgagcagcagcccaggccccttgaagagtgcagactcccacctggcctgggtccgtaggcctcgctccacccgctgtttac

SEQ ID NO: 924210 - DNA, 120 bp, Artificial Sequence
  ENSG00000284954_5 (sequence is synthesized)
ttatcccaagtctggaacccacggtggcggggggaagggcgtctggctccgcagcagaacacgaagtttgcattccccaaggggcggccagggggcggaccagggaaagtccgccccagg

SEQ ID NO: 924211 - DNA, 120 bp, Artificial Sequence
  ENSG00000284954_6 (sequence is synthesized)
tgaagtgcgtgtagtgcccttgtctccagagacgcagagagtcctcgaggccccttgagctaagtgcagcctggcccagtttctcctgccctactctactcccctccctataagcgaccc

SEQ ID NO: 924212 - DNA, 120 bp, Artificial Sequence
  ENSG00000284954_7 (sequence is synthesized)
accctcaaggggcggagggcgcgtagggatgcgctgactcatgcccgcgtaatttcgaccagtctttcaacctgaacgacccccagaatctggctgtctgagttatctgtgggtggctcc

SEQ ID NO: 924213 - DNA, 90 bp, Artificial Sequence
  ENSG00000230732_0 (sequence is synthesized)
gttctgcacatgtatcccggaactttaaaattttttgaaaattcaagttttcattaaaagaaaaaataaaaggtactaggctctgctact

SEQ ID NO: 924214 - DNA, 120 bp, Artificial Sequence
  ENSG00000230732_1 (sequence is synthesized)
attgcttgagcccaggagtttgagactgcggtgagcagtggtcacaccactgtaccccagcctgggtgacagaccttgcctctaaaaataataatttgtttgaaaattgtagaaatttaa

SEQ ID NO: 924215 - DNA, 120 bp, Artificial Sequence
  ENSG00000230732_2 (sequence is synthesized)
tgaaaattgtagaaatttaaaggtactagacaaattgaaacaaaaacagaaaggaatattaatcatattaatagcagttgaaatagaatttaaggtgagaagcaaattgtgtaattatca

SEQ ID NO: 924216 - DNA, 120 bp, Artificial Sequence
  ENSG00000230732_3 (sequence is synthesized)
gatttcaatataaaggagatataatgaccaatctttatgcaccaaagcacacagttgctaaatatgtgtaatacaattaaaacagaaacaagaggaccttggtaaaatagtgatagtggc

SEQ ID NO: 924217 - DNA, 120 bp, Artificial Sequence
  ENSG00000230732_4 (sequence is synthesized)
agacttttctcataagtggataaatctagtagacaataaagacatatacaaaaattacagtcaatataattgatttaatagatgtttatgctccttaagagaatatacatttattgctat

SEQ ID NO: 924218 - DNA, 66 bp, Artificial Sequence
  ENSG00000230732_5 (sequence is synthesized)
aggctcttaaacatataaaaagttgcataacttcacagtaaaagaaaagcaaatgaaaaccacact

SEQ ID NO: 924219 - DNA, 120 bp, Artificial Sequence
  ENSG00000230732_6 (sequence is synthesized)
ataacttcacagtaaaagaaaagcaaatgaaaaccacactgagtgacagataaatgcagtaagttaatcttgattggatcctggactggaagagatgcaatattttgggtaaattagggg

SEQ ID NO: 924220 - DNA, 120 bp, Artificial Sequence
  ENSG00000230732_7 (sequence is synthesized)
aaattttagtatagactaatatattcaggggtcagtgatctttttctgaaagagccagataataaatactttggattttgcagaccttatggtctttgatttatctactgacctgttaca

SEQ ID NO: 924221 - DNA, 120 bp, Artificial Sequence
  ENSG00000230732_8 (sequence is synthesized)
gcacagaagcagatgtagataatacccaagtaatgagtgtggctgtgtttcaattaaacttaataaaaactggcagtgggccatacttggtcattcatgcattagatgatattagtaaac

SEQ ID NO: 924222 - DNA, 120 bp, Artificial Sequence
  ENSG00000230732_9 (sequence is synthesized)
tgatgttaaatatcttgtgtgttcagagatagtgagattgtggttatataggagaaaacatctaaagtaggtaggggtaaaatattgtgattgatgtctccctccaaaaaaattgtacaa

SEQ ID NO: 924223 - DNA, 120 bp, Artificial Sequence
  ENSG00000230732_10 (sequence is synthesized)
gtatatgcaaaaaaataaaaagccaggcaaagtggtaggtgcttatagttccagctactccggaggctgaggcaggagcattacttgagcccagaggtttgctttaaaaaaaaaaaaaaa

SEQ ID NO: 924224 - DNA, 120 bp, Artificial Sequence
  ENSG00000230735_0 (sequence is synthesized)
aggctcccagactctgtagtgaagaggcatgtaaagagacaaatgagagcatgccatgcaaactgctaaagttagcctttgcctttttcccagagactctctaggaatttttcccatctg

SEQ ID NO: 924225 - DNA, 120 bp, Artificial Sequence
  ENSG00000230735_1 (sequence is synthesized)
agatccccctaaaggagattggaacagtgcaatatttggggactgcattctccacccaaggatttagcatcaaatgaaaaacaggttcatgttctgacaaggtagtcacaacatttggcc

SEQ ID NO: 924226 - DNA, 120 bp, Artificial Sequence
  ENSG00000230735_2 (sequence is synthesized)
attttcttgggtacaagctaagacctcagaagacattactgatcaacacatcctgtttagcagtagtgacagaacattgtgcattaaaaattcaatgatatttaactttgaaattataaa

SEQ ID NO: 924227 - DNA, 120 bp, Artificial Sequence
  ENSG00000230737_0 (sequence is synthesized)
gccctgagttttctaaaagtgagtctgaaattctctgttgtactctctactacaaaaaggttataggcgtgatattctttgccgtgtcctagaaccctcaaaacaaacattttaggggac

SEQ ID NO: 924228 - DNA, 120 bp, Artificial Sequence
  ENSG00000230737_1 (sequence is synthesized)
aggattgccttttcaggcagaacctctgttgagggaaaatggcagttaggtttgttcccatttccttctaaagagaaccaacaacattgtcatctatttgaatgatgttaaacagtttac

SEQ ID NO: 924229 - DNA, 120 bp, Artificial Sequence
  ENSG00000230737_2 (sequence is synthesized)
cgactcatcttaagccagtgacttaatcagctgtgtccccccatctaagaaccaaggtctcctggtagctaaccgttcccttgcctcaattctgtgttattggagacttgcctcaggcca

SEQ ID NO: 924230 - DNA, 120 bp, Artificial Sequence
  ENSG00000230737_3 (sequence is synthesized)
cacaggccagaagacttctcaagtcttggaaggaagcccccaactcatagctcagcacacatcttctcaaaacataataaaagaggaactgaatagaatggaaatttcagtgaagaagac

SEQ ID NO: 924231 - DNA, 120 bp, Artificial Sequence
  ENSG00000230737_4 (sequence is synthesized)
ctaagtttgaatctcacacctgctgttcctggctgtatgactgggatgggaagatgcatggagcagatctgaatctactgacagcctgaagaagagcagcagccatcccactgcaccaac

SEQ ID NO: 924232 - DNA, 120 bp, Artificial Sequence
  ENSG00000243491_0 (sequence is synthesized)
acccactcactggtgagctccgcaagagtgtacttctctccgtccctggagcgccacggcgtgctggtgcatagtaagcatctgtccatgtctgtccagttgaatttcttgagagtcatt

SEQ ID NO: 924233 - DNA, 120 bp, Artificial Sequence
  ENSG00000243491_1 (sequence is synthesized)
tgaccttctcagcagctctggagaacccacattgaccagagactttgcagccagctcacccctccaaatccccgccctggagtccctgacccaggaatttctgcatcaggctgctcaaac

SEQ ID NO: 924234 - DNA, 120 bp, Artificial Sequence
  ENSG00000243491_2 (sequence is synthesized)
ctgaatttgacaaaatttcaaagcgctgtatctttatgttgataagacaacggataaagtgccatacttggaacctagatcactcaatgttgcctgtagctgagtccacttctgtcactc

SEQ ID NO: 924235 - DNA, 120 bp, Artificial Sequence
  ENSG00000243491_3 (sequence is synthesized)
accctgcattgccctgccaggagcaagggagagaaagccagccagaaggcatgggcatgggctcaaatctggcttctcctgtggccactgtgaaagttgatcatacaaaggtcactgttg

SEQ ID NO: 924236 - DNA, 120 bp, Artificial Sequence
  ENSG00000243491_4 (sequence is synthesized)
tcatagccaagcagagttatgagaccacaggaaaaagcacttggaccacgtaacattgctccaagagtataactgtctccaaccctggctgctggaacaagtgttgcaacctgaaaccgg

SEQ ID NO: 924237 - DNA, 120 bp, Artificial Sequence
  ENSG00000243491_5 (sequence is synthesized)
tttgatctaatagctacagaaacaacctgcggaaatctaagactagtttcacccactcaccaatcagagcttgccggatccccaaaacgttgctagtgctaatgaacttgctttcctaac

SEQ ID NO: 924238 - DNA, 120 bp, Artificial Sequence
  ENSG00000243491_6 (sequence is synthesized)
aatccataacatttctcatttttatgaaacctacaaccttctctttgctctttggacatactgaagaccacccagtctgtgtgtatgccccaaactgaaattcttgctccccaaataaaa

SEQ ID NO: 924239 - DNA, 120 bp, Artificial Sequence
  ENSG00000243491_7 (sequence is synthesized)
cattttaaacttagagatttgtctgtatattttatttgactttgacagcaccaggggctccggcacaaatctcctccttcaagcccttttctacacagtcccgtgggtctaccctgaaag

SEQ ID NO: 924240 - DNA, 120 bp, Artificial Sequence
  ENSG00000243491_8 (sequence is synthesized)
tgttactgggaggtaaattcaggattacttgaccgaatggcccacccgaggtcacggaggctgctggaggaacagaaaatggtcttcaccaagtgaagcattgtcggtcttggcctgtgt

SEQ ID NO: 924241 - DNA, 120 bp, Artificial Sequence
  ENSG00000243491_9 (sequence is synthesized)
ctggctggagaatgttaaaattctggggacacaacagaaaaggcacagttgtggggaccaggccaatgtcagcgtgagaactggctccatccccctcccatgaaccagctctgcggccaa

SEQ ID NO: 924242 - DNA, 120 bp, Artificial Sequence
  ENSG00000243491_10 (sequence is synthesized)
ggcaggtctgcatttcctggtctgtgacacggagtcagtaacattgcctacttcccggggctatttccagagaagtgagggaatgggtgtggaacgcctgccatctgcggagccccgcat

SEQ ID NO: 924243 - DNA, 120 bp, Artificial Sequence
  ENSG00000243491_11 (sequence is synthesized)
gaaacgtctctgtctttccagccagccctgagccagggaagggactggaagcacagcgggtggctgaggcgggctttcggcagcttacccccagccttgcccctccccgcctgctgaaac

SEQ ID NO: 924244 - DNA, 120 bp, Artificial Sequence
  ENSG00000243491_12 (sequence is synthesized)
acaatctatggttgtcgccttcctggagatgttagccgccccctccagaggtggttccaaatctatttctcatttggctgatttaggagaggctgcgaatcggtcgctatggtttcttta

SEQ ID NO: 924245 - DNA, 120 bp, Artificial Sequence
  ENSG00000243491_13 (sequence is synthesized)
ttttctcctgacagcttaggaatcatttttccaattattcccaggggaggaaaaagaagtggaggaagccagtgtttggaatgaggggaagctcacggatctgaaatgcaacctcttctg

SEQ ID NO: 924246 - DNA, 120 bp, Artificial Sequence
  ENSG00000243491_14 (sequence is synthesized)
caggagacccggcacagctaccgggacccatcacctccctgtaggaaccccgcccagccccctccagccagccctgcgtggttgtggccccactgcagaaacgcctccgcttaacactcc

SEQ ID NO: 924247 - DNA, 120 bp, Artificial Sequence
  ENSG00000243491_15 (sequence is synthesized)
agcctctcttctattcggtcaggccacagctgctgactttgtgcctgctgtagcaaccccgagcccccaaataaaccctccctcccagggtggcctctctacggggggagacagacggtg

SEQ ID NO: 924248 - DNA, 120 bp, Artificial Sequence
  ENSG00000284959_0 (sequence is synthesized)
ttgcgcaccagccacaggtctcagctgggcactcctgagctctgtgctgcaaccttggggcattgggctctgtctttcggcccctcggggtcagacccctgctgtgttgggggatccgaa

SEQ ID NO: 924249 - DNA, 120 bp, Artificial Sequence
  ENSG00000284959_1 (sequence is synthesized)
gtgctcccaagctgcctggaaagcattcaggcggggtcgctagcaagaactcaggctgggcagcggaggcggcacagtgcacacactcctgcaggaacaaccagacaggggctttgggag

SEQ ID NO: 924250 - DNA, 120 bp, Artificial Sequence
  ENSG00000284959_2 (sequence is synthesized)
gggctgcgtgcagggggtcccgcagaacatatgcgccccagtcccgcaggaaggaccgccctgctctctcttggctcactggtggggacagcacttcctggaataacgttgctttggatt

SEQ ID NO: 924251 - DNA, 120 bp, Artificial Sequence
  ENSG00000284959_3 (sequence is synthesized)
taacaacagttgggcaaaggaggtcggtatacagatacaggacaagaagagtggtgtcaaagggaggctaaatcattggttctggcttcatctaaggaattcttatgagaaatcgaggga

SEQ ID NO: 924252 - DNA, 120 bp, Artificial Sequence
  ENSG00000284959_4 (sequence is synthesized)
gagactgtcctgggaagtctgatgaaacatgatcaagatattttaacttctgtgtttagcgcctttaatagattgagctaagaagtctaagcaatcttcagggctaagaaacaagctgca

SEQ ID NO: 924253 - DNA, 120 bp, Artificial Sequence
  ENSG00000284959_5 (sequence is synthesized)
cttgccagagttggatgttcacaccttggtgatggctgatattaaacagaattcttaatgaacaaatcggccttgaaaagggaacatggtgaagcaagacaaaagaattacaaactttga

SEQ ID NO: 924254 - DNA, 120 bp, Artificial Sequence
  ENSG00000284959_6 (sequence is synthesized)
ctgaaactttctcctaccaggaatacagggaccgctcaccaggttgtgatgagaaggatcatctgaaatgctccattgctctcagaagttgaggtaacttcattgggcccaaactgataa

SEQ ID NO: 924255 - DNA, 120 bp, Artificial Sequence
  ENSG00000284959_7 (sequence is synthesized)
actaggaatggctcagaaaatagccccttagaagaactgtatgaagcttggatccatttttctgagaaaaaagaaaaatccctccaatgatttggtgaggagttgaagacaaatatcttt

SEQ ID NO: 924256 - DNA, 120 bp, Artificial Sequence
  ENSG00000284959_8 (sequence is synthesized)
attatttataagtattctggccaagacaatgagtgttggagtgggaggatgagggaattttatgatgaacgacagcacagcaagatggacagtaaggctctgtcattgccataccagatg

SEQ ID NO: 924257 - DNA, 120 bp, Artificial Sequence
  ENSG00000284959_9 (sequence is synthesized)
tacagaagtgttgatggttgtttctagtttggggctattatgaagaaagctgctatgaagaacatccatgtacaaatcattttatggacacacatactcattgctcttgggtaaatatct

SEQ ID NO: 924258 - DNA, 120 bp, Artificial Sequence
  ENSG00000284959_10 (sequence is synthesized)
aggaatatgatttatggatcatagatacaaatttcccaccattctggattctgacacccaacagaaagactgttatttggcatcatgtgaattagccaggagacctctaatttccagcca

SEQ ID NO: 924259 - DNA, 120 bp, Artificial Sequence
  ENSG00000284959_11 (sequence is synthesized)
tttcctctggtctgacccctaaactcagctcatctggtttctcgtttctgaggggacaaacacttcctaaaaggcagaccctctggggttctgaggagaccgtccctgacattgttttta

SEQ ID NO: 924260 - DNA, 120 bp, Artificial Sequence
  ENSG00000284959_12 (sequence is synthesized)
cttcaagactacaagcgaatgaaaaacagctacctctcacaagagggctggagcccttgatacagaacagatctccaactggcttttggactaaaataactgaaccaacaagatatttta

SEQ ID NO: 924261 - DNA, 120 bp, Artificial Sequence
  ENSG00000284959_13 (sequence is synthesized)
gaggtgattatttgttgcatttctcaaattatgatgaattttatagacccatatctcataggtatatctgtcttaatcctaaattagggattagtacacttttttttcccacaaatcatt

SEQ ID NO: 924262 - DNA, 120 bp, Artificial Sequence
  ENSG00000284959_14 (sequence is synthesized)
atcaaaatcctttcatcgaggactaggattatactctatcccaaatcaagccaagtaaatatagatgatgccagaccactaaacaatgttttctagaactctaaaagtgcagagtaaata

SEQ ID NO: 924263 - DNA, 120 bp, Artificial Sequence
  ENSG00000284959_15 (sequence is synthesized)
tccctccttgggccacatgtgtggtctggtatgaagaaagagctttggaggatggaatataagcactaatgctcactggctgtggggtccaggtgagtcacttacactcccaggaagtca

SEQ ID NO: 924264 - DNA, 120 bp, Artificial Sequence
  ENSG00000284959_16 (sequence is synthesized)
gtgcccaatgtcatgagaacttactaaagcccatggctcataacagagtatggtggacaataaagagtagctgtaaatttttattggctggaaaactcttagagaacagagcatgtgtat

SEQ ID NO: 924265 - DNA, 120 bp, Artificial Sequence
  ENSG00000284959_17 (sequence is synthesized)
ttatctttgtagtttatcataatggcacgtacaaatcctttataaacatctgtttattggagaaaaaacctacttatatgtctcaaaaattgtgtacatctgttaagactttccttgtat

SEQ ID NO: 924266 - DNA, 120 bp, Artificial Sequence
  ENSG00000284959_18 (sequence is synthesized)
agtctgatgaaacatgcatgagtcttcgttgaaaccgtgggaggaagaagagttttaccaatcaccagtgctgaagaaatctctcctttctgggcaggatgagggaatcactaaatgacg

SEQ ID NO: 924267 - DNA, 85 bp, Artificial Sequence
  ENSG00000284959_19 (sequence is synthesized)
ctctcctttctgggcaggatgagggaatcactaaatgacgaggagtctggcatgcttactgcaacctctgctcccgggttcaagc

SEQ ID NO: 924268 - DNA, 120 bp, Artificial Sequence
  ENSG00000284959_20 (sequence is synthesized)
gtaagtgtatacttaactatcacaaaaacttccagtttccaaagtgattgtaacatgttcactcataccagtgatctataggagttccagtcaactctacatcctcaccaacacctggtg

SEQ ID NO: 924269 - DNA, 120 bp, Artificial Sequence
  ENSG00000284959_21 (sequence is synthesized)
ttatcagtgttttaacttgtagtcacacaagtaggtatgtttccgtcagcattcttgattggtatttgtaatttgctaaaggatttggagaaatgcacagctaagttaaaaatgtctatt

SEQ ID NO: 924270 - DNA, 120 bp, Artificial Sequence
  ENSG00000284959_22 (sequence is synthesized)
tgtgtacacaagtataatgcttaattttatgtgttagcttgattgggtcatgggatatgaagatatttgcttaaacattatttcgtgttgtgtctgtgaggatgtttctggatgagattg

SEQ ID NO: 924271 - DNA, 120 bp, Artificial Sequence
  ENSG00000284959_23 (sequence is synthesized)
acatttgaattggtaaactcaataaagcagcttgcccttcccaatgtgaatgggcctcatccaatcaattgaaggctcagtaagaaaaattatttatctctgcttgtctttaagctggga

SEQ ID NO: 924272 - DNA, 120 bp, Artificial Sequence
  ENSG00000284959_24 (sequence is synthesized)
tatcaattttctttgctttcagacttggactaaattctacaccacaggctctcctggttctcaggccattggattcaaaccagaatttataccatcagctctcttggttctcaggacttt

SEQ ID NO: 924273 - DNA, 120 bp, Artificial Sequence
  ENSG00000284959_25 (sequence is synthesized)
caactttgactgatactatacctttggctctcctgggtcttcagttttccaactgcttctcttgagcctcttagcctccataatcatgtgaaccaattctttacagtacagtacaaatct

SEQ ID NO: 924274 - DNA, 120 bp, Artificial Sequence
  ENSG00000284959_26 (sequence is synthesized)
ctctccctctccctctcccctccctcagccccctaaatttgttagaactgatgaataaaattcagtaaagtaggttacaaaatcaacatacaaaatttaatagtgtttctatatggtaac

SEQ ID NO: 924275 - DNA, 120 bp, Artificial Sequence
  ENSG00000284959_27 (sequence is synthesized)
aatgaactatctgaaaaaaattaagaaaacaattccatttgcaatagctataaaaaataagatactctggagtaaatttaaccaaggaggagaagaacctatacactgaaaactataaaa

SEQ ID NO: 924276 - DNA, 120 bp, Artificial Sequence
  ENSG00000284959_28 (sequence is synthesized)
cattgataaaagaaattgaagacacaaagaaatggaaagatattctgtgttcatgaattggaagaattaatattgttaaaatgtctatactacccaaagtgatctccagattcagtgcaa

SEQ ID NO: 924277 - DNA, 120 bp, Artificial Sequence
  ENSG00000284959_29 (sequence is synthesized)
tcctatcaaaattccaatgtcatttttcacagaaatagaacaaccttaaaatttgtatggagccacaatagaccctgaataaccaaagcaatctcgagcaaaaataacaaaggttaaggc

SEQ ID NO: 924278 - DNA, 120 bp, Artificial Sequence
  ENSG00000284959_30 (sequence is synthesized)
gttaaactacctgattgcaaaatacatcacaaagttatagtaaccaaaactgcagggtactgccataaaaacagacacatcaatgaatcgaatagggtagagagtccccagataaacgca

SEQ ID NO: 924279 - DNA, 120 bp, Artificial Sequence
  ENSG00000284959_31 (sequence is synthesized)
catatctgtggtcaattgattttcaacaaaggtgccaagaacacacaatgaggaaagaacagtctcttcaataaatggtgttagaaaaagtggctatccacatgcagaaaaataaaattg

SEQ ID NO: 924280 - DNA, 120 bp, Artificial Sequence
  ENSG00000284959_32 (sequence is synthesized)
gtaagatctgaaactgtaaaactcataagagaagactaggagaaaagctccttgacattggtctgggcaattatttcatgggtatgtcccccaaagcagaggcaacaaaagcaaaattag

SEQ ID NO: 924281 - DNA, 120 bp, Artificial Sequence
  ENSG00000284959_33 (sequence is synthesized)
acaattgggattgcatcaaactaaaaaatcttttgcatggcaaaggaagccatcaacagagtgaaaagaaaacctgcagattgggagaaaatatttgcaaatatattgtcaaagggcctc

SEQ ID NO: 924282 - DNA, 120 bp, Artificial Sequence
  ENSG00000284959_34 (sequence is synthesized)
attttgataagggactcatatcaaaaatatataaggaactcaaatgactcaataaaacatatactcgtattaaaaatgggcaaatgacatggatagacacttctcagaagaagacatata

SEQ ID NO: 924283 - DNA, 120 bp, Artificial Sequence
  ENSG00000284959_35 (sequence is synthesized)
aatggccaacagatatagttaaaaatgctcaacatcactactcaacagggaaatgcaaattaaaccacaatgagacatcaccctgcacctgtaagtatggctgtcatcaaaaaggtgaat

SEQ ID NO: 924284 - DNA, 120 bp, Artificial Sequence
  ENSG00000284959_36 (sequence is synthesized)
gctagctagtgttggcaaggatgtagagaaaagggaaccatcacacactgtgttgtggaaatgtgaattagtacaactattttggaaaaagtatgaaggttatttaaaaaactaaaagta

SEQ ID NO: 924285 - DNA, 120 bp, Artificial Sequence
  ENSG00000284959_37 (sequence is synthesized)
gaaataccatatgatccagctatgccacccaaaggaataaaaatcagtaagctgaagaaacgtctgcactccacattcactgcagcagtattcacagttaccaagacaaggtaaatttaa

SEQ ID NO: 924286 - DNA, 120 bp, Artificial Sequence
  ENSG00000284959_38 (sequence is synthesized)
agctttctggaaaagagtcatcattctagataccattaagaacatttgtaatccatgggagaaggtcaaaatttcaacattaacaggagtttggaggaagttaattccaacttctatgga

SEQ ID NO: 924287 - DNA, 120 bp, Artificial Sequence
  ENSG00000284959_39 (sequence is synthesized)
taattttgaggggttaaaaacttcagtggaggaagtaactacggatgtggtgaaaatagcaagagaactagagttagaagtagagcctgaaatgtgactgaattgctgcaatctcatcat

SEQ ID NO: 924288 - DNA, 84 bp, Artificial Sequence
  ENSG00000284959_40 (sequence is synthesized)
atggaatctagtccaggtgaagatgctgtgcgtattgtttaaatgacaacaaagaaatttagaatattacataaacttagttga

SEQ ID NO: 924289 - DNA, 84 bp, Artificial Sequence
  ENSG00000284959_41 (sequence is synthesized)
acaaagaaaagcagggtatgagaagattgactccaattttgaaagaaattccactgcatgtaaaatgctatcaaacagcattgc

SEQ ID NO: 924290 - DNA, 120 bp, Artificial Sequence
  ENSG00000284959_42 (sequence is synthesized)
aatcttagcactggtagactacaccatgtagtgtaaacataattttatatgcaccagaaaacaaaataaaattgtgcgacttactttattgtgatggtttggaaaggacccataaaatct

SEQ ID NO: 924291 - DNA, 120 bp, Artificial Sequence
  ENSG00000284959_43 (sequence is synthesized)
cccaaatctttcaaaattgaaaaaagggtggattttaagtgttctcatcacaaagaaatacgtaaggtggtgtacatgttaattagcctgatttgatcatcccacaatgtatgcatatat

SEQ ID NO: 924292 - DNA, 120 bp, Artificial Sequence
  ENSG00000284959_44 (sequence is synthesized)
caaaatatcctactgtaccccataaatagatataattatttgtcaattaaaaatagtttttaacagaaaaagtgcattactttactattattatctttataggattgtacctaccacatg

SEQ ID NO: 924293 - DNA, 120 bp, Artificial Sequence
  ENSG00000284959_45 (sequence is synthesized)
gagttgctatgaagatgtaataaattattatttgaagcacttataacaatgttaggaacatagtgaacactaactaggtgttttaaacaaaaacataaatcagtttgccaatttattgat

SEQ ID NO: 924294 - DNA, 120 bp, Artificial Sequence
  ENSG00000284959_46 (sequence is synthesized)
gatgagaaatacaactgtcacatgggtctgaatattcgtgatggtatgagcaatttttcttctcagcagactattttagggaaccatgaaatattcagaagtttgcctgaaatcatgaaa

SEQ ID NO: 924295 - DNA, 120 bp, Artificial Sequence
  ENSG00000284959_47 (sequence is synthesized)
tcaatcaaaacaggagatgaatccattttaaaaaatgttctcaggctaagagagcatagtattgttgtttcatacaaaaaatgaccttgcctgaaggtctgaacactgatttaactttcc

SEQ ID NO: 924296 - DNA, 120 bp, Artificial Sequence
  ENSG00000284959_48 (sequence is synthesized)
tttctcctggacatagaccggttgggaatttccagagttctcatctctgactccacttttcctttggctttattgctgatcaatctcctgcctgatggatgttttcttcgtattgtaggg

SEQ ID NO: 924297 - DNA, 120 bp, Artificial Sequence
  ENSG00000284959_49 (sequence is synthesized)
tgttattctgtttcccttaagagattttatatgtctttattatgatccattgtatgttactttaaaaatttacttgatttcatttgtttctaagttcttagggagcattatagtgctcct

SEQ ID NO: 924298 - DNA, 120 bp, Artificial Sequence
  ENSG00000284959_50 (sequence is synthesized)
tatagtgctccttcaatattactgggaacattttattataaactgtgttagtctgtttttgtactgctataaataaatacctgagactgggtaattgactcacagttctgcatggcttgg

SEQ ID NO: 924299 - DNA, 120 bp, Artificial Sequence
  ENSG00000284959_51 (sequence is synthesized)
aacacaatcatggcagaaggtagcagaaggtgaagggcaaacaagcaccttcttcatggcggcaggagagagagagcaaagggtgaactgccgaatactttaaaaaccaacagctcttgt

SEQ ID NO: 924300 - DNA, 120 bp, Artificial Sequence
  ENSG00000284959_52 (sequence is synthesized)
aaccaacagctcttgtgagaactcactataccaagaatagcatgggggaaaccgtccctgtgatccaatcacctcacaccagatctctcccttgacacgtggggattacaattcaagatg

SEQ ID NO: 924301 - DNA, 120 bp, Artificial Sequence
  ENSG00000284959_53 (sequence is synthesized)
acagaaccaaacctagccttggactgccatttaatatgtgtagtgcttttacttggtatgtaaataaaagaaaaaaacttaaatgtatctctttgctcttcctcaaccctcacagaacca

SEQ ID NO: 924302 - DNA, 120 bp, Artificial Sequence
  ENSG00000284959_54 (sequence is synthesized)
tctgggctttgaggagcactgtttaatacctatatggttttcaaacattgttattttatggatgaataatctgaagaaaggatgagtgactcaaattcatttaataaagtaataatagcc

SEQ ID NO: 924303 - DNA, 120 bp, Artificial Sequence
  ENSG00000284959_55 (sequence is synthesized)
aattccatcatctctgtcattctgtgtctgctgctactaactcatttttctgtttgttctggatcatatttcctgcccttctccctgattatggaagtaaaaacatggccaccaatttcc

SEQ ID NO: 924304 - DNA, 120 bp, Artificial Sequence
  ENSG00000284959_56 (sequence is synthesized)
ctctttgggaatctgggctggctttgatcatttgcttgattatagaatgtggcagaagtgtgttctgaaattttgaggttacattagaggaagccttgcagcaaagttccacctgagact

SEQ ID NO: 924305 - DNA, 120 bp, Artificial Sequence
  ENSG00000284959_57 (sequence is synthesized)
agcattcagccatccttatcaaggcagcagacaagtgaataatgccatcttggactctccagaaaagcccatttgtcatctgaataccatgcaatactgtaaaccttgaataacaccatg

SEQ ID NO: 924306 - DNA, 120 bp, Artificial Sequence
  ENSG00000284959_58 (sequence is synthesized)
tgaaagtgctcccaagaagcagagaaaaatcatgacaggaaaaagttgaactgcttgatgtttaccatagatggaggtctgcagctgcgattgcctgccatttcaagataaatgaatcta

SEQ ID NO: 924307 - DNA, 120 bp, Artificial Sequence
  ENSG00000254896_0 (sequence is synthesized)
gtaaaatgaaaggaagagaaaacgtggggtgtggaagacattgccagtagcctgcaatatctttccttccttccttgctaagaggagccattgtttggggcagcaggtgccccatcccaa

SEQ ID NO: 924308 - DNA, 120 bp, Artificial Sequence
  ENSG00000254896_1 (sequence is synthesized)
ggaccaaccatgttccctaatttccagcatcctttgcagctgtggatggccatgtggcctatttttttgccattgggttgtaagtggaagttggattccaagagagctttttcataaccc

SEQ ID NO: 924309 - DNA, 120 bp, Artificial Sequence
  ENSG00000254896_2 (sequence is synthesized)
atgaaaaactcagttactgctaggattacacttttctctttttgtcagcagccatcttatgaccaagaggtgactagcatgaacacaaatgccttcacactgagggtaggaagctggaaa

SEQ ID NO: 924310 - DNA, 120 bp, Artificial Sequence
  ENSG00000254896_3 (sequence is synthesized)
gcagactttagacagcagatggcatccttgaatatctcaacactaatgcctttatgtccccagacttcatgttctgggggaagaatcgatctctattcatttaccctaccatacatgagg

SEQ ID NO: 924311 - DNA, 120 bp, Artificial Sequence
  ENSG00000254896_4 (sequence is synthesized)
tatggactgcatgtctgtccctccctattcccgtgttgaactcctgaccttcaacaggatggtatttggaggtgggacctttgggaggtgattagatcatgacagtggggctctcatgga

SEQ ID NO: 924312 - DNA, 120 bp, Artificial Sequence
  ENSG00000254896_5 (sequence is synthesized)
tgggattagcaccttatataaggagatatgtgagaaagatggtttttctctcagccatgcgaggataataatgagaaaaccactatctgcaaaccagaaacagtccttcgtcagacacca

SEQ ID NO: 924313 - DNA, 120 bp, Artificial Sequence
  ENSG00000254896_6 (sequence is synthesized)
catctgccagtgccttgatcttggacttccagcctccagaattgtgagaaataatcccaagtcacaccaccttctattcgatgggctctacgtatcaggaaggtacctgtgactggtgga

SEQ ID NO: 924314 - DNA, 120 bp, Artificial Sequence
  ENSG00000254896_7 (sequence is synthesized)
aggaaaatgcacttagcagtaattagaagctgagctcagggtgcagctccagggacaacgcccgcagccccgacctccttccctgctcagtccagcacaggaggaaggacaccattttct

SEQ ID NO: 924315 - DNA, 120 bp, Artificial Sequence
  ENSG00000254896_8 (sequence is synthesized)
ccggcttgcaggtgccgcgtgcctttgccagctcctcggacggcggcatggtggttgctctgtccctctagaagcctctgcgctgcaaaggtttgtcgggtcatttgacagagctccatg

SEQ ID NO: 924316 - DNA, 120 bp, Artificial Sequence
  ENSG00000254896_9 (sequence is synthesized)
cgtccctggagagtgagggccggcgctgctgtcccgcatgctgagctcattagtgcagaactcacttcggcaactgtggaggcagacagcatgaacaaagtgcacctgtgagcgacactg

SEQ ID NO: 924317 - DNA, 120 bp, Artificial Sequence
  ENSG00000254896_10 (sequence is synthesized)
ccagcccttgggagcggctgcgggcctgcaggggtgagcggggcgcggcgtggctctctaggcgcttatgggggcgggaaatggcggtgccccggagtagctgcaggcgccccgggatag

SEQ ID NO: 924318 - DNA, 120 bp, Artificial Sequence
  ENSG00000254896_11 (sequence is synthesized)
ctgcaggtgccccggaatagctgcaggtgccccggagtagctgcaggtgccccggaatagctgcaggtgccccggagtagctgcaggtgccccggacctgtctgcgcgccgggacacggg

SEQ ID NO: 924319 - DNA, 120 bp, Artificial Sequence
  ENSG00000254896_12 (sequence is synthesized)
tttgtctgcaagaacgcattggtggtgtcctgatcgacaccgccaggacctggagggggtgcctggcacagtgaccccgacgttgggctggccccagccttcctcttcttcctgctctgt

SEQ ID NO: 924320 - DNA, 120 bp, Artificial Sequence
  ENSG00000254896_13 (sequence is synthesized)
gtggaaggggggccgcatcacccttggttccaggcagccagcgagcattgcgctcccggaaaccccctccacgcgggacttcaccccagagggctcgtctgctgaataaccgtcactcag

SEQ ID NO: 924321 - DNA, 120 bp, Artificial Sequence
  ENSG00000254896_14 (sequence is synthesized)
gcagcatctggaaattccccgcactttcaggctgagatgagaccgcatgcctgggagatctcacggacagcgccggcttggtggtcaagcggtgggaggccgaaggccccggcctttaca

SEQ ID NO: 924322 - DNA, 120 bp, Artificial Sequence
  ENSG00000254896_15 (sequence is synthesized)
acaagcggggggtcataggaagtgtcccttggggctggggacccagggcagccgtgcggaagggagtcacccaaccagagcacgaagcgcaaggccgtgggcagccccgcagccgggcgg

SEQ ID NO: 924323 - DNA, 120 bp, Artificial Sequence
  ENSG00000254896_16 (sequence is synthesized)
gtaggactgccaggactcaggcattcgagcacttcacgtgtcacacatgctgcggagaaccatttgcccttcgccacagcccttagagtatctaccgcgtgtgactactgtggcctccac

SEQ ID NO: 924324 - DNA, 120 bp, Artificial Sequence
  ENSG00000254896_17 (sequence is synthesized)
ttccaagagaaggaaacgggagtggagaggtgtttagttgcttagccaagctgcctgagagctggagctgatatttgaacccgggcaagtctgactccaacatctgtgttcctaaatatt

SEQ ID NO: 924325 - DNA, 120 bp, Artificial Sequence
  ENSG00000254896_18 (sequence is synthesized)
ccccacgtggccgtggggaaggtcaacgcaatgaataacgagaaagaagacacacagcttagacagattttatgaatcagaattaagcaacataagttgcccgtctcccccttcttccct

SEQ ID NO: 924326 - DNA, 120 bp, Artificial Sequence
  ENSG00000254896_19 (sequence is synthesized)
cctcccttcttccctcctcccctttctcccctccgtccccgcttccttccttcatttctatcagcctttattgaaagcatcctacctgtgtattttccacaattcctgtcaaaatcctgt

SEQ ID NO: 924327 - DNA, 120 bp, Artificial Sequence
  ENSG00000254896_20 (sequence is synthesized)
gctcccagaagcggagcctctccgtctcttggctccaaagctgtctgagcctgccctggcttcagtccagaggagaccggcttccttccttcccctgcgggcatcgtcggcccttgcatt

SEQ ID NO: 924328 - DNA, 120 bp, Artificial Sequence
  ENSG00000254896_21 (sequence is synthesized)
cgcatcctttgcaggtgaaggaatggcatggaatctcgcgtgagaacttcatggttccaatgtcagaattatgtagggataattagaattcttaggccctggtgtgatgtagtaggaaga

SEQ ID NO: 924329 - DNA, 120 bp, Artificial Sequence
  ENSG00000254896_22 (sequence is synthesized)
aaagaggttatggagttggccatagataaaatagaatctctgctctgctaacttctaattatgtgctttcaaaaaatacatttcccttcctggatattcagtttcctgatgtggataacc

SEQ ID NO: 924330 - DNA, 120 bp, Artificial Sequence
  ENSG00000254896_23 (sequence is synthesized)
catcctgatgggcaattatacaagaaaattgatgttaagttcctagcacggtgcctggcacattgtcaatgttcaataaactttagttctcatttctctgtttctagtgggattttaagc

SEQ ID NO: 924331 - DNA, 120 bp, Artificial Sequence
  ENSG00000254894_0 (sequence is synthesized)
agaagagaatgacaagagaggatgtcatattaaaaaaaggtttcaaacaatattggcagggatagtgttgaaaagttttcctttcactagtgggacacattccccttttcttttcaaaga

SEQ ID NO: 924332 - DNA, 120 bp, Artificial Sequence
  ENSG00000254894_1 (sequence is synthesized)
ggaagaacatggtgtcatccaatgtgaagtgagcagtttcgggtcaaactcttatggtaagaaactaaaaaaagatgccaagagacaaaccttcagaaatagaagaaatgcaaaagatgg

SEQ ID NO: 924333 - DNA, 120 bp, Artificial Sequence
  ENSG00000254894_2 (sequence is synthesized)
ttacaaaacagaaacaaacaactcaaaaatttaccatactttgtaatgaaaataccagtatgttgaagacacagcagactgggtttctattagaacaagtatcagcaaggtcatgtagac

SEQ ID NO: 924334 - DNA, 120 bp, Artificial Sequence
  ENSG00000254894_3 (sequence is synthesized)
ttgtagaaacttttgccttctcctgcaccagacagatcattgtccagttgggttgtcagctggagaccgaaaagaacctaaaaaatggatctttttttttttctttttcccatggtcacg

SEQ ID NO: 924335 - DNA, 120 bp, Artificial Sequence
  ENSG00000254894_4 (sequence is synthesized)
catccacacaaatgagtcttttggatgagaaaagtcacagcaacttgagttctcctaatgaacagatgactttttagccctgtttgtttcaatggggaaaacaatgacaaaaaaaacaaa

SEQ ID NO: 924336 - DNA, 120 bp, Artificial Sequence
  ENSG00000254898_0 (sequence is synthesized)
gcaggtcacattgacaagacgaaaaatggttgagccagatggccttctatactgggagagattcttggttatgcagcacaagaatcacagatatggctgatcctatcacaaatgtgcctt

SEQ ID NO: 924337 - DNA, 120 bp, Artificial Sequence
  ENSG00000254898_1 (sequence is synthesized)
aaaagaaacagtatgaacctcaagctggggatcacttgaaaccatacaaggccaccaaggataggttcccaccttggaccacacaagatcgccaacctgaaacttaacaccagtggacac

SEQ ID NO: 924338 - DNA, 120 bp, Artificial Sequence
  ENSG00000254898_2 (sequence is synthesized)
ttccgttgttggaacagaagatagtattggctgaacctacaggaaagggtcaaaaaacttcatcagaaattcaaaaaaagaaactatgtataaagtacattaaaaatgctaacaatgtaa

SEQ ID NO: 924339 - DNA, 120 bp, Artificial Sequence
  ENSG00000247556_0 (sequence is synthesized)
gagaagctgcgaagatggcggagtaaggcgtgccgctgcaaactggcctctgggccgggggcgagcagcccccgggaggccgagtgcatctgttggaccgtgcgaggagaagaaaaaaaa

SEQ ID NO: 924340 - DNA, 120 bp, Artificial Sequence
  ENSG00000247556_1 (sequence is synthesized)
tatcggccagaggagaggaactaaccgaacattcttcctccctaccttatagaggggagtggtcatctacactaaagcaaagtgttaggcgcgtccgtgcgaagagaccaccaaacaggc

SEQ ID NO: 924341 - DNA, 120 bp, Artificial Sequence
  ENSG00000247556_2 (sequence is synthesized)
tttgtgttccttatcacaggaagaaaattttccttgacctttaggtgcttttatattcatctcaaaaacaaaattctgaactcaggacttggcaagtgtctctatgttgtctcctagagt

SEQ ID NO: 924342 - DNA, 120 bp, Artificial Sequence
  ENSG00000247556_3 (sequence is synthesized)
gggtagtcctgcttcttttacccagttactttcccgtttttgaaatgtggctatcacttctctacacattacctccatgatttggaatggaaaaggccacttttctttttgttctgcctc

SEQ ID NO: 924343 - DNA, 120 bp, Artificial Sequence
  ENSG00000247556_4 (sequence is synthesized)
tcaaattcaacacagaggagctcctaggattccagttatcctgctaacatctccaggaagaaagaagcaactcacatgggtcttttgctgtttgcttaattataaagacatcattttgca

SEQ ID NO: 924344 - DNA, 120 bp, Artificial Sequence
  ENSG00000247556_5 (sequence is synthesized)
agcagaaggctgagtttcatttgaaacaggtgcttaggtggtggtatttgtgaatacttttcattccaagcaagaagactaaagaagtagcaagtatgaatgacttcagggtttaaaaaa

SEQ ID NO: 924345 - DNA, 120 bp, Artificial Sequence
  ENSG00000247556_6 (sequence is synthesized)
aatgtcttccagtttcagccactaccatgataagcacagttgagactgcagcagtaaattccaaatatgtgtttctaatttgacgtgaaagatactaaaaatttatatttgtatatttaa

SEQ ID NO: 924346 - DNA, 120 bp, Artificial Sequence
  ENSG00000247556_7 (sequence is synthesized)
tactaaaaatttatatttgtatatttaaatcctggctcatcctgtgacatagatttactgaataggaacaaaggcccaattttaaacaaaaacctaggccgggtgtggtggctcacacct

SEQ ID NO: 924347 - DNA, 120 bp, Artificial Sequence
  ENSG00000247556_8 (sequence is synthesized)
aaacaactttggacatagaggagttgggggcagaggggggaggatgagagaattttccatgtaactccttttccttaagaaaaagaagcaaaaatccctcatgcagtgccatctgacttt

SEQ ID NO: 924348 - DNA, 120 bp, Artificial Sequence
  ENSG00000247556_9 (sequence is synthesized)
ctttatggtgtttcacattatatagttactttttttaataaacgcataagattaactcttcctgcaacccaaggtggatacttggatgtttgatttttatttatttatttatttattttt

SEQ ID NO: 924349 - DNA, 90 bp, Artificial Sequence
  ENSG00000247556_10 (sequence is synthesized)
atgcagtctctctctgttgcccaggctggagtgatgcgtgatttctgctcactgcagtctctcccacccgggttcaagcgattctcctgc

SEQ ID NO: 924350 - DNA, 120 bp, Artificial Sequence
  ENSG00000247556_11 (sequence is synthesized)
cgcaccaccacgctcagcctgatttctaggctgaaaaggctgggactcaggtactttccccagttgggactgaactttctcatcagagaatgggcctcagaagcaatgttcccaaacttg

SEQ ID NO: 924351 - DNA, 120 bp, Artificial Sequence
  ENSG00000247556_12 (sequence is synthesized)
tggttgggtcatcgtggaaaagaaacctcaaataagaaaaataattacaataagaaatggattttcttttttcccacaacagttatacattataaagaacagactgtcgtagaaaactgt

SEQ ID NO: 924352 - DNA, 120 bp, Artificial Sequence
  ENSG00000247556_13 (sequence is synthesized)
ctttgcttccaaatcagcagaggaccattgtatgtattgtcaggtctttatataagagtgaaacctttatttatgcttcttgtgagtagagaataaattttaaaactaattagatgaaat

SEQ ID NO: 924353 - DNA, 120 bp, Artificial Sequence
  ENSG00000247556_14 (sequence is synthesized)
taagaacagagtattggaacatctctgtgttttccggaatgtttactcaggtccatgaatgctgtgatgctgggaacttagggaagattcaccaaaatttgagagtgataaaaatggcct

SEQ ID NO: 924354 - DNA, 120 bp, Artificial Sequence
  ENSG00000247556_15 (sequence is synthesized)
aaaatgggaaatggtgagcactcttattattagtgagattggtcaatcagcccatttgaaatgggtaaaaaatactttcagtaaaataattacatattatatataaaatatttctttttt

SEQ ID NO: 924355 - DNA, 120 bp, Artificial Sequence
  ENSG00000247556_16 (sequence is synthesized)
tgagggcagctactgagtgataaaagcatagtagaaatcactttggttaaaagtaactcaaatttttctcttaagtaatctaccaacttcctgatgtttttctttaatattttggaactg

SEQ ID NO: 924356 - DNA, 120 bp, Artificial Sequence
  ENSG00000247556_17 (sequence is synthesized)
ttcaagacagaatggagcctacatatatggtgttccactagtatgttgaaaatgtcatatcatggagaatggagacaccttccaggtgtctgttaaacccatcttctctgtgtacttctg

SEQ ID NO: 924357 - DNA, 120 bp, Artificial Sequence
  ENSG00000247556_18 (sequence is synthesized)
gcatcttttttggtaggatcatttggcagggggtagagtacctgtacttttggcaccattgaaaccagctctggcccacttgtttgaatagctatcagactcagcgtctctatatgcttt

SEQ ID NO: 924358 - DNA, 120 bp, Artificial Sequence
  ENSG00000247556_19 (sequence is synthesized)
atatacagttgagagaaccagtgtttaatgctcttgaaattgtatcttccatgcttcagaccagatgcatttaacaaaatggatatattccagctgtagttgcccagtgtttacttaaca

SEQ ID NO: 924359 - DNA, 120 bp, Artificial Sequence
  ENSG00000247556_20 (sequence is synthesized)
catctacatttttttcttgtctattttggtccccttgataggaaaagctataattttaggcaggactatacgtcgatttgtagccatgcttccttcctttcccttgctcatccatgttag

SEQ ID NO: 924360 - DNA, 120 bp, Artificial Sequence
  ENSG00000247556_21 (sequence is synthesized)
ctggcagtttttcttttgaaaagttaaaaccgggatatgtgcaatagaaatatatatatatatatgtatattttaatacttgtggacaaatgttacaagttgtttaagaacaacaaaatc

SEQ ID NO: 924361 - DNA, 120 bp, Artificial Sequence
  ENSG00000247556_22 (sequence is synthesized)
accaatgtcttccattttgagatgtgtatagttttgtaagcattagtgcttggtagcatattgtagtgccatgttaggggttagtgcatgagtctagtgattttaaacttcaggatgaat

SEQ ID NO: 924362 - DNA, 120 bp, Artificial Sequence
  ENSG00000247556_23 (sequence is synthesized)
tattgataataacaaatagtgtaaaaagagtggaaaatctaaaccttttctttttccataatgtctaaatctgttatattcttcctggggaaaagagattaaggcccaaaagactcattt

SEQ ID NO: 924363 - DNA, 120 bp, Artificial Sequence
  ENSG00000247556_24 (sequence is synthesized)
atgaatagaaatgtggggtcaaaatctgagatactatatttgaggacatttcagctttccataaggtatctggaaaccagctgtctttgtgtcttatgaaacctcaagtcaaaatgagac

SEQ ID NO: 924364 - DNA, 87 bp, Artificial Sequence
  ENSG00000247556_25 (sequence is synthesized)
ctgtctttgtgtcttatgaaacctcaagtcaaaatgagaccgcatttaattattctgctttgctctttttttggggtgggggggaga

SEQ ID NO: 924365 - DNA, 120 bp, Artificial Sequence
  ENSG00000247556_26 (sequence is synthesized)
caaactcctgacctcaagtaatccacctggcctgctcttttcatgtcttaacatggcatgtcttttagtttcattattttcctactccttgtatgtcaagaaattacattttgcatgtct

SEQ ID NO: 924366 - DNA, 120 bp, Artificial Sequence
  ENSG00000247556_27 (sequence is synthesized)
gtcttatggagatgctgttaattgcttcagtgagtgcttttctaatctgcagaccatttacatttcctgtttgcagcatgctgtgtgcaaacactcagtaatttggagtattcaattatt

SEQ ID NO: 924367 - DNA, 120 bp, Artificial Sequence
  ENSG00000247556_28 (sequence is synthesized)
tgttagggctcttcctatttccaaatgtgctgaattgtctattgatgggattttcagatcttttcatgagaactggaaatgtagctgggtggcacctacctaggttgctacgtagtgagt

SEQ ID NO: 924368 - DNA, 120 bp, Artificial Sequence
  ENSG00000247556_29 (sequence is synthesized)
agactttctcttgggtatagtaagcctcagacagctttcacttttatctactttacttgtggaaataaaacagtcattttgttctgaaagaataagatagctttctgtagagaaggaatt

SEQ ID NO: 924369 - DNA, 120 bp, Artificial Sequence
  ENSG00000247556_30 (sequence is synthesized)
cctacctctaaaagctgccttgagaactcagaactggcagttttctgaggtgatttttaaatttcagtattagggagagtccagcatttgctgacacagattctacataactaatgtatg

SEQ ID NO: 924370 - DNA, 120 bp, Artificial Sequence
  ENSG00000247556_31 (sequence is synthesized)
atagcaaatgcaaaactattataatgtggtgtatcttgcgcatacacaggttagaacaagtagactctggcagcagatctccagagacccaagtttaggttctcatagtgtatttgaagt

SEQ ID NO: 924371 - DNA, 120 bp, Artificial Sequence
  ENSG00000247556_32 (sequence is synthesized)
agacccaagtttaggttctcatagtgtatttgaagtagttatactcctggcttaagtagtttagtgcctgggagaatccattactgaaaagcatttaacttaaaaaaaaaaaaaaaaaaa

SEQ ID NO: 924372 - DNA, 120 bp, Artificial Sequence
  ENSG00000247556_33 (sequence is synthesized)
gtagaattttagtagcaataagtttgtgcatgtatagtaatttgcattagcaaggttgtacaatagaataagtgatactactggagtttgtggggctctgcaaccaagagttgcacaagg

SEQ ID NO: 924373 - DNA, 120 bp, Artificial Sequence
  ENSG00000247556_34 (sequence is synthesized)
ctgtactccagcctggtgacagtaagactccacctcaaacaaacaaaaaatgcacaaaaggaaaaaatgttctggataaagagcatatgaaaggtactttcttttagaacagtatgaatg

SEQ ID NO: 924374 - DNA, 120 bp, Artificial Sequence
  ENSG00000247556_35 (sequence is synthesized)
tatatgaatttatctttatgtgagaaataatcttttttgtaagttaaaggttaaagaccctgcttgtttcctaaatcagagggttagagctgttgaaattaaacctttatagtgcttaac

SEQ ID NO: 924375 - DNA, 120 bp, Artificial Sequence
  ENSG00000247556_36 (sequence is synthesized)
ctggaaacaaatgtactacagccccactgaagccgctctatgggttttttgcttacgatgttttagcaacaggcatttattttgtagaatggtatactttctgctttgtctcctcatctt

SEQ ID NO: 924376 - DNA, 120 bp, Artificial Sequence
  ENSG00000247556_37 (sequence is synthesized)
tctccactggtttcctgggtacattttttttaaagggagagaagtttgtgagtttaatgttttaaaaaaactcccaagaacatggataagccggatttctctcatgcttatgattaggga

SEQ ID NO: 924377 - DNA, 120 bp, Artificial Sequence
  ENSG00000247556_38 (sequence is synthesized)
gttaggatttaaagatgcaaagcagaaggactgaaaggaatagccagtgaatatgtttcagtgggtgaggtgtgaaaccttgtctaatatagatgtgtcctatggcctgtgactgcttat

SEQ ID NO: 924378 - DNA, 120 bp, Artificial Sequence
  ENSG00000247556_39 (sequence is synthesized)
tctttatcaatgagaactcagcaaactagtttctttcttgatctgaggaaccacacagctcacatcagaatataatagtggaactagggtgacttcactccctttcacctgatgtctatc

SEQ ID NO: 924379 - DNA, 120 bp, Artificial Sequence
  ENSG00000247556_40 (sequence is synthesized)
ttggccttttagcaccttgactatccctgaaaagactgggtctttgttttcccagggaaaaaacgaagtgatgtagatctaagaaatagtgcctctttaatatttaattcttacatgaca

SEQ ID NO: 924380 - DNA, 120 bp, Artificial Sequence
  ENSG00000247556_41 (sequence is synthesized)
actaacacacagggaaaaggctatgttaagttgattatagctcctcttaaaatgtcctatgctgtcagttggtcttagagacatgggaataaccaagcaatattcagacatctgcactat

SEQ ID NO: 924381 - DNA, 120 bp, Artificial Sequence
  ENSG00000247556_42 (sequence is synthesized)
ctggggacagcgctacatagtacaatgatgtcagcagttcagttacttggaacaattaaagattacccttaacagccatgttaatacatctaaatgctaaaatatactacgagtttttca

SEQ ID NO: 924382 - DNA, 120 bp, Artificial Sequence
  ENSG00000247556_43 (sequence is synthesized)
tagtcttgaaagtatacagttaattacttttcaaagttactgtggtctcatgtttactcttcttgtatctgtgatatgcaaaaagatgaagactcttggcctccaggagtttacattctc

SEQ ID NO: 924383 - DNA, 120 bp, Artificial Sequence
  ENSG00000247556_44 (sequence is synthesized)
atggtgctgttggttcaagcagattgctttagtttattaatgaacattgcttggctattaattatatcctatttggaaggatcccttggtgaacagttttaaaaagcagagggctgtgct

SEQ ID NO: 924384 - DNA, 120 bp, Artificial Sequence
  ENSG00000247556_45 (sequence is synthesized)
aaatttcagggtattgatagcttgagtttacattgtattagccctgctcgttatcatttttttccccagggagctatgcaggtaatgctcattagcatgaatcagaaaagaaaccattct

SEQ ID NO: 924385 - DNA, 120 bp, Artificial Sequence
  ENSG00000247556_46 (sequence is synthesized)
gcctaagagcatcttaaccatccccctaaaccacctatgctctcctgttatagttgtcagtaaatcacgaagaaaattaacagctccttaagactctacatccctcaattctctttcttt

SEQ ID NO: 924386 - DNA, 120 bp, Artificial Sequence
  ENSG00000247556_47 (sequence is synthesized)
tcccagagtttgtacatcattctctactcagatggaccaggatttgcatataagccttttaaaactgactagtggtcctaattttaacatttttgtgtatgactcctatcccttttctga

SEQ ID NO: 924387 - DNA, 120 bp, Artificial Sequence
  ENSG00000247556_48 (sequence is synthesized)
agcagcattgtgatagatgtggagcttctacctgcatttctaagcaattattaacccaacttttgagttgaaacttgcatggatccttgttatgtcccgtaattcctctgaatcaaggaa

SEQ ID NO: 924388 - DNA, 120 bp, Artificial Sequence
  ENSG00000247556_49 (sequence is synthesized)
tttattttgcatgcttattaaactcaaactgggtctgattgaaagtgcaagcaatagtgacaggaccttaactctggttttagagtacgaacattctaatgcatgactcaaaatgtccag

SEQ ID NO: 924389 - DNA, 120 bp, Artificial Sequence
  ENSG00000247556_50 (sequence is synthesized)
tgttgtggttactagttattttatatatgcatttgttaataatgaagcaatagagactaagaccaatagcttgaatatattcagattattttcatgttttaataaaggatttttcttact

SEQ ID NO: 924390 - DNA, 120 bp, Artificial Sequence
  ENSG00000247556_51 (sequence is synthesized)
tccattgaaaatgggaagtagaagataaacaggggcaaccacaagacattcaaactgtcaggactagggcgtagcagtgcccaccctctaaccacttgcctggttccattagtccccaag

SEQ ID NO: 924391 - DNA, 120 bp, Artificial Sequence
  ENSG00000247556_52 (sequence is synthesized)
catgtttgaaaacaaaagacacaaactaagcatgctgaataaaactagctgctatggctgtaataatcagaaaggtgcagagtttcagaaagagtaggaaagtagggaatgccagtatgg

SEQ ID NO: 924392 - DNA, 120 bp, Artificial Sequence
  ENSG00000247556_53 (sequence is synthesized)
agtatgtaaaataactagatatggatatggggtttgtttatgatatgctttatgtagacaaagtttgaggtcttttaaaactgggatttgagttgaaaagagtcaggatgcacatatttc

SEQ ID NO: 924393 - DNA, 120 bp, Artificial Sequence
  ENSG00000247556_54 (sequence is synthesized)
cactatttcaggattttcagatgactaggcacatgttgtggatgatactggtaccaactaccaatgaccaactataaagtacccctgcaataagggagacttcctttttgtagaatagtc

SEQ ID NO: 924394 - DNA, 120 bp, Artificial Sequence
  ENSG00000247556_55 (sequence is synthesized)
ctgaaaatactgacagatctgtggttagtttgttattttattgcataaaaaacagtttaaacaaattttatagccaaagttttatccttgatgggtttggccagactgcaatttcttgac

SEQ ID NO: 924395 - DNA, 120 bp, Artificial Sequence
  ENSG00000247556_56 (sequence is synthesized)
taaagcttttaatgccaggttaaacaggagaaactttttccactagaagaaaatccttgctatctattttttccaatagaagaaaatccttgctatttattttatttgatgaataaacaa

SEQ ID NO: 924396 - DNA, 89 bp, Artificial Sequence
  ENSG00000247556_57 (sequence is synthesized)
cttgctatttattttatttgatgaataaacaaatttattgcagtagcttaaaaaaattttttttttaaaagcaatgtgatctcagctca

SEQ ID NO: 924397 - DNA, 120 bp, Artificial Sequence
  ENSG00000247556_58 (sequence is synthesized)
acaggtgtgagccactgcacctggcctgtagtagcttaaaattttccttgagaaaattcctgactttaaaaataacccttatataagtacaagtgattgtgacaaatgacgtaaaaatgg

SEQ ID NO: 924398 - DNA, 120 bp, Artificial Sequence
  ENSG00000247556_59 (sequence is synthesized)
aatgacgtaaaaatggcattcatgatgtctgaaacaagcctaaatagaattcaagattagactaaatgattttcacaaagcacattcaaggttttacattctatgattgaaaaaaatttt

SEQ ID NO: 924399 - DNA, 120 bp, Artificial Sequence
  ENSG00000247556_60 (sequence is synthesized)
ttgaaaactttttatttcattctttcctgtaggattttgctacaaataactttgggaatgaataaagtggaatggtaactttccagtggttcagaattgaattagacttcttgtgactgt

SEQ ID NO: 924400 - DNA, 120 bp, Artificial Sequence
  ENSG00000247556_61 (sequence is synthesized)
gatgtttggtttccattgaaatatatgaagtgagatgtcatatcctgaatatagtttgtcttccccaattacttgatagcatgtctgtcagccagtaaagattaagaacagagtttctct

SEQ ID NO: 924401 - DNA, 120 bp, Artificial Sequence
  ENSG00000247556_62 (sequence is synthesized)
aaattcctccgattattccactaaggcacattaaaatacttaattttgggaaaccagacatcacagatttctccatgaagtcctaaatcttctttaaagtcagaataggtatcttagtta

SEQ ID NO: 924402 - DNA, 120 bp, Artificial Sequence
  ENSG00000247556_63 (sequence is synthesized)
ctgacagtattcaggtttttttctcccttggtgatatgtcattccatcagtgaaaaaatattttctcccagggataagaaaggtattctggtaatacattatcatcaatccttaaacagt

SEQ ID NO: 924403 - DNA, 120 bp, Artificial Sequence
  ENSG00000247556_64 (sequence is synthesized)
aacagtcttggcacttatcacaaaaccgacccatttcttataaccagaaagattatcttagactgtccttcacattatactttacctactgccttgtaagaataagagttgctcactgtg

SEQ ID NO: 924404 - DNA, 120 bp, Artificial Sequence
  ENSG00000247556_65 (sequence is synthesized)
tttacttgctgtcctccatattctccattgcaccattggtgtataacgttaagagtttcattgaatattattttaagtattacaaaaggcagcttgcttcttaatctatgcatctttggg

SEQ ID NO: 924405 - DNA, 120 bp, Artificial Sequence
  ENSG00000247556_66 (sequence is synthesized)
gtttttgaagaaatttaattctttgatgtaaaaaggaactgttaaaaaagttggaagctctgcacctgtgtatatatatattttagcaataaagcagcatgggctgagaatgcactgaaa

SEQ ID NO: 924406 - DNA, 120 bp, Artificial Sequence
  ENSG00000247556_67 (sequence is synthesized)
gctcaagcgatcctcctgcttcagcctcctccaaagtagctgggaccacaagagggcaccaccacgccctgctaattttttattttttgtagagtggggtcttgatatgttgcccaggct

SEQ ID NO: 924407 - DNA, 75 bp, Artificial Sequence
  ENSG00000247556_68 (sequence is synthesized)
tattttttgtagagtggggtcttgatatgttgcccaggctggtctccaattcctgggctcaagggatccccctca

SEQ ID NO: 924408 - DNA, 74 bp, Artificial Sequence
  ENSG00000247556_69 (sequence is synthesized)
acaaatgtggccgggcagtggatcacttgaggtgaggagtttgaacccagcctggccaacatggtgaaaccccg

SEQ ID NO: 924409 - DNA, 120 bp, Artificial Sequence
  ENSG00000247556_70 (sequence is synthesized)
ggtgagccgagaaggccagtgacggtgggacgagcaggcgccgaggaggtggcgtggcccagacgggccgggtacggaagcgcgcaggaacctgcgagttgcgggcagccggcctcggcc

SEQ ID NO: 924410 - DNA, 74 bp, Artificial Sequence
  ENSG00000247556_71 (sequence is synthesized)
catgctgagattggaggtgtgagccaccgcgcctggccagtgtgtcctttcttaattgacagtgacattatatc

SEQ ID NO: 924411 - DNA, 120 bp, Artificial Sequence
  ENSG00000247556_72 (sequence is synthesized)
gtgattatttgaatgtccctctctgactagattataaattctaaggatagtgtgtctatttttgcttaccttttatccccagcacctagtctaacactttacaaatatatattaaattaa

SEQ ID NO: 924412 - DNA, 120 bp, Artificial Sequence
  ENSG00000247556_73 (sequence is synthesized)
tattttgataagttactcaaagtgctacataaaacaaaattatagaaaatagtactttggtaactgtttcgttttatcattgctttcattatttctctgttaacctcagtttacaactga

SEQ ID NO: 924413 - DNA, 120 bp, Artificial Sequence
  ENSG00000247556_74 (sequence is synthesized)
aaaagacaaattgtatattattcaggcaatttattaaacattacctatagaatattatgatctgtattttacagaagttaaaaagtgatgtattagtattcataacaactgctccatgca

SEQ ID NO: 924414 - DNA, 120 bp, Artificial Sequence
  ENSG00000247556_75 (sequence is synthesized)
ggagtaatagaagtcaacattaagcccaactctattttcagaccaaccatgcaactttagatcagaggacacatgggactctgcatcttaattcctaaatttacagtcaaagacattttc

SEQ ID NO: 924415 - DNA, 120 bp, Artificial Sequence
  ENSG00000247556_76 (sequence is synthesized)
agagataagtattatgaattcaataagaatctaaagtaagttcttaaggcaaatagctataaaagagaagaatccttagtctctcatcttctaaaaacagcttcacaaataatttggaaa

SEQ ID NO: 924416 - DNA, 120 bp, Artificial Sequence
  ENSG00000247556_77 (sequence is synthesized)
atcagcctaaaggtaaatagaaactgcatttcccctccattcttgaagccaatctttttcaagaaatgactaagcagcacctgttgttgaagacagcaataaagcctgaacctgacactc

SEQ ID NO: 924417 - DNA, 82 bp, Artificial Sequence
  ENSG00000247556_78 (sequence is synthesized)
gggggttgtgttcttgccttctgagccaggagatggaatttcacaaggtaatgtcatcagtcaaggcaggaactggccattt

SEQ ID NO: 924418 - DNA, 77 bp, Artificial Sequence
  ENSG00000247556_79 (sequence is synthesized)
tgctcagtgggggtgcttctgagccaggagatggaatttcacaaggtaatgtcatcagtgttgcttcagaccatctg

SEQ ID NO: 924419 - DNA, 120 bp, Artificial Sequence
  ENSG00000247556_80 (sequence is synthesized)
acgaacatgaaaaatgactgtaagctattgaaatttaagttaaatcttttatttttcaacaaaagaaatgtattaaataaaaaggagtaatcttgatcatttgctcaaactaccaataat

SEQ ID NO: 924420 - DNA, 120 bp, Artificial Sequence
  ENSG00000247556_81 (sequence is synthesized)
ttgctcaaactaccaataattttcactgtctaaagaaaacagacacatatttaattagattgaaggaaatcaaatgattaaaaaataggcctggcccggtggctcacgcctgtaatccca

SEQ ID NO: 924421 - DNA, 120 bp, Artificial Sequence
  ENSG00000247556_82 (sequence is synthesized)
tggtctcaaactcttgacttaatcccaaagtgctgggattacaggcatatgccactgcgcctggccaagatctcattcttttttagggctgagtaacatatgccatcatatatatgcact

SEQ ID NO: 924422 - DNA, 120 bp, Artificial Sequence
  ENSG00000247556_83 (sequence is synthesized)
caaaataggcttcatacctactgtgttagttttagtttcctaggcctgctgtaacaaagcaccacaaattgggtagcttagaataacagaaattgtttgatagttataaataaaggtcag

SEQ ID NO: 924423 - DNA, 120 bp, Artificial Sequence
  ENSG00000247556_84 (sequence is synthesized)
cactgaaaaaaaaatttccagtccttctaatttcttgtggttccttaacttgtggcagcataactccagtcttcacatgaagttcttcctgtgtgtgtatctgagtcctaatataaggag

SEQ ID NO: 924424 - DNA, 120 bp, Artificial Sequence
  ENSG00000247556_85 (sequence is synthesized)
actagtcatattggattggggtccatcctgctctgttaatgacctcatcttagctgctgacatctgtaatgactctattaccaaataaggtcacagtatgaggtagtaggggctaggact

SEQ ID NO: 924425 - DNA, 120 bp, Artificial Sequence
  ENSG00000247556_86 (sequence is synthesized)
tttaacatacgaatattgggaggacacagttcaacccattaacacctacttataccttgattaattatatgaaaaccattcagtgtacaactgcttcaaggattgaaaccttgtatgtag

SEQ ID NO: 924426 - DNA, 120 bp, Artificial Sequence
  ENSG00000247556_87 (sequence is synthesized)
tcccagctactctggaaactgaggtagtaggattgcttgaggcctgaagttcaaggctgcagtatgctgattgtgcctgtgaatagccactgcaccccagcttgggcagcatcagaatta

SEQ ID NO: 924427 - DNA, 120 bp, Artificial Sequence
  ENSG00000247556_88 (sequence is synthesized)
tagagacagaaagtagaatgatggttgccaggggttgcaggaagggcagcgagagggaattactgtgtaatgtgtacaaggtttcagtttgggaagaagaaatgagtcctggagatggat

SEQ ID NO: 924428 - DNA, 120 bp, Artificial Sequence
  ENSG00000247556_89 (sequence is synthesized)
tacggtgatggttgcacagcagtatgaatgtacttaatactactgaattgtatactcgaaagggttaatatggtgaattttatgtgtattttatcacaataaaaacattgaaaaataaaa

SEQ ID NO: 924429 - DNA, 120 bp, Artificial Sequence
  ENSG00000280011_0 (sequence is synthesized)
ttcatcttgtgtctccacaatttcaacacagagcctcccagcagtgaatgtcatggaaagggaaacagaataaaagaggcactcttcatgacctcatcccagaaatagtgttatatattg

SEQ ID NO: 924430 - DNA, 120 bp, Artificial Sequence
  ENSG00000280011_1 (sequence is synthesized)
cctgcctaaaaccgcccaaattaaaacatactacaaaaacactatgaccagatcgatatgtcattggcataagaatgacagattagaatataaaatatatgtgagtatagataataattt

SEQ ID NO: 924431 - DNA, 120 bp, Artificial Sequence
  ENSG00000280011_2 (sequence is synthesized)
aacaaaagtagcatttcaatacagtggggaattattatttaatacataattattgtttttatcccagaaatagtgttatatattgcctgcctaaaatcccccaaattaaaacatactaca

SEQ ID NO: 924432 - DNA, 120 bp, Artificial Sequence
  ENSG00000280011_3 (sequence is synthesized)
aaaatactatgaccaaaccaatatgtcattggcataagaatgacagattagaatataaaatatatgtgagtatatataataacttaatataacaaaagtagcatttcaatgcagtgggga

SEQ ID NO: 924433 - DNA, 120 bp, Artificial Sequence
  ENSG00000280011_4 (sequence is synthesized)
attattatttaatacataattattttgtttttcactaaaccacaaagatttaactggcataacaggctacttatccagaaaaaaaataaaattggactcctgttttagccatatatgaaa

SEQ ID NO: 924434 - DNA, 120 bp, Artificial Sequence
  ENSG00000280011_5 (sequence is synthesized)
ataagatttatattaaaggcttaaacagaacaataaaaattcagcaagaaattctgaaaggttatatcaacactctcaacaaagggacaggttcctaaccaagaccagatacccaggagc

SEQ ID NO: 924435 - DNA, 120 bp, Artificial Sequence
  ENSG00000280011_6 (sequence is synthesized)
tatagaaggaatgataaacatttggtaatgcaaaaattaatttttgtatgacaaaagatgatgtaaagtcaatatataattgagatttggaacacagagccacttgtaaggctgaaattt

SEQ ID NO: 924436 - DNA, 120 bp, Artificial Sequence
  ENSG00000280011_7 (sequence is synthesized)
aatatacagagaacatgcacaaattgacagggaaggaataaacaacccaatagaaaaacagaaaaaccaagaggcaagtcacagaaggaagccaaatgtcacccaacataagaaaagacc

SEQ ID NO: 924437 - DNA, 120 bp, Artificial Sequence
  ENSG00000280011_8 (sequence is synthesized)
ttcagacttcctgggatggcagaggggagccagttgaaataataagataccactttatgcctttcagactggcaaaaaataaatctacaaatctattgttggcagctgtgtgagaaaagg

SEQ ID NO: 924438 - DNA, 120 bp, Artificial Sequence
  ENSG00000280011_9 (sequence is synthesized)
gtactcttatgcactgctgctagaaatgagaattataacttctgttgaaagcaatctgaaaatatctattaaaattaaaaatgcacataccctttgaacccagcatgagtaaaatggaat

SEQ ID NO: 924439 - DNA, 120 bp, Artificial Sequence
  ENSG00000280011_10 (sequence is synthesized)
tccatggtagaatagaaacaaaatgatgcttatcagcagaggaagacttagaggtgtgctacaggggaaaaatgcatatacacatatatatcatatatacacacgtctacttttattata

SEQ ID NO: 924440 - DNA, 120 bp, Artificial Sequence
  ENSG00000280011_11 (sequence is synthesized)
ttattaacactagaagatttgtgacacaaagtttacaaataataataaaatatatgatactctgttttataaaatgtatatattcaactgattctcacagaatgcttttatgatttttgc

SEQ ID NO: 924441 - DNA, 120 bp, Artificial Sequence
  ENSG00000280011_12 (sequence is synthesized)
ttgccaaagtcttgtacctgcagccaattgatagttgcaaccaatatacaaatataacataatgttacccacagacagctcggtcaacgcggaagaaaaccctcctgggggttgtcactg

SEQ ID NO: 924442 - DNA, 120 bp, Artificial Sequence
  ENSG00000280011_13 (sequence is synthesized)
agggtttcactgggtcttcaccccagggaagtgaagactttgtgccacatgatcaagggcttggatcattgcggtcttttgtgtttccaaagacaattaccacaaaatttcccttaccac

SEQ ID NO: 924443 - DNA, 120 bp, Artificial Sequence
  ENSG00000280011_14 (sequence is synthesized)
atgcactgttgtgatattatcttgccacttccatcaaaaggtgaatgttgtatctcctccccgtgaatctgacctgacctgtcatcattgtgatcaatagaatatggcggaaatgacaca

SEQ ID NO: 924444 - DNA, 120 bp, Artificial Sequence
  ENSG00000280011_15 (sequence is synthesized)
gctccagcctttgcctcttggagtgcttcttcttagaactcagtcaccatgctgtgaggaagcccaagtagccacgtggagaggtcaacatagagaagagttcaggtcccttcctgatag

SEQ ID NO: 924445 - DNA, 120 bp, Artificial Sequence
  ENSG00000280011_16 (sequence is synthesized)
gcccagctgaactcccagcttgcagccagcatcaacccccagccatgtgagggaggtcgtgttgaaccctgcagccatcccagtatcccaacaccatgtgaagcagacacaccacatgtg

SEQ ID NO: 924446 - DNA, 120 bp, Artificial Sequence
  ENSG00000280011_17 (sequence is synthesized)
cgactcacaggcttgtcataataaatggttgttggcaatttgaactactgagttactgagttttagggtggtttgttataaggcaatagataacctgaacaactgtccaaatgaggactt

SEQ ID NO: 924447 - DNA, 120 bp, Artificial Sequence
  ENSG00000280011_18 (sequence is synthesized)
ggtttaaaaatgtattttaatgataggaacaaatacatatattatgcttaaatgccaaaatgtgttaccatctgtataatttgctttcctggcagtctttttggttctgttttcctattt

SEQ ID NO: 924448 - DNA, 120 bp, Artificial Sequence
  ENSG00000280011_19 (sequence is synthesized)
tggttggcttccttttctccttcccacacatcacatcctatgcccccaaatcaagttgattctggatacttatgcaattatttattaatgtgtacagacacatatagagagggttttatt

SEQ ID NO: 924449 - DNA, 120 bp, Artificial Sequence
  ENSG00000280011_20 (sequence is synthesized)
gaggagaggatcactgtgttataaaaatgactctgtggttctatatattttgctttcttatttgacaattctttgtgaaaattcctccaaatcccctatagagctccaattcattatttt

SEQ ID NO: 924450 - DNA, 120 bp, Artificial Sequence
  ENSG00000280011_21 (sequence is synthesized)
aaatagttgcataaaattccacagcatggccattccatattaatcaaccattctcaggggtatgctggagccagcatatactggctggtgaaagtctactgttaatttttcaggaatttt

SEQ ID NO: 924451 - DNA, 120 bp, Artificial Sequence
  ENSG00000280011_22 (sequence is synthesized)
tgcgagtcagttgttaaatgtagccaataaaaaaattaaattacacaaacttccaattaagtacattttattaaaaacaaaggtaatgcatactcagagtaatcacgtcctaattatctt

SEQ ID NO: 924452 - DNA, 120 bp, Artificial Sequence
  ENSG00000280011_23 (sequence is synthesized)
acctcattttactattattgatgctcctagggtgacttatatttattacaaaatactatataatggcgtgcttctgtgcatccctctccaagactgtgttcaggggcgtcacataggtag

SEQ ID NO: 924453 - DNA, 120 bp, Artificial Sequence
  ENSG00000280011_24 (sequence is synthesized)
tttagaattggccttggtggaactatatacaccatgggaattggcaaacaatgcacatcagggcctgactgattgttctgttgattgtctagacttaagcaagtgatggagaaaatgtta

SEQ ID NO: 924454 - DNA, 120 bp, Artificial Sequence
  ENSG00000280011_25 (sequence is synthesized)
atgatgcaaattcaactttaaagtgtgtcacatctgtagctattgcattgtggagcagggacaggtgaggtgtttgaattattaaaaatgttggttgagagaggttgcatggagaaggta

SEQ ID NO: 924455 - DNA, 120 bp, Artificial Sequence
  ENSG00000280011_26 (sequence is synthesized)
agcacagaggtaaaggaggtgagggtgtgagcccagcgaatatctgagacaagagcatctgagcagaaggaaccacaagtgcaaaggccctggggcaggtgtatgcctggcaggttggag

SEQ ID NO: 924456 - DNA, 120 bp, Artificial Sequence
  ENSG00000280011_27 (sequence is synthesized)
gaatgggaaggagggcagtgtggctggagcccagtgaacaggagaaagtgaaggggggtggaatgcaggaggggtaatagaaggggatgttagagaaggtgcagggagccagtcaaatta

SEQ ID NO: 924457 - DNA, 120 bp, Artificial Sequence
  ENSG00000280011_28 (sequence is synthesized)
tctggggctttgcagagtccgggaaggacgctggcttgcatttcaggtgaaaaggaggagcctcggcaaggtttgggcagaggagcagcataatctggcttaccgtgtaaaggcttcttc

SEQ ID NO: 924458 - DNA, 120 bp, Artificial Sequence
  ENSG00000280011_29 (sequence is synthesized)
tgactgcagtgctaagaacagactgcagaggcaaggatgaaggtggcttgcactaggatggaaacggggcagggtggagagaagccatcagattccggatgcactggggcaatgaaacga

SEQ ID NO: 924459 - DNA, 120 bp, Artificial Sequence
  ENSG00000280011_30 (sequence is synthesized)
taatttcctgacagattggatgtagagtgcagcagaaaaaggaaccatggataaacacaggctcctggcccaagccacggggaagacagggcagccaccaacccagatggggaggtggga

SEQ ID NO: 924460 - DNA, 120 bp, Artificial Sequence
  ENSG00000280011_31 (sequence is synthesized)
ggaaatgaggagatcagtgttggacgtgttggatgtgagcagaggtgtctttgacatccacgttgaaaacctagttggaggtcaggagtcaggacagaggtccaggctggaggcgtacat

SEQ ID NO: 924461 - DNA, 120 bp, Artificial Sequence
  ENSG00000280011_32 (sequence is synthesized)
gggagtcactggcatctggagggcatttaaaaccccgaggcaggatgagatcagtaagggaatgagagggtaataaaacaagacacggtaaggactgagctccagaatgcgccaacacgt

SEQ ID NO: 924462 - DNA, 120 bp, Artificial Sequence
  ENSG00000280011_33 (sequence is synthesized)
tcaaggtcaaggacacataaaagagccagcaagggactgaggtggaactaccagagagatgggaacaaggctgagagcagcagagtcctggcagccaggtgaggagagggcagcaaggag

SEQ ID NO: 924463 - DNA, 120 bp, Artificial Sequence
  ENSG00000280011_34 (sequence is synthesized)
gagagagagaccagccagcagagtcagactcagagggtggctcagacagctgacgtctgccagccaaccctgggttttgggttgggggtcactgctgacttcattaagcctcagggaatc

SEQ ID NO: 924464 - DNA, 120 bp, Artificial Sequence
  ENSG00000280011_35 (sequence is synthesized)
catggggtcacgagtgtgctggagaggggtgttcaagaaagatggggaggagttttgctccttcaaagagctttgctatccagagggggaaagaaacatggaagtggccaggcgccgtgg

SEQ ID NO: 924465 - DNA, 120 bp, Artificial Sequence
  ENSG00000280011_36 (sequence is synthesized)
gctacatttaaaaaaaacaaacaaacatgaaagcagaggaaggagtagagatcaagactgtttttgaagatggaggaacaatcagggtacaccggctttcacctgtaatcctaacacttt

SEQ ID NO: 924466 - DNA, 120 bp, Artificial Sequence
  ENSG00000280011_37 (sequence is synthesized)
agtttgagaccagtctgggcaacataatgagacccctgtttctacaaaaattgtaaaaattagtctgatgtagtgttgcatgcctgtagtcccaggaattccaggcagcagtaagctgtg

SEQ ID NO: 924467 - DNA, 83 bp, Artificial Sequence
  ENSG00000280011_38 (sequence is synthesized)
caaaaattgtaaaaattagtctgatgtagtgttgcatgcctgtagtcccaggaattccaggcagcagtaagctgtgatcagca

SEQ ID NO: 924468 - DNA, 120 bp, Artificial Sequence
  ENSG00000280011_39 (sequence is synthesized)
gagaaacagtgggtgcatgaatgctgatgctaggagtggagcacctgtggcagggcacaaaacagacggactgctccctggtaaagcccgggctttgatggggccccttccagtcagtgg

SEQ ID NO: 924469 - DNA, 120 bp, Artificial Sequence
  ENSG00000280011_40 (sequence is synthesized)
cacatgctcttccccacccctgcatgcccatccccagaggagagcgagccctgtgcctcgctcagatgcggccccattgggagcggcacatgctcttttaaaagaacatcccaactgcag

SEQ ID NO: 924470 - DNA, 120 bp, Artificial Sequence
  ENSG00000280011_41 (sequence is synthesized)
ttggacgtcccacgttcccatgaatcaccccagaaaataattgagtggctggcaaatattcaagccaaacccccagtgcgggaggcagcaagacgtgacatgaacgaggagtgtgcagga

SEQ ID NO: 924471 - DNA, 120 bp, Artificial Sequence
  ENSG00000280011_42 (sequence is synthesized)
tgaacccgagaggcagggacagacaggctcttgttagaaatgtctatttgtggctccccagtctaatttctgaatatgataatgaataaatattggtctttgcttctgcagccttttcta

SEQ ID NO: 924472 - DNA, 120 bp, Artificial Sequence
  ENSG00000280011_43 (sequence is synthesized)
tctgggtggctcagccaaatagatgctgccaccttttgttttctagaactgttgagagactagggctcagagaaaagaaaggcatcccccagggtctcagggcaaggtggtagcagggaa

SEQ ID NO: 924473 - DNA, 120 bp, Artificial Sequence
  ENSG00000280011_44 (sequence is synthesized)
ggggacactgaatggtcagagaccctgggaaggatctgtgtttgccctaagcttgaactctacctcctgcgtttgtctctgtaatgcaccctctgagtgtcatccaactactgcttaaat

SEQ ID NO: 924474 - DNA, 120 bp, Artificial Sequence
  ENSG00000280011_45 (sequence is synthesized)
accaccaatggcagggagctcactaccaccaagtggtccatgccatcgttagttggttcagaaagttagaaagttccttcatttgacaaacttctttcttgaattcctgtaatgtgttga

SEQ ID NO: 924475 - DNA, 120 bp, Artificial Sequence
  ENSG00000280011_46 (sequence is synthesized)
gcagttctctagacgtgggatgccgtgaactggtccttcagggtccctgccctcactggagagacaaataggaacctacacacagcagcacagggaggagagggaggagagtccagctcg

SEQ ID NO: 924476 - DNA, 120 bp, Artificial Sequence
  ENSG00000280011_47 (sequence is synthesized)
tgcttatgcagtgcagaggacgcaaggccacaggagagggtgatgaggctttttgcattagttgacactgagcagtgtcaactaagctgagagctgggtgacaggaaggagctctatgtg

SEQ ID NO: 924477 - DNA, 120 bp, Artificial Sequence
  ENSG00000280011_48 (sequence is synthesized)
tgggtccaagtgagggcagaattctgaacagagggacgggattgcagagggaattccaagaggtgggcaggcacccttgacattctcactgtggaagagtcagtcccaggatcaaaaact

SEQ ID NO: 924478 - DNA, 66 bp, Artificial Sequence
  ENSG00000280011_49 (sequence is synthesized)
cattctcactgtggaagagtcagtcccaggatcaaaaactgcggggtggatcacttgaggtcagga

SEQ ID NO: 924479 - DNA, 83 bp, Artificial Sequence
  ENSG00000280011_50 (sequence is synthesized)
tgaacctggaaggtggaggttgcagttagtggagattgtgccattgtgctccagcgtgggcaacacagtgagactccgtcctg

SEQ ID NO: 924480 - DNA, 120 bp, Artificial Sequence
  ENSG00000280011_51 (sequence is synthesized)
gccacctgtccgggtgtgcatcatccttgagcagcccctcccccaggtcacctccccaccttccccacccccaccaactctaggtcttctggccttcctgtcttctctgagtggtgctgg

SEQ ID NO: 924481 - DNA, 120 bp, Artificial Sequence
  ENSG00000280011_52 (sequence is synthesized)
gaggagggtctgggtgggcttggaatcacagagggcagacacattgaggaggctcttgaggtcacaatggcccacggctatggtttgagtatttacccctttcaaaactcatgtaaaact

SEQ ID NO: 924482 - DNA, 120 bp, Artificial Sequence
  ENSG00000280011_53 (sequence is synthesized)
taattggcaatttggcagtgttgagaggtggagcctttagaggtgattggatcatgagggttctgctctcctgaataggttaatccattcacagattagtagcttagtagatgaatgggc

SEQ ID NO: 924483 - DNA, 120 bp, Artificial Sequence
  ENSG00000280011_54 (sequence is synthesized)
taatggattaatgggttatgacaggagtggcattagtggctttatacaagaagggagagagacctgagccagcatgctcagcccctcaccatgtgatgccctgtgccacctcgggactct

SEQ ID NO: 924484 - DNA, 120 bp, Artificial Sequence
  ENSG00000280011_55 (sequence is synthesized)
gcagagagcctccaccagcaagaaggtcctcaccagatgtagtgccttgaccttggacttttcagcctccgtacctgtaagaagtaatttgcttttccttataaaaaaccaagtttcagg

SEQ ID NO: 924485 - DNA, 120 bp, Artificial Sequence
  ENSG00000280011_56 (sequence is synthesized)
tattctgttataagcaacaaaaaatggactaagacacccacagaagaggggctgagtcaggacactgggtctggctgctccctgaagccccagacttactgtgattgccagactgtgagg

SEQ ID NO: 924486 - DNA, 120 bp, Artificial Sequence
  ENSG00000280011_57 (sequence is synthesized)
cagctcctcctgcgactgaggcccctctgtctccctcccctcagccaacggcccccctctgccctttgggcccatgtgccagcttccctcacccagggggcagccctgcagagacctcat

SEQ ID NO: 924487 - DNA, 120 bp, Artificial Sequence
  ENSG00000280011_58 (sequence is synthesized)
caaggaaaaccccatccctcctgggccttctctgaggttgcagtgagctgcacggtgttcccaaaatgacacatctgcatgctaaccccaggagctgtgaatgtgaccttattcggatat

SEQ ID NO: 924488 - DNA, 120 bp, Artificial Sequence
  ENSG00000280011_59 (sequence is synthesized)
ggggtttttgcagatgtgattaagacaaagcccgacctgaatctactgactggcatcctcatgagaagaaggagagggaggtttgagatactcagacacagatggcacccacagggaagg

SEQ ID NO: 924489 - DNA, 120 bp, Artificial Sequence
  ENSG00000280011_60 (sequence is synthesized)
ccacgtgacattgcaggcagagaggagagggatgcgaccacaagccaaggaatgccgagagcttccaggacccactggaggctgggcaagaggggtccggagcagactcaccctcagagc

SEQ ID NO: 924490 - DNA, 120 bp, Artificial Sequence
  ENSG00000280011_61 (sequence is synthesized)
ctccagaaggaatcaaccctgccaacacctagatttcggacgctgggctctagaactgtgagagaagacactgctgttgatttaggccacctagtttgtggtcatatgttatggtaaccc

SEQ ID NO: 924491 - DNA, 120 bp, Artificial Sequence
  ENSG00000280011_62 (sequence is synthesized)
tgagctacctcacagaaggatcaaaaccactcaggtgacgggtgctccataaatatgagtgggatgcgtggatgagaggctggtcccaaagagtggagtgcccctgccccacaccttctt

SEQ ID NO: 924492 - DNA, 120 bp, Artificial Sequence
  ENSG00000280011_63 (sequence is synthesized)
tccttccacactgcaaggtcacagccactctcagcatctggccccagttcctgaatcctgccctggcccccggggcatcccatggaagccccctgctcagccatgctgtggctgttaacc

SEQ ID NO: 924493 - DNA, 120 bp, Artificial Sequence
  ENSG00000280011_64 (sequence is synthesized)
tggcagctctgggctcctgtcaaatgagtgtgcgggaactcaaataatacctgcaaaatgccaggggcagccatgagtgccaacgcatcagtgcgcctccacctccacagcaagtgatcc

SEQ ID NO: 924494 - DNA, 120 bp, Artificial Sequence
  ENSG00000280011_65 (sequence is synthesized)
cagtgagatgtgtccccgaatggagggtagttttgcttgaagctgatgtttcttatatgtaattttattcttatcgatagaagcagcttgtaaaatgtgtagctacgtgtgtttaaaggc

SEQ ID NO: 924495 - DNA, 120 bp, Artificial Sequence
  ENSG00000280011_66 (sequence is synthesized)
ttttacactgtgtaaaatttttcctaaaattagattcacaaatcgggggtgggggaagtattttgtcagatgcgtccccgctccagctggccacggtgcctgccgctgtggcctctcccc

SEQ ID NO: 924496 - DNA, 120 bp, Artificial Sequence
  ENSG00000280011_67 (sequence is synthesized)
acgcctgccagggtggggttccctgccggcgcctggaagagaaagggcccaggaccttcccagtgccctcctcccggctccctccagacgggccatattgtcccaggagttggtctgaga

SEQ ID NO: 924497 - DNA, 120 bp, Artificial Sequence
  ENSG00000280011_68 (sequence is synthesized)
tagaagctgtgccctcagggaagctgcatttgaaacattctgtcttcacccaggagaggatctgagctgcctgcccagcgggcaacagctcttcacagtcagctgctcacagagcctgcg

SEQ ID NO: 924498 - DNA, 120 bp, Artificial Sequence
  ENSG00000280011_69 (sequence is synthesized)
tgaggccccaccccctgctgggtcatcattcgctttccacggccccctctccttggtggttctaggctctcacatctcaaaccccacaaggctcttgatgccacagtggcccactgatat

SEQ ID NO: 924499 - DNA, 120 bp, Artificial Sequence
  ENSG00000280011_70 (sequence is synthesized)
ccacagtggcccactgatatggtttgaatatttgcctcctttaaaacttatgggaaactgaattgccaatttggcagtgttgagaggtggagccattttttttttaagatggagttttgc

SEQ ID NO: 924500 - DNA, 66 bp, Artificial Sequence
  ENSG00000280011_71 (sequence is synthesized)
gcccggccaagagaggtggagccttcaacaggtgattggggccaggtgcagtggcccacgcctgta

SEQ ID NO: 924501 - DNA, 67 bp, Artificial Sequence
  ENSG00000280011_72 (sequence is synthesized)
actttgggaggccaaggctggtggatgacttaaggacaggagttcaactagccaggtgtggtggcag

SEQ ID NO: 924502 - DNA, 70 bp, Artificial Sequence
  ENSG00000280011_73 (sequence is synthesized)
ccccgtctctactaaaaatacaaaacaactagccaggtgtggtggcagacgcctgtaatcccagctagtt

SEQ ID NO: 924503 - DNA, 120 bp, Artificial Sequence
  ENSG00000280011_74 (sequence is synthesized)
cactccagcctgggtgacagagtgacactacatctcaaaaaacaaacaaacaaaaaaaagaggcgattggatcatgagggttctgccctcgtgaatgggttaatccatacacagattaga

SEQ ID NO: 924504 - DNA, 120 bp, Artificial Sequence
  ENSG00000280011_75 (sequence is synthesized)
tgtgatgccctgcaccacctcgggactctgcagaggacaaggcaaccgtgactgcctccatcataaagcatggtgaggccggggagtgtgaccactcccaggacactcagagccaggctc

SEQ ID NO: 924505 - DNA, 120 bp, Artificial Sequence
  ENSG00000280011_76 (sequence is synthesized)
tcacgtcctgagaagcccaaggcacacagggaggccacttgtgccccctcgctccatcagcagtatgagccaagtccacctgggacccgaggtgggggtgaactgcctccccaggatgag

SEQ ID NO: 924506 - DNA, 120 bp, Artificial Sequence
  ENSG00000280011_77 (sequence is synthesized)
tgcagccccagcatccggtcacctcccgcctgtccagccttcctacctgaggccccagaaactggggaggggagctgagacgcccgccagtccccggctggattccttaaccacagaggc

SEQ ID NO: 924507 - DNA, 120 bp, Artificial Sequence
  ENSG00000280011_78 (sequence is synthesized)
caggaacatagcaagacccaaaaccagggttctctcacacagttgtgtttgggaggtttatccggcagctggagggaactggaagacaggaaagacgggaagctgttatgattggcatca

SEQ ID NO: 924508 - DNA, 120 bp, Artificial Sequence
  ENSG00000280011_79 (sequence is synthesized)
taatccccacccccataatgaggaagcctgtctggtgcagtggccacgcagggaaagcgtgagcagggattggaacccggctatccgcccgcccgcagttgctgccttgctagagggtag

SEQ ID NO: 924509 - DNA, 120 bp, Artificial Sequence
  ENSG00000280011_80 (sequence is synthesized)
cttgggtgtaagtcaggggacctgattagacctgcaggatcccccagctgtgggaaggccggtcaggcctggaggctccactggaaagaagttgccgagtgtcccagccccaggggtctc

SEQ ID NO: 924510 - DNA, 120 bp, Artificial Sequence
  ENSG00000280011_81 (sequence is synthesized)
agagcacagcttttctggagcagcctcatttcaacagctccgggtccaggttcaggcattacagggcgcaaagcttctacagtctgtcattttaactaaagaaacacaaagatattctcc

SEQ ID NO: 924511 - DNA, 72 bp, Artificial Sequence
  ENSG00000280011_82 (sequence is synthesized)
agtctgtcattttaactaaagaaacacaaagatattctcctcttaccaggtgtatagaaactataccatgtg

SEQ ID NO: 924512 - DNA, 120 bp, Artificial Sequence
  ENSG00000280011_83 (sequence is synthesized)
aggaggcgagggtcgcagcgattcgagatcacgccactgcacatgcattactggggccctcccagtaccttggaagctgccgtgtgagggagggaggagctgtgaggtttccccagctcc

SEQ ID NO: 924513 - DNA, 120 bp, Artificial Sequence
  ENSG00000280011_84 (sequence is synthesized)
taggaagtccactctgctcttcagagatcctgccccttgctccggaaaccatcaccacgtcacaccaggccactgttgcagcaccacaagccctgctgtcatctgctgctcccagggaga

SEQ ID NO: 924514 - DNA, 120 bp, Artificial Sequence
  ENSG00000280011_85 (sequence is synthesized)
ttcagccagagatgtgtgtgtgttgcgggtggtggttgggggggggtgcttctgagaagcccagagcagggagggtgatgccctggaatctcaaggttggagcctcctgccctaaaaggg

SEQ ID NO: 924515 - DNA, 120 bp, Artificial Sequence
  ENSG00000280011_86 (sequence is synthesized)
gggagaccgaggctgtgagcagggaagggccttgtcccctcagagtcggtctgcctgtaccccccagatgttacacgcgtgattaggtttgagcagcctcatgagaacagcatgaccggt

SEQ ID NO: 924516 - DNA, 120 bp, Artificial Sequence
  ENSG00000280011_87 (sequence is synthesized)
gctttctatgtgacccagggacactggtcttacccttggtcccaatgacatcctgccggtccccagggtctcctaaatggtgaatggacatcagctggtgggccctgtctgaccaccaca

SEQ ID NO: 924517 - DNA, 120 bp, Artificial Sequence
  ENSG00000280011_88 (sequence is synthesized)
gcccagattttgatagccagagcagacaggacagggcatagggtctgtgcccagggtggcctgaacaaggcactggtccagggtgtggaacccaacccattaggagcaccccattctgcc

SEQ ID NO: 924518 - DNA, 120 bp, Artificial Sequence
  ENSG00000280011_89 (sequence is synthesized)
ctgcacactggaggccagaaccctgtgcagactcctcaaaaggcggttcctccctctgctgacacccctctggatggggactcactgcctctaaggccatggatgccattcttgcccatt

SEQ ID NO: 924519 - DNA, 82 bp, Artificial Sequence
  ENSG00000280011_90 (sequence is synthesized)
ctcactgcctctaaggccatggatgccattcttgcccattagaaagctctgtctggtcaggcacagtagttcacgcctgtag

SEQ ID NO: 924520 - DNA, 120 bp, Artificial Sequence
  ENSG00000280011_91 (sequence is synthesized)
tgcaaacccatctctaaaaaaatttaaaaattggctggacatggtagcacaggcctatagtcccagctactcgggagcctgaggtgagaggatgcttgagcccaggaggttgaggctgca

SEQ ID NO: 924521 - DNA, 84 bp, Artificial Sequence
  ENSG00000280011_92 (sequence is synthesized)
aaaccccactctgcctgatgctgatatagaacctgcctgctacgccccgtcacctggggcctctgcctcccgcaggtgagccca

SEQ ID NO: 924522 - DNA, 120 bp, Artificial Sequence
  ENSG00000280011_93 (sequence is synthesized)
ccccgtcacctggggcctctgcctcccgcaggtgagcccacagggaagctgagtctctgtttcaggctgtgggctccctcgcacccatttcttgcctccctcagcccctgggactcaggc

SEQ ID NO: 924523 - DNA, 120 bp, Artificial Sequence
  ENSG00000280011_94 (sequence is synthesized)
cgtttccttcttctagaacagctaccccagcctactctgtcctccagcagagtcaggaccagctcttcaagaagattccatctcccagcacaccccacactaattgtgtccttgagaaga

SEQ ID NO: 924524 - DNA, 120 bp, Artificial Sequence
  ENSG00000280011_95 (sequence is synthesized)
aagcaccaaagccttttgtggccggtgtatacagtcgtccctcagtatcctggggattggttccaggaccccccgaggataccaaaatccacaaatgctcaagtccttgatataaaatga

SEQ ID NO: 924525 - DNA, 120 bp, Artificial Sequence
  ENSG00000280011_96 (sequence is synthesized)
catagtatttgcatataaccttcacacatcctcccatgtacttataaatcatctctaggttacctataatccctgatacaatgtgaatgctatgtaaatagttttaaatttttttttttt

SEQ ID NO: 924526 - DNA, 120 bp, Artificial Sequence
  ENSG00000280011_97 (sequence is synthesized)
ttacaggcgtgagccaccgcaccctgcctttcctctgaatattcttgatccaaggttgttgaatctgaagatgtggaacccgcagacattgaaggccgactgtaccgacgtgatggagaa

SEQ ID NO: 924527 - DNA, 120 bp, Artificial Sequence
  ENSG00000280011_98 (sequence is synthesized)
tgtaccgacgtgatggagaagactatctatagatacatgctacccctcccccactgtctggctggatcaggggctgggctgggagacagagctaggcaggcggagggctttcctgaatgg

SEQ ID NO: 924528 - DNA, 120 bp, Artificial Sequence
  ENSG00000280011_99 (sequence is synthesized)
aggagaacggatggtgggagagcagatgcctccatgtggggactcgagatggagagggaggattttaaagatactttttgctgcttattaaaaatctactatgtgctaccagagaatgct

SEQ ID NO: 924529 - DNA, 120 bp, Artificial Sequence
  ENSG00000280011_100 (sequence is synthesized)
tctattttccacagtatggcagacttaatcactgaacaagagtcccactgcaaagtaacggaaaatataatgtatatgtatgtatgtatatgaatgtattttatatgtgcatatatacat

SEQ ID NO: 924530 - DNA, 120 bp, Artificial Sequence
  ENSG00000280011_101 (sequence is synthesized)
agagatctataatgtatgtgttaaaatgtgccacactgagcaagcaagaacaaggaaaatacaaaccggagaacttcaagtgaaagtgaaatcccaagaggtgagcagttgccaaagctg

SEQ ID NO: 924531 - DNA, 120 bp, Artificial Sequence
  ENSG00000280011_102 (sequence is synthesized)
actttgcctgggggacctcagccatgcctggttatctgatcttcctttgtgatgaccgcatttggccctgaggatgggaggaaagccagggcccacccatcaaaggaaatcaggaaacct

SEQ ID NO: 924532 - DNA, 120 bp, Artificial Sequence
  ENSG00000280011_103 (sequence is synthesized)
agactctgtctcaaaaaaaaaaaaaaatcaggaaaccccacataaagctggtatcccccaaaggactatgctttcactattggaataagatggggaagtggggctgaagaaagggaaagc

SEQ ID NO: 924533 - DNA, 120 bp, Artificial Sequence
  ENSG00000280011_104 (sequence is synthesized)
gggaagtggggctgaagaaagggaaagcaaggacacttgtctatatcaatcttggacatgagtaaaaaatgaataaaaacctcccctaaagagtcataaccataagccagatgggcttag

SEQ ID NO: 924534 - DNA, 120 bp, Artificial Sequence
  ENSG00000280011_105 (sequence is synthesized)
ccagggctcataaccacagccataatatgggttgtacactagctgtgtggaccccaaatccttagactaggattttcacataaaagagccaaattggagtgaccctacacatccggcaga

SEQ ID NO: 924535 - DNA, 120 bp, Artificial Sequence
  ENSG00000280011_106 (sequence is synthesized)
agcagatgtgaataatctctggaggttcccattttcaacctaggccttgaagaattctccacaattaagttgaaaggaccacaatcaaaacccacaaagacccacaagggaaaaagcacc

SEQ ID NO: 924536 - DNA, 120 bp, Artificial Sequence
  ENSG00000280011_107 (sequence is synthesized)
atgagcaagcgtcaaggtaaacaacagacagcacagtgaaactgcaaaggtttggatgttagcgtcatcagacacagaacagaaaataaagataatccatagaaagaattagaggaaggg

SEQ ID NO: 924537 - DNA, 120 bp, Artificial Sequence
  ENSG00000280011_108 (sequence is synthesized)
ttcaaaaatacgaataatatgaataaagaacaacagactatacaaaggccaagatattttgaaaaagaagcaaataaaacttctagaaatgaaaaaaaaatatctaattgaaataaaatg

SEQ ID NO: 924538 - DNA, 120 bp, Artificial Sequence
  ENSG00000280011_109 (sequence is synthesized)
aatgattaaatagagttgatgcagctgttttagtcaagtgctatagtgtttgttccaccgctactgtaacacacaccaaatgagtaggagttcaaatatttcttgctcatatactgttca

SEQ ID NO: 924539 - DNA, 120 bp, Artificial Sequence
  ENSG00000280011_110 (sequence is synthesized)
aaacgagtgttcctgactggcaggcagctctcctcccagggtgactccgtctgtggctccagcatctcagcacacggcttgcaatctcaccaggctagtcagcatcaccagagcatcggg

SEQ ID NO: 924540 - DNA, 120 bp, Artificial Sequence
  ENSG00000280011_111 (sequence is synthesized)
gagtacaggagtatcaggtcatgcaggggactgggtttgaggaccaggctcagcaatgttgtgttttacttgattcacattttattattgaccacgttgggttgcaaagaaggtggggca

SEQ ID NO: 924541 - DNA, 120 bp, Artificial Sequence
  ENSG00000280011_112 (sequence is synthesized)
tgcagtccagctgcgtgcccagcaggaagagcagatgggcttggtaggtggccaggccatctgggccatggctgctgaagaaaggtggagatcccagtcagtgctagccttggccattgt

SEQ ID NO: 924542 - DNA, 120 bp, Artificial Sequence
  ENSG00000280011_113 (sequence is synthesized)
ttagctgataggacttttcaaaaccctgcccaccattattgcagttcatccttaagatggattaccatcgtgggggttgaactaagcaggcaggatcattccattttacagatgaggaaa

SEQ ID NO: 924543 - DNA, 120 bp, Artificial Sequence
  ENSG00000280011_114 (sequence is synthesized)
ctcaggttcaaaaaggggtagtgacctgtccaagactacacagctgctaaggggcccagtaagactggagccaggacttcccatatcacactcctgcctcttactccagacaaccgggta

SEQ ID NO: 924544 - DNA, 120 bp, Artificial Sequence
  ENSG00000280011_115 (sequence is synthesized)
aaggagagggatcatggagccagaggtcctccatttgtccctgtgttttcagctgagctggtgagcctactggcccagcacaggggccaagaagatgggttcaagtcagagctaagcccc

SEQ ID NO: 924545 - DNA, 120 bp, Artificial Sequence
  ENSG00000280011_116 (sequence is synthesized)
gcttgaatgctggcatcctgggatgctggggtggccagctgggtgggctgcaagttgaagcagcaggtctggatctgactcacccaggagagttaagaggtcacgttagtgggtcagtcc

SEQ ID NO: 924546 - DNA, 120 bp, Artificial Sequence
  ENSG00000280011_117 (sequence is synthesized)
acaagtatttacccagggctaggtgctgctgtgggtctccaacaagcaaagcctagaagcagggacacaaaatccaggtaggactcacctgatgagctggccttttagtgcctaactctg

SEQ ID NO: 924547 - DNA, 120 bp, Artificial Sequence
  ENSG00000280011_118 (sequence is synthesized)
agtgccaaaggcgtgccaggcctctaacctcacgtacctcatgtcactgcatcctcactaggacctatggaggagggacttccagcactgtttttgtgcctgtagtgatgatgatgataa

SEQ ID NO: 924548 - DNA, 120 bp, Artificial Sequence
  ENSG00000280011_119 (sequence is synthesized)
tgatgatgatgatgatgatgtgatggtgatgatagtgacagcagtggtgatgatggtgacaatgatggtgatggtgacaatgatgatggtagtgatgatggtgatgatagtgatgatgat

SEQ ID NO: 924549 - DNA, 120 bp, Artificial Sequence
  ENSG00000280011_120 (sequence is synthesized)
gtgatggtgatgatagtaacagtgatggtgatgatggtgacagtggtgtgatggtggtgatgatggtcataatgatggtgatgacgatctgatgatgatgatggtgacagtggtggtgat

SEQ ID NO: 924550 - DNA, 120 bp, Artificial Sequence
  ENSG00000280011_121 (sequence is synthesized)
gatggtgatgttgatgatgtggaggtgatgatgatgatgatggaggtgatgatgatgtgatggtgatgatggtgacagtggtggtgatgatggtgatgttgatgatgatggtggtgatga

SEQ ID NO: 924551 - DNA, 120 bp, Artificial Sequence
  ENSG00000280011_122 (sequence is synthesized)
tgtcatggtgatgatggtgacagtggaggtgacgatgaggatgatggtgatgatgatgatgtgatggtgatgatggtgacagtggaggtgatgatggtgataatgatggaggtgatgatg

SEQ ID NO: 924552 - DNA, 120 bp, Artificial Sequence
  ENSG00000280011_123 (sequence is synthesized)
atgtgatggtgatgatggtgacagtggaggtgatgaggatgataatggtgatgatgatgccgtgatggtgatgatggtgacagtggtggtgatgatggtgataatgatggaggtgatgat

SEQ ID NO: 924553 - DNA, 120 bp, Artificial Sequence
  ENSG00000280011_124 (sequence is synthesized)
gatgtgatagtgatgatggtgacagtggtggtgatggtgatgatgacacccatgatgtcatctgacatttattgaatgttatgtgtccagcaagcttcaagctctccagatactcaactt

SEQ ID NO: 924554 - DNA, 120 bp, Artificial Sequence
  ENSG00000280011_125 (sequence is synthesized)
tttaaatagccctgtgaagaatagattccttattgcctccatttgacatagaaggaaactgaggcttagggaggtaagtgatttgcctggggtcacagagtgaggtgaggatttgcccag

SEQ ID NO: 924555 - DNA, 120 bp, Artificial Sequence
  ENSG00000280011_126 (sequence is synthesized)
gattcacaccccagggtctgactcaagcatcacactctaaccactgcactacccagccccttccaccctgggctacacctcctctgggatagagcctcggtctgagcactctctttatac

SEQ ID NO: 924556 - DNA, 120 bp, Artificial Sequence
  ENSG00000280011_127 (sequence is synthesized)
ccagctctgtgccctgggcctgcacacagtaggtggagaagttctcttatgaatggtgtgtgcactatgattttgtacctttgtaaaaacccacctaggtattaatgcatcacctttcta

SEQ ID NO: 924557 - DNA, 120 bp, Artificial Sequence
  ENSG00000280011_128 (sequence is synthesized)
ggtaataataaaccaacccatatgaaatgcttgtggataaataaatgaattcatgcaattgttggccagcccaggtccattggctgactcttcttggaagaatcatttctggaacatctt

SEQ ID NO: 924558 - DNA, 120 bp, Artificial Sequence
  ENSG00000280011_129 (sequence is synthesized)
catcatctactttcttaccagccaggcccctcagcccagtcccccattgacctaggggcccaggacactccctgggctacacccccagggggtggggatcccatgtgtctctaggtccat

SEQ ID NO: 924559 - DNA, 120 bp, Artificial Sequence
  ENSG00000280011_130 (sequence is synthesized)
gatgcccctctgctcaccactgcccaagtcttacaaggaaagaaggctggtggggcagggatgggggttgggatggcactggcagctttgatccattgccagaagatatgggggcaggaa

SEQ ID NO: 924560 - DNA, 120 bp, Artificial Sequence
  ENSG00000280011_131 (sequence is synthesized)
cacacttttctctagacaagctgttcgcttaccagctgactttggtaaaaagaaaaaaaaaaatcttagttccatctgttcccagagtggagctggtgtgagtcctggggcttcctgcag

SEQ ID NO: 924561 - DNA, 120 bp, Artificial Sequence
  ENSG00000280011_132 (sequence is synthesized)
ctcaggcggccagacccagtttcagactccaagacagctgccctctggattattttgggaagcagctcaactccgaggcaccccagccttcgaggcatttcccttcgcttcgaagctgtt

SEQ ID NO: 924562 - DNA, 120 bp, Artificial Sequence
  ENSG00000280011_133 (sequence is synthesized)
tgcacacccagcccaagctgccagctccttctctggccctggacgccttcctgttcagcttgctataattatcctgcttccaacttcggctgcaacttctactggagtcagatttcttgg

SEQ ID NO: 924563 - DNA, 120 bp, Artificial Sequence
  ENSG00000280011_134 (sequence is synthesized)
gatggaggaagagagaaaaagagcgaaggccatggatagtgaaataaggggaggaaagggctccctgatcctgcttcgtctcagacttctttgtgggaaccacttcttccacccaccccc

SEQ ID NO: 924564 - DNA, 120 bp, Artificial Sequence
  ENSG00000280011_135 (sequence is synthesized)
aggcacccagggcccccaggcatccaccttgtcccacggtgaaccctcttccccactctcttctcaaagaatgtccccactccttttctgaatgacaagttcctggggcaggtgggatga

SEQ ID NO: 924565 - DNA, 120 bp, Artificial Sequence
  ENSG00000280011_136 (sequence is synthesized)
gggcatcttgggcagagggaacagcatcagaaagacttggaaagatcgcagagatgtcagggatataactggaagcagtgtggaaaggttgaggcagggacggagacagaacacagtgag

SEQ ID NO: 924566 - DNA, 120 bp, Artificial Sequence
  ENSG00000280011_137 (sequence is synthesized)
caggaggaccacaaagccagcagcaccagagcacccagagtccagacgctgcccggaggttggggcctgggaaggttagagcaggatggtagtgagactgggttccgaggacaaaagcac

SEQ ID NO: 924567 - DNA, 120 bp, Artificial Sequence
  ENSG00000280011_138 (sequence is synthesized)
tctggctgctggtgcagaagtgaagtcacaagaaagaagtccctttcttgcgaaagggaggccagctggaaagttccagagtgaagattagggaacggggcaagctctgacttggatgtg

SEQ ID NO: 924568 - DNA, 120 bp, Artificial Sequence
  ENSG00000280011_139 (sequence is synthesized)
gtgagcttggggtgggcaccccaggcacagctatgccctgggaagttcaaaatatagattaggtcagaaagtagaatagtggttgttaggggctaggggctaggggaggaagatgggggt

SEQ ID NO: 924569 - DNA, 120 bp, Artificial Sequence
  ENSG00000280011_140 (sequence is synthesized)
agttattgtttaatggatacagagtttcagttttgcaagatgcaaagagttttgtggttggagggtggtgacagttgcacaataataggaatgtacttaatactgctgaatacacttaaa

SEQ ID NO: 924570 - DNA, 84 bp, Artificial Sequence
  ENSG00000280011_141 (sequence is synthesized)
aataataggaatgtacttaatactgctgaatacacttaaaaatagtaagatggtacattttgtgttatgtgtattttaccacgt

SEQ ID NO: 924571 - DNA, 120 bp, Artificial Sequence
  ENSG00000280011_142 (sequence is synthesized)
gagtgacccttagggaggagggacaggaattttagaagcagaaggcatcgccaggaaagctgtttggagtgggaaggaccaatactgaatctatttctgtaggtacacaagctcactaac

SEQ ID NO: 924572 - DNA, 120 bp, Artificial Sequence
  ENSG00000280011_143 (sequence is synthesized)
atataaccaacactacacaaaatgataaagaaagtcttttaggcaggaagaaaatgataccaaatggaagaagaaacgatgagcaccaggagtaataagtatgtgggtaaatataaaaga

SEQ ID NO: 924573 - DNA, 120 bp, Artificial Sequence
  ENSG00000280011_144 (sequence is synthesized)
ctttcttctcaattaaaaaaaaaaaactctttaaaaggcaatcgatgtggctggacactgtgactcatgcctgtaatcctagcatactgggaggccaaggcaagtggatcacttgaggcc

SEQ ID NO: 924574 - DNA, 73 bp, Artificial Sequence
  ENSG00000280011_145 (sequence is synthesized)
agcatactgggaggccaaggcaagtggatcacttgaggccaggagctggaaaccagcctggacaacataagtt

SEQ ID NO: 924575 - DNA, 89 bp, Artificial Sequence
  ENSG00000280011_146 (sequence is synthesized)
agccaagtgtggtggtgcatgcctgtagccccagcaactgagaaggctgaggtgggaggatcaaactgcagtctgggtgacagagtgag

SEQ ID NO: 924576 - DNA, 120 bp, Artificial Sequence
  ENSG00000280011_147 (sequence is synthesized)
aataatatattgtgaaatttattctatagaaatgagacacatgacaacaataggacacagaagagtaaaatggaagtaatattacttaaaggtagactgtaataagttaagatgttatag

SEQ ID NO: 924577 - DNA, 120 bp, Artificial Sequence
  ENSG00000280011_148 (sequence is synthesized)
tagattaaatggtgaccaaaaggatttgtccacatgctaatccccagaacctgtgaatgttaacttctttgggaaaaaggtttttgcagatacaattaaattaaggatcttgagattaga

SEQ ID NO: 924578 - DNA, 120 bp, Artificial Sequence
  ENSG00000178412_0 (sequence is synthesized)
aaatacgagcgccgcgcggggccggagccggctccgtcctgggaccaaccctgcgtgccggccgtgaagaactgcgttcctgagccctacctacttttcctcggagcgccggcaccgtgg

SEQ ID NO: 924579 - DNA, 120 bp, Artificial Sequence
  ENSG00000178412_1 (sequence is synthesized)
agcagcggcatgcaacgcgggccgctgtcgcccagtcccagtgacggtcttggcgcgctcggaactacgtatcccggcgtgcaccgcggacagagcatggcgggactacgagtcccagcg

SEQ ID NO: 924580 - DNA, 120 bp, Artificial Sequence
  ENSG00000178412_2 (sequence is synthesized)
ttcaacgcaggcctgcgtgccattaccccatcacgcgctgagacccagcatcccgagactacgagttccggcatgcaccgcgagccgctctcctccactcccatcgcgcactgggaaggc

SEQ ID NO: 924581 - DNA, 120 bp, Artificial Sequence
  ENSG00000178412_3 (sequence is synthesized)
gcccagtccccaggagcacaatctgtcctggccatgcttgtccaccgaactgcagcttacactctgcaggtcctggagcccaagaaagaccccgggagggagctcccggccacgcccagg

SEQ ID NO: 924582 - DNA, 120 bp, Artificial Sequence
  ENSG00000178412_4 (sequence is synthesized)
ttcacagcatccgacagacaatgccggcaaaacccagcctggtaaagagggagagaaggaaccaggctttggcaagagaggcgccgtggtttccccagagaacacagtggaagacttccg

SEQ ID NO: 924583 - DNA, 120 bp, Artificial Sequence
  ENSG00000178412_5 (sequence is synthesized)
aagggccaggttcctcctcagggcggagggggcggcgctgaccgggctgagaccgggcttggaaggagcaggtggggctggaggccctgcagggtctcggctgggtccgcagttttaaat

SEQ ID NO: 924584 - DNA, 120 bp, Artificial Sequence
  ENSG00000178412_6 (sequence is synthesized)
cagaacgggagctccgggcctgtcatcgtcctcatgggcggaatgaacccacacaacgtgatccgtcctacagtggaatattcagctttggacaaggaaggaaaatctgactcaggctat

SEQ ID NO: 924585 - DNA, 120 bp, Artificial Sequence
  ENSG00000178412_7 (sequence is synthesized)
accatggatgaatcttggggacatcatgcccagtaaagacaatcacgttcgggacagcagacaccagcgtggcagagctgggttctcctcctgggggcccaggccgtgaggagcagccgg

SEQ ID NO: 924586 - DNA, 120 bp, Artificial Sequence
  ENSG00000178412_8 (sequence is synthesized)
ccaaacttccttcaggcaaaacacatgcttttttctttttttccttttttttggcatcaaacttaccaagaaatatctctacccaactttactgaaactttaaagcttgtaaaaactttt

SEQ ID NO: 924587 - DNA, 120 bp, Artificial Sequence
  ENSG00000288059_0 (sequence is synthesized)
gtgtcgatcacactgggagctgcagaccggagctgttcgtattcggccatcttggaagcccagcaaagacagagagaagatattcctgatctgactcataggggacctcatagaattctg

SEQ ID NO: 924588 - DNA, 120 bp, Artificial Sequence
  ENSG00000288059_1 (sequence is synthesized)
ccaactaactcaagtggtggtcacaggttggcagcatcttccgactgagatgtgcaatctaatctagagtgggaaggattcctttaaacagaattgaagaaggaagaacctatactagaa

SEQ ID NO: 924589 - DNA, 120 bp, Artificial Sequence
  ENSG00000288059_2 (sequence is synthesized)
atgatacacacagaaagaaagtaagaagaagctggcaaagatcaaaccctgagagacttcgtattctgtggaaaagacagattcttcagtgatattccagaagaaggcattgttattata

SEQ ID NO: 924590 - DNA, 120 bp, Artificial Sequence
  ENSG00000288059_3 (sequence is synthesized)
caagaagaaagctccacaaatgtgattacccctgaagatcttcttgtgggacaagatgtgaagagggaaggcagttatattgaatatcttgaacctgtgtaggcctaaactactatgtgt

SEQ ID NO: 924591 - DNA, 120 bp, Artificial Sequence
  ENSG00000272218_0 (sequence is synthesized)
ttttttcaaatctcagttttattctcattccagcatcctaatgctttccctttggatttttttttctaatcttgagaagtttgtgttttcagtgtagtaataacaataatagtgttctta

SEQ ID NO: 924592 - DNA, 120 bp, Artificial Sequence
  ENSG00000272218_1 (sequence is synthesized)
tttgaagtagtccactttctaatcctcattttacagataaggaaactgaggcacacaaggtcagctaacctgcccgaggtctctagctagtgactggaagaggtgttctctggatattat

SEQ ID NO: 924593 - DNA, 120 bp, Artificial Sequence
  ENSG00000272218_2 (sequence is synthesized)
ttgaatctcagtctcgctatatttcttcgtcatgactgtaactttccccctgtatttctaaatattttaatctcttgatcatatagcatacgttgatttaataaatcacttttacatgca

SEQ ID NO: 924594 - DNA, 120 bp, Artificial Sequence
  ENSG00000272219_0 (sequence is synthesized)
ctgtgtttgccctgatgtttctttcaattccaccattccgaaatgtctccggaatctgtcgttttagcttttgcagcaaggttcgttgtgtttgtcttgcccgcttcaggtttctctaat

SEQ ID NO: 924595 - DNA, 120 bp, Artificial Sequence
  ENSG00000272219_1 (sequence is synthesized)
gagattcacgtgtaaaggaggattggcaattaatcggatgactgattaattgtgagattcttattcttaccaaggaatgctatggaagtcctggcttcagataaaattctcaatgagggc

SEQ ID NO: 924596 - DNA, 83 bp, Artificial Sequence
  ENSG00000272219_2 (sequence is synthesized)
tatggaagtcctggcttcagataaaattctcaatgagggccagttgcagtggctcacgcctgtaagcccagcacttgactgag

SEQ ID NO: 924597 - DNA, 86 bp, Artificial Sequence
  ENSG00000272219_3 (sequence is synthesized)
atctctgcccaaaaaggatcccagatacagctacttcggaggctgaggtgggagaatctattgagcctgggaggttgaggctgcag

SEQ ID NO: 924598 - DNA, 120 bp, Artificial Sequence
  ENSG00000272219_4 (sequence is synthesized)
tccagcctggacaacagagcaagaccccgtctcaaaaaagcaaattctcaaagaggccttaatataccttttttaatcataagctttaagagcctggtcatgcaaagataattcagtgag

SEQ ID NO: 924599 - DNA, 120 bp, Artificial Sequence
  ENSG00000272219_5 (sequence is synthesized)
taattcagtgagatgaaagattgtttatttcctactgtgcattggtcacaactttgattccacagaagggcagtgtgctgtcctaacagagctgagtgtgtggagtcttaagagcttcct

SEQ ID NO: 924600 - DNA, 120 bp, Artificial Sequence
  ENSG00000272219_6 (sequence is synthesized)
ccctctcagcaaatgtgtattaaatgtttctgctttgccagttccagtgccagtgccctgtgattagaaggtgagcttcaccgaggcctcctggtgttgtggagagggagccccgggaat

SEQ ID NO: 924601 - DNA, 120 bp, Artificial Sequence
  ENSG00000272219_7 (sequence is synthesized)
ggactagtttggggaggaatgaaattggcatttggagagtgtaagatactagtggagtctccaagcagagctgcccaggagacaggctggccatgaggagagtagcattcacctggatat

SEQ ID NO: 924602 - DNA, 120 bp, Artificial Sequence
  ENSG00000272219_8 (sequence is synthesized)
agatttgggagccactcaccgggagagagattccatctgtgtgtccctgggcagcgtgatcatgggaatactgcttaacctcaaatccttggctttctctgtaaagtaaatgtaataaga

SEQ ID NO: 924603 - DNA, 120 bp, Artificial Sequence
  ENSG00000272219_9 (sequence is synthesized)
tctccacagggtttgctgtgagggttgaacgagctcagtgcacatgaaaatgccctatacactcgaaaccagctataaatattggttattattgttaggatgctgacgttcaaatataaa

SEQ ID NO: 924604 - DNA, 120 bp, Artificial Sequence
  ENSG00000272219_10 (sequence is synthesized)
ttgccaaaatcatttgggaagcattgcatactccattcccacatggagagttgcagggcatgtgattatctgtttgttcatttagtcacaatattgatcaatatagaacaaagcagtata

SEQ ID NO: 924605 - DNA, 120 bp, Artificial Sequence
  ENSG00000272219_11 (sequence is synthesized)
caatattgatcaatatagaacaaagcagtatattttaaaaatcaaccaggagcagccattctttgaagtgttatgcaaccattaaaaattaggtttggccaggcgcggtggctcaagcct

SEQ ID NO: 924606 - DNA, 85 bp, Artificial Sequence
  ENSG00000272219_12 (sequence is synthesized)
agatcacctgaggtcaggagttcgggactagcctggccaacatagtgaagccttgtctttactaaaaatataaaaattccagagg

SEQ ID NO: 924607 - DNA, 120 bp, Artificial Sequence
  ENSG00000272211_0 (sequence is synthesized)
ttacaggcatgagctactatgcctggccacatttttttaagttttgaatcatgcaaaccttttttagaatttcagaataagaatataaaaaatcacatcctaacactgaatatcaacaga

SEQ ID NO: 924608 - DNA, 120 bp, Artificial Sequence
  ENSG00000272211_1 (sequence is synthesized)
aacaaatgtatctaactatatatataactctaactagatacccttaatggactatagtctaagtgcaaaaacaatgtccaaaaaaaaaaaacagttgtactaagtagtttgctgttggta

SEQ ID NO: 924609 - DNA, 120 bp, Artificial Sequence
  ENSG00000272211_2 (sequence is synthesized)
gcagtattagtattgttatgctgaaactattttgtacgtattgttggataaagtgaataagcaagtattgctgagaacctgggttttcactgtgagagaggggagatgcatatatagaat

SEQ ID NO: 924610 - DNA, 120 bp, Artificial Sequence
  ENSG00000272211_3 (sequence is synthesized)
gtgagaagtgatgaagaaccttgtagtggtggacttgaattggagctatgagactaaattcgtgattttgaaaaaatatgatttcctaacactatccttagaaaagtcctaaaaataacg

SEQ ID NO: 924611 - DNA, 120 bp, Artificial Sequence
  ENSG00000272211_4 (sequence is synthesized)
atgctccgttaaaagtgagcatgtccaacacccatatttggtttctaaatgctattccccacttaaaagaaccagaacttctcagagagatggctgattacaggtctggggcaggcaaga

SEQ ID NO: 924612 - DNA, 120 bp, Artificial Sequence
  ENSG00000272211_5 (sequence is synthesized)
taacaagatgaccctggaaattttggtgtgcataaagcaagggagtcttcaaacaccaatgacattatatcaaaaggacataggaagtagcttgaaagggaaccactgataagcttggga

SEQ ID NO: 924613 - DNA, 120 bp, Artificial Sequence
  ENSG00000272211_6 (sequence is synthesized)
tggcagaaactgattagaactcattaattaaaacataatgggttattttccattaatgccatgtgttagattaatttaaaaaacatgaaatccacagaaatattaaaaagtgggaaaggg

SEQ ID NO: 924614 - DNA, 72 bp, Artificial Sequence
  ENSG00000272211_7 (sequence is synthesized)
aaacatgaaatccacagaaatattaaaaagtgggaaagggaaatcactagacgaaaagttaagaagataata

SEQ ID NO: 924615 - DNA, 63 bp, Artificial Sequence
  ENSG00000272211_8 (sequence is synthesized)
ccaacatggtgaaaccccatctctagtaacatacaaaaaatcaatcgcttgaacccaggaggc

SEQ ID NO: 924616 - DNA, 79 bp, Artificial Sequence
  ENSG00000272211_9 (sequence is synthesized)
cgagcctggtgacagagcaagacttaataatcacatggtctgtaaatatcactacacagattaattaaaaagggaaaat

SEQ ID NO: 924617 - DNA, 120 bp, Artificial Sequence
  ENSG00000272211_10 (sequence is synthesized)
ctgtaaatatcactacacagattaattaaaaagggaaaatgttcctttacaatgaggagagctagaagactacaccttaagcatgttcaaatttagcaaaaccagtaataaaacctgact

SEQ ID NO: 924618 - DNA, 120 bp, Artificial Sequence
  ENSG00000272211_11 (sequence is synthesized)
ttattgccacctgatgtgatacaataaatacacatcatcacccacaccaaatacttcagcacaaaaaggaatatcataatacctacaactttcaaatggttcagtaaatgtggcaaaatg

SEQ ID NO: 924619 - DNA, 120 bp, Artificial Sequence
  ENSG00000272211_12 (sequence is synthesized)
ccaacaactggtgagtaaaagtgaagagtataaggatgttaattgtactagtttttcaacttttctatagatttggaattttgtaaaataagagttggggaagaaaaagtgtgtaggatg

SEQ ID NO: 924620 - DNA, 120 bp, Artificial Sequence
  ENSG00000272211_13 (sequence is synthesized)
atttgaggacagaattgactgggtgatagttattaaagattccaccgttttaatttcaccatataaaaattatgccacactactaaaacaactaaacctgattaaatttttaccttcaac

SEQ ID NO: 924621 - DNA, 120 bp, Artificial Sequence
  ENSG00000272211_14 (sequence is synthesized)
tgagactactaaatgtgacaatgccaccccaaaagcggaaggcatagtaattaagccgaagttctagcaataaattttagtgggtcttagtcactctggtaagaaatgtaatacattaat

SEQ ID NO: 924622 - DNA, 120 bp, Artificial Sequence
  ENSG00000272217_0 (sequence is synthesized)
tgataggcactgcggattcagcagagactaaatcaaagtccttgatctcggagagcacatatttcatctaattgaattcacataccagccttatgaggaggtgttcttcctgtttcagaa

SEQ ID NO: 924623 - DNA, 120 bp, Artificial Sequence
  ENSG00000272217_1 (sequence is synthesized)
ctgaaggaaaagctgaacaggcggtctttggaaaggacagaagccaggatagttccagcatccaggcagcagacaccaatggtcagtgcttctactttggatcaaaaagagagaactcca

SEQ ID NO: 924624 - DNA, 120 bp, Artificial Sequence
  ENSG00000272217_2 (sequence is synthesized)
ggatcttgccaccagacaaatgggatatagatgccaggctgcaaaatccaacaaatgtacacgtgcccaaatcccgactccatcactaatagccatgcaatcctctgactatcaattaga

SEQ ID NO: 924625 - DNA, 120 bp, Artificial Sequence
  ENSG00000272217_3 (sequence is synthesized)
ttaattgacactcttttttctctcgctactgtggtacatgcagtagttacctttattcttcactttgttttctcataagactaacaagcagttttttaaaataaagaaataaaagcaaaa

SEQ ID NO: 924626 - DNA, 120 bp, Artificial Sequence
  ENSG00000237179_0 (sequence is synthesized)
ggtggtcttccaggagtcactgaaaatttcaagaagtgaaaatccaacagaaaatatttgaacccaggaataaaatagaagcctggaagactgaaggatattcaccacaggtgaaatccc

SEQ ID NO: 924627 - DNA, 120 bp, Artificial Sequence
  ENSG00000237179_1 (sequence is synthesized)
tctcagcagctggcttatgaaataatgtgaagggaggccttaatgagcagaacgcaccctcagctggagataaatatatgcaaatgagatgcacaaacaaagaagcctggacagagaaat

SEQ ID NO: 924628 - DNA, 120 bp, Artificial Sequence
  ENSG00000237179_2 (sequence is synthesized)
atctgcaattccagcaaaatgctgcctgcagctcgaagatgaacagctttgataaaatgtgagaaatattaccacgcgtgctgatgcctcagacacaccaatctgcaacaagcaactagg

SEQ ID NO: 924629 - DNA, 120 bp, Artificial Sequence
  ENSG00000237179_3 (sequence is synthesized)
ataaaaaatagttaaaagtgaatcaacatttatctggaatatacagtcctgacccccttacgcactcccccccacccccctccccgcaacacacaaagtcatttgtcttctatgtcctgt

SEQ ID NO: 924630 - DNA, 120 bp, Artificial Sequence
  ENSG00000237179_4 (sequence is synthesized)
atatggcagttaaacaaacttctagcacaatctaaatacagtctgttcaagagaggcttccaatgtttatagaccataagtaaagaaaaaaaaaatctggtatttaaccaagaatagtgc

SEQ ID NO: 924631 - DNA, 120 bp, Artificial Sequence
  ENSG00000237179_5 (sequence is synthesized)
tcttgaaaatgtctcagaacaaagtgtttaagcaaaactttggccatagatattctccattcctcattctttgctgatttttttttcaatgaggactttttatatgccatcagtttgctt

SEQ ID NO: 924632 - DNA, 120 bp, Artificial Sequence
  ENSG00000237179_6 (sequence is synthesized)
tcttcttctttttttttttttttttgaaattaacaaactaattttaaaaatcaacacctgactggggacctggtcatacaaacttcctttagatacagttgagaagaaaacatcacattt

SEQ ID NO: 924633 - DNA, 120 bp, Artificial Sequence
  ENSG00000237179_7 (sequence is synthesized)
tcacatttttatgaagcccctctcctgacaggggactggaggaggaacaccattatgcattgttatcagcgtggtgtaatttgactgttgacaaagtatccgtggcagtgcgaatgagcg

SEQ ID NO: 924634 - DNA, 120 bp, Artificial Sequence
  ENSG00000237179_8 (sequence is synthesized)
cagttagaagtgtggcggattgtaatcaagaagatgcttagctgtgcaacactgcatctcgagcagatttgaatcaacattgccttaaggggacacacacacataccaaaagaaaaaaaa

SEQ ID NO: 924635 - DNA, 120 bp, Artificial Sequence
  ENSG00000237179_9 (sequence is synthesized)
atctgtggtcacaatgggtacatcccccaagaagggtggtcttccaggagtcactgaaaatttcaagaagtgaaaatccaacagaaaatatttgaacccaggaataaaatagaagcctgg

SEQ ID NO: 924636 - DNA, 120 bp, Artificial Sequence
  ENSG00000237179_10 (sequence is synthesized)
attggtgtgcagctctcctaattagagattttcaaattcttttactgctgtcaccatgatggcacattgtcttgctggacaaatactaaaattgcaaattggcttgatcaggaagtttta

SEQ ID NO: 924637 - DNA, 120 bp, Artificial Sequence
  ENSG00000237179_11 (sequence is synthesized)
cgtatgaagataacactgtatcctctagtccacttccaaaaggtggacagctggagagcaaagatgactttcagctttaccttcaccccagattaaaaaaaaaaggattattaaaatagt

SEQ ID NO: 924638 - DNA, 120 bp, Artificial Sequence
  ENSG00000237179_12 (sequence is synthesized)
cccaagaagggtggtcttccaggagtcactgaaaatttcaagaagtgaaaatccaacagaaaatatttgaacccaggaataaaatagaagcctggaagactgaaggatatgggcctggtt

SEQ ID NO: 924639 - DNA, 120 bp, Artificial Sequence
  ENSG00000237179_13 (sequence is synthesized)
gatccacttcagattcatcccctgttttattagaggttgaaaaaggttcaagacctggttgtaccacagctcccaccgacagctaaggaaccagtttggcgtctggtttgtctgttgttt

SEQ ID NO: 924640 - DNA, 120 bp, Artificial Sequence
  ENSG00000237179_14 (sequence is synthesized)
tactgctgaccttcaaatcaactttaacccctgacctctggaggcatctatcatgacaagaggctgtttaacacaaatggtgcccatttataggggaagagactctgaagatttcctttt

SEQ ID NO: 924641 - DNA, 120 bp, Artificial Sequence
  ENSG00000237179_15 (sequence is synthesized)
cattgcaatagaccattgtcattgcaacccagtggagcatgcagaggttttctgcactgtttcagaaaactgtttaaacatttgttttaaggcattcatgaaatataatcaatgaactgc

SEQ ID NO: 924642 - DNA, 120 bp, Artificial Sequence
  ENSG00000237174_0 (sequence is synthesized)
aatccatgtaaggaattctggagaggaaggtggcagcattactaatcagatgtttgactgggaaatgtaaagagatagtcattacatggacatctggagaaaaaaacagcacatggaagt

SEQ ID NO: 924643 - DNA, 120 bp, Artificial Sequence
  ENSG00000237174_1 (sequence is synthesized)
atcaagtgttctggggccgcccaggcagaggatatttggcaagggaaataggtccactgtactgggttcattgcttaaccgctggaaacaagagctagactacctgctcgtgatcccagg

SEQ ID NO: 924644 - DNA, 120 bp, Artificial Sequence
  ENSG00000237174_2 (sequence is synthesized)
ttatgggaccatcaatctgttgtgaatgctgtctacagcagatcttatctctcagaattatcaaactgagctgatccaaaggcttgacataaattacatgttaaacgtataacatcttct

SEQ ID NO: 924645 - DNA, 120 bp, Artificial Sequence
  ENSG00000237174_3 (sequence is synthesized)
cctatggatttctcctgggcaagaatggcatctcggtgcaggacccgcagcactttctctggctccgcagacccgtaatgagcctccagaacctcaggcttggttttctctgtcttcagc

SEQ ID NO: 924646 - DNA, 120 bp, Artificial Sequence
  ENSG00000237174_4 (sequence is synthesized)
atgtggatcacatcttctctggcctgtaatagaaagtgcagcaagatcagacgactgacaatgtaaatcgcatactgggctcaaaaaatcaacagagagcttattgaatacatccccatc

SEQ ID NO: 924647 - DNA, 120 bp, Artificial Sequence
  ENSG00000237174_5 (sequence is synthesized)
cccaggcagagggaaacaagagctagactacctgctcgtgatcccaggaggctaatggaacagtgatgtatcgcggttcctgcctcgtgaatttggaagcaggattctgctcctaggctc

SEQ ID NO: 924648 - DNA, 120 bp, Artificial Sequence
  ENSG00000237174_6 (sequence is synthesized)
ttgatgaagaaatatttaacatcagagtaagtgttctagagattaatggctgctgtttggcaaggtccatagacgtcctttcctgccaatacaaatatatacattgttgaagcacaagac

SEQ ID NO: 924649 - DNA, 120 bp, Artificial Sequence
  ENSG00000237174_7 (sequence is synthesized)
aaggaagagaagatgggccatcaatgaaaaatggtggttacaatgaagcaactgatttcacagctaaggcgagagcactgcacttcctcctcatgctttctggttgttaaactcccacta

SEQ ID NO: 924650 - DNA, 120 bp, Artificial Sequence
  ENSG00000237174_8 (sequence is synthesized)
agaagcatgaaaaagagcaagatgcacttgaggagataaagcagacctttgaagggaaaccaaacatcagttcaagttgtaacttagagaccagaaaagatattccaagtttttgtgaag

SEQ ID NO: 924651 - DNA, 120 bp, Artificial Sequence
  ENSG00000237174_9 (sequence is synthesized)
agaccaaactagatttacacaaaggagaaatggatctaagtactcttaaaaatagggatattaaaatggaaggtatttcagacattgttgaatcagaatgcgtgcccagagaagatagag

SEQ ID NO: 924652 - DNA, 120 bp, Artificial Sequence
  ENSG00000237174_10 (sequence is synthesized)
acaggagagcccagaggacagagcagggtgactttcctcacaaagaaggcattaggctccaggaaggcattgaggaggacactgtaaatgggctgacagtctttcatgagctcatctggg

SEQ ID NO: 924653 - DNA, 89 bp, Artificial Sequence
  ENSG00000237174_11 (sequence is synthesized)
gcaagatcagacgactgacaataattatttcaaacacaccagtaaagccagaggtaaaacagccactgagctggtaataatcatggaaa

SEQ ID NO: 924654 - DNA, 89 bp, Artificial Sequence
  ENSG00000237174_12 (sequence is synthesized)
cacaatgagtcacagtgagccgagattgcgcaactgcactccagcctcggcgacagagggagactctgtctcaaaagaataatagagat

SEQ ID NO: 924655 - DNA, 120 bp, Artificial Sequence
  ENSG00000237174_13 (sequence is synthesized)
aggctaatggaacagtgatgtatcgcggttcctgcctcgtgaatttggaagcaggattctgctcctagaattatttcaaacacaccagtaaagccagaggtaaaacagccactgagctgg

SEQ ID NO: 924656 - DNA, 90 bp, Artificial Sequence
  ENSG00000237174_14 (sequence is synthesized)
tgagctggggtcttgtagtcatggctcactgcagcttcaacctccaaggctcaattgatccccgcgcctcagcctcccgagtagctggga

SEQ ID NO: 924657 - DNA, 120 bp, Artificial Sequence
  ENSG00000237174_15 (sequence is synthesized)
caatgatatgcattgacctctactgagtttttgtggtcaggaaccttctctgagctgtcataatcgtgcttcatcatctccaagcaagtggtcagatgaaagcatggtgaagatgactaa

SEQ ID NO: 924658 - DNA, 120 bp, Artificial Sequence
  ENSG00000237174_16 (sequence is synthesized)
atagaagaggcaggtggatgagatcagttaaccagcatcgccagatttctcagcactgaactcacttcatgttcaacagtggccagtcttgttaaataatattatgggaatatccctaga

SEQ ID NO: 924659 - DNA, 120 bp, Artificial Sequence
  ENSG00000277595_0 (sequence is synthesized)
gtttgctgagagttattaccatttttaagtattgatttttgtgagatgtgttttctgcaactatcatgatggtcctatgtttctcccctgtagtctaccagtaggaggaattaaaagata

SEQ ID NO: 924660 - DNA, 120 bp, Artificial Sequence
  ENSG00000277595_1 (sequence is synthesized)
gcattttaatgtatataaattaagacttcaaataaaaacaattgaactcgacaataatatacacctttacattcccatgtagcaacaaagttgggtgagatgtgttcatgaggttgtgca

SEQ ID NO: 924661 - DNA, 120 bp, Artificial Sequence
  ENSG00000277595_2 (sequence is synthesized)
taaactgaagatgtggatgacctagcaattcctagatgtgtaccctaaagaaagttatgcacatgagcatctggagaccccagtactgggcagcagcatccattcataacagcagaaacc

SEQ ID NO: 924662 - DNA, 120 bp, Artificial Sequence
  ENSG00000277595_3 (sequence is synthesized)
tggaaacgacccaaatgtcccgagatggtagaatgcgctattgtgctctattaatacaacagaataacatatagtattgaaaataaaaatttatagctatgtgcgtcaaaactgttgaat

SEQ ID NO: 924663 - DNA, 120 bp, Artificial Sequence
  ENSG00000277597_0 (sequence is synthesized)
cggcccgacccgaccacgcctcccgcagcccggccttaaacgcctgccacgcaccccacaggccctcacacaagaggccgctttccccgcagcgcaatggcggccagactgcgtccgctc

SEQ ID NO: 924664 - DNA, 120 bp, Artificial Sequence
  ENSG00000277597_1 (sequence is synthesized)
tcagatggattagtgagacgaccaattagagttgcacactgcgccgaggaggcgggcccataggcggaaaggctttgaacgcaagggggtgtggtcggggtgaagccccgcctcctccat

SEQ ID NO: 924665 - DNA, 120 bp, Artificial Sequence
  ENSG00000277597_2 (sequence is synthesized)
ttccgaggctgtttctggggcctctgacagacctcagcgtgtgatgggctcccggcgtcgcactgtgagagagcgaagtctaaagggtttgaataaatttgccaagattgcgcattgtac

SEQ ID NO: 924666 - DNA, 120 bp, Artificial Sequence
  ENSG00000257817_0 (sequence is synthesized)
agatgcgcctggggccccagggaggagaacgggatgccggtctcggccgcccccaccaattgatccatgatcggcttggccagggcgcccggcagcgagagcgccgccgcgccgttggga

SEQ ID NO: 924667 - DNA, 120 bp, Artificial Sequence
  ENSG00000257817_1 (sequence is synthesized)
ggcagcgtcagcgcggggaagaacggcggctggtgacccagcaccgcgctcatggcgaagtccggcgcccggtgagtctcactctgtcgcccagtctggagtgcaatggtgtgatcacgg

SEQ ID NO: 924668 - DNA, 86 bp, Artificial Sequence
  ENSG00000257817_2 (sequence is synthesized)
aacagagccaaggagagggtcagaaatacagacaacacctgcaaaacagaaacatgaaaactcagctacataaggagaaatagaga

SEQ ID NO: 924669 - DNA, 120 bp, Artificial Sequence
  ENSG00000257817_3 (sequence is synthesized)
gtcagaaatacagacaacacctgcaaaacagaaacatgaaaactcagctacataaggagaaatagagaccgtggctcatgccgggaatcccggcactttgggaggctgaggtaggcggat

SEQ ID NO: 924670 - DNA, 120 bp, Artificial Sequence
  ENSG00000257817_4 (sequence is synthesized)
ggataaggctcttgacagccaggacgtggaattacagggggtctctttgagagacaaaataaaaaaaatagcccagtaatcttccttccacccttttctcccagatctaattacagatgt

SEQ ID NO: 924671 - DNA, 120 bp, Artificial Sequence
  ENSG00000257817_5 (sequence is synthesized)
cttgacattccttctgcatagaatttccttaaaagatttgccaagaagaaacatttggaaactgtgttttaggtataatccgtctgggagtcactcttgctcgctttgtcgttagatgac

SEQ ID NO: 924672 - DNA, 120 bp, Artificial Sequence
  ENSG00000257817_6 (sequence is synthesized)
aaaacgcttaattacagcgagcacaatgtataccacatttggaaaactggattcttgacctaaataatgtaccccatactgacaatggccttttggcaaaacttgtgtctctgatctcac

SEQ ID NO: 924673 - DNA, 120 bp, Artificial Sequence
  ENSG00000257817_7 (sequence is synthesized)
attaattactacacaaatatacttattgtgggcaccgagtttatgggatggagtcctcttgacacatgttcaccataaaaacacatttttttcccttcccctgaccctaaggaaaagaaa

SEQ ID NO: 924674 - DNA, 120 bp, Artificial Sequence
  ENSG00000257817_8 (sequence is synthesized)
aaaaaaaagattaacatttttcaagatgctgttttagtgacatgaaaactgtctgttgagtgttcactcggcttttgttctttttcttttctccttttattaaaaagcctttcaaaccaa

SEQ ID NO: 924675 - DNA, 120 bp, Artificial Sequence
  ENSG00000257817_9 (sequence is synthesized)
tgctgtgaggagagctggtgttcctttggcctggggcccacccagaatggacacacttgggggcagactggagcccaccttgcatctggagctaagctgtcagacctgcagcttgaagca

SEQ ID NO: 924676 - DNA, 120 bp, Artificial Sequence
  ENSG00000257817_10 (sequence is synthesized)
gggcagcctggctgaggcccacccagatcagccaacttgcaaacacagaagaaaccagtgcttcttgtgacagggtctctctttgttgcctaggctggagtgcagtggaacgaacttggc

SEQ ID NO: 924677 - DNA, 120 bp, Artificial Sequence
  ENSG00000257817_11 (sequence is synthesized)
ttattgaagcattgaccacctggacccaagtgattctcctaccttagcctcttgaatagctgtgacaacaggtgtgcactaccacacccagataaattttgtaatttttatagagagggc

SEQ ID NO: 924678 - DNA, 79 bp, Artificial Sequence
  ENSG00000257817_12 (sequence is synthesized)
tcaagtgaaagaaaatgaggcactgagagattacataacttcccttgagtcatatttgcttgtaagtggtaaggctgga

SEQ ID NO: 924679 - DNA, 120 bp, Artificial Sequence
  ENSG00000257817_13 (sequence is synthesized)
ttcccttgagtcatatttgcttgtaagtggtaaggctggatgttgaacccaggacaaagggtctcactctgtcgcccagtctggagtgcaatggtgtgatcacggtcactgcaacctctg

SEQ ID NO: 924680 - DNA, 120 bp, Artificial Sequence
  ENSG00000257817_14 (sequence is synthesized)
agcctcccaagtagctgggattacagcggcttgcagtaaacttcttggaggagaattggcattgcaagggtgttactggagacctcggcaagaaagtgaatgcaaagacagatgacccag

SEQ ID NO: 924681 - DNA, 90 bp, Artificial Sequence
  ENSG00000257817_15 (sequence is synthesized)
gagaaccctgatgcagtgaacgcaggcgcaggctctggagtgagaaatttctcactctgtcgcccagtctggagtgcaatggtgtgatca

SEQ ID NO: 924682 - DNA, 120 bp, Artificial Sequence
  ENSG00000257817_16 (sequence is synthesized)
cctcccaagtagctgggattacaggggccagcgaaagacacgcgctcgacttagcaagataggggctagacaaaccacggtgaggaaaacggcacctacaagtcttcccagacagctgtc

SEQ ID NO: 924683 - DNA, 81 bp, Artificial Sequence
  ENSG00000257817_17 (sequence is synthesized)
actttcttaataagacctccaggcgcatgacaaagcagaaaccttcagaaacaaaatctaccgagttcgaagaacgggcct

SEQ ID NO: 924684 - DNA, 120 bp, Artificial Sequence
  ENSG00000257817_18 (sequence is synthesized)
gatttctctctgaccagggcagcagcaggcccctttagacccagaggctagactggagggcagaaagggccggggaatggtgtcaggcctcccaatacccacacaaaaggaaagggcttt

SEQ ID NO: 924685 - DNA, 120 bp, Artificial Sequence
  ENSG00000257817_19 (sequence is synthesized)
aagtttttctctctgagaacaaaataaaacagacaacacaacatcaacaaagaaataaggatgttccaggagggtttgaagagtgagtttcttgcagtagagtgccttttttttttttct

SEQ ID NO: 924686 - DNA, 120 bp, Artificial Sequence
  ENSG00000257817_20 (sequence is synthesized)
ttcctgctccctgcagggatgtctgtgctccactgaaaaattctgtctgttcgggagggaacccaggatgcagaccaaatgcaagacccatgcagatgcccagcggcttgcagtaaactt

SEQ ID NO: 924687 - DNA, 120 bp, Artificial Sequence
  ENSG00000257815_0 (sequence is synthesized)
gacgactgcaaaacggcagcgatggggtgggtaggcaggccgctttcagcgcgcttctaacaaggtggagagaggcgcttcacttccctaccgcccttaccgccgctccgtcttgtctcc

SEQ ID NO: 924688 - DNA, 120 bp, Artificial Sequence
  ENSG00000257815_1 (sequence is synthesized)
caccgactcacagggaggcttgctgctcctccgcggccgttacagagagcggggcttctgcggccgctaccgtttccctggggctaggttgcttcgcagaaggctctggccctgagtccg

SEQ ID NO: 924689 - DNA, 120 bp, Artificial Sequence
  ENSG00000257815_2 (sequence is synthesized)
agggggactgcggggtccaggggcgatgaatgctcccgcaacctccggagcttgtgcgcgtacttcagggaccggcaccacgtcaccgtcacctcctgagtagtgagttcccctctgatg

SEQ ID NO: 924690 - DNA, 120 bp, Artificial Sequence
  ENSG00000257815_3 (sequence is synthesized)
atccccaccatttttttttccccaacctgatggaaggaagtacataatggagagcaagtttttaaagcacggtcgtgtcgtgtgaacttgctctagccaaattaggtttatagcactttt

SEQ ID NO: 924691 - DNA, 120 bp, Artificial Sequence
  ENSG00000257815_4 (sequence is synthesized)
tttggctctcattacctccagtccccacataaacaagagtgaccagctgggtcatccgcaagaccgtttgaaattattgtggcttgggtggaaacttaaaggagtgaagtatctgctttc

SEQ ID NO: 924692 - DNA, 120 bp, Artificial Sequence
  ENSG00000257815_5 (sequence is synthesized)
cagaaaaatcgttgtcattcaaagtgaaattaaacttgttttctttgcaataattcgcctttatttccttgtatatctgtaaactcttcacttttttgtaattactagacaattcggact

SEQ ID NO: 924693 - DNA, 120 bp, Artificial Sequence
  ENSG00000257815_6 (sequence is synthesized)
taaaaagagcctcagcatgtgtattttggaattgtgtagcttcataatgtgaaaattattcttttctatttgagtaaagtacagttaatttgaagtaaataaaatttctatttccattgg

SEQ ID NO: 924694 - DNA, 120 bp, Artificial Sequence
  ENSG00000257815_7 (sequence is synthesized)
ttacatttatcattgaaggtcaaaagcaagaaataggaagaaacacaagcatactataaaataaaaggtaactgtcatgtttttgaaggtaaggtgttttgacatatcagcagacattgt

SEQ ID NO: 924695 - DNA, 120 bp, Artificial Sequence
  ENSG00000257815_8 (sequence is synthesized)
gtgaatttatttcaactcctagtggtactggtgtaggtagaaaatgttttgcttggttattcatttcatcaaacactctacttcactgtttttttttcacttcaggaaaattcgaggagg

SEQ ID NO: 924696 - DNA, 120 bp, Artificial Sequence
  ENSG00000257815_9 (sequence is synthesized)
aacaacacatactagtgtctttcctttctttctccccgtcttctgcaaatagtcccttcctcttcctgctttctcctccttctcatgttaacatcttcaaccataagatggtgtgttaaa

SEQ ID NO: 924697 - DNA, 120 bp, Artificial Sequence
  ENSG00000257815_10 (sequence is synthesized)
agattgaatatacctctatggaatgacttccagagggtgtaagtctgatatgagagttttattaccttgagtattttactggaagagatagaacaacaaacattttcataataaatgtgt

SEQ ID NO: 924698 - DNA, 120 bp, Artificial Sequence
  ENSG00000257815_11 (sequence is synthesized)
gggttaggagtgttaggagaaaatacactgatactattactttcaatatttgatactacttactttgactctcactgaacacctatttgtttaggatgaattcactttaagccgggttga

SEQ ID NO: 924699 - DNA, 120 bp, Artificial Sequence
  ENSG00000257815_12 (sequence is synthesized)
agaacaagcctttaattgtcctattatttgtgccaaatctattataaatttgttaaaaaatttttaatacctaccttagagggtactctaggtatttaatgagctagcatttgttaaagg

SEQ ID NO: 924700 - DNA, 120 bp, Artificial Sequence
  ENSG00000257815_13 (sequence is synthesized)
cttgtatagtaagaattcttatagtaagagttcttaccaatagatggtatattttttaaattgtcctgttgcatcaaaaagttcatctttattggtaatgttgattaagtttgcccattt

SEQ ID NO: 924701 - DNA, 120 bp, Artificial Sequence
  ENSG00000257815_14 (sequence is synthesized)
ggtagtttggtttcttttaactatcttactagattttcttacttttacctgaaaagtagtccttactaataggcacatgttttgtatatttccaaaatatgtattatgttaaattctctg

SEQ ID NO: 924702 - DNA, 120 bp, Artificial Sequence
  ENSG00000257815_15 (sequence is synthesized)
tacactttatttaaaaattacagacgttgagggaaaaaaaataccctattaagggaagaatgagtttgtgtataacttgtagaagaaggaggccacccatttttagaaaaatatggatgg

SEQ ID NO: 924703 - DNA, 120 bp, Artificial Sequence
  ENSG00000257815_16 (sequence is synthesized)
tattgaaaattttgccatggcaagggataaaaaggacaggcttctctaatgtgtctgaaacaacatttgaatcccctttgttcattccctaaatctgctgctcctttagaattcctgatt

SEQ ID NO: 924704 - DNA, 120 bp, Artificial Sequence
  ENSG00000257815_17 (sequence is synthesized)
ttcataaatagtaccaccattcacttatttgctcaggcataaaacttggaattttctgattcttcacactcatacaactcatcagacagtaccatcagttcttcctgacaaatacattct

SEQ ID NO: 924705 - DNA, 120 bp, Artificial Sequence
  ENSG00000257815_18 (sequence is synthesized)
gaatttagctacttatcacttccactggtacaacccttgggagccaccatcatctgttgctggaccacagcaataaccacactagttgctatcactttctatctgtaccctcatgaatat

SEQ ID NO: 924706 - DNA, 120 bp, Artificial Sequence
  ENSG00000257815_19 (sequence is synthesized)
tttcccatttaaaccattctctatataccaaccaaagcaatcacttaaaaaatgttattaggttatgtcactcccttgtttaaaaccctccaatagcttccttatgcacacagaatgaaa

SEQ ID NO: 924707 - DNA, 120 bp, Artificial Sequence
  ENSG00000257815_20 (sequence is synthesized)
gcacaggaagttgttctcacccttcttactgcctcctttctgtcgtgggctgtgctttttctagtctgtagcagagtctgttagttgtccccaaaaattcctccatttttttcatagtaa

SEQ ID NO: 924708 - DNA, 120 bp, Artificial Sequence
  ENSG00000257815_21 (sequence is synthesized)
tagacatggatacatggctacccagaacaaagactatattttgcagccttccttgtagccatgtaatagtgctggctgatgggatgtaagcagtatatcatgtggcacacttgtaaaacc

SEQ ID NO: 924709 - DNA, 120 bp, Artificial Sequence
  ENSG00000257815_22 (sequence is synthesized)
atccttaaaagatagttggtgcacaccttcaatgcggcttttcctttatcctgtaccgtggaatatagatgtgatggcttagaactgtagctgccaatttgtgcctcatgcaagttctct

SEQ ID NO: 924710 - DNA, 120 bp, Artificial Sequence
  ENSG00000257815_23 (sequence is synthesized)
cattctagggatggcaaaactaaactggtggaaaccagggtctgtgagaactttatggatcagagcaccatgctagccctgcagtcgtaaatgtctatattattaaagccactattttgg

SEQ ID NO: 924711 - DNA, 120 bp, Artificial Sequence
  ENSG00000257815_24 (sequence is synthesized)
gtctatattattaaagccactattttggagtctcttgttctcaactgaatttaatcttacctgatactctgtctcagggcctttgcacttgctttttattttttatttatttattttttt

SEQ ID NO: 924712 - DNA, 120 bp, Artificial Sequence
  ENSG00000257815_25 (sequence is synthesized)
gatatggctgactcattctcttccttcaggttaacccaaatatctctgacaggccttccctggccaccgtatctaaaatagctcacgttcccatttattctctgtcaatcacgtgcccct

SEQ ID NO: 924713 - DNA, 120 bp, Artificial Sequence
  ENSG00000257815_26 (sequence is synthesized)
ctattttcttaatagcatttataatttatcattatcttgtttattcactgtttattttctacctcccttcaccctacaaaaatataaactacacctgtttttttccactactttatcctt

SEQ ID NO: 924714 - DNA, 120 bp, Artificial Sequence
  ENSG00000257815_27 (sequence is synthesized)
cacacatggtaggcattagataaatgctgttaaattagtgagtgaatgaatcaacaaaattcttatccaagattagctagactttttaaataataaatgagtaaatgtcaacagatatcc

SEQ ID NO: 924715 - DNA, 120 bp, Artificial Sequence
  ENSG00000257815_28 (sequence is synthesized)
ttaacacaaaatttgtaaaatccaatctaggaaacaggaaaaacagtactaaactaataggatattcctgacctccaacttaataaagaagatgtctacctttttctgggaaatctgtaa

SEQ ID NO: 924716 - DNA, 120 bp, Artificial Sequence
  ENSG00000257815_29 (sequence is synthesized)
ggctagtacaagttaaaaaaaaaaagactgcactgcagtatatccagggctaaaattcacactaaaaggggtctgaattataatttactagacctcagtttcttcatcttaaatatgtgt

SEQ ID NO: 924717 - DNA, 120 bp, Artificial Sequence
  ENSG00000257815_30 (sequence is synthesized)
aagctttgaatggtaatactataacagttaaaagtttaatagtaagcccaacttatgagtgacaaaacatgttaaacattaatttagtcttcaggcactattttaacaagtggttatttc

SEQ ID NO: 924718 - DNA, 120 bp, Artificial Sequence
  ENSG00000257815_31 (sequence is synthesized)
ttgataatactggcaaggattcagagaaacagggctgcttatattgctgagagtgtatgttggcagcacttttctagagtgcagtttggcaatatgtatcaaaagccttgagccatgtgc

SEQ ID NO: 924719 - DNA, 75 bp, Artificial Sequence
  ENSG00000257815_32 (sequence is synthesized)
gcagtttggcaatatgtatcaaaagccttgagccatgtgcatttgacccagcgattcttttagaaatgtgtcata

SEQ ID NO: 924720 - DNA, 82 bp, Artificial Sequence
  ENSG00000257815_33 (sequence is synthesized)
caaaagaaaaggccaggcacggtggctcagagagccacctgtaatgccagcactttgggagtctgaggtggggttggatcac

SEQ ID NO: 924721 - DNA, 120 bp, Artificial Sequence
  ENSG00000257815_34 (sequence is synthesized)
aaagaaaaggccaggcacggtggctcagagagccacctgtaatgccagcactttgggagtctgaggtggggttggatcacctgagggcacaagttgaagaccagcctggccaacatggtg

SEQ ID NO: 924722 - DNA, 65 bp, Artificial Sequence
  ENSG00000257815_35 (sequence is synthesized)
atacaaaaattagctgggcatgctggcgggtgcctgtagtttcagctattgggaaggctgagatg

SEQ ID NO: 924723 - DNA, 120 bp, Artificial Sequence
  ENSG00000257815_36 (sequence is synthesized)
cgtctcaaaaaaaaaaaaaaaaaagagaaatgtattataagcaaataagggtgtgtttaacaagttaattgcaagagtattctttactgcatcatttattaggagattggttaagcaaca

SEQ ID NO: 924724 - DNA, 120 bp, Artificial Sequence
  ENSG00000257815_37 (sequence is synthesized)
ggttaagcaacatccatacagtgaacagtattcagccatttgaaatgatgtggaggaaattttattgacatgatacattgttaagagcaaaagaaaaagttttaaaatacaaatgtttaa

SEQ ID NO: 924725 - DNA, 120 bp, Artificial Sequence
  ENSG00000257815_38 (sequence is synthesized)
tttgtaagtctcacaaacatcatctaacgaaatatacacgaggtgttaagtcagccttgcaaacgtaactattttttcattatttttatatcagttactgttattggagcattttatatt

SEQ ID NO: 924726 - DNA, 120 bp, Artificial Sequence
  ENSG00000257815_39 (sequence is synthesized)
gactgaggatctttattaaaacttcttcagccttctgtgaaatcttgttatgatggctatagtgacactatataaaacacataaccagaatatgtttatgctcaaatatttcaagcaata

SEQ ID NO: 924727 - DNA, 120 bp, Artificial Sequence
  ENSG00000257815_40 (sequence is synthesized)
tttgatgcttaaaataccaaagtgacaatgaaaatgaaagaaatttggatagttccttagagttatttgtttgtgtttcagatatgaacataaagtatgtttttaatattaccagttttg

SEQ ID NO: 924728 - DNA, 120 bp, Artificial Sequence
  ENSG00000257815_41 (sequence is synthesized)
catcaaaatatgattattgtactttaaaagcagccatgagaactctgctctttgatagacttcaacttgcaacaactaaggaataatccagttccagaggagattaggagttgggtgaga

SEQ ID NO: 924729 - DNA, 120 bp, Artificial Sequence
  ENSG00000257815_42 (sequence is synthesized)
aaaccactggtaactgcctctccacggaggaaaaaggtcttcacccggaactcttggcgatgaactgaccaagtaagggatgaggaggaggagcttctcaagagttcctagagaaagacg

SEQ ID NO: 924730 - DNA, 120 bp, Artificial Sequence
  ENSG00000257815_43 (sequence is synthesized)
atgcctggggaagataatggccagtagagttggtgccagggactctagaaggaagaggctggagacatccaagagaaatatgatcaggaactggactgagacagtgcttggaagatgagt

SEQ ID NO: 924731 - DNA, 120 bp, Artificial Sequence
  ENSG00000257815_44 (sequence is synthesized)
ggggagacagaaaggaaaaggcaagctctggaagctgacaaagtatggaaggaagggcaatggcctgtggaaaataactgagacttgctgcctgtgaggccaatgacatgctgtctttgc

SEQ ID NO: 924732 - DNA, 120 bp, Artificial Sequence
  ENSG00000257815_45 (sequence is synthesized)
ccactgctcctgtcaggtaaatccattctctcagggaggaactgctttacaatttcagcagagatgcccagcagctcagtcatcatttttaagcagtgtgttcatctcacaccagtgggt

SEQ ID NO: 924733 - DNA, 120 bp, Artificial Sequence
  ENSG00000257815_46 (sequence is synthesized)
gacatgtaaagatgtgcggttcaaggtgtgtcagaggccaggagcacccagcaaacctgactggggtgtcagaggaggggcccagggcctgaatctgtgctcacctcctggatattctgc

SEQ ID NO: 924734 - DNA, 120 bp, Artificial Sequence
  ENSG00000257815_47 (sequence is synthesized)
tttgcccggctgtcagagggatgcatgatggtccccatcactttcatgttgccacagacaaccagggcttcgtccggcgcatctgtgttgattcctactcgaccgtgacagacaatagat

SEQ ID NO: 924735 - DNA, 120 bp, Artificial Sequence
  ENSG00000257815_48 (sequence is synthesized)
tctggaacttgtcctcgctgccacaatgcatcactgtcattttcaaactgcccagggttagaggcctggaaaaatacataaatatattacaattaaagtaacagtagcaggaatagatga

SEQ ID NO: 924736 - DNA, 120 bp, Artificial Sequence
  ENSG00000257815_49 (sequence is synthesized)
tcacattagtgttcagagcaaaggcaaactgaatattatctaagtctttcataagagaatcctgtattgagtgggacattctgacatatccaagtaattccggggcccaggagagccagg

SEQ ID NO: 924737 - DNA, 120 bp, Artificial Sequence
  ENSG00000257815_50 (sequence is synthesized)
ctgatttgaaacatccaatctctattgcatctatctggaattaagaatgtgatcagttatactaggtggatgataaagaagaaaactaaaaatggctatctttccaggaatagtcatcat

SEQ ID NO: 924738 - DNA, 120 bp, Artificial Sequence
  ENSG00000257815_51 (sequence is synthesized)
catcatgatttaaaatcagaacattatatcagaaaatattacaggtgtactaaagtcagataaataaaaataccttgcatttagctagccctattatagtttcaaaatgcttttatattt

SEQ ID NO: 924739 - DNA, 120 bp, Artificial Sequence
  ENSG00000257815_52 (sequence is synthesized)
atgatttcatacacaagtgacaagcaaatgataatacaaatatatttaatatacatcaactattccctaaacacagaggatactgaaggaagaataataacagctacatttgttgtgcga

SEQ ID NO: 924740 - DNA, 120 bp, Artificial Sequence
  ENSG00000257815_53 (sequence is synthesized)
taattcacagtgcaattatatgagacacgtactattgtcctcattttattgacactgacactctgaaaagataaataaattgcccaaagccacaaagctaataagttctggagctggaac

SEQ ID NO: 924741 - DNA, 120 bp, Artificial Sequence
  ENSG00000257815_54 (sequence is synthesized)
tacaagtcctctgattattaaataatgatttgcctgtttcacggcattgcttagaagtagtcctggcaatcttcaaagaaaatccaagtgaaaccattggactagacaaagttctggaga

SEQ ID NO: 924742 - DNA, 120 bp, Artificial Sequence
  ENSG00000257815_55 (sequence is synthesized)
ttttactcttaaataaaattctttgtcaaagaatgttccactgcactgccttccttcctgcttccctgtagccactgaatatattcccaaatattttaaagtaagcatctctaaatccct

SEQ ID NO: 924743 - DNA, 120 bp, Artificial Sequence
  ENSG00000257815_56 (sequence is synthesized)
caaaatcctcacaacaaaattaatttgtttttaaaattatgatgtatttttatgattgaggcaggctgtcacaactttagataaacagttgtgatcctgattatctaaaaagtcagtact

SEQ ID NO: 924744 - DNA, 120 bp, Artificial Sequence
  ENSG00000257815_57 (sequence is synthesized)
aatacttgactttttacctttctggtggtatatgatacattgcaggctcagcacctgaatatgcatagattttctctgaagactactcaggaaaccaataacaatggtttcctcaaggat

SEQ ID NO: 924745 - DNA, 120 bp, Artificial Sequence
  ENSG00000257815_58 (sequence is synthesized)
ggagcctgggagatggagaaacagtggtaggagggagattcacctttcactatatactctcttggtattgtttgagtgtttttgtcatatgcatttgttacaattttaaaaataattaaa

SEQ ID NO: 924746 - DNA, 120 bp, Artificial Sequence
  ENSG00000257815_59 (sequence is synthesized)
agaaaccacaaagtttatttcttagtttgggtttaaagaactttttgatgtcttcaatttcctaattcaatcccaagtgtctgaaccctgagctgcttggaagactcaaccattgatact

SEQ ID NO: 924747 - DNA, 68 bp, Artificial Sequence
  ENSG00000257815_60 (sequence is synthesized)
ctgaaccctgagctgcttggaagactcaaccattgatacttgataaacagaagcagtgaaagaggcca

SEQ ID NO: 924748 - DNA, 80 bp, Artificial Sequence
  ENSG00000249330_0 (sequence is synthesized)
aactgaccgtcgcccgcctggcactagcagcggcgcagacccgggcggcgtcgggcgcctgggtgcgctcggagcgccgc

SEQ ID NO: 924749 - DNA, 120 bp, Artificial Sequence
  ENSG00000249330_1 (sequence is synthesized)
gcagcctcgggctgctccccgaggccgcttgctggggctcccgagaggccccaaggttcctgacagagctgctgttgggtgttggtgtaaagccgggaatgtagtgtggcggtgatgccc

SEQ ID NO: 924750 - DNA, 120 bp, Artificial Sequence
  ENSG00000249330_2 (sequence is synthesized)
tagatccctggggccgcgccctgccgcccgtcccccaacatcaccctactgtggagcgacgtggctgctaagaggcgccctccctagcaggtgatcaaactcaatcaacagctccaaaaa

SEQ ID NO: 924751 - DNA, 120 bp, Artificial Sequence
  ENSG00000249330_3 (sequence is synthesized)
gtttacattacccaggagcaaaaacggacctgctgtgtttctactacctctgcaactcattccccagtgggaggaaagataagaaactaaattgcaaacatgttgcagctgctgaatgac

SEQ ID NO: 924752 - DNA, 120 bp, Artificial Sequence
  ENSG00000249330_4 (sequence is synthesized)
tcagcctggcaagcttcctgtctggaataatgtgctgctctgggaacttctcatcaaacattcaccccaatagcataagtatatactttcaacagttatttatcagatattcattactga

SEQ ID NO: 924753 - DNA, 120 bp, Artificial Sequence
  ENSG00000249330_5 (sequence is synthesized)
aagtatggatcgtatggaatatagcaggagtctaagatatgttctctgccctcatgacactgaccatcaaattaagaaaagaaggcacgagtaaataaaaataatagaaagaatgctata

SEQ ID NO: 924754 - DNA, 120 bp, Artificial Sequence
  ENSG00000249330_6 (sequence is synthesized)
gatagtataaaaccaaatgccaaataaatgatgtcaaaaattaattccacaatctaagaagggaaaatatcagcataagctggaacattcatgagagatgatggagtttatattaagact

SEQ ID NO: 924755 - DNA, 120 bp, Artificial Sequence
  ENSG00000249330_7 (sequence is synthesized)
gttagacaagcggaggacaagatgatggaatttatattaggactattagaaaatagggagattctgaagggaagaggaaataattttcaatgttattctttaactctgcatggtaaaatg

SEQ ID NO: 924756 - DNA, 120 bp, Artificial Sequence
  ENSG00000249330_8 (sequence is synthesized)
ttgaattgagaaagaaatgtacagagatcataaaacagaaggatgatgcaaaagaagagtcagatataagtggagcacacaagattcgactgactgtggaaagccttggacaccaggcta

SEQ ID NO: 924757 - DNA, 120 bp, Artificial Sequence
  ENSG00000249330_9 (sequence is synthesized)
agaaatctgaccttgatcctgaagacaagaaaataattggaggttttgagcagggaagtacaacagtgaaagtaatcttcttgtaagcaaaaccttttgtctgtatgcagaattagaagg

SEQ ID NO: 924758 - DNA, 120 bp, Artificial Sequence
  ENSG00000249330_10 (sequence is synthesized)
gaaggaatggcagcagggtgcttgtgaataggccattgcagcactgttgtcatgagaaaaaagttatatttacaatttacatcattaagcaaggttgtcactaagtagaattaaattgat

SEQ ID NO: 924759 - DNA, 120 bp, Artificial Sequence
  ENSG00000249330_11 (sequence is synthesized)
ctaaatgagttgacaattcagtaaaagaaggaaaaccagtgcaagttatttgataacgtgtagatcaatacacaagatattgattggctttatcgttttggaaataatcattgttgtggt

SEQ ID NO: 924760 - DNA, 120 bp, Artificial Sequence
  ENSG00000249330_12 (sequence is synthesized)
tgaggttcatgctcaatcacaaactaagagtttccagttggtacaagagaaaactggagatcaatgacagatggtcctgcattccattgtttttttgtgtcatatatgtttaaggagtaa

SEQ ID NO: 924761 - DNA, 120 bp, Artificial Sequence
  ENSG00000249330_13 (sequence is synthesized)
gatctctttatacatagtgaaatggctattatattcaagcaattaaaatattcattatctcttgtagttatccttcttatttttgtggcaaacacacctgcaatccactcttttagtaaa

SEQ ID NO: 924762 - DNA, 120 bp, Artificial Sequence
  ENSG00000249330_14 (sequence is synthesized)
aatactcagttaaatactatattattaactatagtccccatgttctctgttacatctctagatttattcttcctatatatctgtagctttgtatttcttgacctgcgtctccccattccc

SEQ ID NO: 924763 - DNA, 120 bp, Artificial Sequence
  ENSG00000249330_15 (sequence is synthesized)
tcttacctcatctctggtaactaccacttcatttcctatttctgtgtattcagtttttttttttaaagattctacatataagtgcaattatgtaatatttttttttaatctggcttattt

SEQ ID NO: 924764 - DNA, 120 bp, Artificial Sequence
  ENSG00000249330_16 (sequence is synthesized)
cacttagcataatgacctccaagttcatccatgttatggtaagtggcaggatcttcttctttattaaggctgaataatactccattatacatatatgtaatatcacagtttctttattca

SEQ ID NO: 924765 - DNA, 120 bp, Artificial Sequence
  ENSG00000249330_17 (sequence is synthesized)
tttatcaattgatacttaggttgtctctatatcttggctactgtgaataatgttacaatcaacataggagtgcagatatctttataacatgatgatttcatgttcattgggtatatacac

SEQ ID NO: 924766 - DNA, 120 bp, Artificial Sequence
  ENSG00000249330_18 (sequence is synthesized)
agaacagaagatagctttatgatgtggtgatttcatttcctttggtatatacacaaaagaagaattactgagtcatgtggtagttatctctttaatgttattaagaacttccatgctgtt

SEQ ID NO: 924767 - DNA, 120 bp, Artificial Sequence
  ENSG00000249330_19 (sequence is synthesized)
ttccataatggttgcaccaatttacattctcaccaacagtatacaaagattcccttttcttcatactctcatgaacaattgttattgcttgatgtgaggcaattatttcataggggtttt

SEQ ID NO: 924768 - DNA, 120 bp, Artificial Sequence
  ENSG00000249330_20 (sequence is synthesized)
aattttcacttccctggtgattagagaggtagagcatcttttcatatacctgttggccatttttatgtcttctgataaatgtttattcaggttattggcctattttttaaaattaggtta

SEQ ID NO: 924769 - DNA, 120 bp, Artificial Sequence
  ENSG00000249330_21 (sequence is synthesized)
cttatttttctcctaatgagttgtgtaagttcttcatgtattttggatattaacattttaccagatatgtggttttcaaatattatttcccaatctgtatgctgccttttcattttgttt

SEQ ID NO: 924770 - DNA, 120 bp, Artificial Sequence
  ENSG00000249330_22 (sequence is synthesized)
attgtatcctttactatgcagaagctttttagtttgatatagtcccatttggtagcctgaactttttatgatatgccaaaagtaattgttcagaccagtgtcatgcagttttttgtatat

SEQ ID NO: 924771 - DNA, 120 bp, Artificial Sequence
  ENSG00000249330_23 (sequence is synthesized)
attttcttctaagagttatggtttcaagtgctacatttaggtttttatccattttaattgacttttgctcttaatttgttgttgtaggatctgcctcaagttgtcaaactaaacattgct

SEQ ID NO: 924772 - DNA, 120 bp, Artificial Sequence
  ENSG00000249330_24 (sequence is synthesized)
ttattgtcttatacacaacagaaataactctcttcaatcaaaacacctgaaaatcttgtcagcaaagtttacctctgatttacttctaccacttaacatctgtgtgatattaagcaaaat

SEQ ID NO: 924773 - DNA, 120 bp, Artificial Sequence
  ENSG00000249330_25 (sequence is synthesized)
aattaacttttctgtgtgcaacactttcttcatctgtaaaatggtaccccgcatatgggtctgttgtatagagaaattttatatacatatgtgtatgtgtgtagtgactgcaatctaata

SEQ ID NO: 924774 - DNA, 120 bp, Artificial Sequence
  ENSG00000249330_26 (sequence is synthesized)
caactcattccccagtgggaggaaagatgcttcctgacctcaaaaatcagactccaagttcttcagttttggaagttggactggctctccttgctccttaacttgcagacagcctattgt

SEQ ID NO: 924775 - DNA, 120 bp, Artificial Sequence
  ENSG00000249330_27 (sequence is synthesized)
gggaccttgtgatcaggtattctgctgacactcaacagacattgtcttcaaaatgtactctcaagtggtcaggatcctattctcatggtactatttcctcgcttagaaaataaaggatga

SEQ ID NO: 924776 - DNA, 120 bp, Artificial Sequence
  ENSG00000249330_28 (sequence is synthesized)
aatgaactacactattggagctactataaagatgaaagaagatgaaagttttcagtaggattgttgccatgtagtaaaccccttataaatagtatgtataataatttgtcacatgctgtt

SEQ ID NO: 924777 - DNA, 120 bp, Artificial Sequence
  ENSG00000249330_29 (sequence is synthesized)
aggttaagccatcaacaacaaacatggcaataattcaagttcaaaaatacagacgggtttgaattaacattgcacaatgatttgtttgtgttttcttgtttttccaaattcagtgttata

SEQ ID NO: 924778 - DNA, 120 bp, Artificial Sequence
  ENSG00000249330_30 (sequence is synthesized)
ttctactttcatattttgtgagcatttattaactgaacgactgccacatgcatggcagtgtgctaaatatttgagtgcattatgatttcacccattatggggtttaaatccatctgaaaa

SEQ ID NO: 924779 - DNA, 120 bp, Artificial Sequence
  ENSG00000249330_31 (sequence is synthesized)
gtaaagattaagacccatgaatctgtgcataattcaaatgatacttattcacgtgtattgtgtggtagagaaaatgaatgtataggaaagaaagagaatgaaagtgaatgaggaggaaaa

SEQ ID NO: 924780 - DNA, 120 bp, Artificial Sequence
  ENSG00000249330_32 (sequence is synthesized)
ttaaatacagtcaggaaaggcttgataaaggacttaagaacttgaatatgattgtgaaacatagttataatttctaagaacagctgaggaaaaaagcttaatttgtatagtttatgaagg

SEQ ID NO: 924781 - DNA, 120 bp, Artificial Sequence
  ENSG00000249330_33 (sequence is synthesized)
aatgcatatgtttgtgtttcacagaatttagagttaagaatacacacacacactacacagaaactcagaaaacctatgctacttgctcaggtaattaattactagtcaatggtaaagttc

SEQ ID NO: 924782 - DNA, 120 bp, Artificial Sequence
  ENSG00000249330_34 (sequence is synthesized)
aaactgatgtctaggtctcctgctcctgttccagtacatttttaccgcaatacattgagtgagcaagctttcaaaagcttcttgaattattcatatggatatggaaaatcctatcttaca

SEQ ID NO: 924783 - DNA, 120 bp, Artificial Sequence
  ENSG00000249330_35 (sequence is synthesized)
acataaggccatttctatttacagatattaagactatgaaaacttttttcatattcagccatctcaatgactaattcttgcatcatcagttttagtagcaccatagctggatctcgtaag

SEQ ID NO: 924784 - DNA, 120 bp, Artificial Sequence
  ENSG00000249330_36 (sequence is synthesized)
taaaaccagccaaactagtagtatgtgtaccatggaaaataaggatttgtttgtttttctgaagatctagttgttaaacatttaccagtacaccactggttggaatagtaaattccatac

SEQ ID NO: 924785 - DNA, 120 bp, Artificial Sequence
  ENSG00000249330_37 (sequence is synthesized)
agtgccactattaaaatagctaaaaatatgaaattatgtttataatcttacataaattgactttagagtgagacgtggaaaggtaaaaaaaaaatgacatggtctttgaattaaaatacc

SEQ ID NO: 924786 - DNA, 81 bp, Artificial Sequence
  ENSG00000249330_38 (sequence is synthesized)
aaatagggaaattattaggttctacgagaaggttctctcgtaagtaaaaaggaacagtcttttgaaatatagtgcatatgg

SEQ ID NO: 924787 - DNA, 120 bp, Artificial Sequence
  ENSG00000249330_39 (sequence is synthesized)
aagtaaaaaggaacagtcttttgaaatatagtgcatatggagtttgcaattgtagctgtttgttgaatatctatgcaaatttacacaaattaaataggaataccttaccatgaatacaca

SEQ ID NO: 924788 - DNA, 120 bp, Artificial Sequence
  ENSG00000249330_40 (sequence is synthesized)
ttttatcctagaaattcaaggacattgctatttcagaaaacctataaatctagtttggtgttcatcagttggtgaactatgaataaaatgattattttaataaatgaaaataaggcattt

SEQ ID NO: 924789 - DNA, 120 bp, Artificial Sequence
  ENSG00000249330_41 (sequence is synthesized)
tgattattttaataaatgaaaataaggcatttaagtaaaaatctcagtaactaaggtaatggaatatgcaagctacatacagaaaaatgcaagccaggagcggtggctcacacctgtaat

SEQ ID NO: 924790 - DNA, 83 bp, Artificial Sequence
  ENSG00000249330_42 (sequence is synthesized)
tatggtgaaaccccatctctactaaaaagtgcaaaaattagcggggcacggtggtgacagaattgctgaacccacgtggcgga

SEQ ID NO: 924791 - DNA, 83 bp, Artificial Sequence
  ENSG00000249330_43 (sequence is synthesized)
cggtggtgacagaattgctgaacccacgtggcggaggttgcagtgagctgacatggggccactgcactccatcctgggtgaca

SEQ ID NO: 924792 - DNA, 120 bp, Artificial Sequence
  ENSG00000249330_44 (sequence is synthesized)
atgcaatactctattttattcaagtaaataattacaaaatgtgctaattcaataaaattaataaaagtgtggtattttatttctatagacataaatccagaagattatgctgaaaacatt

SEQ ID NO: 924793 - DNA, 120 bp, Artificial Sequence
  ENSG00000249330_45 (sequence is synthesized)
atgctttattaaaagagatcacgttgtggatgatttttatttatcctttagaattgtctgcatttttaaaaaaagtctctacagtgaattatatagactacttagtttatgaaaattatg

SEQ ID NO: 924794 - DNA, 120 bp, Artificial Sequence
  ENSG00000249330_46 (sequence is synthesized)
aaaacaaaatttactggagacaagaacttattcacgacaaccacaaaaacttaaaatatccaagagtgacttcaatgggagaaaaattaaacttaaaatcagataaatgttaagtgtata

SEQ ID NO: 924795 - DNA, 120 bp, Artificial Sequence
  ENSG00000249330_47 (sequence is synthesized)
tgaataataaagaggatgaggatgaagatgagaaggagaagagaagaagaaatggtgaagtaaattttagcacaccgataaacgtaatgccacacacatatttgtttaaataatttaggg

SEQ ID NO: 924796 - DNA, 120 bp, Artificial Sequence
  ENSG00000249332_0 (sequence is synthesized)
acactggatgtttcagtggacacaaccagccttcaagaagcatgtggacctagagaaagctctgccacctacatgccagcgcatgttcatgctgagaactgcagggaaaaaagaaatggc

SEQ ID NO: 924797 - DNA, 120 bp, Artificial Sequence
  ENSG00000249332_1 (sequence is synthesized)
ttatattgactgactaccatcaatgtgccagagaggtcttcttatctcatcttagaggtgagagaacaagtcaacccgctggtaaatgggccaatcagaaatgaaatcagctcatcacca

SEQ ID NO: 924798 - DNA, 120 bp, Artificial Sequence
  ENSG00000249332_2 (sequence is synthesized)
gttccagtcacttttccattttgaaaagcctcctgcatcattctctgcacatatgcagcagatatagacacccaagcacacccctaaggagacagcccacttggactcaaggacattccc

SEQ ID NO: 924799 - DNA, 120 bp, Artificial Sequence
  ENSG00000249332_3 (sequence is synthesized)
tttgcacaaatatcttctagaaggacttgttcctcacccactggcccttgattctgtctcactattgaatgaggcttttccaccaaacagctttaaggatggatgtgtgctctggagaga

SEQ ID NO: 924800 - DNA, 120 bp, Artificial Sequence
  ENSG00000249332_4 (sequence is synthesized)
gcaagaaacatgtgagagccggtttgctttctgtgggtcagccaacgtctccgccagtcctatgactgtcatttcactgaggattgatatgcctgaagtcactacaaaaacaaatgatgc

SEQ ID NO: 924801 - DNA, 120 bp, Artificial Sequence
  ENSG00000249332_5 (sequence is synthesized)
tctgaagctcattccgcccttgcacaaagaagccaaaaaaatagggctctaatttattttagaattggcataatgagacaaaagagtccactgtgggaaatttttgcttatgcaatgaaa

SEQ ID NO: 924802 - DNA, 120 bp, Artificial Sequence
  ENSG00000249332_6 (sequence is synthesized)
gacaaggggaagacaccaaatccctggactcaggcctcacatgattgagtgagaggaactctgctgtcagaccctacaatgcactcttcagtggaagaggatcacacattccaaacatac

SEQ ID NO: 924803 - DNA, 120 bp, Artificial Sequence
  ENSG00000249332_7 (sequence is synthesized)
tccatcaggtcatatgttaaatgacagggctgagacctctccacagcacatctgatactgggatcgatgaagatcagatgtgcaaatcacactgggctccggaaagccctagactgtgtc

SEQ ID NO: 924804 - DNA, 120 bp, Artificial Sequence
  ENSG00000249332_8 (sequence is synthesized)
atgggggacccaaaatggtgccctggcatcggcaagtggtgaaaccagccatctggccctgtgccctgtcctcagaagtgcccctgccgccccagcaggtacatttgcaggtgaagaatt

SEQ ID NO: 924805 - DNA, 120 bp, Artificial Sequence
  ENSG00000249332_9 (sequence is synthesized)
tctttcgctttagtgtcctgggaaccaagtattttctgttggtggtgtttctcttgcaccagatgaatttttgcctcgcttacctgagacttagactgtcccaattccagtctccactga

SEQ ID NO: 924806 - DNA, 120 bp, Artificial Sequence
  ENSG00000249332_10 (sequence is synthesized)
acacagtccccatatggggtttctgacctgtagtaagtaaagaatatcacttcctatcaggtccaggagcccagagttatcttgggacctcaaacggagagaaatttacccaactcatag

SEQ ID NO: 924807 - DNA, 120 bp, Artificial Sequence
  ENSG00000249332_11 (sequence is synthesized)
tttaacaattaatattttttttaattttgacttttatgaatgaacaaccaatgggattacggttgggaggtagtagagtttttaaacagctaatgaagtccactaccaataatggcagac

SEQ ID NO: 924808 - DNA, 120 bp, Artificial Sequence
  ENSG00000249332_12 (sequence is synthesized)
tccccaagctcagacctctgctctgccagttgactgcctatgttttctgggatgagctgtttagcctctctgctacacaaattcttcacctgtaaaatgtagacaataaaaagtcctgcc

SEQ ID NO: 924809 - DNA, 120 bp, Artificial Sequence
  ENSG00000249335_0 (sequence is synthesized)
agtgtggtactgaagatgagatgagcttatatccccttgtgtgtgctctgcgttttaatgatagcttggcgtgcaggggcagaggcctacagctttaaaaagtggatgtgctttatcatt

SEQ ID NO: 924810 - DNA, 120 bp, Artificial Sequence
  ENSG00000249335_1 (sequence is synthesized)
ttaactcaagatgacgactcatttttttccctttgtgcagttcaggaaaccaggctgaagaatgtgaaatacatcgcccaaagtcagacacggaggaacaactgcttcggagctagcaat

SEQ ID NO: 924811 - DNA, 120 bp, Artificial Sequence
  ENSG00000249335_2 (sequence is synthesized)
ttcctgagctggaattgcaccactggcctgtagaatccaaactgttttctaccagaacaactccttccctgcaggaagcagggtgtgcacagctgaaccctggtctgagaaggttgaagt

SEQ ID NO: 924812 - DNA, 120 bp, Artificial Sequence
  ENSG00000249335_3 (sequence is synthesized)
cactgactcagccccagcaaggaagttgcccttcgacttctgacctctggccctgtttgaaaaccaactcaaatcgtttttctttttcagaagctgcttgcctccgcttcaccttccacc

SEQ ID NO: 924813 - DNA, 120 bp, Artificial Sequence
  ENSG00000249335_4 (sequence is synthesized)
aagtttcctgaggcctcccagtcatgcttgccgttaaaactgtggaactggcctgaaataactcggtgactaaggaatttcattgagaaaaaagacaaaaacaaaacaaatactttgtct

SEQ ID NO: 924814 - DNA, 120 bp, Artificial Sequence
  ENSG00000249335_5 (sequence is synthesized)
ctttgtcttttggaataaatgaatccttacagaagagtggtaaaatgaacacgagtttggatctgtggagccattattaagtaatgaagactgaattcaccttctttgggctgaagcgaa

SEQ ID NO: 924815 - DNA, 120 bp, Artificial Sequence
  ENSG00000249335_6 (sequence is synthesized)
ggaaacattgttattcatttggttaatcatcaaactcccattgaacacatactccattatgcactgaattattacattctgtaattccaagtagaagagaatctaagagcttgtattcac

SEQ ID NO: 924816 - DNA, 120 bp, Artificial Sequence
  ENSG00000249335_7 (sequence is synthesized)
aaataacttgtctgaagaaataacatcaaaagaatatggcatctcaaatgattatgaaaatcacccttcatagaagatggcggattatgtttgttgcattgtttctgtaatgggactgat

SEQ ID NO: 924817 - DNA, 120 bp, Artificial Sequence
  ENSG00000249335_8 (sequence is synthesized)
agtttgtgctgaataattcatgctatttgcccaagccccttgaaagtgctggcatatctctgagggacagctggctgagattatgggacatactattgccacagacttgaatattgccaa

SEQ ID NO: 924818 - DNA, 120 bp, Artificial Sequence
  ENSG00000249335_9 (sequence is synthesized)
atggcctcttggagattttttttggtagtgcagtgtttgcaatgctgtctgtggaattatgcagacctgggttcaaattctaactctaccctttgacttggacaagggatttaacctctt

SEQ ID NO: 924819 - DNA, 120 bp, Artificial Sequence
  ENSG00000249335_10 (sequence is synthesized)
ttagtctcaatttccttgtatgtaaaatgaaagtagtaatccatccttattgggatttatacatataatgttataggaacagaaatttcattgttttaatgaaaactcctttttcaagga

SEQ ID NO: 924820 - DNA, 120 bp, Artificial Sequence
  ENSG00000249335_11 (sequence is synthesized)
ggttgggtctggttaaagggaatgtccctttcctatttagtgccttgggtttggttgtgaaaacctagtaagaggagttgaggggtaggtgggtactgggagagctccattctttttaga

SEQ ID NO: 924821 - DNA, 120 bp, Artificial Sequence
  ENSG00000249335_12 (sequence is synthesized)
agaagaagaatggggtgaggagaagagaagggaggagagaggcaagaggagtcagccaaaaggagtgaagcaggagggcgatgaggccaacaaattggcaaggtggtggttgtgggataa

SEQ ID NO: 924822 - DNA, 120 bp, Artificial Sequence
  ENSG00000249335_13 (sequence is synthesized)
acattttgcatgcaaagaaagccagagtggctagattactcccttagggtaatggagaaaggaaaaagaaattgaaaaaggtcaggtgaacaaagcagaaggaatgaagaggtttgtgtg

SEQ ID NO: 924823 - DNA, 120 bp, Artificial Sequence
  ENSG00000249335_14 (sequence is synthesized)
tttcctgaggcctcccagtcatgcttgccgttaaaactgtggaactgctttacaacgaatgtaaaagacaagtctcaggaaaagatgtaattttatggaagaaaaaagatagaaaataac

SEQ ID NO: 924824 - DNA, 120 bp, Artificial Sequence
  ENSG00000249335_15 (sequence is synthesized)
attacccaaatgaaaacagatgaagataaagatcatttcttgaacaatatcttcacatcatggctgggcaaagtggaaagagacagaaaactgaaaagtgacaacttaaaaactttcttt

SEQ ID NO: 924825 - DNA, 120 bp, Artificial Sequence
  ENSG00000249335_16 (sequence is synthesized)
aaacatatcactctgacaccaatgtgtaagatgaagtggacaggaatggaactgtactgggaggctctgacagttcgggtgagaagaaatgaagggtcctgtaagcagatgagcagatga

SEQ ID NO: 924826 - DNA, 120 bp, Artificial Sequence
  ENSG00000249335_17 (sequence is synthesized)
acagaagagcagaagagcagcacagccgagaaggaatgaatggcacagcagagaaggagagaagagaaggagcatctgaacgttgagagttcaactagaaatggtcagagaggagactga

SEQ ID NO: 924827 - DNA, 120 bp, Artificial Sequence
  ENSG00000249335_18 (sequence is synthesized)
tcatgggatagccaaactccaggagaagattatgttcccactccatcccctttccagatccccaatccatccctctgagagccacctctaccactcgataaaacccctgcatttaccatc

SEQ ID NO: 924828 - DNA, 120 bp, Artificial Sequence
  ENSG00000249335_19 (sequence is synthesized)
agcagacttaaaatatgtatttaggcagtaaattttttattattttatttctttatttttaattttgcaagtatctcatgaatacattttttaaaaataacaattgaaatgatgcagtca

SEQ ID NO: 924829 - DNA, 120 bp, Artificial Sequence
  ENSG00000249335_20 (sequence is synthesized)
aatctggaaggtcataattttctcaataagaaaaatatatgctagctctgccttgctactcttattatgctcacttttgattatcaggcaactttgagtataaaatttctggtattgcta

SEQ ID NO: 924830 - DNA, 120 bp, Artificial Sequence
  ENSG00000249335_21 (sequence is synthesized)
tttctcttttgaattttgtgatgctaaaatgttcttgaaattaaaatgttccaccccttcccactcttcagatccccatctgttctcttgtgagcacaagacccacacagctggtctcag

SEQ ID NO: 924831 - DNA, 120 bp, Artificial Sequence
  ENSG00000249335_22 (sequence is synthesized)
acatggtcacatccacactgatataagaatatgttcgagtaagcaatctgtggtttggtgatttaattaattctacaagacacctaaaaagtgccaggtggaaggacacagataaataag

SEQ ID NO: 924832 - DNA, 120 bp, Artificial Sequence
  ENSG00000249335_23 (sequence is synthesized)
acagtatccagcctttaaggaaatcctggcataacactaaagaaaactcaatatttttatccagcagaagctggaactgaagtgactagtgcctaggctttggagtcatgcagatctggg

SEQ ID NO: 924833 - DNA, 120 bp, Artificial Sequence
  ENSG00000249335_24 (sequence is synthesized)
tttgaatccagccctgccacctatcatttccatgacctttagaaggtgatgatattgacacttcataagattttgtcatgctttgccttttcacaccgctccatgccacctcacacttta

SEQ ID NO: 924834 - DNA, 120 bp, Artificial Sequence
  ENSG00000249335_25 (sequence is synthesized)
tggctacagattctatccctctggccacagaagtgggcccaagataggtcagttagtgtttattacctctggtcacggtgattggttcagagatggacacagtatctaatctgggccaat

SEQ ID NO: 924835 - DNA, 120 bp, Artificial Sequence
  ENSG00000249335_26 (sequence is synthesized)
cagattccttctctgagattttatctttttctatctggagctagaagggaagaactttttttcttttggatgatgaggctataagcaagtaatttcaagggtgcctgcagccattgtttc

SEQ ID NO: 924836 - DNA, 120 bp, Artificial Sequence
  ENSG00000249203_0 (sequence is synthesized)
ctcctgagacagcaagaccagactttgcccttcctcctctcagcctactcaacgtgaatataatgaggatgaagacctttgtaatgaccttttcccacataatgaatagccattgggaga

SEQ ID NO: 924837 - DNA, 120 bp, Artificial Sequence
  ENSG00000249203_1 (sequence is synthesized)
cacacttctgaacaccaccactggaaaatcacacatgctgaaatgggagagttccctgacccccttgcaggatatgtgacaggagtgtggctcatctgttcagctggagtgcatactcaa

SEQ ID NO: 924838 - DNA, 120 bp, Artificial Sequence
  ENSG00000249203_2 (sequence is synthesized)
accccttatgagacaaggagtatgcagacagaaggtgcaggaactgggaagcaaaatataaactagttaatttgatctccaagagttaagcggttttaatattactgacagtaatatcag

SEQ ID NO: 924839 - DNA, 120 bp, Artificial Sequence
  ENSG00000249203_3 (sequence is synthesized)
cagtggtgttggaaccccatgatctcatgaatcatagatagcaactgcttactggacattgaagctttatggccagctgccaaaaaaataaatgcaccttaatttttaaattgaattata

SEQ ID NO: 924840 - DNA, 120 bp, Artificial Sequence
  ENSG00000249203_4 (sequence is synthesized)
ctattgctctattcctcttattttggtgtttacatgtgactttataatttccttcacttgaaagattttaactttaaaggaaactttactctgaacgtttaggacaattcatagataatc

SEQ ID NO: 924841 - DNA, 120 bp, Artificial Sequence
  ENSG00000249203_5 (sequence is synthesized)
aaattgattatcatgttttcaatgttaaatattacttcatatgtctttttacaaccttcagaataagaaagccagctatgaaataccaagtcttgactagtagtgccacctagcatcaca

SEQ ID NO: 924842 - DNA, 120 bp, Artificial Sequence
  ENSG00000249203_6 (sequence is synthesized)
aagaaaaagttgttcaactactttgcaaagcattggaaatttatcaaatcatctaatatactatctccttgatccttaatccagaggaaaataagcagacatgatcaattagaagaaatg

SEQ ID NO: 924843 - DNA, 120 bp, Artificial Sequence
  ENSG00000249203_7 (sequence is synthesized)
tacacaaaacctatgtaattttagagatagtatactacatattatgaatgtttgtgttttagtaagatgtagttatgagatgtagcagtaagatataatttctggtttgctgactgatat

SEQ ID NO: 924844 - DNA, 120 bp, Artificial Sequence
  ENSG00000249203_8 (sequence is synthesized)
gctaccggtttttcctacaatttaagaaaacatattgggattcaaatgaataaaaataatgtttgtgtactgaaatattggctatgacctaatttatagaataaaaagtaagtcattcac

SEQ ID NO: 924845 - DNA, 120 bp, Artificial Sequence
  ENSG00000249203_9 (sequence is synthesized)
tttatatttgaaaaagaaacctagcatcctggttttctctgggaaaatcttaaagatttgctgtaactgagcctgcatttccttaacacaaatctgctggagctgaacatttgctgctgc

SEQ ID NO: 924846 - DNA, 120 bp, Artificial Sequence
  ENSG00000249203_10 (sequence is synthesized)
ttcctttaaacttgacctcaatcacgaaggtcttcatcaactcactcagtgctttcacatgtacttatacccagcacatgcattggctatgaccttgcagaatttggcattagcaacctc

SEQ ID NO: 924847 - DNA, 120 bp, Artificial Sequence
  ENSG00000233411_0 (sequence is synthesized)
tgcccatcaaaaggaaatgcattttgctgaaagtagcgcagttttcccagggaaataacatttgagccgagccttgaaagatgagtaaaagttcgtcaagctgaaaaatttcatcgtaag

SEQ ID NO: 924848 - DNA, 120 bp, Artificial Sequence
  ENSG00000233411_1 (sequence is synthesized)
ttcaggctttgcaggtgatatggttccttctccatccaggataactccagtgaaggatggacagaggcaagattctagctccattttggctgcaatgtgtccttgttcttttctcctttg

SEQ ID NO: 924849 - DNA, 120 bp, Artificial Sequence
  ENSG00000233410_0 (sequence is synthesized)
aataaagacataaaaaacttaaatggagttcactcgaattatatagatccttattggtaagttctgaataaaattctggtggcaagctccttaaagttccaattccaagcacagagatgt

SEQ ID NO: 924850 - DNA, 120 bp, Artificial Sequence
  ENSG00000233410_1 (sequence is synthesized)
tcatggaaggttttacataacacgtgtagaacctgtccatggctgggttttcttttgttcagttttgggtctcagcacctggaagactacctggcatatgaattcctgtgatccggtaca

SEQ ID NO: 924851 - DNA, 120 bp, Artificial Sequence
  ENSG00000233410_2 (sequence is synthesized)
tacagaaaaatatcaagagaagttaaattttaaaatgatggaccttttccaattagattacttctgatcaatacaatgtctgatttttataagatgacaactaaaattcaaattcggatg

SEQ ID NO: 924852 - DNA, 120 bp, Artificial Sequence
  ENSG00000233410_3 (sequence is synthesized)
tcaaaaaggtttaaataaccctccctccgatctctgtcttcttcctactctgtactctctctggggatctctttacatcccacagccattgaatcttaaaagtaatacaagaaataattg

SEQ ID NO: 924853 - DNA, 120 bp, Artificial Sequence
  ENSG00000233410_4 (sequence is synthesized)
aatgaaatttccaaggacttcagaatatagatcactttttttccctaacatctagaacagtatctagcgtattgacaatatccaataatatttgctaaataaataaagaaaaatgcacac

SEQ ID NO: 924854 - DNA, 120 bp, Artificial Sequence
  ENSG00000233410_5 (sequence is synthesized)
tgaagagtcaacatcataaatgaataaaaacatattcaaaagtatatcattctgaaattgtacaatgcatacaaatatttgatgctaaaaacttctacaaagataaagaagatcacatat

SEQ ID NO: 924855 - DNA, 120 bp, Artificial Sequence
  ENSG00000233410_6 (sequence is synthesized)
gggagttacaacatttagacttctgaaagaaaattaattccaacctagacttctatgctccatttaaaaaattaatcagaagacacagattaagtaaagcaacttacagataggttagat

SEQ ID NO: 924856 - DNA, 120 bp, Artificial Sequence
  ENSG00000233410_7 (sequence is synthesized)
caggagaggttgaaaagaattcctggaataatgttgaagggaaatcctaagacatcagccattcttcaagtctagaaaccccaaggctattgagagcatgaagactaaggaatgaatgtc

SEQ ID NO: 924857 - DNA, 120 bp, Artificial Sequence
  ENSG00000233410_8 (sequence is synthesized)
tccaggaaacaaaaaaggaaccaatgaattcatgacacattacctggtgagactgaccataagcaaacataaacaaaacaatttccataggtattttattgtttggaatgtagcaattta

SEQ ID NO: 924858 - DNA, 120 bp, Artificial Sequence
  ENSG00000233410_9 (sequence is synthesized)
tgaaaaagaagagacgagtattaactccagtacaaacaaagagttatttgggtaagggtgcaaatcttagtaaatgacttggttcagaagtaaacaatataacacaacttttaaaaagtt

SEQ ID NO: 924859 - DNA, 120 bp, Artificial Sequence
  ENSG00000233410_10 (sequence is synthesized)
gaggggtgaagactgaagtggtaatttaaatacaaaattctgatacaattttattgagaggagggagagaggagtggagagaatttggtatcatggtgaagaagtgctaattttaatggt

SEQ ID NO: 924860 - DNA, 120 bp, Artificial Sequence
  ENSG00000233410_11 (sequence is synthesized)
tggtgcataaaaataagtcattggtatcagtgatacatattattttgtaatatgaagactgaagaaagagaaaggaatatttttctattttattttggtaaaaatttttatttctattat

SEQ ID NO: 924861 - DNA, 120 bp, Artificial Sequence
  ENSG00000233410_12 (sequence is synthesized)
ctcctttcaataaaattgtatcaaaatttgtgtttaaattacagttcagtgtcccctctccctcttttgtccctgggggccagagtttttattattattttgagttattgaatttttaaa

SEQ ID NO: 924862 - DNA, 120 bp, Artificial Sequence
  ENSG00000233410_13 (sequence is synthesized)
aactaacacatattagtttttgagatttttttcttgttgttcttgggttattgacagcaaaggggtggaggaggagagagaagataaaatgagcaaataaaaaaatggtaaagtacacaa

SEQ ID NO: 924863 - DNA, 120 bp, Artificial Sequence
  ENSG00000233415_0 (sequence is synthesized)
ctggcagaggaatcctgaatcaactggcataggtctgccactgatgcaggaagttgaacctggcagctgcagccaatcagagctgaagaacagtcaagtcaagcaaacatgatcgctgga

SEQ ID NO: 924864 - DNA, 120 bp, Artificial Sequence
  ENSG00000233415_1 (sequence is synthesized)
gatgcagcaactatcttggacaacaaggtgacaagaagcttaatttgacaacaatacaaaaagatagtatcctgtgtccctgatgacaccaagagggtgcataatattttcctgcagatg

SEQ ID NO: 924865 - DNA, 120 bp, Artificial Sequence
  ENSG00000233415_2 (sequence is synthesized)
gttttctatgcagacaattatgtctgcaaataatgagttttctaaacaaattcctttctgattttttttttgcttgtcttattacattgcctaggaataacattattataatgagtagaa

SEQ ID NO: 924866 - DNA, 120 bp, Artificial Sequence
  ENSG00000233415_3 (sequence is synthesized)
ctagtgataacagtcttttgtcttttttgtgcatttaatgcaaatgctcatctttactattaagtgtgctaacagctgaagttatcaggttaatatacttcaccaggttaagaaggtttg

SEQ ID NO: 924867 - DNA, 120 bp, Artificial Sequence
  ENSG00000233415_4 (sequence is synthesized)
aaggtttgtttctatttctgttttgttaaactacaaaaaaaatcataaatgaaaattaacttttcctcttgatttatcacatttatttaaataaacacagttatgatttctcttttaatc

SEQ ID NO: 924868 - DNA, 120 bp, Artificial Sequence
  ENSG00000233417_0 (sequence is synthesized)
aggacacagacacacacagagggaagaccatgggaagacacagagggaagatggccatggaaaagctagagagagagagttctcagaagaagtaactctgccaacaccttgatctcagat

SEQ ID NO: 924869 - DNA, 120 bp, Artificial Sequence
  ENSG00000233417_1 (sequence is synthesized)
ttctagcctccaaagacaatgtcaagagaatgagaagacaagcctcagaatgagaagaaacatttgtaaaagatacatctaataaagcagttttatccaaaatatataatacaaagatct

SEQ ID NO: 924870 - DNA, 120 bp, Artificial Sequence
  ENSG00000233417_2 (sequence is synthesized)
tgaaaatgtggtctctatcatatgtcatcatggaaattcaaattaaagccacagtgagataccactacacacctataagaatagccaaaatccagaatacagacaacaccatacgctaat

SEQ ID NO: 924871 - DNA, 120 bp, Artificial Sequence
  ENSG00000233417_3 (sequence is synthesized)
gaggattaggagcaacaggaactcgtattcatgctggtgggaatgcagcaaggaacatttccctctctggatacatgtgtttcagatcacaaagccatagatgagaggagtctctctttc

SEQ ID NO: 924872 - DNA, 120 bp, Artificial Sequence
  ENSG00000233417_4 (sequence is synthesized)
taaatcactttttgaagaacacctactcaagagagtcacctgaccccgttggaatataagatgtgtgggaaatctaccttattgcattaaactactcagatttttgtgtggttggttaaa

SEQ ID NO: 924873 - DNA, 120 bp, Artificial Sequence
  ENSG00000271746_0 (sequence is synthesized)
cgtacgattctggcggcgtgggggcccaggcagccgccgcttccagaaggttcggtggcggttgggccgcgccggtgcggggaaggcccgctagccgcggcagccgcgcccgacccggtg

SEQ ID NO: 924874 - DNA, 120 bp, Artificial Sequence
  ENSG00000271746_1 (sequence is synthesized)
ggtggcagccccgagggaagcgtctggggcggcctaagtggcggagcagggcggacttgggccctcactctccgcgcggcggtaaatatttgtgctgggcgttcccggccgcccgcgccg

SEQ ID NO: 924875 - DNA, 120 bp, Artificial Sequence
  ENSG00000271746_2 (sequence is synthesized)
ccgattcgctgccgcgcccagtgcctgggcggccggatgaggtcagagcggaaggcgcggcccgggctcctggcagtggggcctgattcccacccccgcccccaacccaccccggcacca

SEQ ID NO: 924876 - DNA, 120 bp, Artificial Sequence
  ENSG00000271746_3 (sequence is synthesized)
gcttccgcagcacaaagcgtcacgaggtggggaggaggaaaggccggcgactatctacaccgccgcctgcagcttttactgggagcgctgagcgccagcctggaggtgcacgtgttgcag

SEQ ID NO: 924877 - DNA, 120 bp, Artificial Sequence
  ENSG00000271746_4 (sequence is synthesized)
tgaggagccctgaaacatgcgtgttttactgcacaagatgtgcccttgaatggagtctaggccagtcggggtcaccaaaaaaaatccaccaaaaaacacccaagaagggagaagcggtca

SEQ ID NO: 924878 - DNA, 120 bp, Artificial Sequence
  ENSG00000271746_5 (sequence is synthesized)
ccccccacgtgctggaatgacagctttttacttgctaggcagttggaccttttccgaattttctacaatgcacatagatttgtacttacatctttaaattaaaacccacgcaactccggc

SEQ ID NO: 924879 - DNA, 120 bp, Artificial Sequence
  ENSG00000271743_0 (sequence is synthesized)
cttaactcaaatgctataactggttcaaaggacaatccgaagaacacatttaatgattaggaatactgatataaacttgctaatggacaaaaaatattggctttcctacaaggtaggaag

SEQ ID NO: 924880 - DNA, 120 bp, Artificial Sequence
  ENSG00000271743_1 (sequence is synthesized)
cattccctctaccagacagaattcatttcctgcccacagacaagcgcgtttgcattgccagcagctatttacaacttatgaagctgtaaaacagctcccaagcaatgaaggctgcaagca

SEQ ID NO: 924881 - DNA, 120 bp, Artificial Sequence
  ENSG00000271743_2 (sequence is synthesized)
gataaggtggcaggccgtgagcaggcctcaaatggagttttacagtgaagcacaaatgttcccctacagaacccaagatgtctctttaaaagaaatcatgaaagaagaggggattaagtg

SEQ ID NO: 924882 - DNA, 120 bp, Artificial Sequence
  ENSG00000271743_3 (sequence is synthesized)
gagcttatggactgctccagggttaagtggcctccaaaataaacaacaggactgctcagtagtcagagtgaattttgggtggggtttgaaagagttccagctttcctctgctaatggtga

SEQ ID NO: 924883 - DNA, 120 bp, Artificial Sequence
  ENSG00000271743_4 (sequence is synthesized)
cataaaatgttcatttcatacccatgcatatacactgatgtatacatgtagttgaggaggcagtggcagaagccagaaggctttctctgccatgagctcctcctaggagccctgggttgc

SEQ ID NO: 924884 - DNA, 120 bp, Artificial Sequence
  ENSG00000271743_5 (sequence is synthesized)
agagggtgaggactgctaggaaagtccgtcagttaaggccgaagggacattagctttgccttaaaccacattggctgtgcttgcctttgtgtcttcacctgatttaatgggttttagctc

SEQ ID NO: 924885 - DNA, 120 bp, Artificial Sequence
  ENSG00000271743_6 (sequence is synthesized)
aggcagactgtactgttgacaaagctaagcagaacagaatttccccatggcttctagcttcaaggaatcccagctatttatccatcaccaagaaatgaagccccatgggtggctgacggt

SEQ ID NO: 924886 - DNA, 120 bp, Artificial Sequence
  ENSG00000271743_7 (sequence is synthesized)
tcatttactccagcccagggtgttggatttcaattagtgcattcgcttttccctctaggcagagctcaccctttaaagtcgctccttggcctgctaactgtcttaagatgcactttccca

SEQ ID NO: 924887 - DNA, 120 bp, Artificial Sequence
  ENSG00000271743_8 (sequence is synthesized)
tctcaacaatgatacaggacgtgtcttacagggctgtagttctcattcacagcattcttcctctgagtggtccaggaaatactcgcaggccttacagtcaagtcaccttagatttaaagt

SEQ ID NO: 924888 - DNA, 120 bp, Artificial Sequence
  ENSG00000271743_9 (sequence is synthesized)
acggaatacgcgaaaccttcctaactggtaaagcgctcagtaatgcaagctctgggtgcaactcagtggttcttagtatagtcagagttatgcgatcatcagcacaatctactcacaccc

SEQ ID NO: 924889 - DNA, 120 bp, Artificial Sequence
  ENSG00000271743_10 (sequence is synthesized)
tcctcgaggtattaaataaatatttcagaatccacaatgcagccaatctcatcaataactttactgaatcctgtagcccagcactcaggggttctctaaaaccctgccccgccttcccct

SEQ ID NO: 924890 - DNA, 120 bp, Artificial Sequence
  ENSG00000271743_11 (sequence is synthesized)
ccaattgcggtgcccactgtctcttttaaatagactctgtcctcatcaagcctgttctctgtcccccaaatatgccgtatcattccttaatgcatgcattttttccccagttccctacaa

SEQ ID NO: 924891 - DNA, 120 bp, Artificial Sequence
  ENSG00000271743_12 (sequence is synthesized)
tcttataattagtggttacgctaatctatatgtgtgtttaaactcatagaattgtatacaaaaaagtcaactgtactgtgtacacacatttaaaagataaaatgtgttcttttaacgctt

SEQ ID NO: 924892 - DNA, 120 bp, Artificial Sequence
  ENSG00000271742_0 (sequence is synthesized)
ccacccccaaaacacaccctcctcaccttcagccccaatgccccattcccactccttatccttatccctcttcttcagccccacgtatcccaagggcctcaactccctcagcccctgaaa

SEQ ID NO: 924893 - DNA, 120 bp, Artificial Sequence
  ENSG00000271742_1 (sequence is synthesized)
tcttcccacacaccctcctcaaatccaccatctcataaagcccctgcacttagaggtgtcagtctcctacctggctctcttccctccttaagttcccaaataaatatatcctgacacata

SEQ ID NO: 924894 - DNA, 120 bp, Artificial Sequence
  ENSG00000273674_0 (sequence is synthesized)
cgctcgctcgagattgcgcgcagaccggatctcactacgttgcccaggatggtcttgaactcctggactcaagcaagcctcttgcctcggcctcctaaaaagctgggatgacaggcatga

SEQ ID NO: 924895 - DNA, 120 bp, Artificial Sequence
  ENSG00000273674_1 (sequence is synthesized)
gtcaccgtgcccagtcttcattctttaaatatttggtagaattcatcagtgaagccatctcatccggggcttttctttgttgacagattttttattactgattcaatctcattctaacta

SEQ ID NO: 924896 - DNA, 120 bp, Artificial Sequence
  ENSG00000273674_2 (sequence is synthesized)
taggcccccaaatcaagactaagtagccctgccactgaaaaggttgaaaatcagtgaaaaatgcaaataaatgactctagtagaagactaaattcattgtatgcccttgagcaagggttg

SEQ ID NO: 924897 - DNA, 120 bp, Artificial Sequence
  ENSG00000273674_3 (sequence is synthesized)
ccagcatcactaccagattccctcatgtctgcagtgtgaagtggtggcaagagccccccacattgggacccagaaaacctgtgataaaatccaagctgttttcagatgtgtagcctttac

SEQ ID NO: 924898 - DNA, 120 bp, Artificial Sequence
  ENSG00000273674_4 (sequence is synthesized)
cattttgagcctcagttttcttatttctaagtaagcataaatatcttcctgcctaccctatagggttactgtgaaattacatttatatcatgtatatgaatgttcatgtatatactggaa

SEQ ID NO: 924899 - DNA, 120 bp, Artificial Sequence
  ENSG00000273674_5 (sequence is synthesized)
agcaaaataaaaatataaaatagcatgaaaaaagtagtgaggagaaggtacttgatattttgtgatagaagtgctggatatttcccatttgctcacccaactctactttctactctgatc

SEQ ID NO: 924900 - DNA, 120 bp, Artificial Sequence
  ENSG00000273674_6 (sequence is synthesized)
catatcctaaaggctgaattgtctgaattgcatcactgggttcccttgcctttcggctgctggttgagtttaaaaaggagcaacagaaggaattggataggggtagattttgatgattag

SEQ ID NO: 924901 - DNA, 120 bp, Artificial Sequence
  ENSG00000273674_7 (sequence is synthesized)
gtggggaaggctgacttctgtcttaaaggcttactctggatcataatgttgagtgaaggctgtcaggagacaaagaggataaaatgagaagatagcaatctgcaaaccaagaagcagacc

SEQ ID NO: 924902 - DNA, 89 bp, Artificial Sequence
  ENSG00000273674_8 (sequence is synthesized)
aaaatgagaagatagcaatctgcaaaccaagaagcagaccctcatcagacactggcaccttgattttggacttcccagcctccagaact

SEQ ID NO: 924903 - DNA, 120 bp, Artificial Sequence
  ENSG00000273674_9 (sequence is synthesized)
gctgtgaacatgcactattcctcaaaacaagagaagaaagaacccaaaacccaaaaatgatttgaagatcatcaggccaccactcccaccataggaacagaggacctaacttggggaaca

SEQ ID NO: 924904 - DNA, 120 bp, Artificial Sequence
  ENSG00000273674_10 (sequence is synthesized)
gggcggctgcctctgcctcagtttcaaagagcaggaccagtgcccaatggagccatcggtgcagcgccacctgtagcagcagaggcacagcactactcagcagagccactgagaatgcaa

SEQ ID NO: 924905 - DNA, 120 bp, Artificial Sequence
  ENSG00000273674_11 (sequence is synthesized)
cagcaagacagccgtctacaaaccaggaagagtgccctcgccagaaaatggatttgctggcactttgatattggaattcccagcccccaggactgtgagaaataaatttctgtcatttaa

SEQ ID NO: 924906 - DNA, 120 bp, Artificial Sequence
  ENSG00000273674_12 (sequence is synthesized)
aatttgttagtgtacagttgttcatagtattctcttatcctatttatttctgtgactttgattgtaatgttctgattttggttatttgagtatttctttttttcttaatttagctacagg

SEQ ID NO: 924907 - DNA, 120 bp, Artificial Sequence
  ENSG00000273674_13 (sequence is synthesized)
ttacactttttgaaaaacaaattttggtttcattgatttctctgttgtgtttctattctatattgcacttatctctgcacaaatctttagtttgctcttttttttttttttttgagacga

SEQ ID NO: 924908 - DNA, 86 bp, Artificial Sequence
  ENSG00000273674_14 (sequence is synthesized)
gctcttctttttctagttccctaatgtgtacaattaggttgaaaactattccacttttttttctgagacggagtcttgctctttca

SEQ ID NO: 924909 - DNA, 120 bp, Artificial Sequence
  ENSG00000273674_15 (sequence is synthesized)
gggattacagaactttacggtgagccaccactcctggccttagctgaggagatttctaagcaagtgttaaagaagcagcttggtgcctccttactgcttatagtaaaatgcaagaggaag

SEQ ID NO: 924910 - DNA, 120 bp, Artificial Sequence
  ENSG00000273674_16 (sequence is synthesized)
aaataaattgaaaatggcattattaagcaaaaaggaatcagaatataaagatttggaaaattctaagcctgttcatattattttaaaagtaagaaggtatgttcaaaagagaacacaaag

SEQ ID NO: 924911 - DNA, 120 bp, Artificial Sequence
  ENSG00000273674_17 (sequence is synthesized)
ggcatgtcagaccaacaatttgataaaaaagattagcatgggtgtgaactatgaaccaaatcagccatgtatctcaacagaagccaggaatacagataagattatagcagcagaggccgg

SEQ ID NO: 924912 - DNA, 85 bp, Artificial Sequence
  ENSG00000273674_18 (sequence is synthesized)
ttatagcagcagaaacactgccagctgggactaaatggcgggagactgtcagccttcttagatcctacaggactggatcatagag

SEQ ID NO: 924913 - DNA, 120 bp, Artificial Sequence
  ENSG00000273674_19 (sequence is synthesized)
aaggcagagcattgagccaaagaagctcttcaagccttaacgtcttacgaattttgccttgataggtttgggactttcttgggactccatcatccctttcttctttcctatttctccttt

SEQ ID NO: 924914 - DNA, 120 bp, Artificial Sequence
  ENSG00000273674_20 (sequence is synthesized)
ttgggatgggaatatttatcctatccctttcccacaattttattttggaaacacgcaactaatttgatttcacaagttcacagctggagaggaattttgcctcacaatgaatcttacctc

SEQ ID NO: 924915 - DNA, 120 bp, Artificial Sequence
  ENSG00000273674_21 (sequence is synthesized)
tattcttattcatatctcatttagatgagactttgggctttaaactttagagttcaggctgcaatgagttaagacttttgaggctgttgagttggaatgaatgtattttgcatatgagat

SEQ ID NO: 924916 - DNA, 120 bp, Artificial Sequence
  ENSG00000273674_22 (sequence is synthesized)
gggcaggagttttgggggtccagtggcagaatgctatagactgaattgttgtgtcccagcaaattcatatgttgaaattctaacctccagtgtgattgtattaagaggtagggacctttg

SEQ ID NO: 924917 - DNA, 120 bp, Artificial Sequence
  ENSG00000273674_23 (sequence is synthesized)
ctgtaggactctgatgttgagatctcagaaataagacaagtaactgctttgtattacacctgcgtaaaggacaggcacactgatcaagggtttgactcttttcaccgacaataatctggt

SEQ ID NO: 924918 - DNA, 120 bp, Artificial Sequence
  ENSG00000276241_0 (sequence is synthesized)
agcttgcagacagcctattgtgggacctcgtgatcatgcatctgtgtgcaccaatgcagaaaagacggggactacaaggaaggaaaatgttgcatcaggaagggctgctggcacatcttt

SEQ ID NO: 924919 - DNA, 120 bp, Artificial Sequence
  ENSG00000276248_0 (sequence is synthesized)
cattctggtgttcttctttcccttctgatgttcccatctatcttctgtaatcatttcctctctgtgtagagaactttctttggtcattctttcatggttaatctgctggccacaaattct

SEQ ID NO: 924920 - DNA, 120 bp, Artificial Sequence
  ENSG00000276248_1 (sequence is synthesized)
ctaagtttttcttcgtctgggaatggcctttgtccccgcgtcactccgagggcatctcacgggatgtggatttccaggtggtggctctcctcatccagtgcctgggaagcgcgtgtccct

SEQ ID NO: 924921 - DNA, 120 bp, Artificial Sequence
  ENSG00000276248_2 (sequence is synthesized)
gcccccggcttctgtgttccagctatgaaacctgctgctgtttagacttgtgcttctctcgaaggaatgaggggtttctctctggcagctttcaaggtttttttctctgtctttagtttt

SEQ ID NO: 924922 - DNA, 120 bp, Artificial Sequence
  ENSG00000276248_3 (sequence is synthesized)
cagaaattgtattaccatacatcctggagcagatttctctgggtttgttctatttggattcagttggcttctcgcatctgtgggtttatgtctcttggctaacaggaagttttcagccat

SEQ ID NO: 924923 - DNA, 120 bp, Artificial Sequence
  ENSG00000276248_4 (sequence is synthesized)
catttcctcacatcctttttcagtccacttgttctctcctgcgattgcggaaacttagaaatctgctctttggttagggtcctgcgggtctctgaggccttgaccgtcctcggtccgttt

SEQ ID NO: 924924 - DNA, 120 bp, Artificial Sequence
  ENSG00000276248_5 (sequence is synthesized)
ctgtgtgttcaggcagatgaattctgtctgtcctcggggtcaccggttctgccctctctcgtctccactctgccacttagcccatccccagagatttttattatgactgtatttttttag

SEQ ID NO: 924925 - DNA, 120 bp, Artificial Sequence
  ENSG00000276248_6 (sequence is synthesized)
ttgtataatttccacttacttcttttatgtagcctttatttcttggctgagattttctattttttatttgtttacagagagtgtttgtggccttttgaagcgttttagtcatggctgctt

SEQ ID NO: 924926 - DNA, 120 bp, Artificial Sequence
  ENSG00000276248_7 (sequence is synthesized)
taacaccctcatcagataactccagtatccgttcgtctcgatgtgaagtctggcgcttgtcttttctccttcaagttgtgattttcccgattcttaatatgatgagcgacttttcgttgt

SEQ ID NO: 924927 - DNA, 120 bp, Artificial Sequence
  ENSG00000276248_8 (sequence is synthesized)
atcctgggtggttcgtgtgtttattaggaggctttaaaccagtgactcccctggggagggtggtgtgaggcctggccagggggttctgcttcctgccaggcctccagccccaccccggcc

SEQ ID NO: 924928 - DNA, 120 bp, Artificial Sequence
  ENSG00000276248_9 (sequence is synthesized)
caaacagctggcaagcgcttcctcatggcaggcggtggggtggaagaattttttagtatttgccttttgccagatcttctgttacatcttccctgctgtcggtagctcagccaggcaggc

SEQ ID NO: 924929 - DNA, 120 bp, Artificial Sequence
  ENSG00000276248_10 (sequence is synthesized)
aggaaagtagaaggaatgaagggctgtttacctgggttttccagaggttcagcccaggctagagccccagcttggccatgctctggccgtgcaagccctggcagctttctgtgaattggg

SEQ ID NO: 924930 - DNA, 120 bp, Artificial Sequence
  ENSG00000276248_11 (sequence is synthesized)
gaggacgtgggaacagtgcctacctggtggaccgtgggaagactgaaagagaaaaccaggcagggcacttagtgcagccgctggtggaggcagtggttagagttcactcgctagagggtc

SEQ ID NO: 924931 - DNA, 120 bp, Artificial Sequence
  ENSG00000276248_12 (sequence is synthesized)
cttgtgataagagggtccttatgataagagggtccttatgataagagggtccttatcatggccattttcctttgatccagatgtctttaaatatcagaaaaataacgcttttagtcccaa

SEQ ID NO: 924932 - DNA, 120 bp, Artificial Sequence
  ENSG00000276248_13 (sequence is synthesized)
ccgccacatcggaatcagttcttattccttctggctacaatgtccaacataagttgaacaacataatttggacaacagaaggaagggttgtcatgctagccggagatgacttctagttaa

SEQ ID NO: 924933 - DNA, 120 bp, Artificial Sequence
  ENSG00000276248_14 (sequence is synthesized)
ggtctgagcattttccacgcacaaccagttattctcaacggagggcggactctccatacgaaacaagcagagccctggcagagactgcagggcatttgtaaaactcaaacaccacgttga

SEQ ID NO: 924934 - DNA, 120 bp, Artificial Sequence
  ENSG00000276248_15 (sequence is synthesized)
tctcactgccacgttctttccagttacacgcaggtctaacatgctggcataagacattgtcttaatcagaacacttttaaagcttttttttcccttttttccaattcaaaaaattaatgc

SEQ ID NO: 924935 - DNA, 120 bp, Artificial Sequence
  ENSG00000276248_16 (sequence is synthesized)
agtacaggtattgatcccaccgaaattgttctaattcagtcatgacacttcatgtttacaaagagttgatgacttggaaaaatactctgtaatgctgttaaacttaagaaacagaatcgg

SEQ ID NO: 924936 - DNA, 90 bp, Artificial Sequence
  ENSG00000276248_17 (sequence is synthesized)
cagcggctcacgctgtcagatggcttgagagccgggcgcagcggcttccgcctgtcatcctagcgctttgggaggctgaggggggcggat

SEQ ID NO: 924937 - DNA, 120 bp, Artificial Sequence
  ENSG00000276248_18 (sequence is synthesized)
caaaagaaacagaaacagagtcagaattgtagaccacgttcctcctgacgctaacacagagctcccatttgacccagctgttcgctcctcggtatttacccgcaagaaacaaaaacacac

SEQ ID NO: 924938 - DNA, 120 bp, Artificial Sequence
  ENSG00000276248_19 (sequence is synthesized)
atccacattcagactgatacacggtggtgatgggggtacaacagtgtgaatccacctgataccacagagttacacactcagaaatggttaacatggtacattttattgtatgagagtttc

SEQ ID NO: 924939 - DNA, 120 bp, Artificial Sequence
  ENSG00000276248_20 (sequence is synthesized)
accacaatgaaaaacttgtacctgaatgttcaagcagcattattcgtatagttaaaaagtattaagaactcaaatgtcaattagataacaggtagatatacaaaacatactatattcagc

SEQ ID NO: 924940 - DNA, 120 bp, Artificial Sequence
  ENSG00000276248_21 (sequence is synthesized)
aaaggaatattattcagccataatatagaatgaacattgattcatcctatagcacagatgaagcacgatgcttctgaaagaaccggacaaaaagtccacacgctgtgtgattccattcat

SEQ ID NO: 924941 - DNA, 120 bp, Artificial Sequence
  ENSG00000276248_22 (sequence is synthesized)
accaacgtccagactaggccagtccgtacagacaggatgaattactggttgccggagggtggggaggttgggggagatggggaggaagtgctgatgggtacagggtttctttttgggatg

SEQ ID NO: 924942 - DNA, 120 bp, Artificial Sequence
  ENSG00000276248_23 (sequence is synthesized)
atgaaagtattctaacatggattgtggtaatagttgtgtaattttgtgaatatgctggaaaccattgaattgtatactttaaatgggtaagttgtatggtaagtgaattatatatcatag

SEQ ID NO: 924943 - DNA, 120 bp, Artificial Sequence
  ENSG00000276248_24 (sequence is synthesized)
cgatattttaattagacatagaagaacatgaatagagactagaaatatatatatgtatatataacaaggtgttaatgattttctactagtagactggtagatttgtactaagttttttct

SEQ ID NO: 924944 - DNA, 120 bp, Artificial Sequence
  ENSG00000276248_25 (sequence is synthesized)
gtactaagttttttctactatatatacttttctgtaatttaggaaaacctccctttcaattttaataacgagggaaaatttatatttaaaatatcaaagaaataaaattagttgcaacat

SEQ ID NO: 924945 - DNA, 120 bp, Artificial Sequence
  ENSG00000224277_0 (sequence is synthesized)
tctccgagcctcagtttccccatcttccgaaaggggcctggcatatcctgggcaggcagatggtggatcagaggtagtgaggtgcctacaaggaaatgctcccaacagggtggcttggag

SEQ ID NO: 924946 - DNA, 120 bp, Artificial Sequence
  ENSG00000224277_1 (sequence is synthesized)
gaatcctccttcctcagcactcatgggccgggcactgttctaggccgtgggggtggggatcgagcagtggccacactgacaaagcccctacccttgtggaagtgacattctactgaggcc

SEQ ID NO: 924947 - DNA, 120 bp, Artificial Sequence
  ENSG00000224277_2 (sequence is synthesized)
cgtctgggttgagagtagtgactcagaagaaaatgaaggctactgctagcaaccaaatgaggcctttcatgtgtgtttccttcctggcttcctcctgtttttctcacacctctgaacctg

SEQ ID NO: 924948 - DNA, 120 bp, Artificial Sequence
  ENSG00000224277_3 (sequence is synthesized)
ctgtcaggtgaaaaatcaaggctactttcccactggtgccaggattcccccaacgccacactgagaacccaggagaagcatcacattatatgagagataagaaatgaagagagggagcag

SEQ ID NO: 924949 - DNA, 120 bp, Artificial Sequence
  ENSG00000224276_0 (sequence is synthesized)
cataaagagatcctcattgtctccttcttattccatttactgaggacttatatagcagaaagccaagcaaagagaaatagatattgttcctatcctcaaggaatcagagtctagtgagtg

SEQ ID NO: 924950 - DNA, 120 bp, Artificial Sequence
  ENSG00000224276_1 (sequence is synthesized)
taaagcagagcttctcttcgcctcagataaagaagccaggagctacaattccttcccacctgctccctagataccccgttccaagacaggagcacccaagtctctgacaccctcctgctt

SEQ ID NO: 924951 - DNA, 120 bp, Artificial Sequence
  ENSG00000224276_2 (sequence is synthesized)
cacccatccgcctgacttggctgaacgctggtgtcctggaactcattctctttctctgatcttcctgtccactgccagagagtggtgccacaattccaaaaatgaaaggaaagtaaaaga

SEQ ID NO: 924952 - DNA, 120 bp, Artificial Sequence
  ENSG00000270164_0 (sequence is synthesized)
atgttagtggaattaacatatgccccaccccaagtgacttctaaagggctaactcaccacaagggagtcagagcagatcttggactgagacctacaggacacaggtggctcaccaggaga

SEQ ID NO: 924953 - DNA, 120 bp, Artificial Sequence
  ENSG00000270164_1 (sequence is synthesized)
cacttctctccctttcctgagagggaaaaactctcgacgctgagaggaatccaccaacaggcaccagcactctggcaggccaccgaccaatggattgacatagagtttggctggggcagc

SEQ ID NO: 924954 - DNA, 120 bp, Artificial Sequence
  ENSG00000270164_2 (sequence is synthesized)
gaccaatggattgacatagagtttggctggggcagccagaggagagcctgggccgctgaataacccgacttcaggggaaaactattctcccttttggctcccccatctgctgagagctac

SEQ ID NO: 924955 - DNA, 120 bp, Artificial Sequence
  ENSG00000270164_3 (sequence is synthesized)
aaaaatgctacaagatagcatccaaaaagcttttctagacattggcttaggccaagtagtcatgactaatgccccaaaagcaaacgcaaaaatataaaaatagaataagatcaataggac

SEQ ID NO: 924956 - DNA, 120 bp, Artificial Sequence
  ENSG00000270164_4 (sequence is synthesized)
ctaatgaaaccgaaaatcttctgcaaggcagaagaaatatcagcagggtaaacacacaacccacagtataggaaacagtagtcacaaactaggcatctgacaaaggactaatgtccagac

SEQ ID NO: 924957 - DNA, 120 bp, Artificial Sequence
  ENSG00000270164_5 (sequence is synthesized)
tccaaaggaactgaaagaaatcagcaagaagaaaaggtgccatttaccaccttcctgactcattggccagaaccaatgttagtggaattaacatatgccccaccccaagtgacttctaaa

SEQ ID NO: 924958 - DNA, 120 bp, Artificial Sequence
  ENSG00000270164_6 (sequence is synthesized)
gggctaactcaccacaagggagtcagagcagatcttggactgagacctacaggacacaggtactgctttttctcttttatttgttttaaattttatttatgtttttagatcaaatagttc

SEQ ID NO: 924959 - DNA, 120 bp, Artificial Sequence
  ENSG00000270164_7 (sequence is synthesized)
agattgcattggtttttaatctgctgttgttggattaacatatgctttaagcgactcttaaataggtggctcaccaggagaaaggcatagcagaacctggactgagacctacgggagaca

SEQ ID NO: 924960 - DNA, 120 bp, Artificial Sequence
  ENSG00000270164_8 (sequence is synthesized)
ggtattgctttttctcttctaatcattttaaatttaatttaccatctttcatcaaatagctccgatcatatcattattttttcttttctgttttgttggtggttttattggtggagtttt

SEQ ID NO: 924961 - DNA, 120 bp, Artificial Sequence
  ENSG00000270164_9 (sequence is synthesized)
attttactattttagaaaagcagtcttttaaaaaagacttttaaaaagttttattactcttttttttaaaaaaattatgttttcccttgatgtgcttatttcctttataaagatcatcac

SEQ ID NO: 924962 - DNA, 120 bp, Artificial Sequence
  ENSG00000270164_10 (sequence is synthesized)
tgcgtgagataagaaattttttgccaaagcaattagtgatgagtgcaatggaaaaatccgtgatgatcttttaagatgattaactttctaatccagaaaatgctgctgtttgtactgaac

SEQ ID NO: 924963 - DNA, 120 bp, Artificial Sequence
  ENSG00000270164_11 (sequence is synthesized)
aaaatagctttatttttatatgaccaggggtacataaaatgcttcaaaacaacacataatttggcaaaaatactatgtcttgccagccagaagaataagtgtggttttatttctatgtat

SEQ ID NO: 924964 - DNA, 120 bp, Artificial Sequence
  ENSG00000270164_12 (sequence is synthesized)
atgtctagtaccatgcctgcactagagttgggaaattttaaaaacatcacctattgatacagaagagaagtgctgggaagggaagggcatggtccctttgaatgatacagaaaaggtgaa

SEQ ID NO: 924965 - DNA, 120 bp, Artificial Sequence
  ENSG00000270164_13 (sequence is synthesized)
ggaaagtgatgggtagaggaggccggggtccctggctagggctccaaacctgggcttgtgcccctggacctagatgaggacaggcatttttgttttcctgaccaaatgttgcatttccca

SEQ ID NO: 924966 - DNA, 120 bp, Artificial Sequence
  ENSG00000270164_14 (sequence is synthesized)
agatcaccctggcccaccatgccctatcctgtgcctaaaaaaaccctgggaccctagcaggcagacacacaggaggttggacgtcgagaggagcacatcagtgcaagaacacatgggtgg

SEQ ID NO: 924967 - DNA, 120 bp, Artificial Sequence
  ENSG00000270164_15 (sequence is synthesized)
agagcagatcttggactgagacctacaggacacagcgactcttaaataggtggctcaccaggagaaaggcatagcagaacctggactgagacctacgggagacaggcagacacacaggag

SEQ ID NO: 924968 - DNA, 88 bp, Artificial Sequence
  ENSG00000270165_0 (sequence is synthesized)
tgaagaacatgggtgctctggtagcctgcttatatagttgtggtcccactcccctctaccctcacttccaattcagagcagaggttga

SEQ ID NO: 924969 - DNA, 120 bp, Artificial Sequence
  ENSG00000270165_1 (sequence is synthesized)
actccagcctgggcgacagagtgaggcccttctccaaaaaaggatctggcatgcacaataagtttccataaatatgtgttaaatcaagagaagtatcaggtctgaagggccgcaggggat

SEQ ID NO: 924970 - DNA, 120 bp, Artificial Sequence
  ENSG00000270165_2 (sequence is synthesized)
ggaggagctatgcacctgcctaagcatctgatttcacttctggccaggccgccagtgaagagaaggccatggtctaattaaaactacctagcccggggccgggctcagtggctcacgcct

SEQ ID NO: 924971 - DNA, 120 bp, Artificial Sequence
  ENSG00000235158_0 (sequence is synthesized)
gtgagaaaaaaaaaaaaatggtggtggtagattcagttctaaaatctcaccagatgacacaatcttctacctcgtgaaatactgcagaacttaaaaagagaaaagaaaagaagacctctt

SEQ ID NO: 924972 - DNA, 120 bp, Artificial Sequence
  ENSG00000235158_1 (sequence is synthesized)
tcctcctacaggaaaagaatgcagagcctcccaagggtaagaaatactttgtttgcgtatctgtcatatacattctcagcactttcacccacttgggtttcctgtcataagcttttcttt

SEQ ID NO: 924973 - DNA, 120 bp, Artificial Sequence
  ENSG00000235158_2 (sequence is synthesized)
agattgagcaactaaagctcagataaatcagaagaattgcctcaaagatgcacagatcatatgttttattgttggaccccatacgagggactatcatagggtttagtgctggaccccata

SEQ ID NO: 924974 - DNA, 120 bp, Artificial Sequence
  ENSG00000235158_3 (sequence is synthesized)
caagggactatcatagggtttgttatctgtgtgaaatgagagtacatatctgtgtgaatttgatcgggttacatgcatagaatcaagttgtgtttacctatatgcctattaaacccattc

SEQ ID NO: 924975 - DNA, 120 bp, Artificial Sequence
  ENSG00000235158_4 (sequence is synthesized)
cagtgtaggtttcaattgagtattgagtagtgaaatctaaagaagatgcatgtgttattttctggtggaataattttattttccctttgtagattggcaaaaaaaaatgatgagaacagc

SEQ ID NO: 924976 - DNA, 120 bp, Artificial Sequence
  ENSG00000235158_5 (sequence is synthesized)
ttaaattttgttttggggaaaatcttttaacaaaaagttgttgtcatgaattttgttgctttatgtatctatatatctatatctatatctatatctattacttcttcaaggtcctttagg

SEQ ID NO: 924977 - DNA, 120 bp, Artificial Sequence
  ENSG00000235158_6 (sequence is synthesized)
gactcaaccatttttcaataacagatttttagcagtaaagttgcatatattccctatatcatcccttccatgaaaggaagtggatcctaaacaacttgggttgtaggaatgataaatccc

SEQ ID NO: 924978 - DNA, 120 bp, Artificial Sequence
  ENSG00000235158_7 (sequence is synthesized)
taatgtttatgtgactcagcaggtaggggataaaggcttaatttttgaaggtatattaaggtaagtaattagggaaccattatgtgctagaacagtatatctccaaagacaatctacttc

SEQ ID NO: 924979 - DNA, 120 bp, Artificial Sequence
  ENSG00000235158_8 (sequence is synthesized)
tacttagctttactgacctgcccagtaaattccacagaagctgatggcgtaatccaaatccagcctattccaagaaacacatttagatataattttagttagagtcattgttgagtttga

SEQ ID NO: 924980 - DNA, 120 bp, Artificial Sequence
  ENSG00000235158_9 (sequence is synthesized)
aagagatgaacacatttcccttcatcttgaaatgttcccttttggaaaatctaattctccccaagaaaatgattggatacctaaatcatctttgaaaagtaaaatctttccctagatctt

SEQ ID NO: 924981 - DNA, 120 bp, Artificial Sequence
  ENSG00000235158_10 (sequence is synthesized)
atctcatcttttaaagctcatgtgtttgtctctgacaatgctataaatgcattttcaagagaggaatttgtcctactctttaaattacttttatgaatagtcaaagtgattttcctttag

SEQ ID NO: 924982 - DNA, 120 bp, Artificial Sequence
  ENSG00000235158_11 (sequence is synthesized)
tgttcaaacttcctgcagatgattagtccacacttccagaaaccaaaatatataaagacttcttcctaaattagtcatataactttatattgggcaataagtgaatactgtgcaattttg

SEQ ID NO: 924983 - DNA, 120 bp, Artificial Sequence
  ENSG00000235158_12 (sequence is synthesized)
ctttgtcagtaatctgacaaatactgaaaaatactgatgtatatcaagattcaacttctgagtgcccagtggctttctaaactgatcagttaaaaagttttgtcagacgcctgtagtccc

SEQ ID NO: 924984 - DNA, 70 bp, Artificial Sequence
  ENSG00000235158_13 (sequence is synthesized)
gggaggcggagggagactccgtctcaaaaataaaaaaattaaaaaaaatttttaaaaaagttttgtcatc

SEQ ID NO: 924985 - DNA, 120 bp, Artificial Sequence
  ENSG00000235158_14 (sequence is synthesized)
gactccgtctcaaaaataaaaaaattaaaaaaaatttttaaaaaagttttgtcatccaatgacaacaagtttaaaaatattttaagagaagtatgaataagtaaatactgtatcagattg

SEQ ID NO: 924986 - DNA, 120 bp, Artificial Sequence
  ENSG00000235158_15 (sequence is synthesized)
caaagtcacttctatcttatgaacccattgtatacatgacatctgatgaagaagaccaatatgaaaagcaggggagagtctctggttgaatcagaaagctcctggccaccacaaaacttg

SEQ ID NO: 924987 - DNA, 120 bp, Artificial Sequence
  ENSG00000235158_16 (sequence is synthesized)
taacttgctccttgtcctggtggctcaagaagtttgtgaggtatagtttgaaaactactgatctagtcaaacagtactttatagagggataaaaaaaaaattctggagatgtggcatgaa

SEQ ID NO: 924988 - DNA, 120 bp, Artificial Sequence
  ENSG00000235158_17 (sequence is synthesized)
ctgaattatttacgatcacacatagaagtgaaggcaaaatttaaaatggaaatcagcacacctttaaaacagccttctccatggaaacatccctgagaaattttcacccttactgatcat

SEQ ID NO: 924989 - DNA, 120 bp, Artificial Sequence
  ENSG00000235158_18 (sequence is synthesized)
tttgtcttcccatcttctcagcaaacacatcatttattggctatgtccacagtaacaatgtaatttgtgaaatgtttcaggtcagtgaagtaatctgggagaattgaaaatgctttgagg

SEQ ID NO: 924990 - DNA, 120 bp, Artificial Sequence
  ENSG00000235158_19 (sequence is synthesized)
gtagaactacatagcacagctttttgagtcccatagagtgcttttggtctatataaacaaacaatggataaaaggaagataagaccaacaatacagtattatacagtattgctttggagg

SEQ ID NO: 924991 - DNA, 120 bp, Artificial Sequence
  ENSG00000235158_20 (sequence is synthesized)
caatatatagcacagaacacttttatacagaacgtgacaagtgtttcaaaggaaaggatttcatgcaaaagtaaacttgataaagtctgcactaaacaaagttaaacagtaatgattgcc

SEQ ID NO: 924992 - DNA, 120 bp, Artificial Sequence
  ENSG00000235158_21 (sequence is synthesized)
tcctctgagttttgaatatgctaatgtatattaagaatctgcaataatgggaatttttcgaattttccatagagccttaaaaatatgatagatattgcatgcctcaagttcatggtctgc

SEQ ID NO: 924993 - DNA, 120 bp, Artificial Sequence
  ENSG00000235158_22 (sequence is synthesized)
agaatatatttagtaaaatttaagaaaggaacaagactagaagtcagaagtttgatgttttgaactcaaaccctgtgccacaaaaactttggaaagcaacttctctgatcatcagtctct

SEQ ID NO: 924994 - DNA, 120 bp, Artificial Sequence
  ENSG00000235158_23 (sequence is synthesized)
tcatccataaaatagcattgcctatctgagagttaaatatcaaagaagattaatataaaaggctttgcaaaaagttaagctccactgaaacataaagcatgtttattgtgttgtaagttt

SEQ ID NO: 924995 - DNA, 120 bp, Artificial Sequence
  ENSG00000235158_24 (sequence is synthesized)
acaaatataactttactgattgacttgaatagaggcacaaacagcatcccttcaacaacattttcagaataaaacaatgatatttctagacaatagtgtctcaaataaaaaaccaaagtt

SEQ ID NO: 924996 - DNA, 120 bp, Artificial Sequence
  ENSG00000235158_25 (sequence is synthesized)
ttattcaaataacttgcaattatgatagatatttttcaattttatttagtagccaggaatttgaatgttaattactttatcgtgaacttatttcttccatgaagaagctaattgaaaaat

SEQ ID NO: 924997 - DNA, 120 bp, Artificial Sequence
  ENSG00000235158_26 (sequence is synthesized)
taccaaattctgtatttttgtaaacataacaaaaagatacattgagtaaatattttaaatctactcaagttacttgaagatttttctttatgagaggttacaaaaattaaacaaattcac

SEQ ID NO: 924998 - DNA, 120 bp, Artificial Sequence
  ENSG00000235158_27 (sequence is synthesized)
aattaaacaaattcacatttctaacaaagaacaacatattctctctacaaatatatacattgtataatgtaatactaagtctaaaaagatttgcaaggcatggtggctcacacctgtaat

SEQ ID NO: 924999 - DNA, 120 bp, Artificial Sequence
  ENSG00000235158_28 (sequence is synthesized)
ggagttcaagaccagcctgggaaacacaacgagaccctgtatctgccaaaaaaaaaaaaaaaattgaccagccataatggcaatggcctggggttccagctactcaggaggctgaggtgg

SEQ ID NO: 925000 - DNA, 120 bp, Artificial Sequence
  ENSG00000235159_0 (sequence is synthesized)
ctgcttcccaggaaacttcatttcacattggattagactgcccaggagggcaacgctgggctggggcagccgggcaactctgccagggcctcgctgcccactgagctgccttccacagct

SEQ ID NO: 925001 - DNA, 120 bp, Artificial Sequence
  ENSG00000235159_1 (sequence is synthesized)
cgctagacccccatgattgtggctgtgaattgtgccagccaccctgataaacacaccactgcctccaccccatgacacacggaatttggggggagggaaggaagaactcaggtatgctca

SEQ ID NO: 925002 - DNA, 120 bp, Artificial Sequence
  ENSG00000235159_2 (sequence is synthesized)
aattatcaacaagaaaacccggaaaatttacattgttgatgagcactgtgatggataagtttccaggaagaaaaacttggttttcgcctgtgggccacagccatgcctgagatccgccta

SEQ ID NO: 925003 - DNA, 120 bp, Artificial Sequence
  ENSG00000235159_3 (sequence is synthesized)
tgccttgctttctccgccagcccctggcccacagtccagcctcagaaggctgaggggggtgcttcggtttcgtttcttttttctcaacgggtcgacattttaaatttctcagtatccaag

SEQ ID NO: 925004 - DNA, 120 bp, Artificial Sequence
  ENSG00000235159_4 (sequence is synthesized)
gcattatgaggacttaggaaacagatgcatttaatctaattaaagcaaggacggcgagtgagtgaaaaattacattttcacttgggttctgaacattcagttgcacatccaagaataatg

SEQ ID NO: 925005 - DNA, 120 bp, Artificial Sequence
  ENSG00000235159_5 (sequence is synthesized)
atgtttttaaagccagcccaataaacttgagattgcaagttttcagtggctcctggataagatgccacttcgatcatcctagacaatgtgccttttgaggagctgctcagcagctttggg

SEQ ID NO: 925006 - DNA, 120 bp, Artificial Sequence
  ENSG00000235159_6 (sequence is synthesized)
gactctggataaaggcaaaccaggcttatgattttttttcttttgcctttgtttcaaagtagtttgcaggtttgagagtccattttcataggcctgtttcatgacaacatacgctcctac

SEQ ID NO: 925007 - DNA, 120 bp, Artificial Sequence
  ENSG00000273582_0 (sequence is synthesized)
caggagccatgctcaccccgaacgcttccaccagctgaggctgcatggtttcaacaagaggaatttgtttctcatagttctggaggctggaattccaagatcaagcagggcctatgacca

SEQ ID NO: 925008 - DNA, 120 bp, Artificial Sequence
  ENSG00000273582_1 (sequence is synthesized)
acaccctttcctcctgccctcagggcagtccttctcctgctcttgttcattcatccccttcagccctttcttattctcttctgtagccgaaccacaaaaaataaatacattagaaatgtt

SEQ ID NO: 925009 - DNA, 120 bp, Artificial Sequence
  ENSG00000278376_0 (sequence is synthesized)
cactcaagatggcgaaacctcggccgccgcggctatattcgccgcggcgtcactgccttcctggcctggtggtgagaggaagtcgggccgcgaaagcttcctgaggagaaaatggagggc

SEQ ID NO: 925010 - DNA, 120 bp, Artificial Sequence
  ENSG00000278376_1 (sequence is synthesized)
ccttctctcacaccgacgagaaaagttcgagggggaaatacgagttcctttctgaagggacaggacggctgcttttccacagccgcgacgtgattgagaaatggtggctggcaagggtag

SEQ ID NO: 925011 - DNA, 120 bp, Artificial Sequence
  ENSG00000278376_2 (sequence is synthesized)
gcctgccttcgcccctccaaagtaaaaatcgggagttgagaccagaggaacatctctttattacatgactaaggatatgttttgaaaactggcccccgggcagctgctcggggacaggaa

SEQ ID NO: 925012 - DNA, 120 bp, Artificial Sequence
  ENSG00000278376_3 (sequence is synthesized)
gctgacctgacttctccagctggccggggaggctgatgccgggcctaaggggccgcgtccgagcctctcggggcgcgcctccatgcaggaaggcgcggaactagcgacccggagacgccg

SEQ ID NO: 925013 - DNA, 120 bp, Artificial Sequence
  ENSG00000278376_4 (sequence is synthesized)
cgcgtctgagtgtgggggcaggaaggggggccgaccgggcccggaggccgcaccaggcaggagggaggactccagagagtgcgcggggggcgctgcgcggtgggacggggcgagcctgta

SEQ ID NO: 925014 - DNA, 120 bp, Artificial Sequence
  ENSG00000278376_5 (sequence is synthesized)
tgtagggcgcgcctggcggcgggtaggctccgggcttgagggtgcgcctgggggcgctggttgtgggggaaggcaccgggcttgagggtgcacctgggcgggggaagtcttcgggcatga

SEQ ID NO: 925015 - DNA, 120 bp, Artificial Sequence
  ENSG00000278376_6 (sequence is synthesized)
gggcgcgcctgcgggtggtatgggggggtacaccgagcttgagggtgcgcccggggggctctcatgtgaagggtaccaggcttgagggcgcccctgcggggggcgcagaggcaccgagct

SEQ ID NO: 925016 - DNA, 120 bp, Artificial Sequence
  ENSG00000278376_7 (sequence is synthesized)
agggcgtatcttgggggacctgtctaggaggaaccgggaggtgaaggcacaactgggggtgaggcgggggcaggggccgggctgtgagagtgcgactgaggggggattactccggagagc

SEQ ID NO: 925017 - DNA, 120 bp, Artificial Sequence
  ENSG00000278376_8 (sequence is synthesized)
acggagctgggggcgttgcgcaggtggagtggggaggcctggtggagagggtagcaaaccgagagagcgcaccggggtggtggggggagaagctggactgtaaggtgaagagttagtagg

SEQ ID NO: 925018 - DNA, 120 bp, Artificial Sequence
  ENSG00000278376_9 (sequence is synthesized)
gcgcaaccgtcttctcctgccctcgaagggcaagactgaagaaagtaggggcggaggaggccgggccctccactaaagggagggaagctagtgaagcgtcagttataatagaaataggaa

SEQ ID NO: 925019 - DNA, 120 bp, Artificial Sequence
  ENSG00000278376_10 (sequence is synthesized)
ttcagtaaggaaatggagaagcttaaggcaaagggtgactctccggcctgaccctcactatgaagatatttatgtatgttcccataatacttttcagatcccaatgtctgtgtttatcct

SEQ ID NO: 925020 - DNA, 120 bp, Artificial Sequence
  ENSG00000278376_11 (sequence is synthesized)
tgacagaaataatagaactgctgtcttcttccaagttaaacaaaactttggagctaaaagctagctaggtcaagagaaacaaaatctaatcctcacccaattgagagactgaatatacaa

SEQ ID NO: 925021 - DNA, 120 bp, Artificial Sequence
  ENSG00000278376_12 (sequence is synthesized)
agaatggccaaacctaaccatgacctcctacccataacctcttcagtaatcggccagaagggtcaggacttaatctttaaccggcagcttccctatttcttgcccctgcttccagctctg

SEQ ID NO: 925022 - DNA, 120 bp, Artificial Sequence
  ENSG00000278376_13 (sequence is synthesized)
ggccaatcagagaaagccaaatgtgctcctcacaccaatcgcgtaagaagccctgcttctagtatagccctcctccaacttcccgatgccaacatcctccaatcagagccaacctgaagt

SEQ ID NO: 925023 - DNA, 120 bp, Artificial Sequence
  ENSG00000278376_14 (sequence is synthesized)
ttctcccttttttcagtatatgtaaagcttttccactcccctgcctgcctatgagtctgttaaatcaagtgatgggtcgcggctgactcttgccagctctgagtaaatagcctattctca

SEQ ID NO: 925024 - DNA, 120 bp, Artificial Sequence
  ENSG00000235152_0 (sequence is synthesized)
tggtagtgaataactctcacaagatctgatggtttgataaggggaaacccgtttcacttggctttcattctctcttgcagccaccatgccaccttccaccatgattttgaggcctcccca

SEQ ID NO: 925025 - DNA, 120 bp, Artificial Sequence
  ENSG00000235152_1 (sequence is synthesized)
gacacgtggacctagcaacacatgttctaacatgtgtgagactgactgcctctcctctatgaagagatgccagtgacagccaggactggtgtaggctctattgagcatcacagtcatatg

SEQ ID NO: 925026 - DNA, 120 bp, Artificial Sequence
  ENSG00000235152_2 (sequence is synthesized)
tgagtgcccaagagaagctattcactttctcagatgcggtttgcagagggaacttcacaggctctctgggattgctcacatttggcagctaaagtggaatcaccaatccaaaatactcac

SEQ ID NO: 925027 - DNA, 120 bp, Artificial Sequence
  ENSG00000235152_3 (sequence is synthesized)
tgggatgtgcctactccctaagccaagcttctctgtcctgagtgggcttagggtcccctgcagcgtgggtgttaaatgctgcttcctaggcctcaccctcagagcttccagttcagtcga

SEQ ID NO: 925028 - DNA, 120 bp, Artificial Sequence
  ENSG00000235152_4 (sequence is synthesized)
gtccaggtccctaacctgtcgtcgtccaattgattttgatcaggtgccccatggccccactttgagaagcagatcgagtccacctgtgcatcttccctgttgtccctaaaaataaggcta

SEQ ID NO: 925029 - DNA, 120 bp, Artificial Sequence
  ENSG00000235152_5 (sequence is synthesized)
aaaaaaggcaccagttcaaaaatccagtttatttgtttgaagttcaggtttacagttcctccaattctcagatcgcagaagaagcatctggaaggaaatgacccctgcacccaccacacc

SEQ ID NO: 925030 - DNA, 120 bp, Artificial Sequence
  ENSG00000278370_0 (sequence is synthesized)
tatctggtgacacagagttgaagttttagaatttggaaataaaatgactggggtggggtcccaagtactgtgttcaaggaaaggacatgccaggctgcgggacctcaatgcctcctcccc

SEQ ID NO: 925031 - DNA, 120 bp, Artificial Sequence
  ENSG00000278370_1 (sequence is synthesized)
aagatttctacttttatctactgttaagagcacacacttactgtaaatatgttattataaacactgtaaatctgtatcataaaactgtggtgctgtaaacactataaatatgttatcata

SEQ ID NO: 925032 - DNA, 120 bp, Artificial Sequence
  ENSG00000278370_2 (sequence is synthesized)
accctatggtatatatgccctgggtctcgggggggcaacaatgtggggatccaccatctcctggctgcccgagacatggcttttgtttctaagtccctattaaatgttcctaagcaactg

SEQ ID NO: 925033 - DNA, 120 bp, Artificial Sequence
  ENSG00000235151_0 (sequence is synthesized)
gaagtgctgactgcgccgcggtctctcagccgccaacacaccgcggacgcccggggacagcgaccgcttcctccctccccgcccgccttgtctctttttggtcttgctctgtcgcccagg

SEQ ID NO: 925034 - DNA, 120 bp, Artificial Sequence
  ENSG00000235151_1 (sequence is synthesized)
ctggagtcagtggcaccatcgtggctcactgcggcctccacctccgggactccagggatcctcccgcctcagcctcccgaggagctgggaccaccgcacctggctaattttaaaattttt

SEQ ID NO: 925035 - DNA, 120 bp, Artificial Sequence
  ENSG00000235151_2 (sequence is synthesized)
cgtgccaagcctcagttaggtttttaattttaatttggcattgtttgatgctcagactgctgccgtgtcattttcacacgacagcaagttggggacagcgagttgttctgtcctgcgcgt

SEQ ID NO: 925036 - DNA, 120 bp, Artificial Sequence
  ENSG00000235151_3 (sequence is synthesized)
gtgtcccctcatggtcttgagtgacctgaccctctgtggggagccctgagcctcctccctgctcccgcggccccagctctcagctgatggaggctccggggcgggctcaagcccccggcc

SEQ ID NO: 925037 - DNA, 120 bp, Artificial Sequence
  ENSG00000275532_0 (sequence is synthesized)
cgattccggccccctgcacaacctctctcctatccttagctcttccccggcggattttaggagtcccttctcccctgggacccttctcttccctttccaagtccgctcctcccattatcc

SEQ ID NO: 925038 - DNA, 120 bp, Artificial Sequence
  ENSG00000275532_1 (sequence is synthesized)
ggaagcgaggggggatgacgccccccccttgacctcttcctccaggagccgggaccaaaataaccgggcgggaggggacacctcgcagggaatctcggagggctgccgggacgaagaggc

SEQ ID NO: 925039 - DNA, 120 bp, Artificial Sequence
  ENSG00000275532_2 (sequence is synthesized)
tacacagggcggtgtaggggaagcccgtctcttcgacctccgtgcctgggagtaggggccgagagccagattattgcgatgaccggaatcccggcgaggacggccgcgctccggttcctt

SEQ ID NO: 925040 - DNA, 120 bp, Artificial Sequence
  ENSG00000275532_3 (sequence is synthesized)
ggtcaaatttgtgaatttcgctaacacgaaaagttaaacaagacacagaggagaaactgcacttaagggtttctaacgaattacctttactagcaagaataaaactgcaagaaaattaaa

SEQ ID NO: 925041 - DNA, 120 bp, Artificial Sequence
  ENSG00000268038_0 (sequence is synthesized)
gaccgcaggggccctgccctccaggcaccgggacaggccgtcctggcttggctgggaactggggtgtgtacctgtggggaacaactggtcaaaagcggttttttcatttcccaaagccca

SEQ ID NO: 925042 - DNA, 120 bp, Artificial Sequence
  ENSG00000268038_1 (sequence is synthesized)
tagaagaaacagtgaagagtaagaggaaaaggctgccagaaggggagtctcacaacaggaagaagtaacagctacgcatagaggaagggaagctgttcaagagcgggcccaggaacacaa

SEQ ID NO: 925043 - DNA, 120 bp, Artificial Sequence
  ENSG00000268038_2 (sequence is synthesized)
cacagaaccattgtcgtggttggggaactccagagtcccacatcacagttcagcatgtgcctcaggagcttcagcaagtctttcgtggaaggagagtctgccggtgacgggggaagcagg

SEQ ID NO: 925044 - DNA, 120 bp, Artificial Sequence
  ENSG00000268038_3 (sequence is synthesized)
ccatcagcccgcccagcttcatctcaggccgcttccaacaccgccaagcaaactcccttggcaagatccatgcaaggccgcggctgaccaccgggaggcagcagcctactctgcaaggca

SEQ ID NO: 925045 - DNA, 120 bp, Artificial Sequence
  ENSG00000268038_4 (sequence is synthesized)
ctttctttacccgacccccacccccttttaacaggtggcaggaaacctgctggcccagccatctgccgcacccacccttcactcccagtcccatctccccatagcacagatttccctatc

SEQ ID NO: 925046 - DNA, 120 bp, Artificial Sequence
  ENSG00000268038_5 (sequence is synthesized)
attcctacagagattctttctctatcctcctttgtacatttccaaggaattgtttccccagggcccctccccttgaagaaattagacaggaagctggagtagatggttccctctttccca

SEQ ID NO: 925047 - DNA, 120 bp, Artificial Sequence
  ENSG00000268038_6 (sequence is synthesized)
cctctcacactcccaagctctggttaactctctgtgggccagtggctagattccccaacacagatgacaactgaacaatacacatgcagcgtaagaatgttgtcgctgccaccagccact

SEQ ID NO: 925048 - DNA, 120 bp, Artificial Sequence
  ENSG00000268038_7 (sequence is synthesized)
tacagatacaccattgctaaggtccacccaactggactgtttccccctcccatagactaagccccaaaggccaaaaagtaaaacccgctaccccaaacctgcctgtaactgtttgaccag

SEQ ID NO: 925049 - DNA, 120 bp, Artificial Sequence
  ENSG00000268038_8 (sequence is synthesized)
aggccagctgtcccaggatgcggttaagacgtctactttgcacaagagaactggcaagaaaaacatctccaggaagcggtcagacacatggcacaaaggacccccccccttttctttttc

SEQ ID NO: 925050 - DNA, 120 bp, Artificial Sequence
  ENSG00000268038_9 (sequence is synthesized)
cttcaccctgatccagttctatgtcctataaaaccttgctctagcctataagtggggctgccttctctgcttttgtcaagaggtagccaggcaggactgacaataaatcagcttgcctga

SEQ ID NO: 925051 - DNA, 120 bp, Artificial Sequence
  ENSG00000268038_10 (sequence is synthesized)
ggttggcagcctggagtctggagtgcaggtgccgggcaggcagcactgggagcgctcggcgacttggctggaggccgaaggtgccgcccctcggggaccagagcgtctttgcaagcgtgg

SEQ ID NO: 925052 - DNA, 120 bp, Artificial Sequence
  ENSG00000268038_11 (sequence is synthesized)
gaattatagcacagagaaaactgtttaaagaggaagggaagcatgtgacccactgggggtacattcccaccccaattatttaaaagtaatatttaacatttaaaaggttttgaagctgaa

SEQ ID NO: 925053 - DNA, 120 bp, Artificial Sequence
  ENSG00000268038_12 (sequence is synthesized)
aaggccacactgcagctttgtggaaaacttagctctgtggaattatttgttccctgtgggttctgggtgttgattttacactaaaaaaattatttttggagtcgatgaacacacagtatt

SEQ ID NO: 925054 - DNA, 120 bp, Artificial Sequence
  ENSG00000231811_0 (sequence is synthesized)
agacaggcagtcacaagcctggggactgcaggcacagtgaggaaggtagggaagggtctctccaagacaggcccaccaggagcccccactgggaataatgcagcccctctcaggggatgg

SEQ ID NO: 925055 - DNA, 120 bp, Artificial Sequence
  ENSG00000231811_1 (sequence is synthesized)
agtgtctggaattccatggctgaggtgcaacaggtgactgaaggtttgaggaggcaacgctgccactcacagtcagaagcagaggggatgagatggccagatgtgattggaatcagacac

SEQ ID NO: 925056 - DNA, 120 bp, Artificial Sequence
  ENSG00000231811_2 (sequence is synthesized)
agtgaggtttgaatcctcactctgtcctttttgttgtgtggcctgtgtgacaggtcccacagcctctccagcctctgtgggaagaaggatcatctgatgcctatgtaatagagttgctga

SEQ ID NO: 925057 - DNA, 120 bp, Artificial Sequence
  ENSG00000231811_3 (sequence is synthesized)
aggagtggaagcagctttgacattatcagtggaacccaccagtgcagactgcttcaccaagggcacctgaggcagcagatctgaggattagggacgtagggagctgaagcctggctggag

SEQ ID NO: 925058 - DNA, 120 bp, Artificial Sequence
  ENSG00000231811_4 (sequence is synthesized)
aggtggtgcgcacaagaacccccacattccccgacaggagcctgaaaaagcaagacgccatgttgggaggacacggaagcagttctagggagaggagcacatggcaagaagccaaggcct

SEQ ID NO: 925059 - DNA, 120 bp, Artificial Sequence
  ENSG00000231811_5 (sequence is synthesized)
cctgcccacagccgcctagtttcttttgcagataccctgtgattgccagcaagtaaaccagatgcaattgtggtttccgtgaagcacagctggaaaactgctgcccccacggaggaagag

SEQ ID NO: 925060 - DNA, 120 bp, Artificial Sequence
  ENSG00000231811_6 (sequence is synthesized)
gaagatgggaagatggtggttactgcacaccaggcaccagcctcggggctatgagctgtacaaacattacccattttatcctcgtgaccatgttctgagaaggctgtcaatgatctcact

SEQ ID NO: 925061 - DNA, 120 bp, Artificial Sequence
  ENSG00000231811_7 (sequence is synthesized)
ttatacatggggaaattcatgcagacagaggctgactaaattgccatggtcactcagctagtaggaactggagctgtaacttgaacccgggtcttttgtttctgtggctcctggtagcac

SEQ ID NO: 925062 - DNA, 120 bp, Artificial Sequence
  ENSG00000231811_8 (sequence is synthesized)
atgccgggcttgaagtgagatccggaggatgttggaaacaacgtgttccccatcatgaaagtccttatgataccttatgatgcagagttggcagccaggagcaggggcttccagaagcat

SEQ ID NO: 925063 - DNA, 120 bp, Artificial Sequence
  ENSG00000231811_9 (sequence is synthesized)
ggctgacccttgttgggatctcgctcctgtgagccttggaacgtctagggagaaagagcagccaaatttagagctgcaggagctttgagatgcagctcaggcatcatctctgggaagtct

SEQ ID NO: 925064 - DNA, 120 bp, Artificial Sequence
  ENSG00000231811_10 (sequence is synthesized)
ccctgtggctctttttgcatttgctgcctcttttcacaattctgtctccttatgtcttccactctacacgcaagccccttgagggcaggaccatgactcagtcatcctgtaccctagcac

SEQ ID NO: 925065 - DNA, 120 bp, Artificial Sequence
  ENSG00000231811_11 (sequence is synthesized)
ccaccctgggtctgcatctggaaggagctcactaagtgattattgagccaaactgaactgtagcaggagtgagcaaagctaattcatgggtgcagaatgggagcacagagctgccagaat

SEQ ID NO: 925066 - DNA, 120 bp, Artificial Sequence
  ENSG00000231811_12 (sequence is synthesized)
ccagagacaactgtaactgtcccggcacagggggcttcaggccgcggtgagagccactgaaagcaagagagccaggtggtggctcagttcacactgagtcctgctgaagaaataggcaca

SEQ ID NO: 925067 - DNA, 120 bp, Artificial Sequence
  ENSG00000231811_13 (sequence is synthesized)
tcgtgtgtgttaaaatcagcaccccatgcacctgtaggaagagactgaggcaccctggaggcccctcccaataattaaaaggccctctggggcctgtgggagccctagctgatgaaatca

SEQ ID NO: 925068 - DNA, 120 bp, Artificial Sequence
  ENSG00000231811_14 (sequence is synthesized)
caaaggcctcagcctctaaagtgtttccagtaaaatgctaccaggattttcctcccttaaatctggatgaaagggctgtctgtgctacaaagtgcacacctggcgttgatacgcagtctc

SEQ ID NO: 925069 - DNA, 120 bp, Artificial Sequence
  ENSG00000231811_15 (sequence is synthesized)
ttgctgcctgttaactaacccaccagccgacaagttctgcccactggcaggagcaaggacttataaaaaatagtgcctccctcccaagggcttatgagctggttaagtgcagaggacaaa

SEQ ID NO: 925070 - DNA, 120 bp, Artificial Sequence
  ENSG00000231811_16 (sequence is synthesized)
tagaatgaaagaaaaggcaatctcggcatagtatttagttaattcttctctctctcttgttccctctctctcctttctctcttcctccctcctttctatgacttgtcctctccacacaac

SEQ ID NO: 925071 - DNA, 120 bp, Artificial Sequence
  ENSG00000231811_17 (sequence is synthesized)
tccttttccgttttccctcccctgcctccccaccttctttcttgacttcccatcttgctccctttcttcctgcctgcccatctgctttcctttcttatctctggtgcaaattctgcatat

SEQ ID NO: 925072 - DNA, 120 bp, Artificial Sequence
  ENSG00000231811_18 (sequence is synthesized)
agtcgctctcctcatttcatgacaggctgtcttcatcagtttctgagttcttttgttattttataaaatattttacatgctgtcctcaaaaaatcccctcccccagaaaaggcccattca

SEQ ID NO: 925073 - DNA, 120 bp, Artificial Sequence
  ENSG00000231811_19 (sequence is synthesized)
aaagtacttactatacgtccttagataggcaatgatctctgaaatatatataggcttgctctatatgtgtttttgtaagtgtacttttctttcattaaatatgcagatcttaattgtaca

SEQ ID NO: 925074 - DNA, 120 bp, Artificial Sequence
  ENSG00000231811_20 (sequence is synthesized)
ccccttgtgccaccttccagtcaactctcaccctccagaggcacccactgttcagatttctacatgcattttgcctgttgctgaactggaacctcacagccttttacgtctggcttcttt

SEQ ID NO: 925075 - DNA, 120 bp, Artificial Sequence
  ENSG00000231811_21 (sequence is synthesized)
cacttaacataatgtttttaagtcatccatgtagttcattcttttttttgttgcagagcaatattccattgtgtgaatggatgtactttatccatcaacagttgatgaagttgggttggt

SEQ ID NO: 925076 - DNA, 120 bp, Artificial Sequence
  ENSG00000231811_22 (sequence is synthesized)
ggcactttttggctatcgtgggtaatgctgctctggatgtttctgcacaagtctttattgtggacatgggtttccatttcttctgggcaaatgcccaggaacagaattgctgattcatta

SEQ ID NO: 925077 - DNA, 120 bp, Artificial Sequence
  ENSG00000231811_23 (sequence is synthesized)
ggaagttatatgtttaacttcataagaaactggaaaaccgcactccacagtgttcatgctattgcacattgcccccagtgccatgtgaatgtttcattcttggggtctagaatatcttac

SEQ ID NO: 925078 - DNA, 120 bp, Artificial Sequence
  ENSG00000231811_24 (sequence is synthesized)
tgcagttttaattggaagttctctgatgacttttgatagagtatcttttcatgtgcttattggttatttatttcttctttaaagaagagtctagatccttttcccatttaaaattgcatt

SEQ ID NO: 925079 - DNA, 120 bp, Artificial Sequence
  ENSG00000231811_25 (sequence is synthesized)
gcttctatttttactgttgattcttagaagttctttacatattttagatttatatacagtaaatattttctcccagtccatggcttgcctttaccttttcttaatggtgtcttttgatta

SEQ ID NO: 925080 - DNA, 120 bp, Artificial Sequence
  ENSG00000231811_26 (sequence is synthesized)
accagacattttaaattttcatgaagcctattgtatcgggggttgtttttgtttgttcatttatggttagtactctttttggtgctagccaggaaaactttgcctacattctcctaagct

SEQ ID NO: 925081 - DNA, 120 bp, Artificial Sequence
  ENSG00000231811_27 (sequence is synthesized)
catgaatatatttttctatatttgtttctaggacatttataattcaaacttttatgttctagcctatcactcatgtatagttatgtatagtataaataaggattgaagttcatttttctt

SEQ ID NO: 925082 - DNA, 120 bp, Artificial Sequence
  ENSG00000231811_28 (sequence is synthesized)
tccatatacttatccagttattccagcaccatttgttgaaaacactttctttccctcattgaatttccttgaagcttgtgctcataacttatataacgagtattgcgttacaatttccat

SEQ ID NO: 925083 - DNA, 120 bp, Artificial Sequence
  ENSG00000231811_29 (sequence is synthesized)
tatatttcttaatttttcacttaacacaatgtttatatgatctatccgcaatgctgtattcagtcatttgaattcactcattcattttatcattcaataaatctgcagtggtgaagaaaa

SEQ ID NO: 925084 - DNA, 74 bp, Artificial Sequence
  ENSG00000231817_0 (sequence is synthesized)
caaacaggggagccatccttcagaaaccctgtctagttgttcagagacgtaggccaccggcctcagccagggcc

SEQ ID NO: 925085 - DNA, 65 bp, Artificial Sequence
  ENSG00000231817_1 (sequence is synthesized)
tcatgaaagacttgctgttcttggatccccattccaaaggttccggtccccgccccctttgtgac

SEQ ID NO: 925086 - DNA, 120 bp, Artificial Sequence
  ENSG00000231817_2 (sequence is synthesized)
caaataacctgctttctttctgttcccgggctgcgttcggactcctgtcagatagtaaatcctaagtggcgtcggacccctgtcagagagtaaatctcaagtaaggtacctgccatcggc

SEQ ID NO: 925087 - DNA, 81 bp, Artificial Sequence
  ENSG00000231817_3 (sequence is synthesized)
ctccggtagactgcaaatgacctgctttctttctgttcccgggctgcgtttggacccctgtcggatagtaaatcccaagta

SEQ ID NO: 925088 - DNA, 120 bp, Artificial Sequence
  ENSG00000231817_4 (sequence is synthesized)
ccacagtcccccaggctccggtagactgcaaatgacctgctttctttctgttcccgggctgcgtttggacccctgtcggacagtaaatcccaagtaaggtacctgccctcggcagatttg

SEQ ID NO: 925089 - DNA, 120 bp, Artificial Sequence
  ENSG00000231817_5 (sequence is synthesized)
ggacacctaatacccacagtcctccaggaatggaacagataagaagatactgaaattggacggtgctgccgtgcggctgccgcaggacacctttaatatccctgtttctcaggctgtaga

SEQ ID NO: 925090 - DNA, 120 bp, Artificial Sequence
  ENSG00000231817_6 (sequence is synthesized)
gctgtagatgaaggggttcagcatggaggtgatcaccgtgtacatcactgaggccactgcagcctttctcggggaagatgacacatctgaactgaggtaccctccaaagcctgttccgta

SEQ ID NO: 925091 - DNA, 120 bp, Artificial Sequence
  ENSG00000231817_7 (sequence is synthesized)
cgtaaaatcagcaaacaactgacaggataacttcaggaagtgggtattaattctcacggtataagtgaagacattaagcaccagagtttaagtagcttgatccactgaaagagattcaac

SEQ ID NO: 925092 - DNA, 120 bp, Artificial Sequence
  ENSG00000231817_8 (sequence is synthesized)
tgtgtggaacctatgccgtggagaattgctttctgccattgttatcgtccagcagttgccgaatagctctgacctgagcaaagcagtgaaacgcggtgctgttgagtgggttgccactgc

SEQ ID NO: 925093 - DNA, 120 bp, Artificial Sequence
  ENSG00000231817_9 (sequence is synthesized)
acctttttcaactactctagtcttgtggagaaaataccccttctaaattttttcttcattgaatactctccctcagctccagagtaccatatagagttttcttgtattttagagttactg

SEQ ID NO: 925094 - DNA, 120 bp, Artificial Sequence
  ENSG00000231817_10 (sequence is synthesized)
ttttatcaaagtttaccagtcttttgtattacatttctcctgtctaaatcgactgtgtggtttctactcattatggatatagattgatacaaactcaataaatatttttgaatgaataac

SEQ ID NO: 925095 - DNA, 79 bp, Artificial Sequence
  ENSG00000231817_11 (sequence is synthesized)
ggggagttgagaagggtcacagaagaaactaggaatttccgcatcctgcgtctaaaggactgagaaaaaaaaaaaaaaa

SEQ ID NO: 925096 - DNA, 87 bp, Artificial Sequence
  ENSG00000231817_12 (sequence is synthesized)
gggatgcacaatctacaaaaccccacagcccctgagaattctctcgcctgccttcggcccttaggctccgggaggtggcgtcggacc

SEQ ID NO: 925097 - DNA, 120 bp, Artificial Sequence
  ENSG00000231817_13 (sequence is synthesized)
ggctttcagtccccgcctcgcagggggtgccacccccccctgcgatgggggtcccaagagccacggggggaaaaggggctggctctcagccacctcaaaatggggggcctttatgttcag

SEQ ID NO: 925098 - DNA, 63 bp, Artificial Sequence
  ENSG00000231817_14 (sequence is synthesized)
ggccatcctttagaaaccctgtctagttgttcagagacgtaggccaccggcctcagccagggc

SEQ ID NO: 925099 - DNA, 83 bp, Artificial Sequence
  ENSG00000231817_15 (sequence is synthesized)
tggggctgccagaagtttttcctttaagtcatgaaagacttgctgttcttgggatccccattccaaaggttcccggtgctact

SEQ ID NO: 925100 - DNA, 85 bp, Artificial Sequence
  ENSG00000231817_16 (sequence is synthesized)
gacctcatacaaaggcttggctactactgcaaagtttgggatgcacagtctacaaaactgcacagcccctaagaattccctcacc

SEQ ID NO: 925101 - DNA, 120 bp, Artificial Sequence
  ENSG00000231817_17 (sequence is synthesized)
tgaaatctgcatggcaaacatcattgccttatgatacatttctcaaattttcagaacatatccctgtcgtttagcagcacatgaatgtatttgatttattgtcttgatgtccctttgctt

SEQ ID NO: 925102 - DNA, 120 bp, Artificial Sequence
  ENSG00000231817_18 (sequence is synthesized)
tccccatgtgttaccatcaactgcctaatgaaacagcctgggattgtgtaatgactaacttagtgctttgagtttaattctttttcagccactgtggtatgttgattactatattaataa

SEQ ID NO: 925103 - DNA, 120 bp, Artificial Sequence
  ENSG00000231817_19 (sequence is synthesized)
ctcagcctcccaaagtgctaagattactggtgtgagccaccatgccggtccagcaatccatggttccatataggtggcgtcggacccctgtcagagagtaaatctcaagtaaggtacctg

SEQ ID NO: 925104 - DNA, 120 bp, Artificial Sequence
  ENSG00000231817_20 (sequence is synthesized)
ggggcatgaattagagaagttgtactttcgtgaggagatgatggcacacccagacagaagacaaagaaggctgaagaagtaagagtgagaaaccgagagggtgagcacctgtcccagctt

SEQ ID NO: 925105 - DNA, 120 bp, Artificial Sequence
  ENSG00000231817_21 (sequence is synthesized)
ttttgatgaaaaaaaactcaactgacttttgaagataaaaggaagagccagagtggccaaaggaaatagcaacacagagaacttagtctattgaatgaacaaataactcattcaccaaca

SEQ ID NO: 925106 - DNA, 90 bp, Artificial Sequence
  ENSG00000231817_22 (sequence is synthesized)
agcctcagcctcccaaataggtgggactacaggtggcgtcggacccctgtcagagagtaaatctcaagtaaggtacctgccatcggcaga

SEQ ID NO: 925107 - DNA, 120 bp, Artificial Sequence
  ENSG00000231817_23 (sequence is synthesized)
cataaggccacgtcacttcttgcgtaatatctaagcgtgaaggttgggtaaaattagctggaacttctcacagtccattaataaagctttaaatgtgacacatgtgttgttatcctcttc

SEQ ID NO: 925108 - DNA, 120 bp, Artificial Sequence
  ENSG00000231817_24 (sequence is synthesized)
gatattgttcgttatatccttgggggatgttattcctaatgtcacacggggtgtactccctgtcatattattcataatatccaagggggatgttatttttattgtcaccgggggtgacat

SEQ ID NO: 925109 - DNA, 120 bp, Artificial Sequence
  ENSG00000231817_25 (sequence is synthesized)
tacatattaaaaatgcatattcaacacctgtgatactattcctaatatcctaggggcatgctcttccgaatgtcacatggggtgtactccatgtgtgtacacctgctgtgatattattca

SEQ ID NO: 925110 - DNA, 120 bp, Artificial Sequence
  ENSG00000231817_26 (sequence is synthesized)
taatatcctaggggaatgttactcctgatgacacaggcggtgtacaccatgtgtgtaaccctcctgtgttattattcataatatcctagggggatgtttcttttaatgtcacaaagtgtg

SEQ ID NO: 925111 - DNA, 120 bp, Artificial Sequence
  ENSG00000231817_27 (sequence is synthesized)
tacaaaacgtcacagaggtgtacacgctgtgatgtgatctgtaataccctagaaggatgttactcctaatgtatcacaggggtgtacatgctttgatgttatttgcaatctcatagagag

SEQ ID NO: 925112 - DNA, 120 bp, Artificial Sequence
  ENSG00000231817_28 (sequence is synthesized)
atattacttcaaatatcacagtggatgtacacacatagtatataccctgtgatagtattcataatatcctaggaagatacaactcctgatatcagtgtgtgtaccccgtgtgtgtacacc

SEQ ID NO: 925113 - DNA, 73 bp, Artificial Sequence
  ENSG00000231817_29 (sequence is synthesized)
aactcctgatatcagtgtgtgtaccccgtgtgtgtacacccttgatgttagtcgtaatatccagggtaaatca

SEQ ID NO: 925114 - DNA, 82 bp, Artificial Sequence
  ENSG00000231817_30 (sequence is synthesized)
gcttggctaatactgcaaagtttgggatgcacagtctacaaaaccccacagcccctaagaattccctcaccatgcaaaattt

SEQ ID NO: 925115 - DNA, 120 bp, Artificial Sequence
  ENSG00000231817_31 (sequence is synthesized)
agggcgagaggggggtgatatgactgcctgccttgcgggtggcgcccgcccccctgcgatgtggatcgtcttatccagagtgtgaaaggaatggaacagataagaagatactgaaattgg

SEQ ID NO: 925116 - DNA, 120 bp, Artificial Sequence
  ENSG00000231817_32 (sequence is synthesized)
ggggggcacctgcccccctgcgatgtggatggtcatatacagggggccatagggtggtgatattactcccggatttttcctagggtcctttctatactgccaccctcggttcacaccctg

SEQ ID NO: 925117 - DNA, 120 bp, Artificial Sequence
  ENSG00000231817_33 (sequence is synthesized)
acagggggtgttcaccctgtgatatttttcatcatagttttgtgggatgttactcctaaagtcacacggggtgtacacagagtcacacagtgatatgagttgtaacattctatagacatg

SEQ ID NO: 925118 - DNA, 120 bp, Artificial Sequence
  ENSG00000231817_34 (sequence is synthesized)
ttacttgtaaatcacaggggctgtacctcctgtgatatggttcctaatattctaggggaatgttgctactattgtcacgggggtgtacaccctgtgatatgactcgtcatatcccagcgg

SEQ ID NO: 925119 - DNA, 120 bp, Artificial Sequence
  ENSG00000231817_35 (sequence is synthesized)
aatgttactactaatgtcacaatgcctgtacaccctgtgatactatttgtaatatgctaaagagatgttactactaaggtcacaatgaatggaacagataagaagatactgaaattggac

SEQ ID NO: 925120 - DNA, 120 bp, Artificial Sequence
  ENSG00000231815_0 (sequence is synthesized)
caattgtaaggacatatcatactgttcatgtactgtattagtaattagagattcctggatagtgaaagatctgcactgggagcttactaccggggagcacattttctcacagccgcctct

SEQ ID NO: 925121 - DNA, 120 bp, Artificial Sequence
  ENSG00000231815_1 (sequence is synthesized)
tgctgctgtgggtgggccacaacaacagatgactttttaaatgacatgctgtttcctgttctgctacttatagtttctgaagaaccaagttatatagaaagaagaagaaggtaaaggctg

SEQ ID NO: 925122 - DNA, 120 bp, Artificial Sequence
  ENSG00000231815_2 (sequence is synthesized)
tgaaggaaaaagagaagaaactaactgcaagtaaaaaaaatgaaggccatatatttgttgctatgatctgaatgtctgtgttccctcctcaaaatatatgttaaaatcctaacccctaaa

SEQ ID NO: 925123 - DNA, 120 bp, Artificial Sequence
  ENSG00000231815_3 (sequence is synthesized)
cagagaattagaagccctaagcagtgccaatcctgttcagttcacccaagtgagagccaaataataaaatcatgttacacaatgcagaagtcaactcagagcaatgaatacagaacaaag

SEQ ID NO: 925124 - DNA, 120 bp, Artificial Sequence
  ENSG00000231815_4 (sequence is synthesized)
gtactttggaatatgccatcctaatattcctgtatgcgcactttagtgttcttaaatgtgtttcatgtttaatgaaagaaacaatgactttcagtggaggaaaaaaatagatctttaaat

SEQ ID NO: 925125 - DNA, 120 bp, Artificial Sequence
  ENSG00000231815_5 (sequence is synthesized)
ataatcagggccttaaccacctaccttaggtaactgagaaaaagctactgtactctttattttttaatactccagatatgtaatttaatgcaggtctaatgacagtctcaaacatggggc

SEQ ID NO: 925126 - DNA, 120 bp, Artificial Sequence
  ENSG00000231815_6 (sequence is synthesized)
tttaatcgaaattgttcaagctcagtgctgtgacaggaactcacaagcccccaacagtgctgtccattttctcaggttcttcaatagaaaaggaaagaagaaaaaaacctcttgaactta

SEQ ID NO: 925127 - DNA, 120 bp, Artificial Sequence
  ENSG00000231815_7 (sequence is synthesized)
tttctatggaataagcttgtgctagcaaaaccagtttacccagaaacgcacaaatgagctgcttagcatacttctgagatcctgattcccacagtccctgtgctgttgttgctgttgata

SEQ ID NO: 925128 - DNA, 120 bp, Artificial Sequence
  ENSG00000268030_0 (sequence is synthesized)
ctgggattacaggtgcacaatatccagctgtgacaggacagtggcttcttacagcagctgatttctgcctgacttctgatgtttctccaggaaaaaggaaacagggattttttttttctg

SEQ ID NO: 925129 - DNA, 120 bp, Artificial Sequence
  ENSG00000268030_1 (sequence is synthesized)
ggaaattgcctcattgacaaatgtcagcaatcaatacttttttccaagatatcatggaggccaagagcatctatttgtgatctgtatctggtcagtggtttgcagcaccttctagaaata

SEQ ID NO: 925130 - DNA, 120 bp, Artificial Sequence
  ENSG00000268030_2 (sequence is synthesized)
aggtgccacacccagcaaaacccccttccctctaataataactatggttattgaactcctatgacatgccatgcagagacacccagtctccacattcccaaagaagcatgatcttgtata

SEQ ID NO: 925131 - DNA, 79 bp, Artificial Sequence
  ENSG00000268030_3 (sequence is synthesized)
acctggaccgggggtggatcacctgaggtcatgagttcaagactagcctggtgaacatggtgaaacccccgtctctact

SEQ ID NO: 925132 - DNA, 81 bp, Artificial Sequence
  ENSG00000268030_4 (sequence is synthesized)
acttcatcggagagggaggcccatagctagtaccagtgagacacagtactgggaccttctgggatacactcctccttcaaa

SEQ ID NO: 925133 - DNA, 120 bp, Artificial Sequence
  ENSG00000268030_5 (sequence is synthesized)
cacagtactgggaccttctgggatacactcctccttcaaaacaggactcttttctgtctctggctcccagatgtgagggctgaggggttcctggcacctccctcccgtccccccgcaact

SEQ ID NO: 925134 - DNA, 120 bp, Artificial Sequence
  ENSG00000268030_6 (sequence is synthesized)
ccaactccaaatgtagatttattgaagaaacgcagagaggtaggctgtttgaccatgggagagccacttcacccttctgaatcagttttttcaaccataaaatgaaaataaggtagaatg

SEQ ID NO: 925135 - DNA, 120 bp, Artificial Sequence
  ENSG00000268030_7 (sequence is synthesized)
aagatctcacagtgctgtctgtggcaactgaaaccaaaggtgataacgactggagctcaggacaggctgtttctccaagaggagtgtgaagaagtcccgggaatcaacattttgagagca

SEQ ID NO: 925136 - DNA, 120 bp, Artificial Sequence
  ENSG00000268030_8 (sequence is synthesized)
tcccaggggcctctaagaatatattacgggcaaacacttgtagagcacttcatttcatcctcaatcaccgttacgaggcagacacaatcatctccgagtgaaactgaggctcacaggggc

SEQ ID NO: 925137 - DNA, 120 bp, Artificial Sequence
  ENSG00000268030_9 (sequence is synthesized)
gggctccgttgccgaaactcacagggagaggcagagaagcaccacggttctatatccaggttatttaacagaatttaactcagccatccaagctctgaaaaaccccaagtggggaggggc

SEQ ID NO: 925138 - DNA, 120 bp, Artificial Sequence
  ENSG00000268030_10 (sequence is synthesized)
tcaaatatcccctcacgccccgtcccctacaatacagggaaactgaggcacaaaccgggcaacgcccagctccaggttacacgacacacccagaacacaggaggccccaattcctatgcc

SEQ ID NO: 925139 - DNA, 120 bp, Artificial Sequence
  ENSG00000268030_11 (sequence is synthesized)
cctgatccggatccagatccagcccgtagcgccgcctgcgtatccattgagcagacggggaaactgaggcctgtgcgcagcaggaatgaccagatgtggccagtggcgcaccccacccca

SEQ ID NO: 925140 - DNA, 120 bp, Artificial Sequence
  ENSG00000268030_12 (sequence is synthesized)
ggccgcgcccgacccggaccggttccccgcggccctggagtccccagccccaccccaaactcggccccggcgtcggtagcggcggcacctgcacatctggcggccttgctcgcgcttccg

SEQ ID NO: 925141 - DNA, 120 bp, Artificial Sequence
  ENSG00000268030_13 (sequence is synthesized)
ctcgcgcttccgggatggcgcccgcgccggcgaaacgtcaccacgcaccgatcctgcgagcgcgcgtggcggggacgtaccctggagccgcttgcgtgcgttaagtcacgacaggaaagg

SEQ ID NO: 925142 - DNA, 120 bp, Artificial Sequence
  ENSG00000248884_0 (sequence is synthesized)
taagggcttccctgacatagacgacttgcttctttcaaatttggtcatcgccctcttgccttcctgtgtgagtcagcgtggctgcccttgtgcacgccaggctcctgtctgtgctccggg

SEQ ID NO: 925143 - DNA, 120 bp, Artificial Sequence
  ENSG00000248884_1 (sequence is synthesized)
agtcctgagctcacagtcatgcaaccagcaggtggtgaaacacacctccaagctgcctgcctcctaagcatcaagctttgtggcccaggatctacttcatgctccaaatattcatggacc

SEQ ID NO: 925144 - DNA, 120 bp, Artificial Sequence
  ENSG00000248884_2 (sequence is synthesized)
ttcccaggacctcaacaaaacaaaaccatgaagaaaaaccttgacatgaaccccaaaaaaacccagtcagcaatattttaagttaaattttgaaacaaatccaaacgggttcctccccat

SEQ ID NO: 925145 - DNA, 120 bp, Artificial Sequence
  ENSG00000248881_0 (sequence is synthesized)
tagatcataagctaaaatatgaaacgcaaggggagagaaaacaaaaatataaaagatttagctccttaaagaagtaacagaaaatggcttccaacttcatgttgcaattaaataataact

SEQ ID NO: 925146 - DNA, 120 bp, Artificial Sequence
  ENSG00000248881_1 (sequence is synthesized)
attattatattattgagacagagtctcgctcttcaggctggagtacagtggcaagatcttggctgactgcagctttgacctcccaggttcaagtagttctcctgcctcagccatctgagt

SEQ ID NO: 925147 - DNA, 120 bp, Artificial Sequence
  ENSG00000248881_2 (sequence is synthesized)
ttacaggtgtgagccattgtgcctggcctaactaattattttttgagaagaactcattgatagcacaaaagtacttggagaaactacttaagctaactactattaagctgtcttctttca

SEQ ID NO: 925148 - DNA, 120 bp, Artificial Sequence
  ENSG00000248881_3 (sequence is synthesized)
aatgtaactaagatacataatgtgttttaatacacattaatcttttgaattacacattttctcttgaggattataataaaatgatggtacaatttatccttctttatagatttgtggaaa

SEQ ID NO: 925149 - DNA, 120 bp, Artificial Sequence
  ENSG00000248881_4 (sequence is synthesized)
gtaccaacataattgacaagaaatgaaatactgccatttaaaagtcctgtattaaaataaaactactttgaatcatcttagactaaatattttaaaaactgattcaagtgcttattcata

SEQ ID NO: 925150 - DNA, 120 bp, Artificial Sequence
  ENSG00000248881_5 (sequence is synthesized)
agataatggaattttaaataagaaaagccaaattaaaaattatattttaggcaaaaaccattttaacacagataatactgtgatatttattttcctgaagaaaaccacttatgctagtta

SEQ ID NO: 925151 - DNA, 120 bp, Artificial Sequence
  ENSG00000287568_0 (sequence is synthesized)
ggataagctggcagcctgtgcggttcatgttgggtctctgatccagagggcaaagttcacaggacagctcatccacctggtagttgtaaccttcacagcgttcacagtgccagcagcaag

SEQ ID NO: 925152 - DNA, 120 bp, Artificial Sequence
  ENSG00000287568_1 (sequence is synthesized)
ggacccctttcaccgttttcttcctctcccctggcttacacggcaggctgcagacagacgccggacacagtaattttagcagaatgctaataggacaaaactgaaaattacagatgacgg

SEQ ID NO: 925153 - DNA, 120 bp, Artificial Sequence
  ENSG00000287568_2 (sequence is synthesized)
gagaccacttactatgaaaagcagctactataaaagctagtcctcagtttggtccagtgtccaagtcccacctccagagccaagtccctcctacctcatcatgaaaactctcagcagccc

SEQ ID NO: 925154 - DNA, 120 bp, Artificial Sequence
  ENSG00000287568_3 (sequence is synthesized)
tgtggaaagaatggaggcctcctgtccacaacaagcaccaacttcccatgcgtgtgaaggagccacctagaaagtcatcatctggctccagtcaagccttcaggtgacatctgaatgaca

SEQ ID NO: 925155 - DNA, 120 bp, Artificial Sequence
  ENSG00000287568_4 (sequence is synthesized)
tcttgaatacaaactcatgagagaccctgagccaggaaaacacagctaacctgttcctgaatttctgatttacggaaatgttgtgagatgatgtttattgttttaaactgctacattttg

SEQ ID NO: 925156 - DNA, 120 bp, Artificial Sequence
  ENSG00000287568_5 (sequence is synthesized)
gagttatttgttctgcaacaacagaaaatgaatgcagctcaaattaaacttagctacttggtggccactttcattttaatatcagtgtagttatctatccagaaggcacacccagggaca

SEQ ID NO: 925157 - DNA, 120 bp, Artificial Sequence
  ENSG00000287568_6 (sequence is synthesized)
gcgactgtatacttccaaagcagcccgaagtatgtagctttagcaatattccttcatcattcttatggtggcttactctttgacaatcaggtgactgaaatcgttctcatgaacaattac

SEQ ID NO: 925158 - DNA, 120 bp, Artificial Sequence
  ENSG00000287568_7 (sequence is synthesized)
gagaactgtagtcttcaagctctatccttttagagggctgtcgaatctcctcagagtagagactttgtgtctttaatttcagatatcctcccttgagaaagtagatgctacttcatctgt

SEQ ID NO: 925159 - DNA, 120 bp, Artificial Sequence
  ENSG00000287568_8 (sequence is synthesized)
catatgtcatcagggcatttgagactattagatctatcctgtcagctcactacaaaggaaatgtaatctattataaccctctagtttcttattgggttttaatgacttaaaaatattata

SEQ ID NO: 925160 - DNA, 120 bp, Artificial Sequence
  ENSG00000287568_9 (sequence is synthesized)
ttttatttacttataagattacaggaagaaagaaataaaggtaaatggaagcacacagtgatttctttcaaaaatactgagaaaaaaaatgaaatgctccactgggtgcttcaggaatta

SEQ ID NO: 925161 - DNA, 120 bp, Artificial Sequence
  ENSG00000287568_10 (sequence is synthesized)
actttacaacctaagggactcataagataagaaaatacatttttgaaggttatatttaaaagctaattactatagaaacaaaattgcattttgttgggaacttccatagatttacagtgt

SEQ ID NO: 925162 - DNA, 120 bp, Artificial Sequence
  ENSG00000287568_11 (sequence is synthesized)
tcctgctcaaaaaacacaaaacaaaacaaaacaaaacaaaaaatgaaaaacagcaaaaaaaaattggaaacattaaacttcaagaaaccttaaaggtcagtttctctaaccacatgtcgg

SEQ ID NO: 925163 - DNA, 120 bp, Artificial Sequence
  ENSG00000287568_12 (sequence is synthesized)
aagctttaattctcaatatgctttacttctcagaacaacataagatgtgttaaaaaagaaatgtacctatactcggtaggtttcattacataggataactatttatcattataagctaaa

SEQ ID NO: 925164 - DNA, 120 bp, Artificial Sequence
  ENSG00000287568_13 (sequence is synthesized)
tgtgaaattttccttgacaattttttaatgttttgaaccaatgaaaaaacgtttttcataaattaaaaataaagttgtaagaatatgaaaaataccagttttttaacagctatgaatttt

SEQ ID NO: 925165 - DNA, 120 bp, Artificial Sequence
  ENSG00000287568_14 (sequence is synthesized)
atgaaaaataccagttttttaacagctatgaattttctttaagtaaaaaaataagcaatatgtgtaacatttttattataaaggagactgtaatgttatagtttacagattatgttttaa

SEQ ID NO: 925166 - DNA, 120 bp, Artificial Sequence
  ENSG00000272983_0 (sequence is synthesized)
gtaaaaacttaaggtcttattcaggtcattactgggcctttgtctttccctaggcaggtatgttggctttctaaattctctcacatatgcaattactttttagtctccaaaaacaggtgt

SEQ ID NO: 925167 - DNA, 120 bp, Artificial Sequence
  ENSG00000272983_1 (sequence is synthesized)
atcccttttgaatcccttggtggctacttcagtttatggaggttggataactggtgaccagcctacatgcccacaccacatttatcagagaagcactccataattagaacacagagccct

SEQ ID NO: 925168 - DNA, 120 bp, Artificial Sequence
  ENSG00000272983_2 (sequence is synthesized)
ggtgtttggaaggccaggtctttattgtctaccctggctccagcaagacctttcacccttgaatgtgggttatggaccccaatgccacatgacatgagactatagagactgtggttgggg

SEQ ID NO: 925169 - DNA, 120 bp, Artificial Sequence
  ENSG00000272983_3 (sequence is synthesized)
gatggtagttgcaaccctgctcgtggcttaaataaagcaaagattaccataatgtaccagccaagctgtcccctggaagctgcaagtgttcaaaataaactacggaggtttaaaatgttt

SEQ ID NO: 925170 - DNA, 120 bp, Artificial Sequence
  ENSG00000272983_4 (sequence is synthesized)
gcctcagccaatttcttccaatataattgtgcagatagagatggatttttggtattttgtactttgccatttgtcttgacttcattctcctaaggatcagttttaatagtgaagcataat

SEQ ID NO: 925171 - DNA, 120 bp, Artificial Sequence
  ENSG00000272983_5 (sequence is synthesized)
tactctttgaagcatgttagttttcctgtattggaagtcctaatttgttcctcttttgttaaatttaaaatgtgtatgactcattatattggcatcctgaaataaataactctttgtaat

SEQ ID NO: 925172 - DNA, 120 bp, Artificial Sequence
  ENSG00000272983_6 (sequence is synthesized)
ccagacattttgattaatcagaaaattacactaacatcctagtcaattaaatgtctatgcagcactgtggtcccactttgcagagtgactataattgccttgctttgccattagtaattg

SEQ ID NO: 925173 - DNA, 120 bp, Artificial Sequence
  ENSG00000272983_7 (sequence is synthesized)
ttctagagtgtgaaataattgtaagtgtatgaaagctcttgtagagagaacttcacctaggcttgtggcattcactattaaagcaatgagtgccttctggggacagtcagctcaactgac

SEQ ID NO: 925174 - DNA, 120 bp, Artificial Sequence
  ENSG00000272983_8 (sequence is synthesized)
ttcaaatttttgcagagtgtcatcacaaacactaagtatagatttcagtttgaaaaactttaaatttaccttttattgcagtgtttggtggtataaatgcagctaaaagcatgagttaac

SEQ ID NO: 925175 - DNA, 120 bp, Artificial Sequence
  ENSG00000272983_9 (sequence is synthesized)
aaagtgagatttagaaaggaaatgtcattgactgcctgagctatgtacttcatggaatatgtttttgtaataaagcccctagaaaatcgggaaacttatgaaacaagctttacatatgta

SEQ ID NO: 925176 - DNA, 120 bp, Artificial Sequence
  ENSG00000272983_10 (sequence is synthesized)
tatgcatacatatatgtttaaaacttatattggactaaggttagaatacttagtgaggtctaaaatgacaaatggggtgtgagaatgtaagcaaagtaaacaaggactgtcagttcttaa

SEQ ID NO: 925177 - DNA, 120 bp, Artificial Sequence
  ENSG00000272983_11 (sequence is synthesized)
tttattagcagcacatgctcaccaggaacccgttgtcttaaagccaatcccctgagaacaaacagcattgagtctgaaattcaaatttcccagaatggaaaatgatgagccctagaattt

SEQ ID NO: 925178 - DNA, 120 bp, Artificial Sequence
  ENSG00000272983_12 (sequence is synthesized)
tagagtcttgtcattaaatttgcaaagttcagttacaccacagcccagctacttaccaagtgccttattactcttctctttgggcctacttaacccaactaaagaatcagggagtcagac

SEQ ID NO: 925179 - DNA, 120 bp, Artificial Sequence
  ENSG00000272983_13 (sequence is synthesized)
taaatatccataaaggtcctcctaaagacacatcctctggttcattttgaatatctaacttaacattctgtccctgcaggtgttcttttttatagcatcattttagagctgtagcctatc

SEQ ID NO: 925180 - DNA, 120 bp, Artificial Sequence
  ENSG00000272983_14 (sequence is synthesized)
tgcagaggaagagctacaggcaggtttggagtgcatgagttcattacaaataccgtgttttataaattgatgccagtgttcttgacctgtcttgtgaacaactgggaccttatttcctgt

SEQ ID NO: 925181 - DNA, 120 bp, Artificial Sequence
  ENSG00000272983_15 (sequence is synthesized)
gtcactctctcccctttgcatcttaacactttcagctagtcttagaggtttccattgagttctgaggacagactttcagaatcctcattctcttgcttcctttcctccagagatatttct

SEQ ID NO: 925182 - DNA, 120 bp, Artificial Sequence
  ENSG00000272983_16 (sequence is synthesized)
gttcattattgtccttattatgtgttttttttttctgattatgaggcaactaaaatcatctgattattgatcactgtgttgaacctctaactgtatttcttcaatggtttgatatatttt

SEQ ID NO: 925183 - DNA, 64 bp, Artificial Sequence
  ENSG00000272983_17 (sequence is synthesized)
gaacctctaactgtatttcttcaatggtttgatatatttttcctttttttgagatgaattctca

SEQ ID NO: 925184 - DNA, 120 bp, Artificial Sequence
  ENSG00000272983_18 (sequence is synthesized)
ctcccaaaatgctgggattataggtgtacaccaccgcacccagctgacatatttttcatagttaatattgctagtcagtatgagtttttaaatgtgcatatttcgtttactatttttctt

SEQ ID NO: 925185 - DNA, 120 bp, Artificial Sequence
  ENSG00000272983_19 (sequence is synthesized)
tcttccttcaagcctctgaaaatattgatggtgtctcaaaattaataatttattgattgaaaaaattccattgatctattcatatttatttataacgtaccaaatctagtgcaataagta

SEQ ID NO: 925186 - DNA, 120 bp, Artificial Sequence
  ENSG00000272983_20 (sequence is synthesized)
gtcccaggaatttggttcccatttgggagttatacttgaatttcatttataaacccaatttctctcctctggcacatgtattcataatcatcttagcatgcttttagttgttacagatga

SEQ ID NO: 925187 - DNA, 120 bp, Artificial Sequence
  ENSG00000272983_21 (sequence is synthesized)
ggtaactgcagtttgatgtttactctacactctttttcacctgcaaatgttagctagagctgcgtggtcctataagtttgctgtacccttgataaaagaacttacattttataatcattg

SEQ ID NO: 925188 - DNA, 120 bp, Artificial Sequence
  ENSG00000272983_22 (sequence is synthesized)
ctatggctgtactggatcgtggatccataactctacaggtttgtcaaacactaccaaatgctacaccacaaacactgatctttattctttgcttattaaaacaagcaaccaaccaggtta

SEQ ID NO: 925189 - DNA, 120 bp, Artificial Sequence
  ENSG00000272983_23 (sequence is synthesized)
atgtattccaagaggaaaaagaaattgaccaaactaactttggaaaatggtaatttgactgcataaggtttacacaaactgagctgtgtgtaaacacggtatctagttggtaattttatc

SEQ ID NO: 925190 - DNA, 120 bp, Artificial Sequence
  ENSG00000272983_24 (sequence is synthesized)
acagggacaaaagttaattctgacattacttttcattttcatttacactaggctagagaaaatgaataagttgtagagaatgtgagctagattcctcactgttacagaaggaagttataa

SEQ ID NO: 925191 - DNA, 120 bp, Artificial Sequence
  ENSG00000272983_25 (sequence is synthesized)
gttagaaagggtacaagactagaaaaaatcctgtggtgccagattagagttaaaaatatcaatatatacgcagatagatatgtagataagatagactcacagagagatggtagttaggca

SEQ ID NO: 925192 - DNA, 120 bp, Artificial Sequence
  ENSG00000272983_26 (sequence is synthesized)
gatagatagatagacagatacatatacatagagattgatagatgatgtatatacatgggttaggacacactattgcttgttctgtctgctaagagatacatgcatcccgtaagcaatgag

SEQ ID NO: 925193 - DNA, 120 bp, Artificial Sequence
  ENSG00000272983_27 (sequence is synthesized)
cataaatcttggtttctaaataacattctccaatataatgattcagatctctggagcaatgtttgcttctaggactggggcagtgaaaacataagatgatcctggagcatcctgatgtgc

SEQ ID NO: 925194 - DNA, 120 bp, Artificial Sequence
  ENSG00000272983_28 (sequence is synthesized)
ttaaatgaatgagaaggaagagactaatctttcccatggaagaatttcaaataatttatgtagaaaacatgagggcaaagaaaatcaccattagaacactatagtgatagtggctgttgg

SEQ ID NO: 925195 - DNA, 120 bp, Artificial Sequence
  ENSG00000272983_29 (sequence is synthesized)
caagatccaatgagggacccatattagtgggtgaaacttgaggaggaaacagggtatttgcaaagcctgaaagtatctttaaccgaatatttactaattaccatggttgttttaatatac

SEQ ID NO: 925196 - DNA, 120 bp, Artificial Sequence
  ENSG00000272983_30 (sequence is synthesized)
actcacaaatatattgttatttctgccttaaagaggtggagtttaattttcctctccttaagtgtgggctggatttagtgactcaattttaacatatagaggatggaagggaaaaataac

SEQ ID NO: 925197 - DNA, 120 bp, Artificial Sequence
  ENSG00000272983_31 (sequence is synthesized)
ctcgcagaggagcaacctggcagacacaagctaaaccgagtgattgcggttcatgtcaccagtgatgccttatccccataggatgtgatgaaaaggccacctcacctctgcaacattctt

SEQ ID NO: 925198 - DNA, 120 bp, Artificial Sequence
  ENSG00000272983_32 (sequence is synthesized)
ccctcaaatccataatcctagtctagtcagacaaacataaaccaagggaactccacacatatccaactggttttcagcaaaagtgccaaggtcatgaaaaacagaaaagattgagacact

SEQ ID NO: 925199 - DNA, 120 bp, Artificial Sequence
  ENSG00000272983_33 (sequence is synthesized)
gtcacagagtcaaagacactaacacatcatgatgagcaaacatggcacagtaccctgtattggatcctggaaccaataataataatagaaaagtggcaaaatccaaatgaattgtatagt

SEQ ID NO: 925200 - DNA, 120 bp, Artificial Sequence
  ENSG00000272983_34 (sequence is synthesized)
ctacttatagtattataccaatgttaattcttcttagtgttgttaaatatattatagttacatgagatgttaaccttaggggaagttaaaggcatattgaaaccatccacactatctctg

SEQ ID NO: 925201 - DNA, 120 bp, Artificial Sequence
  ENSG00000272983_35 (sequence is synthesized)
ttgaaaccatccacactatctctggaactcttctcaaaatctaaaattacttcaaaataaaaattttttaaatcaggaaagaggctaaagcgggctgggtgtggtggctcatgcctgtaa

SEQ ID NO: 925202 - DNA, 86 bp, Artificial Sequence
  ENSG00000272983_36 (sequence is synthesized)
gccaatgttaaccgggcatagtggtgagtgcctataatcccagctactttggagggtgaggccggagaattgcttgaacccaggag

SEQ ID NO: 925203 - DNA, 120 bp, Artificial Sequence
  ENSG00000272983_37 (sequence is synthesized)
gtggaggttgcagtgagctgaggttgcgccactacactccagcctgggtgagagaaaaataaaagaggctaaagcatcaaaagggggagcagggaagcagggctctcttttgtcttaata

SEQ ID NO: 925204 - DNA, 120 bp, Artificial Sequence
  ENSG00000272983_38 (sequence is synthesized)
aagggggagcagggaagcagggctctcttttgtcttaataaggaagtctgagaagttctggcaccattgtcatatgtttctagcagagcagaatgccagggctgggccatgtctggggaa

SEQ ID NO: 925205 - DNA, 120 bp, Artificial Sequence
  ENSG00000272983_39 (sequence is synthesized)
cagcctcaggatagagtagacagcatataagggaactgaggccagaccccaggaagaacaaaaaatatatatttatgcagagagaacaatataaacaagcttctactgctctgatgataa

SEQ ID NO: 925206 - DNA, 120 bp, Artificial Sequence
  ENSG00000272983_40 (sequence is synthesized)
atgtgagatgattcacaggacactaattcatatctactcttaccatcagaaaatataaacactattaaaacaaaatgtttacatagatccaagcttatattgtgaaaatagaacttctca

SEQ ID NO: 925207 - DNA, 120 bp, Artificial Sequence
  ENSG00000272983_41 (sequence is synthesized)
ttgttctctacatgggggtgtgtacaacactggtggaccccgcaagcttgctcaggtacaactcaggtacaggatcatttgggaaccctgagcatggcccctgagccaatgtataacatg

SEQ ID NO: 925208 - DNA, 120 bp, Artificial Sequence
  ENSG00000272983_42 (sequence is synthesized)
attggtcaggctggttctgccttgaataacacagattccactttagctgagagaaggtaatatttttttaaattccattttggtttatctacactgttttagaatgtatgggtttctcta

SEQ ID NO: 925209 - DNA, 120 bp, Artificial Sequence
  ENSG00000272983_43 (sequence is synthesized)
gatcctctgttacttcaggtgtgacattttatgcacgtcacttgttgcagcccactggtgtccacattctgccatgtgatgtggaggatcctcacctccatgtaggcccatttctccttc

SEQ ID NO: 925210 - DNA, 120 bp, Artificial Sequence
  ENSG00000272983_44 (sequence is synthesized)
tcactttacaacataatttacatgcatgaagaactatatcagaccatggagtaatttttgcttcaatcatcaaacacagtttagaaaaactcaagaaggccagtctgtcgtgtttatcca

SEQ ID NO: 925211 - DNA, 120 bp, Artificial Sequence
  ENSG00000272983_45 (sequence is synthesized)
tgtttttattatttctatttttcttcattcctgatgttatgtttccttattttatcattttgtttctgaattaagaacttccattagccacacctttaagaaggttgctgtgtccttcct

SEQ ID NO: 925212 - DNA, 120 bp, Artificial Sequence
  ENSG00000272983_46 (sequence is synthesized)
tgagtcccaggtccccctggcagcccacagtgtggatctgggatacacagggtgagcacaggctgtaggagttcttgaaattctggcaggggttctgcacttgacctaagaggtaaggca

SEQ ID NO: 925213 - DNA, 120 bp, Artificial Sequence
  ENSG00000272983_47 (sequence is synthesized)
ccagcacttctgaaaccagacagaattggatggaagctgtattttaaggtgattgtctgtatttatgaggattaatcttttggataatctggaaggcctgggggactcactggaaagata

SEQ ID NO: 925214 - DNA, 120 bp, Artificial Sequence
  ENSG00000272983_48 (sequence is synthesized)
tggtaataatttcaataaatatttaagggctataccaagttgaggctggtaggaccagggagaagcagctgcatgctacatattgagatcatctaaagacagcaaattgatgttttacat

SEQ ID NO: 925215 - DNA, 120 bp, Artificial Sequence
  ENSG00000272983_49 (sequence is synthesized)
gaggttgattttgaagagtaaggaggcatatctggtccccagtctcatctctggaaagaactgcaccagacccaatccaccctaattacctgttctctcctgattgtgaagtctatgaaa

SEQ ID NO: 925216 - DNA, 120 bp, Artificial Sequence
  ENSG00000272983_50 (sequence is synthesized)
agaaacacataggtcattttcagaaaatgaagacatggtgttagtagcaaaatctcactgtggtgtgaatgagcatttatgaactgtcaggaaggagcccttcattgctctgttgtcaag

SEQ ID NO: 925217 - DNA, 120 bp, Artificial Sequence
  ENSG00000272983_51 (sequence is synthesized)
aatggcagacactaagagctcagccagggctttgacttaagctccatgtgaataaccttggcctatgctccctggacatgcagttcactgtccgcagagtgtggccagtttgtctgatgg

SEQ ID NO: 925218 - DNA, 120 bp, Artificial Sequence
  ENSG00000272983_52 (sequence is synthesized)
gaggaatcacatgcactgtgagtcaccccttgcagcaagaagtccacaaacaggactttttcctggcaatagtaagtgaggtcagctggggtgtggagctgcccaagactggctgcacac

SEQ ID NO: 925219 - DNA, 120 bp, Artificial Sequence
  ENSG00000272983_53 (sequence is synthesized)
tccagggatgggagttttagtgccctggagggagcctccacctgtgactgctttagcactgccctgagaaccatggtccacatggcgcctgtgagcagagatgggggaaagaggagacat

SEQ ID NO: 925220 - DNA, 120 bp, Artificial Sequence
  ENSG00000272983_54 (sequence is synthesized)
cactgggctgcagaggtcaacagggttgtggaagtgtcttttattgcaattaagttttctagtcatgaaacctcttcgaggtatagaatcagctctgaaattctcaaagtgttttgatca

SEQ ID NO: 925221 - DNA, 120 bp, Artificial Sequence
  ENSG00000272983_55 (sequence is synthesized)
tagtatttaaggatttatttttttaactgagatttacattactatgtatttgcagtaatgtttttgttaaaagttgtatcgtaatgtatttagccagaacttagtgtctgtgagaaagaa

SEQ ID NO: 925222 - DNA, 120 bp, Artificial Sequence
  ENSG00000272983_56 (sequence is synthesized)
aagatactagaacttcttactaccttctaagatataaagtttaaaattatataatgtaaccagtgacttccctgttttaaaaaatcacatactcaaaaaaataaacttactgtctgtata

SEQ ID NO: 925223 - DNA, 120 bp, Artificial Sequence
  ENSG00000272984_0 (sequence is synthesized)
ggccactgcacttatgcacttgttttacttgtgtctccttagccctgtcattctccaatccaaacatctcaagtttcctcattggtttccacaaaaatgccattcacaatctgggcaaag

SEQ ID NO: 925224 - DNA, 120 bp, Artificial Sequence
  ENSG00000272984_1 (sequence is synthesized)
tatcatttctcccatgcatagcacaacaaacttacaaattcatataagatcttcctattagctctggtcttgttgccaccccacctcccaacacttctctcaacatttctcattctcttt

SEQ ID NO: 925225 - DNA, 120 bp, Artificial Sequence
  ENSG00000272984_2 (sequence is synthesized)
ctgttctccattcttatccccttccatgcgtccaaattcttccaccttacatataaaaagcaattcacttgccatgattcctttccccaagccccaaactttctaccacgtgcccagcag

SEQ ID NO: 925226 - DNA, 120 bp, Artificial Sequence
  ENSG00000272984_3 (sequence is synthesized)
acaaaagaactatttaatgtaattcatcatctttagaagaaaattgtgattataaatggcatactttttccaatgtatgtaatatttctggaaattgaataaaagtatctcaaaaccccc

SEQ ID NO: 925227 - DNA, 120 bp, Artificial Sequence
  ENSG00000272986_0 (sequence is synthesized)
agacctggcgaaatacctggcggcgttttgtcgtgtaaccgccaactttatcggtagcacgaaggcacaaagatctgggttgaagaagaggcgaaagctaattttaaaaaagcacctccc

SEQ ID NO: 925228 - DNA, 120 bp, Artificial Sequence
  ENSG00000272986_1 (sequence is synthesized)
tgcccccgggtattaaactgtaccatttgcctttcacacactgcaacttcaaccgttgattcactgtttggagtattgagctctttatgtgagaaaccaaaggtgggtgtcttccttcca

SEQ ID NO: 925229 - DNA, 120 bp, Artificial Sequence
  ENSG00000272986_2 (sequence is synthesized)
ccacctcttttgttcccgtcttgtgcgctgtactgaaatcctgtatttgctttgactttaattccctggttttctagtgccgcgggtgcgcatgagtgcattttaaatcaaacagcttag

SEQ ID NO: 925230 - DNA, 120 bp, Artificial Sequence
  ENSG00000272986_3 (sequence is synthesized)
aggtcgacagttttctctttcacagtgcccgtgtctcgctagtaattagccaccgttgctttgagaattcgaatcaatgattactgatccagtaattcccttaagtaaacatttctttcg

SEQ ID NO: 925231 - DNA, 120 bp, Artificial Sequence
  ENSG00000272986_4 (sequence is synthesized)
gcaataaagacaatttccagttactctcatggttctttatcctggattcctagctgattagccttgtgtttaatgctggcatagaagccatgttgactcataattaaaaatcactgttgt

SEQ ID NO: 925232 - DNA, 120 bp, Artificial Sequence
  ENSG00000272986_5 (sequence is synthesized)
gtaacattttgcccacctgctttttcctcttctctgttcagcccttccctgtgtagaggaagttgtacttctttgaaaggaaaagtaaacatttttattactgttgttattctctgtaaa

SEQ ID NO: 925233 - DNA, 120 bp, Artificial Sequence
  ENSG00000287562_0 (sequence is synthesized)
ggcaacaagagtgaaactccttctcagtcttggttacctctggggcttgacgggccctgtcctgccccacctctctctacagcctctggccatttattttagctgcccctccccacacac

SEQ ID NO: 925234 - DNA, 120 bp, Artificial Sequence
  ENSG00000287562_1 (sequence is synthesized)
acaccagcctctccaggcccctgcatcacagtcatctttctaaagcacagtacagctcagcctgttgaagaacctgccttggctcctcgttgcccagaaattcaatgtagacatccttgg

SEQ ID NO: 925235 - DNA, 120 bp, Artificial Sequence
  ENSG00000287562_2 (sequence is synthesized)
taggcattcagggtcccttctggtctggcccaccctgccttccacgcccatctcccgccagttctactctcagcaactccattgcctctcagctcccaccaggcctcatgttccacatcc

SEQ ID NO: 925236 - DNA, 120 bp, Artificial Sequence
  ENSG00000287562_3 (sequence is synthesized)
ctggccttgctcaagttattctccttgttttgagcgctcgtcctccccacttttccacctggcaaaatcctcctcattcttagggacccagttagttcctccatgaagacttccccggca

SEQ ID NO: 925237 - DNA, 120 bp, Artificial Sequence
  ENSG00000287562_4 (sequence is synthesized)
aactgtgtccccccaccccaggcttctgtcataaaccacttgtcattaatcacttaacagttatcacattttgtcacagccagccagttcctgttcagtgagtagaggaaagaaaacatg

SEQ ID NO: 925238 - DNA, 120 bp, Artificial Sequence
  ENSG00000287562_5 (sequence is synthesized)
gactttgttaccagactatatgatggaatctcagcttggctactcaccagctatgcgaccctgggcaagttacttaacctctgagctttggttttctcatctactaaatggggataatgc

SEQ ID NO: 925239 - DNA, 120 bp, Artificial Sequence
  ENSG00000287562_6 (sequence is synthesized)
tcatatttaacccggattcctcaccaggcctgcaaagccttgcctgcctcctgtctcctgttgctctccacatctcacccacatcaacgtccctgcccctccttgaacattctcagtcct

SEQ ID NO: 925240 - DNA, 120 bp, Artificial Sequence
  ENSG00000287562_7 (sequence is synthesized)
ttcttgcgtccctgcctttgcacctgcccttctctacctggaatgtttccttctcattccattctccacctcatttccaatgtcacctcctcagagaggccctctgcaaccaccttctct

SEQ ID NO: 925241 - DNA, 120 bp, Artificial Sequence
  ENSG00000287562_8 (sequence is synthesized)
aaatcccccgcctggttttgcttcatcttactttctgtttattttcttctagggcttatcccaacctgaaatttccctactttctggcttgcttgtcagctccgtgagtgtggggctctt

SEQ ID NO: 925242 - DNA, 120 bp, Artificial Sequence
  ENSG00000287562_9 (sequence is synthesized)
ttctctgggaactcagaagatgaacagacttgatacgtgttagtcctggcctctcctcttcctccaagccacacctgctcatctgtgagccccttcagggcagggcatcatgtcctcctc

SEQ ID NO: 925243 - DNA, 120 bp, Artificial Sequence
  ENSG00000287562_10 (sequence is synthesized)
atttttgctttcttgaccctgagcagtatgcctggtccatagtgaacccttagcctgtatttgctgcctgcctgcctgtcattgtcttccccaaccttttcccttagcagcccttggtga

SEQ ID NO: 925244 - DNA, 120 bp, Artificial Sequence
  ENSG00000287562_11 (sequence is synthesized)
tctcctgatggtttctaacacatgctgcaggttacatgtggagctgagcctgatatctcccagagtgggaatgtccaggggtggcctcatgtttctgccacttactttgctttccagccc

SEQ ID NO: 925245 - DNA, 120 bp, Artificial Sequence
  ENSG00000287562_12 (sequence is synthesized)
aggacaggattttgagtggagagtttggggtatattactggctgtagcattagggaccttggccacgccctttgcattaccctgcgtggtaggacaatacctagaatggtctggtcaaac

SEQ ID NO: 925246 - DNA, 120 bp, Artificial Sequence
  ENSG00000287562_13 (sequence is synthesized)
ccgagagacttacagaaggtcaagaggacacagcgatgctcataggcccctctcagtggggagattgggctgtgacttgttcaggcggagtggggtccacacagtctgatgaagcttcat

SEQ ID NO: 925247 - DNA, 76 bp, Artificial Sequence
  ENSG00000287562_14 (sequence is synthesized)
tcaggcggagtggggtccacacagtctgatgaagcttcatttggttcagaggaaaattgctctctgaacacagacc

SEQ ID NO: 925248 - DNA, 69 bp, Artificial Sequence
  ENSG00000287562_15 (sequence is synthesized)
atctcaggtgacgcccggactccatcccttcttaagctgacccaggggtctggtaattgagtgagtgtg

SEQ ID NO: 925249 - DNA, 120 bp, Artificial Sequence
  ENSG00000287562_16 (sequence is synthesized)
tcttaagctgacccaggggtctggtaattgagtgagtgtgatggctcaatgttacccacctcctctggcatcaggatgtagggaccagtccgttggtatgcagaggttgtggtacccagc

SEQ ID NO: 925250 - DNA, 120 bp, Artificial Sequence
  ENSG00000287562_17 (sequence is synthesized)
gtgctcactgagcaaatgaagcaggattcactccctgctgggagagggagattagggttagggagcacagtgttgtgctctcagatttgaggatttatcaataaaaattcaaaaagtcat

SEQ ID NO: 925251 - DNA, 120 bp, Artificial Sequence
  ENSG00000287562_18 (sequence is synthesized)
tttgggaactggcataaaggttcgtggcatcttattttgtcaagtaaggacacaggataggtaaaaaattagtttcctactattgtatcctaaaaaatgaatattttaataccaaaaatt

SEQ ID NO: 925252 - DNA, 120 bp, Artificial Sequence
  ENSG00000287562_19 (sequence is synthesized)
gaaaacaagaatagttcttccctagaaaggccgaacagcattcttatgctgacattttgagctatggacaggggagaacaaggtcagaaaccagctcctgggaattgttgggtaaggagt

SEQ ID NO: 925253 - DNA, 120 bp, Artificial Sequence
  ENSG00000287562_20 (sequence is synthesized)
ttggagagcgtgtgcgtgtgaagggagatagtgttgaagcaggttgctggcctggtggcatgattggagggaaagggcctgaatatttcctggattagtccagaatatttcctggattag

SEQ ID NO: 925254 - DNA, 120 bp, Artificial Sequence
  ENSG00000287562_21 (sequence is synthesized)
tttagaaattcttcagtcccctctatcacttaggcttcctgtggattaactcgttttctctttgaaagtgtaaacatcccatgggcagggtccatcagagaacctcgacaagtgttgctc

SEQ ID NO: 925255 - DNA, 120 bp, Artificial Sequence
  ENSG00000287562_22 (sequence is synthesized)
tgtgtacaacctcccgggagggtgtctgtacaggtgaaatctggctgggataaatgtcaaggacatgtgtggggaaaggagagggaggaaagaaaccaacccttgctggtccttactgtg

SEQ ID NO: 925256 - DNA, 120 bp, Artificial Sequence
  ENSG00000287562_23 (sequence is synthesized)
ttcctgcactacacttagggctttttcatgagttaacaaagagctgctgcttatctccattttacagatgagaaaactgaggcccagaaagactcagtgatttgcccaaggtcacacagc

SEQ ID NO: 925257 - DNA, 120 bp, Artificial Sequence
  ENSG00000287562_24 (sequence is synthesized)
cagtgttggaaccagcatttacattcaggcctatgtgaactcaagttcagagcttttatttctccagcaggccaaggcacaaaaaattttaaaaacaacttgagtcccatcttcctgttg

SEQ ID NO: 925258 - DNA, 120 bp, Artificial Sequence
  ENSG00000287562_25 (sequence is synthesized)
gcatagtgtctggcagacatctttttgattcgttctgtccatctggaaacactgtggctgactctgtgttggcagctcccaggcccttggaggggaggttcaaaactcacattttttttt

SEQ ID NO: 925259 - DNA, 120 bp, Artificial Sequence
  ENSG00000287562_26 (sequence is synthesized)
acatttttttttaacttaagagaattctggcagagtacacataaaagttgccattttaaccattttaaaatgttttatttatttaggagacagtctcactctgtcacccaggctgcagtg

SEQ ID NO: 925260 - DNA, 81 bp, Artificial Sequence
  ENSG00000287562_27 (sequence is synthesized)
tctgggattacaggcgtgagccctgcacctggccttaaaaagtgtataatttagcagcatttagtacattgaaaatgctgt

SEQ ID NO: 925261 - DNA, 90 bp, Artificial Sequence
  ENSG00000287562_28 (sequence is synthesized)
gttcaaaaccagcctgggcaacatggggagaccctgtatctacaaaaaaaaaatacaaaaatgagttcttgtgatggtgtgcccatgtag

SEQ ID NO: 925262 - DNA, 74 bp, Artificial Sequence
  ENSG00000287562_29 (sequence is synthesized)
gaggtgggaggactgcttgagctcaggaggttgaggctgtggtgagcggagatcatgccactgtgaaaagaaaa

SEQ ID NO: 925263 - DNA, 120 bp, Artificial Sequence
  ENSG00000287562_30 (sequence is synthesized)
aaatgcttcttgactgtcaccaccccccagttccacaccgctcctcagtccctgactcccagcccctggcagccagcaatctgcattctgtctctaaaaatctccccattctgaacattt

SEQ ID NO: 925264 - DNA, 120 bp, Artificial Sequence
  ENSG00000287562_31 (sequence is synthesized)
ctgcattctgtctctaaaaatctccccattctgaacatttcctataaatgggattgtacactatatggccttttgtgtctggcttcttctactcagcataatgttttcaaggttcatcca

SEQ ID NO: 925265 - DNA, 120 bp, Artificial Sequence
  ENSG00000287562_32 (sequence is synthesized)
ctgaataatattccattgtatggatatacccacattttgtttatccattcatcagtggtggacataggggttgtttccactgttggggttgtgaatagtgctgctgtgaacattcttgtg

SEQ ID NO: 925266 - DNA, 120 bp, Artificial Sequence
  ENSG00000287562_33 (sequence is synthesized)
caagcttttgtctgaacaagtgtatttaatttgttttagtctatactaagagtggaatttcagggtcctgtcgtgcttctgtgtttagcttaaggtggaactgccaaacttccacggcag

SEQ ID NO: 925267 - DNA, 120 bp, Artificial Sequence
  ENSG00000287562_34 (sequence is synthesized)
ctgtacccttttacattcccactagcaatgtgtgagggatctcatttctccacatcttcaccaacacttatatttcattaaagattttttattataaccaccctagtgggtgtgaaatga

SEQ ID NO: 925268 - DNA, 75 bp, Artificial Sequence
  ENSG00000272989_0 (sequence is synthesized)
cctcacaagatccagaccccacaagatccagacctcggctatctggcttctcttttttttgcgacagagtctcaa

SEQ ID NO: 925269 - DNA, 120 bp, Artificial Sequence
  ENSG00000272989_1 (sequence is synthesized)
cttctatacccgcagccccttcctttaccctcaggctgcctcagtctccacactggggcccagagctgggctggactcagcgcagtcagaacctcgccttgcacgtggcgaaggagcggc

SEQ ID NO: 925270 - DNA, 120 bp, Artificial Sequence
  ENSG00000272989_2 (sequence is synthesized)
aggcaggcaggcaggcaggcaggcaagcaggacagccagcttcctcctagtccgcagtttcgcggagcagcctggaaagggaggcccaggcttccctgtctcgtcgcacgtgtgtctgca

SEQ ID NO: 925271 - DNA, 120 bp, Artificial Sequence
  ENSG00000272989_3 (sequence is synthesized)
gtgtctgtgctatctcccaggggcctggatgtcgatggaatgcctgagggtggagagagctgtggctgaggcctaccctggcggcctcagcatctgtggagatgtgtagagacagggaga

SEQ ID NO: 925272 - DNA, 120 bp, Artificial Sequence
  ENSG00000272989_4 (sequence is synthesized)
gtgaatggggaccaacctcaggagatgctgggtcccagaagcaccatgtgcttctcctttggtgagacttaattactctctaaaatgtaaggctactcccacttatcaaattatagatga

SEQ ID NO: 925273 - DNA, 120 bp, Artificial Sequence
  ENSG00000272989_5 (sequence is synthesized)
atagcagcaggctggttgctcttctcagcttcagctgtagccaccccagtttcaggaggaagtgcccgtggttcctggggcctggaagtgccgctcaactctgctgccagacaagtgcgg

SEQ ID NO: 925274 - DNA, 120 bp, Artificial Sequence
  ENSG00000272989_6 (sequence is synthesized)
gcgtggtggactgcactgggtacactgctgtaccggccaccaccctccggccactctcagccggtgagtgctctgcggggccatctggccacgtgttctgtgactgggtcatttactctg

SEQ ID NO: 925275 - DNA, 120 bp, Artificial Sequence
  ENSG00000272989_7 (sequence is synthesized)
ctgcaacctctctttctcctacctacatcgtgttctggataaaggttttggctcataatgtccgaccagaggtggacaaagtggtgtgggacctgccgtaagaaacagggagcatggtgc

SEQ ID NO: 925276 - DNA, 120 bp, Artificial Sequence
  ENSG00000272989_8 (sequence is synthesized)
ggggagagaagcctgtgccttatggagactcggggcaccttcaggaagcagggtcaacagcagcaggccgctagggagtcgggagagctcggtgatgtcacgaggggcatcagactcttc

SEQ ID NO: 925277 - DNA, 120 bp, Artificial Sequence
  ENSG00000272989_9 (sequence is synthesized)
cctgcaggctggcgggactgatgggctctcgttccaatggaggtacaatgggacttccggggctgtgatgggaagggcggaggagctgccgatggtcccagtgccatattagtgtcacat

SEQ ID NO: 925278 - DNA, 120 bp, Artificial Sequence
  ENSG00000272989_10 (sequence is synthesized)
tctgaggggcagccctgtgccggacggcagctgctacctctccctctgcccctttattacttgaatctcttcgttgtgccctgtctaggcacggtcgtccgacagcaggcagcccactgc

SEQ ID NO: 925279 - DNA, 120 bp, Artificial Sequence
  ENSG00000272989_11 (sequence is synthesized)
cctcccagagctcactgtctagcccagggtgacacagggtaaccgtgggcatgacttgggccgggaagtgagaggctcgattccatcacatgtaaataaaaatactcattttcaatctaa

SEQ ID NO: 925280 - DNA, 120 bp, Artificial Sequence
  ENSG00000287560_0 (sequence is synthesized)
ggagacaggccccgcctcatggacttacccctagcatctctctgcctcaaaggatgctggccagctctgtggtgggagcagcctgaaagtccctgggatctgggaacttttatcgttctg

SEQ ID NO: 925281 - DNA, 120 bp, Artificial Sequence
  ENSG00000287560_1 (sequence is synthesized)
aggaacaagaaaaacagagacacctggaaaagctttgcaggaggagtggccacaggtcacctggtagcatgtacatgtctgcagggcccagctgagttctgggggatggaaggtggctcc

SEQ ID NO: 925282 - DNA, 120 bp, Artificial Sequence
  ENSG00000287560_2 (sequence is synthesized)
aggaaatggtgacctgaggaacagatggccccagagccccatgaaacctgtaaaggagtctagagccctaagttgcttctctcaaaggtcctgctgatttcctgattaaaagattaaaag

SEQ ID NO: 925283 - DNA, 83 bp, Artificial Sequence
  ENSG00000287560_3 (sequence is synthesized)
ctcaaaggtcctgctgatttcctgattaaaagattaaaagagccgggcacagtggctcatgcctgtactcccagctgtttgca

SEQ ID NO: 925284 - DNA, 120 bp, Artificial Sequence
  ENSG00000287560_4 (sequence is synthesized)
ccatcacactccagcgtgggaacaagagcgagactttgtcacacacacacgtacacgaagagtaaaagtgaatcattcccaaaaagaatagatttggatattttctcagaaattttctct

SEQ ID NO: 925285 - DNA, 120 bp, Artificial Sequence
  ENSG00000287560_5 (sequence is synthesized)
tccccattacataaggtggcttttgatcactttcaatgcaatgtactttctgatatgtgatatggatttaaaataactcacaaccaacttattataagaatgcactctcctttaggacat

SEQ ID NO: 925286 - DNA, 120 bp, Artificial Sequence
  ENSG00000287560_6 (sequence is synthesized)
ggacatttgaggaaccacctctgagctcagtattttagcctgaatctaccttcaaatctaaaaagattatcgtatatttttgagcccaaaataggacgaaaagtgttggatttcttgcca

SEQ ID NO: 925287 - DNA, 120 bp, Artificial Sequence
  ENSG00000287560_7 (sequence is synthesized)
gtgttttagtcttcttttcgtcctggcttagagctttactgtggcataactggtgcacagtaaactgcacatctttaaaacctacacggtgaggagttctgacttatctccacaccagcg

SEQ ID NO: 925288 - DNA, 120 bp, Artificial Sequence
  ENSG00000287560_8 (sequence is synthesized)
agacttagaccacagtcagaaaaacgaggctcctatcaccccagagttctccgtcactcgctctccgcgagccccttgccaggaagagctgcttcctggcattatagatgtgtctgcatc

SEQ ID NO: 925289 - DNA, 120 bp, Artificial Sequence
  ENSG00000287560_9 (sequence is synthesized)
ttcttgaattgtgcaacatggaatcatacagtgcctgctgttctgctgccagctgttcttgctcagtgtgatgtgttcgagattcagcaacacaggacgcatcagcagctgctgcccttt

SEQ ID NO: 925290 - DNA, 120 bp, Artificial Sequence
  ENSG00000287560_10 (sequence is synthesized)
cattgccgagccctcctccattgcaccaatacatcctgattggtctagccattgacttgctggtggatatctaggtcgtttctaggtgttagttgtcacaaataaagctacaataaatat

SEQ ID NO: 925291 - DNA, 120 bp, Artificial Sequence
  ENSG00000287561_0 (sequence is synthesized)
ggcacggaccccagggagagcgcggaggcggccacgcgggtccttcctccacctgggcccaggcacttccggtctcgtaggcgtcggggaaagctctttgcggacttcgctgcgggctta

SEQ ID NO: 925292 - DNA, 120 bp, Artificial Sequence
  ENSG00000287561_1 (sequence is synthesized)
ggacctccgacatgaagggaagcgggggctggaggacgcagagactctccctgggctgctcgaaggccaaggctgtaacgcggctccggtcctcgttttcccgccgtcggtgctggctgc

SEQ ID NO: 925293 - DNA, 120 bp, Artificial Sequence
  ENSG00000287561_2 (sequence is synthesized)
gagatacaccagagcgcgacccggactcaggaccgcccgggtgggggctgcttcgggcattggacacacttcccgggcgcctcgtgaccgcacactcctggcctcacacctcggggtggg

SEQ ID NO: 925294 - DNA, 120 bp, Artificial Sequence
  ENSG00000287561_3 (sequence is synthesized)
tttgcacgagggggggccgagccctgtcgctgagcgacactgaccttcttaaggccacctagctttgggtacaatggatgtctcatactgaattttaatcagcttcttactggaggacat

SEQ ID NO: 925295 - DNA, 120 bp, Artificial Sequence
  ENSG00000287561_4 (sequence is synthesized)
taatgtttgttcaatcttcgttactacaaaaaatactagagtggagtggtaatatccttgtatgtacgtgcacacgtgcaactttctctgtaaatttccagaagtaaaatttctatgtca

SEQ ID NO: 925296 - DNA, 120 bp, Artificial Sequence
  ENSG00000287566_0 (sequence is synthesized)
aggcacactctgatgggtcttgggggagaccaagggtgccctgctcaatgtcagccctgactctgtgccacgtgcactcagctctgccacggaggtgcatggctctgtagacgtggacgg

SEQ ID NO: 925297 - DNA, 120 bp, Artificial Sequence
  ENSG00000287566_1 (sequence is synthesized)
tgagctggggaggaaggtggtcttggagagaaatgccccatggggagctgagacctgtgtgtcatgggatcatcctggatttggcttaaaatccacgtggctgtggaaatcccagggtgc

SEQ ID NO: 925298 - DNA, 120 bp, Artificial Sequence
  ENSG00000287566_2 (sequence is synthesized)
accgaggatctgtgggggagcagggcctcaggggtgacacctcagagctcctgtttacctctttagccaccaggaagacattaggactcccagagggtgactccaggggcaggtggcttg

SEQ ID NO: 925299 - DNA, 120 bp, Artificial Sequence
  ENSG00000287566_3 (sequence is synthesized)
gaggactggccgtgcaaggaggcagcaaaggggcggccatctgcaagctgagggcagaggccttggaggaagcagccctgccagtgctggtaactatcttcagaggccacctgggatgtc

SEQ ID NO: 925300 - DNA, 120 bp, Artificial Sequence
  ENSG00000287566_4 (sequence is synthesized)
agaagcttccaggaaccaggaggtagctgcatctcctgtcccttccctgagtcaccttgctggactccacagtgtggtgcagacaagaagctgcaggggacaacatggaaggaagcgggg

SEQ ID NO: 925301 - DNA, 120 bp, Artificial Sequence
  ENSG00000287566_5 (sequence is synthesized)
atggaggagatggaatgggatgggctctgggcccggccaagcagagcaggatagggctgagagtcatctgagcacaggtggttcaaatggcagagaagctccacgctggagcggggaaga

SEQ ID NO: 925302 - DNA, 120 bp, Artificial Sequence
  ENSG00000287566_6 (sequence is synthesized)
gcttgggctttccggccagaaagcgcaggttttggccacggctcttctgccactcactagatgtgggagtttggaggcgttacccgagctctgagccttactttcctcatctgaaaaatg

SEQ ID NO: 925303 - DNA, 120 bp, Artificial Sequence
  ENSG00000287566_7 (sequence is synthesized)
ggaataatggtagggttaaattaaaccaaatttggtctgaggatgcctctgcactttgagtccaactgcgaccttagcagcaaatgaactgcaggcctagcttaggagtgtacttttgta

SEQ ID NO: 925304 - DNA, 120 bp, Artificial Sequence
  ENSG00000287566_8 (sequence is synthesized)
agaaatagccgagtcttagccaatcacagcagctgagcttctataaatcgcaggtggctgctgagtagtccatgttcaaacacggcaaaccaagctgtgaccaatgagctgtctctgcag

SEQ ID NO: 925305 - DNA, 120 bp, Artificial Sequence
  ENSG00000287566_9 (sequence is synthesized)
ctcacttccattttctgtctataaacactccctgcccacactgtggagtggagctcagcccttggaacctcttctggtctgagggctgcccacttcatgaatcctttgcttaattaaact

SEQ ID NO: 925306 - DNA, 120 bp, Artificial Sequence
  ENSG00000287566_10 (sequence is synthesized)
gtaagtccaggtgaacctcgagctgttctcagccctgaggtttgggtcactccgagagcacttgggtctctgccgaacggcacagatcattctcaggcccttacaaccatccgggtcact

SEQ ID NO: 925307 - DNA, 120 bp, Artificial Sequence
  ENSG00000287566_11 (sequence is synthesized)
ctagaattccttttaggactcctgggctgggctgtggctattcaggactctgggtaagagcccttggagtcacctgggaggtagaatcgccattttctagcagccatcttgaatggcaga

SEQ ID NO: 925308 - DNA, 120 bp, Artificial Sequence
  ENSG00000287566_12 (sequence is synthesized)
ttccctgcagttcaagctggggctgcccaaggggttctggggggtcctgggtgccttccagttgcccctccaggtgcaccccctcctcccccaggacactgaccggcgggggccatcgtg

SEQ ID NO: 925309 - DNA, 120 bp, Artificial Sequence
  ENSG00000287566_13 (sequence is synthesized)
ggggaccttgtgctctctggctctggctggctcagccagtgggagcctgtggggctgggagggaggagggtgtgatgaggcatctccttcccgctgggctcctccccacctctttcctcc

SEQ ID NO: 925310 - DNA, 120 bp, Artificial Sequence
  ENSG00000287566_14 (sequence is synthesized)
ttttccaagtcccctgaccatccctcccctatctctccaggtctcttaaattaccacggtgccagctacatggcccgggtgggtggttccccacactgcctaccccttcatacctcgccc

SEQ ID NO: 925311 - DNA, 120 bp, Artificial Sequence
  ENSG00000287566_15 (sequence is synthesized)
cattacaccctcctggaatcattctcactggaggctgcaccgtttcctgctgcccacgatgaacaaagcaggaaactgtcttttccagacttccccacgaagtgaggttttgacgacctc

SEQ ID NO: 925312 - DNA, 120 bp, Artificial Sequence
  ENSG00000287566_16 (sequence is synthesized)
attctccaagagcaaacccagcccctggagtccgttctttccctgcgcgcgtggacacccctgcagcagtggctccttttggtggccgctcttcagacacgtgctagagagcaatcattg

SEQ ID NO: 925313 - DNA, 120 bp, Artificial Sequence
  ENSG00000287566_17 (sequence is synthesized)
atgacaacgttttctttcaaaaggcccagaaaacaaaattaaatcttgggactcgaagcttcctgggcctgtgccacgaaggcccatgcttagccggtctggtgccaggctctgtgacgt

SEQ ID NO: 925314 - DNA, 120 bp, Artificial Sequence
  ENSG00000287566_18 (sequence is synthesized)
gtggaaaccaggcccaccgaccacacagcagtggctgaggatggctccctcctcggctactctctgaaatggtagaggccactctcatggctgagtggtctccgccgttctgcagaggtg

SEQ ID NO: 925315 - DNA, 120 bp, Artificial Sequence
  ENSG00000287566_19 (sequence is synthesized)
tggataagaacaggagttcctgcttgtctcctaggggtccgtattgaacgttggcaatcagtggaaatcctgtctcaggccctctcggggccccacactgatcattgtatttaaatcctc

SEQ ID NO: 925316 - DNA, 120 bp, Artificial Sequence
  ENSG00000287566_20 (sequence is synthesized)
ccagtgtcctgcagacacctacctcccagaccaaagagggaccttgctggtggccaggaaacaagctgaagcacagagaggagagaaagagacagagttgggtcctcgggtcaccttaaa

SEQ ID NO: 925317 - DNA, 120 bp, Artificial Sequence
  ENSG00000287566_21 (sequence is synthesized)
aggctgtgagactttttgccagggcagggcctggcgggtggtggagatgcaggatgaaggacttaaggagggatcttttactttcagtgtgaaagtgacctgtgtttttatgagggggct

SEQ ID NO: 925318 - DNA, 120 bp, Artificial Sequence
  ENSG00000287566_22 (sequence is synthesized)
agagaaatactcagaatctgagagcaggcagttggagtgggatctcagcaaacttccgtgtctgcatggtcctgcaaccatcgccctggacagaggtctcagctgggtagagatggacgg

SEQ ID NO: 925319 - DNA, 120 bp, Artificial Sequence
  ENSG00000287566_23 (sequence is synthesized)
ttgtcagggcacagcctgtccttagggggtgctaggaatggggattggggtgaagaggagttcaggaaagaggggtgaggcatggggaacctgctggcttagaggatgcaaaggggcagg

SEQ ID NO: 925320 - DNA, 120 bp, Artificial Sequence
  ENSG00000287566_24 (sequence is synthesized)
gcaccccccgcccccgcagcagcggcttctttcagtggcagaggctgactctttttgcagcttctccagcacttgcaaatgcaacttccttgcacccacttcagacactttacagctgga

SEQ ID NO: 925321 - DNA, 120 bp, Artificial Sequence
  ENSG00000287566_25 (sequence is synthesized)
accccttccttcaaggttaggggcccaggcccacagcccctacctccaagtttccacgtttgaagaatcccaaccttttccctttgcctcctcagcctcaggggtgacacctcagagctc

SEQ ID NO: 925322 - DNA, 120 bp, Artificial Sequence
  ENSG00000287566_26 (sequence is synthesized)
ctgtttacctctttagccaccaggttagtaattttacacccatgcaagtgtgtacaggaatcttccggatccaagtggctggtgtgggcgttgtcttctgtctgaaccctggcccttgtc

SEQ ID NO: 925323 - DNA, 120 bp, Artificial Sequence
  ENSG00000287566_27 (sequence is synthesized)
tgtgcagattcctcccctcctgtccgggagagaagagacagtttcgatgtcatgtggagacaggaggctgtggtcaacgaggggaggctgtggtcaacgaggggaggctgtggtgggggg

SEQ ID NO: 925324 - DNA, 120 bp, Artificial Sequence
  ENSG00000287566_28 (sequence is synthesized)
tggcgttctgagtcacttggctggcttgggaatgtgagctgggccaggtgcaccttagagagcctgggtggtgctggggaccttcaggctctggagtcctgggtgaccctgacaggtgca

SEQ ID NO: 925325 - DNA, 120 bp, Artificial Sequence
  ENSG00000287566_29 (sequence is synthesized)
tgtacccacatctccttggcccctgtctctgttgctaatgtccctgcacagaccccccccagccgtcatttacagattcccagcagtgaagcacacgggcttaggttaaaatcactgagc

SEQ ID NO: 925326 - DNA, 120 bp, Artificial Sequence
  ENSG00000287566_30 (sequence is synthesized)
cccttgcacagcggccttctggtcccctctgctgtaaggcaggaccacctgtcagcccctgtcttctggggaccccactaggcctaagagatgaggctgtggggttctgtcttctggagg

SEQ ID NO: 925327 - DNA, 120 bp, Artificial Sequence
  ENSG00000287566_31 (sequence is synthesized)
ccccactaggcctaagagatgaggccggcggcggaggtctggcctggaagagaaatgtggtgagtcaccccaggcctgacagattcactcagacctggtccttctgctcctaggctgagc

SEQ ID NO: 925328 - DNA, 120 bp, Artificial Sequence
  ENSG00000287566_32 (sequence is synthesized)
catctctcagggaccctcctgccctccttcacctctcacctggcctgccccaaccagttctccaggcaagcccaaaccagttccacctggtttgtgactgtgtttggaaagagggtcttt

SEQ ID NO: 925329 - DNA, 120 bp, Artificial Sequence
  ENSG00000287566_33 (sequence is synthesized)
ccggcagcctggggcattttgctgaggccgccccagccgcctagcatagtcgccaataagtccccgaggttctggtgtgctctctggactagtttcctggggtggctgcaacaaattgcc

SEQ ID NO: 925330 - DNA, 120 bp, Artificial Sequence
  ENSG00000287566_34 (sequence is synthesized)
acaaacacagtggtttaaaccacgcaaatgtcgctcccgcagcctgcaggtcggaagtccaaaccaaggtgctggaagggctggttccttccggacccttcaggggagaatctttctgcc

SEQ ID NO: 925331 - DNA, 120 bp, Artificial Sequence
  ENSG00000287567_0 (sequence is synthesized)
gtggaagcagaaatgaaaacactgaacatttactttaaaaaaaatagagaagagattactattaacattgcctttgaaagcttaccgtccatgtgacctgaaccgtggtgggagtcagca

SEQ ID NO: 925332 - DNA, 120 bp, Artificial Sequence
  ENSG00000287567_1 (sequence is synthesized)
caactggattatgaagacggacaaggacatctcctagctctttctgcacttgcctgtggtccactccttgtgctggtgggctgatatctgcagttagagaagagaatcattcccaccttt

SEQ ID NO: 925333 - DNA, 120 bp, Artificial Sequence
  ENSG00000287567_2 (sequence is synthesized)
aaaaattcatattaaaattacaatttattttatgtaaatcaacctcatgtctttagaactaattacagggaaacaaaacgaaaactctcttgtgacaaaaagcatttaagcctatatata

SEQ ID NO: 925334 - DNA, 120 bp, Artificial Sequence
  ENSG00000287567_3 (sequence is synthesized)
taaatataccactgtggtaggacataatgaaagatgatattgatctttattaaaaatatactaatagaagagtatttgtaatccctcatccgcattcaaatgcagacacactgttgtata

SEQ ID NO: 925335 - DNA, 120 bp, Artificial Sequence
  ENSG00000287567_4 (sequence is synthesized)
acagaagtctagaaagatctctagaaagagcagctttgtacagatgttggtgtattgaatgattttctggatgtgtaaattgggatatatctaaaaactgatgctaagggacctgttaat

SEQ ID NO: 925336 - DNA, 120 bp, Artificial Sequence
  ENSG00000287567_5 (sequence is synthesized)
cccttgtcccaatttgcaggttgtgttttcttcttgacctacttcagtctgggagcatggatggagaagtaatggtggactaggaaagtgaattctgtcattaaaggtaaatagagttgg

SEQ ID NO: 925337 - DNA, 120 bp, Artificial Sequence
  ENSG00000287567_6 (sequence is synthesized)
gggaagaggggaaacagctcctcaaatttgcaaagatacttttgacagaaatagttataatactgataacatgttctaaagtaatacattttgagcagtactctaatacctgacacgagg

SEQ ID NO: 925338 - DNA, 120 bp, Artificial Sequence
  ENSG00000287567_7 (sequence is synthesized)
tcatgcagacatgtttaggaatagtggtggggagaagggaagaaagaaaggtcatgtttaaaatattataccctcagtcacacattgttatgccacattattcatcagtctcctaagtac

SEQ ID NO: 925339 - DNA, 120 bp, Artificial Sequence
  ENSG00000287564_0 (sequence is synthesized)
ctcagaagcaatgagttctggttaaaaaaaagggctcgatagacggaaaaaatgaaggcttaaagaactgacaacaaaatattaacatttggcttgtggaattcttacactctcgtaagc

SEQ ID NO: 925340 - DNA, 120 bp, Artificial Sequence
  ENSG00000287564_1 (sequence is synthesized)
agaaaaaacaaatgttatggcaaaaaagtgtctcagacaaatccgtcttggggggaaaaaaattaaaagaatgagaaaaacagacttcggaataaatagacccaaaggaggaagtattga

SEQ ID NO: 925341 - DNA, 120 bp, Artificial Sequence
  ENSG00000287564_2 (sequence is synthesized)
cacccccgaccccaccactattgatcatgaggtgctttgaggggtccgggtttggaggactgaaacaccgtgggatcttggaacagctcttccttgttggtgatcccttattaagaagcc

SEQ ID NO: 925342 - DNA, 120 bp, Artificial Sequence
  ENSG00000287564_3 (sequence is synthesized)
ctccagcctgacaatgctgaagccctggaggttggagccactcaggattggatgctccacgaagccctcaccagaacagatgctggcaccatgcttcctgtacagcccacaaactgcaag

SEQ ID NO: 925343 - DNA, 120 bp, Artificial Sequence
  ENSG00000287565_0 (sequence is synthesized)
aacatattgaaatctttggaattttcaattcaagacataaagcaattactagcttacgataaacaaaacatttctgaagattatctccaaggccctgaaaggtctggctgcttcctatct

SEQ ID NO: 925344 - DNA, 120 bp, Artificial Sequence
  ENSG00000287565_1 (sequence is synthesized)
ttccagtctcatctggaatgatgcttgcaggatttccagcatgtaagatgtgcctttcatcttctgtcatgattatgaggcctccccagccacacagaactgtgagtccattaaaggctc

SEQ ID NO: 925345 - DNA, 120 bp, Artificial Sequence
  ENSG00000287565_2 (sequence is synthesized)
gccacacagaactgtgagtccattaaaggctctgtcttcatcagcagcgtgaaaatggactaacacagtaaattggtaccagtagagtggggagctgctgaaaagatacccaaaaatgtg

SEQ ID NO: 925346 - DNA, 120 bp, Artificial Sequence
  ENSG00000287565_3 (sequence is synthesized)
gaagtgactttgaaactgggtaacaggcaggcagaggtaggaacagttggagggctcagaaaaagataggaaaatgtgcgaaagtttggaaatccctagagacttgttgaatggctttga

SEQ ID NO: 925347 - DNA, 120 bp, Artificial Sequence
  ENSG00000287565_4 (sequence is synthesized)
tctaggctgagatgctgagatggtctcaggtggagataaggaacttgttgggaactgaagcaaaggtgactcattatattttagcaaagtgactggtggcattttgtccctgcccttttt

SEQ ID NO: 925348 - DNA, 120 bp, Artificial Sequence
  ENSG00000287565_5 (sequence is synthesized)
cctgcccttttttgagatttgtctgactttgaacttgagagagagaacttagggtatctggcagaagatatttctaagcaacaaagcattcaagtggtgacttgggtgctgttaaaggca

SEQ ID NO: 925349 - DNA, 72 bp, Artificial Sequence
  ENSG00000287565_6 (sequence is synthesized)
taaaggcattcagttttataagggaagcacagcataaaagtttgaaaaatttgcagcctgacaatgtaatgt

SEQ ID NO: 925350 - DNA, 120 bp, Artificial Sequence
  ENSG00000287565_7 (sequence is synthesized)
ccaaatgttaatccccaagacactatggggagaatgtctccagggaatatcagagacctttacaacagcccctcccatcacaaacctggaggcctgggaggcaaaaatggtttcatgggc

SEQ ID NO: 925351 - DNA, 79 bp, Artificial Sequence
  ENSG00000287565_8 (sequence is synthesized)
aaaggggccaaagtacagcttgggccatggcttcagagggtgcaagtcccaagaaagtcaagaattgaggtttgggaac

SEQ ID NO: 925352 - DNA, 120 bp, Artificial Sequence
  ENSG00000287565_9 (sequence is synthesized)
gtccaggcagacatttgttgcaggagcagacactgatggagaacctctgctagggcagtgcagtagggaaatgtggggtgggcacccccacacagagtcctcattggggcactgcctagt

SEQ ID NO: 925353 - DNA, 120 bp, Artificial Sequence
  ENSG00000287565_10 (sequence is synthesized)
ggagctgtgagaagagggccgccgttctccagatccctgaatggtagatccaccaacagcttgcaccctgcacatggaaaatccacagaccctccatgccagcccatgaaagcagccaga

SEQ ID NO: 925354 - DNA, 120 bp, Artificial Sequence
  ENSG00000287565_11 (sequence is synthesized)
agagaggctgtaccccacaaagccatagaagtggagctgcccaagaccatgggaatctacctcttgcaacagcatgacccagatgtgagacatagagtcaaaggaggccattttggacct

SEQ ID NO: 925355 - DNA, 120 bp, Artificial Sequence
  ENSG00000287565_12 (sequence is synthesized)
tcaagatttaactgccctgctggatttcagacttgcatgaggcctttagcccctttgctttggccaatttcttccatttggaatagctgtatttacccaatgcctctacccccattttat

SEQ ID NO: 925356 - DNA, 79 bp, Artificial Sequence
  ENSG00000287565_13 (sequence is synthesized)
ttacccaatgcctctttacaggctcacaggtggaagggacttgctttgtcttagataagactttggactgtggactttt

SEQ ID NO: 925357 - DNA, 120 bp, Artificial Sequence
  ENSG00000287565_14 (sequence is synthesized)
taagactttgggggactgttggaatggcatgatttgttttgaaatgtgaagatatgagatttggaaggggccaagtgtggaatcatagggtttgcctgtgtcctcacccaaatctcatct

SEQ ID NO: 925358 - DNA, 120 bp, Artificial Sequence
  ENSG00000287565_15 (sequence is synthesized)
tgaattgtagctcccataattcccttgagttgtgggagggaccaagtgggagacaattgaatcaagggggtggttcccccatactgttctcatggtggtgaataagtctcatgagatctg

SEQ ID NO: 925359 - DNA, 120 bp, Artificial Sequence
  ENSG00000269635_0 (sequence is synthesized)
taaaacaaaaacaacctctgagataatcaagtgagagctatacaaatctccaagttatgagggaggaaagccaggagtgagactgaaggcagagggcttggctgctctgaatgaggttaa

SEQ ID NO: 925360 - DNA, 120 bp, Artificial Sequence
  ENSG00000265128_0 (sequence is synthesized)
ctagaagcatcttaacccaaggccaatttctcatgtaaaaggggaaagagttttgtgaaacctttacccacaagcataatgagtcttaaactcagtattttacctccaaaaatactactg

SEQ ID NO: 925361 - DNA, 120 bp, Artificial Sequence
  ENSG00000265128_1 (sequence is synthesized)
ggaagaaatagaaatgaatttggacaaattcatgaataacatggttagaaaaagcttttcagaaggaacagccagaattcctaccgtgtaagtcgtttcctggaaaccatgctctggatc

SEQ ID NO: 925362 - DNA, 120 bp, Artificial Sequence
  ENSG00000265128_2 (sequence is synthesized)
aactacagcttcaaggcaccaagcagatcatgaaataatcaggagccagaggggtaaattatgtaccctgagattctgatttactaaaaacaaagtatcaaatttttgactaattctaat

SEQ ID NO: 925363 - DNA, 120 bp, Artificial Sequence
  ENSG00000265128_3 (sequence is synthesized)
ttctaaggaaaactatctcaacaactataatttcccagttacttgaatcttcaacttgctactatgattagatgtctggttcagacatccttggtaataaatgaaattctttatgtttca

SEQ ID NO: 925364 - DNA, 120 bp, Artificial Sequence
  ENSG00000265126_0 (sequence is synthesized)
ggttgaggaggaaggacttccctgagtgctgctcccccaggacagcgaggaggcagactggggtgtccctggccagagggtgcttcaggcagcggttgatggcccccatcctaaggatga

SEQ ID NO: 925365 - DNA, 120 bp, Artificial Sequence
  ENSG00000265126_1 (sequence is synthesized)
ggcccccagaggcattgatgcgaaccagcagcagcggctccgccctcacaggacacgtctcctgggccaggagaagagaggggcccctgagcatccaggaccagctcctgaccctggaat

SEQ ID NO: 925366 - DNA, 120 bp, Artificial Sequence
  ENSG00000265126_2 (sequence is synthesized)
ccccagacctgcagtgcagggggcagcggccgctgcggcaggagcttcatcttctcgcccaggctccggaggcccctcttctgcttgcatatcttccggcactcaggacagcagggcggc

SEQ ID NO: 925367 - DNA, 120 bp, Artificial Sequence
  ENSG00000265126_3 (sequence is synthesized)
tcacagcccgggagacggtgtgtgctgaagcaccgtatgcagaagtcgtggccacagtccagcgagatggggtcgcgcaacctctccaggcagatggagcagcctggcggatccagcctc

SEQ ID NO: 925368 - DNA, 120 bp, Artificial Sequence
  ENSG00000234286_0 (sequence is synthesized)
ccgtttccagtttcggaaggggtttctccagaataccaaacaccagtactcgtccaccgccgccgcgccgccgagaggcaacgtcaaccgctccattgccggtggggaagccaaaggctt

SEQ ID NO: 925369 - DNA, 120 bp, Artificial Sequence
  ENSG00000234281_0 (sequence is synthesized)
atttatgaaaaaataagaagtgaaagtattctctgactgcaagtatgaccacctgtctttctatatcagaacccaagctaaaagactgcatttactacccttccttgctaacaagagtga

SEQ ID NO: 925370 - DNA, 120 bp, Artificial Sequence
  ENSG00000234281_1 (sequence is synthesized)
ctacgtgactatgttctggccaatgcaaacagcctgaaaagctgatgtaatgactggatcttcagcagccaccttgagcaagaggtagaagctagaggctgaggaatgatggagcagaaa

SEQ ID NO: 925371 - DNA, 120 bp, Artificial Sequence
  ENSG00000234281_2 (sequence is synthesized)
cttctgttttcttttttggggtatagataactgaacctaatcctgtcccaaatcctgatcctatctaaccagtgttagctatcagcccatacgtatactggagaatgacgtttaacaaaa

SEQ ID NO: 925372 - DNA, 120 bp, Artificial Sequence
  ENSG00000234281_3 (sequence is synthesized)
taagatgttaaagttctaactaattgtaataatcatgcagttttctcatgctgaacaaagttaaagaaatataatgtgtgtttcctaaagagtgtcattttttggaaagataacatgggg

SEQ ID NO: 925373 - DNA, 120 bp, Artificial Sequence
  ENSG00000234281_4 (sequence is synthesized)
cacaaagtaacataaaaatctacatataattatgtaaacattgctttgacatacaacaccaaatatttttattgtatttgtgaatgcatttcttggtaataaaacggcagttatgaataa

SEQ ID NO: 925374 - DNA, 79 bp, Artificial Sequence
  ENSG00000234281_5 (sequence is synthesized)
aaacagcacaaagggcactcttatgctgctgtaaaccagtgccaggatttttaaaatgtgagacacctgttaccctaca

SEQ ID NO: 925375 - DNA, 90 bp, Artificial Sequence
  ENSG00000234281_6 (sequence is synthesized)
tcaaacacacatgctctacataggtcctaggccgacctacagcctcagcttacgaagatgacaagattaagagattaaagtaaagacagg

SEQ ID NO: 925376 - DNA, 120 bp, Artificial Sequence
  ENSG00000234281_7 (sequence is synthesized)
gccatggcttcagccggtccctccattcaaggtccctgacttcctgcaacagggggcaaaggactctttgtcttcaaatttccctccaccttgctcatcatcaagagagtgtgaagagga

SEQ ID NO: 925377 - DNA, 120 bp, Artificial Sequence
  ENSG00000234281_8 (sequence is synthesized)
ggagaaaggctgaagaggaggagaaaggctaagatcttttccaatgcaaaattaggaaaaaatatactacagatttatgaaaaaataagaagtgaaagtattctctgactgcaagtatga

SEQ ID NO: 925378 - DNA, 120 bp, Artificial Sequence
  ENSG00000234281_9 (sequence is synthesized)
ccacctgtctttctatatcaggttgataatttctaacatgttcctttgtaattgtttctcaattttgtgctgaatgttgaccatgtgcatttccatttcttcaacaaaatcacatttgtc

SEQ ID NO: 925379 - DNA, 120 bp, Artificial Sequence
  ENSG00000234281_10 (sequence is synthesized)
tttagagcactgttgttactgtgcacagcactctccccatgcctgaactgtcaacaatccactgagtaggacatatgcccagctgtctgactaaagctgagcattgtgggccgtggcttt

SEQ ID NO: 925380 - DNA, 120 bp, Artificial Sequence
  ENSG00000234281_11 (sequence is synthesized)
caaatactccagtgctttcacagatgatctggggaggaaactagtgactccacacctttaatttaataatattgccccaaacaaatgagtaaaacagagaataaagagggcaaataagta

SEQ ID NO: 925381 - DNA, 120 bp, Artificial Sequence
  ENSG00000234281_12 (sequence is synthesized)
acaaagggcactcttatgctgctgtaaaccagtgccaggatttttaaaatgtgagacacctgttaccctagagtgtgaagaggaggagaaaggctgaagaggaggagaaaggctaagatc

SEQ ID NO: 925382 - DNA, 120 bp, Artificial Sequence
  ENSG00000234283_0 (sequence is synthesized)
tttagagcctgcacagttgttctaaaaaaggcggtggctcctcctaacgttggatgggctcttgctctgcatggtgataccagaaagcatgccatacctaagacctactaccctgagaag

SEQ ID NO: 925383 - DNA, 120 bp, Artificial Sequence
  ENSG00000234283_1 (sequence is synthesized)
ccagctactgctcagatcacctttgcaagatgacattgtgttgggagatggtcatcagagccagggccatggaagatgctgtcaggaggcacgaggaaaggctatgggagcacaaagcaa

SEQ ID NO: 925384 - DNA, 120 bp, Artificial Sequence
  ENSG00000234283_2 (sequence is synthesized)
gaaagtggccttctgcaagccaggaagagaggcctccccagaaaccaactctgtgagctcatcgatctttgacttttggcctccagaacattgagaaaataaaagtctgttgttaaacca

SEQ ID NO: 925385 - DNA, 120 bp, Artificial Sequence
  ENSG00000265121_0 (sequence is synthesized)
cggcgcccacaggcatcatctcaggtctccttagcacactctgctcagtcccaaatctccttgaaagtgtcttttggcgaggactgcctgataaaatacaggccgcccagttacacttga

SEQ ID NO: 925386 - DNA, 120 bp, Artificial Sequence
  ENSG00000265121_1 (sequence is synthesized)
atttcagataagcggcaaataatttctgttagtataaaatatttgggacatatttacactaaaagaaatgattgtttatctgaaattcaggtgtaactgcgtagcctgtagttttacttc

SEQ ID NO: 925387 - DNA, 120 bp, Artificial Sequence
  ENSG00000265121_2 (sequence is synthesized)
cagggctcccagacaccaggctgagggccgaggccagcctgtgacaagttctcacctgtccaaggcaaaaggagataaaagaagacaacgcaaagaggttgttttgtaaagctgaaggtg

SEQ ID NO: 925388 - DNA, 72 bp, Artificial Sequence
  ENSG00000265121_3 (sequence is synthesized)
gaagacaacgcaaagaggttgttttgtaaagctgaaggtgttcaaaggactggtcttcattcttttttttct

SEQ ID NO: 925389 - DNA, 120 bp, Artificial Sequence
  ENSG00000274667_0 (sequence is synthesized)
attttagccatagtaagctatggtaaatagaaaagttctgaagtagtttgatgttggaggattgcaagtgcttcaactggaacatctgtccagttaggctactaatccagtcctttttca

SEQ ID NO: 925390 - DNA, 120 bp, Artificial Sequence
  ENSG00000274667_1 (sequence is synthesized)
ttccagtgttctattaatcagcattggctcactgaaatagcagttttcacaaatgaaaagtcaactgtagttttaggtgacaggaaattggatatttctattgacaacatactttgttat

SEQ ID NO: 925391 - DNA, 120 bp, Artificial Sequence
  ENSG00000274667_2 (sequence is synthesized)
cttgctttagaaaggaattaaaaactttgaattttcagattgctttaaatagtgatttaaataatgacttgatttaatcagtgccttatatcaaaaattgtatgtttagaattttgattt

SEQ ID NO: 925392 - DNA, 120 bp, Artificial Sequence
  ENSG00000274667_3 (sequence is synthesized)
atttctccagagcaattttaaggattctcttaaccctcagtatacgaggaaaagtgtacaattatcactatcatctgggtcaaaagggactggttttttttgcattttacgttattatgt

SEQ ID NO: 925393 - DNA, 120 bp, Artificial Sequence
  ENSG00000274667_4 (sequence is synthesized)
acgttattatgtataatttataggagtaaaaataaagcataatgtaaaacaacttattggagcttttaataagaatttcaatacagcagatatctttgtatgtacttagaaaaataaaaa

SEQ ID NO: 925394 - DNA, 120 bp, Artificial Sequence
  ENSG00000249816_0 (sequence is synthesized)
atgactggttttagtagtgcaagtggctacagcttttcaggtggattatagcactggtgagaagagacctttcttgatcttattcttgtgttctcactcttgttctccttttcactgtaa

SEQ ID NO: 925395 - DNA, 120 bp, Artificial Sequence
  ENSG00000249816_1 (sequence is synthesized)
aattcctgagagaattagccaaggatgcagaatatgatcagaaatctggggccataagaagctggagcagcaaaacacattcacagtgcagccagcccttggctcccagaattcccaaaa

SEQ ID NO: 925396 - DNA, 120 bp, Artificial Sequence
  ENSG00000249816_2 (sequence is synthesized)
caagtgtgctcccttcagaaatacagtccttggagtaggaggctaacagagctaaggtgaaggatctaaaacctgaaaagaggccaaatgattcctcaaaaccacgcaagtacgaagtag

SEQ ID NO: 925397 - DNA, 120 bp, Artificial Sequence
  ENSG00000249816_3 (sequence is synthesized)
cagagcggatctcaaatccagcactccacgaagaggccttggctagctgcacatctccctacatgggtatgtcaagatcaccaactctgcttacagcagttcccagatgaaactcttcat

SEQ ID NO: 925398 - DNA, 120 bp, Artificial Sequence
  ENSG00000249816_4 (sequence is synthesized)
aatttcagatgcacctttaataccagtgaaggtttacctccaggcccacagtctgggtctttccagagacacccacagcaagatgtcacctgctttttgatgtcatcagagtcaaacaca

SEQ ID NO: 925399 - DNA, 120 bp, Artificial Sequence
  ENSG00000249816_5 (sequence is synthesized)
gtgggtgaacccatagtgacctttccttctgattcttcttttactctaagggcatgattttggcaaactgtctatatgtacactggaaacaacttcaacttgcttttatgttgatttcac

SEQ ID NO: 925400 - DNA, 120 bp, Artificial Sequence
  ENSG00000249816_6 (sequence is synthesized)
ttctccactttcaatgcagaaagctaatcagcaatgccctaggttactaagagaggacaattctttcttagcccattgaattatgagcattttcttggaaatgcagcaaaatgtgttctg

SEQ ID NO: 925401 - DNA, 120 bp, Artificial Sequence
  ENSG00000249816_7 (sequence is synthesized)
acagatgcctttgggtcccttgggttctttgctaagacagctatagagagagggctcaataaggtggggcctgtgatgggacattgtttttactgcactggtgatagaacaaaagtcaga

SEQ ID NO: 925402 - DNA, 120 bp, Artificial Sequence
  ENSG00000249816_8 (sequence is synthesized)
cagggcacaacacacactgatacaaccaatcacccagtcacactgcagccttaggaaacccatgagcttgtggcagcaggcaaacttgcttcagagttccaagaatccaaatgttcctgg

SEQ ID NO: 925403 - DNA, 120 bp, Artificial Sequence
  ENSG00000249816_9 (sequence is synthesized)
tgtgtctgttgtcttgcgatatagactgagatcacaggattgaagatacgaccagagtcatgctgttgaaagagactggctgagtagtgatgaaaaataaacttggtcaatctatgctta

SEQ ID NO: 925404 - DNA, 76 bp, Artificial Sequence
  ENSG00000249816_10 (sequence is synthesized)
gtactaaaagtgcaaacacaaagggaactgcgtggcttgtttctacctgaacattgtcaagtgatttcatcctttg

SEQ ID NO: 925405 - DNA, 120 bp, Artificial Sequence
  ENSG00000249816_11 (sequence is synthesized)
ttgtttctacctgaacattgtcaagtgatttcatcctttgaaacacagttgtgaagtgtgtccagcagtctgagaacaagaagaagaagaaaatctaatccttcagggtgtctgtgtgcc

SEQ ID NO: 925406 - DNA, 120 bp, Artificial Sequence
  ENSG00000249816_12 (sequence is synthesized)
agccctgctctcagcacttcccatgtggaactcctttacttctcctaacaactccatgacatgggttagactgtgattgttcccatattgttggtagggaaactgaggcatgcaggtgtt

SEQ ID NO: 925407 - DNA, 120 bp, Artificial Sequence
  ENSG00000249816_13 (sequence is synthesized)
acagagctctctcaagtggcaagctttctgggtggttacagagtggcagagctggggtatcccatgatgtcaccacactgctatatggaaaagaacattaatcgagcacctacgtgcttg

SEQ ID NO: 925408 - DNA, 120 bp, Artificial Sequence
  ENSG00000249816_14 (sequence is synthesized)
attctcttaattctgtgactgaactctcaaaacaccctgggtaagcactatcatctcctattttcacaagtgaaaaaactgggattcaaaaaaattaagtgacttaccaaatattacaga

SEQ ID NO: 925409 - DNA, 120 bp, Artificial Sequence
  ENSG00000249816_15 (sequence is synthesized)
aagcaacagaaggatgttcctttcccaaggggagcagtatctgagatccaggtagaaagaccaaaaggaaaattaagaacagactctcagacctgccttccctttgcattcagggttgcc

SEQ ID NO: 925410 - DNA, 120 bp, Artificial Sequence
  ENSG00000249816_16 (sequence is synthesized)
gtgaggagtaaatgagctgttgcatgggaagcacttagcatggggcctgataaatagtaagcccttggtaataattacatcttccgtgatgctagacacagagggattgaaatgcataac

SEQ ID NO: 925411 - DNA, 120 bp, Artificial Sequence
  ENSG00000249816_17 (sequence is synthesized)
aatagagatgaaacacgaagagtgataaatgaagattgagtgtgcacaccttctggaggagccctgattgagtattttaaaatactactaaagtcatgccgtgtgacttctgaagctagc

SEQ ID NO: 925412 - DNA, 120 bp, Artificial Sequence
  ENSG00000249816_18 (sequence is synthesized)
tcctaagaagtccttgcagcttctgcctgcgactcttagaacacttgctttgaaggatgccagatgctgtcttaaaagtctgagcactctgaaaccatcatgctgtgaggaagcccaagc

SEQ ID NO: 925413 - DNA, 120 bp, Artificial Sequence
  ENSG00000249816_19 (sequence is synthesized)
taaccacatgggcaaaaaagatgccctctgactgccaccatttgagacactctaattaagaactgcctcattgagcccatgaggccctgtgaatgataataataaattgtttttaaccac

SEQ ID NO: 925414 - DNA, 120 bp, Artificial Sequence
  ENSG00000249816_20 (sequence is synthesized)
tggaagctcctgtctgtgaagggtgtgcacagagagcttcggtagcctgcgaagcagccattttcacttccacggagcagatgctggcctgggtgctggaatatggaaatgaggaagatc

SEQ ID NO: 925415 - DNA, 120 bp, Artificial Sequence
  ENSG00000249816_21 (sequence is synthesized)
ctgcctgaggatttcatgacagtgctgcgattaccgacgtgagccactgtgcccagcctcactttaaaaaaaaaaaaaggttatgaagcatctcaacacaagacctcctttgctcatcac

SEQ ID NO: 925416 - DNA, 120 bp, Artificial Sequence
  ENSG00000249816_22 (sequence is synthesized)
aaccacccagtgaagcaggcaagacaacagaaactccccacctgtgatagatgtgaggcctgaagtctcccacatacccacggcagatgcaacgcacagcggtgaccaatggtgaaggat

SEQ ID NO: 925417 - DNA, 120 bp, Artificial Sequence
  ENSG00000249816_23 (sequence is synthesized)
ctaaaacctgaaaagaggccaaatgattcctcaaaaccacgcaagtacgaagtagcagagcggatctcaaatccagagcactgcgtgttttgaaatatacaaatagtgggaaacgaaatc

SEQ ID NO: 925418 - DNA, 120 bp, Artificial Sequence
  ENSG00000249816_24 (sequence is synthesized)
gttcatggcagggaccgagcagtgaggatgggcactgccctgtgtcctagcagagggctgccttctggctccccagccttggccagcagcccttctatcttcatgccatgacctattttt

SEQ ID NO: 925419 - DNA, 120 bp, Artificial Sequence
  ENSG00000249816_25 (sequence is synthesized)
gttcacccagttagtgtatggcctatttctttccttaagaattacttcataactttcacagagtaatagcacatgctgagcacagcattcatgaacttggacacacgcacacaaaatgtc

SEQ ID NO: 925420 - DNA, 120 bp, Artificial Sequence
  ENSG00000249816_26 (sequence is synthesized)
gtactctccacaagagagcaaagctgtgtctgttgcattcactgttgtcttcccagaagcaagcagcatgctggagaccctcaaatacatgtgaaatgaagggacaccttgtgttatttc

SEQ ID NO: 925421 - DNA, 120 bp, Artificial Sequence
  ENSG00000249816_27 (sequence is synthesized)
acctgtttccacctggttcccaagtggcaagcttgcattgaggttacaaagtggcaaagctgggatatcacatgatgtcaccatgatgctatatgaaatgtaacattaattgagtaccta

SEQ ID NO: 925422 - DNA, 120 bp, Artificial Sequence
  ENSG00000249816_28 (sequence is synthesized)
tgtgaccagttctttaattctgtaagtgaactctcaaaaaaccctaggtaagtattatcaactcgaactttaacggatgaggaaactggaattttttaaaaaatgacttaaccaaacatc

SEQ ID NO: 925423 - DNA, 120 bp, Artificial Sequence
  ENSG00000249816_29 (sequence is synthesized)
acagagctgtaaaccaggatttgaatgggtgagctgcactcagccttcatctcaagtcagtttgcctctttctccaagaagccacagttgatcctgaccacatcacatatgagttgcctg

SEQ ID NO: 925424 - DNA, 120 bp, Artificial Sequence
  ENSG00000249816_30 (sequence is synthesized)
cttttaggaggtcacatgccaggcaccgtgttaggtaatgatttctccaagtcacaggagccgtggttctgactttagaaagtttctcatctgatgggagggcaggcaagtaaatcagta

SEQ ID NO: 925425 - DNA, 120 bp, Artificial Sequence
  ENSG00000249816_31 (sequence is synthesized)
agggtggtccctgtcgggacactggttgagaaatacccaggaacactctgattgagaaatacccaaagtgcaaagtgacagggactagaggcatctccactggaccagagagctctggat

SEQ ID NO: 925426 - DNA, 120 bp, Artificial Sequence
  ENSG00000249816_32 (sequence is synthesized)
tcgtcttgagctaagtctctggagagcactgcgtgttttgaaatatacaaatagtgggaaacgaaatctttgttctggatgcagttataatttggaaagcgaggaaataaattataacaa

SEQ ID NO: 925427 - DNA, 120 bp, Artificial Sequence
  ENSG00000249816_33 (sequence is synthesized)
gacttgctccagccaatgaaatgtaagcagaagtgacatatgcagcatgaccagtggaagcttcgaagagctattgccaatttccaccctctctctggaaactgtcattagggttaggga

SEQ ID NO: 925428 - DNA, 120 bp, Artificial Sequence
  ENSG00000249816_34 (sequence is synthesized)
ttacagacgcagccccttgtctgtagctcctgactcccacttaaatgtctgttggaagcaccctggggtagcagaacccagctcagaagatggggcttatccaccatgccttttcctaac

SEQ ID NO: 925429 - DNA, 120 bp, Artificial Sequence
  ENSG00000249816_35 (sequence is synthesized)
ctgacacccacccagataatcttttcaatatgcaaactagagcgtatcaccccctgctcagagcctttctgtgacctcccattttgcttcccaggactccttgctccttagccaggtctc

SEQ ID NO: 925430 - DNA, 120 bp, Artificial Sequence
  ENSG00000249816_36 (sequence is synthesized)
caggtcctccgtgatcaggtctctgctcttctgcagcctcatctctgccattcttcaccttttgtgctccaacccaatctggttttcttctcatgctttgaacaccccaagtctgtctgc

SEQ ID NO: 925431 - DNA, 120 bp, Artificial Sequence
  ENSG00000249816_37 (sequence is synthesized)
ttcaggagcttcgtactggctaatcattcaccacagcatactcccatctatacggctggctcttatattatgggtctcagctaaaatgtcatcccttcaaagagaccttcttggaccacc

SEQ ID NO: 925432 - DNA, 120 bp, Artificial Sequence
  ENSG00000249816_38 (sequence is synthesized)
ttctgtgactgaactctcaaaacaccctgggttggtttcctttttacaactgcccaagtcatgagttcatagggcctggatggctgtaccggattgctctccagctggtctctctgcatc

SEQ ID NO: 925433 - DNA, 120 bp, Artificial Sequence
  ENSG00000249816_39 (sequence is synthesized)
aaaaaaatccattgtccatgtagggttcttctgccgaaacgaggaaagagtgagttaaatgttggtaggtgatatagagatagtaattaggcaatataattcgatgttgttgaaagagct

SEQ ID NO: 925434 - DNA, 120 bp, Artificial Sequence
  ENSG00000249816_40 (sequence is synthesized)
gagctatgaaatgcattgtgataaaggggctgcctgtgtaagtaaatgggtataatgaggtgtaaaactccctttctctctctctttctgcttcataagcctttctgcttctcaagtcca

SEQ ID NO: 925435 - DNA, 120 bp, Artificial Sequence
  ENSG00000249816_41 (sequence is synthesized)
gacctgctgtttttggggtttccttccaatttttttgctgcttccctggggccttggctcttgggcctgctgcctcttcccactctacacctttggattccttatctttggctccacctt

SEQ ID NO: 925436 - DNA, 120 bp, Artificial Sequence
  ENSG00000249816_42 (sequence is synthesized)
tagtgggaaacgaaatctttgttctggatgcagttataatttggaaagcgaggaaataaattataacaaggggaaaaaacagaatactactaaagtcatgccgtgtgacttctgaagcta

SEQ ID NO: 925437 - DNA, 120 bp, Artificial Sequence
  ENSG00000249816_43 (sequence is synthesized)
acttgagtttgacttcatgggtttgccgtgtgcccctgaacaaaccagttatcctctctatgccttatttcggtatgcccatctaacactaattaccacccctccctgactgcccccaaa

SEQ ID NO: 925438 - DNA, 120 bp, Artificial Sequence
  ENSG00000249816_44 (sequence is synthesized)
ccttaccagaagaaatggcatgaagttacggagacactttgaactcattggcaaattgtgcactgtgaggggaaagcactgtggcggccattttcttttcttccttgagaaagtcccttg

SEQ ID NO: 925439 - DNA, 120 bp, Artificial Sequence
  ENSG00000249816_45 (sequence is synthesized)
ttgttaaatataaatatcatgtaccttatatatatattatatataaaaatacatgtaatttaccattttaaccatttcaaaatgtccagttcaggagcattaagtacagtcacattgttg

SEQ ID NO: 925440 - DNA, 120 bp, Artificial Sequence
  ENSG00000249816_46 (sequence is synthesized)
tgctactgtcactacaccatccacagaattcttcctctttccaaactgaaattctacgcactttaaacaataacgccctattcccccctccctccagtctctggcacccaccattttgct

SEQ ID NO: 925441 - DNA, 120 bp, Artificial Sequence
  ENSG00000249816_47 (sequence is synthesized)
ttctgtctttgtgaagttgaccactccagctatatcatatagtatttgtctttttgtgactgctttatttcaattagcataatatcctcaaggttcttctatgttgtagcatatactgga

SEQ ID NO: 925442 - DNA, 120 bp, Artificial Sequence
  ENSG00000249816_48 (sequence is synthesized)
atttccttgtgtgtgtgtgtatgaacctctataaaggatccttcctttttaaggttgaacaatattccatgtatgtatatatccagttttgcttatctgttcatctgtcaatgaacactt

SEQ ID NO: 925443 - DNA, 120 bp, Artificial Sequence
  ENSG00000249816_49 (sequence is synthesized)
ggattgttgccacattttagttattgggaataattttggctattgtgaataatctgtacacatgagtgtacagatatttctttgataaaataggtaaataaaattgctttataaagaaaa

SEQ ID NO: 925444 - DNA, 120 bp, Artificial Sequence
  ENSG00000249816_50 (sequence is synthesized)
tatatcaataaagagaactaaaaggagctccaaaacgttgctgcccttctgcgggctgtctgtgtgtaatgccggctccttcactcttttatggcaccatgattgtgttttaccctcccg

SEQ ID NO: 925445 - DNA, 120 bp, Artificial Sequence
  ENSG00000249816_51 (sequence is synthesized)
aataaaattatggatatgtgtaagtttggtgttttgtttcttttttttttttacactaagcctatattactgttgtaatttaggaaatcacttgttttcctccagcacttcaatgtaaga

SEQ ID NO: 925446 - DNA, 120 bp, Artificial Sequence
  ENSG00000249816_52 (sequence is synthesized)
gtggcactacttagaatgtacttcttaagatatggctgtacatagaacaaattattcaccatgatttccttagcatccaacagaatacctgagtgtagtagatgcttagtaaatagttgt

SEQ ID NO: 925447 - DNA, 120 bp, Artificial Sequence
  ENSG00000249816_53 (sequence is synthesized)
tgaataattgacatatgggagagtgctggataaactctttgagaatgacattatctacttcgatttatgtgagtctggcatcatattttttttgctgtctttaaagaaaccaagaagaaa

SEQ ID NO: 925448 - DNA, 120 bp, Artificial Sequence
  ENSG00000249816_54 (sequence is synthesized)
cattgtccatgtagggttcttctgccgaaacgaggaaagaagcactgcgtgttttgaaatatacaaatagtgggaaacgaaatctttgttctggatgcagttataatttggaaagcgagg

SEQ ID NO: 925449 - DNA, 120 bp, Artificial Sequence
  ENSG00000249816_55 (sequence is synthesized)
aagccagatggttatcaaaatccacaggaacaaatgaagagaaccagaaattgcaaataagaaggacagagtaccagagaggagagagaggtacagagaattatggaggtggcttccgtt

SEQ ID NO: 925450 - DNA, 120 bp, Artificial Sequence
  ENSG00000249816_56 (sequence is synthesized)
gagtatgcagctaagtaatgattaatgcatacatataagaaactactggatgacagagaaagaaccacaagcaatttaaagaatactactaaagtcatgccgtgtgacttctgaagctag

SEQ ID NO: 925451 - DNA, 120 bp, Artificial Sequence
  ENSG00000249816_57 (sequence is synthesized)
gtggacaaggaggagggggctgcaggccaggacacacctacgagtagaagagtcctgctgttagatcccctatcgtgacgctccatgctgtgatgggcagatgtcccaggctagccaaag

SEQ ID NO: 925452 - DNA, 120 bp, Artificial Sequence
  ENSG00000249816_58 (sequence is synthesized)
caaggagaaaagctgtatattttgagatatgggatgcagggccttttagttccataaataagagaactatggtgtgaataccacatgccctgggctgaactaagtgggctctaggggaag

SEQ ID NO: 925453 - DNA, 120 bp, Artificial Sequence
  ENSG00000249816_59 (sequence is synthesized)
gtatactgggcagggagtttggagaactggtttctgtctaatccttctctaactctgtgaccttgaatgcatcatttcccctctgagtctcagattctctttctggctggcatttaatga

SEQ ID NO: 925454 - DNA, 120 bp, Artificial Sequence
  ENSG00000249816_60 (sequence is synthesized)
aacctaaatattctagaccttctacttgttccataagtgctcagtcctacactcactctcctctggcaccaatatactgattactcattttatgcccagcagagcactgcgtgttttgaa

SEQ ID NO: 925455 - DNA, 120 bp, Artificial Sequence
  ENSG00000249816_61 (sequence is synthesized)
agttcatcgcaacactcagcctgtcagtcaggttgtgggatccctcctatccaggaactgtatgctgttgtcccggttctgacactttccctctgagtccttggacaccttacctaacct

SEQ ID NO: 925456 - DNA, 120 bp, Artificial Sequence
  ENSG00000249816_62 (sequence is synthesized)
taacaagtattgcttccgcccattcagtacttcttgcatgccagatctgtgctaagtgctagatgaacacagtctcttttcattctcatagctctttaaaacaggtattgttttctttta

SEQ ID NO: 925457 - DNA, 120 bp, Artificial Sequence
  ENSG00000249816_63 (sequence is synthesized)
ggagcctgtggggacatcatgggaaacagcaagtcagtgcccagcctggcacacacagctcagaccccgagaccccctcgctgacttccatctcatcgctctggccttggcagacccagc

SEQ ID NO: 925458 - DNA, 120 bp, Artificial Sequence
  ENSG00000249816_64 (sequence is synthesized)
agatgggctctcagcagagccctggaactcagccgagctgggctctgctggcacaggacagctctccactcttgagcccgacagagctccccagaccaggaaattctggatcatgaagct

SEQ ID NO: 925459 - DNA, 120 bp, Artificial Sequence
  ENSG00000249816_65 (sequence is synthesized)
cattttgcctcctttaggagcagggctagatgtcctacaattctctgcattagttgagcccatggacagtaacagccatagtctgagatataaaaaaaaaaacagcacatcgcccagaaa

SEQ ID NO: 925460 - DNA, 120 bp, Artificial Sequence
  ENSG00000249816_66 (sequence is synthesized)
aaagcctgggccctgtgcttttgggattctattcgcacgtgtttcggactggcaagactcaaacccagaaagagggactccctgagaggggaaaggcggacgtgcagggccactctggcc

SEQ ID NO: 925461 - DNA, 120 bp, Artificial Sequence
  ENSG00000249816_67 (sequence is synthesized)
agaggaccgttggccttgcctatcagctttcatcgtggaggaggcgtgggtggaccgaggtaccacaagttgccaggaatgcctgaccagaaactgctcttggatgctggcctgggtgct

SEQ ID NO: 925462 - DNA, 120 bp, Artificial Sequence
  ENSG00000249816_68 (sequence is synthesized)
atcagcaggctctctcatacagaaggaggagaaaacagagtgtgtatccttcacatgtgtgagcagtatcttctctctggctcttcagggtctcagcaagccatttccccatagtataat

SEQ ID NO: 925463 - DNA, 120 bp, Artificial Sequence
  ENSG00000249816_69 (sequence is synthesized)
cccgtgttctaccctgtgaaaataaaggcaatcaattcacagagacaagcagaaacaaggcgtccagagcaagtccttcacatcaccctggacaccctggccctgatttccactccctgc

SEQ ID NO: 925464 - DNA, 120 bp, Artificial Sequence
  ENSG00000249816_70 (sequence is synthesized)
caggcttgtttgtccaattcttctttttgttccaagcaccatcccagcaggcttagttacctgtaagcatttggttaatctctcttctcagctagaccgtaggctccccgagtgcagaaa

SEQ ID NO: 925465 - DNA, 120 bp, Artificial Sequence
  ENSG00000249816_71 (sequence is synthesized)
ctatgtttattttggtctctgctggatctccagcacctaaataaatgtttatggttgactgcaaggcagatctgtgtggggaatgaagaagagtattaagacctcccagatgggctgctg

SEQ ID NO: 925466 - DNA, 120 bp, Artificial Sequence
  ENSG00000249816_72 (sequence is synthesized)
tagattctgcaggcaagtgatcagctcaaggtaagattttctttctattaagggtctggaacttcatacttccataataatgggcagacattattttggatatactttctgaagggacaa

SEQ ID NO: 925467 - DNA, 120 bp, Artificial Sequence
  ENSG00000249816_73 (sequence is synthesized)
tatcatattatttatgagacctcagtttagttcctcagaatccttcttccccaattagacacaaacttcttatgagtgggtatacgcccaagagaattgaaaacatggccacacagaaac

SEQ ID NO: 925468 - DNA, 120 bp, Artificial Sequence
  ENSG00000249816_74 (sequence is synthesized)
ttgcacacaaatattcatggcacctccattcataatacttaaaaagtaaagcaactaaaatgtccatcaactgatgaatagataaataaaatggtgtatccatatcatgaaatatttggc

SEQ ID NO: 925469 - DNA, 86 bp, Artificial Sequence
  ENSG00000249816_75 (sequence is synthesized)
actggtcacgagggactacatattgtatgattccatttttataaaatgtccatctctggtttcccttcagaatgaataaatctttt

SEQ ID NO: 925470 - DNA, 120 bp, Artificial Sequence
  ENSG00000249816_76 (sequence is synthesized)
tgtccatctctggtttcccttcagaatgaataaatcttttgccttttactaaaatgtccagaataggcaaatccacagaggcagaatatagattactagttactaagggctaagaggaag

SEQ ID NO: 925471 - DNA, 120 bp, Artificial Sequence
  ENSG00000249816_77 (sequence is synthesized)
aggatggggagagactgataatgggtatgtagtttctttttgggcatgaaaatgttctgcaattggatagtggtgacaattgtacaaccttgtaaatatactaacacttactgaattata

SEQ ID NO: 925472 - DNA, 120 bp, Artificial Sequence
  ENSG00000249816_78 (sequence is synthesized)
cactttcaaagggtgaagtttatggcatgtgaattctacctctgttaaaaaaacaacttcttaagggtaaaaaaccaaactttctatattttatatctaaataaattctcatatttccta

SEQ ID NO: 925473 - DNA, 120 bp, Artificial Sequence
  ENSG00000249816_79 (sequence is synthesized)
agggcctggatggctgtaccggattgctctccagctggtctctctgcatccagaaatttctacaacctactgggaagcaagcagcatgctggagaccctcaaatacatgtgaaatgaagg

SEQ ID NO: 925474 - DNA, 120 bp, Artificial Sequence
  ENSG00000249816_80 (sequence is synthesized)
tttcgagctcaaggactccagaattagatccccaaaatatgcctgagaaacatttactccccaggagctcaaactaaataatgaaaaccattgaaaacaaccaggcagcccatgtcctga

SEQ ID NO: 925475 - DNA, 120 bp, Artificial Sequence
  ENSG00000249816_81 (sequence is synthesized)
agtcaccttttcctgggaggtccaggagagtttttcctactttccctgagttatccttccctttccttcccttccctttcttccccagagggcgatgcatgttaatcaaggagcctgcat

SEQ ID NO: 925476 - DNA, 120 bp, Artificial Sequence
  ENSG00000249816_82 (sequence is synthesized)
ttgcgcaggtatagacaattacacatttactgggtcagttgcacctgggggggacgccaatctgtaaagcagaaccaaacctcttgccttcagtcctcagaagttcttctggttaaaatc

SEQ ID NO: 925477 - DNA, 120 bp, Artificial Sequence
  ENSG00000249816_83 (sequence is synthesized)
atctaaaaagttgtttcaagtctccagaacagctgagatcagcaaaaataaatgaagcttcttctgtgtgggtgcagatgctggcctgggtgctggaatatggaaatgaggaagatcctg

SEQ ID NO: 925478 - DNA, 120 bp, Artificial Sequence
  ENSG00000249816_84 (sequence is synthesized)
cctgaggatttcatgacaggtgagggggagagaggcctgaggaagttaccaccggggaaggtgacaagtgcagtgataggataaatacgaagtgcaaagagaagacagacaagaagttca

SEQ ID NO: 925479 - DNA, 120 bp, Artificial Sequence
  ENSG00000249816_85 (sequence is synthesized)
tagctaagaaatgtgttaataacaccttgatcaatcattcctccactttttttttcttttgagagtctcattctgtcaccccacccagagtgcagtggcaggaacacaactcattgctac

SEQ ID NO: 925480 - DNA, 90 bp, Artificial Sequence
  ENSG00000249816_86 (sequence is synthesized)
ctgcctcagcctcctgtgtagctggggccacgtgtattgcaccaccaagcctggcttattttttaatttcttttgtaaagttcaaactct

SEQ ID NO: 925481 - DNA, 120 bp, Artificial Sequence
  ENSG00000249816_87 (sequence is synthesized)
gtggaggaggcgtgggtggaccgaggtaccacaagttgccaggaatgcctgaccagaaactgctcttgggtgggtcccagagctgcctccccttcacttgaccctagggctgctggcttc

SEQ ID NO: 925482 - DNA, 120 bp, Artificial Sequence
  ENSG00000249816_88 (sequence is synthesized)
aggaaaacaaagaactccttcatcctcctctagattctgcaggcaagtgatcagctcaagggtggaaagaagggaaactcgagccagcctgagaaggaccctaccttgtgctgctaacca

SEQ ID NO: 925483 - DNA, 120 bp, Artificial Sequence
  ENSG00000249816_89 (sequence is synthesized)
gctgtttgtacagcagaaaggggatggacacatcacacctgagtcaagcaaacgccattatcatcagaatcatgggccattgttcctggatcaagccctaccaaattaaagctaagaaaa

SEQ ID NO: 925484 - DNA, 120 bp, Artificial Sequence
  ENSG00000249816_90 (sequence is synthesized)
ggtactcatttccactatactataacctggttttgctatggaattgtatcatcatttcagaaagaatttatgccgacaactcatgcgcttaattgaaaatatgctcatagacctcctcgt

SEQ ID NO: 925485 - DNA, 120 bp, Artificial Sequence
  ENSG00000249816_91 (sequence is synthesized)
agagatctcctgcaagcaccagaaagctcaccaccaaaaataatcacagcaaaccccataactctggaagatgaggattactgtatgcaagttactgaggcttagattcaatttcttggt

SEQ ID NO: 925486 - DNA, 120 bp, Artificial Sequence
  ENSG00000249816_92 (sequence is synthesized)
caagagtcacagatcttgtttctgaggcaaaggatttgccctgattattgttacggtaggtaggtagtcagacatgagcagagcaggagagcgcccccaccaacccccagccaggaatgc

SEQ ID NO: 925487 - DNA, 120 bp, Artificial Sequence
  ENSG00000249816_93 (sequence is synthesized)
caggtgaccatcatgtgatagtcaggcagttgttaaactgcctctctaaaataataattggttgcagcttgtatctaggaaagggcagtctcctaataaattgaaacacctgaaactggt

SEQ ID NO: 925488 - DNA, 120 bp, Artificial Sequence
  ENSG00000249816_94 (sequence is synthesized)
ctagtaagccaagacttgaacactgagatggaattctaccttttaaggtggctaagcaacagaaggatgttcctttcccaagggggtaagaagcagtggccatgttcagcacaattgtcc

SEQ ID NO: 925489 - DNA, 120 bp, Artificial Sequence
  ENSG00000231102_0 (sequence is synthesized)
agacaggcagctgatgtcctcatgaccttccccagtcctcccagccttaaagacgacaatcataacccacccagagctcttcatacttcctgcagccggttcatccacaataggtcacaa

SEQ ID NO: 925490 - DNA, 120 bp, Artificial Sequence
  ENSG00000231102_1 (sequence is synthesized)
tcctttacagatggagaaactgaggtcctgactaggccaagcacttcccagggcagggatctaaatagtgggaagtcttctggcttctggatagggctcaagctgagagccaggttgcag

SEQ ID NO: 925491 - DNA, 120 bp, Artificial Sequence
  ENSG00000231102_2 (sequence is synthesized)
gccaggtctgggccaatggaatctcggccagggcgggtgcaggggcctgaggccacaccccagaggtgtcactgggggcctgcatccgtcttgtccctttccctgagggatgaagcagcc

SEQ ID NO: 925492 - DNA, 120 bp, Artificial Sequence
  ENSG00000231105_0 (sequence is synthesized)
tccagggaccccagacagcatttggtccctggctctgtgtccccacacagccaccctaccccatgctgccttttactgaggcacacagcattttagacaggagaaccctgatggcagagg

SEQ ID NO: 925493 - DNA, 120 bp, Artificial Sequence
  ENSG00000231105_1 (sequence is synthesized)
ctgggtctcacgggaccctgtctccttaagggcttagtctggggctggagcctctacagatgtttgagcaaaggcgggaggcaagggagggaggccggaagccaccccagggactctgat

SEQ ID NO: 925494 - DNA, 120 bp, Artificial Sequence
  ENSG00000231105_2 (sequence is synthesized)
gtccaccctgcggcagcctgtctgtggacagatgatgcaggaagctcacggaactcccaagcagaaatcagcagagatggagcctggttatttttcagcacacaaaagccgagggcccct

SEQ ID NO: 925495 - DNA, 120 bp, Artificial Sequence
  ENSG00000231105_3 (sequence is synthesized)
tcctgagatgcctgcctcagcccggtagtgaaactgaacccacctcagacgggaaaggcttggcgggctctgcttggtgggaagtccacagtggtgcctcgtccctgagatgagaatcat

SEQ ID NO: 925496 - DNA, 120 bp, Artificial Sequence
  ENSG00000231105_4 (sequence is synthesized)
cacctccgctttacaaatgagatgaccaagggtcagagaggagaaaggacctccccccagccctgagtcacctgcctggagactgagggagccataatgcgaatcttccccttgccaaac

SEQ ID NO: 925497 - DNA, 120 bp, Artificial Sequence
  ENSG00000231105_5 (sequence is synthesized)
ccactgactccattacgctgcctccagagaacccgagccccgcggcgagaaagtggtagagctgggcctcgaacctgggtcctggactcttggtcctgtgctccttgtggaagatggaac

SEQ ID NO: 925498 - DNA, 120 bp, Artificial Sequence
  ENSG00000231105_6 (sequence is synthesized)
tgcttcttcagagacaaggtctcattgtattgcccgggctgttctaactcctgggctcaagcgatcctccggcctcagcctcctaaagtgatgggattacagtcatgagtcaccatgctt

SEQ ID NO: 925499 - DNA, 120 bp, Artificial Sequence
  ENSG00000231105_7 (sequence is synthesized)
ggcctgggcaggactttctcaagtggaactgcctcacacacagactccctggagctggcaggatgaagcccatgaaccttggcctggcttgctaaaccctccctcccgactccctcagga

SEQ ID NO: 925500 - DNA, 120 bp, Artificial Sequence
  ENSG00000231105_8 (sequence is synthesized)
gttcgagtctgccttctttctccggctggctcctcagcttaacgcgctttcctccaggcagctctctcgggcttcgcagtgacccttcctcggtgctccgcggcagcatgcttctggcat

SEQ ID NO: 925501 - DNA, 120 bp, Artificial Sequence
  ENSG00000231105_9 (sequence is synthesized)
ctcatcccaacacagtgaagagcagccaagtgcggctgtgtggccctgaccaagtcatttcacttcaattttatgctttggctttcacatctttccacggacgtgaatggagatgatcat

SEQ ID NO: 925502 - DNA, 120 bp, Artificial Sequence
  ENSG00000231105_10 (sequence is synthesized)
gcagcacatgggagggaaggaacgaccagagaagacccgtggtgtgccaggcactagacctggggctcggtggcacatgtcagctccttgcaagtgtgaaacaactggagtgcagcgagc

SEQ ID NO: 925503 - DNA, 120 bp, Artificial Sequence
  ENSG00000231105_11 (sequence is synthesized)
atcagtaactcaccctaagtcacacatctggtaaacagcaaagcctggatttgaacccaggttttcccatgacatcagataagacggcaatcaccacctccttctaacccaccctgcctc

SEQ ID NO: 925504 - DNA, 120 bp, Artificial Sequence
  ENSG00000231105_12 (sequence is synthesized)
acctgctccatccttacgacttcaggtgtcacctcccagctgggtttaaggggctgagttgtccactctgatcttctccaagcacaaactgcaaagcagaccagaaagcagctggtcctg

SEQ ID NO: 925505 - DNA, 120 bp, Artificial Sequence
  ENSG00000231105_13 (sequence is synthesized)
actccagggctacccacagatgcccctgcacctcctcatgctcctgtgctcctgtgtgatgtcctggactgtgtgatgaccaggctggggaagtcccaatctgaagagaccaagcgctct

SEQ ID NO: 925506 - DNA, 120 bp, Artificial Sequence
  ENSG00000231105_14 (sequence is synthesized)
ctgacaatgtgctgatctaatcacgtacaacttaagacaaagttaacccgtctcattgaatgatatggtataatggtgatgactgagctgcccagtaattgtgctcaaccaggaagcagc

SEQ ID NO: 925507 - DNA, 120 bp, Artificial Sequence
  ENSG00000231105_15 (sequence is synthesized)
tcatggagtcagttgtaattagtatttgtgttacacaggtgagtgggtgggtgagggctgggcagagggaggaggaagtgggtggggcaggaagctctggggactccttggatccatgaa

SEQ ID NO: 925508 - DNA, 120 bp, Artificial Sequence
  ENSG00000231105_16 (sequence is synthesized)
ccccatgccagccaactcatgtggttgatcctgtctaaccttcatgatgacctcatgatgtactgttatctctcttctaaggtgagaaaacaggctcagagaagtccattcacttgtcca

SEQ ID NO: 925509 - DNA, 120 bp, Artificial Sequence
  ENSG00000231105_17 (sequence is synthesized)
agatcagacagctagaaaatgacagagccagggttccctcttcagcccaggcgatgtcttggacagcagaaggaacaggaatagggctgggaggctggagatccacatctcggtcccagt

SEQ ID NO: 925510 - DNA, 120 bp, Artificial Sequence
  ENSG00000231105_18 (sequence is synthesized)
tctaacactgccttaccctgggcctcagcaagtagcatccctcttcaggatacaaagagatagtatgtctgtcaggttgcagacggctgagggtgtggacttgggagctaggctccttgg

SEQ ID NO: 925511 - DNA, 120 bp, Artificial Sequence
  ENSG00000231105_19 (sequence is synthesized)
attctaatccttgggcaagctacttcaccatctgagcctcagtgtcctcatctgtaaaatggagatgacaacagtgtctccctcataggcttgtgaagataaaacgagtaacaagactta

SEQ ID NO: 925512 - DNA, 120 bp, Artificial Sequence
  ENSG00000231104_0 (sequence is synthesized)
gctagacaaggagggctctgcaaacatatggcgtggcctggggctgtcagacagtagtgtcgctgcaggacacggaggagactggcagcgaggcagcagggtcggcaggagcccataaag

SEQ ID NO: 925513 - DNA, 120 bp, Artificial Sequence
  ENSG00000231104_1 (sequence is synthesized)
gttctgatgacgcattcctcaggcccaatccgtagagcaggaggaatctaactggtgtccgagaagatgtgtttgacctatggtgccagccttcagtttctcagaagacatatgggaccc

SEQ ID NO: 925514 - DNA, 120 bp, Artificial Sequence
  ENSG00000231104_2 (sequence is synthesized)
agataaatcagacattgaatgcgctgacgagagtcgctgaggacccaagagaaaaggcttttttggtttggatttcatctgtatttcaccacttgaaaattcactattggcatcgggcat

SEQ ID NO: 925515 - DNA, 120 bp, Artificial Sequence
  ENSG00000231104_3 (sequence is synthesized)
agctgtgtttataacgctgaaacgaaatactgagttctaaatctggtgatttatcttttgacagctacaaagtgcgacacatcaacattacattgccagatttaatttctcatcttccat

SEQ ID NO: 925516 - DNA, 120 bp, Artificial Sequence
  ENSG00000231104_4 (sequence is synthesized)
ttcattgataattgtaaggtttaaaatccataacaatttatatgaagttctagttggtcaatactgtgatccagtcctcatactgaaacaatgttaacttacttaaaatccaccacaaaa

SEQ ID NO: 925517 - DNA, 120 bp, Artificial Sequence
  ENSG00000231104_5 (sequence is synthesized)
tattcaattatttgacagatgtttaacagaaagaataagggatcattaatgattccatttaaaaaatatttcatcacgagtgctacttttacttcagattcatgcaaatatggtgcttaa

SEQ ID NO: 925518 - DNA, 120 bp, Artificial Sequence
  ENSG00000231104_6 (sequence is synthesized)
aactggatcatatttcaatccaaaaaccaacgcccgaagtatacggataatttccaagaacagaaaaaccataaataagatataaactcccccaaattcaaaataaattacataacttac

SEQ ID NO: 925519 - DNA, 120 bp, Artificial Sequence
  ENSG00000231104_7 (sequence is synthesized)
tagagcaggaggtaagctttggacaatgttaatcttttcttgtaaatatttaaacattttatatttggtggcataatccatctcattgtatccttgagattgaacagtattatgactata

SEQ ID NO: 925520 - DNA, 120 bp, Artificial Sequence
  ENSG00000231104_8 (sequence is synthesized)
caaatttcagtatatgtctcaggaaaaaatcactgaactaagaaacagaaatatcggtattatacttattgcaataagggttttcaaggaacaacatttaggacaaagattttatcaaaa

SEQ ID NO: 925521 - DNA, 120 bp, Artificial Sequence
  ENSG00000231104_9 (sequence is synthesized)
ggctgctcaaaaatgcctgagaattcctaagaatgctgaaaatgtcgcaactctaaggggaagggtttgcagtgcggcaagcccggctacttcccattctacctgagtgatctgagccac

SEQ ID NO: 925522 - DNA, 120 bp, Artificial Sequence
  ENSG00000231104_10 (sequence is synthesized)
tctctccagctccccacagtgcagatctgagtgagaggctcttgtactgggtattgtctgaagtctaaaggcagaacccctcccttgtggtctgctttatattcacacactgacgtgtca

SEQ ID NO: 925523 - DNA, 120 bp, Artificial Sequence
  ENSG00000231104_11 (sequence is synthesized)
aacacttgacgaactcagtcattcatggctgccttttttgatctgtccttaatggggaaaaaagagttaactgaactggattgaattagcttggtgaaaaataaaatgtctctatttatt

SEQ ID NO: 925524 - DNA, 120 bp, Artificial Sequence
  ENSG00000231104_12 (sequence is synthesized)
attctcagagactttttcattagcattaaatttactttcttacttctgaacataaaagttttcttctaaggactttatgatgaaatggaacattcatttatgctcagggttttgagatag

SEQ ID NO: 925525 - DNA, 120 bp, Artificial Sequence
  ENSG00000231104_13 (sequence is synthesized)
cagaaacagcagtaaaacaggcagccaagccataaaaggaaactggcactcattttattatcatctaataatataaatacaaatgcagacaagctctgccttcaaggaacttaccaattt

SEQ ID NO: 925526 - DNA, 120 bp, Artificial Sequence
  ENSG00000231104_14 (sequence is synthesized)
ggagatacagaagttctcttcccaggcccactcaaagggttctggctcagaccctttttccccattccttaagagagaaaaaagacatatattttcaaggtatagactcccatcaaggca

SEQ ID NO: 925527 - DNA, 120 bp, Artificial Sequence
  ENSG00000231104_15 (sequence is synthesized)
tagtaggtactcaatatttgatgaatgacaaaatttggaaaatactacaaagcaactgctattttgatttactaaatttagaaattaaactttaaaaactaaaagggtagttcagaccaa

SEQ ID NO: 925528 - DNA, 120 bp, Artificial Sequence
  ENSG00000231106_0 (sequence is synthesized)
agcccatctgcacccaggcgctcactgaaacagtgtgttgctccacaccgccttgttttgcttgttggcgcgctctcagggttccgaccaatccaagagccttgcagaaagcattaacgt

SEQ ID NO: 925529 - DNA, 120 bp, Artificial Sequence
  ENSG00000231106_1 (sequence is synthesized)
gcttttctctttggcagagtttttctttgctctgatcttggagacatccctctgcctagtggaaacataaggaatacagaaagaatgcaaggagatagaccaacgtgagattctccttca

SEQ ID NO: 925530 - DNA, 120 bp, Artificial Sequence
  ENSG00000231106_2 (sequence is synthesized)
tgcactcaagagaaagatgttgcaggaagagctagtctttcaggctgggctggtgacctgagaaagaatgtccagcttttcttctccacttggcatatcaagagccaggcgtggaagact

SEQ ID NO: 925531 - DNA, 120 bp, Artificial Sequence
  ENSG00000231106_3 (sequence is synthesized)
aaaacaggaaatgtttataaaaactgttcagcggttcgccaacaagaagtggtaaagtagcaaaaatggggatggagatgccaggaggaaagatgccaggggtaaagtgggaaaatggga

SEQ ID NO: 925532 - DNA, 120 bp, Artificial Sequence
  ENSG00000231106_4 (sequence is synthesized)
gtcacagaactaataagtggtgctgaggactcaaacccggggaagcccactctagaacccatgctggtcatccatatccccaaggccctggtcagaacacagctaagcagatggcttggg

SEQ ID NO: 925533 - DNA, 120 bp, Artificial Sequence
  ENSG00000231106_5 (sequence is synthesized)
tcatcaggacgtccattacatccaaaggaagacagcctgtgacgtttcaaaagcaaaagtcccctaccagccagtgaagctacctgatttctcagtatcttacgcccagtgacacgatct

SEQ ID NO: 925534 - DNA, 120 bp, Artificial Sequence
  ENSG00000231106_6 (sequence is synthesized)
accctcaaaacttaaaaaaaaaagggaaacataaacacataacagcagcagcaataattaaagatgagatgagaacaattaagaaaaaaggaaaggtctcctgtgactgttttattttta

SEQ ID NO: 925535 - DNA, 120 bp, Artificial Sequence
  ENSG00000231106_7 (sequence is synthesized)
gggaaacagagaggaagaagaatgatttttcttttgatgactctatatccaactctgaggtttgattaaagaaatgaccttgaaccacagcaaagaaaaataaaagacaatttccagtaa

SEQ ID NO: 925536 - DNA, 120 bp, Artificial Sequence
  ENSG00000258711_0 (sequence is synthesized)
aaaaagcatttagatcaatgtcagcataaaggagactggactgcaaaacagaactgtgtgcaaagggaatttgttgaaataaacaggctgcaccctctgggacagagaagcatggtcacc

SEQ ID NO: 925537 - DNA, 120 bp, Artificial Sequence
  ENSG00000258711_1 (sequence is synthesized)
tgggaaggagagaaaagggagcttgggtcactccagtatcagcagccagctcagaaatgtagacctgcacaaaataatacccaggcagctatgagaatatctgttgcagccaagagggca

SEQ ID NO: 925538 - DNA, 120 bp, Artificial Sequence
  ENSG00000258711_2 (sequence is synthesized)
ccctgccttctcttttcatatccagtgaagactgtccctctccgtgacaccatggctggaggaagtggatacaccgtgcctgctgcatctgagggctgaaatgcaagatcttcaaagatg

SEQ ID NO: 925539 - DNA, 71 bp, Artificial Sequence
  ENSG00000258711_3 (sequence is synthesized)
tgctgcatctgagggctgaaatgcaagatcttcaaagatggaactgcaacctccgcctcctgggttcaagc

SEQ ID NO: 925540 - DNA, 120 bp, Artificial Sequence
  ENSG00000258711_4 (sequence is synthesized)
ggcatgagccactgcgcccagcctaaaccagtgtcagtcttaagtgaaaagtgcttgtatgattgagactaagtgatttggggattggtgagtaagccaatatgggcagagttgattgtg

SEQ ID NO: 925541 - DNA, 120 bp, Artificial Sequence
  ENSG00000258711_5 (sequence is synthesized)
gagttgattgtgaataaaccaatgcccaaacaacacatttcctctaatatttctcctactcaaagagttatatgcccaactttatcctaagggcctttgtgaaagtagaggtaatgactc

SEQ ID NO: 925542 - DNA, 120 bp, Artificial Sequence
  ENSG00000258711_6 (sequence is synthesized)
atctggtaacttaatttcctagtgggtcatcatttcaagggcccccaagaccaccctcatgtttagtgatttgctagaaggattcaaaggactcagaagtaaatgtattcacagttacag

SEQ ID NO: 925543 - DNA, 120 bp, Artificial Sequence
  ENSG00000258711_7 (sequence is synthesized)
tttcttgcagcgagaggacacaaagcaaaaccagcaaaagcaaaatcagatacaaagcaaaatcagctacaaagcaaaatcagcacatggggcaaagcccaaaggaaaccagacataagc

SEQ ID NO: 925544 - DNA, 120 bp, Artificial Sequence
  ENSG00000258711_8 (sequence is synthesized)
ttccagggtcctcccagtaaaatggcacaggatgcacttaacagagcctacggtttttattggggactggtcatagaaaccctctgcctagcacatataaaatttcagacttccagcagg

SEQ ID NO: 925545 - DNA, 120 bp, Artificial Sequence
  ENSG00000258711_9 (sequence is synthesized)
acagtggtattcagcataaaccatattgtttgtacaaacagtctaggcacagtaaaccatccttatcaattacggaatggtaggaagactcctgaaagccaagttcccagatgctagccg

SEQ ID NO: 925546 - DNA, 120 bp, Artificial Sequence
  ENSG00000258711_10 (sequence is synthesized)
tgggtcaaccttgcaagtaggcctttctgaggtctgctgtctcagggctgctatgttagctctttttcattacagtcacccagagatccccctctgcagcttctccatcaccaccactga

SEQ ID NO: 925547 - DNA, 120 bp, Artificial Sequence
  ENSG00000258711_11 (sequence is synthesized)
ccttagagttgttctggattctgttgtataagttatggtcttggagaccctataaaggactgcaggatttctggttctgttcagttttgccatctatacacaagaagttctcagaaacat

SEQ ID NO: 925548 - DNA, 120 bp, Artificial Sequence
  ENSG00000258711_12 (sequence is synthesized)
atgtgttgaacaaatgagctgtttaaaaaaaaaggggtgctttaaaaactgaaaaaaatactccaaaatattaagaagggatgatgttattacgtataacttttatttctatttgtatat

SEQ ID NO: 925549 - DNA, 120 bp, Artificial Sequence
  ENSG00000258711_13 (sequence is synthesized)
gctttccaaattttctagaataaacacattctatttttattattagaaaataagtaaaacaaatattagtttccaacaaatctgctaaacgatgctcctgcagattagatgcccaatccg

SEQ ID NO: 925550 - DNA, 120 bp, Artificial Sequence
  ENSG00000258711_14 (sequence is synthesized)
caaggttgagccaagatccactggataactttgaccccccagggatatttttagccacagacattctgagtgaggcccacatcacaaagcgtttgtttcttaggacccagacttagtgtt

SEQ ID NO: 925551 - DNA, 120 bp, Artificial Sequence
  ENSG00000258711_15 (sequence is synthesized)
gctccttttcatacagtcttcatagcttaagctcatgaaacacggtggtcaatgcttacaacaaacttgccaacttattaaataaaaaattagaagattcactgatttttcctggtttct

SEQ ID NO: 925552 - DNA, 120 bp, Artificial Sequence
  ENSG00000258711_16 (sequence is synthesized)
agtggtaatggctacaaactatgagtgccacaatcagcttttaaccatctgcacagataggaagaaaattttttaattaaaaattactttccaagcctattgtcctggggttaatattaa

SEQ ID NO: 925553 - DNA, 120 bp, Artificial Sequence
  ENSG00000258711_17 (sequence is synthesized)
taattagtttgcaggatgaggcattctaaaaagattctagatagcagtaaaaaactatcctgcaagtttttatatctgtcatgagcaatgaaatggtttatattgttaccacttattata

SEQ ID NO: 925554 - DNA, 120 bp, Artificial Sequence
  ENSG00000258711_18 (sequence is synthesized)
aataacataaatacataaataaaattatcagtacccagctactctaaataatgtcatccctctttctttctggatttctagtcaaattcactttcttcattacttcaaatactttacttc

SEQ ID NO: 925555 - DNA, 120 bp, Artificial Sequence
  ENSG00000258711_19 (sequence is synthesized)
taaagaacagtacatctgtacccaaacaacatttttcacatacagaagaaaatgcattaaaacttatatatcagatctagcagttatatttccaacagaaatgaggacatgcatgcaata

SEQ ID NO: 925556 - DNA, 120 bp, Artificial Sequence
  ENSG00000258711_20 (sequence is synthesized)
cagttatatttccaacagaaatgaggacatgcatgcaataaaaaacatatacaggccaggcatggtagctcatgcctgtgatcccaacacttcaggaggccaaggtgggtggattgcttg

SEQ ID NO: 925557 - DNA, 80 bp, Artificial Sequence
  ENSG00000258711_21 (sequence is synthesized)
tggtaaaaccccatcgccacgataatctcagttactcaggagtctgaggcatgagaatggcttgaacccaggaggtggag

SEQ ID NO: 925558 - DNA, 120 bp, Artificial Sequence
  ENSG00000258711_22 (sequence is synthesized)
caccactgcactctagcctgggcaacagaatgagactgtcttgaaacaaaacaaaacacgtacaaataggtttatggcagctttgttcatgataactccaaactgggtgcaacccaaatg

SEQ ID NO: 925559 - DNA, 120 bp, Artificial Sequence
  ENSG00000258711_23 (sequence is synthesized)
tccaaactgggtgcaacccaaatgtccatcagcagcaaaatggatatataaaattgtgctttgggaggccgaggcgggcagactgcgaggaaaggagattgagaccatcttggctaacac

SEQ ID NO: 925560 - DNA, 120 bp, Artificial Sequence
  ENSG00000258711_24 (sequence is synthesized)
gagcgagactccatctcaaaaaaaaagtgctacattaatataatggaatactacataatgatgaaaatgtaagaaatttggcaagaacataaatgaaacttacaatgttgagtaaatgaa

SEQ ID NO: 925561 - DNA, 120 bp, Artificial Sequence
  ENSG00000258711_25 (sequence is synthesized)
atgaaacttacaatgttgagtaaatgaagtcagacaaatagagacatactgtataattccatttatacaaagtttaaaactggcaaaagtaatctgccatattggaaatcagggtagcaa

SEQ ID NO: 925562 - DNA, 120 bp, Artificial Sequence
  ENSG00000258711_26 (sequence is synthesized)
tcacccttaggagacagtgacaggaagcaggcacaggaggggcttctgagctgctcataatgttctgtagctcagtctggctacggagcatgagtcatcatccatttggagaaattcatt

SEQ ID NO: 925563 - DNA, 120 bp, Artificial Sequence
  ENSG00000258711_27 (sequence is synthesized)
gcgacgcaaacttaagatttccacacattttaataagtatgttttactgatagaaaaatattaccctctccaaaaaagagggtttacaaagagcttacacataaaaagacatcatttatt

SEQ ID NO: 925564 - DNA, 85 bp, Artificial Sequence
  ENSG00000258711_28 (sequence is synthesized)
ggtttacaaagagcttacacataaaaagacatcatttattaaagttcttttagcctcttccacggtctccctctccctctctctc

SEQ ID NO: 925565 - DNA, 79 bp, Artificial Sequence
  ENSG00000258711_29 (sequence is synthesized)
atctgggaagtgaggagaactccgcctggccgacgccccgtctgggaggtggggggcgcctctgcccggctgccacccc

SEQ ID NO: 925566 - DNA, 120 bp, Artificial Sequence
  ENSG00000267062_0 (sequence is synthesized)
cacctttccctaatactttattggttacctctaggcctgtgtgcggctgggtgggcttgggggagggcgtcactattcagcttctaggtggaggcatgagaaggccttggcctagccctc

SEQ ID NO: 925567 - DNA, 120 bp, Artificial Sequence
  ENSG00000267062_1 (sequence is synthesized)
tagggcacccaggtgggggcacaggctagacgcacggacgatcacacgcgtggacccgcgttctcagcgccaagtgagccctgggccgcgaagccttttatgcccggcccgaaccaagac

SEQ ID NO: 925568 - DNA, 120 bp, Artificial Sequence
  ENSG00000263400_0 (sequence is synthesized)
aggcacctgtgctcccttgacaaagaggaataaaacctcttcagactactctcctatcgattctctcctggaacatatgaccaccatcaattataggcaagaacatgaacacgggagtcc

SEQ ID NO: 925569 - DNA, 120 bp, Artificial Sequence
  ENSG00000263400_1 (sequence is synthesized)
caaagacttgggttcaaatgtcagccccttcactcgctggctgtaggtgtgaggccctggctcctgtggggctattgcagaggagaaacttctggaacagagagctccttgtccagggat

SEQ ID NO: 925570 - DNA, 120 bp, Artificial Sequence
  ENSG00000263400_2 (sequence is synthesized)
gctgcatctgggtgagctgctccttggatatggtgcaagtgtggccagggtgtggtgtggaaggagcagaagtcttcaggactgaatctggatggaccactgtgacagctgtatacccag

SEQ ID NO: 925571 - DNA, 120 bp, Artificial Sequence
  ENSG00000263400_3 (sequence is synthesized)
gtggtaccagtttccctctctgcagaagtccccccaacagcaccattctcagtgccatacctggcctcatcagggctctgatgcaagacactgtatatgcagaatatattatttcatcct

SEQ ID NO: 925572 - DNA, 120 bp, Artificial Sequence
  ENSG00000263400_4 (sequence is synthesized)
cacaacagttctgtatcttccacattttataggctaaggaaataggctcagggtagtcaagtagctttcccaaaggcacacagcagcagaaggggatttgaacccaatttgggctatctc

SEQ ID NO: 925573 - DNA, 120 bp, Artificial Sequence
  ENSG00000263400_5 (sequence is synthesized)
tagagactcaaagccctcccctcctgtccataggaaaggagagaccccttagtactgattgctttggtggggctctggcactccgcagtgatcacctataggaaaacatggagtatcaga

SEQ ID NO: 925574 - DNA, 120 bp, Artificial Sequence
  ENSG00000263400_6 (sequence is synthesized)
atattggtctctcaggaacctggctttgtggggtggtttgaggcagtagttgccccttcatatgtgcacccaggcccctgccagacaggtaatcacattgcctcctccttgtggcagatt

SEQ ID NO: 925575 - DNA, 120 bp, Artificial Sequence
  ENSG00000263400_7 (sequence is synthesized)
atatttcccagaaagtgcctgcaacaatacttccagtcccatatgtgcttctagagccggtcactctctcagtttaaaggtggagtctatttcccttccccttaagactgcctcagtggt

SEQ ID NO: 925576 - DNA, 120 bp, Artificial Sequence
  ENSG00000263400_8 (sequence is synthesized)
tagactatggcaagaaagatatcatgtgacttccaagacaaatcctaaaaggcaacacagcttccacctggctctttctattttgagccacttacctatggaacaccagccaccatgttg

SEQ ID NO: 925577 - DNA, 120 bp, Artificial Sequence
  ENSG00000263400_9 (sequence is synthesized)
gaaggaagcccaggtgacatggagaagcatctgtgagtgctctggcaggcacgccagcttgaatctcagccatcagccagcatcaaccaccagatgcgtgagagagagccttcacatgac

SEQ ID NO: 925578 - DNA, 120 bp, Artificial Sequence
  ENSG00000263400_10 (sequence is synthesized)
ttcaggcctcagcctgcaagctgtcccagcttatgctgagtgagcacagacaacctatccctgctgagccctgtccagtctgcagatttctgagcaaaataaatgatgttattgttttaa

SEQ ID NO: 925579 - DNA, 120 bp, Artificial Sequence
  ENSG00000263400_11 (sequence is synthesized)
agcgcgaagaaggcggccatgagtccgttgcaggcccgccacagcgctggcgccatggctcggagaacacggcgcggggcggtgagtcctgccacgtgcggggcggtgtggtcagctact

SEQ ID NO: 925580 - DNA, 120 bp, Artificial Sequence
  ENSG00000263400_12 (sequence is synthesized)
ccggaatgtggcaggggtggaggccggacaaagtctgaaacagggtcatcaccatagcacctgacatacctggatataaacaatatccaaggaagaggaagaggctccagagctggctct

SEQ ID NO: 925581 - DNA, 120 bp, Artificial Sequence
  ENSG00000263400_13 (sequence is synthesized)
gagaagagggcatttataagccgggaagagaggcctcaccggccaccaaccctgatggaaccttgatcttggacttacagccagcagagctatgaggaaatcaatgtttaagcatcatcc

SEQ ID NO: 925582 - DNA, 120 bp, Artificial Sequence
  ENSG00000263400_14 (sequence is synthesized)
tagtctgtagtgctctggcagcctgagcagaagaatacttactctgtgctccgtcccacccagtctccacactgcagccagtgactgtatgagacacaaatctccaatttctgcttaaga

SEQ ID NO: 925583 - DNA, 120 bp, Artificial Sequence
  ENSG00000263400_15 (sequence is synthesized)
agcgcgaagaaggcggccatgagtccgttgcaggcccgccacagcgctggcgccatggctcggagaacacggcgcggggcggtgagtcctgccacgtgcggggcgatgagaatcctgagg

SEQ ID NO: 925584 - DNA, 120 bp, Artificial Sequence
  ENSG00000263400_16 (sequence is synthesized)
ctcagagtgtgcaacctggccaaaaacacccagctaacaagtgctgaagatcagagtgggactgacttctcatctgtttctacatcatttcctagttaccactcctgtgtgttgaggcag

SEQ ID NO: 925585 - DNA, 120 bp, Artificial Sequence
  ENSG00000263400_17 (sequence is synthesized)
ttccctcttctggaatgttctatccgagatcttcacgtggctgcctcctcttcattcaggtctgagcacaaatgctgcctctccagagaggcctcctacagccagaatcttaagtagccc

SEQ ID NO: 925586 - DNA, 120 bp, Artificial Sequence
  ENSG00000263400_18 (sequence is synthesized)
ccgctcgtctctctccttcacccagtttctcggcttcacagtcctcatcactctccgacagcatcttcctcatttgatggtgtccttgtttgtggcctgtctgctcctggcaggggaaag

SEQ ID NO: 925587 - DNA, 120 bp, Artificial Sequence
  ENSG00000263400_19 (sequence is synthesized)
gacctgcaccaaggccgccagcgcgaagaaggcggccatgagtccgttgcaggcccgccacagcgctggcgccatggctcggagaacacggcgcggggcggcccctaaggtaaaagcctt

SEQ ID NO: 925588 - DNA, 120 bp, Artificial Sequence
  ENSG00000263400_20 (sequence is synthesized)
cctgttcccgtataatgttcacttgccttgaatatcatgaaatgtacattagactttgtaagtaaacacctagctgagtatctggagcatagtaagtgcttatcacacattccatggagt

SEQ ID NO: 925589 - DNA, 120 bp, Artificial Sequence
  ENSG00000263400_21 (sequence is synthesized)
ggccatgagtccgttgcaggcccgccacagcgctggcgccatggctcggagaacacggcgcggggcgcacctgacatacctggatataaacaatatccaaggcccctaaggtaaaagcct

SEQ ID NO: 925590 - DNA, 120 bp, Artificial Sequence
  ENSG00000263400_22 (sequence is synthesized)
gaaggcggccatgagtccgttgcaggcccgccacagcgctggcgccatggctcggagaacacggcgcggggcggtgagtcctgccacgtgcggggcggcccctaaggtaaaagccttgct

SEQ ID NO: 925591 - DNA, 120 bp, Artificial Sequence
  ENSG00000263400_23 (sequence is synthesized)
ccgccagcgcgaagaaggcggccatgagtccgttgcaggcccgccacagcgctggcgccatggctcggagaacacggcgcggggcggtgagtcctgccacgtgcggggcgcacctgacat

SEQ ID NO: 925592 - DNA, 120 bp, Artificial Sequence
  ENSG00000261938_0 (sequence is synthesized)
ttttaataaagcctttttggtttattgcacatcatataaaactgactgcactgtatttgaaacagacgaggacattcacaaggatggagaaaccaaggtttccttctttcctggccctca

SEQ ID NO: 925593 - DNA, 120 bp, Artificial Sequence
  ENSG00000261938_1 (sequence is synthesized)
ttcttgagaggctgggatctgggcgtcatcattgaggcctggaggtgcctccttggtgggcgacctgcttgggggtgtgatgctttcatgatgcttcctttgatgtcgggggcccttggt

SEQ ID NO: 925594 - DNA, 120 bp, Artificial Sequence
  ENSG00000227217_0 (sequence is synthesized)
gagatttccaacctcttgcatcccctcctctagggctcatgggacctctggttctgaatgcatattcccctaaaatcaaagaacttgaagactgaaaaagaccatggttattgtcaactt

SEQ ID NO: 925595 - DNA, 120 bp, Artificial Sequence
  ENSG00000227217_1 (sequence is synthesized)
aagtggtctccaagatgggctataagacaccagattgaagtgtaagaagaaaatatgagaacatttaagagtatttctttttgagcttgaaatttaaaaagatattcagctttactaata

SEQ ID NO: 925596 - DNA, 120 bp, Artificial Sequence
  ENSG00000227217_2 (sequence is synthesized)
ttcatggtggtgctcttgctcaggagaccttagtggctgacagagaacctaaaccctggcttgcaactcgaggctgtgtgaaaggaatcggaacttacttctcacggtgactcgaatcca

SEQ ID NO: 925597 - DNA, 120 bp, Artificial Sequence
  ENSG00000227217_3 (sequence is synthesized)
agtagtatctccctgcatcactctccttcacggtgagaacatgcagctctgccaacagggaacgctgggtctttctacccaggcttcttactcttccttctttgtgccaggagaatgtga

SEQ ID NO: 925598 - DNA, 120 bp, Artificial Sequence
  ENSG00000227217_4 (sequence is synthesized)
cagtccctgaaccctgggctactgagcaaataaggaccatattttctccttcaatcagctgccctccggtgggccggatctctagattcacattagacacagggactcctgggggaacac

SEQ ID NO: 925599 - DNA, 120 bp, Artificial Sequence
  ENSG00000227217_5 (sequence is synthesized)
aagatggcatgtgaaggtcctgatggcagggacatcaaggtcaaggggaaggctggagctaccatgaataggccaatagcagcaggtgcagcaggcagaagcccaaagtaggaaataaga

SEQ ID NO: 925600 - DNA, 120 bp, Artificial Sequence
  ENSG00000227214_0 (sequence is synthesized)
cttcaggattctcagtcttccctccgggagacttttggccagtcttgtctcgctccaacctcctacccccaccccattcctcagtgcattcgtgaatttctccaagcaggcctttccaga

SEQ ID NO: 925601 - DNA, 120 bp, Artificial Sequence
  ENSG00000227214_1 (sequence is synthesized)
tcgacactaagttccaatcccgagctgtgtgacccagcaccaattcagtcacgatgatgacttgcaattgcttaatcagttggcctttcctcctagctgtgaagtttaccgtgcaggatt

SEQ ID NO: 925602 - DNA, 120 bp, Artificial Sequence
  ENSG00000227214_2 (sequence is synthesized)
gcaaacaccagagagaaaatcagtctctggaatgatgcctttgatggaccaagatgcagctgatgaagcattgaaccaattagcacctagcaggagggcacccttgctctgtgtccttga

SEQ ID NO: 925603 - DNA, 120 bp, Artificial Sequence
  ENSG00000227214_3 (sequence is synthesized)
aggttaaagctgtcaaaaagtggtctccctcaagttcggccatcttgctctcagagatctagaactggtaggagaatatagccttgatagtggagaggaaactattgctgttgtgaggga

SEQ ID NO: 925604 - DNA, 120 bp, Artificial Sequence
  ENSG00000227214_4 (sequence is synthesized)
acagcaggtgacaaaagaggcgcgcctaccttggggaatacggaggaacagaggaaagtgagaccaggagaaagagcaggggggcgggtgtgcaggccgggcgccgtggctcacgcctgt

SEQ ID NO: 925605 - DNA, 81 bp, Artificial Sequence
  ENSG00000227214_5 (sequence is synthesized)
cgacggactgagacttcgtctcaaaaaagggagtgactgtgttgcttttgctttcttggaaatcttttttcttagtaattt

SEQ ID NO: 925606 - DNA, 120 bp, Artificial Sequence
  ENSG00000227214_6 (sequence is synthesized)
ttgcttttgctttcttggaaatcttttttcttagtaattttcctaaagtaatttccttaggaaataatgtattgctaagagtattgcaacttttagtattgacgaggtacttttactgaa

SEQ ID NO: 925607 - DNA, 120 bp, Artificial Sequence
  ENSG00000227215_0 (sequence is synthesized)
ctccatgaagcctggcatgaatggaagtgtggaagaagtataacgaaactgggatccatagagggttatctgcctagaagagggtcagcagtccagactagatcttgagtgtctgacatc

SEQ ID NO: 925608 - DNA, 120 bp, Artificial Sequence
  ENSG00000227215_1 (sequence is synthesized)
agcgtgagcgactgtcctaccacatcagacgtgccgtgagagagaggactacagaggctgcacatccctgagaaaagcaagaagcccggatatcaggagatgtggggatgccgggtgttc

SEQ ID NO: 925609 - DNA, 120 bp, Artificial Sequence
  ENSG00000227215_2 (sequence is synthesized)
acaccaatggcagaaagaggagtgacagaggtaacaccaggattctacaagacatctgagggtaaagagagaaggaaaataaaaaaacacaaacttgatgacaactattcagtttagtgc

SEQ ID NO: 925610 - DNA, 120 bp, Artificial Sequence
  ENSG00000227215_3 (sequence is synthesized)
aatacagactgtgttaagtgcaggttaataaggagcagtgaagaaaagaggaaaataattaagctatttggacctgtgactagatgttgttataattaaaattctttcatttctcacttt

SEQ ID NO: 925611 - DNA, 120 bp, Artificial Sequence
  ENSG00000227218_0 (sequence is synthesized)
aggcgtgagccactgtgcccggccaagagcaacttttttaaacctacagtccaattcttttcccttatctctcaggagactttgggctcacctaggagcccacttttacctccttcctca

SEQ ID NO: 925612 - DNA, 120 bp, Artificial Sequence
  ENSG00000227218_1 (sequence is synthesized)
agcccacttttacctccttcctcagttgtgcatataacagaggaaggggcagaatcggccttcagggtttaaaggggccatgagtcggggtcagccctgaggaggagtggggtgaatgct

SEQ ID NO: 925613 - DNA, 120 bp, Artificial Sequence
  ENSG00000227218_2 (sequence is synthesized)
atcccaggatagagatggagccctggtggcctgattcctcctggcctggccagtaccactgaagcttcccaacacctccaagcttattaaagaaccagagtgacttgcctgtcccagaga

SEQ ID NO: 925614 - DNA, 120 bp, Artificial Sequence
  ENSG00000227218_3 (sequence is synthesized)
gacttgggatggtcagaaacgggggtgaggggcccggggcaagccaagcctgtaaatgatggcagcctggggctttagtttgggaacacactcacacctcctacaggtcaggctgcacac

SEQ ID NO: 925615 - DNA, 120 bp, Artificial Sequence
  ENSG00000227218_4 (sequence is synthesized)
caggtgaggaaactgaggcgcagttatttgtcctcaggcatgctccttagaggccacttgattgcagagaaggtctacagagcagtggttagaacttggccctgaggacagagcttttgc

SEQ ID NO: 925616 - DNA, 120 bp, Artificial Sequence
  ENSG00000227218_5 (sequence is synthesized)
tccgtatgaggctggcaggtaacgatcttctcagttttctccccaggaatctggaacgatgaaggtgatgattgtgcctgtggccaagaccgggagaaccctggatccctacaccttccc

SEQ ID NO: 925617 - DNA, 120 bp, Artificial Sequence
  ENSG00000227218_6 (sequence is synthesized)
cacccctggaatgtcactatacatatctgacttcttctgatgttgcctttgaccctaaagtcaatatgataaagtaacaagaagctgggacagaggaacaaacacagcccactcaagcag

SEQ ID NO: 925618 - DNA, 120 bp, Artificial Sequence
  ENSG00000227218_7 (sequence is synthesized)
tggtggcaacattctgttagaaaggaggggagtcaaagaaaaaaacacccctccgcccatctccttatcacctccctaaagacagaggagaacatggacaccctccatcctgatagacat

SEQ ID NO: 925619 - DNA, 120 bp, Artificial Sequence
  ENSG00000227218_8 (sequence is synthesized)
gccatgtggtcagtttgtgcggtaaacaggaaaaaaaaaaaacctaaagatattgtagacctttattttctttaaatctcctaataaaaacattaaactttcaagaagattccaaactga

SEQ ID NO: 925620 - DNA, 120 bp, Artificial Sequence
  ENSG00000227218_9 (sequence is synthesized)
aagcgatcctcccaactcggcctccaaaagtttacaggcgtgagccacggtgcccagcctcctgtgccttttaattcactgatgcaattgttgatccagccctgtcagccccgagggtag

SEQ ID NO: 925621 - DNA, 120 bp, Artificial Sequence
  ENSG00000227218_10 (sequence is synthesized)
gtagggtctgaggttgctgctgtatccctggcactcagtggaggcttggcccaaagaaagaggtttttttgtttttttttttttttcccaagacgggagtctcactctgtcacccaggct

SEQ ID NO: 925622 - DNA, 120 bp, Artificial Sequence
  ENSG00000227218_11 (sequence is synthesized)
gggggtttaggatccaaagcccaagtgggcagttctgcctggactggaggacagagcatggagcaggtggggagagggcaggtgtctgcagttggcctttttcctctgtgatgaggaaga

SEQ ID NO: 925623 - DNA, 120 bp, Artificial Sequence
  ENSG00000227218_12 (sequence is synthesized)
ggctttggactgcggagcacgccgggagtcgtagtccccaggcctgctcgggcccacctcgtcggagacgagcaggaaccgcctcctcttctttgcatatcggcgaagtgtagttctcaa

SEQ ID NO: 925624 - DNA, 120 bp, Artificial Sequence
  ENSG00000227218_13 (sequence is synthesized)
gagcattgtggggccggttgctgcccgaatctctctagggaatgggaccgagttggggacccagactccctggccttcatggccacagtcctgtcgccgccccaccaaaagccaatctct

SEQ ID NO: 925625 - DNA, 120 bp, Artificial Sequence
  ENSG00000227218_14 (sequence is synthesized)
cagagtcccggggccagagtgggatgggagtgcgggatcggaagttccatttttcagatgggaaaagtgaggctcagagaaaggtagatcccattccgagtcagtggtgaagccgacacg

SEQ ID NO: 925626 - DNA, 120 bp, Artificial Sequence
  ENSG00000227218_15 (sequence is synthesized)
gaaaccgggtgccctacttagtctgtaggtgggagaggtgcagagaacgttcactttccagcctagggtgggcgggggagggtctgtccctagcccgcatggatggggaggatttggtgg

SEQ ID NO: 925627 - DNA, 120 bp, Artificial Sequence
  ENSG00000227218_16 (sequence is synthesized)
agaggaggcgccctcctcaccatcgcccggcctcccgggccacccttcggatgtcccctcccttccttcaccgactgtctctcgcagcagcccagacacgtttcggaccgggacccacgc

SEQ ID NO: 925628 - DNA, 120 bp, Artificial Sequence
  ENSG00000227218_17 (sequence is synthesized)
caggcccctccccggtcttggaaggcccttcctctgagaacaaagagatgttgggccagatcatcttccacgcttcttcagctccgagataggaacgcggtcccccaccactcacaggcc

SEQ ID NO: 925629 - DNA, 120 bp, Artificial Sequence
  ENSG00000235908_0 (sequence is synthesized)
gaaaccaggcttgaaaaaacttgctttaggtttgtgctgaagatgatgaggtatctattaataaacttgtgctgcagccctccctgtcatgacagggcagcaggtgggtcaaggatgttg

SEQ ID NO: 925630 - DNA, 120 bp, Artificial Sequence
  ENSG00000235908_1 (sequence is synthesized)
tcgtcattaccacaaacagcctttgagggtctgcttgtggcctcgggttgcctggatagttagtgttagagtgattgtgttgttatggttgtccctaccttaatgatgataactggggtt

SEQ ID NO: 925631 - DNA, 120 bp, Artificial Sequence
  ENSG00000235908_2 (sequence is synthesized)
ggcccaaggagctgagctaagattgagtcctctgtgcagtatgtcccaggacagagaaagagcacgtattccatgccgttggttcacttagatcattttcagcagttatgattgattgat

SEQ ID NO: 925632 - DNA, 120 bp, Artificial Sequence
  ENSG00000235904_0 (sequence is synthesized)
gaacctgaagaactcaaatgcgggcggtggattatttcttatccctcctccatctaccccacacaagagctgctttttgttcctctttttgccaagttccaaggatacaatgagaagacc

SEQ ID NO: 925633 - DNA, 120 bp, Artificial Sequence
  ENSG00000235904_1 (sequence is synthesized)
aaggatacaatgagaagacctgccttctgcaaacccggaggcaagccctcatcagacaccaggtctgctgccaccatgatgttggactgctcagcctccagaactgtgagaaataaatgt

SEQ ID NO: 925634 - DNA, 120 bp, Artificial Sequence
  ENSG00000235904_2 (sequence is synthesized)
tctatggagtcttgagacttctcttcttttggtgtggattccggaactcctttctgaagcaagaggcaaatatctctcagcagagaatgccaagaccaatcacttaaccatggcaatctt

SEQ ID NO: 925635 - DNA, 120 bp, Artificial Sequence
  ENSG00000235904_3 (sequence is synthesized)
actcagcatggtaattcccaccctgatggtcccaagatggctgcagcagtttcagccatgttatcctaatccaccaacatctggaggtatctgtcttttcaatctccatctattacaaat

SEQ ID NO: 925636 - DNA, 120 bp, Artificial Sequence
  ENSG00000235904_4 (sequence is synthesized)
gtaggatacttttaccagaaggtcctcctctagactactactcatgtttcattggacaaatttggtcccatggaatttcttaagtcatttactgatgaggaaagtggaattatcatgact

SEQ ID NO: 925637 - DNA, 120 bp, Artificial Sequence
  ENSG00000235904_5 (sequence is synthesized)
ggattagactacctaagattcaccactcctgagcctggagaaagataattttctcagagcaaacaactgcatatggctgaagataggaatgaactataaaacaaaattggagtcctccag

SEQ ID NO: 925638 - DNA, 120 bp, Artificial Sequence
  ENSG00000235904_6 (sequence is synthesized)
gaaagaaagggggaattaaagggaaatgattgtgtaggcaaaacacaatagtctccaatgccaaataaactttgttttgttactctctcatctactttatcacatttttttccttgttac

SEQ ID NO: 925639 - DNA, 120 bp, Artificial Sequence
  ENSG00000235904_7 (sequence is synthesized)
ccttctcaccttaattcatcaccaataagcctctttaaatcaaatttttgatggtcatccataaatctccaagaaattgagtgataattaacattacagtgataatgagcttaaggtctt

SEQ ID NO: 925640 - DNA, 120 bp, Artificial Sequence
  ENSG00000235904_8 (sequence is synthesized)
gtttcttcttgaaagctgggagggtaggaggggagtgaatggtaagaaattacttagtgggggcaatactcattatttgggtgatgggttaccctataagtccagactttaccattatac

SEQ ID NO: 925641 - DNA, 120 bp, Artificial Sequence
  ENSG00000235904_9 (sequence is synthesized)
aatatatccatgtaacaaaactgcatttgcaccatttaaatgtatacaaatttttaaaaagaaagctctaaaagatataaacatcttcaagatctataggaataaagcagtcatgggggt

SEQ ID NO: 925642 - DNA, 120 bp, Artificial Sequence
  ENSG00000235904_10 (sequence is synthesized)
gtggcaggcaagaaaggatttaaggcccagttcgctcctatgacctcctcactttatctcctatcacactactctgcacactctgttatggccacgtcggcctctctgcagttcctctaa

SEQ ID NO: 925643 - DNA, 120 bp, Artificial Sequence
  ENSG00000235904_11 (sequence is synthesized)
gaggccagcattctctcaccctggggactttgtactttacttccctgtgcccacaccaagctttcttcatataaccatgttacttaattcctcccttactatgagtttctgctcacgtgc

SEQ ID NO: 925644 - DNA, 120 bp, Artificial Sequence
  ENSG00000235904_12 (sequence is synthesized)
caccttattaaagaggtttgtcctgaccatcttatgtaacatagcaactttatttcattctttgtcctattaccccagtttatatatgcttatggctcttataaccacctgacatggtat

SEQ ID NO: 925645 - DNA, 120 bp, Artificial Sequence
  ENSG00000235904_13 (sequence is synthesized)
gcatttatttattgttcttataagtaattatccatgagacaagtgtttatattttgttcacagtttgtttctctgagcctagtatagtgcctgacacatataggcatgtcttaaatatgt

SEQ ID NO: 925646 - DNA, 120 bp, Artificial Sequence
  ENSG00000235904_14 (sequence is synthesized)
atagaatgaactgatgggtggctactggccatgggaaacttagatgatctttctgttccttaacgtagatcacaacataattcaagaggtacctcatcctgggcaggcatctttctctat

SEQ ID NO: 925647 - DNA, 120 bp, Artificial Sequence
  ENSG00000235904_15 (sequence is synthesized)
gataatcagtaatacccatagtaagcccaagtaagtcgatatctttcttctttcatctactttcctctaagcaagaccctcattttttagggtgagctgtttatgttgaaagctgaacag

SEQ ID NO: 925648 - DNA, 120 bp, Artificial Sequence
  ENSG00000235904_16 (sequence is synthesized)
catctatcattctaataagaaataaaaggcaaatcccaacagagtagtgactgagacacatcctacaacttataatactctaattagaaaatgtgttttaattctgattcaattgtattt

SEQ ID NO: 925649 - DNA, 120 bp, Artificial Sequence
  ENSG00000235904_17 (sequence is synthesized)
aaataagtttagtatggcttggaatttccatttgatgtggaacttaagccacatatgcacaaaatgtttcggagacttccaggcaaaatggcaataggaatactagacataattgccagc

SEQ ID NO: 925650 - DNA, 120 bp, Artificial Sequence
  ENSG00000235904_18 (sequence is synthesized)
agaaaaacatggaaacgtctatatacaagattgaaaggaagacagccagactacagtgataggcaggtgagggaacagcctatgtgcattacatatgaaagacgtccctgcagaacctag

SEQ ID NO: 925651 - DNA, 120 bp, Artificial Sequence
  ENSG00000235904_19 (sequence is synthesized)
taacatccactgtctgtgtgccggcagtggtggtaggtgaatatctgaaccccactagtattgctgggaagactgtgagatagggaccacgaagaccagcctgtccaggcctatgctagg

SEQ ID NO: 925652 - DNA, 120 bp, Artificial Sequence
  ENSG00000235904_20 (sequence is synthesized)
tgagaagagcccagtcagcatgggaaagggatcatcttagaatgaggtcacccttgcctggcaaagagaaggaccctggtcccctgtctctgggtttcctcaccaaactcagaggataaa

SEQ ID NO: 925653 - DNA, 120 bp, Artificial Sequence
  ENSG00000235904_21 (sequence is synthesized)
ttctttgggaaatttctcaagttaaggggatctgaagtggtaagatgaaggcacagcaaacccaaacagatttcttttctgaaaagagttcagcaaactgcccctcaatctctgacagaa

SEQ ID NO: 925654 - DNA, 120 bp, Artificial Sequence
  ENSG00000235904_22 (sequence is synthesized)
cccattttaattctcaattctgagtattgagtaacaagtttgatttatgaaatgctatgtaacttttgttttaaatatcacattctcaactaacatttgaggatgtaagagatcctttta

SEQ ID NO: 925655 - DNA, 120 bp, Artificial Sequence
  ENSG00000235904_23 (sequence is synthesized)
ttatatgtgttatattaagtgaaaaatgtgtaaacaagtaggtgatttaggattacaacctgaaaatattttatacaactaaacacacaaaaattgatacaaaagtatggcacagatata

SEQ ID NO: 925656 - DNA, 120 bp, Artificial Sequence
  ENSG00000235904_24 (sequence is synthesized)
cagttggcactcagtatccaggggggattggtcccagaaccctttgtgataccaatatctgtggatgctcaagtcccttaatagtgtaatagtgtagtattagcatataacctatgcaca

SEQ ID NO: 925657 - DNA, 120 bp, Artificial Sequence
  ENSG00000235904_25 (sequence is synthesized)
tcttcccatatatgtgaaatcatctctagattacttataatgtctcatacaatgtaaatgctatgtaaatagttggaatactgtattgtttagagaatcattacaagaaaaaaaagtgtt

SEQ ID NO: 925658 - DNA, 120 bp, Artificial Sequence
  ENSG00000235904_26 (sequence is synthesized)
tgtacctttatagcacagacgcagccatccatttttttctcccaaatattttcaatccatgattggttgaatccacaaatgtggagtccactgatgtggagggccaactgcactccatta

SEQ ID NO: 925659 - DNA, 120 bp, Artificial Sequence
  ENSG00000235904_27 (sequence is synthesized)
tggcaactgtatcaaaatcgcaaagttatttttattcttacttttcatatgttaggtgagaagaaacttaattggccttttattcaggatatatccagaatccaaacactatctacaatt

SEQ ID NO: 925660 - DNA, 120 bp, Artificial Sequence
  ENSG00000235904_28 (sequence is synthesized)
gctgccactctggcctgaaccaccatcattttttttttctcaaattgctgcattagcctcctaatagttctactggcttcccttcttgcccactgtgtgccccatggtgtagtttctaca

SEQ ID NO: 925661 - DNA, 120 bp, Artificial Sequence
  ENSG00000235904_29 (sequence is synthesized)
cagcagacagagtggcctttcaaagacgtaagtcagatttctctgctcagaacttcccagtgactgcacatcactgtcatttcataagcctctctattaactagtcagacattatgttct

SEQ ID NO: 925662 - DNA, 120 bp, Artificial Sequence
  ENSG00000235904_30 (sequence is synthesized)
gctactgttcttgtactgactcttgtccaaccacactgacctccttgtgggtccttagatttgacaatcatgttctttcctttgcacgggctgttcttgctgcctggaattcttccttta

SEQ ID NO: 925663 - DNA, 120 bp, Artificial Sequence
  ENSG00000235904_31 (sequence is synthesized)
gttagcactctcttcaagcctttaatgtaaccttctcaagaaatccagctaccccctcaacacaccccctcctccttctagtcttgccaaatatctccaaacttccttcccagagtcatg

SEQ ID NO: 925664 - DNA, 120 bp, Artificial Sequence
  ENSG00000235904_32 (sequence is synthesized)
ttgcacagttccaggggatgggtgtctcataaaatagaatgtgaatgatacttactgaaattgtgtggaatgtgaagacctcactttatttttctcgatagttcttatcaccttttaata

SEQ ID NO: 925665 - DNA, 120 bp, Artificial Sequence
  ENSG00000235904_33 (sequence is synthesized)
cattatatcatttactttttaaaaattgtctatctcctcctctaggatcatcagctccatgagggtgggaatgtctgttgtacttactgctataacctcagttcctagaacaatgtctgg

SEQ ID NO: 925666 - DNA, 120 bp, Artificial Sequence
  ENSG00000235904_34 (sequence is synthesized)
gttccgattccctctgctggctatctcgaatagcaagcgatttttgcagcaacgctgctgccgctggaactgaacctgaagaactcaaatgcgggcggtggattatttcttatccctcct

SEQ ID NO: 925667 - DNA, 120 bp, Artificial Sequence
  ENSG00000235904_35 (sequence is synthesized)
gagctcttttctactttgtcaagtcggctctgttctcctgagcccagagtctcctatttagataaaaggtccctggtacaaatccagcttcctagtcaagaagaacagagaatttgggct

SEQ ID NO: 925668 - DNA, 120 bp, Artificial Sequence
  ENSG00000235904_36 (sequence is synthesized)
cagtgcacacatggtgtccatccacatacaagccgcaccacccctaaagcaactggcttccaccgaggggaactggtttctggaagctgtgtgagtgcatacgtgttccttggataaaaa

SEQ ID NO: 925669 - DNA, 120 bp, Artificial Sequence
  ENSG00000235904_37 (sequence is synthesized)
taaggatggcaggatacaatgagaagacctgccttctgcaaacccggaggcaagccctcatcagacaccaggtctgctgccaccatgatgttggactgctcagcctccagaactatggtg

SEQ ID NO: 925670 - DNA, 120 bp, Artificial Sequence
  ENSG00000235904_38 (sequence is synthesized)
tcagaagtgggatcccaagcagagcttctagggacccccaggagtgccaagtgaacatgcaagctaccttcaggacccacttgtgtccatggatctctcaaagcagctgaggattgtggg

SEQ ID NO: 925671 - DNA, 120 bp, Artificial Sequence
  ENSG00000235904_39 (sequence is synthesized)
gcaaccatcttgtccagagaccacgtattgaaactcctagactgaggttggattaaagatgatggggcccccagtgcaaaaacataccaaattgtaaaggctatcaacactatgaagaaa

SEQ ID NO: 925672 - DNA, 120 bp, Artificial Sequence
  ENSG00000235904_40 (sequence is synthesized)
gtattcaggagacccatctcatgtgcaaacacacacataggctcaaaataaagggatcgaggaatatttaccaagcaagtggaaagcaataaaaaaagcaagggttacaatcctagtctc

SEQ ID NO: 925673 - DNA, 65 bp, Artificial Sequence
  ENSG00000235904_41 (sequence is synthesized)
atatgtgtacacaatacaagagcacccaaattcataaagcaagtccttatagacatacaaagaga

SEQ ID NO: 925674 - DNA, 120 bp, Artificial Sequence
  ENSG00000235904_42 (sequence is synthesized)
ccaaattcataaagcaagtccttatagacatacaaagagacttagactctcacacaatcatagtgggagattttaacaccccacgatgaatattagacagatcggtgagacagataatta

SEQ ID NO: 925675 - DNA, 80 bp, Artificial Sequence
  ENSG00000235904_43 (sequence is synthesized)
acatcacattcagcagaatacaaaagacaagaaatagctaacaacagagccaaactgaaggagataaagacacaaaaaac

SEQ ID NO: 925676 - DNA, 120 bp, Artificial Sequence
  ENSG00000235903_0 (sequence is synthesized)
aggttccatgcgagcggtaagagtgcggcgggacttggaaatcgaatctgtgctctgtgagagatcctaggaaaggaaactgggagcccgggagaactaaaattcccaattaaaagtgaa

SEQ ID NO: 925677 - DNA, 120 bp, Artificial Sequence
  ENSG00000235903_1 (sequence is synthesized)
tttaaatctgagctgttcttagacccagaatttcttgcctgaaggaggaatcaggtccccacaaggaaagaccctgcaactgtataaaaaaagaatctaaaaagatcatgactccttcag

SEQ ID NO: 925678 - DNA, 120 bp, Artificial Sequence
  ENSG00000235903_2 (sequence is synthesized)
tcctttcccaaagagacctatggaaatttcctcaggaagagggaccaagcaaaaccccagaagagttgatctcaaagcttattttatgaagaaaattgacctgagtgacacaaagggttg

SEQ ID NO: 925679 - DNA, 120 bp, Artificial Sequence
  ENSG00000235903_3 (sequence is synthesized)
gactgtagtagatgtcacgttttgctgcctagatctccatccagggatgaactcttatttcctcagcttctttgtctcctcagcttctgggagggttggcagctgatattctcacctgag

SEQ ID NO: 925680 - DNA, 120 bp, Artificial Sequence
  ENSG00000235903_4 (sequence is synthesized)
tccctttctaggacttgcccttgcctgaagagagctgtgctgcccaacatgatgcctcctccaaggtacaatccacacccagtgactaataaacaggggttacaaaggcatgcctgcttg

SEQ ID NO: 925681 - DNA, 120 bp, Artificial Sequence
  ENSG00000235903_5 (sequence is synthesized)
ccccagtttgggacaactttaccaggccaacccagcctcaaggctctccacaggaacagggaccctgaaagctgtgtctatgaagttattacaagatattggctactgtggtgcatggag

SEQ ID NO: 925682 - DNA, 120 bp, Artificial Sequence
  ENSG00000235903_6 (sequence is synthesized)
cttctaggccagggtgattctcacacctgcctgatgtggatcttgttgcttcacacctgaaacatcatttgagaagcccgggaagtggtgtggctgctgcatggctgctccaagaactac

SEQ ID NO: 925683 - DNA, 120 bp, Artificial Sequence
  ENSG00000235903_7 (sequence is synthesized)
tcccatgggagaggagctcccaacagtgccttgccatcaagctttgatttctaccttacatacctctgaataaactgttgccaatgaggctgatggaagtcttgtgagtttgaatgccag

SEQ ID NO: 925684 - DNA, 120 bp, Artificial Sequence
  ENSG00000235903_8 (sequence is synthesized)
gttgaacttaagaggattccctgttgtgtttgcagagagcaactttgaggtatgagataatgtttcactctgggacaaagaacaggctttcttacagcttgatataaaacagatgaattc

SEQ ID NO: 925685 - DNA, 120 bp, Artificial Sequence
  ENSG00000235903_9 (sequence is synthesized)
cccaagtccagtgtacctcttctgcaatgcaaccaattgcatgtacaggcatccatctgggcccatgtcacatcaccctatgggtcttggggatggggagcaagggaaactgatgtggat

SEQ ID NO: 925686 - DNA, 120 bp, Artificial Sequence
  ENSG00000235903_10 (sequence is synthesized)
gataatgctcataatgcttaccatgccatgggtaatagagttctttgccatagacctaggattcttgagggtttttgttttttttttccagcttccatgaaacagtagtataggctaact

SEQ ID NO: 925687 - DNA, 120 bp, Artificial Sequence
  ENSG00000235903_11 (sequence is synthesized)
tgttagcttccaagtagagtaaaatcaaatccctgacacaacagttaattcaaagttcctaaagtagctaaaaatatttcttttaagttgaggcacttgaatattctggttatgaagcta

SEQ ID NO: 925688 - DNA, 120 bp, Artificial Sequence
  ENSG00000235903_12 (sequence is synthesized)
taataattaagacaatatggcattggcatgcgaatagagtccagaaatagcaatcaatggaacagaacagagagtccagaaatagacccatacaaataaaattaactgattttcaacaat

SEQ ID NO: 925689 - DNA, 120 bp, Artificial Sequence
  ENSG00000235903_13 (sequence is synthesized)
gttaacaggataattcaatgggggaaaggatatttttagcaaatggtgctgaaaacatatgatatccatgtgcaaaagaaatcatctggagccatactttaaaccttataaataactcaa

SEQ ID NO: 925690 - DNA, 120 bp, Artificial Sequence
  ENSG00000235903_14 (sequence is synthesized)
gatggatctcagacccaatggtaagagctaaaacaataaaatttctagaagaaaacggaaaatttttgtgaccttgagttaggcaaagaatttttaggtaggacacaaaaagcacaaatc

SEQ ID NO: 925691 - DNA, 120 bp, Artificial Sequence
  ENSG00000235903_15 (sequence is synthesized)
acaggtgaaaaattgaaaacttggaatttaccattaaaagcatcttgttctttaaaagacactgttaagaaaataagtatataagccatgggatgagagaaaataattgcaaaacacata

SEQ ID NO: 925692 - DNA, 120 bp, Artificial Sequence
  ENSG00000235903_16 (sequence is synthesized)
tcaggtaagggacttgtatccaaaatatgtaaagaacacctataaattaagaataggaagacaacccaatataaagtgggcagaagattatacagatactttaccaaatatgcaaatggc

SEQ ID NO: 925693 - DNA, 120 bp, Artificial Sequence
  ENSG00000235903_17 (sequence is synthesized)
cagtaagcacatgttcaacatcattagctgttagggaaaatgcaaattaaaaccacaatttgctactgcacattcctggaataactaaaatgaaaaagtctgagaatacgaagtgatggt

SEQ ID NO: 925694 - DNA, 120 bp, Artificial Sequence
  ENSG00000235903_18 (sequence is synthesized)
gagaatgtggagcaactcgaatgcccatatattgcttgtggggttgcaaaatggtacaaccactttgaaaaacagtctggcaatttctcatgaagttaaacatgtacttaccatatatcc

SEQ ID NO: 925695 - DNA, 120 bp, Artificial Sequence
  ENSG00000235903_19 (sequence is synthesized)
cagtaattctatttctggatatttgcctaatataaaaacatttgtctacagaaagacctgagtgtcatagcagctgaatgctcaataagctgaatgtttatggcaactttattcataaca

SEQ ID NO: 925696 - DNA, 120 bp, Artificial Sequence
  ENSG00000235903_20 (sequence is synthesized)
ataaaaaaaaacttgaaacaatccaaatgaccatcaattggggagtggataaacaaattgtggtgcattcatacaatgacatgctactcaagagtgaaaaggacaagaccatggatacaa

SEQ ID NO: 925697 - DNA, 120 bp, Artificial Sequence
  ENSG00000235903_21 (sequence is synthesized)
gcaacaaggtggaaaaacctcaaaagcatgatgccaataaaactagctagcgctaaaagatgtatattgtatggctccatctatatggcaccctacaaaaggcaaaactacagagacaga

SEQ ID NO: 925698 - DNA, 120 bp, Artificial Sequence
  ENSG00000235903_22 (sequence is synthesized)
aagtaggttggtttttgccagagggtagagctggtgaaagaggattaacctttgaaaaggtacagcagaattgttttggagtggtggaagtattctatattttgattgtggtggtaggta

SEQ ID NO: 925699 - DNA, 120 bp, Artificial Sequence
  ENSG00000235903_23 (sequence is synthesized)
aatagagaatggaagaacaaaagaatgaggaaaggaagcaagaaaggaaggaagaaagggtgggagggaggaagaacggaagggagggaaagacaaatttcttctcattctttatccctc

SEQ ID NO: 925700 - DNA, 120 bp, Artificial Sequence
  ENSG00000235903_24 (sequence is synthesized)
tttgagatgcctctctgtggatcctgtcacctctactggggagcaaaaagaacacagaagttggagccgacggatcccatgcctagctgggtaattaggcaaatctcagcctctggaaat

SEQ ID NO: 925701 - DNA, 120 bp, Artificial Sequence
  ENSG00000235903_25 (sequence is synthesized)
gcagcttcttctgtaacctacctcagagggctgttgtgaggattgaatggggtaacatttaaactaactggcaaaagcaggttctcaatatattaaaattcacatgaaaaagataaacca

SEQ ID NO: 925702 - DNA, 120 bp, Artificial Sequence
  ENSG00000235903_26 (sequence is synthesized)
ggaagggagttggcaggaagccaggaagcctcctgtgttctctgcaggaggcttatctagttcatcaggatcttgggaacagctagtcttcctctgctgcattctgagagttaggtgatg

SEQ ID NO: 925703 - DNA, 120 bp, Artificial Sequence
  ENSG00000235903_27 (sequence is synthesized)
agtcaccacctcaagaggccatctagttctggccgatctatctgactggatcgtggaccctaggacccagctaacttgttctccagccaatttagaagaatgagtagcaaaaataatatg

SEQ ID NO: 925704 - DNA, 120 bp, Artificial Sequence
  ENSG00000235903_28 (sequence is synthesized)
gcaagtatttcttgaagtgccctaaccctctgtccttattagtgtaccctgtcaggagtggcctgccttgactttctgtcaaactggagcagcctgagactaagggcaaatgccctcttg

SEQ ID NO: 925705 - DNA, 120 bp, Artificial Sequence
  ENSG00000235903_29 (sequence is synthesized)
gccttggccggccacaacttggatatgcaggtcaggcttattgttagggaagctctgagactcaattaatctgatgcctttttattatgagttcaggtgcagctccatttacaagttttt

SEQ ID NO: 925706 - DNA, 120 bp, Artificial Sequence
  ENSG00000235903_30 (sequence is synthesized)
ctttcaaaatcattcagccattaaagctgcataatcttggaaggttttgaagacgcatgattggtaaatgtttttccccttcacacattatctctcatgtttattcatgaaaagtgaacc

SEQ ID NO: 925707 - DNA, 120 bp, Artificial Sequence
  ENSG00000235903_31 (sequence is synthesized)
agtcttataatttaaacagtgtcttggggtatctggcctcctgtatttctaagggggaggaaagatgaggctagcccagaagccatttaaaaaggggatttgaggcctgaacgcagagaa

SEQ ID NO: 925708 - DNA, 120 bp, Artificial Sequence
  ENSG00000235903_32 (sequence is synthesized)
ctcaatcccaggtactaatgaccttgctttggcttgcaagactaagcctgaggcctgtggcacttaagagggttactgggtacccagacaggcaaatgcctgttgattggatggctaaat

SEQ ID NO: 925709 - DNA, 120 bp, Artificial Sequence
  ENSG00000235903_33 (sequence is synthesized)
tgtgaagaaagcaaagcttacctgtgcaatgtgtccatgccttcattcctactttctgaatcaacagtgcctgttattgttctgcccaactgttaagatgttccacctgtgcctgctctt

SEQ ID NO: 925710 - DNA, 120 bp, Artificial Sequence
  ENSG00000235903_34 (sequence is synthesized)
tggcgcagtactccaggctatagatcaacatttctcaaacctggctgcacattagagtcatctggggatcttttaaaaacccagctgccttggctgcacatctgatcattacgtcagact

SEQ ID NO: 925711 - DNA, 120 bp, Artificial Sequence
  ENSG00000235903_35 (sequence is synthesized)
cttgtagggaggagtatagacatcagcattgattaaaactcctgagataattccaatgtgcagtcaggattgagaacagctggtctacaccagttcctcttgaagtatggtctgtaagtc

SEQ ID NO: 925712 - DNA, 120 bp, Artificial Sequence
  ENSG00000235903_36 (sequence is synthesized)
acaggctgcagaatctccttggatgtttgtgggaaatgcagattgctaggttcaccagccctataggcactgagtctcaaggtgagatctggaaaatgtgttttaataagctccccaggt

SEQ ID NO: 925713 - DNA, 120 bp, Artificial Sequence
  ENSG00000235903_37 (sequence is synthesized)
gattcctaagctttttgcaagtaccgctgcttcttatgatatggccgttcttgcttcccatcagttatccttgtctttcagttcctcaaagatatcaagtttcattcatcctcaggacca

SEQ ID NO: 925714 - DNA, 120 bp, Artificial Sequence
  ENSG00000235903_38 (sequence is synthesized)
ctgcatatgatagtcgctctacttggaagacattttcctctttctccttgttattaggcatttggcagacttaacaatgaggctattgtaaccccagaaagtcattgcaaagtgcctgct

SEQ ID NO: 925715 - DNA, 120 bp, Artificial Sequence
  ENSG00000235903_39 (sequence is synthesized)
tagggggttaagagtagacactgcagggccttggaatagtaatggtttactatttaatgagttccctgtcactggaagtcatagagagattgctccaggcatggtgggagaaaagccagt

SEQ ID NO: 925716 - DNA, 120 bp, Artificial Sequence
  ENSG00000235903_40 (sequence is synthesized)
ttgacaggcggtggagggataagagggaagacttgagtgacgtggcacaaactgggtcagatctattaaagaggcagccctgggcagctggcaagagatcatgtcaagagacacaatgca

SEQ ID NO: 925717 - DNA, 120 bp, Artificial Sequence
  ENSG00000235903_41 (sequence is synthesized)
ggtgccagcaggaccagaagatcagcttcttagagcgagtgccacctggaagggggaaaccaagggaaggggcacagcaaagggcaaagctgggtggtggaggaagtacccaaacagagg

SEQ ID NO: 925718 - DNA, 120 bp, Artificial Sequence
  ENSG00000235903_42 (sequence is synthesized)
gaagagccactctggccacatcaagtgaatactgatgatcgggaaacattcatgggaagttatttcactctctcgagtccagtgtaagtgagaaagtgtaatttaatttaaaagagccta

SEQ ID NO: 925719 - DNA, 120 bp, Artificial Sequence
  ENSG00000235903_43 (sequence is synthesized)
atttagccttccatcaactgtagatcttttaacgagacctttattcttctaggacagcatttctcaaactttaatgtgcgtaggaatcttattaaaatgcagattctgattcagtacgtc

SEQ ID NO: 925720 - DNA, 120 bp, Artificial Sequence
  ENSG00000235903_44 (sequence is synthesized)
tggggtaagggctgagattcagcacttctaaccggctcctagatgcccccggtctgagcactacacttagagcaagcaggtttgaacattgcgacttataacagtggacccatggtgtag

SEQ ID NO: 925721 - DNA, 120 bp, Artificial Sequence
  ENSG00000235903_45 (sequence is synthesized)
acaagtccagaaatgactgctgaatcaacagtttttatgttagcttccgtataccttcagaattcagtgtttgtgtgcattctaattctctaaatgatgtatattagatttccattaacg

SEQ ID NO: 925722 - DNA, 120 bp, Artificial Sequence
  ENSG00000235903_46 (sequence is synthesized)
ggacccaggaggacgacgacgaggagaaagcgatgcgcgcgcggctcccgggaaccggctcttggctagcgaggagcccccgggatggctgagaagcagaaccaacccgcccgccgcctc

SEQ ID NO: 925723 - DNA, 120 bp, Artificial Sequence
  ENSG00000235903_47 (sequence is synthesized)
tccagggtcaagcgaaactgggtcgcaggaagaaaaataacgaagagattgtagattaagaaaaggcaacaaaaacactaccaggccgctaggaggaccgcctcaaaatgccgccggaag

SEQ ID NO: 925724 - DNA, 120 bp, Artificial Sequence
  ENSG00000235903_48 (sequence is synthesized)
ttcaagtgcttacctgcctaattatagcaactcaacaatgtaatcaactctcctctacgttttcccagatgagtttgaataccaagtttagaatctgtaatcctgaaatcctgctccaac

SEQ ID NO: 925725 - DNA, 120 bp, Artificial Sequence
  ENSG00000235903_49 (sequence is synthesized)
ccaggagttgagcctacctgaataggagtgttgggtgccaacgctagactgctctgaagtaccaccgattgcacaaatcccttccttcttattgattgcttttctaaaggtcttggcaac

SEQ ID NO: 925726 - DNA, 120 bp, Artificial Sequence
  ENSG00000235903_50 (sequence is synthesized)
atctgtgctttttaggccatggaaaatctgcaaaaatataatgtatctttagaaactcaagcagtgatcaagaaaatcacaaaggaaagaatatgtaatgtcgaagcaaggaggtaagga

SEQ ID NO: 925727 - DNA, 120 bp, Artificial Sequence
  ENSG00000235903_51 (sequence is synthesized)
atgtctttctggatattttttaaaacagaattcaagttccaagtttcaaatgtgtctccttgtattctgcatggtactcaccttgataaactcatcaaagctgatccttccatcttggtc

SEQ ID NO: 925728 - DNA, 120 bp, Artificial Sequence
  ENSG00000235903_52 (sequence is synthesized)
cagatcacctgtagccatcaggttttctgtaatttctcgtactctatacccaggcaaaggcaagcaagcagccttgaacaagtcattcaactcattgaagctgatgtatccattgccatc

SEQ ID NO: 925729 - DNA, 120 bp, Artificial Sequence
  ENSG00000235903_53 (sequence is synthesized)
agtatctgtaatgtacacaatatactgaagcttcaggacgattcaggcaacagcttttagagaggtgagggaagactagatggaaggtgaagggacgagagaggctatcattcagacatt

SEQ ID NO: 925730 - DNA, 120 bp, Artificial Sequence
  ENSG00000235903_54 (sequence is synthesized)
aaggcatgatcccagggaagagtcagaatctcacaagatgactgttgctactgaataggggcaccagcattactttcaacatccacagtaaaagagtcataatttctataaggtacctct

SEQ ID NO: 925731 - DNA, 120 bp, Artificial Sequence
  ENSG00000235903_55 (sequence is synthesized)
gtttccacaaagaactcttatagaaactcttaaggaaaccacaggtttagtgataaagagtaagagaaagtatgtgatggtattaaaatcaaggaaacagcaaaacagaagacaagatat

SEQ ID NO: 925732 - DNA, 120 bp, Artificial Sequence
  ENSG00000235903_56 (sequence is synthesized)
aaaagatgagacttacaaaccatttccaggaacaaactatgtaagagtagagtccatattccatgttttgatagagaaagtcattttattgaagcatatttttcaaaaataagttctccc

SEQ ID NO: 925733 - DNA, 120 bp, Artificial Sequence
  ENSG00000235903_57 (sequence is synthesized)
agctcctctaaacaaatactactggtttcttgtcatctctgaaattttgctcatgttcccatttcattgaatctaccctgaagctactcagtgaagaagagaatgatgcaatttggggta

SEQ ID NO: 925734 - DNA, 120 bp, Artificial Sequence
  ENSG00000235903_58 (sequence is synthesized)
gaacataagggataacttttgtgcatttgaattcttaaaataccacattaagaagcaattcccatttattacatgaagaaatattcttctgcatcccccatgatttagaactatctttcc

SEQ ID NO: 925735 - DNA, 120 bp, Artificial Sequence
  ENSG00000235903_59 (sequence is synthesized)
aaaatgtaagtcagaaatacgctttttctcaatcctccatgtggtggtctccaaagatggctctcaacaatttcttccctctcggtctatacagactgctcctcacatcaagaggtagag

SEQ ID NO: 925736 - DNA, 120 bp, Artificial Sequence
  ENSG00000235903_60 (sequence is synthesized)
cttatttccctcccctagaatctgggctggttttttaactgctttgaccattagagggtggtagaaatgatgtctggggctggaaacttctgcttccttctttttggaatgctcattctt

SEQ ID NO: 925737 - DNA, 120 bp, Artificial Sequence
  ENSG00000235903_61 (sequence is synthesized)
aggatgctccctcttggtacccaatttccatgacatgagacatttaagccacataaataaagaagccaatgaaggagaactgggtgcactggttaacaaacctgctgagatcccatctga

SEQ ID NO: 925738 - DNA, 120 bp, Artificial Sequence
  ENSG00000235903_62 (sequence is synthesized)
cagccagcatcaatgccagcaacctgagagggccattttgggctttctggcccatttgagctcctagatgaccacattcccagccaacatcacattaagcagaagaatcgcccagctgtg

SEQ ID NO: 925739 - DNA, 120 bp, Artificial Sequence
  ENSG00000235903_63 (sequence is synthesized)
ctcagtcaaccaaaagaacagagaagacaaaacgagtgatgtcttaagtcactacgttttagagtagttacccagcaataagcaactaaaacacttcacttttacataaatgtctttttt

SEQ ID NO: 925740 - DNA, 120 bp, Artificial Sequence
  ENSG00000235903_64 (sequence is synthesized)
aagaggtatcttcgtgttcatatttaaaattagtatttgaccaagccaacagatacagtttataacttcaaaggaagttaatcaaaattctccatattatttagggatgaacaaagggaa

SEQ ID NO: 925741 - DNA, 120 bp, Artificial Sequence
  ENSG00000235903_65 (sequence is synthesized)
gctgaccctctcataattcagctatgggaatctgaggcgctttctaggtgttttcttctcagaaaagcgacagtcttgctgagaaacagtgcttgagtaatttcccttttcctgtgcatc

SEQ ID NO: 925742 - DNA, 120 bp, Artificial Sequence
  ENSG00000235903_66 (sequence is synthesized)
actgctgccctctagtgggtgagaagaaaataaaacagaaaatggatgataatctccatgcccctagctaatccacaccagcatgtttcaaatcggagacccactgaagtttgttgaact

SEQ ID NO: 925743 - DNA, 120 bp, Artificial Sequence
  ENSG00000235903_67 (sequence is synthesized)
tactggtgcagaggggataagtggagtgggagtgtgggggttggggtgtttctaagcatagttatattttggatagttcagggaagttatcgatttaaaaaaaaatttgtgacaggatgt

SEQ ID NO: 925744 - DNA, 120 bp, Artificial Sequence
  ENSG00000235903_68 (sequence is synthesized)
tgttttcagtagatttcttttttatattttcatattattctatagtgctgtatttgttcttgatggccaccaacaaccacaccaaacagaaaacagtcttaattaacatcaaaacctgta

SEQ ID NO: 925745 - DNA, 120 bp, Artificial Sequence
  ENSG00000235903_69 (sequence is synthesized)
ggccaaaaatgcattacactcaattttgcaaatccatatccattatccaacaaattaccatcctgccacatacatatatcagtggtttcaaacttttgttccaccaagcaaccctttgtt

SEQ ID NO: 925746 - DNA, 120 bp, Artificial Sequence
  ENSG00000235903_70 (sequence is synthesized)
gacagaaaccttacatgtaaaccttacatgtaagcaaacaaataaaaataacaactctgagagtctttggttgaaaaaacccaaatgtacccctgcccctgctatcttatctccttgtca

SEQ ID NO: 925747 - DNA, 120 bp, Artificial Sequence
  ENSG00000235903_71 (sequence is synthesized)
ccttcatctgtgggaactccagggagcatgatttgaaaatcatagaattatatatgtcttcatttaaatttaaatgtattcattaaaaatatatttttgatatcaataaaaattttattt

SEQ ID NO: 925748 - DNA, 120 bp, Artificial Sequence
  ENSG00000235903_72 (sequence is synthesized)
tgggaagggtatagggaaattacaaggtatggtgcagtgtcccaagaatagtaacatggggcactgaaaagatagagaaaggaaaagaatgagtgaccagaacctggtgacagagccaca

SEQ ID NO: 925749 - DNA, 120 bp, Artificial Sequence
  ENSG00000235903_73 (sequence is synthesized)
ggggagggctgtctggctggagctgtgacttaccattgaaggactcaggaagttcttttttttctttagacagggtctcgctccgtcatctaggctgtcatgcagtggtgtgatcatgac

SEQ ID NO: 925750 - DNA, 120 bp, Artificial Sequence
  ENSG00000235903_74 (sequence is synthesized)
tcactgcaccctcagcacacaccaccatactgggctaatttctgtatttttatagacaggttctcaccaggttgcccagtctgatctcaaaatcctgggctcaagcaatcttcctgcctt

SEQ ID NO: 925751 - DNA, 120 bp, Artificial Sequence
  ENSG00000235903_75 (sequence is synthesized)
ttataggcataagccactgcacccagccctcaggcagtttttattaattctgcaggaagggagctgggagaataaaaatcccgacctcattttctttccttcttttgttctcttgcttga

SEQ ID NO: 925752 - DNA, 120 bp, Artificial Sequence
  ENSG00000235903_76 (sequence is synthesized)
tcttttgttctcttgcttgagcttcccatggatgaactggaagaattcagaaattgaatgatataaataacaaagttaaattaatagacatgtattgaacttagtttttagagtatgtat

SEQ ID NO: 925753 - DNA, 120 bp, Artificial Sequence
  ENSG00000235903_77 (sequence is synthesized)
aattttcccaattttctgtggaattattgcaaaatttgatcacaaactataaggctacaatttaaaaatataacaaattcctaactgtaaaaattttctaggttaaattctttgatcaca

SEQ ID NO: 925754 - DNA, 120 bp, Artificial Sequence
  ENSG00000235903_78 (sequence is synthesized)
aagcaggcaagaaatgaatggtggaacaaactaaaatactagctccatgaatgaaaagacctacatggatatgagagtaattaagaaggagttagcagcgatgggactttgtgattgact

SEQ ID NO: 925755 - DNA, 120 bp, Artificial Sequence
  ENSG00000235903_79 (sequence is synthesized)
atgggcctggaagagtatggagtttgagatgagaagagaaaatggaaactctgaggagcacagaaaattaaggcccaagtgaagaaagatgagcttgcagggaagactgggtgatgacaa

SEQ ID NO: 925756 - DNA, 120 bp, Artificial Sequence
  ENSG00000235903_80 (sequence is synthesized)
gcggtgtaggagagaatccgggtactctgttttgctgaaatgagaaagacggacatacagatgcatataaaggcatatagaggcagatatatttatatttgaggaagtctggacattgag

SEQ ID NO: 925757 - DNA, 120 bp, Artificial Sequence
  ENSG00000235903_81 (sequence is synthesized)
taagttagtgctgataacttctagtttcttagttaagaaagagatgaggttatctatacggagtaaggaggaacgtggtggtgccgttgctactacggtgtaatacgtcactactattac

SEQ ID NO: 925758 - DNA, 120 bp, Artificial Sequence
  ENSG00000235903_82 (sequence is synthesized)
tattaattatggtgtaatacctaaaacgtagtggcttgaaataacaataattatcttttatctctcacagtttctctgggtcagaaatttgaggataaggtggtgaatgattctggctca

SEQ ID NO: 925759 - DNA, 120 bp, Artificial Sequence
  ENSG00000235903_83 (sequence is synthesized)
aggtctcccatattgttgtgatcagtggctggagccagaacagcagagggcttagagaatctagggattggtcagatgtcgctttcgttttatctggctttgagacctctccaatgtgag

SEQ ID NO: 925760 - DNA, 120 bp, Artificial Sequence
  ENSG00000235903_84 (sequence is synthesized)
ctaatttaggcttcctcatagcgtggtaacctcaaggtatgtgaaccgtgtagcggttgacgcttccaagaacaagtattctagcaggcaaggttcatcttttatgctttaggcatggaa

SEQ ID NO: 925761 - DNA, 120 bp, Artificial Sequence
  ENSG00000235903_85 (sequence is synthesized)
attacatagcgtcactttccctaaaatgagaaaggatatagcatgtttggacagtacgaaccagtatcacctaattgacattaatagaccatcctatccagcaatggcagaatacatatt

SEQ ID NO: 925762 - DNA, 120 bp, Artificial Sequence
  ENSG00000235903_86 (sequence is synthesized)
tcaagtgtagatggaacattcaccaaggcagatcatattctgggccatgtacaaaaaaaactgagaaatttaaaaggattaaaattacagaaagcatgctctctgaccacagtggaatta

SEQ ID NO: 925763 - DNA, 120 bp, Artificial Sequence
  ENSG00000235903_87 (sequence is synthesized)
agctagaaatagaaaacaaaaaattatatagaaaatccccaaatatttggaaattttttatttttgattttttaaaattgtgttttttaaccaatgaaaaataattgtattatctgtgga

SEQ ID NO: 925764 - DNA, 120 bp, Artificial Sequence
  ENSG00000235903_88 (sequence is synthesized)
gtacatagtgttgtttcaatacatataaagtatagtgatcagatcatggatattagcatatcagtcattccagacatctataatttttgtgtagggaaccttcaatattatcttccagct

SEQ ID NO: 925765 - DNA, 120 bp, Artificial Sequence
  ENSG00000235903_89 (sequence is synthesized)
agctatttgaaactacataatatattatggttaattacagtttttctattgtggtatagaaattagataatatactcttttaaagtccatgggacacaatgaaaaataattagaaaaatt

SEQ ID NO: 925766 - DNA, 120 bp, Artificial Sequence
  ENSG00000235903_90 (sequence is synthesized)
catactttgaactgattgaaaattaaaacacaacatatcaaaatttgtgagatgcagctaaagcagtacctactgaaaaatgtatgggattagatacttaaaaagtagatgttaaaccaa

SEQ ID NO: 925767 - DNA, 120 bp, Artificial Sequence
  ENSG00000235903_91 (sequence is synthesized)
tgtcctaagcttctgcctcaagaaacttaaaaaaagagcaagcaaagtaaatccaaaacaagtaagggaacaataaagataagattagaaatcaatatagtagaaaaaagggaattatag

SEQ ID NO: 925768 - DNA, 120 bp, Artificial Sequence
  ENSG00000235903_92 (sequence is synthesized)
atacaaccaaagaaacaaaaaaactggtgatttgaaaatagcaataatattgatataggcctctgatcagactcatcaagaacaaaagaaataatatacacactaccaacatcaggaatg

SEQ ID NO: 925769 - DNA, 120 bp, Artificial Sequence
  ENSG00000235903_93 (sequence is synthesized)
aatttgtaggaacattcctacaaatcctacagacactaaaatacaataagaaaatattataaacaatttatgcttataaatttcattacctaggtgaaaagtacaaattttttcaatgat

SEQ ID NO: 925770 - DNA, 120 bp, Artificial Sequence
  ENSG00000235903_94 (sequence is synthesized)
tcaaactgtcaaaggtcactcaagatgaaatagataacctgaatagccctgtatctattagagtaattgcattcatagtttaagatctcctttcaaataaattccagactagatggcttc

SEQ ID NO: 925771 - DNA, 120 bp, Artificial Sequence
  ENSG00000235903_95 (sequence is synthesized)
tctggtgaattttaccagacatttaagaaagaaacaatgtggccgggcccagtggctcacatctgcaattccagcattttgggaggctgaggcggatggatcgcctgaggtcaggagttc

SEQ ID NO: 925772 - DNA, 120 bp, Artificial Sequence
  ENSG00000235903_96 (sequence is synthesized)
ttgatgtcagtcagcctgtgtcaacagccaccccaatgctggcacaaaaggcactagaacagaatagcctgatggcagagatgaagtgtgcatggctccagcagcacggactcctctcat

SEQ ID NO: 925773 - DNA, 120 bp, Artificial Sequence
  ENSG00000235903_97 (sequence is synthesized)
taaggctgatctagctactgttgctgccccatgtctaacttgccagcaacggagaccaaagttgagccccggaatcagcaccattcctcatagagaccagctagtcactgggtggaagag

SEQ ID NO: 925774 - DNA, 120 bp, Artificial Sequence
  ENSG00000235903_98 (sequence is synthesized)
ggctctccacaggaacaggtgaggccatagttgtgattacatcacaggtcagtttctcctctgcccaagccttcttccttcattcctccacagatgctgatcctgagattcctttccagt

SEQ ID NO: 925775 - DNA, 120 bp, Artificial Sequence
  ENSG00000235903_99 (sequence is synthesized)
aaacttcctccatgcaatcttcatctcaggagtctgtttcctggggaaactaacctgcaactgatacaaatgcctattctgtgagataaaacactaaaagtacaatgcgagtggtataaa

SEQ ID NO: 925776 - DNA, 120 bp, Artificial Sequence
  ENSG00000235903_100 (sequence is synthesized)
tattctgctacaggaatacaaagtcaggtatcatttttgacttaggtagtcagagaatggagatattctgagttggacttctgagatactaggattcaataggtgaagggaagatgagat

SEQ ID NO: 925777 - DNA, 120 bp, Artificial Sequence
  ENSG00000235903_101 (sequence is synthesized)
ggtataagactaacataggcagaattttgctaaacgaattggagatgaaacatcataagtgcaggtgcacaagtagaaaagtaaaatcagagctcaaggaaggagaagtgatccagctgg

SEQ ID NO: 925778 - DNA, 120 bp, Artificial Sequence
  ENSG00000235903_102 (sequence is synthesized)
gcagaaatatggggcctatatagagatataccaggaaataaagccaggacgaatggcagggtaggacctgattgttaagggtcttaaatgctggggtcaagattgtggcccttacttaaa

SEQ ID NO: 925779 - DNA, 120 bp, Artificial Sequence
  ENSG00000235903_103 (sequence is synthesized)
agttggttgggcatgattttgggagttgtagcaaaagatgtggcaaactcaaagcttccttttcatgtaaagtatagagaagtggaggttcatatcattaaatcactgtaatttcagtgt

SEQ ID NO: 925780 - DNA, 120 bp, Artificial Sequence
  ENSG00000235903_104 (sequence is synthesized)
gaacttctaacaatttgagctaaccatgagataggacaccttatcaagcaatgagctcttcattatctaaagagatgctgaatttcaagtccatgtagaggaagtcttgtgttgactaga

SEQ ID NO: 925781 - DNA, 120 bp, Artificial Sequence
  ENSG00000235903_105 (sequence is synthesized)
ttagtaacttggatattgtgctaagtgctttacaggtattcttatttaatcctcacaaggcagtatggtagataatctattatattgaaaataatgggccaggcacagtggctcacgcct

SEQ ID NO: 925782 - DNA, 120 bp, Artificial Sequence
  ENSG00000235903_106 (sequence is synthesized)
tagtcccagctactcagaaggctgaagcacgagaatcacttgaacccacgaggtggaggttacagtgagccaaaatcacaccactggactccagcctgggtaagagagcatgactaggtc

SEQ ID NO: 925783 - DNA, 120 bp, Artificial Sequence
  ENSG00000235903_107 (sequence is synthesized)
tcaaaagaaagaaagaaaataatgaacaaaaaatgttgagtgggcagtattaaattaaaaaaaaacctaatgtattaaagaaggagaaaagtataaaaattagtcaacaagcagagaaag

SEQ ID NO: 925784 - DNA, 120 bp, Artificial Sequence
  ENSG00000235903_108 (sequence is synthesized)
aaagaaaatataaaggtaaaaatgtatgttatccaaatgagacctcttaagaagaaaaaataaaggaaattcaaaaaataagttaggaaatagtgagtaaaattatgaagttaaaaattc

SEQ ID NO: 925785 - DNA, 120 bp, Artificial Sequence
  ENSG00000235903_109 (sequence is synthesized)
accaaaaatttattgatatgtccaagttcagcttgtagtgaacagactcttcttatgcagaatttgagcaaagtgctaacacaacagagttaggtaatgggatgagggtcagtcagatca

SEQ ID NO: 925786 - DNA, 120 bp, Artificial Sequence
  ENSG00000235903_110 (sequence is synthesized)
ctctatttttggaaactggtttcatgactgcttccccttacttagtcataaacaggctatataaaaagctgtcagagtggaaagagggagaggatttgtgaatttttttttttagcatgt

SEQ ID NO: 925787 - DNA, 120 bp, Artificial Sequence
  ENSG00000235903_111 (sequence is synthesized)
ttttatggttctgtaagtcaccaccctcccaaagggatgaagtttcggggtgcactccccttacctcagcctagtagggggacttccaggagataatgagagagttggatgtttcctcaa

SEQ ID NO: 925788 - DNA, 120 bp, Artificial Sequence
  ENSG00000235903_112 (sequence is synthesized)
atttacagacacaaagactggtgcctggcttctcctgataaagctaaacctgcatgtggctggtctctagttggctagatagtagtagttaaaatgaaaagaaacacttaatgttagatg

SEQ ID NO: 925789 - DNA, 120 bp, Artificial Sequence
  ENSG00000235903_113 (sequence is synthesized)
ccatccaatagggccacctaaagggatggaaggttctcaacaacaagagcccagaggtagaagcaagactcttagcggggaaggatggagtcgcaagtgaaaacctagacaaagaagcat

SEQ ID NO: 925790 - DNA, 120 bp, Artificial Sequence
  ENSG00000235903_114 (sequence is synthesized)
ctgtcctggtccagaggcttccccaataaagatgtctcacacaactctaagaagttagaactcgagaaaaagactaacaagaaaaagagtaaggtgtgtttgtggaagaggtgaggcagt

SEQ ID NO: 925791 - DNA, 120 bp, Artificial Sequence
  ENSG00000235903_115 (sequence is synthesized)
tgttttcctataaataatgttaaattaaactaaatttggtctgaggatgcctcgtaacttgagtcgctacataacaaactgcaacctaacttaggagtattttttttttgtactaacgag

SEQ ID NO: 925792 - DNA, 120 bp, Artificial Sequence
  ENSG00000235903_116 (sequence is synthesized)
gtgagtctcagccaatcacagcagccaagctacagccaatcccatgtggccaactgatcagcctatgcccagtaagacaactgctcacctgtaactactcaagctgcttctggacctcat

SEQ ID NO: 925793 - DNA, 120 bp, Artificial Sequence
  ENSG00000235903_117 (sequence is synthesized)
ttccatttgctgtttataagtgctgcctgcccactttgctgagcagaactctctgaacttctttcgtttttgagggttacttgattagaaaattgttctttgttcaattaaattttgcta

SEQ ID NO: 925794 - DNA, 120 bp, Artificial Sequence
  ENSG00000235903_118 (sequence is synthesized)
aatataattcttttaaagattttcttttaacaacaaagatggggatatttgaacaataccttggttggaggtgacattctaatttctaaattgaggctatttgtatttttagcaggaccc

SEQ ID NO: 925795 - DNA, 120 bp, Artificial Sequence
  ENSG00000235903_119 (sequence is synthesized)
aaggactgtcacttaaaagcaggctaaaaagccttgaaattttctaactttccatgcgagagcagtgatagataaccccactacgcaaaatgtcatggggcaatgggagacaaaaactaa

SEQ ID NO: 925796 - DNA, 88 bp, Artificial Sequence
  ENSG00000235903_120 (sequence is synthesized)
ccactgcactccagcctgggcgacagaataagactctgtcgaaaaagagagagaaagaaaggaaggaagggagaaggaaggaaggaag

SEQ ID NO: 925797 - DNA, 120 bp, Artificial Sequence
  ENSG00000235903_121 (sequence is synthesized)
gaaggaaggaaggaaggaaggaaattccacacaaaatcttctcaaaaagtgaaagaagaggaaatatttctcaactcatttcatgaggtctacattaccctggcacgacaccaaacttga

SEQ ID NO: 925798 - DNA, 120 bp, Artificial Sequence
  ENSG00000235903_122 (sequence is synthesized)
cattaccctggcacgacaccaaacttgataaaggcatttaaataagaaaactataaactaatgtccctcatatatatagatgcaaaaatgcttaacaacattttaacaaatttaatttag

SEQ ID NO: 925799 - DNA, 120 bp, Artificial Sequence
  ENSG00000235903_123 (sequence is synthesized)
taatatagcaaaagaataatacattatggtcaagtaagatttttcacaagaatgcaatgtttgtttaatattcaaaaaccaattaatgcaattcaccatgttagcagattaaatttaaaa

SEQ ID NO: 925800 - DNA, 120 bp, Artificial Sequence
  ENSG00000235903_124 (sequence is synthesized)
tacctctgaaacgcgaagacatgctgctcacagaagagaacaatgggtacaaggactgcaaggctgcaaagcttcatcccaacagcaattttctgtacaacaaatttctctgaagagaaa

SEQ ID NO: 925801 - DNA, 120 bp, Artificial Sequence
  ENSG00000235903_125 (sequence is synthesized)
aacccagatcattgattgcataacagccttctttacacactggttaaaatataacggcatgttccctcttgttcctgtgggtcaatcaacttagcttccatttccactcccaaaaagaga

SEQ ID NO: 925802 - DNA, 120 bp, Artificial Sequence
  ENSG00000235903_126 (sequence is synthesized)
aatattattggcttagttaggctgttgcttgataattaaacactcaaaaagagtatgatgagagttgctcttaatttagactatctagaaaatgtgtaactccttggggaaggtagggcc

SEQ ID NO: 925803 - DNA, 120 bp, Artificial Sequence
  ENSG00000235903_127 (sequence is synthesized)
aagaataaaagggtagtaatacagtaggatcttgtctggtttattgcagaacaatagctatagaatattgactaatggatatatagcccatgttgagggagatctaccgtgaagtactat

SEQ ID NO: 925804 - DNA, 120 bp, Artificial Sequence
  ENSG00000235903_128 (sequence is synthesized)
aaatgtcttcccttgcctctgactttttcaacattttaaatttatgaagatgtaaaaagtgagttcctcaaatctggctaatccaatccaatgttgaagtgcagtttgtaaggatgatta

SEQ ID NO: 925805 - DNA, 120 bp, Artificial Sequence
  ENSG00000235903_129 (sequence is synthesized)
caggatctctgttcaaaaagatgtttccttgaccatatggaatgataggcccacccccaataggaatactatttcatggaagctggttcaagcagtaaagacatcaggttactttgaatc

SEQ ID NO: 925806 - DNA, 120 bp, Artificial Sequence
  ENSG00000235903_130 (sequence is synthesized)
ttatttaaaggtcaccataatagccatcaattaaatccaggcccatcccctatcatcttgaaagtagcatcaaataacattttgtctagtatgaggccatatcctaccctctgtaagtga

SEQ ID NO: 925807 - DNA, 120 bp, Artificial Sequence
  ENSG00000235903_131 (sequence is synthesized)
gtggagccctcttcccctacattcccattggttaatgcacttgaatgttcttgaagtcagaattggcaaatttgcaaaataaatcagcctgcccacaattaacttctgagaagaaaatga

SEQ ID NO: 925808 - DNA, 75 bp, Artificial Sequence
  ENSG00000235903_132 (sequence is synthesized)
tagaggtgtgccccaccacacccagtcactggatggtctcaaactcctgagctcaggagatccacctgcctctgc

SEQ ID NO: 925809 - DNA, 90 bp, Artificial Sequence
  ENSG00000235903_133 (sequence is synthesized)
ctttcgtgcctggccagaagaaaatgattgagatttcaaacttttccttttgagatttaaaactattgaatgatatttaatgaattaaag

SEQ ID NO: 925810 - DNA, 120 bp, Artificial Sequence
  ENSG00000235903_134 (sequence is synthesized)
tgagatttaaaactattgaatgatatttaatgaattaaagtgacctccactgtaaccacttgttgtataagaaagaagaagaaataagaaaatatgtgtgtgtctgctcatatgtggaga

SEQ ID NO: 925811 - DNA, 120 bp, Artificial Sequence
  ENSG00000235903_135 (sequence is synthesized)
aagaaacataagaaggatagattagaaatcaatgagactggttatccacgggaggtgagtggaaacacactggaaaagacagggtagaagagacagggagggacgcttctttgggtgaag

SEQ ID NO: 925812 - DNA, 120 bp, Artificial Sequence
  ENSG00000235903_136 (sequence is synthesized)
tgttttgaatagttctgaactttagaactactctgaattttagaaccatgttcttttcacatatgtacttaaaacaagcaaacaaataaattttaaaaaataatacaaacaaaaacgaac

SEQ ID NO: 925813 - DNA, 120 bp, Artificial Sequence
  ENSG00000235903_137 (sequence is synthesized)
ctgtgtttcaaatgaataacataatcacactgaaggagagaaagaaaaactaacccaagtaacttttaccttatctttttaacataaaagttaactttaaaacaaacagtcaaaatagtt

SEQ ID NO: 925814 - DNA, 120 bp, Artificial Sequence
  ENSG00000235903_138 (sequence is synthesized)
tgcagtctcatggctctcccagcctcctccagccctctccccatttcttgcacccaagcattttcctcaacacacctcttgcacagctaatcccatcttggtgtctgcttctcagaggat

SEQ ID NO: 925815 - DNA, 120 bp, Artificial Sequence
  ENSG00000235903_139 (sequence is synthesized)
cagaggatcataactgacacaagtaggaagaggaagtctgatacatggacagtcaagttgatagtgcatgggtacaagtaaaaaatgaagtgggctgggcacggtggctcacgcttgtaa

SEQ ID NO: 925816 - DNA, 120 bp, Artificial Sequence
  ENSG00000235903_140 (sequence is synthesized)
tcccaaagagacctatggaaatttcctcaggtaagtctgcaccctggggaaagggtaatactcaaatattttcaggtgtgttggatgcagggtcactatccaagttgattttgaaacttg

SEQ ID NO: 925817 - DNA, 120 bp, Artificial Sequence
  ENSG00000235903_141 (sequence is synthesized)
ggtatctggagccctagcctaagactagctcatagcgggtgcaccatgttaatggattcccccatcattatttccctggtcaccaaatgtataattgacatgaacatactaggtagttgg

SEQ ID NO: 925818 - DNA, 120 bp, Artificial Sequence
  ENSG00000235903_142 (sequence is synthesized)
gaccagagctatcatagtgggaaaagccaaaaggaaacctctgaaattgcccaacctcccagccaagatatcaaaattaaaaaaaaaaaaattcatccttgaggggaaatgacaaatatc

SEQ ID NO: 925819 - DNA, 120 bp, Artificial Sequence
  ENSG00000235903_143 (sequence is synthesized)
agtaccacccttaaagacctaaaagatgcagggatgatagatcccatcaaatccacatttaatttgccatctggatcccacaaaaaccagatggatcctggaaaacgacagcaaacaatc

SEQ ID NO: 925820 - DNA, 120 bp, Artificial Sequence
  ENSG00000235903_144 (sequence is synthesized)
aaactcaaccaagcaacaatctcaattgcagccatagtgcttgatgtggcatctttgccggggtagagtctcaggcatatggtattcagctattgcgctggatatgtcagtcggaaaaag

SEQ ID NO: 925821 - DNA, 120 bp, Artificial Sequence
  ENSG00000235903_145 (sequence is synthesized)
catcagaacagttaacatccacttgggacagacaccagtgcatatttacagtcttgcctcagctttaattaactttctcactctccagctgcaagatgtgtacttgatataagcccccag

SEQ ID NO: 925822 - DNA, 120 bp, Artificial Sequence
  ENSG00000235903_146 (sequence is synthesized)
ctactgtgctctgaaatctgtccctgtgttagtgctaataccacatttcccactggcttcttgcagctaataactgagtatggtggggatactaagggaggctctttctacaaaactgga

SEQ ID NO: 925823 - DNA, 69 bp, Artificial Sequence
  ENSG00000235903_147 (sequence is synthesized)
gtgaagtggtgctgcattatggactcactcgggtgaccgaaagagagcagagagggaaatcgtcccaaa

SEQ ID NO: 925824 - DNA, 120 bp, Artificial Sequence
  ENSG00000235903_148 (sequence is synthesized)
cgggtgaccgaaagagagcagagagggaaatcgtcccaaataggcagagcttcagtgttgcatctcatcatacaccttgggtggaaaaggtgtttccagtgttagaatatgcaggaattc

SEQ ID NO: 925825 - DNA, 120 bp, Artificial Sequence
  ENSG00000235903_149 (sequence is synthesized)
atggagagtggcaagtgacatgactggaaaacccctcaagaacctggaagaagaaatcttgacagattggagacaaagagattggagaaagggggatgtgaatggaactatgagagtggg

SEQ ID NO: 925826 - DNA, 120 bp, Artificial Sequence
  ENSG00000248508_0 (sequence is synthesized)
gggggcctgtgacccggaggcgctggggctgtcctgggtcgtcacatgcgagaaatcgtctcaccccagccagtgtgacggagtgagagcaaaagaaagttttgatagcagcgtacgatt

SEQ ID NO: 925827 - DNA, 120 bp, Artificial Sequence
  ENSG00000248508_1 (sequence is synthesized)
tatattcagctgtatgctgggcaggtccaacttggcatttcttggctgtatctctgaaggaaagtcatcttaatctctatgagcctccatttcctcagctgtaaaatgggaagatcttcc

SEQ ID NO: 925828 - DNA, 120 bp, Artificial Sequence
  ENSG00000248508_2 (sequence is synthesized)
ctgtcctgggagagccgagaggccacctgtcagctgacatcttagggaggacaccatctacatccaaccctgactactgaacacttccagtttcttggaagaaagattttaaaatcttca

SEQ ID NO: 925829 - DNA, 120 bp, Artificial Sequence
  ENSG00000248508_3 (sequence is synthesized)
gaaatgagaactcctccaaataggattttcatttgtttcatatattttaaaattttatattttaatatgtaacagtcatatggtttaaatataaaaatgacatcagtggctcagtaagaa

SEQ ID NO: 925830 - DNA, 120 bp, Artificial Sequence
  ENSG00000248508_4 (sequence is synthesized)
agcggcagcacccatgtggagtgccactttctgatctgggacttaaacaacattgctgttttcctccttgctccaagtcatccattttgacaattttatatcagcatggacccttcacca

SEQ ID NO: 925831 - DNA, 120 bp, Artificial Sequence
  ENSG00000248508_5 (sequence is synthesized)
attttatatcagcatggacccttcaccaagactgaaataactctgttattgaggatcttgttctgtcgcctaggctggagtgcagtgacgtgacacaatcacagctcactgcagcctcga

SEQ ID NO: 925832 - DNA, 120 bp, Artificial Sequence
  ENSG00000248508_6 (sequence is synthesized)
tcagcctcctaagtaactgggactataggtgcatgcaccaccatacccagctaatttttaagggcctctccacatgcctctcgcccaacaccatgatggggggacacccatggaacctgc

SEQ ID NO: 925833 - DNA, 120 bp, Artificial Sequence
  ENSG00000248508_7 (sequence is synthesized)
cgagaggagccaatggataactgtcccccttcttccagtgagttctgaagagaggaaatggcagcctaactccaggcagggcccgggctcagaagggggtctacagggctgaagaggcag

SEQ ID NO: 925834 - DNA, 120 bp, Artificial Sequence
  ENSG00000248508_8 (sequence is synthesized)
ctggccagagattccacaggaagcatcttgttgacacatcttcatcactttggaatttgagcaacaacatttaccccttctgaaactcacccagaggaagcggattttctgacgcatatg

SEQ ID NO: 925835 - DNA, 120 bp, Artificial Sequence
  ENSG00000248508_9 (sequence is synthesized)
aagagtgagaactgtctacatctaagtcttctttgagaacaataccagctgagcggctatttacattccagcttcttttgagaatctctgaagatgattaagtcattgtcagctggccca

SEQ ID NO: 925836 - DNA, 120 bp, Artificial Sequence
  ENSG00000248508_10 (sequence is synthesized)
gaaccatatcctgctccacaagcctcgtccttggcaagaagttgcacctgcccagagagaaaaccttttgaaactggcacaaaggcactggagagactggcagggccccctacttgacga

SEQ ID NO: 925837 - DNA, 120 bp, Artificial Sequence
  ENSG00000248508_11 (sequence is synthesized)
tctggctcatccatctgcacactgaccacgctaagagctgtctgcagtgatggaaaccttctctagctgtgctgtcctctatagtggcaccagctgcctgtggctactgagcacttcaac

SEQ ID NO: 925838 - DNA, 120 bp, Artificial Sequence
  ENSG00000248508_12 (sequence is synthesized)
tgtggctgcagagactatgttaaattgtatttaatcataattaatttaattgtaaacaactacatgtggctagtggtttctgtactgggcactgcaggtgcacatttcctgctggccatg

SEQ ID NO: 925839 - DNA, 120 bp, Artificial Sequence
  ENSG00000248508_13 (sequence is synthesized)
gacagtaagctccataagagactaattgtgcctggtttgcttataggcttatcctcagcacctgcaccagcctagaatatgattggcactctattaattaaaagttcccaggtaaatgaa

SEQ ID NO: 925840 - DNA, 120 bp, Artificial Sequence
  ENSG00000248508_14 (sequence is synthesized)
tcacactgctgtggtgtctcgactccccaaagcgacagatgctgttcatctcttggcctctgtgtcatcattcatccttgattgttcggggaagcccactccacctctgtgacagaccca

SEQ ID NO: 925841 - DNA, 120 bp, Artificial Sequence
  ENSG00000248508_15 (sequence is synthesized)
gaatcattgacttcagtgagtcacaatattgagctggaagaggcctccaagacctttttagtccaaccctttacctgctagttattcacaagtgaatagaaactgagtgaggtccaaaga

SEQ ID NO: 925842 - DNA, 120 bp, Artificial Sequence
  ENSG00000248508_16 (sequence is synthesized)
gggaaaatgacttgaccaagatcacaaagcttggtaatgccaaagacatttagtgagtgcctgctgtgtgtcatccattgtgacagtgttgggaacacggagatgaataaaacaaggccc

SEQ ID NO: 925843 - DNA, 120 bp, Artificial Sequence
  ENSG00000248508_17 (sequence is synthesized)
attacaggtgtgagccaccacgcctggtctcaagccttcgctttcgcaatcagcactaaaggcagccagaaatcaaccgtgcgccacccccgacctgagaaacaagtctaaatgtgtccg

SEQ ID NO: 925844 - DNA, 84 bp, Artificial Sequence
  ENSG00000248508_18 (sequence is synthesized)
aatgaatacacaggggcttagaggcatgtgctgctactgaggggagcaccaagtgagaaatggaaaagaccaggagagtggtga

SEQ ID NO: 925845 - DNA, 120 bp, Artificial Sequence
  ENSG00000248508_19 (sequence is synthesized)
agtcctgactgacgatccacactctgggtcttcagggaagtgtcagcctcagagctgcggtcagtgcgtggagccggctacctgttggggaagaagaacttaaggtagctccttacctca

SEQ ID NO: 925846 - DNA, 120 bp, Artificial Sequence
  ENSG00000248508_20 (sequence is synthesized)
cacgtgctagttaggctaaataattattatttttgaaaggaagcaatttaaaaagaaagaaacgagaagaatgtataggtaaagacttgaaaaaaaaaatatatatatatatatatagtc

SEQ ID NO: 925847 - DNA, 120 bp, Artificial Sequence
  ENSG00000248508_21 (sequence is synthesized)
aagacagggtcttgccatgctgcccagaccagagtgcagtggctattcacaggcatgatcatggtgtgctacagccttaaactcctgggctcaggtgatcctcctgactaagcttctcaa

SEQ ID NO: 925848 - DNA, 120 bp, Artificial Sequence
  ENSG00000248508_22 (sequence is synthesized)
gtagctgggaccacaagtgcattccactgcgtccagccttcttgaacatttttatatgaaaagttatataagcataaatgcaacagaagtcacaaaggaaggcttgatttggctgcattg

SEQ ID NO: 925849 - DNA, 120 bp, Artificial Sequence
  ENSG00000248508_23 (sequence is synthesized)
aaaaaaatttgtgactcgaagtgaaattgtaagacaaatagcagtttataaagaattctcgtagacaataaaatactaattccaaaagttaaaaacagccaaatactaaggaagagacaa

SEQ ID NO: 925850 - DNA, 120 bp, Artificial Sequence
  ENSG00000248508_24 (sequence is synthesized)
aagatctaccaccttcaccattgttgtgtccagttcagtagtattaactacacttacattgtgatacaacaaaagattgtgtctttttacattcttaggacccagcacagtgtctggcac

SEQ ID NO: 925851 - DNA, 120 bp, Artificial Sequence
  ENSG00000248508_25 (sequence is synthesized)
ataatcttagtaaacactggcagagcacatgcctttgccaaggccagaacagaggttcagtgccatccattaccaccctttcacacatccactggggctttaaaaacaacctggaatgaa

SEQ ID NO: 925852 - DNA, 120 bp, Artificial Sequence
  ENSG00000248508_26 (sequence is synthesized)
tggggctttaaaaacaacctggaatgaaagctgttgagtctagagaaatgggctacaaagaaggtttacaagataatctattaagaatagggaatacaggccgggcacggtggctcacac

SEQ ID NO: 925853 - DNA, 63 bp, Artificial Sequence
  ENSG00000248508_27 (sequence is synthesized)
gagaccagcctggccaatgtggtgaaatcctgtctctaccaaaaattacatcgcttgaacccg

SEQ ID NO: 925854 - DNA, 69 bp, Artificial Sequence
  ENSG00000248508_28 (sequence is synthesized)
cgcgccactacctaaaataaagcttaatacacatgacatatggattggcagtcacacataaatatgatt

SEQ ID NO: 925855 - DNA, 120 bp, Artificial Sequence
  ENSG00000248508_29 (sequence is synthesized)
cacatgacatatggattggcagtcacacataaatatgattgataaggatacaaatatttggaggtgctgcctgaccatctgttgctgattatgtggagatcacttgtctaggaccctgag

SEQ ID NO: 925856 - DNA, 120 bp, Artificial Sequence
  ENSG00000248508_30 (sequence is synthesized)
atagactgatgtttctaactctgccacacacggtctctcccaccctccagacactttcttccttcagttcagggaaccctcaatacacagtaagaatgaagaggttgcaggtctgagctt

SEQ ID NO: 925857 - DNA, 120 bp, Artificial Sequence
  ENSG00000248508_31 (sequence is synthesized)
gaggaggactggactaaaaggagtttagccctgccagggcattccgaggactgtgaagatccggaatattggccacaggcatctatgtatttgaatcatatccatttttgagctcactcc

SEQ ID NO: 925858 - DNA, 120 bp, Artificial Sequence
  ENSG00000248508_32 (sequence is synthesized)
tagcagaggagtcaaaacttacgttctggcccccaggtacatttccagtctcttactcataaaattgtgacatacccccaggggtgcccaaaggggtttgtgaatcaagatagtttgagg

SEQ ID NO: 925859 - DNA, 120 bp, Artificial Sequence
  ENSG00000248508_33 (sequence is synthesized)
agaatcgattttctgatcctcagtttttctatgctctttttcctaaaagcgatattcctaaaaaggcatccaagacaaggcatcccctttcccatttgctggggaagacagctttacaag

SEQ ID NO: 925860 - DNA, 120 bp, Artificial Sequence
  ENSG00000248508_34 (sequence is synthesized)
agaaagctgcccctctcacccatgtgaccccccactctggggcactgccctaggggtagaaatctccaaggcatcaaacaaagtgactcctgggggtcaagtgacagaggagcaagtctt

SEQ ID NO: 925861 - DNA, 120 bp, Artificial Sequence
  ENSG00000248508_35 (sequence is synthesized)
tctgcaagtcaagtggtttccagctctgctttcagcaaaattgaaagaggcactaatcaaattgccagcggatcataaaaaaacattttgataataatgttattaggcatataacttgga

SEQ ID NO: 925862 - DNA, 120 bp, Artificial Sequence
  ENSG00000248508_36 (sequence is synthesized)
agaagttcaaagaattgaatggcatcctcataacaaactcatcggcttccatttatttatttatgtggacagtgtttctcaatgtttaaacctacaaaagactaaacatgggagtaaact

SEQ ID NO: 925863 - DNA, 120 bp, Artificial Sequence
  ENSG00000248508_37 (sequence is synthesized)
tcatgttgaaccttgtgtgagtctagcaataagtcatccacatatacatacactaattgggaagaaaacctgtcccaaccccaactattttattaagagatgcatttccaataaaaattt

SEQ ID NO: 925864 - DNA, 120 bp, Artificial Sequence
  ENSG00000259723_0 (sequence is synthesized)
tgagtgaacatagattccttcagtaaatattgggaaaacatttgcttcaggcccattactgggtaccgctttgatacagaggacacaccaaggaacaagacagataggacctctgcctct

SEQ ID NO: 925865 - DNA, 120 bp, Artificial Sequence
  ENSG00000259723_1 (sequence is synthesized)
ggtaagtttgcattccagagggaggagaagacaataagcaagcaagccatcaagaccacgtcagatgagacgaataaagtcagacagcttccaaggagtggatgcttatggagagatcac

SEQ ID NO: 925866 - DNA, 120 bp, Artificial Sequence
  ENSG00000259721_0 (sequence is synthesized)
agaacacagtttaaggggtgcgcgcggaagtgggaaccagccggtggccgctgcccggcgccagaacgtctaccattcagcccgggcgtgcgcggggcggggaagaggctggagtagaga

SEQ ID NO: 925867 - DNA, 120 bp, Artificial Sequence
  ENSG00000259721_1 (sequence is synthesized)
agcgagcgcccgcgagtgcgtggccggtccgcgagcgcgtgtggtgtctgccttgtgagcactgcgggttcgctggaccccgcggccagggccgcgccccgcaccgcagctgtcggatta

SEQ ID NO: 925868 - DNA, 120 bp, Artificial Sequence
  ENSG00000259721_2 (sequence is synthesized)
cccaccgttcggttttccgctgtggctgaacacagcggctctgcccttgccagtctccatctcacctcggggatcggcaaatgcacacatcatggattctccggatgctccaacccgcgg

SEQ ID NO: 925869 - DNA, 120 bp, Artificial Sequence
  ENSG00000259721_3 (sequence is synthesized)
actccaatgggcgccccaagacgcccccagacccagcgcggcgccccaagcacatgggaccctctcaaggcaactcgccgcgcagtcagcggccgactagcaggtccggatgctcctgcg

SEQ ID NO: 925870 - DNA, 120 bp, Artificial Sequence
  ENSG00000259721_4 (sequence is synthesized)
ctctggcggcctggacttcgcgccctcgctaagcgggcgcgtctgccaggcgctgctgccaccagcaccaggagcgtgttcgggggcctccgggaggtggaaacgggatgtgggggtcat

SEQ ID NO: 925871 - DNA, 120 bp, Artificial Sequence
  ENSG00000259721_5 (sequence is synthesized)
cctgcccgctcctgacaactttttttcctacgtttccctgcagacccagagcagcgaggtcacggtgtccgcggcctcagcaggaaggaccccgcgatggttcttcacaattcacccccg

SEQ ID NO: 925872 - DNA, 120 bp, Artificial Sequence
  ENSG00000259721_6 (sequence is synthesized)
cgaacaacgcacccgagcctgcgcgcacggagggctgccgcgcgtggaactgagcgggtcctgggttggtttgcggccctcttccctccgcccactcacatccctgccgggtgcgtccgc

SEQ ID NO: 925873 - DNA, 120 bp, Artificial Sequence
  ENSG00000259721_7 (sequence is synthesized)
cagagccgccggggctcggcgcggggtcagcgggaccgagagtgacgcggcggccgtgcactgggtcgcccggtccgcggaaggcgcaccgagtgccaggcatcgcgccgtctcccgttt

SEQ ID NO: 925874 - DNA, 120 bp, Artificial Sequence
  ENSG00000259721_8 (sequence is synthesized)
cgtctcccgtttaaatgccggcggcagagcgcggcgcccggggccgcgcctctccattggccaggcgccgccgccgccgccagacccgctatccgccccctttcccggtactgcccccgc

SEQ ID NO: 925875 - DNA, 120 bp, Artificial Sequence
  ENSG00000259721_9 (sequence is synthesized)
cccccgcacccctcctgcttccccgcggggtcccctctccgcccgcctcgcctctttgtctgctccccccgcccgggccggctgggagaggtcaccccagggaaccgcgcctggaatgca

SEQ ID NO: 925876 - DNA, 120 bp, Artificial Sequence
  ENSG00000259721_10 (sequence is synthesized)
cagcaaatcacattttccgctcccgttggagagggaagagcgggaggaaatccccccggctggcggcccctcattccttctctgccccaggtctgggctttccctgtcggccgcccggca

SEQ ID NO: 925877 - DNA, 120 bp, Artificial Sequence
  ENSG00000259721_11 (sequence is synthesized)
tcgcctgcgttggtcccgcgctcagtagcggagactgcgctgggaagagcgagatctccgtgggatcgtgccagattcggccattcttcccctctggagggaacgggactgcgggatgct

SEQ ID NO: 925878 - DNA, 120 bp, Artificial Sequence
  ENSG00000259721_12 (sequence is synthesized)
ccgtcgtggctccccggcggccccgcccgaggcccccaacttcgagggcgctgaccccggcgcccccgttaacctggcgggctcgctggccgccagcaggagcctgtcgccaacatgaca

SEQ ID NO: 925879 - DNA, 120 bp, Artificial Sequence
  ENSG00000259721_13 (sequence is synthesized)
gccaacatgacaccctgctctcctcgcccgccaagggttctttcagcccagatgccggcggcctcccctgtgagtgtacagaggggagtcacgggaggagaataaaactaaatgaccgtc

SEQ ID NO: 925880 - DNA, 120 bp, Artificial Sequence
  ENSG00000259720_0 (sequence is synthesized)
aggatgcgaggaaccggcactgggaaagtgggccggtgccgccaagcacaggtcacttctgagctcttacgcggccgctgagacgcataatgatgatgtagatgtggcttaaaatgatca

SEQ ID NO: 925881 - DNA, 120 bp, Artificial Sequence
  ENSG00000259720_1 (sequence is synthesized)
tcggtgggggcaggactggcctgtcatgaaatgtcataatcagctgatatcgctggaacttccacacctggttggatattgattttacttcaaagaaggttgacacatctaaaagaatct

SEQ ID NO: 925882 - DNA, 120 bp, Artificial Sequence
  ENSG00000259720_2 (sequence is synthesized)
ttgtttccaactggactgactcattgagaggaaaccttcactgcacctcaccagtgcagacagaagacctggaggcaggacgggaggcattttatacttcagcacgatatgggccctgac

SEQ ID NO: 925883 - DNA, 120 bp, Artificial Sequence
  ENSG00000259720_3 (sequence is synthesized)
ttttcattttctacatggagacatattggttggtgctgtcatcctcatggggaaactatgaagttgcaaacattatgataacgggaaacttttaatagtttgctggagtgtcttctacat

SEQ ID NO: 925884 - DNA, 120 bp, Artificial Sequence
  ENSG00000259720_4 (sequence is synthesized)
tcctggaaactggaaaatgttacttactcctccctgcctcagaaatttccttcctgattctttccacaactgggaagttagatgagaggacatgtggatgagttgcccacccagatatgc

SEQ ID NO: 925885 - DNA, 120 bp, Artificial Sequence
  ENSG00000259720_5 (sequence is synthesized)
gagctgaccctagagtcccctcagttactggtggcatgtccaggatttgctgtggccacagcagggcccctatctctgtggcagggaaagaggcagagctggaggtggcagtgggtgagg

SEQ ID NO: 925886 - DNA, 120 bp, Artificial Sequence
  ENSG00000259720_6 (sequence is synthesized)
caaaagcggggagttaaggggttgggggaggacgtctgaagtagatcacctgtccccagtgattcaccatgatgccaaggaaacttaagcttctgggtccctcactggcacaggcccctg

SEQ ID NO: 925887 - DNA, 120 bp, Artificial Sequence
  ENSG00000259720_7 (sequence is synthesized)
aactgggcagtttggtttttttttcttttttttcaagatcctgcctcccaagcctataagctttaccaggagagaggcaggccccaccccaagatccactatccactctttgaagaaaga

SEQ ID NO: 925888 - DNA, 120 bp, Artificial Sequence
  ENSG00000259720_8 (sequence is synthesized)
ttagagccatgttctcagactttgggctgcatcctaatccctgcgaagctgcacaatgtgtgatgactccaccctccacccgatccagagggtctggggtgagacccaaggctgagaggc

SEQ ID NO: 925889 - DNA, 120 bp, Artificial Sequence
  ENSG00000259720_9 (sequence is synthesized)
ctcgatggcttcctggccccatctccggcagcagcctctatggctgggctctcctgcaggctgggtgcaccccaggccctcagatggttctaaccagaatcgatgggcagcagtgacttc

SEQ ID NO: 925890 - DNA, 120 bp, Artificial Sequence
  ENSG00000259720_10 (sequence is synthesized)
gactgtatcatcaatcttggctgccacaaggttgggtgtccaggccctcagctgacccttgaggtgggcccccacacagagctttgctctgcccccagcccaccctcattcatcgcccag

SEQ ID NO: 925891 - DNA, 120 bp, Artificial Sequence
  ENSG00000259720_11 (sequence is synthesized)
accacggccagggacccagctcctcatgtcccataccctgctctcacctcatcaccagtgcaaccacagcaccgaggcctgcctggcgggggctgtggcttgatgcttgggatttcatga

SEQ ID NO: 925892 - DNA, 120 bp, Artificial Sequence
  ENSG00000259720_12 (sequence is synthesized)
gaagtctctctcctcccgactgacgtggttgcacaagccacagtgtgcctggccacccccactgggaccgcctgcagctcggccatttcccccagaggcgctctgatctgccctcctgcc

SEQ ID NO: 925893 - DNA, 120 bp, Artificial Sequence
  ENSG00000259720_13 (sequence is synthesized)
tcctctcctgttcttgttagtagagagccacactctgggagctgtgtagacccagggcctcagagagggctggaggatggcttgccagccaagcgggtcagtttggtgagcacttcagaa

SEQ ID NO: 925894 - DNA, 120 bp, Artificial Sequence
  ENSG00000259720_14 (sequence is synthesized)
tgagacgccttgatttgtttccctattccaagagtttaccatctggatttagccatgcccttgtaatgaccccaccaatttcatgaaaaatggaatctgtgaatttgctctttaaatcac

SEQ ID NO: 925895 - DNA, 120 bp, Artificial Sequence
  ENSG00000259720_15 (sequence is synthesized)
gctcctgcacgcactgctcctcgaactcatgcagcctctttagctcctcgtcgctaaggaagagctctgtgtgaagggagaagtgtcggccacgtgaaaaacaagaagaatcacggccgc

SEQ ID NO: 925896 - DNA, 120 bp, Artificial Sequence
  ENSG00000259727_0 (sequence is synthesized)
ctgtgtggtgctgggtgtgagtcggagctagcctgggtttacctgagttgcagggtcacccctcatcgcacccttgtcagtcctcaaataggggtgcaactgttccatgaaagggaacaa

SEQ ID NO: 925897 - DNA, 120 bp, Artificial Sequence
  ENSG00000259727_1 (sequence is synthesized)
agagactgagctactagacaccaagctgtttaggactgaacccattcctgtccaaacggaagtgatccagagggactctgaatattacagaagtcaagagatttcatcatctttattcaa

SEQ ID NO: 925898 - DNA, 120 bp, Artificial Sequence
  ENSG00000259727_2 (sequence is synthesized)
agaaaggggtttgtttgttgattttttggattttttttttggaccacagctctatctactccctgaagagtaaggattattaagtaaatcagatggaaaaagaatcgcaaataagcataa

SEQ ID NO: 925899 - DNA, 120 bp, Artificial Sequence
  ENSG00000259727_3 (sequence is synthesized)
tgtgaagagcatgagctttggaataagcaagcctggaattacaattttcttttattagctctgtggctgtaatactcaacttttgcaagcttcagtttcctcgtctgtgaaatggaataa

SEQ ID NO: 925900 - DNA, 120 bp, Artificial Sequence
  ENSG00000259727_4 (sequence is synthesized)
tagcacttacctcattggctgttgtatggattaaatgagaccatgactatggatgtatggcatttggtacccaataacccctcaataatcggcagctataattattcataataataatgg

SEQ ID NO: 925901 - DNA, 120 bp, Artificial Sequence
  ENSG00000259727_5 (sequence is synthesized)
atctgaaggaccgatcactaaaaagaagatgaactcagtcctacgtagtaacaagaatgtgacatctatgttgttgccaaaagtctggaggagttgccaggaccagagagaaggaggtgg

SEQ ID NO: 925902 - DNA, 120 bp, Artificial Sequence
  ENSG00000259727_6 (sequence is synthesized)
tgaggccggcctggaagagggaggggacagatgtcaaggaccccaatcttgaggtggaaagttctgtgattaacccagatgaatgtctctaacctccaactcttctgttctcagagtttt

SEQ ID NO: 925903 - DNA, 120 bp, Artificial Sequence
  ENSG00000259727_7 (sequence is synthesized)
aatggggcacaccgtgtgctgggcattgacatagatgggaaaagcatgacctaaaataagggctggaagccaagactgggaggaagggcaaagggagcaggcagcctggcaccaggtacc

SEQ ID NO: 925904 - DNA, 120 bp, Artificial Sequence
  ENSG00000259727_8 (sequence is synthesized)
agtgaggtgtctgctctttgtccccatcacctgtcagctaaggaattctgcatgtcatcagtgcaataaaatgtgatcgccagagtgaaaaccttgtaatagaccagctgtggcttctct

SEQ ID NO: 925905 - DNA, 120 bp, Artificial Sequence
  ENSG00000259727_9 (sequence is synthesized)
caacaccagtatgtccaaggaggatgcatttttattgcttttgtggtcttaacaaaaaagattcatgagcattgtataaaaggcatattaaaacaattcggtaaaaggatgaaagaaaaa

SEQ ID NO: 925906 - DNA, 120 bp, Artificial Sequence
  ENSG00000259725_0 (sequence is synthesized)
gtctgagcgcgctgggctcgtcccggtgccggaaacgagcgctgcccggcgagcggccttggggacccagggctggggcccgtggcctacacgaggccagagatccccactggccccgag

SEQ ID NO: 925907 - DNA, 120 bp, Artificial Sequence
  ENSG00000259725_1 (sequence is synthesized)
aggccgcccagcgctggaggtgcgggcagagctgcagccaagctcccgaggcgatctgctgttaggccacaacctgggctcgcctagtgcccgaggcccaagtcgcagttctcgtgaaaa

SEQ ID NO: 925908 - DNA, 120 bp, Artificial Sequence
  ENSG00000259725_2 (sequence is synthesized)
ctagggacagtcctgaagctttagccagtttaaggggaaggcgggcagcaaggtcccagtcgggcccgatttccctcctgtttgatgaccgggcgacgagggaaacaaagatccagcccg

SEQ ID NO: 925909 - DNA, 120 bp, Artificial Sequence
  ENSG00000259725_3 (sequence is synthesized)
agggcgcgcccccctttcccctaataaccctgcacctgggggagaccagtggatacaacctatgagggcttctggcggggtagggcgaagccgagatgtccaccccacaggccaaaagct

SEQ ID NO: 925910 - DNA, 120 bp, Artificial Sequence
  ENSG00000259725_4 (sequence is synthesized)
gaccaaaacggtctttcagggcgcggttgcacggtagcacccccatttcccaaaccgcagattaaaactgcgcggggtccagagttggagcgtggaagggcccgcaggagtggaagtgcg

SEQ ID NO: 925911 - DNA, 120 bp, Artificial Sequence
  ENSG00000259725_5 (sequence is synthesized)
tacacctgatgcgggacgggaactgccgggcgcgcacggctgcagcccccacccgcaggctgtttcagccggcagcgtatttctcaattgcctgcgcctggttttttgaaatgtgccgaa

SEQ ID NO: 925912 - DNA, 120 bp, Artificial Sequence
  ENSG00000259724_0 (sequence is synthesized)
ttatcattgtatttactgagcccaaagggccaatttatgtaactatttgtacaggtagagagatatgtgtgtcttaggttccatctcaaacttgcaggttttcaagccactttgtaaatt

SEQ ID NO: 925913 - DNA, 120 bp, Artificial Sequence
  ENSG00000259724_1 (sequence is synthesized)
tatgtagcagcacatcaaactctccaatactgccaacaaaatccaaagacagcaactgagagatgtgtcttctgtcttcttaagaaacaacaacaaataagcgttgagaacttaccaagt

SEQ ID NO: 925914 - DNA, 120 bp, Artificial Sequence
  ENSG00000259724_2 (sequence is synthesized)
ggcaggcactgtaggagatgccaactgttcatcatggaccttcatgttgcagcttgggcccatcttccccatctcatctcccaggactcaaactagcaaatctccttaggctactgtgag

SEQ ID NO: 925915 - DNA, 120 bp, Artificial Sequence
  ENSG00000259724_3 (sequence is synthesized)
gaggatggattaaaatggggaaaaggctgaagcagggggaattaattaggaacctgttacagtataattagggacaaattatgatggtctgcatcattgtagtagtagtagtaaaaatta

SEQ ID NO: 925916 - DNA, 120 bp, Artificial Sequence
  ENSG00000259724_4 (sequence is synthesized)
agagtttgtgtgaaagatgggaataagtgaacgataaatctcaggattttgtttgtttctaatgtctacaaatggggagaaagttgtgggactccttgttcatcttcaggcatctttagg

SEQ ID NO: 925917 - DNA, 120 bp, Artificial Sequence
  ENSG00000259724_5 (sequence is synthesized)
cataagattcagttacctgaagcatagtcaagaggagatgcttagttagcacttaggttataatacagaagagaaattttgttggatatacaagtttgtgagcaattaacatgtaataaa

SEQ ID NO: 925918 - DNA, 120 bp, Artificial Sequence
  ENSG00000259724_6 (sequence is synthesized)
agtaaccagatcaccccaggggagcttttatattgatagtgaggggagcccagaaaagaccccagtgcctataaaagtgcctggcagatacatagttgtcaattgataagtgcatgaaat

SEQ ID NO: 925919 - DNA, 120 bp, Artificial Sequence
  ENSG00000259724_7 (sequence is synthesized)
aattaactaatgaaagaatgaacagacatagagatacctctttctgatgaacagatagatgtataaaccagtaagatcattctatgtgctataaatgaagtaatattaaatgtttcattc

SEQ ID NO: 925920 - DNA, 120 bp, Artificial Sequence
  ENSG00000259724_8 (sequence is synthesized)
aaatgctgcaagttctcctctagcagggagcagagcttccaggcattatgatctgtcctgcctgtctggatggaacttctgctccatactattggatattacggatctttcaaacagaat

SEQ ID NO: 925921 - DNA, 120 bp, Artificial Sequence
  ENSG00000259724_9 (sequence is synthesized)
gccaaactataaagatgtgtggaatatgagcacaatatatactatgtgagtaaagaagctacaggctgcgggtaataggagaactacttcaaagcagctatgggaaagctaaaaggggtt

SEQ ID NO: 925922 - DNA, 120 bp, Artificial Sequence
  ENSG00000259724_10 (sequence is synthesized)
tggactggagccaggattggagcatgggggagcctgcatggattggtgactttttccacagagtgtgggttcgtgcctctttagctgtagatcagtactctgtccataggtctataggac

SEQ ID NO: 925923 - DNA, 120 bp, Artificial Sequence
  ENSG00000259724_11 (sequence is synthesized)
agaaaaggatggccaagagctcctgaattttacatgttccagtccagggactaaagagatttctctttccaacccagtctacacaattgatgaggaagaaacaggagtttccccaggtca

SEQ ID NO: 925924 - DNA, 120 bp, Artificial Sequence
  ENSG00000259724_12 (sequence is synthesized)
gcccgcagaagtgaatactactttgcctcctgctggaatccctttccgtccatgaaaatacacaatggattagaagggtcaggggtttggagtcaggcaaatctgagtctcgcttattag

SEQ ID NO: 925925 - DNA, 120 bp, Artificial Sequence
  ENSG00000259724_13 (sequence is synthesized)
ttatgcaactctggacgaatcacttaatctcttcaaaattcaatgtcctcatctataaaactggactaaaactattggccatgcagcattgtcaacctaaaaggatgctgagtgggaatt

SEQ ID NO: 925926 - DNA, 120 bp, Artificial Sequence
  ENSG00000259724_14 (sequence is synthesized)
ttcctcatgcccaaaagtgaggccaaaaagaactgtgaagaaattgacattctctggcacagcggttctcaaagtgagtcctgggaccatcagcatcaacctcacctgagaacttgtcag

SEQ ID NO: 925927 - DNA, 120 bp, Artificial Sequence
  ENSG00000259724_15 (sequence is synthesized)
aaatgcaaaatcttgaactctagcctagacttactgcgtcagaaacattggacatggcaaccagtgatgcaggccgcagtttgagaacttctgctctatggacctagaaggaacctccaa

SEQ ID NO: 925928 - DNA, 120 bp, Artificial Sequence
  ENSG00000259724_16 (sequence is synthesized)
agagccctccagagtggaccacaaactcctggtggaggccagttgaatctactcctcccaggaccattctattcctggccatctctgtcacttcagtggagaagccatgagcaacgttct

SEQ ID NO: 925929 - DNA, 120 bp, Artificial Sequence
  ENSG00000259724_17 (sequence is synthesized)
caacgtccaacattcctctcttatgagactaaagatgtgatcacattggatattttcttacaaagaataaaccactaggacataatccccaaaatgccactttttggcctgagctgggat

SEQ ID NO: 925930 - DNA, 120 bp, Artificial Sequence
  ENSG00000259724_18 (sequence is synthesized)
ccctggatgcaagctgccaccatccagtatctaggcaaattggactgggactttaggctggctttcttccataaagctctttcaagatggtctcctccgggaagagtctccacaacgaaa

SEQ ID NO: 925931 - DNA, 120 bp, Artificial Sequence
  ENSG00000259724_19 (sequence is synthesized)
gctggaaaaggtttccttaactccagacagatgagctcagagaaccacaagagggcaggtgttccctaaatcagatctgatggctgcctggttcagacattggactttaaatttaaatac

SEQ ID NO: 925932 - DNA, 120 bp, Artificial Sequence
  ENSG00000259724_20 (sequence is synthesized)
tttggaataagaaaataacagttctaatgcagagatgagtctttgataagactggatgaactcaaggatttgaaacagttttctggggatccttagaggcgccaaggaaataactgagaa

SEQ ID NO: 925933 - DNA, 120 bp, Artificial Sequence
  ENSG00000259724_21 (sequence is synthesized)
ggcaaggggaagcccgaacagagagagtgcagtcaatccataaacctatgtgtgggagactgagagagtaacttctggcagaagaaagatttttgtggtctttgtcggcttggcctggag

SEQ ID NO: 925934 - DNA, 120 bp, Artificial Sequence
  ENSG00000259724_22 (sequence is synthesized)
agaggttttctaacttgacatgggaaagttttcatgaacatgacaacagaaatatgagtccatgactgagtgaggttccaatctataagaacaggacataatgaggaagtgacaggtcac

SEQ ID NO: 925935 - DNA, 120 bp, Artificial Sequence
  ENSG00000259724_23 (sequence is synthesized)
actggaagctgagttaattgattatattcatacggaacatgaaagttctccttctgaaaagggcaaaagatgacatcctcaaactcgcagcaataattggaaggagagacacgaactccc

SEQ ID NO: 925936 - DNA, 120 bp, Artificial Sequence
  ENSG00000259724_24 (sequence is synthesized)
cgttgctctggagaaagtgatgaaagttcccggggctctggctaatgacaggaaacacataagtggacagagtatcagcctcttggggggccccaggatacagttcaaatgccagcttgt

SEQ ID NO: 925937 - DNA, 120 bp, Artificial Sequence
  ENSG00000258098_0 (sequence is synthesized)
tttaatagattcattcctctgaggaccctcaagtacttcagaagaactaaaaaatgaatatcacgttacaccaaagaagaaatgaaagctgccagtgtcttctgaagttaaacaggctcc

SEQ ID NO: 925938 - DNA, 120 bp, Artificial Sequence
  ENSG00000258098_1 (sequence is synthesized)
tgttctttgacccagcaatccaatcctaggtatttaattgttccctgaggtttaaggcagtggactgaggataatacaggctccagctttcattagttcaatggatgatgctgttcaatc

SEQ ID NO: 925939 - DNA, 120 bp, Artificial Sequence
  ENSG00000258098_2 (sequence is synthesized)
caaggcaataatgacgacaagggttgaagatgaaagatgccaaatattctgatcaattcaataaggcaaaaagacaagttaattcactcagtgctccaggcatcaacttcatagaaggaa

SEQ ID NO: 925940 - DNA, 120 bp, Artificial Sequence
  ENSG00000258098_3 (sequence is synthesized)
tggaaattctacctgtttcctaaagaactacagaggtgtacaccaaacggagggcaaatgctgttaccactcatcgtgcaagacttttgaggcaatttggacatagacaagtgatgggaa

SEQ ID NO: 925941 - DNA, 120 bp, Artificial Sequence
  ENSG00000258098_4 (sequence is synthesized)
aattgaatcattatatggctcatgacagtgttgaaaactcaaacatccaaggacctgtacctttgctaagtgccatgcatatgttgctgataaagatgcaataaatactcttttgttaaa

SEQ ID NO: 925942 - DNA, 120 bp, Artificial Sequence
  ENSG00000258098_5 (sequence is synthesized)
attgttctattcatcatgacctcatagagccttttctttttctcaggtctcatttacttcctcttttttttttccttttccttttcctataccttcctttggtccttataagtatccaaa

SEQ ID NO: 925943 - DNA, 120 bp, Artificial Sequence
  ENSG00000258099_0 (sequence is synthesized)
gcggccgctgagcgcatcggagggcgggcgcgccgaggcgccgggtgggagcggagcatcttcacttctgcggggacctagtttgcccccacctgatgcaacccagaaaatggactgact

SEQ ID NO: 925944 - DNA, 120 bp, Artificial Sequence
  ENSG00000258099_1 (sequence is synthesized)
gcgagtgccttggggcggagaatgtgtcttgctacgtgtaaagcacctagaaccctgccagattcaggggacacagcatcctgccgttttcctgccgtcccccgcccgccacacagtagg

SEQ ID NO: 925945 - DNA, 120 bp, Artificial Sequence
  ENSG00000258099_2 (sequence is synthesized)
cagtggctcggggcatctaccaggcaggccgcgctgtcctgccctgccggggctggagtggagcaaccctccggggccacccacatctgggtaccttttccccactttttccaccccagc

SEQ ID NO: 925946 - DNA, 120 bp, Artificial Sequence
  ENSG00000258099_3 (sequence is synthesized)
cgcgcacagtcaccagaaaactcttttaggtatctgaccttcatttgaacctatgttccctcacttgaacttctttttcctcattcatgagattctaaaggaaatatatgggattgggac

SEQ ID NO: 925947 - DNA, 120 bp, Artificial Sequence
  ENSG00000258092_0 (sequence is synthesized)
attgtttccactttattgctcaagcatggaacttgaggcaagcctggaccttcagcaacgtgcagagaagaggctgaggggattttgggacacaacctggccgagaggggaaactgacag

SEQ ID NO: 925948 - DNA, 120 bp, Artificial Sequence
  ENSG00000258092_1 (sequence is synthesized)
ccttgcgatccagactggagtcaaactttgtgccatctaatagccagccagtgtagtggacaaagactcggtccccaatcatgggcatctctgtacctgtgccctctctcttgatgacct

SEQ ID NO: 925949 - DNA, 120 bp, Artificial Sequence
  ENSG00000258096_0 (sequence is synthesized)
gattcatcccaggccaggcgagtggaaaagtaccagccgcgcgcgaggggcgggggcgcgccgaggggcggaaaagtacagacggcggagccgcggggagaacaaagatgatgccaccgc

SEQ ID NO: 925950 - DNA, 120 bp, Artificial Sequence
  ENSG00000258096_1 (sequence is synthesized)
tgtgttgcggccgtcgaggccccctactccggcagatttcaacctgctttcactcttcaaaactagccggaggtcggcgagcagctccttttcgggatgtgctttttgtacggccatgga

SEQ ID NO: 925951 - DNA, 120 bp, Artificial Sequence
  ENSG00000258096_2 (sequence is synthesized)
tggccagcaagccaggccccttagaaagaggccccagtggggagcccggcgctcctaaggccgtttgggagtccccagttttccactcgctgacacgttgcttctcttatcccaccaccg

SEQ ID NO: 925952 - DNA, 120 bp, Artificial Sequence
  ENSG00000258096_3 (sequence is synthesized)
ccgccccgggcaaaggcactgccttgtctgaatgcgggtctgaggcgctttctgcggagcctggtcctttcccttcaatggtgatgtgtgtggtcttgctgagccaggcaactaggggga

SEQ ID NO: 925953 - DNA, 120 bp, Artificial Sequence
  ENSG00000258096_4 (sequence is synthesized)
cccttcgctgtggaaaaattggtgctgcgggaaaggcaagactcactcccttgcaggaaacaaagaccccttaggagagagaaatgttcatggaatgaatgaataaacaagtttgaccta

SEQ ID NO: 925954 - DNA, 120 bp, Artificial Sequence
  ENSG00000257904_0 (sequence is synthesized)
gtactggctttttctttgccttctaccataattatctgtttcctgaggcctccgcagaatccaagcagatgccagcatcatgcctgctgtacatcccacagaactgttagaaaatatcca

SEQ ID NO: 925955 - DNA, 120 bp, Artificial Sequence
  ENSG00000257904_1 (sequence is synthesized)
gaaaaaattgtgaataaatcagaggagaaatggacattacccagatgtcaggcttgaagcttcataaagtaactgaagagaatttggaaaacattgacccttgaacaacacaggttgaac

SEQ ID NO: 925956 - DNA, 120 bp, Artificial Sequence
  ENSG00000257904_2 (sequence is synthesized)
tgtgtgagtacactgaaaaatggattttattccacctctgccacccctgagacaacaagaccaaccccgttgtcttcctcctcatcagcctattcaatataaggacaaccaggatgaaga

SEQ ID NO: 925957 - DNA, 120 bp, Artificial Sequence
  ENSG00000257904_3 (sequence is synthesized)
tttttacataaaaaagaggaagactgagatatcatgcaatgccagcatcattatatatcttgaactcagacaaaatgacagagactgcatgtctcccctacctcgtgtcaaactctaact

SEQ ID NO: 925958 - DNA, 120 bp, Artificial Sequence
  ENSG00000257904_4 (sequence is synthesized)
tcctggtaatgaaatgaatgaactgtggccacataccactagatttcatggatagctctgttgacttgagaaaaattgaattctgaaggggcagagttgctgacagatgtcacatcagac

SEQ ID NO: 925959 - DNA, 120 bp, Artificial Sequence
  ENSG00000257904_5 (sequence is synthesized)
tctcacgtgaacacatactattagtatatactaagggaaagaaaagatatacttacatgtgttcagtagtgatgtgaaactggatgctctcatctccaaataaaaacacgtggcttcttt

SEQ ID NO: 925960 - DNA, 120 bp, Artificial Sequence
  ENSG00000272159_0 (sequence is synthesized)
ttgtttccagggtgctgatcctactggtggatcattcagaaagttaatcaggtgctcctaaaatggtttttggaacttccaagttcttactcagaattccaagccataggagacaggtat

SEQ ID NO: 925961 - DNA, 120 bp, Artificial Sequence
  ENSG00000272159_1 (sequence is synthesized)
ctaaggtgccaagctgattccattgtgcaaaaaatttcctctctgaagggacgtacacatgaaactaaaaaaacaacatgatggggggtgggctttatacaaagttgagtggggtgacaa

SEQ ID NO: 925962 - DNA, 120 bp, Artificial Sequence
  ENSG00000272159_2 (sequence is synthesized)
aaaggactgccccacgggctaaacagctgatccgctctctgaagccagacagtcttatctgggaggtcctttacagatgccactgttgagggccggaagctgaagagagtgagctccatc

SEQ ID NO: 925963 - DNA, 120 bp, Artificial Sequence
  ENSG00000272159_3 (sequence is synthesized)
ctcaagtagtcctttatgctccttttgaactagccttgctgttctgggccgtcatttgtgatttggcctggagtgtctaggcgtaaaaaacaaggactgtaggcattagtcacagacgtg

SEQ ID NO: 925964 - DNA, 120 bp, Artificial Sequence
  ENSG00000272159_4 (sequence is synthesized)
taagttcttaaggagtgaatgctatttttgttttcttaatcaaaatagtgaccacaaagtcaaatctgagattataatttaccttggtaataaaagataaaggagatttacaaaaaacaa

SEQ ID NO: 925965 - DNA, 120 bp, Artificial Sequence
  ENSG00000272158_0 (sequence is synthesized)
ccaaaagagaaggatgactaaatcagaggaaactattatcaatggagaaggcacctactgaaatctgcataacaaacattactcttatttaccatacttgtcctgttcacctccccataa

SEQ ID NO: 925966 - DNA, 120 bp, Artificial Sequence
  ENSG00000272158_1 (sequence is synthesized)
cattttcccctgggtatctcctatgtatacatgaagcatacatgttaacaaacttctgcttgtttttcttttgttaccctgttggtttgttatagtggttccaacccagaaattagaagg

SEQ ID NO: 925967 - DNA, 120 bp, Artificial Sequence
  ENSG00000272158_2 (sequence is synthesized)
gtagagggaaaatgattttttttctcccctccacttgaaatatgtattcttcctgctctatgaagttgtttggatgttcattaactcaccactctcaaatacataattagtttctgccta

SEQ ID NO: 925968 - DNA, 120 bp, Artificial Sequence
  ENSG00000272157_0 (sequence is synthesized)
gccgttctgccacccctatttatacgccgggaggctcctgacgcagcctgcgatcgatcacggcacgccggccagtgggggcagcgcgctgctgcagccaaggcgaggattctgcgcaaa

SEQ ID NO: 925969 - DNA, 120 bp, Artificial Sequence
  ENSG00000272157_1 (sequence is synthesized)
agggaaggcggggtcgagctacggcccgaggagctgcggcggtcgtcctttccactttgctcagagggccctgattttctctgagatcccatgccccctcactcatttcccttctgtact

SEQ ID NO: 925970 - DNA, 120 bp, Artificial Sequence
  ENSG00000272157_2 (sequence is synthesized)
gcccctcccgtcctgcattgcccagaccccgtgacacttggatccttaagttgcccccaaaacaggttcttgctcccttttgacaccctagttttctgtatcccgtcacctcgcagacac

SEQ ID NO: 925971 - DNA, 120 bp, Artificial Sequence
  ENSG00000272157_3 (sequence is synthesized)
cctgtccccccaactcgcccttttcccaccaggaacctccttaattttttcccttggtgtttacggtgatggtgcggctagggaattttagatacaaataaataggctaggttatgtgta

SEQ ID NO: 925972 - DNA, 120 bp, Artificial Sequence
  ENSG00000272156_0 (sequence is synthesized)
ctttatagtacaagtacttccttattaaaataagataactttcctccaataatcaatttttaaaccatttctgcattgtcatggtttcacatgtctttaagcttattttgtatagtttgc

SEQ ID NO: 925973 - DNA, 120 bp, Artificial Sequence
  ENSG00000272156_1 (sequence is synthesized)
aacctaaatctatgcaacattttctagtactgacaaacctacggtatttgagttatgggctgacattcatggtcttgcaggcaaaactcaagttcctaggtaggactgagaagtggcatg

SEQ ID NO: 925974 - DNA, 120 bp, Artificial Sequence
  ENSG00000272156_2 (sequence is synthesized)
agccactgtgctcagcctcagtttattttttactcataaataactcagatttgatttcttcttatgggtttgctggaagtaaaaatcacattcacaaccactgaagccagacatttgatt

SEQ ID NO: 925975 - DNA, 120 bp, Artificial Sequence
  ENSG00000272156_3 (sequence is synthesized)
taacagtattatttattaggaaagtaatgctgtaagagtcagcaaaatggggcctggcttcccggggctttgtcctagtcagcaacttgccttgcactgccctcttcctgccacctgtgt

SEQ ID NO: 925976 - DNA, 120 bp, Artificial Sequence
  ENSG00000272156_4 (sequence is synthesized)
ccagcctgagcaagaaaagatctgatgctcagggaatccctcattgggaaaatttaaatatggaccgtatagtagatgataatattgaaattaggttatctttttattagatgtgatgat

SEQ ID NO: 925977 - DNA, 120 bp, Artificial Sequence
  ENSG00000272156_5 (sequence is synthesized)
ggtaatgtgataatgtaggtgaatgttcttatttttaggtgaggcgtggggaatgtttccggatggaatattctatgtcttcaacttactttcaaaaaaacaatacagcaagtcctcaaa

SEQ ID NO: 925978 - DNA, 120 bp, Artificial Sequence
  ENSG00000272155_0 (sequence is synthesized)
attaaactttctattttcttaaaactctcacatcaggtatttccagtgttttcaagcatgtataaatattttaatgtataaatgttgtttaaaatcccctcaatcggtatctcctgattg

SEQ ID NO: 925979 - DNA, 120 bp, Artificial Sequence
  ENSG00000272155_1 (sequence is synthesized)
acatttgaaacacggagtaatacaggtctgtgcaagaattagcagcttgttccttgctaataatgacttgtgtcatctggaaggcccccaagagcccatggtctacaggtggaatgacca

SEQ ID NO: 925980 - DNA, 120 bp, Artificial Sequence
  ENSG00000272155_2 (sequence is synthesized)
ccacttgggagtgagctgatggagagcacccagcaggtctcctccatcttcctggttcctgtgctcaccatagggctggtgtacattgggccattaataaacgtttgttgaacaaattaa

SEQ ID NO: 925981 - DNA, 120 bp, Artificial Sequence
  ENSG00000272154_0 (sequence is synthesized)
cgtagtccagcgacctgagggcaaacaggtggccgttgtccgcgttgatggagaccagggaagagaggggcagccacagaatagcgtcttgactcggacccagccagagaccctcccaga

SEQ ID NO: 925982 - DNA, 120 bp, Artificial Sequence
  ENSG00000272154_1 (sequence is synthesized)
aaaacaaagagaagcaagacttgcctttgtctaagaaatcgctctcctcccgcctccattgcactttccgtcacgctcttccagggaatgtcgccaagctgaacctcagacagagctggg

SEQ ID NO: 925983 - DNA, 120 bp, Artificial Sequence
  ENSG00000272154_2 (sequence is synthesized)
taccacactggatccgtgcgtcaccgagcatgcacaatgcctgtggtttaattcgccttcttagtcaacagcgccaccatgcgttcgcttgcagttacaaaatcttggagaaggtgtttt

SEQ ID NO: 925984 - DNA, 120 bp, Artificial Sequence
  ENSG00000272154_3 (sequence is synthesized)
tattttgctttatcgattattcttatcaaccctagttgacgctactggaggagtttctcatgttatatgaattaaataaatgcaatctagggaaataaaatgcacttttatctacgagca

SEQ ID NO: 925985 - DNA, 120 bp, Artificial Sequence
  ENSG00000272154_4 (sequence is synthesized)
gcgcacgagggcggtccctgatcttggaggagagccgccgtctaaagcgccagcagcgccaccttgcgttttgtggatgttattcccgttatcaagactagaacaaaaagatggcggatt

SEQ ID NO: 925986 - DNA, 120 bp, Artificial Sequence
  ENSG00000272154_5 (sequence is synthesized)
gaaggaattctgcaacaagaatgatttgtccccggtatctttgctgtttcattccatctttatcctcaaatggtcacagtaatgctaccacagaatagcgtcttgactcggacccagcca

SEQ ID NO: 925987 - DNA, 120 bp, Artificial Sequence
  ENSG00000272154_6 (sequence is synthesized)
agggacctgagggcaaacaggtggccgttgtccgcgttgatggagaccagggaggcgaggggcaggtttctctgttaccagagtatagaagttttcgacagatggcttcaggatgaaggg

SEQ ID NO: 925988 - DNA, 120 bp, Artificial Sequence
  ENSG00000272153_0 (sequence is synthesized)
ttcgggctgcagtagcagcatggcgtctttcgacaccaaggagactcttcagcagaccctgcaaaggaggctgcagcaccttgaggtcctgtgggggccgggcgcagtacagcaggggcc

SEQ ID NO: 925989 - DNA, 120 bp, Artificial Sequence
  ENSG00000272153_1 (sequence is synthesized)
ctttgacggcacggagctcgtgggtggcaagggtggcagccgtcctcttctcacagagatcttcgtggagcttggtctgtaacacagaagcagtgatgagcaaggtctcttgtgccctga

SEQ ID NO: 925990 - DNA, 120 bp, Artificial Sequence
  ENSG00000272153_2 (sequence is synthesized)
accctcccggtccaaggtcttcacaaccacgccacgcccctttccgagacagggctcccctccaactcctctccacccggccagccaggcactcactttgtggaatcaccatcaggaaaa

SEQ ID NO: 925991 - DNA, 120 bp, Artificial Sequence
  ENSG00000272153_3 (sequence is synthesized)
ctatcttaacctatcaatcagcagactttcttccttctctaattctgacataatatttgagatttcaaagaacccatcttgaactaaaatgtaaataaaggctgagctttaagttgtaaa

SEQ ID NO: 925992 - DNA, 120 bp, Artificial Sequence
  ENSG00000257900_0 (sequence is synthesized)
gcactaaatcatgaaggctggattcttgaagcctggcagaggcaaatgtctcattaatgctgatctgagagacatctgtgatgagcctgaacatcaggccaatctgcagagctgatcagg

SEQ ID NO: 925993 - DNA, 120 bp, Artificial Sequence
  ENSG00000257900_1 (sequence is synthesized)
ggctgctgagtggttctgaagtgagtcaggctgtgaatgaagactccaccagaatgaggagaattccatgcatggagattcaaataaagacaaaagggagatgcaactatggaggctgag

SEQ ID NO: 925994 - DNA, 120 bp, Artificial Sequence
  ENSG00000267890_0 (sequence is synthesized)
aggaaaagactgtgaccagcttcacaaaaggcagcaaaggactatcagagaaagagaactccgagtgaggggtctggcctaggcccgggatcggaccaggctccctcaggaccccatcct

SEQ ID NO: 925995 - DNA, 120 bp, Artificial Sequence
  ENSG00000267890_1 (sequence is synthesized)
ttcctgcccggaccgtgaattcatctccttgaagccataacgtccgagctgctggtgcggggcagccctggccctaggcttcctacccctggaagcgagaggatgagaggaggccggccc

SEQ ID NO: 925996 - DNA, 120 bp, Artificial Sequence
  ENSG00000267890_2 (sequence is synthesized)
gggggacccctgccccccaaaaccctctgtctgtctctgtctctttgctgtttgtccaagactcagtgtcccgacccttgttctcgccgtgaatgtcaatgggccaatcctctctgtcct

SEQ ID NO: 925997 - DNA, 120 bp, Artificial Sequence
  ENSG00000267890_3 (sequence is synthesized)
ttcagacacacacacacctgtgtccaccccttctgttcgccacaccctgcgtctggccggtccccccactgctgctgctatcaacgccagaataaacacactccgtgggtctcactccaa

SEQ ID NO: 925998 - DNA, 120 bp, Artificial Sequence
  ENSG00000267892_0 (sequence is synthesized)
atcctcctttttcaccagcagggcatcgcggcactcggtggggagtgtgtcccagcgtgggcagctggagagactgtggtgtgaggggcgggcaggtggggtccagccccacacccaccc

SEQ ID NO: 925999 - DNA, 120 bp, Artificial Sequence
  ENSG00000267892_1 (sequence is synthesized)
cagacccatcccacctgtcgctccaggcccccgtccactccacgcagccccatgggttccgcagccgcagcagccgcaccttggtgaagcccaggaacacctggggcagcatcgtcagtg

SEQ ID NO: 926000 - DNA, 120 bp, Artificial Sequence
  ENSG00000267892_2 (sequence is synthesized)
ggggtgatgcctggacatggcctgccaccccacccatgggggacacttaccttgtgtgtgcccgtgatggaatacgcgtgtccctttaccaggccctcttctgtgcggtactcaccccga

SEQ ID NO: 926001 - DNA, 120 bp, Artificial Sequence
  ENSG00000267892_3 (sequence is synthesized)
tcactctgggcaggggatgggatggtgaggccaaggtaggggacaggagggcagctgctcctccctgcccccaacctcctgccaccaaggcaggagccaaccagagcactgaactgaatg

SEQ ID NO: 926002 - DNA, 120 bp, Artificial Sequence
  ENSG00000267892_4 (sequence is synthesized)
gcacgcagctcagagaccatgtcagggttagtgactgaaggcgaaagagaaaaggagaggaagggagatggaaacgagacaaaaggagatggaggtacgggctcacgcctgtaatcccag

SEQ ID NO: 926003 - DNA, 74 bp, Artificial Sequence
  ENSG00000267892_5 (sequence is synthesized)
agtctacaaaaattttaaaaattcaacaggcgtggtggtgcacaccagtggtcccagctactctggaggctgag

SEQ ID NO: 926004 - DNA, 120 bp, Artificial Sequence
  ENSG00000267892_6 (sequence is synthesized)
tgaggcaggaggatcccttgagcccagaggtcaaggctatagtgagctatgatgacactactgcactctggcctgggtgacagagtgagatgagaccctgcctccaaaaacaaaaacaaa

SEQ ID NO: 926005 - DNA, 69 bp, Artificial Sequence
  ENSG00000267892_7 (sequence is synthesized)
ctgggtgacagagtgagatgagaccctgcctccaaaaacaaaaacaaacaaaatagatggaaagaggcc

SEQ ID NO: 926006 - DNA, 71 bp, Artificial Sequence
  ENSG00000267892_8 (sequence is synthesized)
aaaaacaagcaggagaattgcttgaacttgggtgacagaggttacagtgagccaaggtcgtgccactgcac

SEQ ID NO: 926007 - DNA, 61 bp, Artificial Sequence
  ENSG00000267892_9 (sequence is synthesized)
gtagagagacagagacagagacaaagaaagatacagaagagagaaacagacacaaaagaaa

SEQ ID NO: 926008 - DNA, 120 bp, Artificial Sequence
  ENSG00000267892_10 (sequence is synthesized)
caaagaaagatacagaagagagaaacagacacaaaagaaaaagagaagcagtaactcagaggatttaagtaaatgaatgagtgaaggagttagaccaactcagtgaatgaatgagtgtgt

SEQ ID NO: 926009 - DNA, 120 bp, Artificial Sequence
  ENSG00000267892_11 (sequence is synthesized)
catggggtcacagatgaacacatgacccaagctaagcccacgagaatcaatcctgggacttttactgaaattctcagaaagaggcactttttttttttttttttaaataaaccctagggt

SEQ ID NO: 926010 - DNA, 120 bp, Artificial Sequence
  ENSG00000267892_12 (sequence is synthesized)
ggtaggagatacctgcagctatgggggatccttttatgcccatgaggggagagcctggctgagagtgacactaacacagaatgagaaataaacatagttgcaacaccctcagcatctgga

SEQ ID NO: 926011 - DNA, 120 bp, Artificial Sequence
  ENSG00000287100_0 (sequence is synthesized)
agcctcggcggggcccggccggcggcggggaggtcgcggggccgggaggcgcgaggttgttcgagaagctgaaatagaaatcaatttcttgatttcagtaggaatagtgagtccctaaga

SEQ ID NO: 926012 - DNA, 120 bp, Artificial Sequence
  ENSG00000287100_1 (sequence is synthesized)
ggggagaagccagctttcatttcctgagctgtggaatgcttgcttttgggacaatatctcttggaatgcagctgccatactctgagaatctgaagccatagggaagaccacatgtagatg

SEQ ID NO: 926013 - DNA, 120 bp, Artificial Sequence
  ENSG00000287100_2 (sequence is synthesized)
ctccagttgacaaacccagctgagctccaagttgacagccatcattagtcacaaaccacatgaaggcatcatggctgtttaactcagttgtaacttgtaatgactctaggcccaactacc

SEQ ID NO: 926014 - DNA, 120 bp, Artificial Sequence
  ENSG00000287100_3 (sequence is synthesized)
atctgactgcaactgcctaagacactctaagtggggattatccacttgagcctaggaaatcttcagaactgtgaaagataatgataagttgttttaagccattcagcacaaattgtagta

SEQ ID NO: 926015 - DNA, 120 bp, Artificial Sequence
  ENSG00000287100_4 (sequence is synthesized)
ttgtagtacaattttcttatcaaatatcataattttactatatatattttagcattttaaatacagcatgctgttttaaagtacttacaatatggctgcaaagcctataaaatatttatt

SEQ ID NO: 926016 - DNA, 120 bp, Artificial Sequence
  ENSG00000287100_5 (sequence is synthesized)
aatttgttgagctatttaagggtaacattttatctaccaactttggaaaccaactatttaacttggcatagagtagcattctttgaaattagcataatgtttttaacagatcagacctat

SEQ ID NO: 926017 - DNA, 120 bp, Artificial Sequence
  ENSG00000287100_6 (sequence is synthesized)
gttactttaaaattaacaatctgaaagtcaccaactactaggagggtttcaataggagtaatttgagactgagaaggtttaagtcattcttcaatttctcttttaatatagttgacttgt

SEQ ID NO: 926018 - DNA, 120 bp, Artificial Sequence
  ENSG00000287100_7 (sequence is synthesized)
taatttataattcttatcccatcctacacaagggtatctatttcatttttataaagttcttcatgtcgtagatcttgcagctcaaagagaacatatacatctaaggcttaagaaggtaga

SEQ ID NO: 926019 - DNA, 120 bp, Artificial Sequence
  ENSG00000287100_8 (sequence is synthesized)
aagtgcataaaacaaaactctggactagtactctgaaaaactggattgcagctccagttgtgtggctaggtttggtcacttcaccttttagtttttatcttcttcctctatagacagata

SEQ ID NO: 926020 - DNA, 120 bp, Artificial Sequence
  ENSG00000287100_9 (sequence is synthesized)
ttagctcttctttaaggtcctttctactctagttggtgacaaagcaagtcatttttattatcagtactgtcctcttttcctgcaatgcctctttttcccctaacttttgagaagaagcca

SEQ ID NO: 926021 - DNA, 120 bp, Artificial Sequence
  ENSG00000287100_10 (sequence is synthesized)
agttatgctgtatcaccttgtttttcatggttggctcaaagtaaaggttatgtctacctataacagctgcaaaaaaataaactaaatgtgtgaatatctccatttttagacatcctatta

SEQ ID NO: 926022 - DNA, 120 bp, Artificial Sequence
  ENSG00000287100_11 (sequence is synthesized)
tttagacatcctattattatctgtgtcaatttctgtgttcacatgtgtgtcaataaagaaaatataatattggaaaaattgtagataatattatgaattgtgtatgtatataaatacaat

SEQ ID NO: 926023 - DNA, 120 bp, Artificial Sequence
  ENSG00000267898_0 (sequence is synthesized)
cagataccggcctggcggggcatctgcagatcccctcggtcaggggctgccccgcctgggctgttcggagcagctcctctgtagggcagggcctgacctcaccccacaccccagtggctt

SEQ ID NO: 926024 - DNA, 120 bp, Artificial Sequence
  ENSG00000267898_1 (sequence is synthesized)
cagctccctgcccagcgcacgggctgcctccatcagggcacttaagtagagtcaaggtttgcgccgactccgtctcccagaaatcaacgtggaccaggcccacttaaaaaatatgcatta

SEQ ID NO: 926025 - DNA, 120 bp, Artificial Sequence
  ENSG00000267898_2 (sequence is synthesized)
gtcgaagacagacgtctcgtccataggtccccagactgtttgtccacaacgcagggcttctctttgtgggcctgaaggagcacacgtcaggcaagacacgagggcaacttcagagacact

SEQ ID NO: 926026 - DNA, 120 bp, Artificial Sequence
  ENSG00000267898_3 (sequence is synthesized)
tccaagcttcccaaggatccggagactccttatctcgcagcgcaaacctcaggcaactacaggtcctccctgcacctttgaggtgcccctccccccactcaaggttccagaaaaatccat

SEQ ID NO: 926027 - DNA, 120 bp, Artificial Sequence
  ENSG00000267898_4 (sequence is synthesized)
gccctcggaaaccccagaatcttactttcccgaggcaccccaggaccccagggtcatcagttcacagggctgttagtgctcccataaaactctagcctcccagagggaccccagccccca

SEQ ID NO: 926028 - DNA, 120 bp, Artificial Sequence
  ENSG00000267898_5 (sequence is synthesized)
ccctcccgcccacgaacccctgcatttccagaatcagccccagggccccaacccccccaagcccccatttcacaacacgctggcgctacaggcgcgtgacttccccttgctttggggcgg

SEQ ID NO: 926029 - DNA, 120 bp, Artificial Sequence
  ENSG00000267898_6 (sequence is synthesized)
atcccagagacaccgcaaagctcaaaacagacttttcattcctccccatttccactcccagaaaaagcctgggcccctgaaagagctccaagagatctccaggggtccagaaataacacc

SEQ ID NO: 926030 - DNA, 120 bp, Artificial Sequence
  ENSG00000212694_0 (sequence is synthesized)
catcagacacgaaggagaggccaacagatgagggaagccatttttctgcaatggaattaaatggccaagtgggtttttcctttgttgcaaatggggaatgtttttcctttgactctacca

SEQ ID NO: 926031 - DNA, 120 bp, Artificial Sequence
  ENSG00000212694_1 (sequence is synthesized)
tccagttcaggacgtctcagtgtgtttaacatttgtcaacaggcccaaggactcacagttggaagactggagaagactttttaaaaagatctggatttttccttatgacttggaatccat

SEQ ID NO: 926032 - DNA, 120 bp, Artificial Sequence
  ENSG00000212694_2 (sequence is synthesized)
ctttgtcttgtataactaggtcatagcacaccattcatgtcagcagttaacagttttgaattccaaaaaaacctaaagcagtaaacagtcctcagcgaagccgcctttttgcctacccaa

SEQ ID NO: 926033 - DNA, 120 bp, Artificial Sequence
  ENSG00000212694_3 (sequence is synthesized)
ccctggaaagtttgcagaagtggaaggagcagaacgtgagggtgtaacttacaaaaaggttctgggccggagaaggggcgacgttcgggcaccccccgaatggacaatctttccttctgt

SEQ ID NO: 926034 - DNA, 120 bp, Artificial Sequence
  ENSG00000212694_4 (sequence is synthesized)
ttgtcaggcatttggggcgtgtaagtctctgccgaatatagcagcatacgagaggatccacttgcaagtatttcccagttgtgtgttcttcggcggggggagggccctgggtgccgccta

SEQ ID NO: 926035 - DNA, 120 bp, Artificial Sequence
  ENSG00000212694_5 (sequence is synthesized)
cttctgaaagacacaggtcactgtcagaaagcccaactgtgctgtggccttccctccagccgcccccgtggggcatgtggggtgacagtgtgagccgtcctctgatgtctggctgctaga

SEQ ID NO: 926036 - DNA, 120 bp, Artificial Sequence
  ENSG00000212694_6 (sequence is synthesized)
gaggcaaagaacagagacccgaggttccggccacctttctctatgaaagggccttccttgacgcttctccaccttcctgggattgttttcttctccagtccccgaatgggcaggcctgta

SEQ ID NO: 926037 - DNA, 120 bp, Artificial Sequence
  ENSG00000212694_7 (sequence is synthesized)
tataagccttgtttctagaaccagacaaagctggatttgaaacctggcgagccattgaacagctatggccttgcgtaagcggtatagcctccaagcctatttctccatctccgaaaacag

SEQ ID NO: 926038 - DNA, 120 bp, Artificial Sequence
  ENSG00000212694_8 (sequence is synthesized)
agctctgagcagctggcttggctccgaggtatttttagctacagatccagcccccctccatcaccacaacagtcgagtccaaatcaaacgcgctccaggcaggtggggctggggttctgc

SEQ ID NO: 926039 - DNA, 120 bp, Artificial Sequence
  ENSG00000212694_9 (sequence is synthesized)
cagcctcctggccagcaggggtgggtgggcagactggggccagtatcagctgttctgcctggacccaggccgggctgggaaggcacacttgtgcttatttcccgcctccacttctgtgca

SEQ ID NO: 926040 - DNA, 120 bp, Artificial Sequence
  ENSG00000212694_10 (sequence is synthesized)
agcttgtgctgtcataagcagagatcacagccccatttcttggatggagaaagtggacactgaggtctgaggcttttgaggacagtcaggagccctcctatgggctccagtgatgcactc

SEQ ID NO: 926041 - DNA, 120 bp, Artificial Sequence
  ENSG00000212694_11 (sequence is synthesized)
accagcttctggtcctcttcttccacctcttagagtgccttggctccctcctgtcgtcctggggaacctcggccccagccctgcctccccagccagtcacagctcctccctggtcaccct

SEQ ID NO: 926042 - DNA, 120 bp, Artificial Sequence
  ENSG00000212694_12 (sequence is synthesized)
taaggaattcctggtgactggaagggggagtgactcaggccctcaacctctagcaggtaagggagctacctcctgggtgggcatgcccagttcctcagtgggcccagcgcggcccagcct

SEQ ID NO: 926043 - DNA, 120 bp, Artificial Sequence
  ENSG00000212694_13 (sequence is synthesized)
gcccggctggtagctgggttgctctgcttctgtcccccactcctgtggagcctggcaggcaactccatgatctgaccccggttaccttgacagccctgcctggcctcccctctcatggcc

SEQ ID NO: 926044 - DNA, 120 bp, Artificial Sequence
  ENSG00000212694_14 (sequence is synthesized)
cagccaccccagaacctgaagaggttttctagctgccgtgcatttgccaggctgggttacccaccctactttccctgcctgccctccagtgctgccaggcctagtgtgccagccagcgct

SEQ ID NO: 926045 - DNA, 120 bp, Artificial Sequence
  ENSG00000212694_15 (sequence is synthesized)
cagccttcagtaaagggttcccctgcttccaacctccattgcactgcttcccctaagactgtgacctcctggaaggctggagcacaactgcctctcaataaacgtgttgcaaaaaaggaa

SEQ ID NO: 926046 - DNA, 120 bp, Artificial Sequence
  ENSG00000212694_16 (sequence is synthesized)
ccggcggcggcagctgcgccgccaaagccccgggccccagcggccccccacccctcactcgcgcgctcccacactgcctccccctccccgggggaaggccttttaatttatttatttttc

SEQ ID NO: 926047 - DNA, 120 bp, Artificial Sequence
  ENSG00000212694_17 (sequence is synthesized)
tgggactggggtgggggtcttggctggcgggggagggggtctccccgggctctacctcccgcggccgggactaccctcagagccgcgaccgccgcggcgtgcgtcccgggcctgcaaaac

SEQ ID NO: 926048 - DNA, 120 bp, Artificial Sequence
  ENSG00000212694_18 (sequence is synthesized)
cgcgcggggcccggggagatggctggggtctggggggccgagggtgtgtgtggacgctgggagccgcggggggaggccggcgtcgactcagaggagttgcaatcgaggtccgggagtggc

SEQ ID NO: 926049 - DNA, 120 bp, Artificial Sequence
  ENSG00000212694_19 (sequence is synthesized)
ggagctgagctggggaagggagaccagggttcaccacgttagcattcgcattcctgggaggatgcagccctcgcctggacctgggcgatagacgccttcttctgtttttatttttggagg

SEQ ID NO: 926050 - DNA, 120 bp, Artificial Sequence
  ENSG00000212694_20 (sequence is synthesized)
ggagcgccctgtaattgtcctgaacacatgcttcccccccttcctccagccacccgcggaggagagagtcccccttttttgcatttatcttttccttcccctttctttattaaaggtccg

SEQ ID NO: 926051 - DNA, 120 bp, Artificial Sequence
  ENSG00000212694_21 (sequence is synthesized)
ggagtggcggcggccaatcagcgcgcggcttccattttgtgagttcaactccgaggctcccgggcttcgcgaggacgcgtttgcagccccctctgccgctcctctctggcggccgaggcg

SEQ ID NO: 926052 - DNA, 120 bp, Artificial Sequence
  ENSG00000212694_22 (sequence is synthesized)
caggagccgcctcgccggggctcggagctggtgtagctcatattggggctcttttcggggtttgtaatttggccgtgggtaggtaattggctggagcagggcggcagggcgcggcagcca

SEQ ID NO: 926053 - DNA, 120 bp, Artificial Sequence
  ENSG00000212694_23 (sequence is synthesized)
atcagcgcgcggcttctatagggcttgagttattagacgctgatctcaaaacatccttcatcagacacgaaggagaggccaacagatgagggaagccatttttctgcaatggaattaaat

SEQ ID NO: 926054 - DNA, 120 bp, Artificial Sequence
  ENSG00000212694_24 (sequence is synthesized)
ggcttcgagcccgtcgcggctgggccgggctggtctggcaggcgggcccagccgggcagggctgctttgctaatggcggcggctctctttccttccttcctcctttcctccgtccccccg

SEQ ID NO: 926055 - DNA, 120 bp, Artificial Sequence
  ENSG00000212694_25 (sequence is synthesized)
ttgtgagcagttgttactcttttagtttttaaaaaaccttttacattgtaagtacccaatccattctgtcctgacgcagtacagttttgatgttaatgttgctgagatgtccttaatttt

SEQ ID NO: 926056 - DNA, 120 bp, Artificial Sequence
  ENSG00000212694_26 (sequence is synthesized)
ccgaaccttcatctgcatgtatgtctttgtctctcttgtctaatataagccagttaagatgcttgagacgatcttgctttataaagctaaggttctagctttatgcttttgaaaatgttt

SEQ ID NO: 926057 - DNA, 120 bp, Artificial Sequence
  ENSG00000212694_27 (sequence is synthesized)
acagcactaaatgctagtcagctttcttccccgtagcttgtacactttctttgaaaatcgatctatttgaagaaaaacagccctgtttttctcgtctttggtgttgggggttggggggag

SEQ ID NO: 926058 - DNA, 120 bp, Artificial Sequence
  ENSG00000212694_28 (sequence is synthesized)
ctggtgggtgagggaaaggaagaccttttctttgtgtagagagactaaagccgtcacaggaaactagattaaaactggaaaacaagtcctagctggttccagcaaacaccaacgttaagt

SEQ ID NO: 926059 - DNA, 120 bp, Artificial Sequence
  ENSG00000212694_29 (sequence is synthesized)
agtttgactctgacagtcctcccactaaggtaggtgtgagtacttgcccagaccgtgagggagatttggggggctctggcctgcagcccagggagggccgaaccccaaacacgccgggct

SEQ ID NO: 926060 - DNA, 120 bp, Artificial Sequence
  ENSG00000212694_30 (sequence is synthesized)
tttgttctatgggtgggtggggggagcttggagctgtcttaatctgtattctcttgactgaacaataaatttttaaatatatctagtttcctctattaaacacttaaacctggccatctt

SEQ ID NO: 926061 - DNA, 120 bp, Artificial Sequence
  ENSG00000212694_31 (sequence is synthesized)
ggggggtattttctatggtggttgggcggctggtgcgtcttgtgccttttgtttgatttgactgtattttcgccttttgtctcttaatgacgatcacaccattgctatatccagagcagt

SEQ ID NO: 926062 - DNA, 120 bp, Artificial Sequence
  ENSG00000212694_32 (sequence is synthesized)
agcgggcagtgggcggggggttgggacacgaagggctcttcggacccctgtgcctcttctgccccaagggcgagaagacgggcttcgcagcgaccctcgggggtccatggagccgcctgc

SEQ ID NO: 926063 - DNA, 120 bp, Artificial Sequence
  ENSG00000260329_0 (sequence is synthesized)
gtgttttgacgtcggcggtgcccgcgttccgcgccgagtaacggtcttcggaattcagagccttcgccttagggaaggtgggacggtcgccagtttctccagcactttcttcgtccaggg

SEQ ID NO: 926064 - DNA, 120 bp, Artificial Sequence
  ENSG00000260329_1 (sequence is synthesized)
acgtcaacctcccttgcatgctgtcctcagggactgacagcggggcctgctcagaagttctcgtcgggactctctacaggcctttgtgattaagtgctaggggtgaggagagacgtggct

SEQ ID NO: 926065 - DNA, 120 bp, Artificial Sequence
  ENSG00000260329_2 (sequence is synthesized)
tatttatgtgtttttcagtttgttatgatttttttttttttaattttacttctccctgccctagaattgagctccttgagagtaaaaacccgcctgggtcgccatcaccctaggcttggt

SEQ ID NO: 926066 - DNA, 120 bp, Artificial Sequence
  ENSG00000260329_3 (sequence is synthesized)
gcagggcctgccaggcgctcgaatttgttgaagaggtgggtgttcagtatcgaaagagccgcggattgtacattagaaagcctggctttgcgccgcgtccttgccacttgctgaccaggc

SEQ ID NO: 926067 - DNA, 120 bp, Artificial Sequence
  ENSG00000260329_4 (sequence is synthesized)
ccctccacgtggtccccgccggggcagcagctctcctcacccgtccaaaggcacggggaggcgcgtggcggccccgccagagctgagccccctgggatgtgaggccgtctcgctctgagc

SEQ ID NO: 926068 - DNA, 120 bp, Artificial Sequence
  ENSG00000260329_5 (sequence is synthesized)
ttcagagcagggttgcaggagacacctcagaaggtcgttttgaggacgggaggagatgaactgctcaaagcctgcttaactagataaatggtatcgattaacttttctttgactcccttt

SEQ ID NO: 926069 - DNA, 120 bp, Artificial Sequence
  ENSG00000260329_6 (sequence is synthesized)
acttgtcatactttttttgtggtgggtgggaaaggtctttatgaactgtgaagtcctatgcaaacgtgagatgtttcctttcgcaatctgattagcgaagcaaaaacacgcgagtcaaaa

SEQ ID NO: 926070 - DNA, 120 bp, Artificial Sequence
  ENSG00000260329_7 (sequence is synthesized)
acatacacagaaagcaaaaaaaaaaaattcacaaaatggtttatcaactgcagaatattcaggatggtggaactgaatggtaactactgacaacatagctcagaaaggacgtgctaaaac

SEQ ID NO: 926071 - DNA, 120 bp, Artificial Sequence
  ENSG00000260329_8 (sequence is synthesized)
atgctggatgaagctaactttgatccaggtcttaaatggaatggactatagtttatagcttcaacctaatcattaacttatgaaatcagagaattaaggccacttaagccactgtgctca

SEQ ID NO: 926072 - DNA, 120 bp, Artificial Sequence
  ENSG00000260329_9 (sequence is synthesized)
gactgtcaagatatttagtttctcaaagcagaaagaggaaattaaatactcttgtcaattcaacatatgggttggatgattagcaggatccgtggattgttgtttatccagtatgtgaag

SEQ ID NO: 926073 - DNA, 120 bp, Artificial Sequence
  ENSG00000260329_10 (sequence is synthesized)
aaacggatatcctctgttttctcgttattacacaaacttctatccttaatatgtgacctttcaaggttgaactctaggtaaaattatgaagtgcacaattacgtcttgtttcttcttccc

SEQ ID NO: 926074 - DNA, 120 bp, Artificial Sequence
  ENSG00000260329_11 (sequence is synthesized)
tttgcacgtcgttttacaagagaatctaattattattaaagtacaaatgactgacaagattgtagccactcctgggagattttgcatttttacggttattaaaagccataactcaaagca

SEQ ID NO: 926075 - DNA, 120 bp, Artificial Sequence
  ENSG00000265943_0 (sequence is synthesized)
agtactgaggtagcgctcgtcctcccgccggtccaccaccaccgagtgtagcccgggcccggcctatttcatcagacacaaccccagagccgggagccacccctaccccgggagcccttc

SEQ ID NO: 926076 - DNA, 120 bp, Artificial Sequence
  ENSG00000265943_1 (sequence is synthesized)
gccaagcacgcagctccagaccagaagcagtcgctccgacccagagctccgggtggggcagaagaatcttttcttgctgctctcctaggatctaccaaccagagattctaatgtgatacg

SEQ ID NO: 926077 - DNA, 120 bp, Artificial Sequence
  ENSG00000265943_2 (sequence is synthesized)
tatccccaaatttgaaaaattcaaaatctgaaacacttctgatcccaagcatttcagactcctaagagttaatacgaagtagaaagagaagttggagttaagcagctcgttccagttctg

SEQ ID NO: 926078 - DNA, 120 bp, Artificial Sequence
  ENSG00000265943_3 (sequence is synthesized)
attttgccatttcctgtctgagtgacctgagtaagttatttaaacttctttggccctaactgtcttcatcaggaaaagaggctgtggtaagagttaaagatggtaaaatgacaaaatgcc

SEQ ID NO: 926079 - DNA, 120 bp, Artificial Sequence
  ENSG00000265944_0 (sequence is synthesized)
gtatttcaaagctctctgggtcctggggatgagcagtgccctctcatcctgtaataatcgtggacatcacacactgatgtacagacatggtgccagcgcctcccttccttggggtcttgg

SEQ ID NO: 926080 - DNA, 120 bp, Artificial Sequence
  ENSG00000265944_1 (sequence is synthesized)
aaaacccggtgccacaatgggatctaagtatccttggatcaatacggattcgtgtttctcacaccgaagttcagggctctggcagctccaggtcccctgaggccctgaggaaagagtcac

SEQ ID NO: 926081 - DNA, 120 bp, Artificial Sequence
  ENSG00000265944_2 (sequence is synthesized)
aagtggagtggaccctggtactacttgcaattcctccaagaattcaacccagccagcaagacggagggcctcccaaatgctgcgatctgctccgtgctgctctgctgggccgtcactgcc

SEQ ID NO: 926082 - DNA, 120 bp, Artificial Sequence
  ENSG00000265944_3 (sequence is synthesized)
ccctgtgcgttcctgcgggcgaggtcttctcccagaagcgagacaatgaacaggacagaagtgaattcattggccagaccctcaaactgttggtgaagaggaacgtttccttggaattaa

SEQ ID NO: 926083 - DNA, 120 bp, Artificial Sequence
  ENSG00000265944_4 (sequence is synthesized)
gctgccgctaagtaaaggtcaaggcacggggcagctggatgtccgtgtggatcctgcaaatggagaggctctgctgtggaaacagaatggaacttaacctcagctaaaacagtggtggag

SEQ ID NO: 926084 - DNA, 120 bp, Artificial Sequence
  ENSG00000265948_0 (sequence is synthesized)
ctgggcaacagagtgagaccctttctcaatcaattaatcaataaatgtgcaagtataaaaaaaatttagtttatcaagtatcttttatgtgactaagaagtatgatctgctgctcatttt

SEQ ID NO: 926085 - DNA, 120 bp, Artificial Sequence
  ENSG00000265948_1 (sequence is synthesized)
tatgatctgctgctcattttcctcacagctatgaactaaaagccaatgagctgacctgcagtcagtttcagctctgctgcttacatctgggtaacctcagtcaagtccccaatcctgctg

SEQ ID NO: 926086 - DNA, 120 bp, Artificial Sequence
  ENSG00000260322_0 (sequence is synthesized)
gtcatttcagagatacctatccttgaactataccctggtaagagtgggcatctattctttatgacaggagtcactatcaatataatttaggcctgcagagagatgttttctgagagaaac

SEQ ID NO: 926087 - DNA, 120 bp, Artificial Sequence
  ENSG00000260322_1 (sequence is synthesized)
caataggactattaaccagaagctaaagacaggtatcactatcaccagatgttatctatggaagacacatgtagagactctgcctgggagaaaatgctgattgaaaattctctctgtcca

SEQ ID NO: 926088 - DNA, 120 bp, Artificial Sequence
  ENSG00000260322_2 (sequence is synthesized)
tgtgtgagtgattttatacatttgactccctcttatgatagatttttcttagaagaaagaatagaccccaaaagattaatatgaagactgaggaggcttcacgagcatgtcaggtgattt

SEQ ID NO: 926089 - DNA, 81 bp, Artificial Sequence
  ENSG00000260322_3 (sequence is synthesized)
atgaagactgaggaggcttcacgagcatgtcaggtgatttatggcaggcttgaattggagcttaatcagagtgttaccagt

SEQ ID NO: 926090 - DNA, 120 bp, Artificial Sequence
  ENSG00000260322_4 (sequence is synthesized)
ttgaaaattaaagtacactccacaatgtgggagcaagcctgagcataggggctcaagggccccgttacagaatttgtaggggtttaaataccttctatgggtttccattggttacttggt

SEQ ID NO: 926091 - DNA, 120 bp, Artificial Sequence
  ENSG00000260322_5 (sequence is synthesized)
atatgccctatgtaaaagagaggatgaagtaaagttacttatatttggtgtatgccctatggagaggctatttcccgtcatagctgaagtgtgaatcggctttatgttcccttcccccag

SEQ ID NO: 926092 - DNA, 120 bp, Artificial Sequence
  ENSG00000260322_6 (sequence is synthesized)
accctattttcctgcctcattttctctctgagagacgtgatccccataaatctttataagaggcagagggacccacagtctttcttctataactgcttcatgctggcttgagatgtagct

SEQ ID NO: 926093 - DNA, 120 bp, Artificial Sequence
  ENSG00000260322_7 (sequence is synthesized)
cccagcgactgagtatcacagtactcaccctgctctgtctagtggggacagggtttccttgatggtcaggggtggtgtctttcacctggaactggctggaacccttgtcacatgatcatc

SEQ ID NO: 926094 - DNA, 120 bp, Artificial Sequence
  ENSG00000260322_8 (sequence is synthesized)
gaacttcaaggagtggatacctgtgctgtcaagaatgtttgttatagagatttgtatgagaaaaacaaaacctggtttgtgttgtgttctaggatctatgtgttaccttaaagtcttagc

SEQ ID NO: 926095 - DNA, 120 bp, Artificial Sequence
  ENSG00000260322_9 (sequence is synthesized)
acaagcaactccattatagtttggtttggtctgttggagcctagtgcatgagctcagtccaaaacaatggccttccataactttgttttaaaaaatccccctttttggtcaggttctcac

SEQ ID NO: 926096 - DNA, 120 bp, Artificial Sequence
  ENSG00000260322_10 (sequence is synthesized)
ttaggtgagagggtaaccaaaacttagggccttaataacactctcagttaccatcattttgggtttcagtcttagcacatcattcataggttatggtgtcctcatggttgctcatttctt

SEQ ID NO: 926097 - DNA, 120 bp, Artificial Sequence
  ENSG00000260322_11 (sequence is synthesized)
tcagctcttgttatttcaattgaagagagaccgtatgacactctagagatggctgcatgcaaacattcaaaacctttgagagaatacagcatgccaggaagactattattacgactaatg

SEQ ID NO: 926098 - DNA, 120 bp, Artificial Sequence
  ENSG00000260322_12 (sequence is synthesized)
ggaagataataccaagaatttggagtatactccttacccaaggtccccataaactgaacttcctaaaatcaaatagatcaaagaatgagctagataaacagtttactacttaactaagca

SEQ ID NO: 926099 - DNA, 120 bp, Artificial Sequence
  ENSG00000260322_13 (sequence is synthesized)
gtccctttgcaaattctctaccactgaatttctataatcttcatttgatgtatttttccataggccacaagtattagcagctgcacagataattttctgttcagcaaattctattataac

SEQ ID NO: 926100 - DNA, 120 bp, Artificial Sequence
  ENSG00000260322_14 (sequence is synthesized)
tttcacaagacaatttaaagtctttgtgtaactgtagcctttacagtaaaatttgagcctatcatgaggtgtacatttctaatcattgctttttcactttaaaccaaggaaaaaggacct

SEQ ID NO: 926101 - DNA, 120 bp, Artificial Sequence
  ENSG00000260322_15 (sequence is synthesized)
aacaaatgatgctcttctggaagagtgaaggcctactggcaatgttctctttaacccatgatgtgggctaagaggagtgaaccaataaataaaataataaaataatccaaattgaataca

SEQ ID NO: 926102 - DNA, 120 bp, Artificial Sequence
  ENSG00000228293_0 (sequence is synthesized)
gatgcgcaagcactttgtctcttgctttgttttcagtcgccatatttaatctacgtcgaaacttcaaaataacattagggggaaaaatgtagcgtcatgtttatcagacgaggacctgag

SEQ ID NO: 926103 - DNA, 120 bp, Artificial Sequence
  ENSG00000228293_1 (sequence is synthesized)
cttaacaagcgattgagagaaaatccttgggaagctgttaaaatttgtgtgtcaatgcgtttgttattcttttaaccagtactcactgaatacctgtatgtcaggctctcgaggaataca

SEQ ID NO: 926104 - DNA, 120 bp, Artificial Sequence
  ENSG00000228293_2 (sequence is synthesized)
cacctaaagacaaactggtacaggaagatttgcctcacccgctcttctggaagtatggttttggatcacctatccagatggaccagagctcttgttaaaagtgcaggcttgtgagtcata

SEQ ID NO: 926105 - DNA, 120 bp, Artificial Sequence
  ENSG00000228293_3 (sequence is synthesized)
cttcatttgctgaatccaaatctcagtgatgggggcccagaaaatatatctctaacaggctccccgttaatacacactgaaatttaagaaccactagctaggttctctgtgataagttcc

SEQ ID NO: 926106 - DNA, 120 bp, Artificial Sequence
  ENSG00000228293_4 (sequence is synthesized)
tccttcgtatatacctcaaccagccaaaaaggtggcaacgcaaaggcattcccagtgcttctattcttggggaatatgcataggctttgtgcctcctctgcaatcctttaggtgcgacat

SEQ ID NO: 926107 - DNA, 120 bp, Artificial Sequence
  ENSG00000228293_5 (sequence is synthesized)
tctcctatatagtagtaggatgagaagattaaactaggtaatgtgtaagagttttgaacaaatgaaaagtactgggtaaatatagagctgttattatagctaatataatattagtataac

SEQ ID NO: 926108 - DNA, 120 bp, Artificial Sequence
  ENSG00000228290_0 (sequence is synthesized)
ggggtgcctgaggagaaaggggtgctggttcttccttatatcccctgcctgcctcagctgggctctgacccagccagcagactggagtcctcttctgcatgtgtttctatagtaacacag

SEQ ID NO: 926109 - DNA, 120 bp, Artificial Sequence
  ENSG00000228290_1 (sequence is synthesized)
cctcaaagttatcagaattcatccctccagcctacctgcaggatctggtacaccccctactgctctgacacccagctgctccagccctcctattgttctggcccattccctcacatctgc

SEQ ID NO: 926110 - DNA, 120 bp, Artificial Sequence
  ENSG00000228290_2 (sequence is synthesized)
aaacataagggtgctcagctgtcttttaaaattcaacttaaacatcatttctaagaggcctctgatgacaatgtcttacttatgcccctacttaccccaattggatgtgagactgactcc

SEQ ID NO: 926111 - DNA, 120 bp, Artificial Sequence
  ENSG00000228290_3 (sequence is synthesized)
ctccttgctcctagcttagaaaccttggcatagtgccttcctggaaatcctggattgcatctaaaaccatgtggcagagggagaaacaacagacaggacatcctgagaagactcaggctg

SEQ ID NO: 926112 - DNA, 120 bp, Artificial Sequence
  ENSG00000228290_4 (sequence is synthesized)
ggacgaaagctctgctctccagggacaaagcagcaggggaccagccatgctcagaaatactccactggccagtgcacatttttttgagcaatttcacttgcttcctcaccacctgtcccc

SEQ ID NO: 926113 - DNA, 120 bp, Artificial Sequence
  ENSG00000228290_5 (sequence is synthesized)
agtgtgggtgtaggggtgcctgaggagaaaggggtgctggttcttccttatatcccctgcctgcctcagctgggctctgacccagccagcagactggagtcctcttctgcatggtatatt

SEQ ID NO: 926114 - DNA, 120 bp, Artificial Sequence
  ENSG00000228290_6 (sequence is synthesized)
ctttcctgagacttttgtttcagttaggtgtgtgtgtgtttctgtttttgtgtgtgcatgtgtgtgtcttaaaatatagttctatgtattgtgtctagaagaatgtttgataaacactgg

SEQ ID NO: 926115 - DNA, 120 bp, Artificial Sequence
  ENSG00000228290_7 (sequence is synthesized)
gacctggacttgcaaatttggcacaaagttcttctaataagaggccataaaataaccaaatgattttttatgtgcctatagaaccaaaagaactatttcagaatgtcagctgaaaagcac

SEQ ID NO: 926116 - DNA, 120 bp, Artificial Sequence
  ENSG00000228290_8 (sequence is synthesized)
ggggtgcctgaggagaaaggggtgctggttcttccttatatcccctgcctgcctcagctgggctctgacccagccagcagactggagtcctcttctgcatggtaaggaaactgaggctta

SEQ ID NO: 926117 - DNA, 120 bp, Artificial Sequence
  ENSG00000228290_9 (sequence is synthesized)
aaaacacactgacttcaaagaaatgagttgtggcatctgtaacatctacaggagcagtgccagtggaggctagcgggtctgcagaggagcagctcaagtcatgcgattactggagcttgc

SEQ ID NO: 926118 - DNA, 120 bp, Artificial Sequence
  ENSG00000228290_10 (sequence is synthesized)
agcaaaatgactggaacaacatctgggctgcagcaagctggccaggacattttaaaagagctcctgtggtgcctccaactttgattttacagagctgcggggaaagaaacaggctgtgtt

SEQ ID NO: 926119 - DNA, 120 bp, Artificial Sequence
  ENSG00000228290_11 (sequence is synthesized)
caagagctcatgtgttttgcctcacatgttttgtccttgctcactgtgaagggcctcactcagctggggaccctgagggacactcttgggcagtcattctctgtctactctgctagctct

SEQ ID NO: 926120 - DNA, 120 bp, Artificial Sequence
  ENSG00000228290_12 (sequence is synthesized)
agggaagcatgtggacactcgaacaggaaacgtcatagagaaaactcagcaaggcagacaggggaagaagggctttgcttaattgttctctcaaagcaaaggtaaggaaactgaggctta

SEQ ID NO: 926121 - DNA, 120 bp, Artificial Sequence
  ENSG00000228290_13 (sequence is synthesized)
aggggtgcctgaggagaaaggggtgctggttcttccttatatcccctgcctgcctcagctgggctctgacccagccagcagactggagtcctcttctgcatggagcagtgccagtggagg

SEQ ID NO: 926122 - DNA, 120 bp, Artificial Sequence
  ENSG00000228290_14 (sequence is synthesized)
agatagtcttagcaaacggcacaccagaagattatatcccaagcctggctcagaaggtcctatgcccatggagcctcaatcattgctagcacaacagtctgagatcaaactgcaaggtgg

SEQ ID NO: 926123 - DNA, 120 bp, Artificial Sequence
  ENSG00000228290_15 (sequence is synthesized)
gaggcttgaggcattcactagcatatgcctaaaggtactcacatagcaggtacacaatatgaccccacagaagaataatgagcaactaaacattgacagtaacaatgagactgtggccaa

SEQ ID NO: 926124 - DNA, 120 bp, Artificial Sequence; identical to SEQ ID NO: 842473
  ENSG00000228296_0 (sequence is synthesized)

SEQ ID NO: 926125 - DNA, 120 bp, Artificial Sequence; identical to SEQ ID NO: 842474
  ENSG00000228296_1 (sequence is synthesized)

SEQ ID NO: 926126 - DNA, 120 bp, Artificial Sequence; identical to SEQ ID NO: 842475
  ENSG00000228296_2 (sequence is synthesized)

SEQ ID NO: 926127 - DNA, 120 bp, Artificial Sequence; identical to SEQ ID NO: 842476
  ENSG00000228296_3 (sequence is synthesized)

SEQ ID NO: 926128 - DNA, 120 bp, Artificial Sequence; identical to SEQ ID NO: 842477
  ENSG00000228296_4 (sequence is synthesized)

SEQ ID NO: 926129 - DNA, 120 bp, Artificial Sequence; identical to SEQ ID NO: 842478
  ENSG00000228296_5 (sequence is synthesized)

SEQ ID NO: 926130 - DNA, 120 bp, Artificial Sequence; identical to SEQ ID NO: 842479
  ENSG00000228296_6 (sequence is synthesized)

SEQ ID NO: 926131 - DNA, 120 bp, Artificial Sequence; identical to SEQ ID NO: 842480
  ENSG00000228296_7 (sequence is synthesized)

SEQ ID NO: 926132 - DNA, 120 bp, Artificial Sequence; identical to SEQ ID NO: 842481
  ENSG00000228296_8 (sequence is synthesized)

SEQ ID NO: 926133 - DNA, 120 bp, Artificial Sequence; identical to SEQ ID NO: 842482
  ENSG00000228296_9 (sequence is synthesized)

SEQ ID NO: 926134 - DNA, 120 bp, Artificial Sequence; identical to SEQ ID NO: 842483
  ENSG00000228296_10 (sequence is synthesized)

SEQ ID NO: 926135 - DNA, 120 bp, Artificial Sequence
  ENSG00000228295_0 (sequence is synthesized)
cacccggcagccaccccatctgggaagtcctgtgccatggaagccttgaattccagtgcccgttacttcttctgctgccagtggctcccatttgtgttctctcctgtggcatcggattcg

SEQ ID NO: 926136 - DNA, 120 bp, Artificial Sequence
  ENSG00000228295_1 (sequence is synthesized)
cagctcaaccaaagttcttttaacagtaaaaaccaatatgcaaagaagaggaggaagagatggaaccatcaagcccttctgggctcagaatatgtgtgtgtgagcgcacatacacaggtg

SEQ ID NO: 926137 - DNA, 120 bp, Artificial Sequence
  ENSG00000228295_2 (sequence is synthesized)
catgcagctttgcaatataagattaaactgtacaatgttctataatctccatttttccattcactatattatgaacatcttccaaatcaccatatagttttgtataacacacattttgat

SEQ ID NO: 926138 - DNA, 120 bp, Artificial Sequence
  ENSG00000228295_3 (sequence is synthesized)
gactgaacagtaatgtattctccacaatttgtattaccaaatctttactgatggacacaagttatttagagttttgatcattaaaaacatagctttaataaacattcatatatctttgca

SEQ ID NO: 926139 - DNA, 120 bp, Artificial Sequence
  ENSG00000228295_4 (sequence is synthesized)
cattttcatctttgtgtccttagtacctaccatggttcttcgcacctaatggaatttcagtcctgtgccatggaagccttgaattccagtgcccgttacttcttctgctgccagtggctc

SEQ ID NO: 926140 - DNA, 120 bp, Artificial Sequence
  ENSG00000236347_0 (sequence is synthesized)
agtgtcagacagtgggcgcagtttggagttgttgctacctgtgtctacccagccaaggactttatgcctcaggccttcatattcaggacatgtttctcatgaaaattttggaaatgtgaa

SEQ ID NO: 926141 - DNA, 120 bp, Artificial Sequence
  ENSG00000236347_1 (sequence is synthesized)
ttgcaagagtttagaaagttgtaaccttattttttaaatcagtgcataactaatattttttatgctattaaaatattattttaagatgtaatatctaatcacatgtctgcatcataatct

SEQ ID NO: 926142 - DNA, 120 bp, Artificial Sequence
  ENSG00000236347_2 (sequence is synthesized)
acttaatctccccttgttcacaattaagtagtttccaatttttcactatcaaagtaatgctacaacaagaaggatatcctggtatataaataattttacacaacacagttatttccttga

SEQ ID NO: 926143 - DNA, 120 bp, Artificial Sequence
  ENSG00000236345_0 (sequence is synthesized)
taggaaagtcaagaaataggaaggaaatcggtcagttttctatcatcattggttgggcttgaaagtgtaacaagaggttaaaatagaagttctagctgaagcacaaagaaagtagaaaca

SEQ ID NO: 926144 - DNA, 120 bp, Artificial Sequence
  ENSG00000236345_1 (sequence is synthesized)
acacatcaaagtgagggatttataaagcaggagactgaaaaccagctggtgactcttgaattcctcacccttattgagagtataaaaggcttatagccctcaccctttcacctcaaatca

SEQ ID NO: 926145 - DNA, 120 bp, Artificial Sequence
  ENSG00000236345_2 (sequence is synthesized)
agagggaagggttttagaaacacaacttggagagcttaatatgtatccctgaagtttgaggaaaggggacgtagtgtactgacttctgcctggaaagtctaacaggtgggagattaattg

SEQ ID NO: 926146 - DNA, 120 bp, Artificial Sequence
  ENSG00000236345_3 (sequence is synthesized)
actgcaatgaaggagaaagccaatgacaggttgcttcttgactggaattgttcagcactccagaggctgtcagggaaaggatgtgagcatgctgcctggaatctgatgtggctcagctgt

SEQ ID NO: 926147 - DNA, 120 bp, Artificial Sequence
  ENSG00000236345_4 (sequence is synthesized)
aggacaaagatagtgtgttttcttaagttctgaccaaatgaaccaccttaagagacaaagatcactcagcaaggaaagctgaagatgctatgagatgccagaggttggggaaggagcaaa

SEQ ID NO: 926148 - DNA, 120 bp, Artificial Sequence
  ENSG00000236345_5 (sequence is synthesized)
caaccagctggaatggatatgccttttctcaaagaaaattgcaagtggaagaattccagccatggggtctccaaagcatccgtgaaactgttccacaagacaaggatggatgactgaatg

SEQ ID NO: 926149 - DNA, 120 bp, Artificial Sequence
  ENSG00000236345_6 (sequence is synthesized)
cagtgaagctaaatcaactcaatcatttcagtgaagaaagaaatctcctgtcctttcctgtccctgaactccatgatgaagggccatgtgctgtaggtagcaaaacaggggagaaagaat

SEQ ID NO: 926150 - DNA, 120 bp, Artificial Sequence
  ENSG00000236345_7 (sequence is synthesized)
gggagaaagaatttcagttttccttttcccttgaaattttctagctaaatcagtccgaaatgtggaaggaaaaagcatgaagttttttatttttattttttgagactgagtcttgctctg

SEQ ID NO: 926151 - DNA, 120 bp, Artificial Sequence
  ENSG00000236345_8 (sequence is synthesized)
cacctggccacatgaaagcatgaaatttaatgcagatagatttacctatcatataaaaatggaaaaccgaattactaagtggaactgatattttgtgatccaggaatgaccatgtctgaa

SEQ ID NO: 926152 - DNA, 120 bp, Artificial Sequence
  ENSG00000236345_9 (sequence is synthesized)
ctttcatttgaggggaaaaaggataattaacaccattgaacaaatttaaagggagaatggaagacaaagtaaagttgttttatgtttacatacagctgtgctattaagaaaagctaccga

SEQ ID NO: 926153 - DNA, 120 bp, Artificial Sequence
  ENSG00000236340_0 (sequence is synthesized)
agctgtgggaacattcctacaaagctgattctcttccgattctgctggaatcctgagtctctctcaaactggaattatcttaacaattcttttgcttgaggtttcctggacggcatatgt

SEQ ID NO: 926154 - DNA, 120 bp, Artificial Sequence
  ENSG00000236340_1 (sequence is synthesized)
ggataatggagcaggtgatgtttagcctggagaactgaaggctcaggaagaacggggtcttcaaacacctgaaggactgtctcatgaaaaagagatgcacaagacaggagaattgagcag

SEQ ID NO: 926155 - DNA, 120 bp, Artificial Sequence
  ENSG00000236340_2 (sequence is synthesized)
agagatgtttaactcaaatcgaagaacaaagacagcattgaatcaccacctatcaagggtcttacttgaatagactttggtttggatgagaggctatagaagaaaacctcaaaagtctct

SEQ ID NO: 926156 - DNA, 120 bp, Artificial Sequence
  ENSG00000236340_3 (sequence is synthesized)
tccaattctaaggtttcatgattccaggcatttggagaattaggaaaaataatcacttaaaaaaaaaactatttagtgccaagcttcctaaaacatctttaaaatgtccaatatccatga

SEQ ID NO: 926157 - DNA, 120 bp, Artificial Sequence
  ENSG00000236340_4 (sequence is synthesized)
atcatagggtattatccattttatttgaaaaccatggaactctactactagaacttcattctaggttgtttaaaacaaagtacaatgcaaaactgtcttctttcataagaaccattttct

SEQ ID NO: 926158 - DNA, 120 bp, Artificial Sequence
  ENSG00000236340_5 (sequence is synthesized)
agatgggcatagattctttgagggaattcttatcatgcagatattttacttcaaaatctaaacttgtaccactttactggaatgaaatattaacgctattaatttaaacatcataacatt

SEQ ID NO: 926159 - DNA, 120 bp, Artificial Sequence
  ENSG00000236340_6 (sequence is synthesized)
ttttaaaaataaggtgttaaaataatatttattcatcaatcctataccactacaatattttagatcagtgatttaatatctgaaaaaatttatcacatactatgcataccactgatcagc

SEQ ID NO: 926160 - DNA, 120 bp, Artificial Sequence
  ENSG00000236340_7 (sequence is synthesized)
aggctgaaattttactgtaacttcagtccaaagatacaggttttaatttgagttctccataattcacagaaatatttaagggtaaatataagtcttaattaaaatccctattctcccagc

SEQ ID NO: 926161 - DNA, 120 bp, Artificial Sequence
  ENSG00000236340_8 (sequence is synthesized)
atgtgctaaacccaccctgctccacatgcagacccttggccccaaacaatcccgagaggatgttggctcagagcagcaaggagctgacagatggggcattcggtaaaggagtggtgctgg

SEQ ID NO: 926162 - DNA, 120 bp, Artificial Sequence
  ENSG00000236340_9 (sequence is synthesized)
gttttttcatttttgttagagacgaaagctgtgggaaaaacattctccacttaatctattttattttcagcaaggttttacctgtaaatattaatttatacaccagcaaaactcactaga

SEQ ID NO: 926163 - DNA, 120 bp, Artificial Sequence
  ENSG00000236340_10 (sequence is synthesized)
tgcctgggctacatgaatataaatgaaataaagctatccaaactaaaaaatgaaatttcctgtatcttcctttctcaggcagaggaaaaatatccaaggatttaaaattctatccagtgg

SEQ ID NO: 926164 - DNA, 120 bp, Artificial Sequence
  ENSG00000236340_11 (sequence is synthesized)
tttcaaaggcaacaaaagatctcacattgagctctcatttaaataggtggggttaaccagggtagaaattacaagttaaagtgctgcagcataaagaagaaaaataatcatttatgccat

SEQ ID NO: 926165 - DNA, 120 bp, Artificial Sequence
  ENSG00000236340_12 (sequence is synthesized)
tttcaatacagaatttatttccaaatcaaaaccctttacacttggaatattgtcaaatctcaaatttttaccttgctgagatctacgaccaccttttgaaactgagacagtgtaggtatg

SEQ ID NO: 926166 - DNA, 120 bp, Artificial Sequence
  ENSG00000236340_13 (sequence is synthesized)
attactccctgtatactcaagggttaggaaaatggaaaagaaccgtgagcccctcaagaatggtggcttttcttattggaatgaagtaaataaaataaattcattgacaatgcatttaat

SEQ ID NO: 926167 - DNA, 120 bp, Artificial Sequence
  ENSG00000236340_14 (sequence is synthesized)
catccaggctggagtacagtggcatgatcctagctcactgtagattcgaaatcctgttccagtggtcctcccacctcaacctcctgatcaactgaactacaggaatgcaccaccaaaccc

SEQ ID NO: 926168 - DNA, 120 bp, Artificial Sequence
  ENSG00000236340_15 (sequence is synthesized)
aggaatgcaccaccaaacccagctaattatttttttgtagaggtgggggtctcacaatgctgcccagactgttctcaaactcctggcctcaagtgatgttcctgcccaggcctaaaattt

SEQ ID NO: 926169 - DNA, 120 bp, Artificial Sequence
  ENSG00000236341_0 (sequence is synthesized)
agagtaagtaagaacaaaaaactcttttggccaatacgaaggtggtctcagcattttctgttccagaaccaaagactattcttctactcgcagatggaattcaaatacctgtcgtgttca

SEQ ID NO: 926170 - DNA, 120 bp, Artificial Sequence
  ENSG00000236341_1 (sequence is synthesized)
agacagccccatggggattataggtggatgtcagaactatacccagattcagacatgtgacactttcgggctgaagcacttaagagccagtgtgccctgtccatttctgtcttctgtcct

SEQ ID NO: 926171 - DNA, 120 bp, Artificial Sequence
  ENSG00000236341_2 (sequence is synthesized)
aagcatgtgttgacagaacaatgtcttatggtgaaggaagcctaaacccctgagtcattggatggaggagagcccatgttgacccataaaggacttcatggtctcgctctgtcacccagg

SEQ ID NO: 926172 - DNA, 87 bp, Artificial Sequence
  ENSG00000236341_3 (sequence is synthesized)
catcgtgctatcttggctcactgcaacttctgcttcccgagttcaagagatcctcatacctcagcctcctgagtagccgggactaca

SEQ ID NO: 926173 - DNA, 120 bp, Artificial Sequence
  ENSG00000236341_4 (sequence is synthesized)
ggggactctcgtggaaaggctagatgatggagtcacgtgctcccttcccgttcactagctgctgattggccaactgctcctgccagctgtccctgcactccagcttcctaccatatgctc

SEQ ID NO: 926174 - DNA, 120 bp, Artificial Sequence
  ENSG00000226990_0 (sequence is synthesized)
gggaacaaaaagaatcagggagacttttaccctcgaagagttttcagactgaggagctatgctgtctacagactccaagacagggtcaacagtggggtgagatcaacgaacgctgctgtt

SEQ ID NO: 926175 - DNA, 120 bp, Artificial Sequence
  ENSG00000226990_1 (sequence is synthesized)
ggccgaggtgggtggatcacctgagaacatttttgggaagacaagactcttttcccctggtgtcagaagtaaagacctacagatataccagcagtctctcagcatcggtagcctcattag

SEQ ID NO: 926176 - DNA, 120 bp, Artificial Sequence
  ENSG00000226990_2 (sequence is synthesized)
ataccagcagtctctcagcatcggtagcctcattagggagctactgaatagcagctaatggtcttctgtagaacataagttgaaacaatactagatagaatgattattacaaaaacaacc

SEQ ID NO: 926177 - DNA, 88 bp, Artificial Sequence
  ENSG00000226996_0 (sequence is synthesized)
ggccaataaaccacatttttgcattcaactacatgaaatgttgattaaagtcttcgagaataaacaatagcatcagcagcaacaacaa

SEQ ID NO: 926178 - DNA, 120 bp, Artificial Sequence
  ENSG00000226996_1 (sequence is synthesized)
gaggttcctttgtcaacgaattcaacaaagctgtaagcaaagccaatggaagaatatgtcagatactgagtttatgacagggccttgccattgttcatatcataaagctggtctatcatg

SEQ ID NO: 926179 - DNA, 120 bp, Artificial Sequence
  ENSG00000226996_2 (sequence is synthesized)
cccagtgcttggacagaagaagaagagagcaatggagacagcccacctgctgggttaaaggcttgagcattacagcagcacattcagctctcattttattaaaaagaatttggtcaaatg

SEQ ID NO: 926180 - DNA, 120 bp, Artificial Sequence
  ENSG00000226996_3 (sequence is synthesized)
accacactgactgcaagagaggctagtaaagtagttttgctgtgcatccaggaagaggagcagaaatgattttgtgctacagtcatctacatgtaatacacatcaacaaacaaaaacatg

SEQ ID NO: 926181 - DNA, 120 bp, Artificial Sequence
  ENSG00000226996_4 (sequence is synthesized)
aaacaaagcaaaacaaaacaaaacaaaacctcagaactaattggattaggatcccaccataataggctcattttaaattaatcacattaatcacttctttaaacacaattaccgtatttc

SEQ ID NO: 926182 - DNA, 120 bp, Artificial Sequence
  ENSG00000226996_5 (sequence is synthesized)
caaatagggttacaatctggagtactggctgttgggactcgaacatatgaattttggggtgacacaagtcaactgagtacattctgtactctccctaaaataaaagaagtttaaaaacaa

SEQ ID NO: 926183 - DNA, 120 bp, Artificial Sequence
  ENSG00000226994_0 (sequence is synthesized)
acccttttcagtgcctctttcagtgatacgaagctaaaaccagatactgctttcatagtacttttctgaccacggttttctggagttttttcgtatggagtttgtaagcttcctgacatg

SEQ ID NO: 926184 - DNA, 120 bp, Artificial Sequence
  ENSG00000226994_1 (sequence is synthesized)
ttatttttggcagattttgatggatgtacattgatggatagccacgtggatccagaaaataaagacttctactctgcatttgactaaagcagaagatatgcaaggaagctcagtctctca

SEQ ID NO: 926185 - DNA, 120 bp, Artificial Sequence
  ENSG00000226994_2 (sequence is synthesized)
attgagtggattctgaaatttatcctgttgtcttcagctactaaggctaatttgcaaatcacactgtgcacggggttccagggtgaaataggagcacttaggaagcactgcaatgaattt

SEQ ID NO: 926186 - DNA, 120 bp, Artificial Sequence
  ENSG00000226994_3 (sequence is synthesized)
actgcttattcagcatattgatagagtcttctctaaaacaacaaaaagtgttgacagcaaactgaagatcttaaagaatgtgtgtgtcccacccctgcagtacttcagcattctgaggta

SEQ ID NO: 926187 - DNA, 120 bp, Artificial Sequence
  ENSG00000226994_4 (sequence is synthesized)
tggaagcagaggcagcaatttctcaagcctagttccaaaaggattaaacctgacaaagatttataaacaacctgttcagtggctgctgattaactccccaagattgatgtactgaagaag

SEQ ID NO: 926188 - DNA, 120 bp, Artificial Sequence
  ENSG00000226994_5 (sequence is synthesized)
gatgacctccccttgacaccaatgctactagtcaataacgaccactgtgactcagaacaaattctctgggggcaggcagtgaagcttcttctcttgttgaccttaccagaccacaaggct

SEQ ID NO: 926189 - DNA, 120 bp, Artificial Sequence
  ENSG00000226994_6 (sequence is synthesized)
gaaaatattctgtggcctgatgcccttaaattgatcatattaatacaatcaagcagaaaagaaattaattttccctctctctctctgtctatatatatacttactactatatatatgtgt

SEQ ID NO: 926190 - DNA, 80 bp, Artificial Sequence
  ENSG00000226994_7 (sequence is synthesized)
tataaaaatatatttgtattcctcttcagctccatacttgagattaaaaagtatcctttaagagttcatacatctagacc

SEQ ID NO: 926191 - DNA, 120 bp, Artificial Sequence
  ENSG00000226994_8 (sequence is synthesized)
agattaaaaagtatcctttaagagttcatacatctagacctctcttctgaaaagaataataatctcctgtttatctatgcacttatttgctaaataaagaagaatattgagcacccaaaa

SEQ ID NO: 926192 - DNA, 64 bp, Artificial Sequence
  ENSG00000226994_9 (sequence is synthesized)
gcgcgatctcagctcactgcaacctcacctcccgggttcaagtgattcccattttttttgtatt

SEQ ID NO: 926193 - DNA, 120 bp, Artificial Sequence
  ENSG00000226994_10 (sequence is synthesized)
agtgcctctttcagtgatacgaagctaaaaccagatactatggacttatctctcaaggcaaagaataaagaaaaactacttggctttcatagtacttttctgaccacggttttctggagt

SEQ ID NO: 926194 - DNA, 120 bp, Artificial Sequence
  ENSG00000226994_11 (sequence is synthesized)
ctaaggctaatttgcaaatcacactgtgcacggttttatctctcccaataaatacaatattctacatcctctgttgtactcagaatttggaaattaaccccagtatgctgattaatagtc

SEQ ID NO: 926195 - DNA, 120 bp, Artificial Sequence
  ENSG00000226994_12 (sequence is synthesized)
ataactatatctagataacaaaatatgcatatatatgaaggaggcagacaataggggagggcaggttgaaagttttttttatcctaatttcttgaaactcttcttacatgagtcccctga

SEQ ID NO: 926196 - DNA, 120 bp, Artificial Sequence
  ENSG00000226994_13 (sequence is synthesized)
ctactcttacatatgcatcattttctctctcgtgatcacatatgctttaaaatatgtaaaatttatatgaatatattttatgcctggctgcattttaataccttccgtcaagggttccag

SEQ ID NO: 926197 - DNA, 120 bp, Artificial Sequence
  ENSG00000226994_14 (sequence is synthesized)
ggcctgggtcctagaaagcttaggatcctatgcaaaaccctactctaactcatttcaagtgtctggaaatgtagtacatgccgtggatgtacgtcaggctttcatagtacttttctgacc

SEQ ID NO: 926198 - DNA, 120 bp, Artificial Sequence
  ENSG00000226994_15 (sequence is synthesized)
catgagccaccgtgcccggccaaatgtatctattttttaatagtttgtacttgttgttctctatttaagaaatgttgtttgcctatctgaaaaccaaaaaaacaaacaaacaaacaaaaa

SEQ ID NO: 926199 - DNA, 120 bp, Artificial Sequence
  ENSG00000226994_16 (sequence is synthesized)
agaatagattgtcttggggtagctgaatgtttaatttataatgaatagtcaaaattgtttttttaattgattgtaatattttacactaactggcaatgtatcaataagagttctaatttt

SEQ ID NO: 926200 - DNA, 120 bp, Artificial Sequence
  ENSG00000226994_17 (sequence is synthesized)
actggcaatgtatcaataagagttctaatttttccacatcctttcgtaacttagttttgttggatttctagttaaaatcttttggctggccaggttgctcacgcctgtaatcccagcact

SEQ ID NO: 926201 - DNA, 120 bp, Artificial Sequence
  ENSG00000226994_18 (sequence is synthesized)
atctcaacaacaaccacaaaaatctttctagtagaaaacagaaatacattatggaatagaaagcaaatttccaggaagttttaaaataaaatatgtgacttcaaagacacttgtttgtgc

SEQ ID NO: 926202 - DNA, 120 bp, Artificial Sequence
  ENSG00000226994_19 (sequence is synthesized)
tgggctgcttcagactctgccctgggtctccctgaaggcacacacaatctgctatgctttgggggacacgttgatggaaaaagagaaaatctgcaactgcaatacaataccaagaatgga

SEQ ID NO: 926203 - DNA, 120 bp, Artificial Sequence
  ENSG00000226994_20 (sequence is synthesized)
gataattcccacatctgagtcatctcaaggttggtttcaattaactttgagaaatggctacttttccctttccctcttctcacattgtcctaattctttgtgtgttaataactttaggtg

SEQ ID NO: 926204 - DNA, 120 bp, Artificial Sequence
  ENSG00000226994_21 (sequence is synthesized)
tcattctgtttagtcttgttttagcagacaattaatccaggtggttttagaccacagttttgtcttctttctgtggacagcagtactagcaccaattcagttttcaaaacctattctgcg

SEQ ID NO: 926205 - DNA, 120 bp, Artificial Sequence
  ENSG00000226994_22 (sequence is synthesized)
ctaatttaggtttgctccatgcacgtagcactgttgggactttgagcagtggtttatatgattgtttatttttcatgtatttgctatgctgatgtagttatagcctgcaagtgttggaca

SEQ ID NO: 926206 - DNA, 120 bp, Artificial Sequence
  ENSG00000226994_23 (sequence is synthesized)
tatcctgagcatgagagcttggccatttcatacacagatttaggggatgttttatcttcagttctcttttataaggaacactcttcatactctgtcttatgaggtccctttacctcttct

SEQ ID NO: 926207 - DNA, 120 bp, Artificial Sequence
  ENSG00000226994_24 (sequence is synthesized)
ctcacaacaaactgtgggtttttcttggagcttcagttttctatgctgctatggcagctgcaacttcaaaatgcttacctgcctctagggccaaactataagagaataaaaaagaaaaaa

SEQ ID NO: 926208 - DNA, 120 bp, Artificial Sequence
  ENSG00000226994_25 (sequence is synthesized)
gggaagaaagaaaagacctcttttatgacacacatctacaaaggacataaagaattataagttgtcaagtgagaaagacaatagcccaaatttatacgggtatttgtactagaaagtgtt

SEQ ID NO: 926209 - DNA, 120 bp, Artificial Sequence
  ENSG00000226994_26 (sequence is synthesized)
agtgaaggagattaagatattagaatttccctatgaggtagttgttgtcttaccataaccggatggcctttttgtgtctatctagtgtagtaatgaatcattttcatccttcataataga

SEQ ID NO: 926210 - DNA, 120 bp, Artificial Sequence
  ENSG00000226994_27 (sequence is synthesized)
ctccctttggaggagtcacaggacaattttgactcacaattaacccttctttatacagagtaagaagagagggtcatcccactgtaatttccctatatggtttactgtcttattgatgaa

SEQ ID NO: 926211 - DNA, 120 bp, Artificial Sequence
  ENSG00000226994_28 (sequence is synthesized)
ataaattttctgaatcacctcaatgtcctttccttctgggactccatagttatgtttgttaggcctttttaatattgtccacaggtccaagactcggttttatttgccttttcattatta

SEQ ID NO: 926212 - DNA, 120 bp, Artificial Sequence
  ENSG00000226994_29 (sequence is synthesized)
ctctgtcttctttattgtgttattaggggtatccagtgaaatttttatgtccaatgttgtacattttatgtcaaaactagcatttggttcttttaaagtttctgtgtctctttgagaatg

SEQ ID NO: 926213 - DNA, 120 bp, Artificial Sequence
  ENSG00000226994_30 (sequence is synthesized)
gagttcaatgcagtctcacaatcactgcactcttcctctcccagttgcacagatttctctgtgtcatgcagctgctatggggggatggaggaggagtggcattggcaattcaagactgcc

SEQ ID NO: 926214 - DNA, 120 bp, Artificial Sequence
  ENSG00000226994_31 (sequence is synthesized)
gtaatgtgaattttcttgatcacaaataaggttgattctattttttgcccatgtgtacaatatcatttgcctttttactatatatttgttaatgctccatacatatatttgatatgaatt

SEQ ID NO: 926215 - DNA, 120 bp, Artificial Sequence
  ENSG00000226994_32 (sequence is synthesized)
atttttactcttaatagaattgtgtattaatttgttatgaatatttttccattctataactgtcctactcattttatttgtgtcttttgataaagtcagaatctatcattctgtgttgaa

SEQ ID NO: 926216 - DNA, 120 bp, Artificial Sequence
  ENSG00000226994_33 (sequence is synthesized)
tgtattgattacatccaagaaatattttcttactgtaagtgcactaatatagtctccttattgtcttctagaatttgtatgttcctagttactacatgatacatttaatttgtatatgaa

SEQ ID NO: 926217 - DNA, 120 bp, Artificial Sequence
  ENSG00000226994_34 (sequence is synthesized)
tgatacatttaatttgtatatgaagtgagatgggtaaagttttatctattcattcttttgcatgtatatgtgtatatatacatatatgtgtgtgtgtatatatgtgtatatgtatatgta

SEQ ID NO: 926218 - DNA, 120 bp, Artificial Sequence
  ENSG00000226994_35 (sequence is synthesized)
cacacatatatttatatgtagaattgttccagcaccatatgtcataaagacgttctattgaattaacttcgatcatcattcaaaataaatacatttactgcataaggataagtatctttc

SEQ ID NO: 926219 - DNA, 120 bp, Artificial Sequence
  ENSG00000226994_36 (sequence is synthesized)
tgaatttttctatctgctccatttatctgtccacattcaaagcatactacattttcttgatcaatatagctttatatctaaatacacagttgtggtttctgctgctgtttttctttgcag

SEQ ID NO: 926220 - DNA, 120 bp, Artificial Sequence
  ENSG00000226994_37 (sequence is synthesized)
ttattggctttcatcttatgcatcttatgcatcttcagcctgaaaaacttcttttcacatttcctgtggtagaagtctgctgtacatcaattctctaaactattgactgaaaatattttc

SEQ ID NO: 926221 - DNA, 120 bp, Artificial Sequence
  ENSG00000226994_38 (sequence is synthesized)
acttggcctacatgtttgaaggatacttttttctatacacagacttgtaggttgacaagttttttttttctctctctctttaaagctctcatttgataatctttaaccttcagtttttca

SEQ ID NO: 926222 - DNA, 120 bp, Artificial Sequence
  ENSG00000226994_39 (sequence is synthesized)
ggtgagaagtcagccatattttgtcaatgttacgtggtctataatatgcctttatttttccctctagctgctttcaagaaatgttctttctctttggtttcagcagattaactaggacat

SEQ ID NO: 926223 - DNA, 120 bp, Artificial Sequence
  ENSG00000226994_40 (sequence is synthesized)
cccaaggtatacttcctctcccccgttagacttaatttcttcaaatatttcttctgccccattctctacctcctcttattttgagattcaatttgtgcatattttagggtatttaatatt

SEQ ID NO: 926224 - DNA, 120 bp, Artificial Sequence
  ENSG00000226994_41 (sequence is synthesized)
tctccacgtgcactgaaggctgtattggtttttcactcttttttcgtatatcagtttgtcttcaggtttactcatattttctcatgctgttaggctcttactaagccttccaagtgagat

SEQ ID NO: 926225 - DNA, 120 bp, Artificial Sequence
  ENSG00000226994_42 (sequence is synthesized)
agattttcatttttacatcttattttttctaatgttttgatattgttctattttaagcttctatctgcagaatattttagtaagttcattaatagttttcactttttatactacatcctt

SEQ ID NO: 926226 - DNA, 120 bp, Artificial Sequence
  ENSG00000226994_43 (sequence is synthesized)
atagttatctgatttactttacaaccttttcttataattagaacatctgtaacatttccttttctcttttgaccatggatcacatattcttgtttcatgaaacgacttgtagttttttgt

SEQ ID NO: 926227 - DNA, 120 bp, Artificial Sequence
  ENSG00000226994_44 (sequence is synthesized)
tttgtttttattattactgtatactatacattgtgagacaaggaaatgtagagactgaagtaaatactattttcccccactgaaggcaaatcttttcagtaatgcttcaactctggagtg

SEQ ID NO: 926228 - DNA, 120 bp, Artificial Sequence
  ENSG00000226994_45 (sequence is synthesized)
ctgagtcaatccagtcggtagttaagatgaatctctacttaatttaattagtttggattaatttcactattaaatgcaaatattctaaatacagaatcaggaattttctttcattagatc

SEQ ID NO: 926229 - DNA, 120 bp, Artificial Sequence
  ENSG00000226994_46 (sequence is synthesized)
ttaaaacgtaagcatgaacaacattctggagacttttttttcaattacccaaccctcaactttcccaaaagagggaggattttgctctgcttttcaacccaactgctagttttttggatt

SEQ ID NO: 926230 - DNA, 120 bp, Artificial Sequence
  ENSG00000226994_47 (sequence is synthesized)
cctaaacttgaaaggtttttccagtttagtggataggcccaaggtttctcagaaatatttttctgagctgctcggccttgaaacattcttaagaaggctctggttctcgctggaaaaaaa

SEQ ID NO: 926231 - DNA, 120 bp, Artificial Sequence
  ENSG00000226994_48 (sequence is synthesized)
tcttatttgcttccgaacagactctttcagctttcttactgtgcatctagtcttcatcatgttatatcatgcatgtgaaaaagcacatgagcaaaattagtctggtaaatataaactctc

SEQ ID NO: 926232 - DNA, 120 bp, Artificial Sequence
  ENSG00000226994_49 (sequence is synthesized)
atttttctccaagatgagacttgttgcttatggtaatttaattagcttaggtttttttttttgcaacctcagtcctctgattcttttaagtctctgactttgcagattatcaggcaagtt

SEQ ID NO: 926233 - DNA, 120 bp, Artificial Sequence
  ENSG00000226994_50 (sequence is synthesized)
tttgtggttagaatgagaagcatatgttcatttgatttcctttatcttaattagtggtcaaagtttagccccctacatttttacttcccgtctggtttattttattttgacttattttta

SEQ ID NO: 926234 - DNA, 120 bp, Artificial Sequence
  ENSG00000226994_51 (sequence is synthesized)
gataacaaacttttaaaaatttcctgatatttcctattcttgaactatgtatttggtttccctgtattgaatctcaacaatccttagagaatttagtttctatttgcctttgcatctttg

SEQ ID NO: 926235 - DNA, 120 bp, Artificial Sequence
  ENSG00000226994_52 (sequence is synthesized)
tatttttggcatactagtactggccccctgagtacctgccctgttagctcccagttctctttgctgggagaagttttaatggtttctcagatccattagcttttcatttggacacatcat

SEQ ID NO: 926236 - DNA, 120 bp, Artificial Sequence
  ENSG00000226994_53 (sequence is synthesized)
attttttatttatgtgtgcttagtattgaaacttatcctgaaggtgagttctaatactgttctgaaaaaaaattagtatgggtacattaaatgttcttgaatgttattgctttgggttgt

SEQ ID NO: 926237 - DNA, 120 bp, Artificial Sequence
  ENSG00000226994_54 (sequence is synthesized)
tagctcatatatattttatttgcttatcaaatgggatcaaaactctgatgcttttccttctgggtgagtgattttagttaaactgagcatttcccatttcaaaataacacctcaaaatgc

SEQ ID NO: 926238 - DNA, 120 bp, Artificial Sequence
  ENSG00000226994_55 (sequence is synthesized)
atgctacatatacttttattattttactagtaaatactcgattttttagtgagctataaaacaagattatagtattgtttttaaagaactaaaatgcagtgtccatgttacattgaaaat

SEQ ID NO: 926239 - DNA, 120 bp, Artificial Sequence
  ENSG00000226994_56 (sequence is synthesized)
tcatgcagaaaaattactagcaaaatcatacttacaatatgttaaggatgaaagttttatatgacatgttttcctagtatagctaaaactaaatatatgataaaatttctggaaaaggta

SEQ ID NO: 926240 - DNA, 120 bp, Artificial Sequence
  ENSG00000226994_57 (sequence is synthesized)
aaattttggattcatattttaaatatatttcagtactttcatgatatgtggagaattacaaaactttaaacacacagaaactactcaactttaaagtgtgttttataatcctgtatgtta

SEQ ID NO: 926241 - DNA, 120 bp, Artificial Sequence
  ENSG00000226994_58 (sequence is synthesized)
tactctgtcataattaaaagacaaatttagctcaagatttatctttatctaatccctcttccttagataattctcctactttactggatattcatggctgcaatcatgaactttcttaat

SEQ ID NO: 926242 - DNA, 120 bp, Artificial Sequence
  ENSG00000226994_59 (sequence is synthesized)
ctgtatactatgaattacaatggtagaagtatgacaaatgtgtattttttcttctgttcacatgtacaattgaagaagccacgtataacatttatcaggagggaaaagatgggattgtcc

SEQ ID NO: 926243 - DNA, 120 bp, Artificial Sequence
  ENSG00000226994_60 (sequence is synthesized)
tgtgcttacctcaagcctagtgagaatggtttcatggaggcctctcagtgtgcttgatatatatcccctgcagatacatagagaacaatggactagtgtctgacacggatcctgaaatct

SEQ ID NO: 926244 - DNA, 120 bp, Artificial Sequence
  ENSG00000226994_61 (sequence is synthesized)
aaaagtgtgaatgtatggcaatgaacctgagctggcagagaagagattctgttgcactgggaaatagctactcttcggatggaaggggattagtggcatggggtatgtgtgtgtttcata

SEQ ID NO: 926245 - DNA, 120 bp, Artificial Sequence
  ENSG00000226994_62 (sequence is synthesized)
gaacagaagtggcatatgcagaagagaaaggctacaaaacatcatttagtattctgccccaaaggaccaactataaagatacctgtgacccatcagaaacagtctggaaaagaggaaaat

SEQ ID NO: 926246 - DNA, 120 bp, Artificial Sequence
  ENSG00000226994_63 (sequence is synthesized)
ggaagtaatattttttttaaaaactgagtaacagagaaagaggtgtaaatgcactactcattatcaccaagaacgcagctggttgctgcagagcaagtcctctgaagcacccatggagac

SEQ ID NO: 926247 - DNA, 120 bp, Artificial Sequence
  ENSG00000226995_0 (sequence is synthesized)
agatctctctctctgcggaagccagccaccgctctccaaggactctcgagcagctccatctacagattcacatggagaagaattaagggttcctgccaatcaccagcaccactttgccag

SEQ ID NO: 926248 - DNA, 120 bp, Artificial Sequence
  ENSG00000226995_1 (sequence is synthesized)
ccttgtaagtgggccaccttggaattggagcctccagttcctactgacatctgactgcaacatcatgagagaccctgagtttgaaccacccagctgagctgcttctgagctaacccactg

SEQ ID NO: 926249 - DNA, 120 bp, Artificial Sequence
  ENSG00000226995_2 (sequence is synthesized)
aaaccacagttggcatctgtgtgaagatgtgaatggaggaggcagagtaggcagtgagtgccgcagccacagcttgtgttctctgcagccctggcacagaagataggaacactcatgggg

SEQ ID NO: 926250 - DNA, 120 bp, Artificial Sequence
  ENSG00000226995_3 (sequence is synthesized)
gatgcggccactgtgatgtcttcccacacaagaagtgccaagtgcttttctcatgcttttctggattgtcccatggtggacgagtcagcaggagtgagatggagcagcacagtagagggg

SEQ ID NO: 926251 - DNA, 120 bp, Artificial Sequence
  ENSG00000226995_4 (sequence is synthesized)
ccaggatatcgttgtacatattctcagctaagtgagcaccaatagaggagagggagagtctcatggaagttccttctaagcctttggctctttttaccttcaacaaggtgtgccacctct

SEQ ID NO: 926252 - DNA, 120 bp, Artificial Sequence
  ENSG00000226995_5 (sequence is synthesized)
tcttttgcatgttcccaacctttcctgcctttatctgatattcgttccttagatcctgggatgaggaggtggaccagcagaaggtgggcttgtgaaggcagcccggggtccaaatcctcc

SEQ ID NO: 926253 - DNA, 120 bp, Artificial Sequence
  ENSG00000226995_6 (sequence is synthesized)
tggctcttcagcttagcgggttagttaacattcagaagccttcatctcccatctgcaaaatgggcatgtccaactcagaagctgccttgaagaaagggtctacccagcatggtgcgtgga

SEQ ID NO: 926254 - DNA, 120 bp, Artificial Sequence
  ENSG00000226995_7 (sequence is synthesized)
gcctaagcagtcagtacttcaggacttcacccggcccctttccaataactgctgctgtcgccctcacaggatgtcaccttcagcgtctgaaagctgggtttgatgcgtctggaaaggcgt

SEQ ID NO: 926255 - DNA, 120 bp, Artificial Sequence
  ENSG00000226995_8 (sequence is synthesized)
ccctgacaggcgtcgttgccaggagcccctagtgccaccagcagccagcaggggagggcgtcctctgcccgctcacttctgacccttctctcgttgcacccggaacatggtgcagctggg

SEQ ID NO: 926256 - DNA, 120 bp, Artificial Sequence
  ENSG00000226995_9 (sequence is synthesized)
agcagcctgggctgcgcggaaggctcagatttggggacggcccttgccagtgactgtgagctggggtgtcttggaaactcccagtctcagcttctccatttataagatgagaatgatcat

SEQ ID NO: 926257 - DNA, 120 bp, Artificial Sequence
  ENSG00000226995_10 (sequence is synthesized)
accagactcaggcaaggttgtttgtgcattagtgaaatcagacgtattaaataaagtaccacattgatcgtggagttgttgaataaccaagaacacgcctatctgtctccaaaaaataaa

SEQ ID NO: 926258 - DNA, 120 bp, Artificial Sequence
  ENSG00000226995_11 (sequence is synthesized)
ctctctctgcggaagccagccaccgctctccaaggactctcgagcagctccatctacagattcacatggagaagaattaagggttcctgccaatcaccagcaccactttgccagccttac

SEQ ID NO: 926259 - DNA, 120 bp, Artificial Sequence
  ENSG00000226995_12 (sequence is synthesized)
aaacaacacccagtagccactagcacacctagctcccagatctgtttttgatgccattcttcagtaaaaggaagcaaggctgcttggagaaattgctatcaaggactggggtagaaaata

SEQ ID NO: 926260 - DNA, 120 bp, Artificial Sequence
  ENSG00000226995_13 (sequence is synthesized)
ccgttccttagatcctgggatgaggaggtggaccagcagaaggtgggcttgtgaaggcagcccggggtccaaatcctcctggctcttcagcttagcggggttgcttagactcagtggtgt

SEQ ID NO: 926261 - DNA, 120 bp, Artificial Sequence
  ENSG00000226995_14 (sequence is synthesized)
actggcactccactgcttagattttaccagtgcttgcagtgctaaccaggagctcatccctggaggagaggcagagaatgtgtactcccagatgcagccagcttccagaagaagaggtag

SEQ ID NO: 926262 - DNA, 120 bp, Artificial Sequence
  ENSG00000226995_15 (sequence is synthesized)
gagccaagcagagcatgcccacatcaatcttccagcatttaatggccatagaagttactgaacctcccttggatggatagaagatggcattatctttcttaaatatgatacctcttatct

SEQ ID NO: 926263 - DNA, 120 bp, Artificial Sequence
  ENSG00000226995_16 (sequence is synthesized)
ttttgttcccttgacacttgaggagggaggccaagggttgatcatgcaagcaagtttgtgcattttgcacatttattaagttatgcttttgaggaaattaaaagatcacaagggcttcaa

SEQ ID NO: 926264 - DNA, 120 bp, Artificial Sequence
  ENSG00000226995_17 (sequence is synthesized)
cagatgggataaccagagaactagaacctccagagcccagagtcttatttctcaaaattcccatgtccaagcttggatggacaacacccaagttgcctctttaaggtggcctgaacgatg

SEQ ID NO: 926265 - DNA, 120 bp, Artificial Sequence
  ENSG00000226995_18 (sequence is synthesized)
gcatcttgtagtgcttgaaaacagttggcatctgtgtgaagatgtgaatggaggaggcagagtaggcagtgtgccacctctttgatccagcaagtgggaagaacagtcccggcctctttg

SEQ ID NO: 926266 - DNA, 120 bp, Artificial Sequence
  ENSG00000226995_19 (sequence is synthesized)
acagccaagagggaggccgggccaggggctggtggcttcctccgcgagctctgccagtttctggcctcaggtcctgagttgttatcgcaagtccaggaagaatgaggttactcaggcaac

SEQ ID NO: 926267 - DNA, 120 bp, Artificial Sequence
  ENSG00000226995_20 (sequence is synthesized)
tggagggtgaggatggagaagagctttattgagcaacagaacagctctcagcagagaggagacccaaagtgggtagctcctacctgcaggaaggtttctgaagggggccaagatggccca

SEQ ID NO: 926268 - DNA, 120 bp, Artificial Sequence
  ENSG00000264273_0 (sequence is synthesized)
ctcttgttgcccaggctggagagcaatgactctgcaaaaaaaataaaaataaaaaaacttattatgtatgtttattagtgatgtgcctcactccaaggaaatctgtttttaatatcaata

SEQ ID NO: 926269 - DNA, 120 bp, Artificial Sequence
  ENSG00000264273_1 (sequence is synthesized)
tgttaactcatgcctaacatctgagtgttcacaatgcttatgacaacccagtgaagcaagcactagaatgagacccattttagacagggaagctaggtttccagatgaagaaacttactc

SEQ ID NO: 926270 - DNA, 120 bp, Artificial Sequence
  ENSG00000264273_2 (sequence is synthesized)
aaggctgcaaagcctctaagcagcaaaaatagctcggtctcagcatgatttgtagtagttagtcctatgcaacagtgggctgcacagcctgtctctcaacccacacagaaaacgacttgg

SEQ ID NO: 926271 - DNA, 120 bp, Artificial Sequence
  ENSG00000260810_0 (sequence is synthesized)
ctggttttctttcctaagagttattgtttctggcaacgaccacactccagcaggctcaggcctgagctgatgaatgggacaacctgatgaccaccacaaagttgcgtctgctcccatcca

SEQ ID NO: 926272 - DNA, 120 bp, Artificial Sequence
  ENSG00000260810_1 (sequence is synthesized)
gctaatccgagggctctcagacagactgtgactaatggggacatctgagggcagaacgttcgaaggccaaggaggaacaagtccagacaaagtgtgagcacacacatctggagggctggg

SEQ ID NO: 926273 - DNA, 120 bp, Artificial Sequence
  ENSG00000260810_2 (sequence is synthesized)
tgggcatctgaatgcccgggtttgaattccacatctgttgctttttggctctgagagctctggcaagttatgtagcctccctgggccttggtttctgcttctttaaaatggggttaacaa

SEQ ID NO: 926274 - DNA, 120 bp, Artificial Sequence
  ENSG00000260810_3 (sequence is synthesized)
tgaagattggtgtaagaatcacatataaaggtgctgtcaagaaatctggttgaaggctggacatgatggctcatgcctgtaatctcagcaccttgggaggttgaggtgggaggatcactt

SEQ ID NO: 926275 - DNA, 120 bp, Artificial Sequence
  ENSG00000260810_4 (sequence is synthesized)
gaggccggggcttcaagaagagcttgggtaagactgtagccatagccatagcaagaatctgtctctatttaaaaaagaagaagaagaaaaaaggaatggaaataaattaattaaatggaa

SEQ ID NO: 926276 - DNA, 120 bp, Artificial Sequence
  ENSG00000260816_0 (sequence is synthesized)
agaaacacagccgttcactgaagaggatttgagtgttgtctcctctgtggggtcaaaacatcatgcttctttctgttctgccccatggcagtggtgacgatggcctagcttccatcccgt

SEQ ID NO: 926277 - DNA, 120 bp, Artificial Sequence
  ENSG00000260816_1 (sequence is synthesized)
agcttcttgtgtttttctattccaccagtctatcaaccctgtatttgttgtcaaatttacactgtccacaggcaaagatctattctcctttagaatttaataggagggtttggaaatgat

SEQ ID NO: 926278 - DNA, 120 bp, Artificial Sequence
  ENSG00000260816_2 (sequence is synthesized)
gccatggaaaccctgagcagcttggcaatgctgaccccaaatgagaaataactatcattggtgttttccttctactactattatcttgcccattgatcttcaaaaagttcattggtcaaa

SEQ ID NO: 926279 - DNA, 120 bp, Artificial Sequence
  ENSG00000260816_3 (sequence is synthesized)
ttgattgaggaacgcaagacttaaatgtaatatggctctggcaaattctgagatgctaacaaaaacaagttttcttaagaacaatgtcaactgactcacagtatccgactatataaagtc

SEQ ID NO: 926280 - DNA, 120 bp, Artificial Sequence
  ENSG00000260816_4 (sequence is synthesized)
gagtgctctcatgccaggaagctgatacagttcatgaaacctcagtcattctttcgtattactcctgtcttctctttggaaaacaatctcatgaatttggtcttgacgctgacttaacat

SEQ ID NO: 926281 - DNA, 120 bp, Artificial Sequence
  ENSG00000260816_5 (sequence is synthesized)
cccaggaaacagatactcaattccactgtcttttttgagaaatgaacagttctcaaactttgtttaaatttccttttcacagatgagtaataaccaaagatatttctgaaagggctctga

SEQ ID NO: 926282 - DNA, 120 bp, Artificial Sequence
  ENSG00000260816_6 (sequence is synthesized)
aaacatgcaggcaattgatctttaaaaataagatagaaatagtaggttttataaaagaaggaaatagaaatacttcagaagaaataaagtgtgctgaatcatgttttaaacataattata

SEQ ID NO: 926283 - DNA, 120 bp, Artificial Sequence
  ENSG00000260816_7 (sequence is synthesized)
tccggaatgcacttacccatttgaaaaaaaaaaaaagtcaccaagttgtttccaattgtttttgtaaatttgcttagtcattttcagagacaaaaatttgggaaaaggattgtagaatga

SEQ ID NO: 926284 - DNA, 120 bp, Artificial Sequence
  ENSG00000260816_8 (sequence is synthesized)
ctggcttcccaaaaccacttggtgtttacaaagttatcaaaaacgggctgggaccactgatggtaataacaaaacctggggccctgaatcgtgtattctacatccgttagcacactgaag

SEQ ID NO: 926285 - DNA, 120 bp, Artificial Sequence
  ENSG00000260816_9 (sequence is synthesized)
ccacaccgcaaacttgtgaggccagcgttgcttcccctaccccttccgtcaaaaaccgtctgaggctgatcattaacttgcataaggtcacatagctaatgagaagcaaacgcatcataa

SEQ ID NO: 926286 - DNA, 120 bp, Artificial Sequence
  ENSG00000260816_10 (sequence is synthesized)
tgacctgggacatatgacactgaagcctactctctttccacaaagcttgatgtactcagatagtaattagtaaacattttcataaataatcttaaccttttcaagcatttttgtcgattg

SEQ ID NO: 926287 - DNA, 120 bp, Artificial Sequence
  ENSG00000260816_11 (sequence is synthesized)
gattgtagcactcaaaagtaaggtctgttttactaatataaaattgggcctgtggaataattctcttcacagaagtgtgtgtgtgtgtgagagagagagaaaatgtatatgcatacatat

SEQ ID NO: 926288 - DNA, 120 bp, Artificial Sequence
  ENSG00000260816_12 (sequence is synthesized)
acatatattattgagacataatttacataatttatgttctataaaattagcatattttaaatatacagttctctggattttgaaaaatgtatacgtgtacataatcatggatccaccacc

SEQ ID NO: 926289 - DNA, 120 bp, Artificial Sequence
  ENSG00000260816_13 (sequence is synthesized)
ccagttaagatatagaacattccagggccaggttcagtggatcatgcttgtaatcgcagcatgttgggaggctgaggagggtggaccacttgaggccaggagtttgagatcagtctgggc

SEQ ID NO: 926290 - DNA, 88 bp, Artificial Sequence
  ENSG00000260816_14 (sequence is synthesized)
aaaaagaaaaaaaaaaagaaaaaaatagctggccattgtgacatatgcctgtaaccgtagctactctggtggctgaggcttgagtatc

SEQ ID NO: 926291 - DNA, 82 bp, Artificial Sequence
  ENSG00000260816_15 (sequence is synthesized)
tctggtggctgaggcttgagtatctgctgcactctagcctgggtgacagtgagactgtctttaaaaaaaaaaaaaaaaaaaa

SEQ ID NO: 926292 - DNA, 120 bp, Artificial Sequence
  ENSG00000260816_16 (sequence is synthesized)
acaagaacattcccatcacgtcggtaagtatctcattctcctttccaataaatccttttattcccagaaacaagcattcttgtttcaatcattgtaactttgttttacctgttctagaac

SEQ ID NO: 926293 - DNA, 120 bp, Artificial Sequence
  ENSG00000260816_17 (sequence is synthesized)
tgttgatgggtgtattaggggttctctttttcaatgctggatagtatcctgtggtgaaaatacaccacaattcgcttatctgtgcacctgttgatgagcattgggttgtttatatttgtt

SEQ ID NO: 926294 - DNA, 120 bp, Artificial Sequence
  ENSG00000260816_18 (sequence is synthesized)
ggctattatgaataaagctaccacgaatattcataaatcctgtatacatgtttttatgcccttatgtttttatgtatttttgataaatacctaggtgtgaaattattgactcttagtgtt

SEQ ID NO: 926295 - DNA, 120 bp, Artificial Sequence
  ENSG00000260816_19 (sequence is synthesized)
taacttgtaagaatgctgccaaacagttgtctaaagtaattgtatcattttaaccccccgctagaagtgtgtaagagtttatgttgcttcacatcctcatcagcactttgtaatttcagt

SEQ ID NO: 926296 - DNA, 120 bp, Artificial Sequence
  ENSG00000260816_20 (sequence is synthesized)
ctttttaattatagcctttttgtgggtgagaaacgctatctcttgctagttttattttgcattttcctagtgactaatgcctctttttatgaactcattggccgttcatatattttcttt

SEQ ID NO: 926297 - DNA, 120 bp, Artificial Sequence
  ENSG00000260816_21 (sequence is synthesized)
ctgtgaactgcttgtttatgtattggccattttctaaaaattagatagtctttttaatattgaattataggaattctatatatattttggatacattctttttttttcatatgtactgtg

SEQ ID NO: 926298 - DNA, 120 bp, Artificial Sequence
  ENSG00000260816_22 (sequence is synthesized)
aattttctcctttgtcttgtctatttattccttaatggtgtcttttgaaaagcagaagttataaatactgatagtgtccaatttatctttttcatttgtgtagtgctttcttgttctaag

SEQ ID NO: 926299 - DNA, 120 bp, Artificial Sequence
  ENSG00000260816_23 (sequence is synthesized)
aacctttaccaatcaccaggtcacaaaaatattttcctatgttttcttctagacactccataacttcaatctttacattcagatctatgttccatctcaaattaatttttgtatatggtg

SEQ ID NO: 926300 - DNA, 120 bp, Artificial Sequence
  ENSG00000260816_24 (sequence is synthesized)
tgaggtaatggtagaggtttatttttctctccataagactctccaattgttctagcactatttgttcaaagactaatcctcgcgctattcaatttccttggcatctttgtcaaaaatcag

SEQ ID NO: 926301 - DNA, 120 bp, Artificial Sequence
  ENSG00000260816_25 (sequence is synthesized)
ttgactatatatgtgtgggtgtatttctagactgttgtactccattgatctaattttttttcttatacttactgctcgattgcctggaagctaggtaataataaggattcaaactttgtt

SEQ ID NO: 926302 - DNA, 120 bp, Artificial Sequence
  ENSG00000260816_26 (sequence is synthesized)
ctttatttcaagattgtttgggttagtttagatactttccttttacatatatatttcctgatcagcttctccatttcttttaaaaagccttgctgggagtttatttgctttggtattgaa

SEQ ID NO: 926303 - DNA, 120 bp, Artificial Sequence
  ENSG00000260816_27 (sequence is synthesized)
tctcttgatcaatttgaggaggatcaaaatcctgaaagtgttaagcgttaccatccatgagcatgcatctctccatttatttaaggcttctttatttataaacatttcagtgatatttga

SEQ ID NO: 926304 - DNA, 120 bp, Artificial Sequence
  ENSG00000260816_28 (sequence is synthesized)
tgattttgaatgtggaggtcttatacttttttgttaaattaactcttacacatttgatttttttatgctattgtaaatggcattataaaatttcttttttccaactgtttgtttctaata

SEQ ID NO: 926305 - DNA, 120 bp, Artificial Sequence
  ENSG00000260816_29 (sequence is synthesized)
tatagaaatacagttgattctagcaaactgctctcatatcctgtgatcttaaaatttatttattcaccttttcctttttgttaaatagattctgtagaattctctacatctctgaatata

SEQ ID NO: 926306 - DNA, 120 bp, Artificial Sequence
  ENSG00000260816_30 (sequence is synthesized)
gttttacttcttctccaatttttatggcttttgtttctttttcttgttttaatgcactggctatagcctgtaggacagtgttgaacagaggttttgagacagacatcattgctttattca

SEQ ID NO: 926307 - DNA, 120 bp, Artificial Sequence
  ENSG00000260816_31 (sequence is synthesized)
ggacttctctattatatgtgatgctagttgtatgttttctgtacctatacttcattagattaaggagtttgaatttatttctagtttgctgagagttcttttataaatgtgttcatatat

SEQ ID NO: 926308 - DNA, 120 bp, Artificial Sequence
  ENSG00000260816_32 (sequence is synthesized)
atatgttttatatttttcttattcttactatctgcatattagagggagtttagctcattggttaaaaggatttgttccggaaacctaactccaaatctttgaacttcctagaaacctggc

SEQ ID NO: 926309 - DNA, 120 bp, Artificial Sequence
  ENSG00000260816_33 (sequence is synthesized)
ctgtttatttaccccgtatgtcactttcctttatctgtaactggaaaatgtgtacgaagagcttaatacaatgactgatacacagtgagttctccataaatgttagttattattttaata

SEQ ID NO: 926310 - DNA, 120 bp, Artificial Sequence
  ENSG00000260816_34 (sequence is synthesized)
ttacagcatctgtggaaacagtgggtttatatttcagcgtcctgagaaacactcatcctgaacaacgggaacattggccacatccgccattgtcaattttaaataaaagatatgatgact

SEQ ID NO: 926311 - DNA, 120 bp, Artificial Sequence
  ENSG00000229528_0 (sequence is synthesized)
agaggggagagccctagagtgagaattcaggggcccaaggtgtgtgacctccaccaccaaccagctgtgactgttgagtgttgagcggggagtattacttgattccccagggcctcagct

SEQ ID NO: 926312 - DNA, 120 bp, Artificial Sequence
  ENSG00000229528_1 (sequence is synthesized)
accctggaatttattctcctgaatctttctctacaggacctggaacatggcagacagtcagtaagtgctgggtcaccttcaggccaccctggaccatccagctctagctaagccatcagc

SEQ ID NO: 926313 - DNA, 120 bp, Artificial Sequence
  ENSG00000229528_2 (sequence is synthesized)
tgactacaactacatgaatgaacccaggagataagagcagaagaatcacctagctgagcccagccaaactgcagcatatagtatcatgagctaataaacaattcctgctttaagccctaa

SEQ ID NO: 926314 - DNA, 120 bp, Artificial Sequence
  ENSG00000224738_0 (sequence is synthesized)
cacctgcgcgccccatctcttcaggtccagcgccgcctacccccatttcgccatttttaccggcgcgcccgccccgaggcgcagaagtagggcgaacggtggccgcagctcctttctccc

SEQ ID NO: 926315 - DNA, 120 bp, Artificial Sequence
  ENSG00000224738_1 (sequence is synthesized)
ggctcagccgccggccagcagccgcgccggaacctcggcccacgtgacgcgggcgcgcgcctatggaactgacggtggagttcagcgaagaaggtgccgcagagaattcgcaaacaccaa

SEQ ID NO: 926316 - DNA, 120 bp, Artificial Sequence
  ENSG00000224738_2 (sequence is synthesized)
ccgtaaccagagcagctgggggcgcggcggcgagagaagctgcgaagcgcatgcgcgcaggacgctgtgggaggggaaaggaggggaggagcgtggagcgatcgcctagttcccgcgttg

SEQ ID NO: 926317 - DNA, 120 bp, Artificial Sequence
  ENSG00000224738_3 (sequence is synthesized)
cggggcgcatacgagacttggcgactcgctgcctcagggttgcgtgcctccggccctagcctgcgcaggcggcctgagcttggggctctgctacgccacccacgcccaccttggcggagg

SEQ ID NO: 926318 - DNA, 120 bp, Artificial Sequence
  ENSG00000224738_4 (sequence is synthesized)
gcggggccccacggctctcaaacttgcgcgccaaagacggagccacctggcgtactggtggaaagcgcagacttcagagccacacccgtagttaagtattcggactctgagattccaggg

SEQ ID NO: 926319 - DNA, 120 bp, Artificial Sequence
  ENSG00000224738_5 (sequence is synthesized)
cgttttcacccagcatcgtgtgattcggcagcaggtggtctgtggcccgcactttgagaaaccctggtgcagaaggttcatggttagtggttctctctggaaggaacagtctaaggtttg

SEQ ID NO: 926320 - DNA, 120 bp, Artificial Sequence
  ENSG00000224738_6 (sequence is synthesized)
taggacttgcgttccacctaccaaagctaatcgagttagaaggctccaaactgaggtgtcatttctcattacggtggtgagaggacgggaccacacactgtgaagtcttcgttcccacat

SEQ ID NO: 926321 - DNA, 120 bp, Artificial Sequence
  ENSG00000224738_7 (sequence is synthesized)
cccacacttcattcttgccgcctaagttgtcgccgtgggactattgaaagggtatcagcgatattcatctttcctataaatgggatctgctttctacagtttcctgccagatgtgtaaag

SEQ ID NO: 926322 - DNA, 120 bp, Artificial Sequence
  ENSG00000224738_8 (sequence is synthesized)
ttcctgccagatgtgtaaagattgcaagaattgaaggtatttcttcaactgaagacctttacagatactcagatgactgaaatcctcttatcactggctggacatggtggctcacgcctg

SEQ ID NO: 926323 - DNA, 61 bp, Artificial Sequence
  ENSG00000224738_9 (sequence is synthesized)
ccacaaaaaattagctgggcattgtggcaggcgcttgtaatcccagctattccggaggctg

SEQ ID NO: 926324 - DNA, 120 bp, Artificial Sequence
  ENSG00000224739_0 (sequence is synthesized)
gagcaaacagcacagaaaaagaaacagcagtatatgtggaagaaagcaagaaaaatcaactggcctggaacctaagacttgtccaaagatgtcacagagagtaaaatgagaaaaatccag

SEQ ID NO: 926325 - DNA, 120 bp, Artificial Sequence
  ENSG00000229522_0 (sequence is synthesized)
agcagagctagaacccgggctccagttttcacccaggagacaggaggattctggctggaagggcaggagggactggggtcccccccagaaggagcgccccaggacgatgccacacaagag

SEQ ID NO: 926326 - DNA, 120 bp, Artificial Sequence
  ENSG00000229522_1 (sequence is synthesized)
catagagaagcatctcatgctgtctgcagcggctgcagcgctctcctggggcaggagatgctcaaaggtcaacatgactttgaaaaggggctgggagaaaagcccccagtgctggctctg

SEQ ID NO: 926327 - DNA, 120 bp, Artificial Sequence
  ENSG00000229522_2 (sequence is synthesized)
gactcactatcccagggctcttaaagggctaaacatgactagattgtagtgagcctttcctaacatgcaaagaagcatccagggataatgtctaaatacagatgtgctatttctctcctc

SEQ ID NO: 926328 - DNA, 120 bp, Artificial Sequence
  ENSG00000229520_0 (sequence is synthesized)
aaaagaaccttcgccgagaaggctgctaatgaattcagactgcatagttctcaaaatctgatgttttgcaatgatgacattagcgtggcggccgagggtccgagcccagaaagtctgcgc

SEQ ID NO: 926329 - DNA, 120 bp, Artificial Sequence
  ENSG00000229520_1 (sequence is synthesized)
tgcataccccgttctgcctgagtgaccggcggagctgcggcagggagcagcattgtccacgggtcacttcaagatgagcgagatgacaagagccagaaacaccattttgaaaagttgcaa

SEQ ID NO: 926330 - DNA, 120 bp, Artificial Sequence
  ENSG00000229520_2 (sequence is synthesized)
ctgaggccccttggccggcaaatctgagctgcagaagcgcctgaattccggacgttaaacctccaatcaccagccagggcagctccggctgggacagcgcgggcgcgcggcccctccacc

SEQ ID NO: 926331 - DNA, 120 bp, Artificial Sequence
  ENSG00000229521_0 (sequence is synthesized)
agcaaaatgaaagtctgctctacaattttctgctgccattcccttggttaagattttcccgtgacctggaagtcctccccttaaactctgctgatcaattcttccagggtctctcaaact

SEQ ID NO: 926332 - DNA, 90 bp, Artificial Sequence
  ENSG00000229521_1 (sequence is synthesized)
aaaaaattactctttccctctgctgattctttttgtattactctggtggcacttaataataatctttgacctatagtgtaatcagcctct

SEQ ID NO: 926333 - DNA, 120 bp, Artificial Sequence
  ENSG00000229521_2 (sequence is synthesized)
ctcatgaaataaaaaataagtttcagactgtcccaaataatcataatttatattctcttcagcctagttcatccatgtgtttcaactgaattaaatattcttttataaaaggcactaaac

SEQ ID NO: 926334 - DNA, 120 bp, Artificial Sequence
  ENSG00000224730_0 (sequence is synthesized)
acttatgtgcggattgccccagttgaactcatggaagtagagagtagaaggtggtccccgggagctgggctggggtggaatcagagagctgcatcgaaggataccgcacttcagttggac

SEQ ID NO: 926335 - DNA, 120 bp, Artificial Sequence
  ENSG00000224730_1 (sequence is synthesized)
aggaggagtaagtttaggagatctgttgtacagtatggtgactacagttgctaacaatggattgcatacgcgaaaattgcacgttgcactcctggaggcggcacatttatttgcattttg

SEQ ID NO: 926336 - DNA, 120 bp, Artificial Sequence
  ENSG00000224730_2 (sequence is synthesized)
ccccatccacagtgagctccctgggaacacttgctggttgaatgaatgaaggggagcctgggggaccggggtggttcatttattcctcatcctcctgaggcctggggagagctctaacaa

SEQ ID NO: 926337 - DNA, 120 bp, Artificial Sequence
  ENSG00000224730_3 (sequence is synthesized)
ccagacggccaaacagaggatgaggagcaggaaggggacccgggaggaggcccacgaggtcccaggacagcaggagagagtgaggtcgcagcaggcgggaggcagcgtgctggacaagga

SEQ ID NO: 926338 - DNA, 120 bp, Artificial Sequence
  ENSG00000224731_0 (sequence is synthesized)
ctgaagactcaggacaacgaaacaaaaccctaatgccctgaattcccaaggaaatgacctaaggttctctttctgtcgtgaagctaggagacctctgagatgggagtcagtgtgaggtct

SEQ ID NO: 926339 - DNA, 120 bp, Artificial Sequence
  ENSG00000224731_1 (sequence is synthesized)
ccagagatgtaaatttataattgagggccacaaggaatcagggagctggaggagactgcgttccacctggcatctagttttgctgcgaaagcaacccatggagataatcaaacaacttgg

SEQ ID NO: 926340 - DNA, 120 bp, Artificial Sequence
  ENSG00000224731_2 (sequence is synthesized)
gtcatatggaagagggaggaaaaaaagactaacttcccagagctggagggaaagcagaaagccatgcttaagctctcatcagtgggagccattccatcccaggatcctttcagcaaccaa

SEQ ID NO: 926341 - DNA, 120 bp, Artificial Sequence
  ENSG00000224731_3 (sequence is synthesized)
tttggaagtctaggcttttcagtaaatagttttatcttgtgtttcgaaaaagccacacttcatcttctgagcctcatattctcttacatgaagttactaaataaatctgtatttctttta

SEQ ID NO: 926342 - DNA, 80 bp, Artificial Sequence
  ENSG00000229525_0 (sequence is synthesized)
gcctccgcctccggcccgccctcgtctccgcccctgcgggggctgctcgttaggccccgccctgcacccccgtcacccac

SEQ ID NO: 926343 - DNA, 120 bp, Artificial Sequence
  ENSG00000229525_1 (sequence is synthesized)
gcggaggtgctaggacagccgcggacggcccgcctccccgtgccccgggcctcgaggccaataaaaagctcgcccctccagctcaccgggtccgacgggtacggtacaaagtgctgtctc

SEQ ID NO: 926344 - DNA, 120 bp, Artificial Sequence
  ENSG00000229525_2 (sequence is synthesized)
tcgccacagccacctttgtgacaataaaagcaataaggctaatgtccatggggcgctcacggtgagctttagctttatgataaagattggcctgttacctcgtttaatcttcacaactgc

SEQ ID NO: 926345 - DNA, 120 bp, Artificial Sequence
  ENSG00000229525_3 (sequence is synthesized)
cccatcaactatgtactcttactgtccccagtttatgcatgaacagagaaagctgagatacggagactagtgatccgtcgaggtaataaacggcacaggtggggtttgaactccatcagt

SEQ ID NO: 926346 - DNA, 120 bp, Artificial Sequence
  ENSG00000229525_4 (sequence is synthesized)
ttgattgcagaggcctggaacaaccctacagccttctctcagatcttttctggacctttttctatgcgctttgcacctaggacgtgaggctgccaagcttggtattcaataaatattgat

SEQ ID NO: 926347 - DNA, 120 bp, Artificial Sequence
  ENSG00000229525_5 (sequence is synthesized)
ggatgaaggaacaatggaagaaaggagtgcatgggtaaacaaatgacaaatatgtcaaagcacggatgcagattcttagaatgggctaatgctgttttctgctggatttttggatgtgta

SEQ ID NO: 926348 - DNA, 120 bp, Artificial Sequence
  ENSG00000229525_6 (sequence is synthesized)
ggtcagaggagaactgatgctccgcatggcattttaccatcctgcctgcctgcctggggccctgggcccacaggctttggggagagtgtatggccaggctgcagccttcctgggataaag

SEQ ID NO: 926349 - DNA, 120 bp, Artificial Sequence
  ENSG00000229525_7 (sequence is synthesized)
ctctgccttttagtctcttatcctactttttagaagccctttaaggtctttgttaaaggaaatctaatgtgaagaattccaggagaactggataagcctgactatgggtgggcgtgactg

SEQ ID NO: 926350 - DNA, 120 bp, Artificial Sequence
  ENSG00000229525_8 (sequence is synthesized)
aattacttcccgggctggctaaggaaggcctcccccgaagtgcatcggaagcctgcagcttctccttatggccactggagggcacttggaccatgaaataccagatcgtctcggcgtccc

SEQ ID NO: 926351 - DNA, 120 bp, Artificial Sequence
  ENSG00000229525_9 (sequence is synthesized)
aggtctttggaaatgtgtgattcaattcagcaaacgtttcaaaatcatcactataaagatagcgcttttgtgttgaacatccaatatggcgctaaacaccttatatatatgtgtgcgtgt

SEQ ID NO: 926352 - DNA, 120 bp, Artificial Sequence
  ENSG00000229525_10 (sequence is synthesized)
atatatgaacttgcttaatattaactacaattgttgtgagttacttaggctatttaggaaaaaaaaatcaaggcttaaagaagtcaaagtacttacccaagattgcttagctaaataaaa

SEQ ID NO: 926353 - DNA, 120 bp, Artificial Sequence
  ENSG00000229525_11 (sequence is synthesized)
tttgggagtaaggacttgaactcaagcccttgggcaccaaccataagcaataggtgcacacaaagctgaaatgaggactctcttataagcaggaagacgcacacaccacacaaatattat

SEQ ID NO: 926354 - DNA, 120 bp, Artificial Sequence
  ENSG00000229525_12 (sequence is synthesized)
tgttcctcaacaatttacacattctgaaattggaagatgacttacaatttgtacattacatggtaatgtttcttttttcccttgaaatgatgttattaaataaatgaagtgtctcacaat

SEQ ID NO: 926355 - DNA, 120 bp, Artificial Sequence
  ENSG00000273293_0 (sequence is synthesized)
cctgctgcactccccaccacgggcagcctcggtctctatgggtcacagccaagcagctcccccctcgcttctctgtcctcaccacttccaccaggggccctaataaagatgtcaaaccag

SEQ ID NO: 926356 - DNA, 120 bp, Artificial Sequence
  ENSG00000282097_0 (sequence is synthesized)
gggagtttgacaggtgaagagacctctttcaggcagagggaacaaaataagccacagtcctcatccttgaaccaggtgagaacttctagcttactgggtaaagtccaattaacgtggtgc

SEQ ID NO: 926357 - DNA, 120 bp, Artificial Sequence
  ENSG00000282097_1 (sequence is synthesized)
agaattccatccatggcagggctcctgctgtctccagcctcatctccaggcacaccctgcacccttgagaagacaatgcttccgtgtccaccagttcattccttccagacacatcccagt

SEQ ID NO: 926358 - DNA, 120 bp, Artificial Sequence
  ENSG00000282097_2 (sequence is synthesized)
ggtgtctagctcaggtctcagctcctggaaagggacaaggacgccccagagtctgcttttttgacacttaccttctggtccccctgaaaaatcatgctgcatcacgcctgcacattgtcc

SEQ ID NO: 926359 - DNA, 120 bp, Artificial Sequence
  ENSG00000282097_3 (sequence is synthesized)
tttctgcggaaatgtcctgtctccccatctctatctgccaaagacccacgcataatgcaaacaattcaggtttcaccctttgcagtgaactttgtacagctctcccagagccgtggagtc

SEQ ID NO: 926360 - DNA, 120 bp, Artificial Sequence
  ENSG00000282097_4 (sequence is synthesized)
taggtctatgcccaagagagatgcatgaaatgttttactggtttctgcaaataagccagaccaagggagaaacagaccttcagcaagtagtaaccaaatgcaagttttgagaatgtggag

SEQ ID NO: 926361 - DNA, 120 bp, Artificial Sequence
  ENSG00000282097_5 (sequence is synthesized)
tctgtcactcatcggagccacctgatctgaagcgttgtcagggtcagtatttttgttctgcctgctgttttgctaatggatcaatggcagtcagtaaagaacaaaccgtgccagaaaaga

SEQ ID NO: 926362 - DNA, 120 bp, Artificial Sequence
  ENSG00000282097_6 (sequence is synthesized)
atgtcctcttcttctcagctgactcagctcgggacaggaagacagggggcatctggcatttggggaagcccttgattgtcccttaggaaataactgaaaatggatttgtgttggcctggt

SEQ ID NO: 926363 - DNA, 120 bp, Artificial Sequence
  ENSG00000282097_7 (sequence is synthesized)
tctaagaaggtcacccaggttgaatttgaaaagcagaggcactgtgtccacaaaagaaagtgataagcagcaagccatttctcaaagctaatgcccgagtgtgtaccaccgggatccatt

SEQ ID NO: 926364 - DNA, 120 bp, Artificial Sequence
  ENSG00000282097_8 (sequence is synthesized)
ttatatctctctacagattggtgtgtttttcatgacaaccatccccatagcaaccaggtgtccaggcactaaattgatctcaaggatatgaaatctcagcctggtgagggaagcccactc

SEQ ID NO: 926365 - DNA, 120 bp, Artificial Sequence
  ENSG00000282097_9 (sequence is synthesized)
tgactgcagtttccttggagtcgtttcacatcgagggctggtgtgcaggtcatggggaatggggcttcttcctgagggctcagctggacacaagggacagccctggtgagaggggagcct

SEQ ID NO: 926366 - DNA, 120 bp, Artificial Sequence
  ENSG00000286965_0 (sequence is synthesized)
caagggtgcttgtgattacattgggcgcagctggatatccaggaccctcttcccccgcccctcaacttagccacagctgcaaagtccttctagccgagtaacagaacacattcacaggtt

SEQ ID NO: 926367 - DNA, 120 bp, Artificial Sequence
  ENSG00000286965_1 (sequence is synthesized)
ctggggattaggacttggctatctttgggggctcaggacttggctatctttgggggctcattcttaaacctaccaattacagtcaattaatgggtgcctacattataatgcttactctaa

SEQ ID NO: 926368 - DNA, 120 bp, Artificial Sequence
  ENSG00000286965_2 (sequence is synthesized)
acatatttatcctttaaaatttggttaggaatgaaagtatttactttttgttagacaaattaaccccagccaggtcagaactcgtaaattcaaatgagaaactttccagtgcaacatctc

SEQ ID NO: 926369 - DNA, 120 bp, Artificial Sequence
  ENSG00000286965_3 (sequence is synthesized)
aaatgtgtttttggagcaagtctagactagagcattgagaaaatacaacagctctttgggcaaaagaagttgtcaaggtaatttccttctagcccgtggttttctccgcagatggtgtaa

SEQ ID NO: 926370 - DNA, 120 bp, Artificial Sequence
  ENSG00000286965_4 (sequence is synthesized)
ataagttagcacaagaatggagtgatggcacgtgtggttagtattctcccaacctgctgaaagctgacaagccataaaaactgttttccatctttatttccagtaaaggaattaagtagc

SEQ ID NO: 926371 - DNA, 120 bp, Artificial Sequence
  ENSG00000286965_5 (sequence is synthesized)
tagcttgctctgcatttctgacttttccaaatgttgtgactttccgccaccagacatggagaacaaccacggctgtgcccggttcttcaggtggctgccagtccccccgtgcctgctccc

SEQ ID NO: 926372 - DNA, 120 bp, Artificial Sequence
  ENSG00000286965_6 (sequence is synthesized)
tgtccctgcctgccttcccgctgatgatgactgacgttctgggacggaggagcaggttaggcctaggtacagttgtgtgctggtaaatttgtaacaaaaggctctccaggggaagaaaag

SEQ ID NO: 926373 - DNA, 120 bp, Artificial Sequence
  ENSG00000286965_7 (sequence is synthesized)
ccctgattttcagtgtttgccaatttccacggtattaaaagtactcacaccaaggccggttttaagcagtgctcctgaagtccctgaagacagagttgaaaagcatcgtgcacagttgac

SEQ ID NO: 926374 - DNA, 120 bp, Artificial Sequence
  ENSG00000286965_8 (sequence is synthesized)
tcttctaagctagtccgagctggctccaacacactactgcctatcttctgggaacactcttttttgtgtcctgtcctggttatgctgagagtctgcatcttgcttcagagaatttactaa

SEQ ID NO: 926375 - DNA, 120 bp, Artificial Sequence
  ENSG00000286965_9 (sequence is synthesized)
aatcacaggaaggtctgaattctcatttgtacattcgacaccaagtatatggaggctttcccaattgctctgtgtgaaggacttgagttttcttccagcatcagctgaaaataccaaatg

SEQ ID NO: 926376 - DNA, 120 bp, Artificial Sequence
  ENSG00000286965_10 (sequence is synthesized)
cctgtttgtgtggaaatttcctgagactacagctcttaactctctgacctgagtagtatatgtgtgaattttccatcaggttgtattctctgcatttttctctgccgtatggtggcaaat

SEQ ID NO: 926377 - DNA, 120 bp, Artificial Sequence
  ENSG00000286965_11 (sequence is synthesized)
gattgtcctaatgtataagatcccctttcagcctcctacccccagcctcagtactgcccctgagctcgggaagagaaccccttgccctgggctcctcctacatttgagatttgactctag

SEQ ID NO: 926378 - DNA, 120 bp, Artificial Sequence
  ENSG00000286965_12 (sequence is synthesized)
atatctgttggctatgtccctttccactaagtctgtggaccccacttctaagactattgtctggattctggagagtccagaattctctgcctgaaaggctctgaacctattggacctgta

SEQ ID NO: 926379 - DNA, 120 bp, Artificial Sequence
  ENSG00000286965_13 (sequence is synthesized)
gtggcctctttgccttatccattctccaaagggtagactatgccaaatcccaagattttgattaagaacagctagcttgtgtgtttttttgtttttgtttggtgagggtggttgtggatg

SEQ ID NO: 926380 - DNA, 120 bp, Artificial Sequence
  ENSG00000286965_14 (sequence is synthesized)
gtactacacctaaaggccaccatggatgttcacatagcactcatgcttgttgtgcagaccatatggagccaatagcaagaatgttaagggatccagcaaaatcagaaggcctgggggcaa

SEQ ID NO: 926381 - DNA, 120 bp, Artificial Sequence
  ENSG00000286965_15 (sequence is synthesized)
tggctgggtctcccctacctgttgtcacatttcagtgtggacctctgaagattgcaagcatcctgaatttgaaccttcctttgtagtgaaggatggaatctatttcatttaagagctcgt

SEQ ID NO: 926382 - DNA, 120 bp, Artificial Sequence
  ENSG00000286965_16 (sequence is synthesized)
taaacttttaaatatttagacagatagtatatgaacctccatttatactcttgcaccagactctgcaaatattggccaggccttcccaaaacacagttttttttttcttttctttttttt

SEQ ID NO: 926383 - DNA, 120 bp, Artificial Sequence
  ENSG00000286965_17 (sequence is synthesized)
gtcctcttttctctttcaagtgtacagtctaggtgagtaaggattaggtttttaagagggaaaagtcccagagaaagtgtcataagcatgggaatgagtccaccaaagactaggaagctg

SEQ ID NO: 926384 - DNA, 120 bp, Artificial Sequence
  ENSG00000286965_18 (sequence is synthesized)
atgatccaatgtaattgccagagagaatgtggtggatctaacccttggagctgctaagaggacaaacactgatgcccagaccagcagcaggtctggcaatggcaactgtctggtctcatg

SEQ ID NO: 926385 - DNA, 120 bp, Artificial Sequence
  ENSG00000286965_19 (sequence is synthesized)
gacaggaatacagactgggttaaaccgagatctacttgtttctcctatttcctaactctcccctacaaggccatcactttcctccttgtgtgctcaagaaacctaataaatgtcctgcag

SEQ ID NO: 926386 - DNA, 120 bp, Artificial Sequence
  ENSG00000286965_20 (sequence is synthesized)
gaagagttacaggtgcctcagagttctggactctcctgcaattgctgtgtcaccttaatcttttctctttgaccatggtcagtttgtgatttgctgaagtgaaccaatgagcattttaaa

SEQ ID NO: 926387 - DNA, 120 bp, Artificial Sequence
  ENSG00000286965_21 (sequence is synthesized)
ccccattgggtaggaagagtcattttctgcttggactctggactggaaacaaaccttcccattgtgcagcactatggtcctttctgtgtgctgtcattaatcttttctcaactgcccagc

SEQ ID NO: 926388 - DNA, 120 bp, Artificial Sequence
  ENSG00000286965_22 (sequence is synthesized)
tgcagtgactctaggacattacaacataattccttcctactcaatatcatgtaggccacatatatgaacagaccatttcctgacatttttttcagaaaaatcagtatcagtgtgggaatt

SEQ ID NO: 926389 - DNA, 120 bp, Artificial Sequence
  ENSG00000286965_23 (sequence is synthesized)
caatgacactctagacttgtgtcatttttatgtactaaacaaaatggtactataaaaattcaacatagtctcaagaaggtcccagttagtgcacatgtaataacaatactcaagtttcac

SEQ ID NO: 926390 - DNA, 120 bp, Artificial Sequence
  ENSG00000286965_24 (sequence is synthesized)
tggcaattcttgcaggaaggatattctggtatcttctaattagtaaaaaaaaaaaaatactaagataaatatttttgtgaacttaattgggaaaataaatgaaactatcaattagccagg

SEQ ID NO: 926391 - DNA, 120 bp, Artificial Sequence
  ENSG00000286965_25 (sequence is synthesized)
atttggggagcatctgagaactatgaggtatgcagtaaacatgtgactgaactgcctttgcatggatgctatcataaaatacattaccaattgggtagagataaatctaacacaccaaaa

SEQ ID NO: 926392 - DNA, 120 bp, Artificial Sequence
  ENSG00000286965_26 (sequence is synthesized)
gcaagagtagaaaataaaaacaaatcaccctgctgctattccaaggaccagattttttaccacaattagtactgactctctgagtgctataggctattgagacaaggaagaaatctatga

SEQ ID NO: 926393 - DNA, 120 bp, Artificial Sequence
  ENSG00000286965_27 (sequence is synthesized)
aggggagttagggaaagcttcctggaaaaaaaaaaaaaaaggcttgagctgtgctttaggaagatgtgcagtggaaggaggagatttccatgggatggggacattataaatatttatatg

SEQ ID NO: 926394 - DNA, 120 bp, Artificial Sequence
  ENSG00000286965_28 (sequence is synthesized)
ccacagtcaaataccttgactatgccacaaggtaactagatttttgggcagacattattctgggtatgcctatgaggatgtttggaagagattaacattgtgtagaaggagtaaaacagg

SEQ ID NO: 926395 - DNA, 120 bp, Artificial Sequence
  ENSG00000286965_29 (sequence is synthesized)
ttgccctccctaatgtaagtgggtctcatccaatcagttgaaggtctgaatagaacggaaatgctgactctcccctaagagagaattctttgtgtctagtggcctttgaactaggacatg

SEQ ID NO: 926396 - DNA, 120 bp, Artificial Sequence
  ENSG00000286965_30 (sequence is synthesized)
gtgtttttttcctgccttcacactcaaattgaagcatcagttctttcttagtcttgagcctgctggcctttggaatggaccacaccatcaactgtcctggttgtcaggcctttggacttg

SEQ ID NO: 926397 - DNA, 120 bp, Artificial Sequence
  ENSG00000286965_31 (sequence is synthesized)
gggtggaactaaactatcagctctcctgggtcaacagcttgccgactcatcctgcaaatcttaggacttgccagcctccttgattgcatgaccaattccttataataaatctcttcatat

SEQ ID NO: 926398 - DNA, 120 bp, Artificial Sequence
  ENSG00000286964_0 (sequence is synthesized)
taaaagtaatacagctaaggatttttttaaaaaatcatttttaggcctctatagggagcaatatttaacttataatatgaaagcctattaatcagctttcagatattgagcattaaatga

SEQ ID NO: 926399 - DNA, 120 bp, Artificial Sequence
  ENSG00000286964_1 (sequence is synthesized)
catttttagggatgaagacaacagcaaagttgaatttagaccttgtcaaaatttaaggaggtctccaacattaaggtgttcccaactccccaaaagaatataagtatattcaaataatga

SEQ ID NO: 926400 - DNA, 120 bp, Artificial Sequence
  ENSG00000286964_2 (sequence is synthesized)
gttagcaaagttaccaagtacaatggtgaaagaaaaaaaaagaatacctgcccataagatgttgtgaaaaaatacgaggatcaaacataaaaaaaaaaattcagatgtaaccacccacaa

SEQ ID NO: 926401 - DNA, 120 bp, Artificial Sequence
  ENSG00000286964_3 (sequence is synthesized)
atttgggggccacattcacattcagcaggaaatcttaaggaggagaatttattctaaagtggttctgggctggttgtgtagagaatataaggttaaaggatatgtacattcaaattgact

SEQ ID NO: 926402 - DNA, 120 bp, Artificial Sequence
  ENSG00000286964_4 (sequence is synthesized)
ttcaacttaaaagattgcctacaatccttccaaaggctccactgctcccagtttgatctgccttcatggaatcacagagatagcctatgttggaagccaaagctgtgtaataccctgact

SEQ ID NO: 926403 - DNA, 120 bp, Artificial Sequence
  ENSG00000286964_5 (sequence is synthesized)
ataatcatcattctcagtgctttcctttactgttattacctgagtgggaatattaccctggctgaatttggagtccctctctcaccaactgtccagccatttccaaagtgagtttaatga

SEQ ID NO: 926404 - DNA, 120 bp, Artificial Sequence
  ENSG00000286964_6 (sequence is synthesized)
gtattcttatatctctagtgttagcagaagactagacaacagagtgcattgaacaggactctcctgggcaacgctggaacctcagaccagcatgggtcatttgaacccattcaatgaatt

SEQ ID NO: 926405 - DNA, 120 bp, Artificial Sequence
  ENSG00000286964_7 (sequence is synthesized)
agcgtctacacaatgtatgtaatcaaggccatcaagatgagagtaaggaacttgccatccagaatctgtggctttttgtcacaggactacagaaccaacctccttttgtctccaagcatg

SEQ ID NO: 926406 - DNA, 120 bp, Artificial Sequence
  ENSG00000286964_8 (sequence is synthesized)
aagagccagtatctgagaattaaagtcctccagagagtagactttagctaataattggtagatatatagttataagtattccagctctgttgttctgtttgagacaactgtgatttgtga

SEQ ID NO: 926407 - DNA, 120 bp, Artificial Sequence
  ENSG00000286964_9 (sequence is synthesized)
tatcaaaatattgttcggccttcttcctctccctgttgcatggtcccactccctggtcactatatttttacttggaccacttcctaatatatcactttccgatgagtcctcaatcagagt

SEQ ID NO: 926408 - DNA, 120 bp, Artificial Sequence
  ENSG00000286964_10 (sequence is synthesized)
cagcttatggggaacccaatctaaaggcacagccaagttgttttccaaaatatttcttttactttacactcttgccctcaatgtttgtggtcccatttcctcactagtatttggtaccat

SEQ ID NO: 926409 - DNA, 120 bp, Artificial Sequence
  ENSG00000286964_11 (sequence is synthesized)
cggtctaactttttgtcaagtgtgttgctttaattactttgtattgactaaatttatatgttaactatgcatattaactttttggagtgatcactaaaataatgtaaatagaatgtataa

SEQ ID NO: 926410 - DNA, 120 bp, Artificial Sequence
  ENSG00000286964_12 (sequence is synthesized)
cttcttaatgagtagaaaaaagtaatgaattaatacaaggaacttagaacgttttaattacaaataattgcctcccagggtaaatgttcttcttctcattactttagctctgttttttca

SEQ ID NO: 926411 - DNA, 120 bp, Artificial Sequence
  ENSG00000286964_13 (sequence is synthesized)
tcttcaaattagacatttatgctattgtttgtttagatttagccatgtatttgccattttctttgccagcattccagacatttatactagtacattttccttcttctaaagtatatccta

SEQ ID NO: 926412 - DNA, 120 bp, Artificial Sequence
  ENSG00000286964_14 (sequence is synthesized)
tagatatactcctttaataatggtctattagggaaactgtgatgtctttcattttctgaaaagttattttatcctcattcttttaaaattattcttgttgagtctctttgacttgtggaa

SEQ ID NO: 926413 - DNA, 120 bp, Artificial Sequence
  ENSG00000286964_15 (sequence is synthesized)
ccattcatatctctttttttctatataatattgtattatgtaccaccaaaaccttagtgatgcaatagttcttaaatgacaatttcacttttttgtcctaaatttttcccgttaatccat

SEQ ID NO: 926414 - DNA, 120 bp, Artificial Sequence
  ENSG00000286964_16 (sequence is synthesized)
cgtcatcagtttggcaagttttgatacaggtgcttttaatgtttgcatgtaagcaggcagtaactattatgtcacagcagcccctgggccaacaacaattcataattttgattgattgta

SEQ ID NO: 926415 - DNA, 120 bp, Artificial Sequence
  ENSG00000286964_17 (sequence is synthesized)
ataaacaccttgatataagagatattaaaaagtgacaaatttgaatagaattgatggaaacagcattattctgtagtcttttagcttccatttttgctattaaaaaattatttgtcagcc

SEQ ID NO: 926416 - DNA, 120 bp, Artificial Sequence
  ENSG00000286967_0 (sequence is synthesized)
atgctgcttttgtgatgtcatgacagaattgagtagctgtgacaatgagtatgtgacgtacaaggctgaaatatttattatctggtcttttatggaaaaaaaaaagtttgcctattccta

SEQ ID NO: 926417 - DNA, 120 bp, Artificial Sequence
  ENSG00000286967_1 (sequence is synthesized)
ccctaagcaatcactgtgaccagaagatcacgatttatgattaatcaagatgaaggcacacccccacttcagaagttcatgaacagagagtagaaactagatgattctccaaaggaaatt

SEQ ID NO: 926418 - DNA, 120 bp, Artificial Sequence
  ENSG00000286967_2 (sequence is synthesized)
aatcccagcactttgggagcctgagggtgcaatcagtgccagctgggctgtgttctcatctggaggcttaactatggaagattccatttccaagctccttcaggctgttggcagaaatta

SEQ ID NO: 926419 - DNA, 120 bp, Artificial Sequence
  ENSG00000286967_3 (sequence is synthesized)
agaaattatttccttgcagatgtatgactggggacccagcttgttcctggctgccagatggagcctgctcaacatcctagaagctacttgcaattccctgccacaagacccctcccacag

SEQ ID NO: 926420 - DNA, 120 bp, Artificial Sequence
  ENSG00000286967_4 (sequence is synthesized)
gcagtttgcaacatggtggtttgcttcttcaaggccagcaagaaaatctctttagtctaccaagaaggagtcttatacaataaaacaatcatgggagtggcattcccatcactagtgcca

SEQ ID NO: 926421 - DNA, 79 bp, Artificial Sequence
  ENSG00000286966_0 (sequence is synthesized)
agactgatgccgagcttcaggtaactctcacaatggaagaaggcaggaacgtcaggcctctgagcccaagccaagccat

SEQ ID NO: 926422 - DNA, 120 bp, Artificial Sequence
  ENSG00000286961_0 (sequence is synthesized)
gaagcctgagaagatgagagagtcaagtccttagagggactgaaagcagagacataacggcacaaaacgagatgggaaagtgacggagcaatacatgagtctgtaatgagtgggatttag

SEQ ID NO: 926423 - DNA, 120 bp, Artificial Sequence
  ENSG00000286961_1 (sequence is synthesized)
gtgggcagcagcacttggttatttacaagttcaggatcctgtttataaagcaaggaaagattgctatctgtctccagcactatggcgagataattaataggagcactgctggagactgat

SEQ ID NO: 926424 - DNA, 120 bp, Artificial Sequence
  ENSG00000286961_2 (sequence is synthesized)
agtgcaggcggccgatacccatggcaggagctctcgtcatctaactgccacagaattgtgaagatatgatgcctcaaaaggagaacaacatcacttccgcggcattcctgcgcaaaatga

SEQ ID NO: 926425 - DNA, 120 bp, Artificial Sequence
  ENSG00000286961_3 (sequence is synthesized)
ctaacctgaatctagtcatgagaaactgagaatctcaaattgtcagacaatctagaaaataatttgcctgtactcttcaaaaatatcaagatcatgaaagacaaagaaagtcggagaaat

SEQ ID NO: 926426 - DNA, 120 bp, Artificial Sequence
  ENSG00000286961_4 (sequence is synthesized)
tgtttcagattaagatacattaaagagataagacgacggaatgcattgagtcccagaaggagggattagcatatactgtgtttgcatatcataaaaactgacactgaggtaattctgctt

SEQ ID NO: 926427 - DNA, 120 bp, Artificial Sequence
  ENSG00000286961_5 (sequence is synthesized)
gaaagaataactaatttattatttattcctgtgattaaacaatgtgcacgtttcaaaatatggtattaaaggaacatgtctctacttacctcatcacaaggtcttagacagcttcatgtt

SEQ ID NO: 926428 - DNA, 120 bp, Artificial Sequence
  ENSG00000286961_6 (sequence is synthesized)
catcattattaaaggaagcccacacaaaaactgcacacccctagaaactgaagcagctgaattacactaacaataaaccaaggggtgaataaaagtgtctactaaatacaaaatttaagt

SEQ ID NO: 926429 - DNA, 120 bp, Artificial Sequence
  ENSG00000286961_7 (sequence is synthesized)
ataattctcaatgggtatgatggttgtagcagataatgatatgtctagtctactgtaatcattacttatgtaagaaattctttattgttattggagagagtcaatcacctggttgaatat

SEQ ID NO: 926430 - DNA, 120 bp, Artificial Sequence
  ENSG00000286961_8 (sequence is synthesized)
aaaaatatctctcttttggcctgtacaatccacagatttatagaagatttggaagacctggagtcccatactcttactagtatcttccagtatagattatttttaataaagtatagaaga

SEQ ID NO: 926431 - DNA, 120 bp, Artificial Sequence
  ENSG00000286961_9 (sequence is synthesized)
attttcagattgattttttaacaatgtttaaatcaagtggtgcatacacttggatgtgaacacatcacatatcatgattttaatgtttaaaagcgtttttgtgatattccatcggtaaca

SEQ ID NO: 926432 - DNA, 120 bp, Artificial Sequence
  ENSG00000286961_10 (sequence is synthesized)
gattttttttcatctgttttgctattgcatgcctctcaaacttctgggtaataagaaatgtagaaaagtaaatttacaaaatttagaagcaaatatcatgtatttgcttttatgttctca

SEQ ID NO: 926433 - DNA, 120 bp, Artificial Sequence
  ENSG00000286961_11 (sequence is synthesized)
aacagacccttaagagacttcagcttaatatgtccagttggcccttccaactcctgtgggttccacatctgtgcattcaaccaacagcaactcaacaagacttggaaaaaagattgcatt

SEQ ID NO: 926434 - DNA, 120 bp, Artificial Sequence
  ENSG00000286961_12 (sequence is synthesized)
tgtaccgaacatgcagaaacttgttttcttgtcattgttccctaaacattatagtaccaattatttacattgcatttaccttgtattagatattatacataatttagagatgagttaaag

SEQ ID NO: 926435 - DNA, 120 bp, Artificial Sequence
  ENSG00000286961_13 (sequence is synthesized)
aaaagtcattatgttgtgcaccagttgacaagagacgacactttcgtgttcttgccaaacaaaaacgaaaacaaaaaattataggagcctgttctaagtactggggtaacaaccctagac

SEQ ID NO: 926436 - DNA, 120 bp, Artificial Sequence
  ENSG00000286961_14 (sequence is synthesized)
actgtctttggcttcacagagataacaggccagatgggcattgagacaagtgaacaggcagatggaaaacagcatgtaattgatgcctttgttttcaaatgagatatttctggagtgata

SEQ ID NO: 926437 - DNA, 120 bp, Artificial Sequence
  ENSG00000286961_15 (sequence is synthesized)
gaacattcatttttactaaataaatgcattatctatagcacacattatagagttttgttgttgttgttgttaatctaacatgtaacagaaataaaagagattgtttctaaaccactttaa

SEQ ID NO: 926438 - DNA, 120 bp, Artificial Sequence
  ENSG00000286961_16 (sequence is synthesized)
actgttctggcaactaccttagacccttctggcgaagcatctctaaagaagaccattgacagccactatcagtagcagcagcagtgggcatgtgtcctcgcttgccaccccacaaaaaag

SEQ ID NO: 926439 - DNA, 120 bp, Artificial Sequence
  ENSG00000286961_17 (sequence is synthesized)
caaacaaacaaaaatcattcccagatgaaaactacgaagttgtaaactataaaagggaagattaaacattgtctgtgtgttctctaacatccatttgatttatagtttttttttttttcc

SEQ ID NO: 926440 - DNA, 120 bp, Artificial Sequence
  ENSG00000286961_18 (sequence is synthesized)
ttttttgacagaagttggtcttatcccattttctcagcataaaaataacaattctcttataaggcagttttacgcagcattaacagagcaaagagtaaactttgtttgctttaataatac

SEQ ID NO: 926441 - DNA, 120 bp, Artificial Sequence
  ENSG00000286961_19 (sequence is synthesized)
taaattgtaacatcatattttctatttgcaaatgtttgtccatctactggatgtataaatcttcgtagtgacaaaagtatgtttgatttatttataatggtcaatggaagggctatgaaa

SEQ ID NO: 926442 - DNA, 120 bp, Artificial Sequence
  ENSG00000286961_20 (sequence is synthesized)
ttgtgtattaagctactatgagaaaagcggcatggctcaaataatcatctttatattcagcatgcttcaggcaatcactaatttttgagaaatctattgttctctagtttttcccaagta

SEQ ID NO: 926443 - DNA, 120 bp, Artificial Sequence
  ENSG00000286961_21 (sequence is synthesized)
gagtcttatccctatgacttgctcaaagcagatattgtctattttttttgtctattaagaaaataacaaaattttaaaaccaaataagatcttggctaagataccatatgaaaggtgaat

SEQ ID NO: 926444 - DNA, 120 bp, Artificial Sequence
  ENSG00000286961_22 (sequence is synthesized)
acacacagacccaaacaagtccaaaagattgcctgtcataaagttaaaactggaatcagaactggcaacctggacttctgacttgtgattcaggatatatttcaccatctagactgctac

SEQ ID NO: 926445 - DNA, 120 bp, Artificial Sequence
  ENSG00000286961_23 (sequence is synthesized)
gcagtctcagaaaaaaaaaacaaaaaaaaacttagattgatttcaaagaggccaccacacatgtattctttcttccaaagccttgttttattcttaccttattcttcaacctctagtata

SEQ ID NO: 926446 - DNA, 120 bp, Artificial Sequence
  ENSG00000286961_24 (sequence is synthesized)
cacatatacagctcataattgaaatgatgtattttcctgtccttatgctaaacaattttaggaggtttttttcctgttttggggttaaaaagtactaaaattaggcaagatcatttagct

SEQ ID NO: 926447 - DNA, 120 bp, Artificial Sequence
  ENSG00000286961_25 (sequence is synthesized)
gctttctttaggaaatacttgcttcttgaagacctcgaagcaactgaatagatctctcatcaggacttacagcttactcttcagtacttgcctgaataccatctcctctctagcccctca

SEQ ID NO: 926448 - DNA, 120 bp, Artificial Sequence
  ENSG00000286961_26 (sequence is synthesized)
atccacagttattataccattaactacctaatctgaactggctccttgaattgcatggctcgagttaaaacttctcgcatttattatgaaataatttttaaatgaaaccctataaatatc

SEQ ID NO: 926449 - DNA, 120 bp, Artificial Sequence
  ENSG00000286961_27 (sequence is synthesized)
ggtctattttttctcccttctgattaagactgtcatgatggtgttatcccactattagagttctccagataaatagaaacaataggatgtgaatttatatatacagagacatttatttta

SEQ ID NO: 926450 - DNA, 120 bp, Artificial Sequence
  ENSG00000286961_28 (sequence is synthesized)
agaagttggctcatgcagttgtggatgctggatagtccgaaatctgcagggtaggtgggcaagctgggaactcagagaagaactgatgttgtgcttcaagttcaaggctgtctactggta

SEQ ID NO: 926451 - DNA, 120 bp, Artificial Sequence
  ENSG00000286961_29 (sequence is synthesized)
gaattccccttatctagagggaggtcactctttttcttaaggtcttcaactgattggatgaggtccacccaccttgtggatggtaatctgcttcattcaaagtattcaatgttaatctca

SEQ ID NO: 926452 - DNA, 120 bp, Artificial Sequence
  ENSG00000286961_30 (sequence is synthesized)
tctgaaaataccttcacagcaatatccggatgtgtttgattaaatatctgggatgtggtctagccaaactgacacatgaaattaaccattgcatcctttgtagcaatgaataaaataaat

SEQ ID NO: 926453 - DNA, 120 bp, Artificial Sequence
  ENSG00000286961_31 (sequence is synthesized)
agggtactatggcatctgctgtggaaagaagatagatctaggtgatggttaagtctaagacaaaggaggagtaaaatcatcaaggaaagcaggagagagggaaggaagtggaaagcagac

SEQ ID NO: 926454 - DNA, 120 bp, Artificial Sequence
  ENSG00000286961_32 (sequence is synthesized)
aatacagtttgttggttaactatagaatctaaataggtgataagattcatgagaaaagtttcttctgttttgtgaattgtaatattctcagtgcctaaaacaattcctaacaaatagcag

SEQ ID NO: 926455 - DNA, 73 bp, Artificial Sequence
  ENSG00000286961_33 (sequence is synthesized)
aatattctcagtgcctaaaacaattcctaacaaatagcaggtaccagtaggtatttgaaaaaagcgtaaatgg

SEQ ID NO: 926456 - DNA, 120 bp, Artificial Sequence
  ENSG00000286961_34 (sequence is synthesized)
agaagcctgagaagatgagagagtcaagtccttagagggactgaaagcagagacataacggcacaaaacgagatgggaaagtgacggagcaatacatgagtctgtaatgagtgtaattga

SEQ ID NO: 926457 - DNA, 120 bp, Artificial Sequence
  ENSG00000286960_0 (sequence is synthesized)
caatgccaagaaatgtaaaaatttacagcacgaattaaagttaccagaagacacacctgaggagagactgccatgctgaaaacaagccaagcctcaacccccactgaggcatttacatga

SEQ ID NO: 926458 - DNA, 120 bp, Artificial Sequence
  ENSG00000286960_1 (sequence is synthesized)
agtcagaggctagcaggagcaatgccagtggtagagagaactcaaagggggaagagccaggccaggccaggggacttttaccacatagcacaaaagaaatcgagacctagagaggtgaaa

SEQ ID NO: 926459 - DNA, 120 bp, Artificial Sequence
  ENSG00000286960_2 (sequence is synthesized)
actgtaccaggcaactgggatataatttaatacagaaaggggtgatttgagattatacactttaccctgccatcaatgcatgtatataaaaactgagtcctagagaatgaagtgagttgt

SEQ ID NO: 926460 - DNA, 120 bp, Artificial Sequence
  ENSG00000286960_3 (sequence is synthesized)
ccacaattaggagcagagtggggattagaaaccagttgtcagtttcccgggtcagggatctttccacacagttccagagaggaagtcctggctccaggcagaggaatgaatgtttcactc

SEQ ID NO: 926461 - DNA, 120 bp, Artificial Sequence
  ENSG00000286960_4 (sequence is synthesized)
cacatttctagaaggcccagagtgaaatatcccttttcctggggaagttcgtaggtgagctgctgctatcagctagcatttactccctaggctgttttgggagaaaggggttttcaaaaa

SEQ ID NO: 926462 - DNA, 120 bp, Artificial Sequence
  ENSG00000286960_5 (sequence is synthesized)
tcttgtagctgggaatttaactcaggctgtatggactctgagtctactctccccacaggcagaggttggctgtatggccaagtagagtctaggcctaggccactcagcctcgtacctcaa

SEQ ID NO: 926463 - DNA, 120 bp, Artificial Sequence
  ENSG00000286960_6 (sequence is synthesized)
aagtcaggcattgccttaaggggaagaacaaccatgcctcaggcatggttgttctggagtatggagtggattctacagcggtgggtgggtgaaggagctcaacatctgatcagcaccacc

SEQ ID NO: 926464 - DNA, 120 bp, Artificial Sequence
  ENSG00000286960_7 (sequence is synthesized)
agtccctgagacagtttgtacagattagaaaaaggcaccccttcatcaagatgatttactacctgccatctgccagaaaagtacaatacatatacaaatcaacaaagacaggatatgcat

SEQ ID NO: 926465 - DNA, 120 bp, Artificial Sequence
  ENSG00000286960_8 (sequence is synthesized)
ggcgcgccctggagttgcacaatgcacacccgtaacaatcgcgtgaatcagcctctgagccaccctcacctcactctcctccatacagctgtgcaggtgttgttcttggagccagcagag

SEQ ID NO: 926466 - DNA, 120 bp, Artificial Sequence
  ENSG00000286960_9 (sequence is synthesized)
ccaaagacattccagcctcaggacatcctttatggtgcctctggccttcaacttctgctctgtccccatgggtgccacctcttacggggcaaatagatttttctcctagattctacaaga

SEQ ID NO: 926467 - DNA, 120 bp, Artificial Sequence
  ENSG00000286960_10 (sequence is synthesized)
ttcagagatcaccaatctggaaacactccaagaaaacaagtcttgcattcaccaagtcccagccccttgagtgcaaagcagaattgctcctgagcctagaatagaccagtgacttcctag

SEQ ID NO: 926468 - DNA, 120 bp, Artificial Sequence
  ENSG00000286960_11 (sequence is synthesized)
gccatggccagccaggccatgccaccattaacctctgtgtaaatggaggtggctgcctgcaaatgggacagcttccacggtcattgtctgtacttactgaagtatgcatactgcagttca

SEQ ID NO: 926469 - DNA, 120 bp, Artificial Sequence
  ENSG00000286960_12 (sequence is synthesized)
taattgaaaggaatgcaggtactagcttgtattttagcagagccttgaaaaaaaaaaactgagagaaaagcagatcagatactcaggctataatgtgttcatgcaaacacggttaattgt

SEQ ID NO: 926470 - DNA, 120 bp, Artificial Sequence
  ENSG00000286960_13 (sequence is synthesized)
ttttcacttgtgtggttttcgccatgaaaagatttttcatgttatttagttatcagaatcactttgagggaaacaggaatctttgttctcattttactcagagaaaataaaaaatgaagc

SEQ ID NO: 926471 - DNA, 120 bp, Artificial Sequence
  ENSG00000286960_14 (sequence is synthesized)
agaaagacttggccagggcctcaccctgagctgttacccagtttggattggaacctgaactcctcatccagtgctttcttggccataccactccccctgtactcctgttcttcagggctt

SEQ ID NO: 926472 - DNA, 120 bp, Artificial Sequence
  ENSG00000286960_15 (sequence is synthesized)
cctcagccagcacaggctcccagcccactgtcagtctcccttaccctggtttgcctaggagaagaggaaccagagatcttcagaaacatagcaggaaggagagtcttggatggcttggaa

SEQ ID NO: 926473 - DNA, 120 bp, Artificial Sequence
  ENSG00000286960_16 (sequence is synthesized)
gggtgaagctagttactgccttagaaggggccactctgcaccagccctgccaggagctgaagacaagcaatatcccatagagtccattttcttcctccattgtcagagttagtgggaaga

SEQ ID NO: 926474 - DNA, 120 bp, Artificial Sequence
  ENSG00000286960_17 (sequence is synthesized)
gttcctggaggtgaagctggaaaaaaagacagagcctaggatctggcatgccttttaaaccatctttaggagtttggacttggacccaggagcaacaggaaatccatcatctcttcccac

SEQ ID NO: 926475 - DNA, 120 bp, Artificial Sequence
  ENSG00000286960_18 (sequence is synthesized)
tctgactcagccgcaactgaaaggagaaaacggcaagagagagagaggcgggaggaaggaactgaagactcctgaggtggctgcagcactgccctggcttccagaaagctctcgagcatg

SEQ ID NO: 926476 - DNA, 120 bp, Artificial Sequence
  ENSG00000286960_19 (sequence is synthesized)
ctgggtctcctcagggaccaagaagacgaggtgcggaagctgctgctgggtaacagccttagtcataaaagtaacactgtgaaaaatccattttgtgggtaacaatgagaagttaataca

SEQ ID NO: 926477 - DNA, 120 bp, Artificial Sequence
  ENSG00000286960_20 (sequence is synthesized)
aagactcattgcccttcgttagtaaaaactttggcagtgaccttccaggctcccgggaagcctttggagaatgctgcttcaacccagaagcacttcatcatttatatgaatgaaaatgag

SEQ ID NO: 926478 - DNA, 120 bp, Artificial Sequence
  ENSG00000286960_21 (sequence is synthesized)
tgcaaacagattgtcgagatgtctgttcacatcacctcttttttcttgcaaggaatcccctctgtaattacattttgcctgtcagttcataaatttttcttattacaaactagccattat

SEQ ID NO: 926479 - DNA, 120 bp, Artificial Sequence
  ENSG00000286960_22 (sequence is synthesized)
tgattgctttttaaaagtactaaaactgggcccaaagcagtagatctctccgtaaattcaaaacacactgtcttcagtcccaatcactggtgaagagtgaaggggaaaatctcagagttc

SEQ ID NO: 926480 - DNA, 120 bp, Artificial Sequence
  ENSG00000286960_23 (sequence is synthesized)
actgcgggctctgcgcagaggcaggcctaccatacgttttggtttagagacttggctttgagggctgcatgttctaagccacaatgaaaataataaataaaggataaacttctttggcaa

SEQ ID NO: 926481 - DNA, 120 bp, Artificial Sequence
  ENSG00000286963_0 (sequence is synthesized)
ggggcaaaaggcatgataaatgagtagaagtcatggagaggtggagcttgcctccagacagaatgctaagaaggatgctgctgcacagtggggactgagccaactcactgttcaacaaat

SEQ ID NO: 926482 - DNA, 120 bp, Artificial Sequence
  ENSG00000286963_1 (sequence is synthesized)
aagcattggagggtctctagttccatagaaagaaggcaaatgaagaggacagaagaaggagagagaccttcccaccccatcagccctatgctgcagagagggatcccacatctacttctc

SEQ ID NO: 926483 - DNA, 120 bp, Artificial Sequence
  ENSG00000286963_2 (sequence is synthesized)
ttgcagaaaccaactggtggaagtgaccttctcatggagtgtccttcacaaggaccagtcctctgctcagagttcctgcatcctgggggccacttctgaaccagaccatgcccactccag

SEQ ID NO: 926484 - DNA, 120 bp, Artificial Sequence
  ENSG00000286963_3 (sequence is synthesized)
agccacgggcaaccaattactagactggccacacctgtgacttgtgtggttccgccttaagagatagactggagcaatcagattctcagtttgagaaatctgatcaaacacatggaaaga

SEQ ID NO: 926485 - DNA, 120 bp, Artificial Sequence
  ENSG00000286963_4 (sequence is synthesized)
cttgctgatttatggtgatgattgcagctgcaaagtcttgagctgccccgtcataaggagtaggagatgatgaccatcttggaggagggagatgctgtatcctggagaggccactggggt

SEQ ID NO: 926486 - DNA, 120 bp, Artificial Sequence
  ENSG00000286963_5 (sequence is synthesized)
aggaatcggccatctgtgctccgcttcaagttgtgctaccgattagtcacatcacttcacatctgtgctgcaccctcaccctcactgctaaactggtgacaataaagattgtggggaaga

SEQ ID NO: 926487 - DNA, 120 bp, Artificial Sequence
  ENSG00000286962_0 (sequence is synthesized)
aggcatgaacttggcttctgctagcagctgctctgacaggtttagggctgtttgatgaagtgtgcatcccttatttgcatgcatttggaagaggaggaggaagaagaaaagaggagaagg

SEQ ID NO: 926488 - DNA, 120 bp, Artificial Sequence
  ENSG00000286962_1 (sequence is synthesized)
caaaggagagcctgggatgggtcctggatcatggagcgggtgagaacctgtactgggatcgtcagtccccttgttggtgagcctggagctcgtgcgtctgcctccctgctggattgaggg

SEQ ID NO: 926489 - DNA, 120 bp, Artificial Sequence
  ENSG00000286962_2 (sequence is synthesized)
ccccacacgcagcgagatgctcaatagacatgtgatccttcccgtcccccagcagcagctttgtgggaactgaggctcgggttgtggactacctggcacaaggactctcggggatttgct

SEQ ID NO: 926490 - DNA, 120 bp, Artificial Sequence
  ENSG00000286962_3 (sequence is synthesized)
ttcttctgctgatgggagagatggaataaaacctgcctgctggagggggaagcagaagggacccatggctgacagcatacatcctccacgcactcagtggggaatgaagctgccactgcc

SEQ ID NO: 926491 - DNA, 120 bp, Artificial Sequence
  ENSG00000286962_4 (sequence is synthesized)
ccaagacacaggctggagacaaggcagttttggccaaaccctcttcaactccagtagctgggaaagagctggccacccctggtagtgaggaatggggtgcaagagccaggaagactcagg

SEQ ID NO: 926492 - DNA, 120 bp, Artificial Sequence
  ENSG00000286962_5 (sequence is synthesized)
tgaaaagccacgctccatctgtggcaatgtgaacaggagtaagggactcgagctccacgggccaccatctccttgcttatgtaatggggtggtttctttctgactgccctgcatggaagc

SEQ ID NO: 926493 - DNA, 120 bp, Artificial Sequence
  ENSG00000286962_6 (sequence is synthesized)
acagtgaccaagtgatctctgaagggcccagcacagaggtccccatgctgaccgtaagccaccgatggggtgatactgtacacagacagtgtacatttgaaagaactcccaagggggtca

SEQ ID NO: 926494 - DNA, 120 bp, Artificial Sequence
  ENSG00000286962_7 (sequence is synthesized)
gacttggcccagcccggaagcctgcatgtgctgttcttcctatctgggtgcctctctctctcttcctgtccatggttaacattttcattatggctgacaaagagctttacttctcatccc

SEQ ID NO: 926495 - DNA, 120 bp, Artificial Sequence
  ENSG00000286962_8 (sequence is synthesized)
ccatgcccacatcctccacaaaactagatgccttcttctggacagcctgctctgtctgtctttagcatctcattgtcatccggtcacccaaatacctctcacccaaagaaccccagaagc

SEQ ID NO: 926496 - DNA, 120 bp, Artificial Sequence
  ENSG00000286962_9 (sequence is synthesized)
agaactcacggcggcctgatggcacactggattctacaatagcttctcttttcagcatgttggacctgcccacattaacttccccattgtcttgatttccccaagttacaaactctatag

SEQ ID NO: 926497 - DNA, 120 bp, Artificial Sequence
  ENSG00000286962_10 (sequence is synthesized)
gctgtgccactgctgtctgcagctcccatggcaccgattccagggcctcgcacttagtagacacacagtaaacactgccgacttaacaagtgagttcataatgtgaccgctaagctagct

SEQ ID NO: 926498 - DNA, 120 bp, Artificial Sequence
  ENSG00000286962_11 (sequence is synthesized)
ctcggaaaggatgtagtggggaggccagaatggacactgagagaccccagtcagagtcaaggccctgccacatctagcaaggtaccacctccaccagcttcactttccctgtctcaaaga

SEQ ID NO: 926499 - DNA, 120 bp, Artificial Sequence
  ENSG00000286969_0 (sequence is synthesized)
ctggacctgcagatagcagtatctgattatgcaggccatatagaacatgcccttcctgctgacaaattacttcagttcttacctcatactcctgtagttatgcctacaaagcacgatgca

SEQ ID NO: 926500 - DNA, 120 bp, Artificial Sequence
  ENSG00000286969_1 (sequence is synthesized)
tcaaatcataccatggtgtggctaggacccaacccagtaggagaaatgaagggaatgaccctacaggacctgcagccccggatgatgcaacttccttggatgacacgagccctggacatt

SEQ ID NO: 926501 - DNA, 120 bp, Artificial Sequence
  ENSG00000286969_2 (sequence is synthesized)
acaacccaggaggctgagcaaatcctaccctggacacagacaccattcactccagataatttgttccttgctatgctttctgttgtacattgcaactcttgtaggatattggcttttctt

SEQ ID NO: 926502 - DNA, 120 bp, Artificial Sequence
  ENSG00000286969_3 (sequence is synthesized)
attttctcactctggttgcaactggtacctgctacactctattaagcccatcttctaaatctgcctttcttctgcactgttacctgtgcagatactcccttcccagcctctaataacgta

SEQ ID NO: 926503 - DNA, 120 bp, Artificial Sequence
  ENSG00000286969_4 (sequence is synthesized)
accgcttggctaggagggattgacctacccgccatgggtttccttagtaatggcacagattggactgaggagccaagcaacactacatatcactccttgactggaaaagaatgttacgaa

SEQ ID NO: 926504 - DNA, 120 bp, Artificial Sequence
  ENSG00000266304_0 (sequence is synthesized)
ggacagaggccagactgcaacttaagctatctggaatcttacctctgctgtcttactggctgtctacatggggctacattttaactatggcttacagaaatcattgcctgtcaacagcct

SEQ ID NO: 926505 - DNA, 120 bp, Artificial Sequence
  ENSG00000266304_1 (sequence is synthesized)
tcttgggaatggactctgacaaactcaccatcaggaaagttgatgtttcccatctaggatggaagaatgggattctgaactttgtcactgtttctgaaacgtcatcagctcctgtaattg

SEQ ID NO: 926506 - DNA, 120 bp, Artificial Sequence
  ENSG00000266304_2 (sequence is synthesized)
catggttgggacagatctatttaaattgctttgaagttttcccaggaaattcccacaaaattgtgcaacccaaggaattgaggtggaaaaaatggcactggcatcaatttgcttctcacc

SEQ ID NO: 926507 - DNA, 120 bp, Artificial Sequence
  ENSG00000262413_0 (sequence is synthesized)
tccttcaggggcatttatttcccggtcagaaaagaagcagggacaggcgcctctgcctgagcctggcagacacaacacgaagaccggggatggggcgggggaggcacaggagacggctct

SEQ ID NO: 926508 - DNA, 120 bp, Artificial Sequence
  ENSG00000262413_1 (sequence is synthesized)
atcgagggctcttgggggggtgtgggctctgggcactgcccgctgagacagaaaaggcagaggcaggacaatacccagcctcctggatggtactgaggtgacttgagttttggcaatttg

SEQ ID NO: 926509 - DNA, 120 bp, Artificial Sequence
  ENSG00000262413_2 (sequence is synthesized)
gctttccccaagccgccggagccatctccacagccctgtccagggaagggggcaggctggccaggcactggtgggctggggagcagcagcagcacaccccacgtgtccctgggtcactgg

SEQ ID NO: 926510 - DNA, 120 bp, Artificial Sequence
  ENSG00000262413_3 (sequence is synthesized)
agcaatgtgtgcacttggtcccttgtttgttcctggctgggtcagggaaggcctgccgggggtggtggcactgagagcctgggggaacaggcgccaggccagctggccaggcactggtgg

SEQ ID NO: 926511 - DNA, 120 bp, Artificial Sequence
  ENSG00000262413_4 (sequence is synthesized)
tgcagacacagggagttagaggctagtgaggccccacggtacactccacatgttaaggcatcatggttagacgggaccgacagcgacaagggggctggccagggagcagcggggctggag

SEQ ID NO: 926512 - DNA, 120 bp, Artificial Sequence
  ENSG00000262413_5 (sequence is synthesized)
gacggcccggcccccacgaggccgtgcatcccacaccccagctccaccccggagcagcagacgcacacgtccaggggcaaccacggggcctggagaatggctgctccgctccctcctgaa

SEQ ID NO: 926513 - DNA, 120 bp, Artificial Sequence
  ENSG00000262412_0 (sequence is synthesized)
agagaatgaagtttctttctgtctcttaagtgatgtgtgagtggatggacagattgccctcagctttaagggcagttcaggatgatctgtcttaagatcgatgctctgtggaatgagaaa

SEQ ID NO: 926514 - DNA, 120 bp, Artificial Sequence
  ENSG00000262412_1 (sequence is synthesized)
aatgcgctctgcagggcatgcccactgcatgtgctgggaggctctcctacatccaatgggcagatgcgcagtctccacggaggcctcaggcctcggtgtgagccagggctgcttcaaaca

SEQ ID NO: 926515 - DNA, 120 bp, Artificial Sequence
  ENSG00000262412_2 (sequence is synthesized)
tgtcggctatctaaagtccagcatcttccggtgactctggaggaagaggtgggcccccgtgctggatagtgggaggttctacatcattacctggtcctgagagctgagctgtagcctcct

SEQ ID NO: 926516 - DNA, 120 bp, Artificial Sequence
  ENSG00000262412_3 (sequence is synthesized)
ggtggactggagaagttcccacctctgcactaggctctgttgctatggtgagctgcatgtctggaggcttaacagagacattgggcaaatctgaatgctgagtttgatggtgacctggag

SEQ ID NO: 926517 - DNA, 120 bp, Artificial Sequence
  ENSG00000262412_4 (sequence is synthesized)
tctcctgctgggctggagaagattcaacctccccagaaggctgagctggctgctcctgctcactgggggaaagttcaggctctacaggaggacctggaggctcagttggggcctcctctt

SEQ ID NO: 926518 - DNA, 120 bp, Artificial Sequence
  ENSG00000262412_5 (sequence is synthesized)
ggtttgcaggaggttccatctcttctggaggctgagctggggtctcctgccgagtctgagaagattcaacctccccagaagactcagaaggctgagctggctgctcctgctcactaatgg

SEQ ID NO: 926519 - DNA, 120 bp, Artificial Sequence
  ENSG00000262412_6 (sequence is synthesized)
aaagttcacgctccgtaggatgacatggaggctcggttggggcctactgttgggttgcagaaggttccacctcctctggaaactgaactggagcctcctgctgggcttgggaagattctt

SEQ ID NO: 926520 - DNA, 120 bp, Artificial Sequence
  ENSG00000262412_7 (sequence is synthesized)
tctcattggtaggctccgaagttatggtaacctccacatctgcaggtttaactgtaatgttgggcaagttataatgagcttgatcctcacctggaggttgaactgtcacctcatgatttg

SEQ ID NO: 926521 - DNA, 120 bp, Artificial Sequence
  ENSG00000262410_0 (sequence is synthesized)
tgatctctcttgcttttccccacactctcactcagcataatcatgctgatatttatccaagtctaaaatcctttgatattcatccgtgatacacatccatgttgcatgtgtcaaaagccc

SEQ ID NO: 926522 - DNA, 120 bp, Artificial Sequence
  ENSG00000262410_1 (sequence is synthesized)
gcccattcccctgtacggatctaacacagcctgtttatccattcacatgtggatggatttctggatcatttccagtttttgctcatacaaataaagccgctgtgaacctttgtgtacaaa

SEQ ID NO: 926523 - DNA, 120 bp, Artificial Sequence
  ENSG00000285570_0 (sequence is synthesized)
ggtggagccaagacaccgaggctctcctcccgtcccatttctgagcttgggggtcaagctgtctttctgcagggagtccagggtccagagggactgactaggagagaatgtgagcagaag

SEQ ID NO: 926524 - DNA, 120 bp, Artificial Sequence
  ENSG00000285570_1 (sequence is synthesized)
acgttcgggtgagtcaactcgacgttgagggcctgaggagggcacgtggctcagagagaccctgcagggaggacaaacagactgaagacagacagcaggattggggccttgaatcttact

SEQ ID NO: 926525 - DNA, 120 bp, Artificial Sequence
  ENSG00000285570_2 (sequence is synthesized)
cttcagctggggcctgggggtgtaccagaccaccacctcatccactgaggacaggggccagaatccagagaagatgaggagggagtggcatctaggctttccaaagagaaaatttctttt

SEQ ID NO: 926526 - DNA, 120 bp, Artificial Sequence
  ENSG00000285570_3 (sequence is synthesized)
gcagcattccagacctgtcttagatccagactcactcctatagtccagggagaggggtgccttccctccctcccctctcgcccaacccagccgaactaccgtctctctgttgagtgcagg

SEQ ID NO: 926527 - DNA, 120 bp, Artificial Sequence
  ENSG00000285570_4 (sequence is synthesized)
aattgaaggcagcaggcctgcccttacgctcccagtggctggggtccttaactaacgtccatctctcccccagagtcctctcccagtcaccaggtcctggcactctcccctgccccagat

SEQ ID NO: 926528 - DNA, 120 bp, Artificial Sequence
  ENSG00000285570_5 (sequence is synthesized)
gtctagcccagttggcccagagggcacacagaaggtgggctggaaaagtgggaaaggcagtctggattgacttagttttccccacctttgaccaacacacccaattgggctgcagccgat

SEQ ID NO: 926529 - DNA, 120 bp, Artificial Sequence
  ENSG00000285570_6 (sequence is synthesized)
ctatggtcgggggaggtaggtgggaacctagatttttggaaatgtgggattggggtttcacacgaaaccatttgttgaaatccaagaaagtgataattatccctagcgattttagaactc

SEQ ID NO: 926530 - DNA, 120 bp, Artificial Sequence
  ENSG00000228730_0 (sequence is synthesized)
tttattctacacatggaagctttactatagttataaaatataaatgtgatcatgtaatttccctgcttaaaacactgtagtgttactccaatgtcatctggataaatccacacttgttat

SEQ ID NO: 926531 - DNA, 120 bp, Artificial Sequence
  ENSG00000228730_1 (sequence is synthesized)
catactttggacttcttagcatggttcaggaggtttatttcaagtatcaacctctcctacacacacacacgcacaccacctgatgttcctcacagtgagtgtctatcatggctgtaaacg

SEQ ID NO: 926532 - DNA, 120 bp, Artificial Sequence
  ENSG00000228730_2 (sequence is synthesized)
ctattgcccaggacactggacctgcaatgcctcctatgagactacatacagtgggcgtgttatggatggctgaagcacagcacggtactgttgtaacaagaaacagcctcttctgtaagg

SEQ ID NO: 926533 - DNA, 120 bp, Artificial Sequence
  ENSG00000228730_3 (sequence is synthesized)
gacaaattgccgagagtgcagcttttggtttgagtaaaacagaaaaggagaaaattgacccacatgtgccaataaaaaagaacatcatttaaataaaagacccgtattaaccatttaaaa

SEQ ID NO: 926534 - DNA, 120 bp, Artificial Sequence
  ENSG00000228730_4 (sequence is synthesized)
attggtaactggagctaaatctttctggggaaccctagaactctagtgggacagagtttatgggtatattatcgagtgagaggaaagtgaaatattgatctgtcatcttcctttatgtta

SEQ ID NO: 926535 - DNA, 120 bp, Artificial Sequence
  ENSG00000228730_5 (sequence is synthesized)
tttgttgagggttgtttctggggcaataactattgcacttctagttttccttgagtgtagacccaatatgctcctacagtcagaaaaacacaaatccacaggcaaatagctgcatgtgtt

SEQ ID NO: 926536 - DNA, 120 bp, Artificial Sequence
  ENSG00000228730_6 (sequence is synthesized)
cacagtaagacttaaaacaagaccgtattttccaaattattgtttatcatcatggagatacccaagctatttccaagtcttgttgtttctctatcctcaatatctctagaatacagtcaa

SEQ ID NO: 926537 - DNA, 120 bp, Artificial Sequence
  ENSG00000228730_7 (sequence is synthesized)
ctttgggaggagcctggtttacagtctacagtctaaaacaaagatgaaaacagctgcttcccaagataacttccctcttgcctggggaccagaccaagaaactagccacaggattagaaa

SEQ ID NO: 926538 - DNA, 120 bp, Artificial Sequence
  ENSG00000228730_8 (sequence is synthesized)
ccatggcccaggagccatgcagctggaggttacaagattttgaccctccctaaactgctctcaagattggtgcttaagatattttgtaaaccatgcccttgatgatcagttggcaccacc

SEQ ID NO: 926539 - DNA, 120 bp, Artificial Sequence
  ENSG00000228730_9 (sequence is synthesized)
cagattgacaaactggcttatctgatttagcaccagaagacagccactattgtaaaatagcagagactaaaacaaagtattgccatgcagttacagattatgttcccaaggacatgaaac

SEQ ID NO: 926540 - DNA, 120 bp, Artificial Sequence
  ENSG00000228730_10 (sequence is synthesized)
cctaagataccctttctttgacagaaccatagagaaagatgtgcaaagcacccaagattgtctacagcttaagaccaacaagttctttttcattaattatacatttacagagaacataaa

SEQ ID NO: 926541 - DNA, 120 bp, Artificial Sequence
  ENSG00000234736_0 (sequence is synthesized)
ggactcagccactatgttgtgaggaagcctaggccacatggagaggccacatagatgtgttccaggcagcagccccagcaaaggtctcaatcaaccaccatatgtgtgagtgaaggaacc

SEQ ID NO: 926542 - DNA, 120 bp, Artificial Sequence
  ENSG00000234736_1 (sequence is synthesized)
ttcagataattttgcttcccagacttcaagtctttcagctggggtccaagacatcacaaggcagagacaagccctcctggaattccccacccaccgtgagcataagaaaacttgaaagcg

SEQ ID NO: 926543 - DNA, 120 bp, Artificial Sequence
  ENSG00000234736_2 (sequence is synthesized)
gtgtaaatggctcttatctgaaccacaatgaattcacatattcaagttggcttcttcggaaatttcaggccacaaatggcagtgatgcgaccaggagcagtaacacgtgccacttccatc

SEQ ID NO: 926544 - DNA, 120 bp, Artificial Sequence
  ENSG00000234736_3 (sequence is synthesized)
cggacagaaggaacccaggtcaaggctgacaggaggagcaggagccgtcaatgagagcagacctcagaagccaacggaggtgagaagagcaccatccacagccccatcctctgaatgctg

SEQ ID NO: 926545 - DNA, 120 bp, Artificial Sequence
  ENSG00000234736_4 (sequence is synthesized)
agtccacaaaataccaccccttggagtcagtcagtagtagagcccttgctgctggctgcaaataccccatcagaacatgtttggggtgattcttggacctggtttcaatttcttttctgc

SEQ ID NO: 926546 - DNA, 120 bp, Artificial Sequence
  ENSG00000234736_5 (sequence is synthesized)
cagtcagcagttgtgcttgactcacaatttgttgccatctcttgaattaaactcaggaaacaggataaagatcagaaccacattgtaaaagcttccttatggttcattttttgctgagat

SEQ ID NO: 926547 - DNA, 120 bp, Artificial Sequence
  ENSG00000234736_6 (sequence is synthesized)
aaataatgagcagctctgatccatgtctctggagagctcagagcacactaccaggagctcctagccacagggtgagcacaggtggctggtgttctcttgatgaggaaagacagcagtgtc

SEQ ID NO: 926548 - DNA, 120 bp, Artificial Sequence
  ENSG00000234736_7 (sequence is synthesized)
caatctaccctgccttacacggagccccaggtgctctcccggactgtgttgctacctaaagcacatggcaattgcatgatgctaaccagagcagcccctcactcattagaaacatctgct

SEQ ID NO: 926549 - DNA, 120 bp, Artificial Sequence
  ENSG00000234736_8 (sequence is synthesized)
ttgcattatttacacaggcaaagttttcctttttactgagcctacccagttcaaacttaagtgggatttgccagctatctggctaattttatgagcaataataaagattggtgaacactt

SEQ ID NO: 926550 - DNA, 120 bp, Artificial Sequence
  ENSG00000234736_9 (sequence is synthesized)
attacatgttattcttaacacctgccacttctctcttcccacctctatctgccttattgaacttcatctttccttcattctcttcaacttccacttcttcttgtatggtcctgttgatgc

SEQ ID NO: 926551 - DNA, 120 bp, Artificial Sequence
  ENSG00000234736_10 (sequence is synthesized)
catcttgtttccgtccccagactcatcatctttaccctctgtcaactgagttcccaccctggttctctctcaagatcttcctctcatagctttcacccttggtaaacaatgaggacacat

SEQ ID NO: 926552 - DNA, 120 bp, Artificial Sequence
  ENSG00000234736_11 (sequence is synthesized)
ctcaaaaagaatgatgtaatttaattgccttgagttggctgggccatcatctattataaagtgctcttaaaattaaagctaatttaattctgaagaactaaggattaagaagttaagagc

SEQ ID NO: 926553 - DNA, 120 bp, Artificial Sequence
  ENSG00000234736_12 (sequence is synthesized)
tggggttcttacaatatggcttgcagactacaagtgtgaactgaggaggtccccaaagtcacttcttactaagtgaaagcggtgtaaatggctcttatctgaaccacaatgaattcacat

SEQ ID NO: 926554 - DNA, 120 bp, Artificial Sequence
  ENSG00000234736_13 (sequence is synthesized)
tgctccatcatcatttcatgattctcactacagcccagacaggtgggcagagcagtgttctttcccctttaatgaatgaagaagctgagcctcaaacagatgagggggcttcctgggttc

SEQ ID NO: 926555 - DNA, 120 bp, Artificial Sequence
  ENSG00000234736_14 (sequence is synthesized)
acagagctctaaagggctgagctgtagatccacggccaccatgatgagctaagagtttctggattcagtgcctgctgttgctcctggagatttgtatcctgattgaaggctggttccata

SEQ ID NO: 926556 - DNA, 120 bp, Artificial Sequence
  ENSG00000234736_15 (sequence is synthesized)
gcaacatcaacatcccccacacacccagcaccgaggaataccctcctctctagaatgtgaggccactgtgtggaggaagacaccacggtgctctactgagccatgaaagtcacgcctgac

SEQ ID NO: 926557 - DNA, 120 bp, Artificial Sequence
  ENSG00000234736_16 (sequence is synthesized)
cgcttcagcctcaatcagcctgataaaatgttcacctgccatctctctgctctgcaacacgctggcacttcactcatttcctccaacaagcttcttaccacttccctctgtggctaatct

SEQ ID NO: 926558 - DNA, 120 bp, Artificial Sequence
  ENSG00000228734_0 (sequence is synthesized)
atttaagtgaattttgaaaatattttaaatgtctcccgcaaaaaacaaaatacagttggtcctcaaacaatgtgagtttgaactgagtgggtccacttaacacaataattttttgcaata

SEQ ID NO: 926559 - DNA, 120 bp, Artificial Sequence
  ENSG00000228734_1 (sequence is synthesized)
agtatagtcagccctccataccagccagttccaaattcacaaccaaacacagattgaaaattcagtattggagggatgcaaatcccacgtgtaaagagggccgactttgcatatccacga

SEQ ID NO: 926560 - DNA, 120 bp, Artificial Sequence
  ENSG00000228734_2 (sequence is synthesized)
tttctgcagtaccgatggcgggactggagtatgagcagattttggtatccacaagtggttctggaacaaattccccacagatactgaggaacgactaaacggcctagacctgatccaaag

SEQ ID NO: 926561 - DNA, 87 bp, Artificial Sequence
  ENSG00000228734_3 (sequence is synthesized)
ttggcccataatagagacagtttcactctcgttaccaaggctgaagtgcaatggcaccaactcagctcaccgcaacctccgcctcct

SEQ ID NO: 926562 - DNA, 120 bp, Artificial Sequence
  ENSG00000228734_4 (sequence is synthesized)
tcccgagtagctgggattacaggtatgagtcaccacgcccagcccagtttctgttttgactagatggtttggatataatcctagtaaaatctgatgtacacccaacttgccttttctaca

SEQ ID NO: 926563 - DNA, 120 bp, Artificial Sequence
  ENSG00000228734_5 (sequence is synthesized)
taaaatctgatgtacacccaacttgccttttctacaagtctgtgaacatttgattggttgaaatgatacctaaatgtcttaggttgagccacaacaagctccactaactttcaatagtaa

SEQ ID NO: 926564 - DNA, 120 bp, Artificial Sequence
  ENSG00000228734_6 (sequence is synthesized)
agcttagagcatgtctgtagccctaaaaaatgtgagaatattcagatcaactttctgtgttgaatttcatctcctcatttctatttgttcatctacaagtttatttctgtaattctattt

SEQ ID NO: 926565 - DNA, 120 bp, Artificial Sequence
  ENSG00000228735_0 (sequence is synthesized)
ggtgacactggattctctccatcatggagggggtgggcctttgcttgggaaaacacaggctttctgcatgtgggttttcctctctatgatcgtgcttttgccggcactattatcccaaca

SEQ ID NO: 926566 - DNA, 120 bp, Artificial Sequence
  ENSG00000228735_1 (sequence is synthesized)
ttgcctctgattaatgtgcttattgcacagaggacatgcgttgaaggactcaggcccagaggactcaccatactacacctagcttccctctcacccagaagcagctaacctgatgaaaca

SEQ ID NO: 926567 - DNA, 120 bp, Artificial Sequence
  ENSG00000228735_2 (sequence is synthesized)
aatgccctggccttgggaagacttagctatatcctaattggagccaacacccagaaaaaaagaagcactgtcctaaagatagtagatgatttgaatcagcgtgtgatatggggtgctgat

SEQ ID NO: 926568 - DNA, 120 bp, Artificial Sequence
  ENSG00000228735_3 (sequence is synthesized)
gaccaagtgggagtgttttctccactattacacaagatttctcacttacagaatttttatattcttcctctatcaagctctactacctttggttccaacggaaacatgcctgtaccaggg

SEQ ID NO: 926569 - DNA, 120 bp, Artificial Sequence
  ENSG00000228735_4 (sequence is synthesized)
ccagcaccctcgaacagtgactgacaggagctggtatttatatattccagattcttctttggctggagacaaccctgaggtgtgtgtttcatgctatctgaaacccccgtgggattaaac

SEQ ID NO: 926570 - DNA, 120 bp, Artificial Sequence
  ENSG00000228735_5 (sequence is synthesized)
tcctgttgcatgtagtggtaacgagtttgataacacattctgcctacatttttttaatcttatttcctcctcctctactggtggttcctgaaactcttaaataaattgattagactcaaa

SEQ ID NO: 926571 - DNA, 120 bp, Artificial Sequence
  ENSG00000228737_0 (sequence is synthesized)
agaagagaaaatggacccagaagaggggaccaaaaaagaggaggcgtgttcgggtactggaggaagaagaaaggaaagcacctacataatagctgcccaatctcttccctgctctgagcc

SEQ ID NO: 926572 - DNA, 120 bp, Artificial Sequence
  ENSG00000228737_1 (sequence is synthesized)
caggggtttagtctgcagagctctgagagtgtaaaatttcccatgtgccttcaaaccaggtcattctggaatctgcgatgtctcatatgtcctgaaaccaaccagcagaggggagcaggc

SEQ ID NO: 926573 - DNA, 120 bp, Artificial Sequence
  ENSG00000228737_2 (sequence is synthesized)
ccatgtggccatatctgagggacaccctagctcacactggacaacaggggaggaaatcaggagagtgctcaccagcagcgggcaacatttcggacagtataaccaccaccacccagcacg

SEQ ID NO: 926574 - DNA, 120 bp, Artificial Sequence
  ENSG00000228737_3 (sequence is synthesized)
agtagagggatattgaagctcttgacatattcaacgcattccctgttaaaaggaaccagaggaagatgtggaggaggttatcaaaagacaaggtaaatacctttaggtattgcctgaaag

SEQ ID NO: 926575 - DNA, 120 bp, Artificial Sequence
  ENSG00000228737_4 (sequence is synthesized)
gagcacaagaaaactataaatgttctaaatctttatcttgatagtgaaattcattatgttatacccttaagatttgggtatactttatatgctgtgtctcaataaaaattttaaaataaa

SEQ ID NO: 926576 - DNA, 65 bp, Artificial Sequence
  ENSG00000286349_0 (sequence is synthesized)
taattttctgtatttttagtagagatggagttccaccatgttgggtaggctggtcttgaactctc

SEQ ID NO: 926577 - DNA, 120 bp, Artificial Sequence
  ENSG00000286349_1 (sequence is synthesized)
gtgctgggattacaggcgtaaaccactgcacccggcccctatgctactttttaaaaatatttttatatttccataatagtcatttaatttatatgtcagcattttcccatttttgtgata

SEQ ID NO: 926578 - DNA, 120 bp, Artificial Sequence
  ENSG00000286349_2 (sequence is synthesized)
gcaatctgactccaggtatatattaagcaacatggtttataagtgactttctatgtagcattaagggcaaaataaacaaacatgtctgaagctctcaaacaattcttagcacagaaaagc

SEQ ID NO: 926579 - DNA, 120 bp, Artificial Sequence
  ENSG00000286349_3 (sequence is synthesized)
agtgaaagaacatgaatgttgggaaggcaaaaagcaattccccttattctgcaggtccaggtcattttctctcctctacaactaatacaacctttcctggtagggattggcagtaataac

SEQ ID NO: 926580 - DNA, 120 bp, Artificial Sequence
  ENSG00000286349_4 (sequence is synthesized)
tcagttgagtcatactgttgctatatgtggtgagggaattttccagtgctgttaaccaatttatcattgctgttagaaccttaaacactccagctcatgcaagtctctaagagacagagg

SEQ ID NO: 926581 - DNA, 120 bp, Artificial Sequence
  ENSG00000286349_5 (sequence is synthesized)
gtgttgggattacaggcgtgagccacgacctccggcccgaatgtgcatctgcaatcaaagacatcatctggatgcttaccatagttgagatgacaaacggaaaaaatggtagagagagga

SEQ ID NO: 926582 - DNA, 120 bp, Artificial Sequence
  ENSG00000286349_6 (sequence is synthesized)
atagttgagatgacaaacggaaaaaatggtagagagaggagagaagtaagagagaatattactcctgccaaagcaagcccacttcttcagaaataacaagtgaagccagcatagaaacct

SEQ ID NO: 926583 - DNA, 120 bp, Artificial Sequence
  ENSG00000286349_7 (sequence is synthesized)
aaactatcagtgacatctactcaagtcttggcaaatacagaaaaggcccccaaaacatcaagagaggaattatcaccaggggctgctgaggagaacttacaccataaagaaaaaggaaaa

SEQ ID NO: 926584 - DNA, 120 bp, Artificial Sequence
  ENSG00000286349_8 (sequence is synthesized)
tgcattcaatcgagcccaactcatttgaacaccttgatactgaacactgtaacaggcatgggaaaaacgatgagcaagatgtgatcaccactctcaagataacctcagtctaattaaaat

SEQ ID NO: 926585 - DNA, 120 bp, Artificial Sequence
  ENSG00000286349_9 (sequence is synthesized)
tcaccactctcaagataacctcagtctaattaaaatggggctccaggaactgcacttgaaagccccagagtattgggaggccgaggtgggtgggtcacgaggtcaggagttcaagatcag

SEQ ID NO: 926586 - DNA, 120 bp, Artificial Sequence
  ENSG00000286348_0 (sequence is synthesized)
gggaccgtctgtagtgagaaaggaagtagaggcttcaactgcaaggcagcagaatgccaaaagcctgcacagaagcatcttgccaaggagatggaaagcggcctctcacaggggaccttt

SEQ ID NO: 926587 - DNA, 120 bp, Artificial Sequence
  ENSG00000286348_1 (sequence is synthesized)
agtatccctgaaggaccaaaatgcactcctaagtcctgggagtctcaatgataacgagcaaatgatgggtgaagctccacaaccatctctctcagcctttggatgagggagatctaataa

SEQ ID NO: 926588 - DNA, 120 bp, Artificial Sequence
  ENSG00000286348_2 (sequence is synthesized)
gcactgttctggcatcctgacctagaggaattttaaagctttgcaaaggcttgttaagagactacaacctattttgagtgactaaaatcctgccgatttcaatgttacaggcttctggga

SEQ ID NO: 926589 - DNA, 120 bp, Artificial Sequence
  ENSG00000286348_3 (sequence is synthesized)
aacagctcaggtagcaaaaatgccggcacatgatccctggtttcgcagctggcattctgactaaccagggattgttcagacaaacagctgcatctctctgagcctcagttttctcaccta

SEQ ID NO: 926590 - DNA, 120 bp, Artificial Sequence
  ENSG00000286348_4 (sequence is synthesized)
tgtatacccattatggacacactttctttagggtttcggtagttctacaacgaaatatgtataaagtgtggtggagagcaggtgtttgaaaaatgctcattcccttccctgtcctgctgt

SEQ ID NO: 926591 - DNA, 120 bp, Artificial Sequence
  ENSG00000286348_5 (sequence is synthesized)
atatcattcatacacagattagtgtctgattctgagctggttgtaccaggatgagacaattgagaagtaaatctgaagataaaagcaaagcgaagagctcaagtgagagatttattattt

SEQ ID NO: 926592 - DNA, 120 bp, Artificial Sequence
  ENSG00000286348_6 (sequence is synthesized)
catctttttggatggattatttggatatttcaggacaagagaaaatccccactttatgtttcctatcaatgagatgcttcttgagctataggctttcttcctggttcataaaccttttgt

SEQ ID NO: 926593 - DNA, 120 bp, Artificial Sequence
  ENSG00000286348_7 (sequence is synthesized)
atgacagtcaataaggatttgtggaccacactggagcaaggagagcagctgaattacctggaggaacattttgggtttgaacagcagttcatattttgtctatgcagaaagcgctattgg

SEQ ID NO: 926594 - DNA, 120 bp, Artificial Sequence
  ENSG00000286348_8 (sequence is synthesized)
aaaattttaaattgagtggcattatacaaaagatctccttcagttttgaagtctccatttgagttcccaagtctgcctttttgggtgccaggtccttcagaagtcatatggattcaagca

SEQ ID NO: 926595 - DNA, 120 bp, Artificial Sequence
  ENSG00000286348_9 (sequence is synthesized)
ggaaacagactctcaggagcaaaactgcgaatgccacccagtctgcagatccccacaaaggaaggaaacatcatgagcatacaatttcttcctctccctgtcccatgacttcaccctgtc

SEQ ID NO: 926596 - DNA, 120 bp, Artificial Sequence
  ENSG00000286348_10 (sequence is synthesized)
ctcttcggccagccaacaatctccacacttcagcccactccaaaatccttaacaaccctagtgccaaactcctcaggcagacggacttgaagttttctccaactcctcattcagtgaccc

SEQ ID NO: 926597 - DNA, 120 bp, Artificial Sequence
  ENSG00000286348_11 (sequence is synthesized)
tataattaaacttctttttctgcagcaaccccatgacttggtatattgatttgccacgtgcatcgggcaatgggcctgttatggttgtaattttgagagtagaatacatgaagataaaac

SEQ ID NO: 926598 - DNA, 120 bp, Artificial Sequence
  ENSG00000286348_12 (sequence is synthesized)
atgttccaattgatggcaatatgtgctccagaaagcactgagcctatgtgaagccttcagcaaggggtccttgaaaaggagtgacaccaagccatttattaaaagtaaggaatggttaca

SEQ ID NO: 926599 - DNA, 120 bp, Artificial Sequence
  ENSG00000286348_13 (sequence is synthesized)
tagagagtaagggatggttacacagattcaggaatgggcttaaactgaaaactataaaaattacaggaaagtctgtgtctgacaatgaagagttgattaagaagaaagactagcatccaa

SEQ ID NO: 926600 - DNA, 120 bp, Artificial Sequence
  ENSG00000286348_14 (sequence is synthesized)
agcaaggcttcaactggctcttctggaagaaaacgcctaagaggacctacaacagagacactggggcataaaacatggcaggacagatcaattctgctgctgtgtagcaatgatgcaggg

SEQ ID NO: 926601 - DNA, 120 bp, Artificial Sequence
  ENSG00000286348_15 (sequence is synthesized)
catataacaaagccaagcatagtgtacagaacaagaaacccttgtgttctcaaaaaacaaaaattatgtctctgtgttctggcaacataatcagaaagtgtgggtgacagccatcttgtt

SEQ ID NO: 926602 - DNA, 120 bp, Artificial Sequence
  ENSG00000286348_16 (sequence is synthesized)
tatggaatggttccaccaatgcttcatcccagaaatgacaaaatacttggaagaggaagggttgaaatttaagtcctattaataatagacaacgcacttggccatcctgaatctgtttgc

SEQ ID NO: 926603 - DNA, 120 bp, Artificial Sequence
  ENSG00000286348_17 (sequence is synthesized)
tgtgaaaatgaaaagtcaaggtcatatttttacctccaaatacaatcttattgcttcagctcatttacctgggcatcatttgatttgtcaagtcaatatacaactgcctgatatttgatc

SEQ ID NO: 926604 - DNA, 120 bp, Artificial Sequence
  ENSG00000286348_18 (sequence is synthesized)
acacatgatcagcaattaatgcaaacaccaatctgaacataatgcagtgctgatgcaacagcatttatcaaagctgcaatgaatggattacaaccagaagctgtaaatggctactggaca

SEQ ID NO: 926605 - DNA, 120 bp, Artificial Sequence
  ENSG00000286348_19 (sequence is synthesized)
gacttatggagtgctgacctgaataatttaaaaggctttctggggagcatcagagaaattaggaagaccattcgtgaagcaagacaagttggtgaagaaagatttgccaacatgcttgga

SEQ ID NO: 926606 - DNA, 120 bp, Artificial Sequence
  ENSG00000286348_20 (sequence is synthesized)
agcatgaaagaacatattgaaggccactgagaagcattaacaaatgaagaattggaagaacttgttgagtcctctgcagaggaaaaggaagataaagaagaactgaagctgaaccagcaa

SEQ ID NO: 926607 - DNA, 120 bp, Artificial Sequence
  ENSG00000286348_21 (sequence is synthesized)
tatgaaaattaccaaaatttgccaaagtgttttgagttgcacagactctaaaggacaaaattgtggaatatgattcttaaatggaacacagcattaaagtcacccatatgatcaatgaag

SEQ ID NO: 926608 - DNA, 120 bp, Artificial Sequence
  ENSG00000286348_22 (sequence is synthesized)
gattaaaacctctgcagaaacactttgatgagttaaaaagagacaacaccttctgattacagtgttcttccagaaagtttcaaccaaaaaaccttctactattgaggattccccaccatc

SEQ ID NO: 926609 - DNA, 120 bp, Artificial Sequence
  ENSG00000286348_23 (sequence is synthesized)
aacatcgcctgatcctgacattcatccattgacgttgtcaaggctcgaggaaccagaatcactcaaagcagaaggtcaacagtagcctaacactgcatcacaatgcctataacgctcacc

SEQ ID NO: 926610 - DNA, 120 bp, Artificial Sequence
  ENSG00000286348_24 (sequence is synthesized)
aatgagaattctccaggtcttctcgggccctgttcttgcccattatgccatctgattagcagggcacacgctgggctctcagaaaaataggtctttacagtgtggtataattaagagaga

SEQ ID NO: 926611 - DNA, 120 bp, Artificial Sequence
  ENSG00000286348_25 (sequence is synthesized)
acaaaatctggattcagaaagcctacgtttgaatcctgtctctgtgacttaccagttatgtgacctaataaaatcacagtcccactgggcgtcatcttcctcacctgaaaactagatatt

SEQ ID NO: 926612 - DNA, 120 bp, Artificial Sequence
  ENSG00000286348_26 (sequence is synthesized)
aatggcatccagctcagtgggggctttgaaggctaaatgagagaatacaaagctattgtatgaaaaagctttgtgcacctatatcacattgtgtatgtcattgtactaggcagctcctaa

SEQ ID NO: 926613 - DNA, 120 bp, Artificial Sequence
  ENSG00000286348_27 (sequence is synthesized)
ttcaagagggctccatcatcccaaattgctgctctttattcctagcttgagaagtggaaggagggaaataataataatatctttgataataatggtggctactgtttattaagagcttac

SEQ ID NO: 926614 - DNA, 120 bp, Artificial Sequence
  ENSG00000286348_28 (sequence is synthesized)
ctgtcaccaggtgctatgctatatgctttacaaataatatttcaaccagatctgacaactcaatgagatagaaactgaggctcagaaaaatcagtcacaaaattgctaaattgtcaagct

SEQ ID NO: 926615 - DNA, 120 bp, Artificial Sequence
  ENSG00000286348_29 (sequence is synthesized)
ggggttttgtaacgtagtgcccccattgttctagaggtggctttttttttttcctctccctcttcttttcgtattcctgggctccctgtttcctacttagcccttcagaaatgcaagtat

SEQ ID NO: 926616 - DNA, 120 bp, Artificial Sequence
  ENSG00000286348_30 (sequence is synthesized)
agccttttacctgccccgtcacagacattccatacaggtcaagttctgtgtgctccaagacagatctcttcttggactaaagcacagccgccatggaactctcacctccatggggttgcc

SEQ ID NO: 926617 - DNA, 120 bp, Artificial Sequence
  ENSG00000286348_31 (sequence is synthesized)
tcggaactttcatccatcaggagggctcatggaaagcatgcccgtgtgaacacttttacagcttccttctgcccaggaaggcaccacctcaactgcccagtagataagacaccaagctag

SEQ ID NO: 926618 - DNA, 120 bp, Artificial Sequence
  ENSG00000286348_32 (sequence is synthesized)
caggtgtacccctgtccttactcattttcttcgcaaccttatataagtgcctgctttctgctccagaggtggagtggcacatttaaaggcggaacattttgtgccccttccccaagctaa

SEQ ID NO: 926619 - DNA, 120 bp, Artificial Sequence
  ENSG00000286348_33 (sequence is synthesized)
cttcagaatgaattcacttattttgtatcagacctggctcttgttaattggactctcatgtggaaagcaactaacctgtttcttcgttacaatttgaatgtgtgtcctttctgataccaa

SEQ ID NO: 926620 - DNA, 120 bp, Artificial Sequence
  ENSG00000286348_34 (sequence is synthesized)
agcctgtgctctgataactatacatgtttcccagcagccattgtatcgcctttggcacacctcagcggtctacttcctggcccttggcaggaaagctgccccgtactcctgcagagaata

SEQ ID NO: 926621 - DNA, 120 bp, Artificial Sequence
  ENSG00000286348_35 (sequence is synthesized)
aagtgggagcttgtataagggacaagagtaaagaacacttgaggtgctgaagaaggcgatgcccctcagatggtgggttggtcactagcagcagtgtagcatgcctactggggtcatgtg

SEQ ID NO: 926622 - DNA, 120 bp, Artificial Sequence
  ENSG00000286348_36 (sequence is synthesized)
tctcatctttaggccaaccctgctaaaaaagccaaagctaagtgtgccgaacacgccagttactgttttgggtctgcctagcacattttcacctatcttttcttctgctttcggcactcc

SEQ ID NO: 926623 - DNA, 120 bp, Artificial Sequence
  ENSG00000286348_37 (sequence is synthesized)
cttttgtttgcagaactccttacccattccttgaggttctgatggaaataccagcgatggtgccccacttgcaacctctatctgaagggtgggcatgtgacccaggctgcatgtgtaaca

SEQ ID NO: 926624 - DNA, 120 bp, Artificial Sequence
  ENSG00000286348_38 (sequence is synthesized)
gtcacccatgcctttggcagcacatgttaatctactggggatctgactcaagaaggccattcagagcccattccctggactgctatttgtagaaaggaaagagagagtctcttcctacca

SEQ ID NO: 926625 - DNA, 120 bp, Artificial Sequence
  ENSG00000286348_39 (sequence is synthesized)
gtgataccaagttggcatgtaaatctgaggttccaccttgcccttcatcctgctaaaatagagtaagcacatcttcacgaagaggtaatcaggccaacatgcagaagaaattatgaaaaa

SEQ ID NO: 926626 - DNA, 120 bp, Artificial Sequence
  ENSG00000286348_40 (sequence is synthesized)
aagaaattataattgagagagagaaactgtccacattgtttcagtttgtagatccagccttgcttgagccacagtctacctctggctttcccataggcccaaaccaacaaatttcctttt

SEQ ID NO: 926627 - DNA, 120 bp, Artificial Sequence
  ENSG00000286348_41 (sequence is synthesized)
ttttgagttgagctaatatgaacttattataagttagagtaagttcttagaatcaaaagaatcttcattcaattgatttaatatagtgatgaaagatagaaatcccagaggtagaaagtg

SEQ ID NO: 926628 - DNA, 120 bp, Artificial Sequence
  ENSG00000286348_42 (sequence is synthesized)
aaagtatatcaatagatgaagactatataaattataagatggcttcactccaagacaaaaacgcaaatatgtattgcaaagaaggaactgtgaactgtgttttctccctggatatttcta

SEQ ID NO: 926629 - DNA, 120 bp, Artificial Sequence
  ENSG00000286348_43 (sequence is synthesized)
taatttctactttaaaaaagcaaacatccacaagctgtaggggaaaaatactcaagtgacaaaatattttaatatgctgcacattcagacatagataaagattctctgtttttcttctta

SEQ ID NO: 926630 - DNA, 120 bp, Artificial Sequence
  ENSG00000286348_44 (sequence is synthesized)
ccgctagcttgaggtttgtacagaaatactgcctgagaagtatttattatcttcctcataccctataccaaaagccataacataaaccattcagatcattttagaaagttatttagtggt

SEQ ID NO: 926631 - DNA, 120 bp, Artificial Sequence
  ENSG00000286348_45 (sequence is synthesized)
gggggttttgaggataagcctgaaatcctgaaggtgagttttgatctcatttaaagtgcagtccaaacagcagcttagtgaatcacatcaaattagcaacatgaggcaatgcaggaccaa

SEQ ID NO: 926632 - DNA, 120 bp, Artificial Sequence
  ENSG00000286348_46 (sequence is synthesized)
tttctacattttaatttttcctgcttctcctactgtgaaatgctattaaagaatgtgagtaaagcccaacaatgtagatcttggtgctctggccaggtaagacaaccagtcttttttttt

SEQ ID NO: 926633 - DNA, 120 bp, Artificial Sequence
  ENSG00000226609_0 (sequence is synthesized)
agtgtccaacgttgcctcgcggaggccgccgtgcggagcaaatgtctaacggaaatcagaggtggaaaagaggttggaggagcctgttccgttccacccgcgtttactgatgcgcccacc

SEQ ID NO: 926634 - DNA, 120 bp, Artificial Sequence
  ENSG00000226609_1 (sequence is synthesized)
agcagccacgcttggggctgggggctttgaggacacgcacgtgagtcagggtcttctggcctctaaggcacgcgcaggaagaaccctagatagacggaattacgacccatatcggaagaa

SEQ ID NO: 926635 - DNA, 120 bp, Artificial Sequence
  ENSG00000226609_2 (sequence is synthesized)
tagcataaagggcgacaaggctcaaatgagctagaggacatcgggtggggaacctggaagggacttcaaagaggcggtgtggggagtcttcaggctcactctgaggtccccattgtggct

SEQ ID NO: 926636 - DNA, 120 bp, Artificial Sequence
  ENSG00000226609_3 (sequence is synthesized)
tgcttctgcagctgagctggatttgtgtaaagtcaaacctcagaacagcgagcatgagtagagagtctcaaatgatatgcgactcttcaactcacactttggccgaagagacttttgaaa

SEQ ID NO: 926637 - DNA, 120 bp, Artificial Sequence
  ENSG00000226609_4 (sequence is synthesized)
gaaccatgaggttcaagttattcttcatgcatttgtgcttcctttccaggccttgggctgagctgattctcagctttatttgctggcgtggtgcaaatagtcaaggtgttacttccagcc

SEQ ID NO: 926638 - DNA, 120 bp, Artificial Sequence
  ENSG00000226609_5 (sequence is synthesized)
ctttggggtgtaggttcacctcctttttccaccttacctgtccctagatcttctgtttccaaggccaagtctttaaagggttttcagtccctctagcaaagtaatgggtagggaggctca

SEQ ID NO: 926639 - DNA, 120 bp, Artificial Sequence
  ENSG00000226609_6 (sequence is synthesized)
ctctaccacagttttctctagaaacaaatagaagagaatgcagagggttgaaatctacccaaaatatcagtcagagactctgagcttcaaagaccttcccctatttcccccaatgtaatt

SEQ ID NO: 926640 - DNA, 120 bp, Artificial Sequence
  ENSG00000226609_7 (sequence is synthesized)
tatatagggttggacccttagtcctcaagctatcatctttatctcctccacataagcctgccttggctgggaaaagtagcattcaaagggcactgggaacaattttaaatgctgcatcta

SEQ ID NO: 926641 - DNA, 120 bp, Artificial Sequence
  ENSG00000226609_8 (sequence is synthesized)
aggaatgccaagttctggtcctcttggagttggattaaaattgttaacactttcacattcaagggctgcttacaactactacagaccctattatctgttcttctgaattagcatgaaaat

SEQ ID NO: 926642 - DNA, 120 bp, Artificial Sequence
  ENSG00000226609_9 (sequence is synthesized)
gaatagcacaatataactagaaatgagtatttctagaaatgagtatatacatctatagatgtataacatcggtttttcttattgaatggtgctacttattttaacaaccaggctgcctta

SEQ ID NO: 926643 - DNA, 120 bp, Artificial Sequence
  ENSG00000226609_10 (sequence is synthesized)
aatataatggacatccgtatggattaagactctatacaagctttctctttagtacaccaggggaaagtgaaaaaagaaccacatttgaattcggctttgtcactacaagtgggtgaccat

SEQ ID NO: 926644 - DNA, 120 bp, Artificial Sequence
  ENSG00000226609_11 (sequence is synthesized)
gagcaagttactaacctcagtgaacctgttcctaacctaaaaaggaggagaatggagagcaggtaataataccttatgagatggttgtgagagttatatagcattctttatgtcatagtc

SEQ ID NO: 926645 - DNA, 120 bp, Artificial Sequence
  ENSG00000226609_12 (sequence is synthesized)
ctagcaaagtgctggcataaaataggtgctccctaaatgttaattacctaccttcctttccctttctgtcagattttctctactattcttatgaaataataaagagtttttgtaattaaa

SEQ ID NO: 926646 - DNA, 120 bp, Artificial Sequence
  ENSG00000286341_0 (sequence is synthesized)
agcacacaaggcttcccaaacccaggcagagcatcgtggatcgcagacacgctgaccatgcagttgtgtgatggcaacagatgacttgtctctttgtgtcccttccccaaaagtactcag

SEQ ID NO: 926647 - DNA, 120 bp, Artificial Sequence
  ENSG00000286341_1 (sequence is synthesized)
taacctaacaggcttctaccagcctccaaatagaagcatctttttttcaaaccctgaagggatcaagcaagccagagggacagcatgctatcccagtgtcatggtggaagaacaaggaac

SEQ ID NO: 926648 - DNA, 120 bp, Artificial Sequence
  ENSG00000286341_2 (sequence is synthesized)
aggacattcaaacagtggatgaccaggtccctacttcccaggactcggctttctttggagggaagcttatccatgttccccgaggacctactacacacgtgatttcagagtggactgttc

SEQ ID NO: 926649 - DNA, 120 bp, Artificial Sequence
  ENSG00000286341_3 (sequence is synthesized)
agtgtggcttgtctgggacttatattctcaatctcatcattgcctttctgtgtccaaaaccaaagcatcagaggtacaagaaggcaaaactccatttcctctgtgagcactgttcctgtt

SEQ ID NO: 926650 - DNA, 120 bp, Artificial Sequence
  ENSG00000286341_4 (sequence is synthesized)
tgactgaggaatctggctagaacaagaagaaatagggccagagttggggctatgtatgtagaaattttgggtggatttaaagaaatcaacgtcttggattttgtcacaagaaaaatcact

SEQ ID NO: 926651 - DNA, 120 bp, Artificial Sequence
  ENSG00000286341_5 (sequence is synthesized)
tagacaccctacagttatggataagaaaccaaatggaatgcttgattcattctattatgcttttaagtaactattacaatgaatgattcattaattactatgaaagagcaaggtttcaac

SEQ ID NO: 926652 - DNA, 120 bp, Artificial Sequence
  ENSG00000286341_6 (sequence is synthesized)
aaaaacaaatacgaataaattaaataatttctagcgaaacttcatttgttatggaatagcacctaatctaacttttattttgctaaataaaaaagagttttggtatcttatttcaggtat

SEQ ID NO: 926653 - DNA, 120 bp, Artificial Sequence
  ENSG00000286341_7 (sequence is synthesized)
tgaaatgcctcgggtcttgctctggacaaacacattgccctgggaccggctgctcacagcattttggctttgacacggcagctctgacattaaaaagcccttaactaaccatttgcaaca

SEQ ID NO: 926654 - DNA, 120 bp, Artificial Sequence
  ENSG00000286341_8 (sequence is synthesized)
cagaaaaaaggttaatttgccttttacgcatcctttactctgctctgttgtagaggagaaaagacaggactctggttctcctttcaaatcagttatgcatagaataaaggaagagcacag

SEQ ID NO: 926655 - DNA, 120 bp, Artificial Sequence
  ENSG00000286341_9 (sequence is synthesized)
gcaacaagagcgaaactccgtttcaaaaacaaaaataaagggagagcacttgataggaaggcagcagacctgcattgaagtcctaaccagtaacaagctgtgctactctcagcaagtcac

SEQ ID NO: 926656 - DNA, 120 bp, Artificial Sequence
  ENSG00000286341_10 (sequence is synthesized)
actctcagcaagtcactgtcccactctgagtctctatttcctgatctgaaaataaggacttagtgtaggtgtccttccccgtgcctttgattttcacaatcactctctgaagcatatagt

SEQ ID NO: 926657 - DNA, 120 bp, Artificial Sequence
  ENSG00000286341_11 (sequence is synthesized)
tcaggaggttttatttgaagctgaagatacagaaacccacagatcaagagccagcaaactacagcccaggggccaaaccagcccacctcctgcttttgtacagcctgtgagctaagatgg

SEQ ID NO: 926658 - DNA, 68 bp, Artificial Sequence
  ENSG00000286341_12 (sequence is synthesized)
gcccacctcctgcttttgtacagcctgtgagctaagatggttttcacatttttaaatggttaaaataa

SEQ ID NO: 926659 - DNA, 72 bp, Artificial Sequence
  ENSG00000286341_13 (sequence is synthesized)
agtgacagagagagactccatctcaaaccaaaaagaaaagaaaagaagaaaaaaatcaaaagaagaatgaca

SEQ ID NO: 926660 - DNA, 120 bp, Artificial Sequence
  ENSG00000286340_0 (sequence is synthesized)
atctgacgcacacggagccgcagcacaggctctattcagcggcgctggctggagctgagatggaagttagtttctatgtagcagaaatatgaaacaaatgaagcaaaactgcccagagag

SEQ ID NO: 926661 - DNA, 120 bp, Artificial Sequence
  ENSG00000286340_1 (sequence is synthesized)
gggaaatgccccaaggatgggtctcactcacgcgcgtacacagacacacacgcagagagcactctcacgctgggcaagctcgggatcgcgctacccttcccgagttgaatgatagtgttt

SEQ ID NO: 926662 - DNA, 120 bp, Artificial Sequence
  ENSG00000286340_2 (sequence is synthesized)
ggtttctgtctcttgccatgtgcatgtgtataaatgctgcggattggcatctgtttaatcacgggaagacttcttgaaaactgacgaaaaggagaaaaaaaaatctttcgtaaattagta

SEQ ID NO: 926663 - DNA, 120 bp, Artificial Sequence
  ENSG00000286340_3 (sequence is synthesized)
tgtaattaccgattttatatgctaaatcatacatctgtgttttgctgatgaggataagggccttgtttttaaaaaaacgaatatgggtgaaattaatggaaacaatagaaaaagccattt

SEQ ID NO: 926664 - DNA, 120 bp, Artificial Sequence
  ENSG00000286340_4 (sequence is synthesized)
gttagaaaacaaggacaccaaatgatatttatctccagatgatttaagcactttccaaaaagacttgagagttcaatattttttaaggattgcattttaaagggaatttggatagtcgtt

SEQ ID NO: 926665 - DNA, 120 bp, Artificial Sequence
  ENSG00000286340_5 (sequence is synthesized)
cttttgttaacatttaacaaaagattctccttaaaaatgttagataataaactgcattttatgggtctggtttaaaaaggttatttgtggggaaaggaccaacaagctgtattgtggttt

SEQ ID NO: 926666 - DNA, 120 bp, Artificial Sequence
  ENSG00000286340_6 (sequence is synthesized)
tctagattgtttcctcaagccttgtaacctcctagctccttacattcctagtgggaaatacttgctgcaaatgccttgggctgcactgtaagcccaagtgtgctgcaccagtgtgatgcc

SEQ ID NO: 926667 - DNA, 120 bp, Artificial Sequence
  ENSG00000286340_7 (sequence is synthesized)
ctatactaaaacatccagaaatcatcatacatatgaggaagaagaaataaagcctcaaaccctttggaataataggatataaaattgccttttgtaactgaatcttaaaaatggaaggtt

SEQ ID NO: 926668 - DNA, 120 bp, Artificial Sequence
  ENSG00000286340_8 (sequence is synthesized)
accatgacttgtcctattgcaacctggttatcagaataacttattttttttaagatagctattctcaaatactgaacatatttgcatctttaaagacactttattctattcaattatagg

SEQ ID NO: 926669 - DNA, 120 bp, Artificial Sequence
  ENSG00000286340_9 (sequence is synthesized)
tttttgcaaattgtatttacttctaagaccgatgctgttttagcttaacttttaaaaaagtgttcttcaaataattgtaatattttacacgatcttgaagttcttcaaataaacagagtt

SEQ ID NO: 926670 - DNA, 120 bp, Artificial Sequence
  ENSG00000286340_10 (sequence is synthesized)
tagaaactaaaaattatagtgggattttctggttttgaaggcttggaatgtatgattcttactaatagatgttttattcttgtgattgaaaataaaccaaattatgacatggaatataat

SEQ ID NO: 926671 - DNA, 120 bp, Artificial Sequence
  ENSG00000286340_11 (sequence is synthesized)
attactctgggtaaagtttgtgatatatatcttctgtgtgttttgtaaacatagaaaactagcatgattatctcatatattcttttcatttagaagccacaaaagctttcacctaaatat

SEQ ID NO: 926672 - DNA, 120 bp, Artificial Sequence
  ENSG00000286340_12 (sequence is synthesized)
gctactagtacttagctccttaaaaattttttggaaaatccccctctaagttttctaaacatgatgttcctgtcattttgattgatttttgacagtgtttatatttctttttcaaatgtc

SEQ ID NO: 926673 - DNA, 120 bp, Artificial Sequence
  ENSG00000286340_13 (sequence is synthesized)
caatatgcagattgttgtaaccttccctttgaactattgtctgttataagaaaatatacattacctgctaaaaattaaaacttcccttcagccaaataaactatttgtatttaacagtgg

SEQ ID NO: 926674 - DNA, 120 bp, Artificial Sequence
  ENSG00000286340_14 (sequence is synthesized)
atattgaattgaattttactaagtcctttaaatgtaacaaatactccaaatagcccttttaattttcttaaacataaaaaacatttgtgaattatagcattgacagttaactgtaagatt

SEQ ID NO: 926675 - DNA, 120 bp, Artificial Sequence
  ENSG00000286340_15 (sequence is synthesized)
tattaagttgtttattgtacttgtttatgtacaaagtctgtaaatatcaaatagaaagaaaagtcttatttggaagttctagattttagttcccaaagcaatgatccttgcaattttttg

SEQ ID NO: 926676 - DNA, 120 bp, Artificial Sequence
  ENSG00000286340_16 (sequence is synthesized)
ttcagccaactcttttgcatataaggatagttcagattccatctatatcctttcctgtttgtttattttaacatttttatgggtttccaaaaataaaatatcactttaaaaagatctcca

SEQ ID NO: 926677 - DNA, 120 bp, Artificial Sequence
  ENSG00000286340_17 (sequence is synthesized)
tgcagtttaaataacaaggttaacaaataatagtaaaagtttggaaagccaagacctaacgtttttacataatatagtctctctaggagatatagaaacttttcttgaaatataaaagtt

SEQ ID NO: 926678 - DNA, 120 bp, Artificial Sequence
  ENSG00000286340_18 (sequence is synthesized)
gcgcgccgccgtacctgagccgcctgctgacagggtccatcttccaggaaccgggcgatgaggaagtagagctctgcgcgggagagagggacggggagacacacaggctgagcggtcggg

SEQ ID NO: 926679 - DNA, 120 bp, Artificial Sequence
  ENSG00000286340_19 (sequence is synthesized)
cggcggggggcgggggaccgcgggcggaatcgcccggtgccagcggccccggcagccccccgacttacccgatcgcagctccgagaggcctttcctctcacaagacatgtttatgggtca

SEQ ID NO: 926680 - DNA, 120 bp, Artificial Sequence
  ENSG00000286340_20 (sequence is synthesized)
cttcagggccgccgacgggacaccccgccgccgaggggaagcggggacggtgccgccgcctgccctatagctgtcagtgtgtgttcacgagccgagcttcggctccaccattcaagcaac

SEQ ID NO: 926681 - DNA, 120 bp, Artificial Sequence
  ENSG00000286340_21 (sequence is synthesized)
ggcggcggaggcggaggaggaggaggaggaaacaacaactctcaggcagcgactacggccgtggccgcctccgccgcggatccctccgccgcagaaaggagtccgccgccttcgcggccc

SEQ ID NO: 926682 - DNA, 120 bp, Artificial Sequence
  ENSG00000286340_22 (sequence is synthesized)
agggctcggccccggctctggcccgcgcccccgccccccggcgctaaaaaaggagtgcctccgacccctcgtccccagcgctccgcacgcggcacagtgagacccccacccgctcctccc

SEQ ID NO: 926683 - DNA, 120 bp, Artificial Sequence
  ENSG00000286340_23 (sequence is synthesized)
cgcagggcgtgcgatttatttatttatttccagtcggagaagatgtcggagcccaagccgccggttggctggaaggcgctttctctgtggaggccgatagtggcagggagggggccgggg

SEQ ID NO: 926684 - DNA, 120 bp, Artificial Sequence
  ENSG00000286340_24 (sequence is synthesized)
ttattggagtgctgtatattgcaatagaggtttgggctgctttttgttaagcacttgcgttttgcaaacccgttatttgctgaagccacctctgcatatttcttttattactgccattgc

SEQ ID NO: 926685 - DNA, 120 bp, Artificial Sequence
  ENSG00000286340_25 (sequence is synthesized)
cttcagatactctttttccttattacaaaaaggctagtgatggctaattaggtatttggaattaaagaaccttaaagcttttttaagtgtttacgagaagggagaatgtaaacctgaggg

SEQ ID NO: 926686 - DNA, 120 bp, Artificial Sequence
  ENSG00000286340_26 (sequence is synthesized)
aaaggaaaggacgctaatattcatgtctaactgatctggaggtaatttagtgacagatcgataacctgcctaaggatattgaaagagtatactacagtttagccaaggtgaatagtgatt

SEQ ID NO: 926687 - DNA, 120 bp, Artificial Sequence
  ENSG00000286340_27 (sequence is synthesized)
aaataatttaaataatctgtgtatcttgcagttgacttcgtcatgctaattaatggcttctaatttgagatgtaaaccattcctgtttacagttaatcacgggaagacttcttgaaaact

SEQ ID NO: 926688 - DNA, 120 bp, Artificial Sequence
  ENSG00000286342_0 (sequence is synthesized)
cgccgagccagtttagagtggtctccaggccctagtgggaaggggctccgcgcttctgggcgtccacaggagctgcatggccctgcccgctgacgcccggtcgggacgctccacaccctg

SEQ ID NO: 926689 - DNA, 120 bp, Artificial Sequence
  ENSG00000286342_1 (sequence is synthesized)
tgtgggggcggaggggacgcggtgggtgcggcctgggcgcgggtgggctagagcctggagaccgccgggagcccgacttcctggcgctttgccctttggggagcggagccaaggaacagc

SEQ ID NO: 926690 - DNA, 120 bp, Artificial Sequence
  ENSG00000286342_2 (sequence is synthesized)
gccaacctctctccacaagccagggaccctacgacccaccgccgcaggccagaaccagcagctgatttagataccatcaagacacctaaaaccttatcatgagccagatgctgtggaaga

SEQ ID NO: 926691 - DNA, 68 bp, Artificial Sequence
  ENSG00000286342_3 (sequence is synthesized)
gacacctaaaaccttatcatgagccagatgctgtggaagagattctgggagaatcctgaggacccccc

SEQ ID NO: 926692 - DNA, 90 bp, Artificial Sequence
  ENSG00000286342_4 (sequence is synthesized)
aggaaagcgggacaaccagtcacaatgagtaatttaatgatagctatgagagcggtgatcaccattgctgtgagtattccttcagcaagc

SEQ ID NO: 926693 - DNA, 85 bp, Artificial Sequence
  ENSG00000286342_5 (sequence is synthesized)
ttgccataatgaatctgctcctataattaaattgaacctggccagaaaaaatgaatgtacttgtttgggaagattgcattgcaga

SEQ ID NO: 926694 - DNA, 120 bp, Artificial Sequence
  ENSG00000286342_6 (sequence is synthesized)
gtacctctgagtatgtgtgccatggccacactatgttcagctggtcagaagaaaacagtcagatggtagaaatggtaagaagtatggcaagagttcttattatctggaaacatggcggta

SEQ ID NO: 926695 - DNA, 79 bp, Artificial Sequence
  ENSG00000286342_7 (sequence is synthesized)
agattaacaaaatttgggaacgaataaaaaaccatctagaaggacactatacaaactggtttttggatattgcaaagtt

SEQ ID NO: 926696 - DNA, 85 bp, Artificial Sequence
  ENSG00000286342_8 (sequence is synthesized)
aataagatcaaaatttgggaacgaataaaaaaccatctagaaggacactatacaaactggtttttggatattgcaaagtctgacc

SEQ ID NO: 926697 - DNA, 88 bp, Artificial Sequence
  ENSG00000286342_9 (sequence is synthesized)
tattaatctgtgttgtttgtctttgtgtagtctgcagatgcagatcctgactcctgcgagaagtagctcaccgtgataaagctgcctt

SEQ ID NO: 926698 - DNA, 120 bp, Artificial Sequence
  ENSG00000286342_10 (sequence is synthesized)
gactcctgcgagaagtagctcaccgtgataaagctgcctttgcttttattgccctgcaaaaacaagaagggggatatgctggggaataggcccccaaatctggacataaactggccccaa

SEQ ID NO: 926699 - DNA, 120 bp, Artificial Sequence
  ENSG00000286342_11 (sequence is synthesized)
aactggccataaacaaaatctctgcagcgctgtgacatgttcatggtggccataacgcccatgctggaaggctgtggtttaccggaatgagagcgaggaacacctggcctatccagggcg

SEQ ID NO: 926700 - DNA, 79 bp, Artificial Sequence
  ENSG00000286342_12 (sequence is synthesized)
accggaatgagagcgaggaacacctggcctatccagggcggaaaaccacttataggtattcctaaaccacaaacaacct

SEQ ID NO: 926701 - DNA, 120 bp, Artificial Sequence
  ENSG00000286342_13 (sequence is synthesized)
cgccaacctctctccacaagccagggaccctacgacccaccgccgcaggtgagctccgcccgggcgccccctcccccaccacgcctggatccctgccgggctccccgagccgagactgtg

SEQ ID NO: 926702 - DNA, 120 bp, Artificial Sequence
  ENSG00000286347_0 (sequence is synthesized)
aatcctggaaggatacagacatgttcagcagcttcaggcgcatcaactgcacagaaagtgaccctggtcagtcggagacatccatctggcaggagccaccctggagcagtgggggattct

SEQ ID NO: 926703 - DNA, 120 bp, Artificial Sequence
  ENSG00000286347_1 (sequence is synthesized)
gtttttccagcagtgatgcagaaaaggggaaaaagttaacatttgaaattcaaaatatgatttttgcagcaagacaactggtttggaagcaagactttgtcaaagagagattttctaaat

SEQ ID NO: 926704 - DNA, 120 bp, Artificial Sequence
  ENSG00000286347_2 (sequence is synthesized)
tcctttagcagttaaagaacaaaacttggaggattaagatcacaatataaggaggacataatttcctcttgtgtcatttggtgaagaaatccatgccttaggctggcagtacagcagagg

SEQ ID NO: 926705 - DNA, 120 bp, Artificial Sequence
  ENSG00000286347_3 (sequence is synthesized)
gacagaaagccctttgctatctgaggattatgaaaagaaaagagagagggagggacagatgctaagaatgaggggttcatgtttggctctctaggagccaattaccctatagactgtccc

SEQ ID NO: 926706 - DNA, 120 bp, Artificial Sequence
  ENSG00000286347_4 (sequence is synthesized)
cacatcaacgtaattagactgtgcagtgagggtgggcagaggaaggacaaactgatttcactattgttttaatttggatgtatttaactataagccataattttttcacatttatggttc

SEQ ID NO: 926707 - DNA, 120 bp, Artificial Sequence
  ENSG00000286347_5 (sequence is synthesized)
atttttctttgtatcaattaagataagctacataatttgcagaacctagggtaaaatgaaaatgcagtgtctcttgttcaaaacttaacaaaattcaagatggcaagatggcccttaaac

SEQ ID NO: 926708 - DNA, 120 bp, Artificial Sequence
  ENSG00000286347_6 (sequence is synthesized)
caagggccaggccctttgaaatgagaggccctgggtggctgactgcacaggtcccatgcccatgaagctgaccctggtctcaatatttttggcccattttatattcggttgcaaatgttt

SEQ ID NO: 926709 - DNA, 120 bp, Artificial Sequence
  ENSG00000286347_7 (sequence is synthesized)
tcttagtccaggggtgggcaagctttttctgtgaagggccagacagtaaatatttcaggttctgggggccatgtggtctccgtggcaactactcaactctgctttttgtagcacaaaagc

SEQ ID NO: 926710 - DNA, 120 bp, Artificial Sequence
  ENSG00000286347_8 (sequence is synthesized)
actacaataaaattttatttacaaaaacaggctgcaggccatagttcgccagcttatgtcccagacaatcactttctttcagactcgtttttttctaaatttctgtattcactgtcatgt

SEQ ID NO: 926711 - DNA, 120 bp, Artificial Sequence
  ENSG00000286347_9 (sequence is synthesized)
ctttctcacgacaagataatatacaaatctgtattttttttcctgatagctgaagttttggtgtactttgctattcatttcctgttatttattgccgataatgcagactggaaaaattgc

SEQ ID NO: 926712 - DNA, 120 bp, Artificial Sequence
  ENSG00000286347_10 (sequence is synthesized)
gccttgggagatatatggaggcattctttgtgacctaataaatatttcatgggcatttgaaaggaaagtttattctctgtagggtatagggttcaaaatatattttgaatatatccttga

SEQ ID NO: 926713 - DNA, 120 bp, Artificial Sequence
  ENSG00000286347_11 (sequence is synthesized)
atgcttaagtattcagagatgtctttcagattctgctgagatacagtttttatcttcagcagtcaaaaaaattggagttatcttaaacatttctcaaatattgaagccctgttgcattcc

SEQ ID NO: 926714 - DNA, 120 bp, Artificial Sequence
  ENSG00000286347_12 (sequence is synthesized)
taggataaattttacttggtcttaggatattattcctttactatactgttagttttttaacaatatgtatttaatttaaaatttaaagtttttattcagaagttggtgggaagttttgtg

SEQ ID NO: 926715 - DNA, 120 bp, Artificial Sequence
  ENSG00000286347_13 (sequence is synthesized)
tatgaaggtattatctttggtagatatggttattagatctatgctagcttcataaagtgaattgagaaactattttttcctgctgtctgtatgcgtttaacactagtactgaaattttct

SEQ ID NO: 926716 - DNA, 120 bp, Artificial Sequence
  ENSG00000286347_14 (sequence is synthesized)
gttccttgaagatgtgacagaactttccatgaaaccaactggtccagaatcgaaggactccttcacagagacaaatccatctccttcaaatacccagattctattggtgagggaaaggca

SEQ ID NO: 926717 - DNA, 120 bp, Artificial Sequence
  ENSG00000286347_15 (sequence is synthesized)
acatttgaaagactgagcattttacctaaagggattttaaaaaatcaccacaatggactattatcacaacttggattcaaaatttatggatttccctccctcttgctacccagaaggtgg

SEQ ID NO: 926718 - DNA, 120 bp, Artificial Sequence; identical to SEQ ID NO: 31941
  ENSG00000287363_0 (sequence is synthesized)

SEQ ID NO: 926719 - DNA, 120 bp, Artificial Sequence; identical to SEQ ID NO: 31942
  ENSG00000287363_1 (sequence is synthesized)

SEQ ID NO: 926720 - DNA, 120 bp, Artificial Sequence; identical to SEQ ID NO: 31943
  ENSG00000287363_2 (sequence is synthesized)

SEQ ID NO: 926721 - DNA, 120 bp, Artificial Sequence
  ENSG00000287363_3 (sequence is synthesized)
tcagggtacagtctcccctggggctgcaaggatttagtggagactcttaacaccagttctctggcatctgtgagtttgagtgtgggccatcatcttcttccttctgctctctccctctcc

SEQ ID NO: 926722 - DNA, 120 bp, Artificial Sequence
  ENSG00000287363_4 (sequence is synthesized)
acatttcccggtaccatctgatccatcaggcccttctttgctcaggcctgaaggactcaggcctgtgagagaggacggccccgttgtcggccaagacacctttgggcgaggagcagcgaa

SEQ ID NO: 926723 - DNA, 120 bp, Artificial Sequence
  ENSG00000287363_5 (sequence is synthesized)
cagggcctgtccatctcagacgtcagccccctgaaggcctgagcaatgggcaacgtgatggagggaaagtcagtggaggagctgagcagcaccgagtgccaccagtggtacaagaagttc

SEQ ID NO: 926724 - DNA, 120 bp, Artificial Sequence
  ENSG00000287363_6 (sequence is synthesized)
atgactgagtgcccctctggccaactcaccctctatgagttccgccagttcttcggcctcaagaacctgagcccgtcggccagccagtacgtggaacagatgtttgagacttttgacttc

SEQ ID NO: 926725 - DNA, 120 bp, Artificial Sequence
  ENSG00000287363_7 (sequence is synthesized)
atgatgtagatggcaacggctgcattgaccgcgatgagctgctcaccatcatccaggccattcgcgccattaacccctgcagcgataccaccatgactgcagaggagttcaccgatacag

SEQ ID NO: 926726 - DNA, 120 bp, Artificial Sequence
  ENSG00000287363_8 (sequence is synthesized)
tgttctccaagattgacgtcaacggggatggggaactctccctggaagagtttatagagggcgtccagaaggaccagatgctcctggacacactgacacgaagcctggaccttacccgca

SEQ ID NO: 926727 - DNA, 120 bp, Artificial Sequence
  ENSG00000287363_9 (sequence is synthesized)
tcgtgcgcaggctccagaatggcgagcaagacgaggagggggctgacgaggccgctgaggcagccggctgagtgcaccgcccggctgcttctgcactagcgggtggggtggtatggtggt

SEQ ID NO: 926728 - DNA, 120 bp, Artificial Sequence
  ENSG00000287363_10 (sequence is synthesized)
gcctgttggtggtgttcttgtcttaaccctagatagaatctaatgaactcagaggcttagctcgcctctttagggtccatggtggcagcagagaggcagaagtgggagtccagagccagg

SEQ ID NO: 926729 - DNA, 120 bp, Artificial Sequence
  ENSG00000287363_11 (sequence is synthesized)
aacagtgaaggatggttcctggcccctctgagtgacagctggtggcagcactccttgctggggggcactgttcaacatccctctgccgtcgggtgaccccctagcccttctgactcctct

SEQ ID NO: 926730 - DNA, 120 bp, Artificial Sequence
  ENSG00000287363_12 (sequence is synthesized)
cccagcttttcccagctttccccactgagcttctccagtccatgctcttctggacgtggactctctgaggcagaactgagcttttccaggcctcttatggaatcctgcagatccagtggc

SEQ ID NO: 926731 - DNA, 120 bp, Artificial Sequence
  ENSG00000287363_13 (sequence is synthesized)
tgcagcttcaatcccagtgctgcaatcacacatccattctgccctgggggaccctggagcctacttgtgcgctttgcatttcattgattgacgcctcccttcaacaagcatttactgagc

SEQ ID NO: 926732 - DNA, 120 bp, Artificial Sequence
  ENSG00000287363_14 (sequence is synthesized)
gcctactatgtactaatgctagatgttagatgtacaaagaagacagttttcatcctctaggaactcataggctaatggtgagacacacagacaaacatcattataataaaatatgctaag

SEQ ID NO: 926733 - DNA, 120 bp, Artificial Sequence
  ENSG00000287363_15 (sequence is synthesized)
agtatcctgccaagagtcctccctgaccaccagaagttccacctcaccatcaagaaaggccctggtccaggatgtgcaaggactcacagaaaccctctgtacccagtcatgggccaaaga

SEQ ID NO: 926734 - DNA, 120 bp, Artificial Sequence
  ENSG00000287363_16 (sequence is synthesized)
gaaccccttctacactttgcagaagcctacctgtggctacctgtaccgccgggacactgaccacacccgcaagcgctttgatgtgcctcctgccaacttggtcttgtggcgctcctaggc

SEQ ID NO: 926735 - DNA, 120 bp, Artificial Sequence
  ENSG00000287363_17 (sequence is synthesized)
ctgagccaaacggaagcccccgacccttcaccctcacccctgtgacctcaggtccccaaggggaagggctgctcactgcaggaggagtgacctatattcgggctaagacagctgtgccat

SEQ ID NO: 926736 - DNA, 120 bp, Artificial Sequence
  ENSG00000254287_0 (sequence is synthesized)
atgttgcccagataaaatacaggatgaaaaatgaagtaaaagactaaaaatataataatgataacagtggacatgtcaagccagggcatattttctttatcattttgtcgtgttatctaa

SEQ ID NO: 926737 - DNA, 120 bp, Artificial Sequence
  ENSG00000254287_1 (sequence is synthesized)
actttgcatgatgcagttataatgcttttagaaaatttttggaaagttaaatgtaaattagatgaaaatctgtcacatagcataagaaatctgagaaaatctccaaaccttacggacatc

SEQ ID NO: 926738 - DNA, 120 bp, Artificial Sequence
  ENSG00000254287_2 (sequence is synthesized)
tccatgacctttgccccacacatatgccatggtgatgcatcccagaactagacgtgcaaggcgctgtgacttgtggtctgtgagatgatcaatgctgagcatgtttaactgaaaacaaat

SEQ ID NO: 926739 - DNA, 120 bp, Artificial Sequence
  ENSG00000254289_0 (sequence is synthesized)
atggggtgtgaattaagctgaatttttcttgttggtattttaaaaggtgttcagtgtgaggtggagctgatagagcccacagaggacctgagacaacctgggaagttcctgagactctcc

SEQ ID NO: 926740 - DNA, 120 bp, Artificial Sequence
  ENSG00000254289_1 (sequence is synthesized)
atgcagactctgtgaagggcagattctccatctccaaagacaatgctaagaactctctgtatctgcaaatgaacagtcagagaactgaggacatggctgtgtatggctgtacataaggtt

SEQ ID NO: 926741 - DNA, 120 bp, Artificial Sequence
  ENSG00000254288_0 (sequence is synthesized)
acttggaagaagggctgtaacctttagcttcccccagtttagcccgttggccttgtctaggctggtctgtttctgactcttcttttcctcatctaatatagacctacttttcttttattg

SEQ ID NO: 926742 - DNA, 120 bp, Artificial Sequence
  ENSG00000254288_1 (sequence is synthesized)
gaagtaggaagaggaaaaatagacaaaggaagagaaaaatactagattaaggctcagatattgtaggcatgagacctggaaactggagactccttttgggacagagttgtagcagcaagc

SEQ ID NO: 926743 - DNA, 120 bp, Artificial Sequence
  ENSG00000254288_2 (sequence is synthesized)
ccaactatagaagaagggaactggggcctgttggtggcatggtgaccagagattttggtgttgttttggtgcaacaacagaccagcatttcttcctgatgagagacaattgaccatggag

SEQ ID NO: 926744 - DNA, 120 bp, Artificial Sequence
  ENSG00000254288_3 (sequence is synthesized)
ggagaatgtgcagcaaaggttttcctgtcatctgcttcatcttttgatgtcagagggcctaaaactccaccctgggattatgctaacactgccattttttgtacacaggacccatgaaga

SEQ ID NO: 926745 - DNA, 120 bp, Artificial Sequence
  ENSG00000254288_4 (sequence is synthesized)
ggcatgaagctcaattgcacatgtgcatgtttttccttttgtaaatattaatgactcctcctataatctgttgaatatgtacacttaaccactcaacttaccatacgtttctgttccctt

SEQ ID NO: 926746 - DNA, 120 bp, Artificial Sequence
  ENSG00000254288_5 (sequence is synthesized)
ttcccctcccttgaagtatctgtttttggcttctgaccagagactacacttcccagcctctgggaatggccaccctgcaggctgaaactcttcatgagaaataaagctcttctttctaaa

SEQ ID NO: 926747 - DNA, 120 bp, Artificial Sequence
  ENSG00000257958_0 (sequence is synthesized)
gtcaacatcccagttgatgtcacagccaacagcctgcatcaagtgcctgacacgagccttggaagaggcggcaagggtggcagttcagggacagactgcctgggctggcgttctgatttg

SEQ ID NO: 926748 - DNA, 120 bp, Artificial Sequence
  ENSG00000257958_1 (sequence is synthesized)
ccgaaggtagtaagcaactatctctgtgaccttgaacaaagtactgaactgcatctctgtaaaatggggagaataatcattctacttcataggattgttatacgctataagcgctaacat

SEQ ID NO: 926749 - DNA, 120 bp, Artificial Sequence
  ENSG00000257958_2 (sequence is synthesized)
atgtacaaccctgagacctgagcctagctcacaataagggctctgagtttgctgttgttattgttgttgttgattattacggttgttgttgtttttattgttattagaaagactccactt

SEQ ID NO: 926750 - DNA, 120 bp, Artificial Sequence
  ENSG00000257958_3 (sequence is synthesized)
tgtcaggctgctctgtctccatcctattgccctctccaggtgcctatacagagtcagcccttgtgctgctcatttacaaatagctgcttggtgtctcccctcatctccactcctctggat

SEQ ID NO: 926751 - DNA, 120 bp, Artificial Sequence
  ENSG00000257958_4 (sequence is synthesized)
tccagaacttcccacacaggagcccagccctggacagtgacggtgacccatggagaatgcatcatgcctgtcagggtcctgttggttcagcggctggggaggcagtgccctgctgggaac

SEQ ID NO: 926752 - DNA, 120 bp, Artificial Sequence
  ENSG00000257958_5 (sequence is synthesized)
gatcacttcccatgaagatggatggctttctctgtcccggcgacactaactgcgagagatgggggaacctgctgcaggagggaaggggcagtttgtattaagtggtcactgggcccagtg

SEQ ID NO: 926753 - DNA, 120 bp, Artificial Sequence
  ENSG00000257958_6 (sequence is synthesized)
gccgtccacgtgtttctttgcacactggtaaagcccaggggttaccggcatgcattttggaatcagctggcttgtgaataagtccttgctttgccgtttccttggctgctaaatttggac

SEQ ID NO: 926754 - DNA, 120 bp, Artificial Sequence
  ENSG00000257958_7 (sequence is synthesized)
ccactatttaacttccctttggtctctgtttcttaatgaaataatagtatccaccttgttaagttacgctgtgaagtctgagagacctgcatgtgaagccctaagagaggctggagagca

SEQ ID NO: 926755 - DNA, 120 bp, Artificial Sequence
  ENSG00000257958_8 (sequence is synthesized)
ggggtgccaaacgtgttcagtaatggatcagcagatcaatcttttgggctctgtggtccgtaagatctctgttgcagatactcaactctgccagtgtagccccaaagcagccatagataa

SEQ ID NO: 926756 - DNA, 120 bp, Artificial Sequence
  ENSG00000257958_9 (sequence is synthesized)
tagatacataatcaggcatggttgtgttctaataaaactttacataaaaagcaggcaacggtgagattttgcctgtgggttgtagtttgtaagccctggactaaagcctagtcctcaaga

SEQ ID NO: 926757 - DNA, 120 bp, Artificial Sequence
  ENSG00000257958_10 (sequence is synthesized)
gcaggggccatggatcccggctgcacctgggtttagatctcagctctgacactcacaagctgtgtgagctttcttcacctgctggcagttgtaagaattttgtgagtcatacattgatag

SEQ ID NO: 926758 - DNA, 120 bp, Artificial Sequence
  ENSG00000257958_11 (sequence is synthesized)
gccaaggacttgcaatggtgtttaggaaacgttaaacacaacttaagtgtttgctctcattttcattattacagagtgagtataaaacaggtcccaggccaggtgcggtggctcatgcct

SEQ ID NO: 926759 - DNA, 120 bp, Artificial Sequence
  ENSG00000257959_0 (sequence is synthesized)
caaaccacataaccaaatgtgccaagataatcctgagctcactcattgtcagactttcaaagtggaaaaaataaacaacatcaatgtggtaaaatacctaagaagataatggctgtaaat

SEQ ID NO: 926760 - DNA, 120 bp, Artificial Sequence
  ENSG00000257959_1 (sequence is synthesized)
ctttgagaactgatgagagaaagactctaaagtttcaggaaaaatatatcaggaagcctgatatatcctgcaggaacaaggaaaaataaaaagaaacctatgcttactacatcatagcag

SEQ ID NO: 926761 - DNA, 120 bp, Artificial Sequence
  ENSG00000257959_2 (sequence is synthesized)
gcaaagagaagatcttaaaagtgctcagagcaaaaaagacagatcatcagaaaggaaagaagaaaattgattgacagttgaataacagcagcagtggacaccagaagatagttcaaatac

SEQ ID NO: 926762 - DNA, 120 bp, Artificial Sequence
  ENSG00000257959_3 (sequence is synthesized)
tttcaaagtgcttagaaaaaacaaaagccagtccaaaattgtgtatccagcaaaagtatctttcaagaataaggatgaggaccaagatgaggttaacagggatccacctgaaaaaactaa

SEQ ID NO: 926763 - DNA, 120 bp, Artificial Sequence
  ENSG00000257955_0 (sequence is synthesized)
agagatggagctgggtgaggggctgctgtctgcagtgtcagcctctgcaccccacccacagcctcccacggcatcccctccccatctcccctttgtcttcctctgtcttcctttttactt

SEQ ID NO: 926764 - DNA, 120 bp, Artificial Sequence
  ENSG00000257955_1 (sequence is synthesized)
ccttttcgctgtttaatgagaacgacttccatttgctatttgttgactgagtccggcactgcattaagctctgtctacattttgtcttagtgcttgcaggcactttataaggtagacgca

SEQ ID NO: 926765 - DNA, 120 bp, Artificial Sequence
  ENSG00000257955_2 (sequence is synthesized)
agtattgtgccacttttacacatcagggaacgtatgaacacatcaggttgctcagcaatgaagtggaagagcattgatagccctttgggcacagatctgtgtgcctccaaaacccatgct

SEQ ID NO: 926766 - DNA, 120 bp, Artificial Sequence
  ENSG00000257955_3 (sequence is synthesized)
ctgagcgctggtaacctctactcctcctcttcctcaccttgtcagcatcagcactccaccttccctttcctcctccgcttcgaatctcagagccaacttcagctagtgcctctcccttcg

SEQ ID NO: 926767 - DNA, 120 bp, Artificial Sequence
  ENSG00000257955_4 (sequence is synthesized)
aacacctccgggaaatacctcctcccagatcacccctgccagaaccagcaacgactatgagtacagcacgtgggtctgcagattggcaaggaccaaaagaactgattactatacaaggag

SEQ ID NO: 926768 - DNA, 120 bp, Artificial Sequence
  ENSG00000257955_5 (sequence is synthesized)
tggctatggtggtgagatttgtcctctgcaaaccatgacggtggtagctggcaaaggtttggtgaaataggctttggcatacattgttgatgggaatggtgcatgcagtgttaaagggaa

SEQ ID NO: 926769 - DNA, 120 bp, Artificial Sequence
  ENSG00000257955_6 (sequence is synthesized)
tttatctgtcaaatttttttaatgcacttcaattttgacccagcaattctgcttctaggaaattatccaacagataaatgtgcaagtgcaaaatggcatatacacaaatatttactgcag

SEQ ID NO: 926770 - DNA, 120 bp, Artificial Sequence
  ENSG00000257955_7 (sequence is synthesized)
cattatctcagcaaaaggctagagataacccgaatgtccatcagaaggggactgcttaaataaattatggtatatctgtataatggaatattaagcaatattaaaatagtgagaatttca

SEQ ID NO: 926771 - DNA, 120 bp, Artificial Sequence
  ENSG00000257953_0 (sequence is synthesized)
catttgactgggactcccccatggagagaagtcctcccaggtcctctgcaaggggcatctgttccttggctatggacatgccctaaagtgccaggtggacggaagagctcctgggaccag

SEQ ID NO: 926772 - DNA, 120 bp, Artificial Sequence
  ENSG00000257953_1 (sequence is synthesized)
caggttgggagcatcaattcacgttggctagaaatgtgacttctttagtatttaccattttaacaaaatccatgataagggatttggaaggtcccatggaaaggatgaaatgacacctct

SEQ ID NO: 926773 - DNA, 120 bp, Artificial Sequence
  ENSG00000257953_2 (sequence is synthesized)
gtttctttaagacctctacggttgagaagagaggacaaaggaacacccccacctctgccatcctccgagggatttttcacagcaattccagtgctgctcagtggaaagctctgcaagtca

SEQ ID NO: 926774 - DNA, 120 bp, Artificial Sequence
  ENSG00000257953_3 (sequence is synthesized)
actgcaaacccccagccccagatgttaggcatttacaaactttgttgctgatttatcagcgctcctctgcaattttggggacaggagcaaacacaagcttaagtcaccacgcaggctgca

SEQ ID NO: 926775 - DNA, 120 bp, Artificial Sequence
  ENSG00000257953_4 (sequence is synthesized)
acccttacccaaagatgggggaaaaactccaaaggagatgcaggagggagcctcagcagtcactgtgagagcacaaagaggccaagacccagggtaggcaaaggaaggtgagaggcacca

SEQ ID NO: 926776 - DNA, 120 bp, Artificial Sequence
  ENSG00000255886_0 (sequence is synthesized)
tgggaagctcctggctttctggagccagaggatgttcaggaggaaagcccactcagccgagggtgaggccacagctgggaggatgactcgcactggatccagaaagaaaacaaatggtcc

SEQ ID NO: 926777 - DNA, 120 bp, Artificial Sequence
  ENSG00000255886_1 (sequence is synthesized)
cagaaatatggtgagcttcgccgttgatgtctctcctctagtcgaatatggaagactggatcaccagatctcccaatttgcttttcctcttgtttttcggcctctttcagcttgctctct

SEQ ID NO: 926778 - DNA, 120 bp, Artificial Sequence
  ENSG00000255886_2 (sequence is synthesized)
caccagcttaatgcaaacacaagcctttgcataccaaatgacctgacaggcatatagccatgtaaatgtactcccatagcatattttcctgtttgaattcttctctactaaaacttcatg

SEQ ID NO: 926779 - DNA, 120 bp, Artificial Sequence
  ENSG00000255886_3 (sequence is synthesized)
cataattctccattcaatacacctaatttatctttcttgctccatttttcctcaactgctgaaaaaatagtcaagtagaaaacgacccacgtcatgaatttccttaggagattgggatat

SEQ ID NO: 926780 - DNA, 120 bp, Artificial Sequence
  ENSG00000255886_4 (sequence is synthesized)
cctatatgataacttgcacagaagttaatatttttttcttactgacatggccatatcatgtatctgacactactcttatagtttaaatcaaaataataaaaatacctgtagcaaatttaa

SEQ ID NO: 926781 - DNA, 120 bp, Artificial Sequence
  ENSG00000225956_0 (sequence is synthesized)
attcacttacctgctctgataaattctgctgccatcctgagagctgcaccacggagaggcccacatggcaaggaactgagggctacctttactgtagcctgtgagagaccatgggccaag

SEQ ID NO: 926782 - DNA, 120 bp, Artificial Sequence
  ENSG00000225956_1 (sequence is synthesized)
agagtcccctctgcccacatgaaaaccagtcagagacgagctgttttgaatcaagtctcctgctcttgtagacttttagtttgaccttggaatgttcaagcagacctctgcatttaatcc

SEQ ID NO: 926783 - DNA, 120 bp, Artificial Sequence
  ENSG00000225956_2 (sequence is synthesized)
aagattgaggcaagttttctctctgcctaggtttatcttgtctgtctgtgaacaaaagagaggatagcaaagtaccttgtttggatttgtctataaatgtgaccttcctaaactggctaa

SEQ ID NO: 926784 - DNA, 120 bp, Artificial Sequence
  ENSG00000255882_0 (sequence is synthesized)
aagatgatcgtactttaaatgtggcaaagaaacagtgtggcttttgttatgagttcagcacaaaatagcagagctagacccgaagaggtcatttatattggaacatggtcttctcaggtg

SEQ ID NO: 926785 - DNA, 120 bp, Artificial Sequence
  ENSG00000255882_1 (sequence is synthesized)
taatcagtggaaactgatgaatggagaccattataacactttggtgtcttatacaacctgggaaacttcatataaccttggaagaaatctctcactctcaataccaccaaatgacagaaa

SEQ ID NO: 926786 - DNA, 120 bp, Artificial Sequence
  ENSG00000255882_2 (sequence is synthesized)
ttcttctcgtcaaaaaagaaagcttgccaaggaggaaggaagtttgtgatataacaatttaaagctgaagaataaacacatattttcttactttctcaactgggattctcatctgaacca

SEQ ID NO: 926787 - DNA, 120 bp, Artificial Sequence
  ENSG00000255882_3 (sequence is synthesized)
cagaacacgaaattgctcaagtggctgtttttctgattcatccaggagtggtacttaaccacgtatccttccagaactgtaggagaggctgatactaattaattcaacagcattctttag

SEQ ID NO: 926788 - DNA, 120 bp, Artificial Sequence
  ENSG00000255882_4 (sequence is synthesized)
gacattactgctttcttatcctgtgttaagaaagatcaccttaaaagcgatagaatcaaagaaaaagcaatggtttaaactttggctactgaaagaaaaacaaaaactattatctctctc

SEQ ID NO: 926789 - DNA, 120 bp, Artificial Sequence
  ENSG00000225952_0 (sequence is synthesized)
tgcccagcacagggcccagagcacagcaggtgcccaccacagctttgtccattggacagaagaaatgaacaagagggctggcctcatttctgcccccttcctggccctggtgcatgctac

SEQ ID NO: 926790 - DNA, 120 bp, Artificial Sequence
  ENSG00000225952_1 (sequence is synthesized)
aaaaggccaggggtcactgcggctctgaaatctactcattttcttgaaacacacagaaaagatgtttctgggatggatgtgtcaaggaaaaaaaaaaaaggctgaagttgagaattccag

SEQ ID NO: 926791 - DNA, 120 bp, Artificial Sequence
  ENSG00000225952_2 (sequence is synthesized)
ctcagcacatgtcctccagccctcacagacatgacgagggattaaaacgccttttctcctcatttgcccaacatctcaggagaaagccaagtggcgtccccatcagggctgtcctgggca

SEQ ID NO: 926792 - DNA, 120 bp, Artificial Sequence
  ENSG00000225952_3 (sequence is synthesized)
cccgctggctacgaagacaacctcctcattagcctggctttcctctgaaaatgagctcacacagactgcattgtgcgtgcctgtgtgaacgtgtgtggtgtcaggtaccccttaccgtgc

SEQ ID NO: 926793 - DNA, 120 bp, Artificial Sequence
  ENSG00000225951_0 (sequence is synthesized)
ggccatgacctgcttggcagccgcagccccatccatttccgcctccaccagcttggacatgaggcactccttctcctgtttgacctgagtcatcatcttctgtagagaggtcacttaacc

SEQ ID NO: 926794 - DNA, 120 bp, Artificial Sequence
  ENSG00000225951_1 (sequence is synthesized)
caatgaggtggattctgatgtagaggagggagaaacacatgaactcagaaggcagaaccttgaccacgagttccaccactggaggcttatttactgattagacgggaaaagctgtaacag

SEQ ID NO: 926795 - DNA, 120 bp, Artificial Sequence
  ENSG00000225951_2 (sequence is synthesized)
ctaactcggggaccccaggaagaacatactctgaacccttgtgatggaacattacctatccatgtttaaatgatggttttggagaattcccaacatcaaaattaaaagcttgggctacaa

SEQ ID NO: 926796 - DNA, 120 bp, Artificial Sequence
  ENSG00000229066_0 (sequence is synthesized)
ttgggttcctgccggcgcctctccctccacacctcacctcaaacagagggagccggctccggtctcggccagcccagagagggcctcccatagtgcagcggcgggctgaaggtctcctca

SEQ ID NO: 926797 - DNA, 120 bp, Artificial Sequence
  ENSG00000229066_1 (sequence is synthesized)
agcgctgccagagtgggcgtcgaggctgaggagacaccgagagcgagtgagggctgcaagcatgctgtcacctctcagtaatttgagaaaatttctgttttctatggcagaggcatcatg

SEQ ID NO: 926798 - DNA, 120 bp, Artificial Sequence
  ENSG00000229066_2 (sequence is synthesized)
tgaggaagctgttattggcttgaatttctgcctcttgtattcctcaaagcaaatgagcagtgaagtagacaagagaccataattcccatagtcaaggttgggagcagcaagtactgcagc

SEQ ID NO: 926799 - DNA, 120 bp, Artificial Sequence
  ENSG00000229066_3 (sequence is synthesized)
ccatttgaggtatgataatcagctgattagctagtggagtcgttttccctgaggctcttttgtgtgcaaaatcctcacactcaattgacatgtggacatcataaagctgatgaaatgcaa

SEQ ID NO: 926800 - DNA, 120 bp, Artificial Sequence
  ENSG00000229066_4 (sequence is synthesized)
ttgtaatgaacaagagggagcggcatctgcagccgtctaaatgaaggaccctttcctctcgccatgctaattcagaaaatctgctcttaacgtgtactccccctggattccaaattgagg

SEQ ID NO: 926801 - DNA, 120 bp, Artificial Sequence
  ENSG00000229066_5 (sequence is synthesized)
cacatctccatgaatgcatattcaaggagtgaattagcctctgtggcaagtgagcgcctagcctggccagactgattctaatttcaagacagattatactgcatcaaccatagtaatgat

SEQ ID NO: 926802 - DNA, 120 bp, Artificial Sequence
  ENSG00000229066_6 (sequence is synthesized)
gtcctacagtcagctttactgctcggacagacaggtgcacagagagagccagcaagacctctcagaaaacaccaaaggctgctgtcaaatgatttcagcccaaatagccagatgaaggag

SEQ ID NO: 926803 - DNA, 120 bp, Artificial Sequence
  ENSG00000229066_7 (sequence is synthesized)
aaaagaggtaatctgtatctctggcctccttgtctgactgagtggattcattgctcctgtatgtgttatcacagaagtgaactttcatagaaaagcatctggccaaagatgccattcttc

SEQ ID NO: 926804 - DNA, 120 bp, Artificial Sequence
  ENSG00000229066_8 (sequence is synthesized)
aattcagagggaagactttctggagcttcatggcttaacagttaaccgagtatccttgtaacagctaagtacccttagcttaacaaataaaaaaactgaaacgcatttggaaagacaaag

SEQ ID NO: 926805 - DNA, 120 bp, Artificial Sequence
  ENSG00000229066_9 (sequence is synthesized)
gctacgtagcaggagtcagctttctagattaatattacaacaacataaacaacaatcaacattgattgggcactaggttctgtgctgggtttgttcctatgtcatttcattcaatcctca

SEQ ID NO: 926806 - DNA, 120 bp, Artificial Sequence
  ENSG00000229066_10 (sequence is synthesized)
caggagtccaaggagatgcactattattttcttcatgtcacagatgaggaaatgagaatgaagatgtcgagtgactattccaaaggcatagtaaggagtacccagcctttgaaccctcct

SEQ ID NO: 926807 - DNA, 120 bp, Artificial Sequence
  ENSG00000229066_11 (sequence is synthesized)
ttctgaatggaagtgtccctctaatcatccttgctaaacattatagcttcaaaattaaagaatggccaaacttggccataaaggagtaggagtaaataaagatgatgactggagctaaaa

SEQ ID NO: 926808 - DNA, 120 bp, Artificial Sequence
  ENSG00000229065_0 (sequence is synthesized)
gccattctcctgcctcagcctcccgactactcaggagtctgagtgggaggatcacctaagcgcaggaatttgaggctacagtgagatgtgatcattccactgcactccagcctgaaagac

SEQ ID NO: 926809 - DNA, 120 bp, Artificial Sequence
  ENSG00000229065_1 (sequence is synthesized)
ctccagcctgaaagacagagcaagaccttatctctaaaaatttaaaacaaaccaaccaacccagaatttatattagaatagattttctcattttagagagatttattagagagaaggaaa

SEQ ID NO: 926810 - DNA, 120 bp, Artificial Sequence
  ENSG00000229065_2 (sequence is synthesized)
tccctagagaggtagagggaagaccacaggacccaaacaagtgccctttcccttctgtgcggccagggaggggttcccagcaggtgggtgctgctttttccaaggcctcttctttttatt

SEQ ID NO: 926811 - DNA, 120 bp, Artificial Sequence
  ENSG00000229065_3 (sequence is synthesized)
gttatgcctgtatatttcaaaatctaaaaccagacgttaatgtagaaaacatttcgatacaggtattggcacatgcatacatgcgcatgcctattcatcctgacctgctccaagccatcc

SEQ ID NO: 926812 - DNA, 120 bp, Artificial Sequence
  ENSG00000229063_0 (sequence is synthesized)
ccacgggcaccaggcttctcggctgggtagctctttgtctcctggcagcaggctgttttcatgccaaagtcacacagactccaggatatttggtcaaaggaaaaggaaggaaaacaaaga

SEQ ID NO: 926813 - DNA, 120 bp, Artificial Sequence
  ENSG00000229063_1 (sequence is synthesized)
caagttcttcaagaaatggagatgcacaagaagcgattctcatctcaatgccccaagaacccaccctgcagcctggcaatcctgtcctcggaaccgggagacaccgcactgtatctctgt

SEQ ID NO: 926814 - DNA, 120 bp, Artificial Sequence
  ENSG00000253398_0 (sequence is synthesized)
acagctcccagcgtgagcaatgcagaagacaggggttaggaaactgttgcctatgggctgaatttggcttgctgtctgcttttagagaccaggatgaatctgaaggctatggtggttatt

SEQ ID NO: 926815 - DNA, 120 bp, Artificial Sequence
  ENSG00000253398_1 (sequence is synthesized)
gcctgtgatgtcatcagcaaccaatcagagcttctgaactgcacgtctcacattcagtgttaacatactgagttgatgtaattccaacaaaaaaaaaataaaaagatatgtgctgtttta

SEQ ID NO: 926816 - DNA, 120 bp, Artificial Sequence
  ENSG00000253399_0 (sequence is synthesized)
gaagtccttggagattttgctcccggcagctggagtgcaaggagctgcctggagatgaagtgattggcgggctcgcctagctcagatgttctgtcttcagaaaatacttaggcgggtttg

SEQ ID NO: 926817 - DNA, 120 bp, Artificial Sequence
  ENSG00000253399_1 (sequence is synthesized)
gctggtttgaatatgtgtgctgtgcgtttggagtgcctctgtgtggcttccgtctgggagcaggccgagggtgaatctcctggatcaatgtgcagcgtcatttggtagattgcgtgtcca

SEQ ID NO: 926818 - DNA, 120 bp, Artificial Sequence
  ENSG00000253399_2 (sequence is synthesized)
gccttgccgcgctgtagggtgggtgtgatcatccgtggctgcgtcattcgctgagctgataaaaatcctctggaaactttcacgttgcctgctgccaaattacatagctcaaatcaccaa

SEQ ID NO: 926819 - DNA, 120 bp, Artificial Sequence
  ENSG00000253390_0 (sequence is synthesized)
cctggattcagctactgttaacggaagaaaccatgaagcctcagaaggttagagccaaagggactctactgtgtagccccaatcaccttcttttacagttaagagcctggaacccagaga

SEQ ID NO: 926820 - DNA, 120 bp, Artificial Sequence
  ENSG00000253390_1 (sequence is synthesized)
ggttgagtgacttggccaagaccccctggaggcagaggagagcagaaccaatgtttcagactcccacatgacttgcgcatcagtgtcttttttttgacaatctgttgctataagaaatta

SEQ ID NO: 926821 - DNA, 120 bp, Artificial Sequence
  ENSG00000253390_2 (sequence is synthesized)
cctgtgacccaaggctagcattgagaagctaaagctggccactgacatactgtgattttaaggacagtctccttcgaaattatctgcctttcaaaatctttgccattggagacactggtt

SEQ ID NO: 926822 - DNA, 86 bp, Artificial Sequence
  ENSG00000253390_3 (sequence is synthesized)
tatctgcctttcaaaatctttgccattggagacactggttggggttatgttagtcttccttaaggagggctctactaaaatgccag

SEQ ID NO: 926823 - DNA, 71 bp, Artificial Sequence
  ENSG00000253390_4 (sequence is synthesized)
ggtctcgaactcctgacctcagatgatcccccagcctcggccttgtttttttttgaaatggagtcttgctc

SEQ ID NO: 926824 - DNA, 120 bp, Artificial Sequence
  ENSG00000253392_0 (sequence is synthesized)
ctgggactgcgcgggtgctgcggtgagcttcggggtctggtatggctggtgcttgtgcagccactgcctccggcctcggtgattgcgaaactgaggggcagttgggtgcagtgagacttg

SEQ ID NO: 926825 - DNA, 120 bp, Artificial Sequence
  ENSG00000253392_1 (sequence is synthesized)
acgtgccttttaagagaagaaagatgcgtgaagactgtcctgcacttggtgcattcatatggtttttctccagcagaaactttcttgtgcaggaactgatgagaaagaaatgagttcatt

SEQ ID NO: 926826 - DNA, 120 bp, Artificial Sequence
  ENSG00000253392_2 (sequence is synthesized)
aaaaaccaagggaaggaatgatgccatcctcacctactgaggccaggttccggaaggtctccagcatcacatctctgtagaggtccctctgagcagaatccagcaaagcccactcctcca

SEQ ID NO: 926827 - DNA, 120 bp, Artificial Sequence
  ENSG00000253392_3 (sequence is synthesized)
aggtgtgcaggaggattggagacactgaaagtactggggaactggactcaattcataaattcaaacaagattctgtggtgtcccaacacctcctctatgacgcgaatgttagatctttta

SEQ ID NO: 926828 - DNA, 120 bp, Artificial Sequence
  ENSG00000253392_4 (sequence is synthesized)
cttattcacaatcacttcctagtaaacttcatggcaccactatcagtctgaacttatctctgcctttttactgcgactgctcttattttcctctaccaggagggtctagagaaatgctat

SEQ ID NO: 926829 - DNA, 120 bp, Artificial Sequence
  ENSG00000253392_5 (sequence is synthesized)
gcaaatgaagtaacttttccatttgaaacgttgcataacgcagcaggcctcggttgtccaaacgatgcacatttcataggactttcggaaaagccttccaccagctactgcagaaaatgg

SEQ ID NO: 926830 - DNA, 120 bp, Artificial Sequence
  ENSG00000253392_6 (sequence is synthesized)
agttgtcgggctgggactgcgcgggtgctgcggtccccattcctaattcaaaggctgctgtctaactcccagtgagaaatgaggaaaaacaaattgcaaaagatgattagagactatact

SEQ ID NO: 926831 - DNA, 120 bp, Artificial Sequence
  ENSG00000253392_7 (sequence is synthesized)
ttatagagaactctgcatatttaccaggttttgcaaaaaaaaatttggtaaggtacaatatataaaatagtgagacttgacgtgccttttaagagaagaaagatgcgtgaagactgtcct

SEQ ID NO: 926832 - DNA, 73 bp, Artificial Sequence
  ENSG00000253392_8 (sequence is synthesized)
caatgaaatgtgcacgttaaatggctgtacgttctatatgtcagtaaagctggtttttaaaaaacataaagaa

SEQ ID NO: 926833 - DNA, 120 bp, Artificial Sequence
  ENSG00000253392_9 (sequence is synthesized)
gggtctaatacagttcgaaatgaaaatatttaagagacaaaacacttaactattaaaacttaggtactatagctgaaagaggacttagagaattattttctcacataaacatttattttt

SEQ ID NO: 926834 - DNA, 120 bp, Artificial Sequence
  ENSG00000253392_10 (sequence is synthesized)
gaaagagctggaaattcacgactaatgggtctgttttacaaatgaggtattgacaaagacaatatcatacttgtaagatttctctcctggtgtgaattttctggagcattatacatgaat

SEQ ID NO: 926835 - DNA, 120 bp, Artificial Sequence
  ENSG00000253392_11 (sequence is synthesized)
taatgtgaggttaccccattaaagttatagaatttctctttagtgtgtgctctcactggttttagaaagaatgacttggcaactgaaggcttttgagtatgactgacattcgtgggattt

SEQ ID NO: 926836 - DNA, 120 bp, Artificial Sequence
  ENSG00000253392_12 (sequence is synthesized)
ctgtcctgtgtgcatcctcagatggttccggaaggaggagtgccacttgaaggacatcccacattgtttacatttgtgaggtttctctccagtgtgcatcctcacatgattatgtaaggt

SEQ ID NO: 926837 - DNA, 120 bp, Artificial Sequence
  ENSG00000253392_13 (sequence is synthesized)
tgaggaccaagtgaaggtttttccacattgtttacactcataaggcttctctccagtgtgcatcctcaaatgaccttggaatgctctggaagaggtaaaggccttcccacagtgttcaca

SEQ ID NO: 926838 - DNA, 120 bp, Artificial Sequence
  ENSG00000253392_14 (sequence is synthesized)
tttatggagctgctcttgcgtgtgaattctcacatgttctctaaacgttgaggaccaagtgaaggtttttccacattgtttacactcataaggcttctctccagtgtgcgtcctcaaatg

SEQ ID NO: 926839 - DNA, 120 bp, Artificial Sequence
  ENSG00000253392_15 (sequence is synthesized)
acctcggaatgatctggaagaggtaaaagccttcccacattgttcacatttatagagctgctcttgcgtgtgaattctcacatgttctctaaacgttgaggaccaagtgaaggctttccc

SEQ ID NO: 926840 - DNA, 120 bp, Artificial Sequence
  ENSG00000253392_16 (sequence is synthesized)
ttcccacagtgttcacatttatagagtttgtccccagtgtggatcctcatgtggactcgcaaggtttcagaccaactgaatgttttcccacactgcttgcattcatagggcttctctccc

SEQ ID NO: 926841 - DNA, 120 bp, Artificial Sequence
  ENSG00000253392_17 (sequence is synthesized)
gtgtgcgtcttctcatgtctttgaaaagcctgggggtaagtgaaggctttcccacagtgctgacatttatagggcttctctccagtgtgtgttgtcatgtgtctttgaaatgtcgaggga

SEQ ID NO: 926842 - DNA, 120 bp, Artificial Sequence
  ENSG00000253392_18 (sequence is synthesized)
taaatgaaggctctcccacattcctgacatttatatggcctgtcttttgtgtgagttctcacatgtctagtgaagcttgcgaacccattaaacgccatccgacactgctcgcatttgtag

SEQ ID NO: 926843 - DNA, 120 bp, Artificial Sequence
  ENSG00000253392_19 (sequence is synthesized)
gttttctctgctgtgtgagtctttacgtggtgggagaggtaacgaggatgttggaaagtttgcccacatgcttgacacttatacggcttctcctcagtgtcagttcttccgtgactgtgt

SEQ ID NO: 926844 - DNA, 120 bp, Artificial Sequence
  ENSG00000253394_0 (sequence is synthesized)
gtcttttctggcagattacttctgtgagcaactgggtctctcagttctttgggagcaccctgggaaacagtgtggctatgacttggagctgctcaccagttccagtcattctgtggttga

SEQ ID NO: 926845 - DNA, 120 bp, Artificial Sequence
  ENSG00000253394_1 (sequence is synthesized)
gagctgctccctatggatgttaattcttctctattttagattttccacaggtgtgggccccattagctctggccacctgagaaagccctcaggcaaagagtcgcaggtgaaagccagcag

SEQ ID NO: 926846 - DNA, 120 bp, Artificial Sequence
  ENSG00000253394_2 (sequence is synthesized)
ttagaggttcacagaaatgagtgcagaagcatcttcagttggagagccattgcctcttgctgtgaaatatttgggaatcttcagaaaccatgaagaataacctgctaaaggccaccaagt

SEQ ID NO: 926847 - DNA, 120 bp, Artificial Sequence
  ENSG00000253394_3 (sequence is synthesized)
tctattgaacatcatgaatcctatgctcaagtgagatcagctcaagtgagaccagatatctgaagaccttttcattttcgccaccctcaaatgaaggcatgcaaggtatgtagccatctt

SEQ ID NO: 926848 - DNA, 120 bp, Artificial Sequence
  ENSG00000253394_4 (sequence is synthesized)
tatttttctattatttaacttcatttttcctttgtgccctcatcagcctttcattttaggcaaataaaaccctttaaatttggaacacaggcactttggaattttccccttgaaatgctt

SEQ ID NO: 926849 - DNA, 120 bp, Artificial Sequence
  ENSG00000253394_5 (sequence is synthesized)
ctccttcagatagcacataagttttaggcatcataacaatttgggcttgcacccaggcctcaacaccttctaggctggagcccctccaagaactaatctgtgttagtggtaccctttaat

SEQ ID NO: 926850 - DNA, 120 bp, Artificial Sequence
  ENSG00000253394_6 (sequence is synthesized)
aatgggatggaatgacagaaaagggagagggtataagaatccggagaaaattgtttcatctgctttgcactttttgaacgatactccatagatagtcacctacaaagcatcagggaacgt

SEQ ID NO: 926851 - DNA, 120 bp, Artificial Sequence
  ENSG00000253394_7 (sequence is synthesized)
gtatctgggttctatgggagtgagttctcaaagtcataaaaaatgtctcccacctatcagttttcattaatgaaaatgtcaggacagctgaataattttcataaaccattcattcaaggt

SEQ ID NO: 926852 - DNA, 120 bp, Artificial Sequence
  ENSG00000253394_8 (sequence is synthesized)
atttattagcaagaaacaaattgctgtctttttattttttgtaatcatttattcataatgctagcctttggtcagacaatggcctcttttaaaacacaaataatcaacatgttctgaatc

SEQ ID NO: 926853 - DNA, 120 bp, Artificial Sequence
  ENSG00000253394_9 (sequence is synthesized)
ctggacatattctgtttagggagttgcttcttatgattggcactatcacagccttgcttcagtttattacactgttagtaagtggaatcactaaagctgtcacatcaaaagccttctgga

SEQ ID NO: 926854 - DNA, 120 bp, Artificial Sequence
  ENSG00000253394_10 (sequence is synthesized)
ttttcagaatccttcactagcattcttctctgacaagaaatgaattgttcttttgttgttgcataatctgattgacaagactaacatgaatagggtctattgcatggaggaaattaggaa

SEQ ID NO: 926855 - DNA, 120 bp, Artificial Sequence
  ENSG00000253394_11 (sequence is synthesized)
ccatttctcttgtcaaaatttctgtctttgcttttgtctttcctgtctaagcacagatatggtcacagtaagtagtgggcagcctacaaaggcagtggtgcagcttaaagagcacacgtc

SEQ ID NO: 926856 - DNA, 120 bp, Artificial Sequence
  ENSG00000253394_12 (sequence is synthesized)
gttcacagaaatggcaactttctctatggtgggtaccgtagaagactagaagtttctattataacacattcatcattttgaaaaatgaaggtggctggctgcagtggctcacgcctgtaa

SEQ ID NO: 926857 - DNA, 120 bp, Artificial Sequence
  ENSG00000253394_13 (sequence is synthesized)
aaagtgtgaagctatctgaagattgactcaattgacctgatgcaatgaggaagtccactagaggatttaagcaataggccaagttttcaatcaaatcttaaaataattaagtgaccttaa

SEQ ID NO: 926858 - DNA, 120 bp, Artificial Sequence
  ENSG00000253394_14 (sequence is synthesized)
aattcttgactaaatttctgagtgatcacttgtgtattctcatcaaatgaggtagttaagagacctgaggaagagaatacttttggatctgagtttctgtctgttaagtaaaaatggatt

SEQ ID NO: 926859 - DNA, 120 bp, Artificial Sequence
  ENSG00000253394_15 (sequence is synthesized)
tgttgtataatctgagtaagctgtttaccatctcaagagtctccattaagaaaaaaaatgttagatagtggacaacaatgctctctttatgaggattacatggtgtaaagtgactgtcat

SEQ ID NO: 926860 - DNA, 120 bp, Artificial Sequence
  ENSG00000253394_16 (sequence is synthesized)
gtgtcaaagcttcataaattggggaaatagataaataactgtggatagttttgcctttttgtaaacagatactgataaaaagacctagaataaaggctctctcttttaataatttctgaa

SEQ ID NO: 926861 - DNA, 120 bp, Artificial Sequence
  ENSG00000253394_17 (sequence is synthesized)
agaaatgatgccataggtattaacactgcagagaatcaagaggcctggtgatgcttgtgtagaattgctgaaacggttgatcgtggaggacagacaggagaggaatcatgcaaatactac

SEQ ID NO: 926862 - DNA, 120 bp, Artificial Sequence
  ENSG00000253394_18 (sequence is synthesized)
tgaggtcaaacaatcttctcacctcagcctcgcaagcagctaggactacaggcatgtgccaccacgccccactaattttttaatttttcttttgtggagacgcagtcttgttatcttgaa

SEQ ID NO: 926863 - DNA, 120 bp, Artificial Sequence
  ENSG00000253394_19 (sequence is synthesized)
attataggatatttgtgtatatagctttgctggtttgacttcctagaatagctcccaggaacacaaagtacttaattgattagtataaaatgattatgtcatactcacatgttggttttc

SEQ ID NO: 926864 - DNA, 120 bp, Artificial Sequence
  ENSG00000253394_20 (sequence is synthesized)
taaatgcacttaatttttctgattaagaactgaaaactatgctgaccagggacactgtagacctgtggctcatttttgcataaaggttatgtgtttattgtctgatttggtcatgcctat

SEQ ID NO: 926865 - DNA, 120 bp, Artificial Sequence
  ENSG00000253394_21 (sequence is synthesized)
aggccaatagtgttttattttgaaatgtttcaaacttacaataaggcacaaaaataatataatagacaccatggtctcagcatccagatttaagagatgttaagatgttactacgtttgc

SEQ ID NO: 926866 - DNA, 120 bp, Artificial Sequence
  ENSG00000253394_22 (sequence is synthesized)
ttcagacttttctaacacacacacaaaatactagagatgcagccaaaaccccatctatcaatcccttcctcttctctccagaggtagctattacattgaagtcggtatgtaatatttcca

SEQ ID NO: 926867 - DNA, 120 bp, Artificial Sequence
  ENSG00000253394_23 (sequence is synthesized)
tgtttggctttgtacatgttctacttatgtatgtattcattaacttcgtactactttttaatgttcttatatagtttcattagtaacatcccagagggcatatcatttgtgagtttgatt

SEQ ID NO: 926868 - DNA, 120 bp, Artificial Sequence
  ENSG00000253394_24 (sequence is synthesized)
ttctcactcttcatttcttttttggggataatttattcttggtacatgtagatctcctcactccactacaattgctttatggtacttaatatatgaataaactatggtatatttatttcc

SEQ ID NO: 926869 - DNA, 120 bp, Artificial Sequence
  ENSG00000253394_25 (sequence is synthesized)
tgagagacggtatcaatagatattatgggaactcactaaattcagactgtacaggaaaagaatgtttcagaagagtaaaagactattttggaatgaattatagagtattttttaaagaaa

SEQ ID NO: 926870 - DNA, 120 bp, Artificial Sequence
  ENSG00000253394_26 (sequence is synthesized)
atctgtcatgtgagtttacagtgagaagatggccatctatgaaccaagaagtaggcattgtccagacaccaaatctgctggcaccttgatcttgggacttcccagcctccagaactgtga

SEQ ID NO: 926871 - DNA, 120 bp, Artificial Sequence
  ENSG00000253394_27 (sequence is synthesized)
accaacaaacaaaaacttgaagaataataatcttcaaaacattcttcatagtggcccctaaatggaaaaaatccaaatggtcatcaaaagaaaaatgagtaagaaactgtactatattca

SEQ ID NO: 926872 - DNA, 120 bp, Artificial Sequence
  ENSG00000253394_28 (sequence is synthesized)
tacaatggactactactcggcacacaaaggggaatgaactactgatgaaggcattaacatggatgaacctcaatatatttatgttgagtaaaaaatacaggaagaaggaagtacatatta

SEQ ID NO: 926873 - DNA, 120 bp, Artificial Sequence
  ENSG00000253394_29 (sequence is synthesized)
tatggttccatttacagaaagttctagaacaggcaaaaccatccatggtgatataaatcaggatgagattgcctctgggaagggagagggaaataatcgacttgaaaggtcataacccag

SEQ ID NO: 926874 - DNA, 120 bp, Artificial Sequence
  ENSG00000253394_30 (sequence is synthesized)
agagtaacacaataaaatataacacaataaaatataagtgctctcataggagacactgtgatattttaaatgattgctgaaagaactaatattcttaagaataaaatactatgaaatcca

SEQ ID NO: 926875 - DNA, 120 bp, Artificial Sequence
  ENSG00000253394_31 (sequence is synthesized)
atgcagcaagggctctagccagttccaggtgaagaccccaccccgggccatcaaggagcttccctgcctccactagacagagcagagtgagagttccatgatccccaataggtaggggct

SEQ ID NO: 926876 - DNA, 120 bp, Artificial Sequence
  ENSG00000253394_32 (sequence is synthesized)
atgcctcaagccagcatgaagcagttacagaaaaaaagaccatcagttcctctgcctcccatggggatcacatctttcagcagggagatgaggcataaaaacaaggtctggaggcaggga

SEQ ID NO: 926877 - DNA, 120 bp, Artificial Sequence
  ENSG00000253394_33 (sequence is synthesized)
gacaggaaatatcctctccatagggtataggccaagtaaatgactttgtaactttactcctcattttcataggttgcaccccaagtaagcaatggaatcctctagagggtatttccccaa

SEQ ID NO: 926878 - DNA, 120 bp, Artificial Sequence
  ENSG00000253394_34 (sequence is synthesized)
tcattttcataggttgcaccccaagtaagcaatggaatcctctagagggtatttccccaaaattctgtaatggggtccttgagcccctatgctcgggcccactcccacactgtggagtgt

SEQ ID NO: 926879 - DNA, 120 bp, Artificial Sequence
  ENSG00000253394_35 (sequence is synthesized)
catttgccaccattagccctcttcttctgactgcttgttgtttgtacttcctagaggccatggtcatgcatcagccctactcatttaaagatcacacaaaaagatgaatcaaccaaggtt

SEQ ID NO: 926880 - DNA, 120 bp, Artificial Sequence
  ENSG00000253394_36 (sequence is synthesized)
tggagacaataaactgctcacccaagattatataaagaaagcaaaaattgcagttagaagtggcatttgttggttgtagtaacagttatcataatctgtgccatggatatcagaaaggcc

SEQ ID NO: 926881 - DNA, 120 bp, Artificial Sequence
  ENSG00000253394_37 (sequence is synthesized)
aagtgtgaaggagctgaaccaactagaaactgatttttaagttgtaggtttaaaacataccagttgatggacagaggcctatttgcattgataagtcactggagtaaagaggtaaaaatc

SEQ ID NO: 926882 - DNA, 120 bp, Artificial Sequence
  ENSG00000253394_38 (sequence is synthesized)
gctttgtttccatgaatgaattggcatcattatggagaactgagggaatgcagactttcaaggcagggaaacattacatttagctcatatacatgataaaaagaaacagattgtgtaatt

SEQ ID NO: 926883 - DNA, 120 bp, Artificial Sequence
  ENSG00000253394_39 (sequence is synthesized)
actacacatctgtgagcacatttttttttttaaatagaacttttcctgaataattaatcacatctcttgatttaggccttggtagtttttaataaattttaaatatttataccgtgttgc

SEQ ID NO: 926884 - DNA, 120 bp, Artificial Sequence
  ENSG00000253394_40 (sequence is synthesized)
caactatttaattgcttaccaactgcacaatatacagtcactttgggagaggaatcaagaggctgataaataaaagggtgctatccacaggctgaaattttttatcctcacctgcaatta

SEQ ID NO: 926885 - DNA, 120 bp, Artificial Sequence
  ENSG00000253394_41 (sequence is synthesized)
aagtacccaagaatttttcaaagctacctttcagaagtgttttcagattttatacagtcttcttaaaaaaaagttctgctcctgtaatgttgttgaaatatatttggacacctaaagtgt

SEQ ID NO: 926886 - DNA, 120 bp, Artificial Sequence
  ENSG00000253394_42 (sequence is synthesized)
gtgccataaagactgcttttctcctaggaacattatgcctgtaattagtagatattatcacgaagatgatagaatttaagtttatggattgggacccatgcagtacagaaagcccggcaa

SEQ ID NO: 926887 - DNA, 120 bp, Artificial Sequence
  ENSG00000253394_43 (sequence is synthesized)
ccaatgactaaccagtccggattcactcagcctttgctaccaaaaaaaatcttagtaagctagacacaaaaggacaaatattgtatgattccatttacatgaggtacttagaataggcaa

SEQ ID NO: 926888 - DNA, 120 bp, Artificial Sequence
  ENSG00000253394_44 (sequence is synthesized)
attcacagagacagagttagtatagtgattaccagggtacagggaagagagaaataaagatttgtttaacgagtatatggtttcaatttgggatgcaaaaatgttctgaagatggatgat

SEQ ID NO: 926889 - DNA, 120 bp, Artificial Sequence
  ENSG00000253394_45 (sequence is synthesized)
cgtgatgatggtacaacaatgtaaatgtacttactgtctcttagccgtacatttaaaatagttaaaattgtaagtttcatgttatgtatattttcccaaaataaaaaatttttaagcaat

SEQ ID NO: 926890 - DNA, 120 bp, Artificial Sequence
  ENSG00000253394_46 (sequence is synthesized)
cattgaaggaggctcagaaaatacttagtcaacaagcatttattatccctctaccccagaggatatttggcaatgtctggggacatttttgatcttcacaactggggaaggaatgctact

SEQ ID NO: 926891 - DNA, 120 bp, Artificial Sequence
  ENSG00000253394_47 (sequence is synthesized)
ggcatctagtgggtagggccagagatgcagctaagcatccaacaatgcacacagcatagcccccacagcaaagaaatagccccaaatgtcaatagtgccaaagttgagaaactctgccca

SEQ ID NO: 926892 - DNA, 120 bp, Artificial Sequence
  ENSG00000253394_48 (sequence is synthesized)
gaacgctcttcctccagtcacccatttcctttaagtctctactcaaatatcatcttaatgaggcttagcccgactgccttctgtgtaaaattgttacccgtctcggcacttcctcagctc

SEQ ID NO: 926893 - DNA, 120 bp, Artificial Sequence
  ENSG00000253394_49 (sequence is synthesized)
cttctctgattttgttttattgtagtacttctcactgttggctctactgaaccatttacttattattttattatcagcatctctccactgaaatataaattctctgagggtggaaaatta

SEQ ID NO: 926894 - DNA, 120 bp, Artificial Sequence
  ENSG00000253394_50 (sequence is synthesized)
ggcatctctattttccacaaagcaatattgaagttaggccaattaataaccctacaatggcttctaagtgtttgagggaaaggaagagtttcatgtctctcacttggaatcaaaagctag

SEQ ID NO: 926895 - DNA, 120 bp, Artificial Sequence
  ENSG00000253394_51 (sequence is synthesized)
aaatgatgaagcttagagagaaaggcatgtcaaaagccaccatgagctgaaacctgggtcttttgtgcctaacagccaagttgtgaatgcaaaggaaaggttcttgggagaaattgaaaa

SEQ ID NO: 926896 - DNA, 120 bp, Artificial Sequence
  ENSG00000253394_52 (sequence is synthesized)
aaatgataagaatgagagcaaaacaaccttatttctgatatggagaaagtccacgtgatcaggatagaaggtcaaaccagccataacattcacttaagccaaagtctaatccagggcaag

SEQ ID NO: 926897 - DNA, 120 bp, Artificial Sequence
  ENSG00000253394_53 (sequence is synthesized)
aacctaactctttaagtctgtgaagagtgagagaggtgaggaagctgcaaagaaaagtttaaagctagcagagcttggttcatgaggtttaaggaaaaaagccatctccataacataaaa

SEQ ID NO: 926898 - DNA, 120 bp, Artificial Sequence
  ENSG00000253394_54 (sequence is synthesized)
gtgcaaggttaggccataagtgctgatagggaagttgcagtaagttatccagaagatctacctacaatcattaatgaacatgactatgctaaacaatagattttttatgtagatgaaaca

SEQ ID NO: 926899 - DNA, 120 bp, Artificial Sequence
  ENSG00000253394_55 (sequence is synthesized)
ctaaacaatagattttttatgtagatgaaacagccttatcctgtattagaagaagaagccatataaaactcccatagcgagtcaggtgcgttggatcacacctataatcccagcactttg

SEQ ID NO: 926900 - DNA, 90 bp, Artificial Sequence
  ENSG00000253394_56 (sequence is synthesized)
gtaggggcatgtgcctgtaatcccagctacttgagacttgcgaggctgaggtaggagactcgcttgaacccaggagatcaaggctacagt

SEQ ID NO: 926901 - DNA, 120 bp, Artificial Sequence
  ENSG00000253394_57 (sequence is synthesized)
gtaggagactcgcttgaacccaggagatcaaggctacagtgagccatgatcatgccactgctttccagcctgggtggaagagcaagactgtctcaaaaaaagaacaacaacaacaacaaa

SEQ ID NO: 926902 - DNA, 120 bp, Artificial Sequence
  ENSG00000253394_58 (sequence is synthesized)
ggatataacttatggcctattctatatggaaagttggttttctcacagttccactccctttccagatatcagcaaatggccctcctagcccagaagtctccagagaggccaccaagttct

SEQ ID NO: 926903 - DNA, 120 bp, Artificial Sequence
  ENSG00000253394_59 (sequence is synthesized)
aaggacattagatttgggaaggaccaggggagtaacgatatggcttgggtctgtgtccccaccaaaaactcatgttgaattataattcttagtgttgggaaagggacctggtggaaggtg

SEQ ID NO: 926904 - DNA, 120 bp, Artificial Sequence
  ENSG00000253394_60 (sequence is synthesized)
attgtatcatgtgggcagatttcccccttgttctcatgacagtaaatgacttctcacaggatctgttgatttaaaagtgtgtggcacttctcccttcaccctctgtctctcctgctgcca

SEQ ID NO: 926905 - DNA, 120 bp, Artificial Sequence
  ENSG00000253394_61 (sequence is synthesized)
tgtagagaaggtgctggcttccccttcaccttatgccatgattgcaactttcctgaggccttctattaatgcttcttgttaagattgaagaactgtgagtcacttaaacctcttttcttc

SEQ ID NO: 926906 - DNA, 120 bp, Artificial Sequence
  ENSG00000253394_62 (sequence is synthesized)
ataaagtccccagtctcaagtagttatagcagcatgagaacagattaatacagctactgttaagattgacagaattaaatgaaatgaagtctgtagaaagcacatagcaagttgcacaaa

SEQ ID NO: 926907 - DNA, 120 bp, Artificial Sequence
  ENSG00000253394_63 (sequence is synthesized)
tatgtggctatattagaaatcactaaattttatgcattatacttacatttttaaaatttaaaagtgtgaattttatgctataggaatgtcagtgagaaataaattctataacaaattgcc

SEQ ID NO: 926908 - DNA, 120 bp, Artificial Sequence
  ENSG00000253394_64 (sequence is synthesized)
gcttttttttttatcttcattttctcatgagggctcctgtgtcatgtaaaatatgttaaatttatacgcttttctcttgttaatttatcttacgtcaatttaattctcaagcccagcaga

SEQ ID NO: 926909 - DNA, 120 bp, Artificial Sequence
  ENSG00000253394_65 (sequence is synthesized)
cttacgtcaatttaattctcaagcccagcagagaccctagaagggcagaggtaaatttttgcctgcactacactattgatcccaaaacacacacacagagagagagagagagaaagagag

SEQ ID NO: 926910 - DNA, 120 bp, Artificial Sequence
  ENSG00000253394_66 (sequence is synthesized)
gaaattctgccatcagcaaatatatcttttctgactttgaaaatactgatgacagtggagattaaaatcctaccaaggctgctgcagaatcaatgacacatgaggtggccaggcatggtg

SEQ ID NO: 926911 - DNA, 120 bp, Artificial Sequence
  ENSG00000253394_67 (sequence is synthesized)
gaatgggaatgaggaagagaaagagagtggaagaacatttgttttactgagggaagttggggaaaagccaatgaaatagagacagcaagagagagaaaagaagggaggaaggaaggagaa

SEQ ID NO: 926912 - DNA, 120 bp, Artificial Sequence
  ENSG00000253394_68 (sequence is synthesized)
ttgcttgaagtggataacagaactgtgagcaaagaaagaataggaagtgtgagtacagcctggagacagactgaggagaccatagacatcttccatttgtttgtatctttttaaattctt

SEQ ID NO: 926913 - DNA, 120 bp, Artificial Sequence
  ENSG00000253394_69 (sequence is synthesized)
atctcttggttaatttcttagtggttttatatatatatatatagttgttaatgttattgttttcttaatctcaatcacattgttggtgtgttgaaatacaattttttcatgttgattttg

SEQ ID NO: 926914 - DNA, 120 bp, Artificial Sequence
  ENSG00000253394_70 (sequence is synthesized)
tatcttgcaactttgctaaattcatgtattagttcaaacagtttgtgtatgtgtaatctttggaattttctgcacatgagatcctgttgtctgtgaactgagatagttttgtttctttct

SEQ ID NO: 926915 - DNA, 120 bp, Artificial Sequence
  ENSG00000253394_71 (sequence is synthesized)
tgtccatttggatgccttttgtttattttccttgcctggttcctctggctggatctttcaatgctatgtcaagctacttcaagcttttcaaatttcaccattgagtataatggtgctgtg

SEQ ID NO: 926916 - DNA, 120 bp, Artificial Sequence
  ENSG00000253394_72 (sequence is synthesized)
gattattcatatatggcctttattatgttcagattgtttccttctattcctggtttgtcatgggtttttgtcatgaattgatcttgaattttgtctaatgctttttctgcatcaaataat

SEQ ID NO: 926917 - DNA, 120 bp, Artificial Sequence
  ENSG00000253394_73 (sequence is synthesized)
acgattgtggtttttccatcattctacaagtgtgatgtattacactgtttgttgtaatatgttgtttatttcacattgtttgtgttacactaattgttgtaatcaacaaatgttgactca

SEQ ID NO: 926918 - DNA, 120 bp, Artificial Sequence
  ENSG00000253394_74 (sequence is synthesized)
gggtatcaatgatggctgctatagagatcaaggcatgaaacgggactacaaggtatactcaaggaattgctggttgtctagcattctgggagtgtagggaataagtgtggaagtatcagg

SEQ ID NO: 926919 - DNA, 120 bp, Artificial Sequence
  ENSG00000253394_75 (sequence is synthesized)
atctaagggtgtctagatacataacagccaaatcatgaagggccgtgtgaggaagacatgctaaggaagttggaacttattttgcgggccactaaatatttaaaaaatagagtgtcatag

SEQ ID NO: 926920 - DNA, 120 bp, Artificial Sequence
  ENSG00000253394_76 (sequence is synthesized)
ggtatcaccattagctgactggattaattaatatctctattgagcttctgctgtgtttgcagcattttgcaggtagctgtgtgaggtatatcaggtattttctttaattaatgaaaataa

SEQ ID NO: 926921 - DNA, 120 bp, Artificial Sequence
  ENSG00000253394_77 (sequence is synthesized)
tctgtttaaagtctattcaatatattggtgctattgctgtatgttagtaagtgttggtgtgtttaaattttacatgatgtgtatatatcacaggtcttgagtacgctagctgatacctag

SEQ ID NO: 926922 - DNA, 120 bp, Artificial Sequence
  ENSG00000253394_78 (sequence is synthesized)
tatcattctctaaaaaacgaccaatagtatttttctttttcctgagagcacaggatgaaatttaagctaataattttcttttataccaaaaaattacctttatacaaattttttaatacc

SEQ ID NO: 926923 - DNA, 120 bp, Artificial Sequence
  ENSG00000253394_79 (sequence is synthesized)
aaaagttcccattcattgggaactatatgtaggtccccagtgaatgaatatattaattattcaccttgcccatggacactagtcacattttatttgcgaccattgccacatctcatagaa

SEQ ID NO: 926924 - DNA, 120 bp, Artificial Sequence
  ENSG00000253394_80 (sequence is synthesized)
gaagaaaacagaacatttctgctcatcagtgttttgcagtaagaacttgtgacccctaattgtcaatatatcctgtgggacggtaggttttatgccttaacagaggccacatcagtgtgc

SEQ ID NO: 926925 - DNA, 120 bp, Artificial Sequence
  ENSG00000253394_81 (sequence is synthesized)
cctctgcccaaatagccctcttcccatcacttgatgggatgacattggctagggcatgaccaatggaagaaggccattttaccttcttcccatgttgctcacacacttaaatgttcaggg

SEQ ID NO: 926926 - DNA, 120 bp, Artificial Sequence
  ENSG00000253394_82 (sequence is synthesized)
cttttctgtgctctcaaggccacactcctcaaccaaataagaaagaactcacatgatgggatgacactgagtagggtactgtctaactcattgctcacctcttagaatggaaggacaaca

SEQ ID NO: 926927 - DNA, 120 bp, Artificial Sequence
  ENSG00000253394_83 (sequence is synthesized)
actgacaagaatgggaggagactagatcggtcatgttggggaataaagggtgagatgaaggatccatgaaagagccatacatgtggattacctgggagagcccatgaagaccctggtacc

SEQ ID NO: 926928 - DNA, 120 bp, Artificial Sequence
  ENSG00000253394_84 (sequence is synthesized)
tggagagtggagtgggcaagaaataaaagggcaattcagaagggagagtggtagcctgaacagaaacttccaaactgtaataatcaaggattcggagaaagcttaatatggggatctcca

SEQ ID NO: 926929 - DNA, 120 bp, Artificial Sequence
  ENSG00000253394_85 (sequence is synthesized)
gagactgaatttgcagaacaagtgaagcagcacaggggctgccgttggtgaacattctaaccttggtcacccagttaatgtgctatagcttctggggaatacacttgtcgtaactgccac

SEQ ID NO: 926930 - DNA, 120 bp, Artificial Sequence
  ENSG00000253394_86 (sequence is synthesized)
caaatagtgaggttttccttgagtaatgagaagaaaaatgcattcactacctcaattcagtacacaaagcccgcaaaggatagttttacagggttttaatatcttcctgagctttttaat

SEQ ID NO: 926931 - DNA, 120 bp, Artificial Sequence
  ENSG00000253394_87 (sequence is synthesized)
tttacagggttttaatatcttcctgagctttttaatgagggaaaccaagcacgtcatatctgctttgctgaaactttaagattaatgtggctgagtgcagtggctcacgcttgtaatccc

SEQ ID NO: 926932 - DNA, 120 bp, Artificial Sequence
  ENSG00000253394_88 (sequence is synthesized)
cgttctaggaagaaaacagaacatttctgctcatcagtgttttgcagtaggagataaaaactatcatgtggaagatgccctccctgtgccaagagaaaagaaacattcttccatgaagac

SEQ ID NO: 926933 - DNA, 120 bp, Artificial Sequence
  ENSG00000253394_89 (sequence is synthesized)
aaaaaacaaaaaacaaaaaaaaaacacatgaagctttaccagaagatttcagtatgtcctccagtgcgtaattcatttgttcaacaatttttactgggcaggcattctaatagatgttga

SEQ ID NO: 926934 - DNA, 120 bp, Artificial Sequence
  ENSG00000253394_90 (sequence is synthesized)
actgggcaggcattctaatagatgttgaggatatcacaataaataaggcaaacaaaatctctaccctatggtagagattttgaaatatcaaattattaagttttaggaaaattcaatgac

SEQ ID NO: 926935 - DNA, 120 bp, Artificial Sequence
  ENSG00000253394_91 (sequence is synthesized)
tgacaaaaagaaagtcttataatattaccatgtccagataatgtaagtatttacacattactatttcaatttcattcaatttttttctaaacttttattttttcaaacatgtaatcataa

SEQ ID NO: 926936 - DNA, 120 bp, Artificial Sequence
  ENSG00000253394_92 (sequence is synthesized)
aaacttttattttttcaaacatgtaatcataatatattagtgctaagtattaaaacaatttcttaattcccatgtaaatttaagggtatttaagcttttttttttttttttttgagacgg

SEQ ID NO: 926937 - DNA, 120 bp, Artificial Sequence
  ENSG00000253394_93 (sequence is synthesized)
cttcttatctggaaaactgcagtgactctccacccctctgccctggtcctttccattgttagactatttcctgctgtactgaattgaatcttccttttatcaattatttccctttagatt

SEQ ID NO: 926938 - DNA, 120 bp, Artificial Sequence
  ENSG00000253394_94 (sequence is synthesized)
gatgagtgaaaatccatcttaagatggattaaagtactgctttccaaaagttgaagataactctcatgtcaacttatccagaggaaaacatttacatagttctatattcttcagactctt

SEQ ID NO: 926939 - DNA, 120 bp, Artificial Sequence
  ENSG00000253394_95 (sequence is synthesized)
atggctttttcatagtatcaacataggtaaactcattagtctgttgtgaaagaaacaaaagatgcctactctaggtaatgggctaggtacttacaaacacatattttcattttattttta

SEQ ID NO: 926940 - DNA, 120 bp, Artificial Sequence
  ENSG00000253394_96 (sequence is synthesized)
tagtaatctgaggaagatgtgatcaatcagtagtccgaatggtaaggttaagtaagttgctccaaccagactagtgagtggctgagctggtattcccaagcagagcctttgacttcatct

SEQ ID NO: 926941 - DNA, 120 bp, Artificial Sequence
  ENSG00000253394_97 (sequence is synthesized)
tcaggtgtctccacttctccattgctaccgtaagagtgactggccacctatgagatactaattaaaggattggcatttacagcagcagtgctcagacttgagtgggtggccgagtcacct

SEQ ID NO: 926942 - DNA, 120 bp, Artificial Sequence
  ENSG00000253394_98 (sequence is synthesized)
gcggggggcatgttgaaacacagatttctgcatcctactccagagtttcagattcagcatgtctgggatgaggcccaagaatgtgcatttctacacatctccagatggtgctaatgctga

SEQ ID NO: 926943 - DNA, 120 bp, Artificial Sequence
  ENSG00000253394_99 (sequence is synthesized)
tgtctggagaccacatttcgagaatcactgatttagagttcctcagcatttgtctgcaggaccctgtaatcagatcaatacccttgattaacaggaaaacaatagaaagcactgcctttc

SEQ ID NO: 926944 - DNA, 120 bp, Artificial Sequence
  ENSG00000253394_100 (sequence is synthesized)
ccaggaagcctactctcatgtagtaaggcctcttctgccccctacaccatcctccaacttccctgttttcacactctcacaagccatcacccttttaattctataatcaactgagcctat

SEQ ID NO: 926945 - DNA, 120 bp, Artificial Sequence
  ENSG00000253394_101 (sequence is synthesized)
tttaagaagccaaattgtttcctgcttttcaaagttatacatatcgttacatatgtttatatttatgtgtacacacaaatgtaaagcaatgatgcctctattaaaatgatgttcagttaa

SEQ ID NO: 926946 - DNA, 120 bp, Artificial Sequence
  ENSG00000253395_0 (sequence is synthesized)
caaagctccaagacagacctgtagcagcatggcccaaaaagttcctctgctgccccagtcccatacctgcctgaggtacgggggttcaggctgagtcggctgacctggagtcatctggaa

SEQ ID NO: 926947 - DNA, 120 bp, Artificial Sequence
  ENSG00000253395_1 (sequence is synthesized)
tattatatgaagagatttgcaagtgttattttacgtaattcgcactttacaaaggaggaaactgcagcgcaggtaccaaggttgccccatctcggtccaggcctgctcccggcgagccac

SEQ ID NO: 926948 - DNA, 120 bp, Artificial Sequence
  ENSG00000253395_2 (sequence is synthesized)
tcgcccttgaccacgcctcctctctcctgattggctgtcaggcatgagtcgacagagaaagatgaccactgccctcaccccactaaagaagccccagcacttagcaagcacttatggccc

SEQ ID NO: 926949 - DNA, 120 bp, Artificial Sequence
  ENSG00000253396_0 (sequence is synthesized)
gtgcaaggcccatggcttcctcccaagggaagctccgtgtccctttcttggaaagcagacttggcttgtttggcaggatcatggccaactgtctggaggaggaggagaaggaagaggagg

SEQ ID NO: 926950 - DNA, 120 bp, Artificial Sequence
  ENSG00000253396_1 (sequence is synthesized)
aggaggaggaagaagacttctcctaagttcctgacccccaccccatagctacctgctcagtacctgggtaggcaggcactgaagatcagcacaaaagatgagcccctgactcttccaggg

SEQ ID NO: 926951 - DNA, 120 bp, Artificial Sequence
  ENSG00000253396_2 (sequence is synthesized)
cacaaatgagaagccacattgcagtatcaaccttgagaatttcaaatacctttgaaacaggcatctcactggacacagaagacacaactgtgaacaagtccaagaaagaccctgttctca

SEQ ID NO: 926952 - DNA, 120 bp, Artificial Sequence
  ENSG00000253396_3 (sequence is synthesized)
ggaaactgaaattcctgctagaaggtctggcaaaccttcgttcagagatatgacaaaatcaagggttgtgcaagaagcatggtgctggcatctgctcctggttgaggcctcaggaagctt

SEQ ID NO: 926953 - DNA, 120 bp, Artificial Sequence
  ENSG00000253397_0 (sequence is synthesized)
aacactgaggcacagagattataccagctgggctagcgagtgaccgggggaagcctccagatccatgcacacaaccgccaggtttatgacacctctagaaatgtggccagtgcccctggg

SEQ ID NO: 926954 - DNA, 120 bp, Artificial Sequence
  ENSG00000253397_1 (sequence is synthesized)
aagaaggcagcagtctgcacaccaggaggagagtcctcaccacaactcagccctgccacaccctgatcctggactttcagcctccagagctgtgagaaataaatgcctgctgtttcagca

SEQ ID NO: 926955 - DNA, 120 bp, Artificial Sequence
  ENSG00000257488_0 (sequence is synthesized)
agaaacagactctcctggtacagaggaaacacaactcacaagcagaggtaggggtatgttcaacctgatcgtcctcaaagtaatgccaattaaaatgagacaaagaagacagacaaatag

SEQ ID NO: 926956 - DNA, 120 bp, Artificial Sequence
  ENSG00000257488_1 (sequence is synthesized)
ccagcagttccacagcgactcaggggactgccagggttcaaatcctgctcctgctagatgccacttctgctgctcttcattgctgccctagacaaggccaggccctgcggcgtgctgcga

SEQ ID NO: 926957 - DNA, 120 bp, Artificial Sequence
  ENSG00000257488_2 (sequence is synthesized)
aagagacactatcaggattccaatgacctgctgttaaagttcatctcttattcactcattgcctccctcaaggctgaagagtggggtggaggggagaccagcagagctactgagctcaat

SEQ ID NO: 926958 - DNA, 120 bp, Artificial Sequence
  ENSG00000257488_3 (sequence is synthesized)
ctgcctccttggccctcccagcccagagctctgccagcggtggtaggaggagtgtggtaagtatttgctgatgaatgaacaaccgaaggacaaaataatgaactgtcatcttccaaggca

SEQ ID NO: 926959 - DNA, 120 bp, Artificial Sequence
  ENSG00000257488_4 (sequence is synthesized)
ccagcccagagctctgccagcggtggtaggaggagtgtgttctggtagatatcatggagcaggagtccctagcaccaagaagctgagatccggaagaggcgccccaaaaaatcagcctgg

SEQ ID NO: 926960 - DNA, 120 bp, Artificial Sequence
  ENSG00000257488_5 (sequence is synthesized)
aaacacaactcacaagcagaggtaggggtatgttcaacctgatcgtcctcaaagtaatgccaattaaaatgagacaaaggaaaaagcccaccgtgaggggtgatggccaggtgctcactg

SEQ ID NO: 926961 - DNA, 120 bp, Artificial Sequence
  ENSG00000257488_6 (sequence is synthesized)
cagattccctcccatatatgggaggctcctggagctccatagtctcctctactactgctgaggagcaggccatggcaggcgcctgtggggacagcccccagaggacagggctgactgcag

SEQ ID NO: 926962 - DNA, 120 bp, Artificial Sequence
  ENSG00000286904_0 (sequence is synthesized)
ggagccaggatgtggagttggcggcgagacgtggaggctgggctcagggcctagcgtgggcgtgaagatagaagaggagccggaacgtgcaagggagggctggcagcccgagcgcggagg

SEQ ID NO: 926963 - DNA, 90 bp, Artificial Sequence
  ENSG00000286904_1 (sequence is synthesized)
tgcagtcgaggactaagatctaccgcagccccctggaccagcctgctagcccatgcttcgatgttgatgacatcaaaggcacccctcccg

SEQ ID NO: 926964 - DNA, 86 bp, Artificial Sequence
  ENSG00000286904_2 (sequence is synthesized)
aacagcacttgggttttcctgttgagaggagggactgagagacaggactagctgcgtttcctaggccgggtatccacctttaaaca

SEQ ID NO: 926965 - DNA, 120 bp, Artificial Sequence
  ENSG00000286904_3 (sequence is synthesized)
aaatagctaatatctatcacctgagagtacagggggagggacaatgattgggatagaaacccaggcattcgagccggcaacggcaaccccctttgggtctccttccattttatgggagct

SEQ ID NO: 926966 - DNA, 64 bp, Artificial Sequence
  ENSG00000227555_0 (sequence is synthesized)
tgctacccacagctttattcttgaagtcagcgagaccatgaacccaccggcaggaactgactct

SEQ ID NO: 926967 - DNA, 120 bp, Artificial Sequence
  ENSG00000227555_1 (sequence is synthesized)
agtcagcgagaccatgaacccaccggcaggaactgactctggacacaatggcggctcctgaccagaccctcagaacctgaggacgggtgatcatttctggtccagtgtcttgactggcac

SEQ ID NO: 926968 - DNA, 120 bp, Artificial Sequence
  ENSG00000227555_2 (sequence is synthesized)
caagtcaagcattgtcctccacgtcatcagctgcaggccagataatctaagatgatgccaaacagtcactgcagaagaatttgctgcacggagctgtctgggatgcctcagacctgccag

SEQ ID NO: 926969 - DNA, 120 bp, Artificial Sequence
  ENSG00000227555_3 (sequence is synthesized)
cggtagagctgcctgccttgcttcctcttgcttactcacagctctaagtctgaacttggctgcagctgtcctgaacagcccaggaggagcctaggcaggaggaggcttctctcctatgca

SEQ ID NO: 926970 - DNA, 120 bp, Artificial Sequence
  ENSG00000227555_4 (sequence is synthesized)
atttggctgaattttagttactcaaaagagcaaaggaagcacttctgaatattcgtcaggaggagccaaccaccttagcttgctccctgatgggttttgttcagcccctgccttactgtt

SEQ ID NO: 926971 - DNA, 120 bp, Artificial Sequence
  ENSG00000227555_5 (sequence is synthesized)
gtcagcctggactgtcttctgggcttgggttcaccatgtgtctggaccacgggagtgtctctaggtgtctcccttcctgtgcatttctcctgggcatagacacccatcctgtggaacact

SEQ ID NO: 926972 - DNA, 120 bp, Artificial Sequence
  ENSG00000227555_6 (sequence is synthesized)
gggaggagggtgcaagaccccactgcacccaggcttggttcctcttgggtgcagcagcctcatccccttgcaagccttcctcccactcctcccagaaggctctgcttcctccacttgctc

SEQ ID NO: 926973 - DNA, 120 bp, Artificial Sequence
  ENSG00000227555_7 (sequence is synthesized)
ctctcctaggtgtgagccagcagggtttggtcacccagatatgaagtattaatgttggactcctgtctggagtcgggagtctattaaggaagacgtgtgggagaggcctgtgttcaaggc

SEQ ID NO: 926974 - DNA, 120 bp, Artificial Sequence
  ENSG00000227555_8 (sequence is synthesized)
ccttagaaccattctgcctgagccatcagctccttaaaaagaaatcaccaaagatcccaaacaatggcagagtccccctcccaccctttgggctacttggtaaataggcccaccaattct

SEQ ID NO: 926975 - DNA, 120 bp, Artificial Sequence
  ENSG00000227555_9 (sequence is synthesized)
atctccaaaatatctcccatcaggaccatgtgtatattgacatctttatcttccatcaggtcagggttgccacaaaagcctccatccaaatttcctgaaaaagcccagtttctctaaatg

SEQ ID NO: 926976 - DNA, 120 bp, Artificial Sequence
  ENSG00000227555_10 (sequence is synthesized)
tgtgcatgaacacggtgctgggcatggccctctcctctcagtccttctgcaacgcccagtgccttcacagccaaggccagacttcctagtggaagagcaaagtccctcctgacacggctt

SEQ ID NO: 926977 - DNA, 120 bp, Artificial Sequence
  ENSG00000227555_11 (sequence is synthesized)
tgccgtgctctgggccaggtcgctgggcttgctggtccttagacttggagcacctgatgctgtttgcccatctgtgtccttgtcagcctttgagaattggatctggcagcccctcctcag

SEQ ID NO: 926978 - DNA, 120 bp, Artificial Sequence
  ENSG00000227555_12 (sequence is synthesized)
gaagcccatgagagcctccgccccatactcacacagaccctgagctaggtggcccctgcctgtgtccctcagctcccagcccagcttccatgcagctttagcacagtttaccagcaccat

SEQ ID NO: 926979 - DNA, 120 bp, Artificial Sequence
  ENSG00000227555_13 (sequence is synthesized)
caagacccctctgggaggacagagagctctgggaggacagagagctctgaaggacagaacacgcatgcctttctggttgttcctctgaagcctagcacaacactgacacgtgagaaatac

SEQ ID NO: 926980 - DNA, 120 bp, Artificial Sequence
  ENSG00000227555_14 (sequence is synthesized)
tggctgaataaaaggtggaagtgaaaaagaacaacactgacacgtgagaaatactggctgaataaaaggcactgtgcattccctgcccatgaggaaggaagcagcttattccattttcac

SEQ ID NO: 926981 - DNA, 120 bp, Artificial Sequence
  ENSG00000227555_15 (sequence is synthesized)
cccagcagaacccctgcatgcaggtttaggtcaacactagctgccagcaggatggagacccagcagcatgcggcacacgggagtctcgccgcgggtccttgacagaagagtaacgagact

SEQ ID NO: 926982 - DNA, 120 bp, Artificial Sequence
  ENSG00000227555_16 (sequence is synthesized)
tttcttgaaatagtgtcctgagttgagatctgagaagaacctgttatgcatcctagaacacagtgcatttgcaagtcataagatgttagcaccgattatggagcctcgtgtgttcttagg

SEQ ID NO: 926983 - DNA, 120 bp, Artificial Sequence
  ENSG00000227555_17 (sequence is synthesized)
ggctatttccgtgacctcgtcgggggttcaatgagcagcttcaacagaaaactggatttccttttcctccaaggctgtcttatttccagattactctggacctaattttaatcgtgcaca

SEQ ID NO: 926984 - DNA, 120 bp, Artificial Sequence
  ENSG00000227555_18 (sequence is synthesized)
cctaccatggcaggctgttttcctgtcctcccaatgatctccatacaatctcactgctgggtagcacctccattcccttgcttacctaagccatcaaaacctgcaacaactcacaaaacc

SEQ ID NO: 926985 - DNA, 120 bp, Artificial Sequence
  ENSG00000227555_19 (sequence is synthesized)
acaaaaagcaacagaaaatatcagaagataatcaaatgaatcaagacctccagaaaactgtgcataattcagttttcatttcatttaatgataatgtccacagttaatcaggcattcctt

SEQ ID NO: 926986 - DNA, 120 bp, Artificial Sequence
  ENSG00000227555_20 (sequence is synthesized)
atcatttggatctacatgttgaataaacacaacatccctagacctttgagggttttctaaataatctgctgttgattttcttaggtactgaccagattactatgaatattcctgatagaa

SEQ ID NO: 926987 - DNA, 120 bp, Artificial Sequence
  ENSG00000227555_21 (sequence is synthesized)
tatgctgacaagaaacaaacaggacaagcctaaaatagaggttctggtaaacattcagggaaaagtttattactgacatgtgagagctcggttttcaaggttaataaaataaagttgaca

SEQ ID NO: 926988 - DNA, 120 bp, Artificial Sequence
  ENSG00000227554_0 (sequence is synthesized)
attaagaactcttaaaagccaaaaggtaaatgaaagcagaacccacagataggcattgaagtcagcttccattcagacgtcattggccaaaccagtattgagtcatcactggtaagtagc

SEQ ID NO: 926989 - DNA, 120 bp, Artificial Sequence
  ENSG00000227554_1 (sequence is synthesized)
cagccagagattacatctccccatcacacatccctcacatctgtatggaacaacaggactaattctcagtcatagaaggtgaatacaaaagattcccaggtcccagaggatggtggagct

SEQ ID NO: 926990 - DNA, 120 bp, Artificial Sequence
  ENSG00000227554_2 (sequence is synthesized)
tcaagaagaaagtagccttggtccctaaattatcacatggagaaaaggggcactcccaccagaaacacctaaattggactattatatgattgagaaataaacttttattatgttaagcta

SEQ ID NO: 926991 - DNA, 120 bp, Artificial Sequence
  ENSG00000244625_0 (sequence is synthesized)
agaaagcggagcctttcttacaccggaagtcaatgaagcgggtctttcctacgctaaaaaccactgagtggagtatttagtacacaggaagtcggccagagaaacatttctcatatttga

SEQ ID NO: 926992 - DNA, 120 bp, Artificial Sequence
  ENSG00000244625_1 (sequence is synthesized)
aggccggaaagagggacatttctgacaccggaagtcagtgagaggactctttcccacacaggaagtcagctagagagccgtctcccctctctggagccgagagaggccggtttcccccac

SEQ ID NO: 926993 - DNA, 120 bp, Artificial Sequence
  ENSG00000244625_2 (sequence is synthesized)
ccacgtttgggttgggatattgaggaggttatggttaaaagcatacgatgggagatcatattgtacttgcgagtgagacccggctggaggaatgttttaattcttcggaaataccaagtg

SEQ ID NO: 926994 - DNA, 90 bp, Artificial Sequence
  ENSG00000244625_3 (sequence is synthesized)
cggctggaggaatgttttaattcttcggaaataccaagtggtctctagatgggttttcactatttttcccaggctagtctccaacttctg

SEQ ID NO: 926995 - DNA, 120 bp, Artificial Sequence
  ENSG00000244625_4 (sequence is synthesized)
ccaatatctgaaggatctaggatgcctgttcccctctcttatgctgtctcgggggatgatttagccaccaagaattttccttatggttgcaagatgattaaaaaaaaccacacactcaga

SEQ ID NO: 926996 - DNA, 120 bp, Artificial Sequence
  ENSG00000244625_5 (sequence is synthesized)
aagattctgctctcagggtgttgattgacgtctggaaggcagagactcgtggattagcaagcatgtgtaagaaagtgctctggatgccacagggtggtaatttgtgcatggaaaatggct

SEQ ID NO: 926997 - DNA, 64 bp, Artificial Sequence
  ENSG00000244625_6 (sequence is synthesized)
tggatgccacagggtggtaatttgtgcatggaaaatggctggggtgaagaggagactagctgag

SEQ ID NO: 926998 - DNA, 120 bp, Artificial Sequence
  ENSG00000244625_7 (sequence is synthesized)
agtacttcacaatggggaaactgaactggaactctactgacaacgcagttgggagttcaaacttaataaccttccagagttggtatcaaattcagacgctgacgctccttggagaggttc

SEQ ID NO: 926999 - DNA, 120 bp, Artificial Sequence
  ENSG00000244625_8 (sequence is synthesized)
tttgctgcaagaggatggaaaggatcactgtgattttgtttttctcctgctgctctgtctggaagccatgtgaggaggacatctgagcagccctgtggagaggcccccagccaacagcca

SEQ ID NO: 927000 - DNA, 120 bp, Artificial Sequence
  ENSG00000244625_9 (sequence is synthesized)
gcatgaacttgctgggcatgtgagtgcaccaccttgaaagtagagcctcaacccctggtcaagccatcaggtaagattgcagccctggcttatatctgaccacaacctcatgagcaaccc

SEQ ID NO: 927001 - DNA, 120 bp, Artificial Sequence
  ENSG00000244625_10 (sequence is synthesized)
gggatggggagagtccctcctgccactgacccaggatggataaaagtacccctttcatagaaggaagaaaatgggaacaaaggtgctgctgatcatctgaggttgcctgcatggcagtga

SEQ ID NO: 927002 - DNA, 120 bp, Artificial Sequence
  ENSG00000244625_11 (sequence is synthesized)
ttggagctttgcagatataaagaaaaagctgatttaagcttccccagttttccctgcccccttcatgaaagaattacagcatataataagaaaaatctggagaaacacttatttttatgg

SEQ ID NO: 927003 - DNA, 120 bp, Artificial Sequence
  ENSG00000244625_12 (sequence is synthesized)
atagggtggttagccaagcataatgagaccattgaggcatcccagcaagaattgatctgtttagagaagagatgttgctgctgcttctttttttttaacattttatttttaattttgctg

SEQ ID NO: 927004 - DNA, 120 bp, Artificial Sequence
  ENSG00000244625_13 (sequence is synthesized)
cctatgacaagctgcttctaacagcctcagggcgaggggcccatgagtgcaaggacaggagaggggtctgcgagttctacttgggtagggcttggggcatcataggagtgcagggatctc

SEQ ID NO: 927005 - DNA, 120 bp, Artificial Sequence
  ENSG00000244625_14 (sequence is synthesized)
ctctctgggatccagtttaaccctgatgacatcccccatgcagcaaataactccaggtaaccggcagcagctggtccacatcatagtctgtgagagattgctcatgtcttgcctgttttc

SEQ ID NO: 927006 - DNA, 120 bp, Artificial Sequence
  ENSG00000244625_15 (sequence is synthesized)
ctacctcttcattctaaggaaaaggacccacaatctgagtgccctgctctgggacataggtggggaacaggcagggatgggaggtggggaccactttcttctgcacccattaaatatatg

SEQ ID NO: 927007 - DNA, 120 bp, Artificial Sequence
  ENSG00000244625_16 (sequence is synthesized)
cctttttttttttgagacagggcctccctctgtcacccagactggagggcagtggtgcaatcgtggctcactgctgcctcagtctccagatggctcaagccatcctcccccatcagctgt

SEQ ID NO: 927008 - DNA, 120 bp, Artificial Sequence
  ENSG00000244625_17 (sequence is synthesized)
atgccaccatgcccagctaattttttctattttttttttttttgtagagatgggttttcactatttttcccaggctagtctccaacttctgggctcaagcgatccacccgccttggcctc

SEQ ID NO: 927009 - DNA, 120 bp, Artificial Sequence
  ENSG00000244625_18 (sequence is synthesized)
aatttgtagtgtacagaattttggaaatagaaggaagctaagaggggtgtcaaatgcagcttcttctttttttacctgaaaagataccaaagtccagctcagggaaggtcacacagctaa

SEQ ID NO: 927010 - DNA, 120 bp, Artificial Sequence
  ENSG00000244625_19 (sequence is synthesized)
ttcttatcatggggagacagacccagggacatcatggtgcctccgagattagtacggcccctcaaacatccccattttctgtccctagcccattggaaccccttaaagttggtccctcga

SEQ ID NO: 927011 - DNA, 120 bp, Artificial Sequence
  ENSG00000244625_20 (sequence is synthesized)
gctcgggtgatagcacacatgatggaaagtaggcaggcttgccattgaagctccaacctagctctgcaccacatcagctgtgtgaccttgagcaaatcacttaaccactctgagcatggc

SEQ ID NO: 927012 - DNA, 120 bp, Artificial Sequence
  ENSG00000244625_21 (sequence is synthesized)
atttgtaaatgtcaaggtagcaacgccctctttactgccctgttgtgacaaataagatatattccataaatatgatccatgtagtattaaactaccatttactgagtctcccctatggaa

SEQ ID NO: 927013 - DNA, 120 bp, Artificial Sequence
  ENSG00000244625_22 (sequence is synthesized)
agcacttagtaggtgctcaaaaactcctagtcctttcttcccctctttcaatgtgtcactgcatctgggtaatttatacccatttcctgttttcctttgagaagtgcatgtcatgctctg

SEQ ID NO: 927014 - DNA, 120 bp, Artificial Sequence
  ENSG00000244625_23 (sequence is synthesized)
cacaaaagtgactcttaatggtggcatttcaagcatcatggcagagtgctgagacgctgatgaagatattttaggctggggtgcatggggagcactctcagggcctctcatgcgcatcct

SEQ ID NO: 927015 - DNA, 120 bp, Artificial Sequence
  ENSG00000244625_24 (sequence is synthesized)
catagatttcctggaggttccatccagctctggctctagctggctccttgactctggacaagtcacttcatctctccaagccttgtctataaagtagggataatactccttcccacttca

SEQ ID NO: 927016 - DNA, 120 bp, Artificial Sequence
  ENSG00000244625_25 (sequence is synthesized)
gagagtcattcggggattaaactgtgacatgtatgtagccaagggtccagcacacactgacaactcaccaaatattagccatcactccaaactaagaaggcaggattccggctgggcacg

SEQ ID NO: 927017 - DNA, 120 bp, Artificial Sequence
  ENSG00000244625_26 (sequence is synthesized)
gttgaatgaatgaacgagtaaggttagagaggcaggcatgagccagatcctgaattgatttgaatgccatggacaacatccagaggtgtccagaaagaaggtggccttgaccagaattcc

SEQ ID NO: 927018 - DNA, 120 bp, Artificial Sequence
  ENSG00000244625_27 (sequence is synthesized)
ctgcacatgagaaccagtgagggagccctaaaaacgctgatgcccaggctccacccagacctataggtgcagaacctctaggggagggcccagccatcgcgctttgaaaaatctcctcag

SEQ ID NO: 927019 - DNA, 120 bp, Artificial Sequence
  ENSG00000244625_28 (sequence is synthesized)
attgcacccccttctgtgagcatgcacaaactcagcttgatgcccaagcccttcaatttgtcttgttagaaaaccctgtgttaaagagaccattaaaacaagagggaaagataaattgcc

SEQ ID NO: 927020 - DNA, 120 bp, Artificial Sequence
  ENSG00000244625_29 (sequence is synthesized)
tgaagctgcaagactcaggaggcaagggagagcaggtgatggaaaacaggcctgtgattagagggcagggggtggcacaggagccagagcaggcaaaaacatccactggagatgtcaaaa

SEQ ID NO: 927021 - DNA, 120 bp, Artificial Sequence
  ENSG00000244625_30 (sequence is synthesized)
tatttgaaaatcctcttcctttggtgaattgagttaccaaaatgtattttttttttttttttgcatgcggagaagagtctgagatagaggttaagaatatagtttccagagtgaggcaga

SEQ ID NO: 927022 - DNA, 120 bp, Artificial Sequence
  ENSG00000244625_31 (sequence is synthesized)
actaggctctgtcccttcccagctgctgtcagacctcaggcaaatctctgaacctctctgaccctcggtttcctcatctagcaagaggggacaatggagagctcaagctggcctgttgga

SEQ ID NO: 927023 - DNA, 120 bp, Artificial Sequence
  ENSG00000244625_32 (sequence is synthesized)
agatgacaggccatatgcaacagacgtgaagtgtcccagctgatccccttccagaacacccaccttccagatgaccacagatgcaagggtgagccagccaatagctgctgagacattccc

SEQ ID NO: 927024 - DNA, 120 bp, Artificial Sequence
  ENSG00000244625_33 (sequence is synthesized)
agaaagacagaacatccagctgacccatggactcatgggcgatcatggataaatggatattgtttcaagctactaggtttggggttggtttgttacgcagcaatagctaacagctacacc

SEQ ID NO: 927025 - DNA, 120 bp, Artificial Sequence
  ENSG00000244625_34 (sequence is synthesized)
aattgcaaaggtacagaaaaatgaatagctataacagctactagtgattgagtgctggctctgcctggtactgtgctcaggattggcatgcattatctcaaagagttgcacaggctagaa

SEQ ID NO: 927026 - DNA, 120 bp, Artificial Sequence
  ENSG00000244625_35 (sequence is synthesized)
gggctgcagctgaagattctagaagagttcaggtataatgcctggcacatggtacctgtttcatgtatgctagttgttggatgctgctgatgctggcagcacgtggaactcctgacacat

SEQ ID NO: 927027 - DNA, 120 bp, Artificial Sequence
  ENSG00000244625_36 (sequence is synthesized)
gcctctgatttggtagtggggtctgaactttgtaatctgtgtgtccagagaccttgggaagtcttcagccaagggcagaccaggaggtagcttttgtgatctgagtgcagagaagtttct

SEQ ID NO: 927028 - DNA, 120 bp, Artificial Sequence
  ENSG00000244625_37 (sequence is synthesized)
tagagtgaatggcatccagatagggtggggaaaaagcattagccagggtgctccacacactcccctcactagtgtggtccctggaccagcagcctcagcctcccctgggcccttattaga

SEQ ID NO: 927029 - DNA, 120 bp, Artificial Sequence
  ENSG00000244625_38 (sequence is synthesized)
aatgcagaatctcaggtcctacccctgcttactgaatcagtaagagcattttaacaagatccccaggggatttgtgtgcatgttagagtttgtccagaacactcttctcaagctatctgt

SEQ ID NO: 927030 - DNA, 120 bp, Artificial Sequence
  ENSG00000244625_39 (sequence is synthesized)
gctgagacaccagtatttttttcaaattccaatttattgcagaatgacagttttaaaaaatgcagtaaaaaagcaaattcctagaaaaattaaatgaaaaataaaatatacaaaatctaa

SEQ ID NO: 927031 - DNA, 120 bp, Artificial Sequence
  ENSG00000244625_40 (sequence is synthesized)
tgtgaaggttcccaagcgttcttgcagagctaagacagcgcttgatgccctgcaagtgttccctgaaacctcattctgtgttagcaccagatgatgagattgggggccagaggtgctctg

SEQ ID NO: 927032 - DNA, 120 bp, Artificial Sequence
  ENSG00000244625_41 (sequence is synthesized)
agtcagagaaagcatcttgtcttcattttatagaggaggaaactgaggcaaaaggaaactacccgagtttatgcataaagttcgtagtagaactggaatcaatcgacccatcaccccttc

SEQ ID NO: 927033 - DNA, 120 bp, Artificial Sequence
  ENSG00000244625_42 (sequence is synthesized)
tatcaatcagtcacatcacagtaatgaatttactgctaccgaactgtgcacttaaatatggttaaaataatacattttatgtttgttatattctaccacaataaataaatatttagtctc

SEQ ID NO: 927034 - DNA, 120 bp, Artificial Sequence
  ENSG00000244625_43 (sequence is synthesized)
caatattgagaaaccctgttgaagatggagactatccacggggcattgatcttggggtctcccccttcctgaatacttgaagtccctcggcagactcttggatacctccagcaatgggga

SEQ ID NO: 927035 - DNA, 120 bp, Artificial Sequence
  ENSG00000244625_44 (sequence is synthesized)
gctcaccacctgttttgaagccaggcaggtttgggctcttcttgtagctgtgtgactctggattttcccataggtgggagtggatccaccaccttgagcttcagtttcctccagtgccat

SEQ ID NO: 927036 - DNA, 120 bp, Artificial Sequence
  ENSG00000244625_45 (sequence is synthesized)
gggattagcagcagccctgcctcacagattgcgtgaggatgaaatgagatgatgctcctgagttggctggtgcagtgcacggtacacagagagtgctcaataaatgttccctgctgtgaa

SEQ ID NO: 927037 - DNA, 120 bp, Artificial Sequence
  ENSG00000244625_46 (sequence is synthesized)
catatattggctgtgtccaaggtcaaaaccaaaacccgagcaaccacacctggtatcaggcattaggggtcagtatgtgaccaggagagccagagggtgccaggtgattaaaagtcggtg

SEQ ID NO: 927038 - DNA, 120 bp, Artificial Sequence
  ENSG00000244625_47 (sequence is synthesized)
tatggaggatggagtgggagatgaagggcaatgaatgaaaatgaagcaaacatcatatgtttgatatggtgaaaaggatgctaaaattcctcccattgagtttgggcaaatcctatggtt

SEQ ID NO: 927039 - DNA, 120 bp, Artificial Sequence
  ENSG00000244625_48 (sequence is synthesized)
ctctgtgataagccctttctatcccctttccctaccaaatcttcctgctacattacactctgctccctaccagggagctaaatagcaacctgtgtatttcatctaggtcggttacttaac

SEQ ID NO: 927040 - DNA, 120 bp, Artificial Sequence
  ENSG00000244625_49 (sequence is synthesized)
aatcctaaggaaactatttgaatttaaatgactgccttctagacacaacacaacaatgatagcaataaaaataatgacttgtaaattagtcagcatcagctgggctgctgtaacaaacaa

SEQ ID NO: 927041 - DNA, 120 bp, Artificial Sequence
  ENSG00000244625_50 (sequence is synthesized)
ccccaaatctcataaacaaacgttagttttcacccctctgaagtccactgtgggcctaggcagctatggtccatgtggtgactcagtgatccaggcttttaaaattgtgtgcttctgcac

SEQ ID NO: 927042 - DNA, 120 bp, Artificial Sequence
  ENSG00000244625_51 (sequence is synthesized)
tgcaatttgaggacgcctcatttgctgtgtcaggggaggagagagattggaaaacctcatggggactgtacacttccttggcctgaagcgatgctcatcacttccattcacaaagccagt

SEQ ID NO: 927043 - DNA, 120 bp, Artificial Sequence
  ENSG00000244625_52 (sequence is synthesized)
catatgcccctttagctggaagagggtagggaaagctagttttctgtgcatccaggaaggatgaatataaaacagcatttagtgaacacgtaattttctctgtgttgcaacgaccacttc

SEQ ID NO: 927044 - DNA, 120 bp, Artificial Sequence
  ENSG00000244625_53 (sequence is synthesized)
atgacttgcctaaagtcacacatataatggtagatccagaattagaagccgtggttctgtttcaccataacctgtgcccctcactgttcagatgatggatcctcagactccgggggagct

SEQ ID NO: 927045 - DNA, 120 bp, Artificial Sequence
  ENSG00000244625_54 (sequence is synthesized)
gtggggtaactccctccacccttcagctacagcctggaaaccattgccttttctgctcattgcagccaggcctggatccatgtgaggaaacacacctgctgcctcgggaatcccatacca

SEQ ID NO: 927046 - DNA, 120 bp, Artificial Sequence
  ENSG00000244625_55 (sequence is synthesized)
gtgatgtgacactcacaaaaggcgatcaatggttcctgacaattttttcttttcatttaggcaaaaaatatggaaagcatatttgatctttgattttcttccatttcccatctgttcttt

SEQ ID NO: 927047 - DNA, 120 bp, Artificial Sequence
  ENSG00000244625_56 (sequence is synthesized)
atttcttaggcaatggctgagaatggcaactcaccacatgcctttgaataagacgtgattattattaacccatattctatcaaagaagaaactgaggctcagagaggcaacttacttgcc

SEQ ID NO: 927048 - DNA, 120 bp, Artificial Sequence
  ENSG00000287768_0 (sequence is synthesized)
cacaccccagcccggggcctttgcaaacatcatggacactttaaccttgtaggacatcctatcccaagctgtggagctttgcaggatgatcctggctggaagcagaagcaggtggcttca

SEQ ID NO: 927049 - DNA, 120 bp, Artificial Sequence
  ENSG00000287768_1 (sequence is synthesized)
ttgcgccagacagccccaccgtagcctgggccctgagcttctgcctaccaggctgtcagcaacatctcagcaacaggctccagccagttggcacatacctggctcagctctacaggtagc

SEQ ID NO: 927050 - DNA, 120 bp, Artificial Sequence
  ENSG00000287768_2 (sequence is synthesized)
tcagacctaacctcattgctctgcacttcaggggctgaaatgcaactccctgtggggcccaaggggacttttggcctctctgcagcctgctggtccctggaggatctacctcgtgctgct

SEQ ID NO: 927051 - DNA, 120 bp, Artificial Sequence
  ENSG00000287768_3 (sequence is synthesized)
cacccaaaccctgcacggctggcaaatcccttctgggttttgtttgaggcaccagaggctcccctgaggcattgaattctgattttattgttgctgttgctgttgatgtttgtgtccata

SEQ ID NO: 927052 - DNA, 120 bp, Artificial Sequence
  ENSG00000287768_4 (sequence is synthesized)
cattttgcaacttcccacaaacttgtacatccaaatgctttgccctgttgtccttgttaaaaggataatttttaaaaggcacagtcatgattgtcataaaatatacaatgaacacatcaa

SEQ ID NO: 927053 - DNA, 120 bp, Artificial Sequence
  ENSG00000287769_0 (sequence is synthesized)
gcccccacggagggcggcgaagagacggcgcatcaggaaaggggctgcgcgggcgcgaggactggccggtgggcgttccggcgccgcgaaccgcggagcctgcaacttacaagtaggacg

SEQ ID NO: 927054 - DNA, 120 bp, Artificial Sequence
  ENSG00000287769_1 (sequence is synthesized)
ttgaagaaaggacaagccccctttgtcctggacgtaagccgcaagtcgtcctgagtggtgcacaccgcgaagactgaggaaactggatcacagggctgggccgtgagccttgaacctcgg

SEQ ID NO: 927055 - DNA, 120 bp, Artificial Sequence
  ENSG00000287769_2 (sequence is synthesized)
agaacgtcgcattactgctccagcgcgccggttcagggccgcgggacgcgagccctttaaaaggatggatttgcttcctgtgactccctggaagagacgtcttcaccaccgcactgcgta

SEQ ID NO: 927056 - DNA, 120 bp, Artificial Sequence
  ENSG00000287769_3 (sequence is synthesized)
gaggccggcgtcgtcgccggctcaccccgcttgctgcctccccgcacaaagcccagcccaggtagctcaggttagctggagccccggagcctcacctacaagtacctggcctgtcctagg

SEQ ID NO: 927057 - DNA, 120 bp, Artificial Sequence
  ENSG00000287769_4 (sequence is synthesized)
ttgtgtggggacgggatgtggcttctgcaagcccagaaacctgtttccactcccccaccacaaatggaactcacccagctctactcgcaaggttaggagccaaaaattcccatgatcgca

SEQ ID NO: 927058 - DNA, 120 bp, Artificial Sequence
  ENSG00000287769_5 (sequence is synthesized)
cgcgaattcatttgacttccgtttcagttaagatgccttttcagcattttgttgcttgtttgcagaagggagagaggtaggatcaagaatagtttttactcctgcagagtcgagtgcgag

SEQ ID NO: 927059 - DNA, 120 bp, Artificial Sequence
  ENSG00000287769_6 (sequence is synthesized)
acttggaggctgagtccaggcgctctcccctccccgccagtcccgtgtcctggagcaggtcactgacctggttcctcgagtgcgacagcgcagcctcatcgtaataaaccgcctcccaaa

SEQ ID NO: 927060 - DNA, 120 bp, Artificial Sequence
  ENSG00000287769_7 (sequence is synthesized)
gcgttgtcagatcaaattccagaacatgttactggaaagcaccttgaacactctaaactgcagcacagttattagttagcaatactctttggggtttcactggcaccttttctaacaaat

SEQ ID NO: 927061 - DNA, 120 bp, Artificial Sequence
  ENSG00000287769_8 (sequence is synthesized)
aagattgatagatgcctgctcaaacaaattgaagtgcttgtctcagatgacacacttggcaggcatgggacgttcacaggccaactagagagctaatttcaaaactgagatataaaagtg

SEQ ID NO: 927062 - DNA, 120 bp, Artificial Sequence
  ENSG00000287769_9 (sequence is synthesized)
tatcgctgtacttacaagttaccaagtgttgagaaattactcactttcatttgtgtgtttaatgtcttttttgtttttttagacggagtctcactctgttccccaggctgcagtgcagtg

SEQ ID NO: 927063 - DNA, 75 bp, Artificial Sequence
  ENSG00000287769_10 (sequence is synthesized)
tccgcttcctgggttcaagcaatcctcacatccagctaatttttaaaaatatttttagtagagacggggtttcgc

SEQ ID NO: 927064 - DNA, 62 bp, Artificial Sequence
  ENSG00000287769_11 (sequence is synthesized)
ccagctaatttttaaagcctccagcaatccgctggcctcggcctcctgaagtgctaggatta

SEQ ID NO: 927065 - DNA, 120 bp, Artificial Sequence
  ENSG00000287769_12 (sequence is synthesized)
tggcctgtttaatgtcttgcagtggggtcatctccgaaacaaagagggatgggaagaaggtaggtgccaagaagtctgctggttggaagatttcatctcattggcgagatccctgggttt

SEQ ID NO: 927066 - DNA, 120 bp, Artificial Sequence
  ENSG00000287769_13 (sequence is synthesized)
tggcctccacccactagatgccagtagcacacacactcctccaaaattcacggaaaacgtcttcaaagtcaaatatgtggccccaccttcatctccatccccaacccctgatttaaaatt

SEQ ID NO: 927067 - DNA, 120 bp, Artificial Sequence
  ENSG00000287769_14 (sequence is synthesized)
ccccaccttcatctccatccccaacccctgatttaaaatttgccactggtgatgatctcattgggagctattgagaatacacaggactgtggtttacacctgtaatcccaacactttggg

SEQ ID NO: 927068 - DNA, 73 bp, Artificial Sequence
  ENSG00000287769_15 (sequence is synthesized)
accagcctgggcaacatagcaagaccccaactctaaaataaataaaattttaaaaaattttaaaaaggccaag

SEQ ID NO: 927069 - DNA, 70 bp, Artificial Sequence
  ENSG00000287769_16 (sequence is synthesized)
agggtcaaactccatctcaaaaaaaaatacacaggattgtggctcatgcctgtaataccggcactttggg

SEQ ID NO: 927070 - DNA, 120 bp, Artificial Sequence
  ENSG00000287769_17 (sequence is synthesized)
ggtgacggagtcaaactccatctcaaaaaaaaatacacaggattgtggctcatgcctgtaataccggcactttgggaggccaaggtggtaggatggcttgagcccaggagttcaggacca

SEQ ID NO: 927071 - DNA, 80 bp, Artificial Sequence
  ENSG00000287769_18 (sequence is synthesized)
accagcctgggcaacatagcaagaccccaactgtacaataaataaataaaattttttaaaatgaaacaaaggccggccag

SEQ ID NO: 927072 - DNA, 65 bp, Artificial Sequence
  ENSG00000287769_19 (sequence is synthesized)
catttctactaaaaatataaaaattagccagccgtggtggcaggcaccagtaatccacagtgagc

SEQ ID NO: 927073 - DNA, 83 bp, Artificial Sequence
  ENSG00000287769_20 (sequence is synthesized)
cactccagcctggaaaaaataaaagaatgcacagtccagtaatgtcacccagccctatatcagtaaaggtcacactctagagt

SEQ ID NO: 927074 - DNA, 120 bp, Artificial Sequence
  ENSG00000287769_21 (sequence is synthesized)
gtcacccagccctatatcagtaaaggtcacactctagagtggtacatatctcagctgcatctaaggccttgctaattagctcattagaatgtcacaaatgggtttttatattacccatgt

SEQ ID NO: 927075 - DNA, 120 bp, Artificial Sequence
  ENSG00000287769_22 (sequence is synthesized)
atagctgccaaaaatgtttaagtgaatctaatcaaagttggaaaaaaaaataagaaaaatccaggttggaagacattcagcaaaacaatttccctgcactacactctaaaaaaagtcaag

SEQ ID NO: 927076 - DNA, 120 bp, Artificial Sequence
  ENSG00000287769_23 (sequence is synthesized)
ctagggaattggtccagacagataacacaactgggttggtccattaagtgacccctgatgcagcactgcattgaaggcaaaaaagctgtgagagagatttgagggacaactggggaactt

SEQ ID NO: 927077 - DNA, 120 bp, Artificial Sequence
  ENSG00000287769_24 (sequence is synthesized)
tgtagttatatatggactatatattagacagtattattgtatcatcattagatttttcagtgtgacagtggctatttacaagaatgccctagttcttaggatgttagtgctgaatcatta

SEQ ID NO: 927078 - DNA, 120 bp, Artificial Sequence
  ENSG00000287769_25 (sequence is synthesized)
gacaagagacctgatggctacaactgacatataaatgcctcagagactgatgtattttatatggaggtaaagcaaatgtaacaaactgttaatagttggtggatctaagtgatgagtcta

SEQ ID NO: 927079 - DNA, 120 bp, Artificial Sequence
  ENSG00000287760_0 (sequence is synthesized)
aaagacgaccagccgaggatggctggcggaggcgtggggcaggccgcaggaccctcgaaggatcgtgtgagaccccgggcagcctcttgggaggccatttcgaggagaaaaccttgattt

SEQ ID NO: 927080 - DNA, 120 bp, Artificial Sequence
  ENSG00000287760_1 (sequence is synthesized)
ctgcctcaggaccctgggcctcagttttcctatctgagaagaagggcgaagagctgtgcccccgaccacacccgtcggtgatggggcaaaccgagggcaagcagaggagcgcttcacttt

SEQ ID NO: 927081 - DNA, 120 bp, Artificial Sequence
  ENSG00000287760_2 (sequence is synthesized)
tggtcatcccttgggccaccagggccttcccgtctccgtcttcccatcgcaggtcctggcctccttcacaccactccaggataccgcagcatctcccccagcgcagcagacggagggcgc

SEQ ID NO: 927082 - DNA, 120 bp, Artificial Sequence
  ENSG00000287760_3 (sequence is synthesized)
ttcacatgcccccggacctaagcccactctccccttcaagatctggactccacttttttgcaacactcttaacttctttggaagctgggaagcctcctactcccttgggcctctccaccc

SEQ ID NO: 927083 - DNA, 120 bp, Artificial Sequence
  ENSG00000287760_4 (sequence is synthesized)
agcagcaccctctacttcccctgttctacttgcatgtttatgtgctcgtcttcctcattataagatccacaggggaggggccatgtctatattattcatacttacagtccagtgtctagt

SEQ ID NO: 927084 - DNA, 120 bp, Artificial Sequence
  ENSG00000287760_5 (sequence is synthesized)
catacttacagtccagtgtctagtatctggcacgtagtaggcactcactagctattgagatataaatatagatatttgttgaattgaaaatgaattgggccgggcgtggtggctcacgcc

SEQ ID NO: 927085 - DNA, 120 bp, Artificial Sequence
  ENSG00000287761_0 (sequence is synthesized)
ggctctctttggtctgctgtctccatgggtgccaggaactgtgctgtgaatatctggatgctgcatcattaaacctattgagtatctcactgtctgctgagcccaactgtgactctgttc

SEQ ID NO: 927086 - DNA, 120 bp, Artificial Sequence
  ENSG00000287761_1 (sequence is synthesized)
aaacaaataaaggtacctaatggctgcaacctgaattgtgggcacatggcccaagtggtaatcagagatggcctatgtcactgaggcagaagacccacaagaagtgcagagaataataga

SEQ ID NO: 927087 - DNA, 120 bp, Artificial Sequence
  ENSG00000287761_2 (sequence is synthesized)
gatgcagaggctattcccagattcccactggaagtcccattagcagtgacaaaaggagacacagacggaggagagagttgcggcagatggtctccatccaggaaggagcagaagagatgc

SEQ ID NO: 927088 - DNA, 120 bp, Artificial Sequence
  ENSG00000287761_3 (sequence is synthesized)
tgacgtcaagaaaaaacgggggctgtgactctactgatgactctatttcctgttccaggctacttggcagggattctggccacagaggaaaggctctacacccagacacacaaggaataa

SEQ ID NO: 927089 - DNA, 120 bp, Artificial Sequence
  ENSG00000287761_4 (sequence is synthesized)
gcaactggtgtccagtagagaagagggagagaaacctcgaggtcttaatttcacagaggttcttgacacagggtgggattcattgctgtctaagaagggaacttaggatcttgtggagtt

SEQ ID NO: 927090 - DNA, 120 bp, Artificial Sequence
  ENSG00000287761_5 (sequence is synthesized)
ttgttttttttttttctgaagctacttcctcagtgtgttgtttggccaaaatcaggaagaaaataaaacctacctgttagggtatgttgcactcagaaaacctggctcagctgatgggat

SEQ ID NO: 927091 - DNA, 120 bp, Artificial Sequence
  ENSG00000287761_6 (sequence is synthesized)
atttatcacactaagtatgctgacattttccaggattcttgaggaggtctaaatagaaggatctaaattcaccaaaatgatagcattctgtaagagaaaagactaaacaaaaatatcctc

SEQ ID NO: 927092 - DNA, 120 bp, Artificial Sequence
  ENSG00000287761_7 (sequence is synthesized)
aaggcaagaggatagcttgagaccaggcattcaagaccagcctgggcaaccctgtctctacaaaaaacaaaaaaattagccaggcatggtggtatgacctatagtcccagctactaggga

SEQ ID NO: 927093 - DNA, 120 bp, Artificial Sequence
  ENSG00000287761_8 (sequence is synthesized)
ggctgaggaaggaggatcacttgagccaggagttcaagactgcagagagccatgatgaactgctgcactccagcctaggcaacagagtaagaccctgtcccaggaaaaaaaaaaaaaaaa

SEQ ID NO: 927094 - DNA, 120 bp, Artificial Sequence
  ENSG00000287762_0 (sequence is synthesized)
aatgccacactgcagattccctgggatgctcgcgaaagtcccctctgcattcccaatagaaaggaaaaataaatattcttcatgttagcagttttggaaactggtctaaactgtctagga

SEQ ID NO: 927095 - DNA, 120 bp, Artificial Sequence
  ENSG00000287762_1 (sequence is synthesized)
tgcccacgggagccaatgcctttgcaggaagtgcctttgctggctgcttctatcaattatatcctgagcctctgacatactccgcagcaggaggccctttgcgggggacagagtggctgt

SEQ ID NO: 927096 - DNA, 120 bp, Artificial Sequence
  ENSG00000287762_2 (sequence is synthesized)
aatttacaagacacacacagctttgcatcaagagaagggagtgggcaagaggacaagggcaggacggagaggagcaccctgcagcctccagacagaggactgattaatgccctgaagaac

SEQ ID NO: 927097 - DNA, 120 bp, Artificial Sequence
  ENSG00000287762_3 (sequence is synthesized)
aggttgtcaaatggcctggatgtcttgagcctaatttaccatcagggaaggcagacactcagggaggcggaccgctggtcacatctggaaatgacacagctacaagttccttggtgcagc

SEQ ID NO: 927098 - DNA, 120 bp, Artificial Sequence
  ENSG00000287762_4 (sequence is synthesized)
cattacacaactggactttcaagaaaataatatcagaaaggctccccacaggcccaaatgtcttccccaccctcaccctacaaaccacaggagaagaaaggagaaagtcaacatgcctct

SEQ ID NO: 927099 - DNA, 120 bp, Artificial Sequence
  ENSG00000287762_5 (sequence is synthesized)
tggagcgttagttgctttctcacagatagttatgggaaggaaaaacagagaggccgttatattcacggctgtgtagaaagccaagaatcaaaccttggaccaagtgcaagagctgggagc

SEQ ID NO: 927100 - DNA, 120 bp, Artificial Sequence
  ENSG00000287762_6 (sequence is synthesized)
tgaatggcatggccagtttgaacagtgaaaaccaggccacccagggctgtgcttggccaagctcgtcccgaggaagctcagggtgaagtgacaggctggctcttcagccagaaataaaaa

SEQ ID NO: 927101 - DNA, 120 bp, Artificial Sequence
  ENSG00000287762_7 (sequence is synthesized)
tgaggatatcagctggatggacaattctattggttcccatcaagtcaccatatctcattttctggtcacttaaagtgaagcttctgatggcgagcagaagatataaaccaacagagacta

SEQ ID NO: 927102 - DNA, 120 bp, Artificial Sequence
  ENSG00000287762_8 (sequence is synthesized)
gcacatctacattctcctttcttgggctctaattaacattgtctctgcttttcatctagaatctcagtcccttgtgctaactgctactgagttactctagttaaagtatgttaatgaagg

SEQ ID NO: 927103 - DNA, 120 bp, Artificial Sequence
  ENSG00000287762_9 (sequence is synthesized)
ggtgagaactactagcttcatgaaattttgggattattttactcatcttcctcctatccccctttctcagacataacaagaaccagctaggactggtggatgacttaacagtttctgaga

SEQ ID NO: 927104 - DNA, 120 bp, Artificial Sequence
  ENSG00000287762_10 (sequence is synthesized)
tgatctagagggctttagggttctacttttccagcctgctcagccactctccacccaccaccctctggttgtggaagctgttcattccacaaatatctactgagcatcttctgtgtgaca

SEQ ID NO: 927105 - DNA, 120 bp, Artificial Sequence
  ENSG00000287762_11 (sequence is synthesized)
ggcactgttctagttcacaacattccagaaaaatcaacaaataccctgtcttcatgggtcttaaattccagtaaagaagacaaaaaatacacagaaaaacacaaatgaatacaaaattgg

SEQ ID NO: 927106 - DNA, 120 bp, Artificial Sequence
  ENSG00000287762_12 (sequence is synthesized)
atgataagtatcatgaaaaaaaaaaaaaacataaggtgggttgagggactagaaattgagatggttgctcttttaggcagagatcttgcatctgcttgcccaccatgctccctccccttt

SEQ ID NO: 927107 - DNA, 120 bp, Artificial Sequence
  ENSG00000287762_13 (sequence is synthesized)
tccctttcttcctgtaatacccctcaccccctgaaacaggagtagcctgggccagtcacggtatcacttgcccctgatcacagtgactgcttcaggaataaggtccacatggggccaggg

SEQ ID NO: 927108 - DNA, 120 bp, Artificial Sequence
  ENSG00000287762_14 (sequence is synthesized)
tacattactaggaattttttacacctggggccaggggacagcattcccttgcttttctgggcaaggagctagaagcaagtaatcctggggatgatactggccacgctccctgttataagg

SEQ ID NO: 927109 - DNA, 120 bp, Artificial Sequence
  ENSG00000287762_15 (sequence is synthesized)
gaatgtttgcctataggaagaaataatgagtttaaggagagataagagatgagagaaagatcctgaaatctccagggccaccctcgtccccatgggtgtcccttcaatcttaatattctt

SEQ ID NO: 927110 - DNA, 120 bp, Artificial Sequence
  ENSG00000287762_16 (sequence is synthesized)
gtagtaaatcctctttgttcagctgaagtgccacttcctttggaaggacttttctgacatatccagtctcagtgaaaggccactgtcactgtgatgttagagatcctttaaaaaaaaata

SEQ ID NO: 927111 - DNA, 120 bp, Artificial Sequence
  ENSG00000287762_17 (sequence is synthesized)
cagcagtagcagcaatctatgaatacctactacatgccagactttatgccaagggctctacctgggtcacctttactatagaacttaacaagttgcaccctagtgaatcatttttatgca

SEQ ID NO: 927112 - DNA, 120 bp, Artificial Sequence
  ENSG00000287762_18 (sequence is synthesized)
catttcacccactagaaaaatgaatataaaaatttgtggataatctcctttgtgaaagaaaaaaaactaatttcaaatttatttcagcctgcatatgtgcagaagagattacagttgtcc

SEQ ID NO: 927113 - DNA, 120 bp, Artificial Sequence
  ENSG00000287762_19 (sequence is synthesized)
ctcaatatctgctctcctaacaaaaatgcctacagtttttagctgaaataaagtctactttccccaagtctttgcttgcagctagatatggatgcatgaccaagttcaagtctgtaagat

SEQ ID NO: 927114 - DNA, 120 bp, Artificial Sequence
  ENSG00000287765_0 (sequence is synthesized)
aattcgcttcccacaaagaggtccggctcctccacttccgttaggctgagcaccggctgaatcgcggaaacccgactctggcaatgtaggttccccacgccgggagttcccaagctgggt

SEQ ID NO: 927115 - DNA, 120 bp, Artificial Sequence
  ENSG00000287765_1 (sequence is synthesized)
tggagaactcgagcttcgggcattcagtggccagctcggctttataaaggaccgtgcccttaacagcagggctcgagttcctatatccagaccaaaacctccaactgcatgagccttttt

SEQ ID NO: 927116 - DNA, 120 bp, Artificial Sequence
  ENSG00000287765_2 (sequence is synthesized)
cttaataaattttattttggtaattgtaaaaagaaaaatcaggaccaaaactaaaggcaacttaaaaagttcaaatatataatccttatgtgatagagatttataatttccaggccctct

SEQ ID NO: 927117 - DNA, 120 bp, Artificial Sequence
  ENSG00000287765_3 (sequence is synthesized)
ctggggaaggaatgcccaaagggcaaaagggaaggcaacaatgccatcacacaattcagtcaatcagaagagaagctggtaggagagttcaacagggcatgaagaaagggagagaacagc

SEQ ID NO: 927118 - DNA, 120 bp, Artificial Sequence
  ENSG00000287765_4 (sequence is synthesized)
aatagttctgccatacagaactcagtccatcttgaggttaacatagatataccggatgaactttagggaagaaaaaaaggagatggtgcccagcatgaggaagaagacataaccagtgag

SEQ ID NO: 927119 - DNA, 120 bp, Artificial Sequence
  ENSG00000287765_5 (sequence is synthesized)
tctactgtctgtactgccccagacatgttggagcgccgggcataatagaaaactgagtagaggaagatgaagaggccggtggagccaacactcagcacagatcgccaccaccagcggtaa

SEQ ID NO: 927120 - DNA, 120 bp, Artificial Sequence
  ENSG00000287765_6 (sequence is synthesized)
tcctccccagacaactggaagtagtgccaagggccaggaactgggcacccacgccaagcacagcacagagcagaccacggtatggggggaagcggaagacatctgtatggataattttcc

SEQ ID NO: 927121 - DNA, 120 bp, Artificial Sequence
  ENSG00000287765_7 (sequence is synthesized)
agccattgtcaccctggtcaaagtcatcaccagaacctgcagaggtggtctcctcatctaagttgtaccgagccaggtcattccgaagcacacgcattagaatgacagccacaaaaccca

SEQ ID NO: 927122 - DNA, 120 bp, Artificial Sequence
  ENSG00000287765_8 (sequence is synthesized)
ccagtaaaaacacaagcaccatggagttgatgatggacaaccaatggatttccagtgttcgaggaaagaaaccaccatcgtcaccacggcgcctgtcactccgacgctccactgaagtct

SEQ ID NO: 927123 - DNA, 120 bp, Artificial Sequence
  ENSG00000287765_9 (sequence is synthesized)
cagaccagcgcacgctataagtgtgggtaaggcctaggaactcgtcaggtcgtaacccatccaagctgtggggcttgacgtcccgcactgaaacattggcaaatataattcggtctccat

SEQ ID NO: 927124 - DNA, 120 bp, Artificial Sequence
  ENSG00000287766_0 (sequence is synthesized)
gtgctgggattacaggtgggagccaccgcgtccagcctaagccttttcaatcaatagctcaatgccctctcgtgtcaatatgcagaacaaggaactgaatctatactagactttattaca

SEQ ID NO: 927125 - DNA, 120 bp, Artificial Sequence
  ENSG00000287766_1 (sequence is synthesized)
tacagcacagtgtccattatctttactttctcccactataataccccagtcttgcccgtaaagatgagaagggaagtttgactttgatgagcaccaaagttaccaattttacaaaatcta

SEQ ID NO: 927126 - DNA, 120 bp, Artificial Sequence
  ENSG00000287766_2 (sequence is synthesized)
atagccataattcttgtagttcctcaccaccctacagttcccactatttttaccctagttcctgtgtctgcagcctggtttgcatgaatggacctctgctcagctgtcttttccattcct

SEQ ID NO: 927127 - DNA, 120 bp, Artificial Sequence
  ENSG00000287766_3 (sequence is synthesized)
ttgcgtcctgattcacagttcctctttgcacttctgtttagaggaggacagtgggtatggcctgcacacctcaggaatattgctggtaccccatccatattttcccaagtccttaaggcc

SEQ ID NO: 927128 - DNA, 120 bp, Artificial Sequence
  ENSG00000287766_4 (sequence is synthesized)
tactcagactttgtaacatttatccaaggctctactcgtgttcagtatactgatgatgcctttgtagccaaactaagcaaggtggtcttatggatttcctcattctcctagagacactag

SEQ ID NO: 927129 - DNA, 120 bp, Artificial Sequence
  ENSG00000287766_5 (sequence is synthesized)
cttgaatcaattttatccatcgctctccgcaaaataaaagcaggcgtgagccactgcaccttgcctctttatgcactcttaacctgtctcttctcattccttcgtcaccactggactttg

SEQ ID NO: 927130 - DNA, 120 bp, Artificial Sequence
  ENSG00000287766_6 (sequence is synthesized)
ggtaccctacgggtgatgttaaggctggtccccaacaattgttatttgtggaaactttccagtacccacgtatagccagcagcccctttaagggaacataactctccctggctggccaac

SEQ ID NO: 927131 - DNA, 120 bp, Artificial Sequence
  ENSG00000287766_7 (sequence is synthesized)
aaatagcccggagccaagcagtcatcagctgtcgagtctgccagggagcgttgtccttcacggaaagcatctaaagcattagctctctgctgcgtgtggttagagtgtgctgaacgtttt

SEQ ID NO: 927132 - DNA, 120 bp, Artificial Sequence
  ENSG00000287766_8 (sequence is synthesized)
ccgatggcttcatggtttgagttgacaggatgacatcatgtgtgcctaaggcagtgcccgtggtggcccaaaaagtatgtgcaatgagcagaaaattagcacacttgtctcaagaggagg

SEQ ID NO: 927133 - DNA, 120 bp, Artificial Sequence
  ENSG00000287766_9 (sequence is synthesized)
tttgggagtgggtgtgagatggagcagggactccctcttcacggcctgtggatctcccaggcatagaaataaagaacaatcttgcttttcttcaaggtaaatttcagtcacctagttagc

SEQ ID NO: 927134 - DNA, 120 bp, Artificial Sequence
  ENSG00000287766_10 (sequence is synthesized)
cccaagaagtaaatatgcaacttgataagcaagaaggtaacggtagcctaaaacaatagccaaggaagctagaagcatcggatgtgtagttctcctgtagaaactaaagatggtggccgg

SEQ ID NO: 927135 - DNA, 120 bp, Artificial Sequence
  ENSG00000287767_0 (sequence is synthesized)
ccttgtgggctggccagatgtctttgtggaggggaaggcatccttccaagaccggaatcctctcatgcagggactagcttgcataaaagaccctcctccagatccagcctcatcaagacc

SEQ ID NO: 927136 - DNA, 120 bp, Artificial Sequence
  ENSG00000287767_1 (sequence is synthesized)
ttgaagcagctgggaaatcaaagcctcgaatcgtgaagaaacatgtggaggtgacacaacaattatttgctgggagtgagagaggtactcacatgctcttttcacttattgtccagaaga

SEQ ID NO: 927137 - DNA, 120 bp, Artificial Sequence
  ENSG00000287767_2 (sequence is synthesized)
agaacatcacgatggaaacatacctttcactggagtcattgaatcttaactactgaataccttacccaagaagtcaatgctgaatgtcatcaacaaaggccgcaacaaccatagctgtgg

SEQ ID NO: 927138 - DNA, 120 bp, Artificial Sequence
  ENSG00000287767_3 (sequence is synthesized)
ataagaagaatccttctcttaagacatgttgattttttgagtgtgcagggtatggagacatgaagccttaaactcgaatacaaaatccactctaagtcctcattttctcttctgtaaaat

SEQ ID NO: 927139 - DNA, 120 bp, Artificial Sequence
  ENSG00000287767_4 (sequence is synthesized)
ggacttatgaactgcctccctccctatgagttaatgagataacagttaaatagaatgcagggcgtaacacaggacctctcacagggactgtactcaacacgttagatgtcttaacttcat

SEQ ID NO: 927140 - DNA, 120 bp, Artificial Sequence
  ENSG00000287767_5 (sequence is synthesized)
ccctttctgactccagggaaagtgaaatgccagcatttttaagtagatgttacatttctacagcgaacaatcttgtctttctctgattgtttttggttgatttttatgtatcatgtcaat

SEQ ID NO: 927141 - DNA, 120 bp, Artificial Sequence
  ENSG00000287767_6 (sequence is synthesized)
ctagtttttaatgcataacaaagcgctgccaaattttatgctttaaacagtaaactattttactcacaattctgcaggtcaataatttcagctggtcccatctgagtgggttttcttgtt

SEQ ID NO: 927142 - DNA, 120 bp, Artificial Sequence
  ENSG00000287767_7 (sequence is synthesized)
tgtttgcttttttttttttttttttgctgttcatggctaggcttagttatgcatcttcagctagtgctctcttatgacctaagtagttctgcttgtgggcgaatggtctaggatggcctc

SEQ ID NO: 927143 - DNA, 120 bp, Artificial Sequence
  ENSG00000287767_8 (sequence is synthesized)
cctcacccatatgttgggcaacggtttcactgtcagctggggtgaaagggaagaatctgccacaggtatctcatcatccagctagcctggccagccttcctcacattgctgtcacaatgt

SEQ ID NO: 927144 - DNA, 120 bp, Artificial Sequence
  ENSG00000287767_9 (sequence is synthesized)
ttcaagagcgaaaagagagaggataccccagtgtgcaagcacctttcagttctctgctgacttctgttcacatttgttattgtcccactggacacaacaaattacatggccaagaccaga

SEQ ID NO: 927145 - DNA, 120 bp, Artificial Sequence
  ENSG00000287767_10 (sequence is synthesized)
aacaatgacagtgtggaaggagatacaggcttccacgaacaaattgcagtttcactgtaacaatctactactacagtgattcctgaattacactgctcatcattggagaaatacttaaat

SEQ ID NO: 927146 - DNA, 120 bp, Artificial Sequence
  ENSG00000287767_11 (sequence is synthesized)
atgcaaaaccagacagaggaatgctgttctcttaaaaaggatttttactatcgttacaaaagtcttagcttttcttgccttgttactatattatagatgaataataaagttattaggcca

SEQ ID NO: 927147 - DNA, 120 bp, Artificial Sequence
  ENSG00000254754_0 (sequence is synthesized)
aagtgagaacgttcagtatttgacttttggttcctgaattaaatgtatttctttaattcacaggtcttcagattgagaggagcagaacatgaggtactgaactcaagaggtctcacgtgc

SEQ ID NO: 927148 - DNA, 120 bp, Artificial Sequence
  ENSG00000254754_1 (sequence is synthesized)
cagaatgagagcgaaaaaacaactatactgaaagcaaattgaagagaattgtgaactttcttctgaatgcatatattttgctcgacaagtttagcttccataaaaatctgaaatctagaa

SEQ ID NO: 927149 - DNA, 120 bp, Artificial Sequence
  ENSG00000254757_0 (sequence is synthesized)
aggaccagcattccacgaaggcagcccttttctagatggagaaaacagaacctgaaggcacccgtttccctaaactgctctcgctcatgtgcttccgaggcgttcgatcgggaagtgtcg

SEQ ID NO: 927150 - DNA, 120 bp, Artificial Sequence
  ENSG00000254757_1 (sequence is synthesized)
agcaattcacgttgacctgggtcaccctcaacttaaggctcatgactcccctagatcctcagggtccacactaaatgtgatgaaatatgatgcaagccacatatttacttttgcattttg

SEQ ID NO: 927151 - DNA, 70 bp, Artificial Sequence
  ENSG00000254757_2 (sequence is synthesized)
tttgtagtaaccaggatttaaacaaatctatccgaaataccaggtctacatgtataaaatattttaacat

SEQ ID NO: 927152 - DNA, 120 bp, Artificial Sequence
  ENSG00000254756_0 (sequence is synthesized)
atggagagacggagcctcacccagcctcttaggcgacagcagcttctcagggcccagctccgcactcagcatggcccgggcccggctcagcgcctgacggatgccctgcagctcctgggg

SEQ ID NO: 927153 - DNA, 120 bp, Artificial Sequence
  ENSG00000254756_1 (sequence is synthesized)
ctcgggcccagcccgcacctgggtcagtaggtcctgcaccagctggcccgcggctgtgtgtcggtcctgcatcagtgctgccgcagcccggcccacctgccgctccggtgccagtaggga

SEQ ID NO: 927154 - DNA, 120 bp, Artificial Sequence
  ENSG00000254756_2 (sequence is synthesized)
tcggcggcccaggtgcccagtagtgaagctggacgggctgggggctccaggagagcccgcgcctgactctccagggctttccatggctgggagctccttcgcttcaggaagagaatccag

SEQ ID NO: 927155 - DNA, 87 bp, Artificial Sequence
  ENSG00000254756_3 (sequence is synthesized)
ccatggctgggagctccttcgcttcaggaagagaatccagtcccaaggcaaggcacgcacatccccaagataagaactcctgggccc

SEQ ID NO: 927156 - DNA, 120 bp, Artificial Sequence
  ENSG00000254753_0 (sequence is synthesized)
aattatagaatgtgtatctgccatggtcaatgtcatttcagaagtttgtaagggctattccttgaagcttacacctgcccccctcaatgtgactaacaagtcttttcagttagtaacata

SEQ ID NO: 927157 - DNA, 120 bp, Artificial Sequence
  ENSG00000254753_1 (sequence is synthesized)
cttgctgagggtttgacaacaaagacttaatgaagattgtgataaattcacacagacacccaagtaaatgtaagcatccacagaaatgaggaagaactcaatgctattaattcaacaata

SEQ ID NO: 927158 - DNA, 120 bp, Artificial Sequence
  ENSG00000254753_2 (sequence is synthesized)
attctgagactatacactgtattgaaaaagaggatcgtcagcttaataccattagagtactgtgcttttgttctgtacagcaccaaaatgcagttttcattcaggattaatttatttttt

SEQ ID NO: 927159 - DNA, 120 bp, Artificial Sequence
  ENSG00000254753_3 (sequence is synthesized)
caaactatatatgtacttttctgtttaattgtaatcctaggagagcagctatattatctgcattgttgttatattcccaaaacccagaaaacagatgttcaataaatgattttcaaatga

SEQ ID NO: 927160 - DNA, 120 bp, Artificial Sequence
  ENSG00000257228_0 (sequence is synthesized)
acttttaacctggcacatgattacccaaaatgaagactccatatatcagccatggccaagtttctgaccaatgagataaataaaacagacacgactggatgtgaaacagtcatttggacc

SEQ ID NO: 927161 - DNA, 120 bp, Artificial Sequence
  ENSG00000257228_1 (sequence is synthesized)
atgaagtgaccttggaaaaggaagccagaagagttcttcttagctataactacctggaagaaaaagttgctgatcacattgagaactgaaattaatagcagaagaaagtgaagagtgaag

SEQ ID NO: 927162 - DNA, 120 bp, Artificial Sequence
  ENSG00000257228_2 (sequence is synthesized)
gtttactacagggccttgtaaagaattaactaggtttaaatgaaatgccttttgatgtattttacttgaaatagcattcttgcttcaattaagcagtccccagaaaagcaataacacggt

SEQ ID NO: 927163 - DNA, 120 bp, Artificial Sequence
  ENSG00000257228_3 (sequence is synthesized)
aggatcaaataagccagaatttgcttatcctccaagttctctggcgtgctaaaaagtcaaactcaggatgcaatatctgtgcttttgttgatgagtgcccaataaacaaggaactctgaa

SEQ ID NO: 927164 - DNA, 120 bp, Artificial Sequence
  ENSG00000257228_4 (sequence is synthesized)
gggatgccatggctcttcctgaaatcctgagagcttattcctgcccttgaacttctattggttttataggaaaggctcttggaaccccagcacctgagcacaatcccattctaagatttc

SEQ ID NO: 927165 - DNA, 62 bp, Artificial Sequence
  ENSG00000257228_5 (sequence is synthesized)
ggaaccccagcacctgagcacaatcccattctaagatttcctgagtggtatcatttaaattt

SEQ ID NO: 927166 - DNA, 120 bp, Artificial Sequence
  ENSG00000257228_6 (sequence is synthesized)
agaagatagccctgtgaagacacagactcagagagaattctaatatggagatggaaacaaaatctgtagtcatgctgctccaagctaaggaatacctggggctaccagaagctcgaagaa

SEQ ID NO: 927167 - DNA, 120 bp, Artificial Sequence
  ENSG00000257228_7 (sequence is synthesized)
gcaggagaagttcctccctagaggcttcagagaacatgacatctgacacattgatttcagttggctgaccttcaaagcgatgaggtgaatttctgttgttttaagccacccagagacagc

SEQ ID NO: 927168 - DNA, 120 bp, Artificial Sequence
  ENSG00000257228_8 (sequence is synthesized)
cctaagaaattaatgcacatgctaatactagttttctctaagtttcattgagaatattgaaaaatatatatttaaatatctggatcttattgagaatacaaagaagactttcatacgttg

SEQ ID NO: 927169 - DNA, 120 bp, Artificial Sequence
  ENSG00000257228_9 (sequence is synthesized)
gtatttctgaatcttcatttataaagtgttaaataacttatgcccaaaagaaaaaatcggtcagaaattacctcatatcagtaagttctatagtaaaggaataaatgcatctaagaatga

SEQ ID NO: 927170 - DNA, 120 bp, Artificial Sequence
  ENSG00000257225_0 (sequence is synthesized)
ggtcatcgtgacaggcatgcctcacaccaagacggactatcaagacctgagccgacctgacttacataaatgacaaacactagtgctttacaaaggtggctggagttctccatcttctaa

SEQ ID NO: 927171 - DNA, 120 bp, Artificial Sequence
  ENSG00000257225_1 (sequence is synthesized)
aatcaacatccaatccccttcagtcagcatcttcagtattcccttgaggactggaaaaccaaagcagctacgtccatctgtaacgcacccgcaccggacaggcacgagatgtcacgtcca

SEQ ID NO: 927172 - DNA, 120 bp, Artificial Sequence
  ENSG00000257225_2 (sequence is synthesized)
cctggcaccatccaaagagggtaaattggagaaatcacacctttcaaatgttaatctgacactgtaaacagcagttgagttctcatttacatgggcaaagaaagcactttaaactatttt

SEQ ID NO: 927173 - DNA, 120 bp, Artificial Sequence
  ENSG00000257225_3 (sequence is synthesized)
cacaactttcctacggaagaaaaggaaacgattcagacggttaatggctaagttttaaacaaatgctctgcatcactacttggttaagaaataatacaatttttgcccttgtgtcccttt

SEQ ID NO: 927174 - DNA, 120 bp, Artificial Sequence
  ENSG00000257225_4 (sequence is synthesized)
ttcttcttggattttgttgtcctctgaccaaactgaggggtgggaagtgcagatggtggactagaaaggtcatctgtatagtaggcaaatctctgtggccggggttgagggattggttgt

SEQ ID NO: 927175 - DNA, 120 bp, Artificial Sequence
  ENSG00000257225_5 (sequence is synthesized)
ccaagaaaatatccttcttcttccgagtcggaagaggaggaggaggaagaacaccaggaatcatcatcctcgccgtagagtcccagaaaccgattcattcctgggttctgcaggccataa

SEQ ID NO: 927176 - DNA, 120 bp, Artificial Sequence
  ENSG00000257225_6 (sequence is synthesized)
tcggaagtggcatgggcgtactgtccgtagagatcagcattctggatgtatgcttggatctcccgggcacttttattctgtataaatttctcatagttatcgggggtgtacagccgcagt

SEQ ID NO: 927177 - DNA, 120 bp, Artificial Sequence
  ENSG00000257225_7 (sequence is synthesized)
ctgtccttgggagagtattttctttctgtaacaagattcagggcattgtcggagcgggactttctacttctccggcggcggtggtgatgagacctggatcccctctcttcaaaattgtag

SEQ ID NO: 927178 - DNA, 120 bp, Artificial Sequence
  ENSG00000257225_8 (sequence is synthesized)
acgcgtctccgagtcctttcactcatcggaggctgccggatttcaatgtcatagttcccattgtcaatgacatcatcagaaaacttgacctgctggggtctggattgagacttggacctt

SEQ ID NO: 927179 - DNA, 120 bp, Artificial Sequence
  ENSG00000257225_9 (sequence is synthesized)
ctgagcactggcagatgtactggcttctcttcaggcaggattttctctggacacaactctgaacttagactctttaaggactctgcactcctgtgcagcatggaagagttcaaagttccc

SEQ ID NO: 927180 - DNA, 120 bp, Artificial Sequence
  ENSG00000257225_10 (sequence is synthesized)
atattgctcatcttctcacaatcttctgtttccatctcctcaaaattttgcagagaatacaatgatggccttggcttgttttctccatccaccgaagcccctagaagagaggccaaaaca

SEQ ID NO: 927181 - DNA, 120 bp, Artificial Sequence
  ENSG00000257225_11 (sequence is synthesized)
cagtacttaaaaatatccagtgctcactggctcgaatatccatctcattgggctgtggctgaaagaggcttttatcaccaaacttgaggaggagctgcgtcatataatcttcatgatcag

SEQ ID NO: 927182 - DNA, 120 bp, Artificial Sequence
  ENSG00000257225_12 (sequence is synthesized)
cccattcttcagggtcttctggagtttcctgctctactctgcctttccaaaattcttcactggcaaaacttgttccttgtctggagagactcagatcatccaattttcgagaaagggtgt

SEQ ID NO: 927183 - DNA, 120 bp, Artificial Sequence
  ENSG00000257225_13 (sequence is synthesized)
catcagcattgcctgagaggccaggaaacttgtagttcagagcaggcgataagaggagagactgtctacactgatctgctgaccggctgctcttgcccattcggacacttcttcgggagt

SEQ ID NO: 927184 - DNA, 120 bp, Artificial Sequence
  ENSG00000257225_14 (sequence is synthesized)
ctcttgatcgagctgactgaaatgcagagtcggaagaatcagaggcatggacgtcttcaccaagactgcacgtttttgagcagtaaatctgaccctgtttgggaaggaagggacatccca

SEQ ID NO: 927185 - DNA, 120 bp, Artificial Sequence
  ENSG00000257225_15 (sequence is synthesized)
acaaagaggctttacactgggcacaagaaaagcaggcttccgtggcgtgccagtgctgcccgtcataggtcatctgtgcatggtccacacctgttttgaaaaggatagaataaataacag

SEQ ID NO: 927186 - DNA, 120 bp, Artificial Sequence
  ENSG00000257225_16 (sequence is synthesized)
gttatggtttaatgcctgaaacaaggtataaggaagaaacgaagaaaataaataaagattatgggtatgggggagctgtgtgggtgacacagatataattaatcctcattctttgtggat

SEQ ID NO: 927187 - DNA, 120 bp, Artificial Sequence
  ENSG00000257225_17 (sequence is synthesized)
tctgtatttgtgagtgtgcctactcataaaaatttattcacaactcccaaactaatattcgcaacagtttcatggtcattcgcagatgtgcagagtggtaaaaatacgaactgaaccaac

SEQ ID NO: 927188 - DNA, 120 bp, Artificial Sequence
  ENSG00000257225_18 (sequence is synthesized)
atgcactgatccaggagatgctcagctttttgtttcagctctcatactgtagacaagtgtcctatttctggtctatctactgccgcgttttctgcatttttgtgctctttgttggtgagt

SEQ ID NO: 927189 - DNA, 120 bp, Artificial Sequence
  ENSG00000257225_19 (sequence is synthesized)
ttactgtttaaaatggcccccaagtgtaatgctgataatgctgaaatgctgtcatgttgctaagggcaagaaggctgtgatgtgccttacagagaaaagacatgtattacgtaagctcct

SEQ ID NO: 927190 - DNA, 120 bp, Artificial Sequence
  ENSG00000257225_20 (sequence is synthesized)
aatcttgagtacggtaccactggctgtgagttcaatattaatgcatcaacaatgtacattcaataaggcagtggctttaagcaaaaacacacgtgaaacaaggttatgtattgatgggtt

SEQ ID NO: 927191 - DNA, 120 bp, Artificial Sequence
  ENSG00000257225_21 (sequence is synthesized)
gatgaaactgctgtgaccagaggctcacaggaacctaaccctgtattcccccatgagcaatggttcagtgttcactaatccagtgtttgcagtaacgtcacagaacacaactactgcaag

SEQ ID NO: 927192 - DNA, 120 bp, Artificial Sequence
  ENSG00000257225_22 (sequence is synthesized)
taacaagaatcaactctctgttcatttgtcaaagctcatcagctggaacatttaagatctgtacatttcattgtatgtaaattatatctcaactttaaaaaacagaaaaagaaaaaataa

SEQ ID NO: 927193 - DNA, 120 bp, Artificial Sequence
  ENSG00000257226_0 (sequence is synthesized)
ttagggaagacccaggcagggcgcaatatattcttctttttgttctcctgtctgtctccgtttgcaatcccagccgctttgtatggagagcttttacgcagcacctgaaaattcaatttg

SEQ ID NO: 927194 - DNA, 120 bp, Artificial Sequence
  ENSG00000257226_1 (sequence is synthesized)
aacacctgtgtccccttcttttcaatctgggaggctgaaatttgacagacacatcatggcaaagttgtgcagcagcgatacaagtagatgctgaagaaaagggaggaatctgagcgcagg

SEQ ID NO: 927195 - DNA, 120 bp, Artificial Sequence
  ENSG00000257226_2 (sequence is synthesized)
ataaaatgctcaagaaaatcccattggtggaatgtttgtgagagaaaaaaaaggtggcagaaagactggtattatagtagtccctgcttatcttcgggggatattctccagaaaccccat

SEQ ID NO: 927196 - DNA, 120 bp, Artificial Sequence
  ENSG00000257226_3 (sequence is synthesized)
cccgccgccagtggatgcctgagaccttggatagtaccgaaccagattgccatctattggaacatgtttctcttccatccacagatgtaatgccttttccatcttaactcagcactcatc

SEQ ID NO: 927197 - DNA, 120 bp, Artificial Sequence
  ENSG00000257226_4 (sequence is synthesized)
atgcactgcggccataacttttgcagtctgaggcacaacagcaaaactagcacaaatttatttttcctacttgacaatttcacagatggaagattcattcttaacataaatcatagcaac

SEQ ID NO: 927198 - DNA, 120 bp, Artificial Sequence
  ENSG00000257226_5 (sequence is synthesized)
cttccacctttccactgaatggaagcacgttatggcttctctttggcatgtgtgaattgccagcatcacctactcttgcacgttgggggccattgtgaagtaaaataaggaatcctcaaa

SEQ ID NO: 927199 - DNA, 120 bp, Artificial Sequence
  ENSG00000257226_6 (sequence is synthesized)
cacaagcactgtgatgccacaacattgatctgataactaggaaggctactctctgaataatggcaccagaggagacagcttggagactctggacaaagggaggagttacgtcctggttgg

SEQ ID NO: 927200 - DNA, 120 bp, Artificial Sequence
  ENSG00000257226_7 (sequence is synthesized)
gagaactcatcatgctactcagaatggtgtgccacttattaattgcatatttctggaattttccatttcatactttcagactatggttgactttggataactgaaaccgtggaaagtgaa

SEQ ID NO: 927201 - DNA, 120 bp, Artificial Sequence
  ENSG00000257226_8 (sequence is synthesized)
accacagataagggggactgctgcattttttttttcccttcacaaacctgattctctgaagaaccacttttgtgaccaagaggccatgccgtccatctcttgaaagagtttgagcagggc

SEQ ID NO: 927202 - DNA, 120 bp, Artificial Sequence
  ENSG00000257226_9 (sequence is synthesized)
ctaagccatgtgtgtactgcctggtacttgcccaccaccaagcaagctcatggcacatactgtggccagcaaagcatatttgacctgaccaatattaataataatcaactactgttctaa

SEQ ID NO: 927203 - DNA, 120 bp, Artificial Sequence
  ENSG00000257221_0 (sequence is synthesized)
gaggaaactgaagctgagagggagaatgtgccttgctcaagggcacacagagtaatggcagagccaggactcaagtccaggcacatgaaataatgttcttgatcttaacccctagcctgg

SEQ ID NO: 927204 - DNA, 120 bp, Artificial Sequence
  ENSG00000257221_1 (sequence is synthesized)
gtagcttagcagcaggaatgaagcccaagaaaaatactccaagttgccttccaagattgaagcaatgatatctgagaccctattggttctcttcttctggagaacgctaatagagaggct

SEQ ID NO: 927205 - DNA, 120 bp, Artificial Sequence
  ENSG00000257221_2 (sequence is synthesized)
agcaggccggaggctgggagaataacacagaaacacggagggtgctggggcccagttcttcaggactcaaaacactctctgtagatgcacagcacaggccctttcagctgcaaccaagag

SEQ ID NO: 927206 - DNA, 120 bp, Artificial Sequence
  ENSG00000257221_3 (sequence is synthesized)
cctctctagggagctggactacagataccacaaggaccctattggttctcttcttctggagaacgctaatagagaggctctgtccacgcagaaatgatgggagcacaggctgggggagtc

SEQ ID NO: 927207 - DNA, 120 bp, Artificial Sequence
  ENSG00000257221_4 (sequence is synthesized)
accgggcaggtgtgagaagtagctgggatatggatgcactgtgaaaccagagcctgggtgtgggatacgcaagaagagatgggagtcaaggaggctcagaggtggaagagcatgaacttc

SEQ ID NO: 927208 - DNA, 120 bp, Artificial Sequence
  ENSG00000257221_5 (sequence is synthesized)
ctcctgtagacaaaagggataatcacttgtgtctccttcagagaccttgacagaaaacatcactctagaagcaaaacagggaacaggcggttggaggcagagaaaccagctacaaggctg

SEQ ID NO: 927209 - DNA, 120 bp, Artificial Sequence
  ENSG00000257221_6 (sequence is synthesized)
ttcggacactagactgttatctacatggggaggcacctggcaggtggccagatccccagatggaatctccaccttgtggtttatgaggcattctaggccactgcctcctgaagacactgc

SEQ ID NO: 927210 - DNA, 120 bp, Artificial Sequence
  ENSG00000257221_7 (sequence is synthesized)
ctgcatgccctgaggtctaaaggccagcaattctgggctgtggccctctggtagccctccatccaatggggaggccagcgagtaaacaattcggtggaacatcatgccacaatgacacag

SEQ ID NO: 927211 - DNA, 120 bp, Artificial Sequence
  ENSG00000257221_8 (sequence is synthesized)
tgttcgccaagaggtattattccaacttccacaacccaaatagcatctctgcacggaaatgaagctgcaacagctccctgtcatggatggggcacttcccagttctcagacttcatcact

SEQ ID NO: 927212 - DNA, 120 bp, Artificial Sequence
  ENSG00000257221_9 (sequence is synthesized)
agagcccccaagcttggatgttgttgctgaactccctcaaggcactaagtgttagcctgagcacctctcctggctggaccaggggtcacttgctccattacagttctctccagctcggtg

SEQ ID NO: 927213 - DNA, 120 bp, Artificial Sequence
  ENSG00000257221_10 (sequence is synthesized)
acactctcactgtaaatgcaagttctcactcagtgaatgccaagacgaatgcaaccctacctagtggggtagagattaggaaatgggcgatgagaggcacagggctcttgggaagggagc

SEQ ID NO: 927214 - DNA, 120 bp, Artificial Sequence
  ENSG00000257221_11 (sequence is synthesized)
cctgctgctgggggcctgagagacacccagtggagaggagcctggacaaacttggcaaccagccccaaccacgttccgcagcattttgggggccaggcaccctgtgtgtgatccctttcc

SEQ ID NO: 927215 - DNA, 120 bp, Artificial Sequence
  ENSG00000257221_12 (sequence is synthesized)
actgtaaccaggcctgctccctgctcttcccctcggagacacagatgactgctcctctctggcagcccaaagctttctctgcccccacaactgcctgggggcctttgagccacttctccc

SEQ ID NO: 927216 - DNA, 120 bp, Artificial Sequence
  ENSG00000257221_13 (sequence is synthesized)
cagttctgttccaaacccaccaggaagtccttccccaaaagtccacttactctttgagatcagtgtgaggaagctactctaagaacaaaactaagcacccggtggtgagtgcccaagctc

SEQ ID NO: 927217 - DNA, 120 bp, Artificial Sequence
  ENSG00000257221_14 (sequence is synthesized)
aagtgtgcagattttttctgacagcagaatagacctgtctacttgccttccaagttgagtcctgaagtgggtaacttcctcctctgacttctgccctcaggctccctgggcaacggccct

SEQ ID NO: 927218 - DNA, 120 bp, Artificial Sequence
  ENSG00000257221_15 (sequence is synthesized)
gacgttgctttctagcccctcaccatgaagcctgtcagggagccgcgtgcctcaccctctatctgcccctcactaaactcaggatcctaaaatctgccctcttacccattttcgttcaca

SEQ ID NO: 927219 - DNA, 120 bp, Artificial Sequence
  ENSG00000257222_0 (sequence is synthesized)
aagatttggcccgcaatcagtctgattggttgaggtactttcaatttccatctgcctgtcagaaaagagggagagttcgatgccaggacagtccagatccaacggctacagaacccatga

SEQ ID NO: 927220 - DNA, 120 bp, Artificial Sequence
  ENSG00000257222_1 (sequence is synthesized)
atatgtgaagaattaaagaagcacagtgaaatacacattattgatacgcagctgaaacatgggatacaatccatctatgaataactggtacagtccagactccatttttgcagtctacac

SEQ ID NO: 927221 - DNA, 120 bp, Artificial Sequence
  ENSG00000257222_2 (sequence is synthesized)
caaccaaacaagcaaaattaatgtatttaaataaagaagaaaatataaaagcaacagaataaaaagcttcttatatgaatactggccaaaaaaacctgttgtcactggtaatgtaaacat

SEQ ID NO: 927222 - DNA, 120 bp, Artificial Sequence
  ENSG00000285722_0 (sequence is synthesized)
gcctatgaccagacagcctctgctctggagggctcctgtcctgagtgccgactgccaggccgtcctcgggctggaaagggcagagctgtggggaggtgagcagaagcccagggaagcacc

SEQ ID NO: 927223 - DNA, 120 bp, Artificial Sequence
  ENSG00000285722_1 (sequence is synthesized)
gggtgctgggcaggccagccagctgcaggcatcgctttcagggtgcagaagagccagacccagcccaaggagggaggcccagagtgcctcagtgatgaccacgtgggcatagccaggagg

SEQ ID NO: 927224 - DNA, 120 bp, Artificial Sequence
  ENSG00000285722_2 (sequence is synthesized)
aacacccagggcggcggtaggtccctggaagagggacacggtgggcattgcctggggttgggaagcctccgtctctgcaggtcactcgcacctgggagtatggccacggtcagccccaga

SEQ ID NO: 927225 - DNA, 120 bp, Artificial Sequence
  ENSG00000285722_3 (sequence is synthesized)
gtccggaaggaaagcagggcccgggaggcctcaggaccagaaacaaacagagaagatgccagaggcatccacaaggcaaagtcagcaaaacaggggataaaggagctgtttcagaggaag

SEQ ID NO: 927226 - DNA, 120 bp, Artificial Sequence
  ENSG00000285722_4 (sequence is synthesized)
aaaagtcccggtccctgcaggaggggccaactcccagcctcatgctgctgccacagggggcctgtggggctggttccagctggggaagcacagggagacgtccacccaggaaactgctcc

SEQ ID NO: 927227 - DNA, 120 bp, Artificial Sequence
  ENSG00000285722_5 (sequence is synthesized)
aaagccaggacaagtgtgactggagttgggaagagcagagacgatggctcagcagtgaacagccaggggcagcccaggaggcgaagctggccctgctcaccctgtccacatcctgatgca

SEQ ID NO: 927228 - DNA, 120 bp, Artificial Sequence
  ENSG00000285722_6 (sequence is synthesized)
agaagaacatggcgtggagctccgtaatgaggcagcatccactgcacaaacaagcccagaaaaagggagacacacaggtgacccagagtggagtcaggaagccccgagaaaggacgcggg

SEQ ID NO: 927229 - DNA, 120 bp, Artificial Sequence
  ENSG00000285722_7 (sequence is synthesized)
ctgtggctgctgcagaacttggagctccaaaataacaaaggaaatgacctatgcacagccacgaggagagagagacggggtcccagcattgctgggagaggccatgatgctcagtgggca

SEQ ID NO: 927230 - DNA, 120 bp, Artificial Sequence
  ENSG00000285722_8 (sequence is synthesized)
cccaccatgagatgcccgggtcctgagccaggaggcggagccactccccacgcactctgtcctgactttggtgacaggagcagccaccgaatgccatcatctgccaaggtgacctccaag

SEQ ID NO: 927231 - DNA, 120 bp, Artificial Sequence
  ENSG00000285722_9 (sequence is synthesized)
ggcagttttatctgcaggcagagggagcgaccaggtgcccgaagcccctccaccccgggactgcagcgtcctgggaccctcaagacaggatcccacgaggagggttaccagctccccggc

SEQ ID NO: 927232 - DNA, 120 bp, Artificial Sequence
  ENSG00000285722_10 (sequence is synthesized)
cgaggcgttctctttccctacggcctgcctttttcataagatcaatgccgtggaatcctacggtgggaggtcttttgtccatttcctcaatataaaactaacaggcaaaaagttactctt

SEQ ID NO: 927233 - DNA, 120 bp, Artificial Sequence
  ENSG00000285722_11 (sequence is synthesized)
aatatcctctttgtgccctgttaatatctattgacctttaatgaatattcctattttattgctaacagtcataacttgtgttttctttctggttttttaaaatattattcctaggaaatg

SEQ ID NO: 927234 - DNA, 120 bp, Artificial Sequence
  ENSG00000285722_12 (sequence is synthesized)
aattattagctaatacttccaaagaacgaacctgtcaaagttccatgtttccaactgaacccatgttcctccactaatacttggattttcttccaccacggccgttcctgagacagcaag

SEQ ID NO: 927235 - DNA, 120 bp, Artificial Sequence
  ENSG00000285722_13 (sequence is synthesized)
accagttcctcctccttctgctcctcctcagcccacttgacgtgaagacgacgaggatggagaccttgatcgtgccccactcccacctaatgaatagtctgtagattttctcttccttag

SEQ ID NO: 927236 - DNA, 120 bp, Artificial Sequence
  ENSG00000285722_14 (sequence is synthesized)
gactttcttcataacattttcctttctctatcttactttattataaaaatacagtatataacacagatgcaaattatgtgttaattgagtttttatgttatctgtaaggcttccagtcaa

SEQ ID NO: 927237 - DNA, 120 bp, Artificial Sequence
  ENSG00000285722_15 (sequence is synthesized)
cagttggccctcaggagctaagttttgggggagtccaaagttgtatgagtatttttcactgtgtaggggatcagtgcccataaacctcaggttatttaagggtctactgtataaagtaaa

SEQ ID NO: 927238 - DNA, 120 bp, Artificial Sequence
  ENSG00000285722_16 (sequence is synthesized)
tattggactcataataacaatagcagctataacatctttgtagcacttagccttggtacaggtgccttcaatatgctaactaatttaacttttaaccaagccagttctttatgtaaaaaa

SEQ ID NO: 927239 - DNA, 120 bp, Artificial Sequence
  ENSG00000285722_17 (sequence is synthesized)
ccagttctttatgtaaaaaaaacgattcatcataatttaatatcttatacatgttccattcaattttctaaatttggctaatataaaataaggtttaatattaccatgatttgatcaaca

SEQ ID NO: 927240 - DNA, 120 bp, Artificial Sequence
  ENSG00000285722_18 (sequence is synthesized)
ctcttacaaattcattgttattgacatcaaatttataaccacgttattggcattgtttaaccacacagtaaaataagtgtaatcagtgaaaaaaatagaataaaatctatatagtggaga

SEQ ID NO: 927241 - DNA, 120 bp, Artificial Sequence
  ENSG00000285726_0 (sequence is synthesized)
gggacattgggatgtggccatggacgcagcagttcctccagggactgtccatgagagacaaggagggagactgcagaaggcctgtggctgacagggcccttcctccgccacctggaagta

SEQ ID NO: 927242 - DNA, 120 bp, Artificial Sequence
  ENSG00000285726_1 (sequence is synthesized)
gctactgtgatctccttctgggctggctggggacatgcatgtctactctcgaagggctgtggtctcgtagaacacgaaagaagaaatgtggacacagatccgcatgcagtgagatgatgt

SEQ ID NO: 927243 - DNA, 120 bp, Artificial Sequence
  ENSG00000285726_2 (sequence is synthesized)
gtgaagaggaagacagaccccagggtgatgcttctacaagccaaggaatgccaaagactgctggccatccctaggagccaggcggaggcctgggccgtgccttcctcggggctcagcagg

SEQ ID NO: 927244 - DNA, 120 bp, Artificial Sequence
  ENSG00000285726_3 (sequence is synthesized)
aaccagccccacttgcaccttggcctgggacttccaacctccagacccgggacagttctgtcatttaaaccactgagtccagggtactttgctaggacagcccaaggaaaccaatgcact

SEQ ID NO: 927245 - DNA, 120 bp, Artificial Sequence
  ENSG00000285726_4 (sequence is synthesized)
cagggagacaaatataagagacgctgtgcagccaggcagcaaagcctttgctgggactcggaaagaaccggaatgctttgagcatgtttccttcataaagtagactgtgttcctggtagg

SEQ ID NO: 927246 - DNA, 120 bp, Artificial Sequence
  ENSG00000285726_5 (sequence is synthesized)
tgcaatgcaaaggatccggatgaggacaaaccctccctggacataggaccagaggaaggaggcagggcatgcacagaactgaggcacccccagagagaccagggcctgggtgactcactg

SEQ ID NO: 927247 - DNA, 120 bp, Artificial Sequence
  ENSG00000285726_6 (sequence is synthesized)
ctctagggagccaaagattgtttctggttggtgagccagggcagcctattggaggcacaggccttggagacagcaggccttggatgcgtggaggttggggcgaatgttccaaaggaaaca

SEQ ID NO: 927248 - DNA, 120 bp, Artificial Sequence
  ENSG00000285726_7 (sequence is synthesized)
atgaacccagagacttgggggcaggcgcacaatggggcctgtgtgtgacactgcgtactgtgtcactcgggtggatgttccctggagaacagtacattgtaactgcttccaaagcaagtg

SEQ ID NO: 927249 - DNA, 120 bp, Artificial Sequence
  ENSG00000285726_8 (sequence is synthesized)
aactatgggtttcaacaaactcctgaatttctgtattaaagacccaacaggtgaagaacaaagaatttggaggtattcttctgactcagcaatttcatttcggatgcaggtctcctttgc

SEQ ID NO: 927250 - DNA, 120 bp, Artificial Sequence
  ENSG00000285726_9 (sequence is synthesized)
aaaacatccatcaggggcttgttctgagaatcttggtcactttgattcttggcccgaaacactgacatagaactggtttcccaaaggattctgtggagaaggctgagaagtgtgacagtg

SEQ ID NO: 927251 - DNA, 120 bp, Artificial Sequence
  ENSG00000285726_10 (sequence is synthesized)
cctctttaattagatttgtccctgaactttgagaaggtcaggatgttcacagcagggcccttaactcttagagactcatcactcctgggcagaacattggcatgtgctcttcccagctgt

SEQ ID NO: 927252 - DNA, 120 bp, Artificial Sequence
  ENSG00000285726_11 (sequence is synthesized)
gtcccctcagaggagacttttcacagttttgtgttgggccagccatgaaaacagaagctcagcccgttagtcccagctctatgggaccagctttgagaaaaacaggtaataacagacact

SEQ ID NO: 927253 - DNA, 120 bp, Artificial Sequence
  ENSG00000285726_12 (sequence is synthesized)
gatttattcaaggatgcgatccttcaacagctttttaccatatccacaaacacaaactccaggagggcctgaagctgagaagcagatgggctgctggggacacatatttacagtgtgtga

SEQ ID NO: 927254 - DNA, 120 bp, Artificial Sequence
  ENSG00000285726_13 (sequence is synthesized)
tcattaagcaggggtgtcctcacttcccaaattctagtaatcaatacgtatttcctatggctgccgtaacaaattgccacaaacttagtagctcaaaccaacacaaatgggttctcttag

SEQ ID NO: 927255 - DNA, 120 bp, Artificial Sequence
  ENSG00000285726_14 (sequence is synthesized)
aattctggaggtcagaactctgaaataggtcctaaaatcaaggtgtcagcagggctgtgttccttgcagagatgccacaggagaatccatttccctgatttttccagcttctagaggcca

SEQ ID NO: 927256 - DNA, 120 bp, Artificial Sequence
  ENSG00000285726_15 (sequence is synthesized)
cccacattctttgacttgtggcctcttcctcttcaaaacttgtcctgtagtcatcgtcctgtcatttttgactttaatcttcttgcctctctcttaaagatccttgtgagtagattaggc

SEQ ID NO: 927257 - DNA, 120 bp, Artificial Sequence
  ENSG00000285726_16 (sequence is synthesized)
ccacctgaatcatccaggacaatccctccatccccaaatccttcacagaatcacactgacaaaattccttttgccaggtaaggtattcacaggttctggggattaggacgtggacgtctt

SEQ ID NO: 927258 - DNA, 120 bp, Artificial Sequence
  ENSG00000285726_17 (sequence is synthesized)
tggtggaggagggggcatcgttctctctaccacaccgagactttgcaaaaatgtgttcttcttggacaagtaaatttggaacatgttgggttaaataaaaaaaacaaaccaggtttcttt

SEQ ID NO: 927259 - DNA, 120 bp, Artificial Sequence
  ENSG00000285727_0 (sequence is synthesized)
tattaacccacaatatttaccattgacttataatcttttgccttgaagtctttaatccttctagagatttccttgtatatatactctgctctgactgcctccatgatttccttattatct

SEQ ID NO: 927260 - DNA, 120 bp, Artificial Sequence
  ENSG00000285727_1 (sequence is synthesized)
ttgatacacagaagtttgaatgtcatctatctagggagcagctggatagcaaagcctcaagcccatggaaaacatttataaacctccatgacaagccatctccacaaaccccgaaataga

SEQ ID NO: 927261 - DNA, 120 bp, Artificial Sequence
  ENSG00000285727_2 (sequence is synthesized)
actggtgacaaatccccaacagctacaagacctgcatggtagtaacatctgtgtgaaaagaagacagaagtaatggggcagtgtcaatgaaggatctgagaagagagaattccaaagagc

SEQ ID NO: 927262 - DNA, 120 bp, Artificial Sequence
  ENSG00000285727_3 (sequence is synthesized)
ctgcgaggagtgcctggtagactatgaaggggctggcattgtccagaccctgtgaactttgaaaaggacctgcacaggtttgtttctagggcagagtcccacattgaggagagattgcca

SEQ ID NO: 927263 - DNA, 120 bp, Artificial Sequence
  ENSG00000285727_4 (sequence is synthesized)
ggagtggaggcaaaattgagccgggcgggggcaacatggatgaagaaagagagggccaggtaaaagtagggcaatgagaatagagccgggacattttaagggactattttatttttaaat

SEQ ID NO: 927264 - DNA, 120 bp, Artificial Sequence
  ENSG00000285727_5 (sequence is synthesized)
aatgcataaaaccatggactatggggcagtttgaacttatacagtttatcatgaacgatgtttccttctaaaaattcaggaaaacaaaattcacataaaattagtataggaaaagatcac

SEQ ID NO: 927265 - DNA, 120 bp, Artificial Sequence
  ENSG00000285724_0 (sequence is synthesized)
ttttatgataaatttgctagaacaatcctgcaattccatctgttcagctcacatcagaatgtcactctgaagaaattaatggtgcagagttatacaaagttactacaagctttggttgca

SEQ ID NO: 927266 - DNA, 120 bp, Artificial Sequence
  ENSG00000285724_1 (sequence is synthesized)
gatttagagtgtggatcagcattagggtgagaagtattaggttggtgcaaacataactgcgttttttgccattactacggaatcgaggagaatagaaaataaagatcttcacagaatcat

SEQ ID NO: 927267 - DNA, 120 bp, Artificial Sequence
  ENSG00000285724_2 (sequence is synthesized)
gacatgactattatctatcttttaagttactttattcaggggatggctttgccaggaaaagcccttcaatagcagcctggccaaagattctgggcaaataagttggctgggtccatgggc

SEQ ID NO: 927268 - DNA, 120 bp, Artificial Sequence
  ENSG00000285724_3 (sequence is synthesized)
caggagggacaacatctgagcaagataaatctgaggctaccagcgggatgttacactcggtctactgactcacatgcatcttctccaagaacaccctcacagacacacctggagaagctc

SEQ ID NO: 927269 - DNA, 120 bp, Artificial Sequence
  ENSG00000285724_4 (sequence is synthesized)
aagcattctaatcaaaatgaaaaccacctggaattctctttcagcagaagaggaatgggttccattcctattgaagcattgagaataaataaccctttaccagctacctgagtattcctt

SEQ ID NO: 927270 - DNA, 120 bp, Artificial Sequence
  ENSG00000285724_5 (sequence is synthesized)
aattcagtcaagtttcatccaaaatcaactgttgcaacttattctgaaatgttcaactagctttacattctttagattaggtcctgcttgttcatgatatattgtacttttgtatagagc

SEQ ID NO: 927271 - DNA, 120 bp, Artificial Sequence
  ENSG00000285724_6 (sequence is synthesized)
tagattttatttaaaatactgtgaagtttgtttgaggctgaggtgggagaatcaatgagcccaggaggttgagggtgtagtgagccgtgattgtgccactgtgctatcccctggtaacag

SEQ ID NO: 927272 - DNA, 120 bp, Artificial Sequence
  ENSG00000285724_7 (sequence is synthesized)
aggaaggagtccaggggtgttttagcgtaatcatgctggctcatgccgctgaaggaacagctgggattgagaactcactgctgtgaggaaacttgcaattgtattcccatcccacagtca

SEQ ID NO: 927273 - DNA, 120 bp, Artificial Sequence
  ENSG00000285724_8 (sequence is synthesized)
ccagtggacagagctacccatgacattctggatgaaaacctctgtactagagaattattccttgatatctatttatggagaattgcttgtgggacacctgtggataccaaaattagtgga

SEQ ID NO: 927274 - DNA, 120 bp, Artificial Sequence
  ENSG00000285724_9 (sequence is synthesized)
tgctcaagtccagtagaagaaatggagtactatttccatataatctatgcataccagcaggtctacctcccaccaagcgatcagcctccgttctgctgactccaacagggtgcacccttt

SEQ ID NO: 927275 - DNA, 120 bp, Artificial Sequence
  ENSG00000285724_10 (sequence is synthesized)
ctctaattaactaaaatggctatggaaagcaaaggaggccttgtgttgggtgaaccaattattttgaagggtattaagtcatcagatttacttttatcttgattgcattgtggaaatcgt

SEQ ID NO: 927276 - DNA, 120 bp, Artificial Sequence
  ENSG00000285724_11 (sequence is synthesized)
aaattgaaatccaaaattgtatatacaatttaaatttgaattaaaaagcacaaagtgcttacaaattttaataatttttgtgtaagactagcacactaaaaattatgaaataatactgaa

SEQ ID NO: 927277 - DNA, 120 bp, Artificial Sequence
  ENSG00000285724_12 (sequence is synthesized)
agggtgatataaataaatgcagagatttatggtgtttatggattgaaagactcaatatcattaagttgttcattctcaagtcaatctgtagattcaaggtaagcttaattaaaatctcaa

SEQ ID NO: 927278 - DNA, 120 bp, Artificial Sequence
  ENSG00000285728_0 (sequence is synthesized)
gtcttttctttaatggccgtgtagtcgcggcacagccgagggtttctggaattgccttaaacgtatgcgtttgaagagcgtacccttttgtcggagcagtcaccttggagggaccacgca

SEQ ID NO: 927279 - DNA, 120 bp, Artificial Sequence
  ENSG00000285728_1 (sequence is synthesized)
ggctatggcagcccgggttcagcatgtttagggcgagggtgtgctccatggggacctgccttctgatccgttttaccaggcatatatttaaaaaaatgtgtcttcctttccaagtattca

SEQ ID NO: 927280 - DNA, 120 bp, Artificial Sequence
  ENSG00000285728_2 (sequence is synthesized)
catctttttctactgaccacaaatcagatttaattcaactcacatttattgaacaagctagcctgttttgttttttcactttattcctgcaacagccacgtgatagagggattactatcc

SEQ ID NO: 927281 - DNA, 120 bp, Artificial Sequence
  ENSG00000285728_3 (sequence is synthesized)
acgtttcacaaacgataaaattgaggctgccacctgatgttactgaagtcctccacccaccttctttcgttcttttttaagcgtctactatcggctggggatggaatagttcgcgagtca

SEQ ID NO: 927282 - DNA, 120 bp, Artificial Sequence
  ENSG00000285728_4 (sequence is synthesized)
gtttctgccttctgatggaggcagaaatttaaacagccaacacggtttcggtcccagaggtaaagagaaagggaagtccacactctgggtttatggccttgaagtcgagcaagctatact

SEQ ID NO: 927283 - DNA, 120 bp, Artificial Sequence
  ENSG00000285728_5 (sequence is synthesized)
aagagaacagagctgtatagtattccactgaagagaatggaacctctacgtgtgtaagacttggctgcaatgcaagcagctttgcctttgtactggactggaatggactggagccagaca

SEQ ID NO: 927284 - DNA, 120 bp, Artificial Sequence
  ENSG00000285728_6 (sequence is synthesized)
ttctctccactcctggccttttcagctggcagagcttctgagtttcaggacagggaacatacagtgtcacatgcccagcaggcacataaatatttgctgccaaatctccagtgttcccca

SEQ ID NO: 927285 - DNA, 120 bp, Artificial Sequence
  ENSG00000285728_7 (sequence is synthesized)
acaatgctgctagaatcatcttctgaacatgaaaattcatctacagtattctgctgaaaatccttaagtggttcatattggcctgattcttttttggagggtcagtgccccttttgagaa

SEQ ID NO: 927286 - DNA, 120 bp, Artificial Sequence
  ENSG00000285728_8 (sequence is synthesized)
tctcaggagcacagtggactccttccccaaaagggaaaaattacttcatgcctgaaagtcagcctctgccctcagaataacatatgaactgctaaacttggcactggctttcactactgg

SEQ ID NO: 927287 - DNA, 120 bp, Artificial Sequence
  ENSG00000285728_9 (sequence is synthesized)
ccctggcctctctccaaccttctcaccatttgcttttcatatcttcctgcttcagtcatattgaattatttgcagcttcctctacacttcctgctgtttcctgcctttgtgactttgcat

SEQ ID NO: 927288 - DNA, 120 bp, Artificial Sequence
  ENSG00000285728_10 (sequence is synthesized)
aggctgttccctctgcctggaatgccctgcccagttttagccacctgacaagttatattctttcttgtactaaactgaagcatcatctcttctgtagtctactcaaccactctgggaaga

SEQ ID NO: 927289 - DNA, 120 bp, Artificial Sequence
  ENSG00000285728_11 (sequence is synthesized)
tccgggcatttatgctttcctcaccttgttctaaaacctccaatacagggctttattgtactgtaattgtcagttctcccaagagactgagttccttgaaggatggaactgacttttcaa

SEQ ID NO: 927290 - DNA, 120 bp, Artificial Sequence
  ENSG00000285728_12 (sequence is synthesized)
atctgtagcctcatatgcagcatgggaactatcttaattcatcagcgcttagttgtggaatgaatagaggaccagcccaactgccaccaacacatatttcctaatcttcccctacgggaa

SEQ ID NO: 927291 - DNA, 120 bp, Artificial Sequence
  ENSG00000285728_13 (sequence is synthesized)
tgtctcgcatctataggtaattctagaatgaaacacagtgtttcctaaaccttagtcattcaaatagcatcttcacaactgttacaatatctatcatccacaggtacaatttatttttta

SEQ ID NO: 927292 - DNA, 120 bp, Artificial Sequence
  ENSG00000285728_14 (sequence is synthesized)
agctaatcactatttgaacttcaatattgcctcactataagctgtaataactgtaaaatgatgtattgtgctaattccgtattttttcctaagatccaaatattaaaataaaagacagtc

SEQ ID NO: 927293 - DNA, 120 bp, Artificial Sequence
  ENSG00000285728_15 (sequence is synthesized)
gggcagaaggaacgtgacttccacgaggcagccgccgggctggcgggccccacgttcagggttgtgtctcggctgaaaaaaaggcacgcccgaacgctgggcagggattacccggccgga

SEQ ID NO: 927294 - DNA, 120 bp, Artificial Sequence
  ENSG00000285728_16 (sequence is synthesized)
gtcgcccaggctggagtgcagtggtatgaacatggctcactgcagccttgaattgacctcctgggctcaagggatcctcctacctcagcctaccaagtacctgggactacaggcgcacac

SEQ ID NO: 927295 - DNA, 120 bp, Artificial Sequence
  ENSG00000285728_17 (sequence is synthesized)
tacctgggactacaggcgcacaccaccaaaaataaaaaaataaaaaataacttttcttatttttgtagagacagggtcttactatgttgccaagctgttctcaaactcctgggatcaagc

SEQ ID NO: 927296 - DNA, 120 bp, Artificial Sequence
  ENSG00000285728_18 (sequence is synthesized)
aatcctcccagcatcccaagagcctaatcccccaggaaatatttctgaaagactccaggatggcttgccaagagccttacctgtggaaggtgcttcctttgtatcctattggaaccccat

SEQ ID NO: 927297 - DNA, 120 bp, Artificial Sequence
  ENSG00000285728_19 (sequence is synthesized)
ctttcctataaccgaaaagaaagagacttggagtgacagcaggtagcacaaggcctttccagtttaccatgcactggagccaaaaggactctcctaaagatggttgacagacataaagaa

SEQ ID NO: 927298 - DNA, 120 bp, Artificial Sequence
  ENSG00000285728_20 (sequence is synthesized)
ggcaaataaactagggacagacccttggggcattaccttctatcactgtcaccagcaatcattcaaggccagcaggtggttcaccgataccctcactgcagccccagaacacccctctgg

SEQ ID NO: 927299 - DNA, 120 bp, Artificial Sequence
  ENSG00000285728_21 (sequence is synthesized)
agcaggcaaagaagtcaaacacatctgaaactgacctgaattctccggtgcagaactgcctgaaagggacaaaaaatgaatgattcaatcactatgatgtcacagtcgtgagcgcctcta

SEQ ID NO: 927300 - DNA, 120 bp, Artificial Sequence
  ENSG00000285728_22 (sequence is synthesized)
aatacgggaaagaataaacactggagccagcaagtccaccaatcggccagccagacgtccagacacgcagtcacacagactaacaacgtaaattaacacgggaacaatccaaacggcaac

SEQ ID NO: 927301 - DNA, 120 bp, Artificial Sequence
  ENSG00000285728_23 (sequence is synthesized)
cagacagagcaatgcatggaggaatcaggtctcaagagcagtgagcggacggacagaggtagacaggctatttcaggcggctgactggagcccgacttctgcctcagctaatccagcgga

SEQ ID NO: 927302 - DNA, 120 bp, Artificial Sequence
  ENSG00000285728_24 (sequence is synthesized)
gctggagcacgtccttacctaaagttctcggccgtcttaggcacaacgtctgcaaagagctcgatcttcatgcggccaacttcctgcaatcagcgggagagtgtcagaaggcccagtcca

SEQ ID NO: 927303 - DNA, 120 bp, Artificial Sequence
  ENSG00000285728_25 (sequence is synthesized)
agaccatgagggcttcacggagcagggggcatgatgggctgacccaccaccctgccgctcggtatctcccacctccgcctccctagtctaaccgcccagttcctccagaagcggggcgct

SEQ ID NO: 927304 - DNA, 120 bp, Artificial Sequence
  ENSG00000170161_0 (sequence is synthesized)
acccatagtaccccattccttgctgcaatgtaattatatttacttacaagtgtgctcctggtggtctttaactgaagggcactgactgggtcactggtgaagttccccgcaggaactgag

SEQ ID NO: 927305 - DNA, 120 bp, Artificial Sequence
  ENSG00000170161_1 (sequence is synthesized)
tcagaccccatctcagggccctgcacaagataggtacctgctctaaggcgtggaccctcgccacagccctggcccgtcttgacgggcgagggttactgtacttgtcccaaccgtacagat

SEQ ID NO: 927306 - DNA, 120 bp, Artificial Sequence
  ENSG00000170161_2 (sequence is synthesized)
gagaaagctgagactcagggccagcaacccgggtcccagcggagcgcccggcacgcgccaacacttcagcaccagtcgcggtggccaccactgtgcgcggagatggctgcgacgcgtgcg

SEQ ID NO: 927307 - DNA, 120 bp, Artificial Sequence
  ENSG00000170161_3 (sequence is synthesized)
cagatctcgatcccaaactccctcctaccagaatctggacccgaatccacccattgtccgttttccgctgccgctggagagaatctctgaggtccccaggagagcctgcctgcacggaag

SEQ ID NO: 927308 - DNA, 120 bp, Artificial Sequence
  ENSG00000170161_4 (sequence is synthesized)
agacgcctcctcgattaaatgctgttttccatgaccgtctctgttcttcccatacgcgaatggcaggcattcagatctccaagaatagaggattaggagagactccaccacctatgtcct

SEQ ID NO: 927309 - DNA, 120 bp, Artificial Sequence
  ENSG00000170161_5 (sequence is synthesized)
cacagttaattatcgatttgtgtcagttgcccattttctcacttcctgtttgtgtgtcaaggggtattaataaatctttgcctatttaaagatattagccttggattttcaaatattgca

SEQ ID NO: 927310 - DNA, 120 bp, Artificial Sequence
  ENSG00000170161_6 (sequence is synthesized)
acatgtaaaaatttgttagttttattttttcaaccgatctgacctgtatagttgggcttgaggaagcttcctcattctacatgttactatggattttctaatattaacacagggttgtat

SEQ ID NO: 927311 - DNA, 120 bp, Artificial Sequence
  ENSG00000170161_7 (sequence is synthesized)
tttttccatataactttctattgaatttctttttccatatgataggtggtgaaggtttagcccagtaaagcagagaggttaagaggttagattgggggctctggagccagacctgtgtag

SEQ ID NO: 927312 - DNA, 120 bp, Artificial Sequence
  ENSG00000170161_8 (sequence is synthesized)
atctgagtcctggctctggcacttgaaagccgtgtgaccttggttaagatacttagtccctctctgccaaatggagaaataagggcacctaccccatagggtagttgtgtgattacacaa

SEQ ID NO: 927313 - DNA, 120 bp, Artificial Sequence
  ENSG00000170161_9 (sequence is synthesized)
gttaatacacttcaatcagtagcaagaaagtgaatgtcaagctgtatttgttcaggcagccatatggtagccccacgtccttagtaaactgaggtattgaagtatcttctttttctttca

SEQ ID NO: 927314 - DNA, 120 bp, Artificial Sequence
  ENSG00000170161_10 (sequence is synthesized)
gaaaatatttgtcaagcaccttctgtgttcaaagaactgttctagagctttacatgctatggaggtctagaaattcacattatggtggcaggtgacagacaatacaaagagataaagcaa

SEQ ID NO: 927315 - DNA, 120 bp, Artificial Sequence
  ENSG00000170161_11 (sequence is synthesized)
ttttatatagtgataagctagggaggagtgctaaaaggagccaaggtgtagtggtgactggaaggtgaccagggaaaccactgtagggtttctaagtgatgagatctgtgacaaatccct

SEQ ID NO: 927316 - DNA, 120 bp, Artificial Sequence
  ENSG00000170161_12 (sequence is synthesized)
gtggtcagcagcaggcattggatatgtaactttattctgtcccattgatcttgtagtcaaccctggtctgttctgtattgttttaattacataatctttgtaataatctttaatacctgg

SEQ ID NO: 927317 - DNA, 120 bp, Artificial Sequence
  ENSG00000170161_13 (sequence is synthesized)
aatgcctctgtgatcagggactctaatctggaaataggtagtcggagaggtcggtgatgcagtctctggatcagagacctgagctatatggggttagagaggggccctgggcaggcgagt

SEQ ID NO: 927318 - DNA, 120 bp, Artificial Sequence
  ENSG00000170161_14 (sequence is synthesized)
ctctggggagtgtggtgagaatccttgtgtaagatgctgggaggaggtggggtcagggctggggtccgtgggccgacgggttgggggatggccagcgtcagggatcagtagtagagattc

SEQ ID NO: 927319 - DNA, 120 bp, Artificial Sequence
  ENSG00000170161_15 (sequence is synthesized)
tatgtgccctgatcgccagtggaggttttaaatacagagtattcatgagtttagcaatgttattcgcctctcattatttaaataatttgaagttttccccaataactagtgtcttagaag

SEQ ID NO: 927320 - DNA, 120 bp, Artificial Sequence
  ENSG00000170161_16 (sequence is synthesized)
tcatgaaaatttcagaaaatgacaggtcttctgagttcatgatgggagttgggcagcagtcgcatacgagcacctggagagtccttgccagttctttggggatggggagctcttaagact

SEQ ID NO: 927321 - DNA, 120 bp, Artificial Sequence
  ENSG00000170161_17 (sequence is synthesized)
gcttcagggagccatgtttgttactggcgggcgccgacctcactgagcatgtgcagccctggccgggcggcctcaaagttctgacatcacagggcggttcctgaagtggacatagttgta

SEQ ID NO: 927322 - DNA, 120 bp, Artificial Sequence
  ENSG00000170161_18 (sequence is synthesized)
gttctaggtggttctgcatggggcctctcacatgtgctacagtcaaacattagccggggccacagtcatctgaaactcacttacatggctgacaattgatgttggctgttgcctggagaa

SEQ ID NO: 927323 - DNA, 120 bp, Artificial Sequence; identical to SEQ ID NO: 907482
  ENSG00000170161_19 (sequence is synthesized)

SEQ ID NO: 927324 - DNA, 120 bp, Artificial Sequence
  ENSG00000231346_0 (sequence is synthesized)
ctgagaagtgaggagaccctccgcctcgcagccgccccgtctgaaaaggtggctgtcaatagattggcccaaaaggaagaacaaggaaaagggcaccaaagaagataaatgaaaatacaa

SEQ ID NO: 927325 - DNA, 120 bp, Artificial Sequence
  ENSG00000231346_1 (sequence is synthesized)
ataaatgaaaatacaagggtataagctgaactgtggacatcctgccactgggaattaagttaaagtagaaaaaagcagaatgtaatggggagtcccctcacaagaagaatttggatcaaa

SEQ ID NO: 927326 - DNA, 120 bp, Artificial Sequence
  ENSG00000231346_2 (sequence is synthesized)
tgagcagtgccgatttcaaatgaagactgacttgatcctgaacataacctacaagaagaaagggaccacaggctatacacaaagcatggtgccggcatctgcttctggtgagggcctcag

SEQ ID NO: 927327 - DNA, 120 bp, Artificial Sequence
  ENSG00000231346_3 (sequence is synthesized)
aagccagcgcatcacatggcaagagagggagcaagagagaaggggacagtgccgcacactttaaaaaaaaaccttatctcacgaggcagaactaactgagtgagagttcactcatcacca

SEQ ID NO: 927328 - DNA, 86 bp, Artificial Sequence
  ENSG00000231346_4 (sequence is synthesized)
acgaggcagaactaactgagtgagagttcactcatcaccaagggaatggtgctgagtcattcatgagggatccccctgccgccccc

SEQ ID NO: 927329 - DNA, 120 bp, Artificial Sequence
  ENSG00000231346_5 (sequence is synthesized)
caaacatccaaaccatgtcagtcttcaacccctcttcctgacatacaactcctaaaactcttagaatctccaaagtgctgtctttttatgtgttagtaattggctagtggctcacagccc

SEQ ID NO: 927330 - DNA, 120 bp, Artificial Sequence
  ENSG00000284237_0 (sequence is synthesized)
ttcagaaccgcccgtcagccttggctccagcgcctggcgcgagcgaaccgggcttggctgtctcggccccgtctgaaccctgcgggccgcgggccagggcgcgccgggatccgctgcgcc

SEQ ID NO: 927331 - DNA, 120 bp, Artificial Sequence
  ENSG00000284237_1 (sequence is synthesized)
aggaccctgcagacccggccgcggccgggccgagtgcctcccgccggggccttacgcccacggtccacgcttgcaacaccagggctgtacggcgggtccgcagctgggtctgcgcctggg

SEQ ID NO: 927332 - DNA, 120 bp, Artificial Sequence
  ENSG00000284237_2 (sequence is synthesized)
actcggggctccctgcgctcctcgtgccgcaccccttgccttaaccccaagcggacgggtcctggggcttcaccggccaggccggagccccagccccacaactccccccctcccaccgca

SEQ ID NO: 927333 - DNA, 120 bp, Artificial Sequence
  ENSG00000284237_3 (sequence is synthesized)
ctgccccctctgcgctgtggcgggagttggggactggggccggagaaaggagacgcgccggtcctcaagtctcttgagccatttcggttccgggcgcgccccccagggctgcagtcgcgc

SEQ ID NO: 927334 - DNA, 120 bp, Artificial Sequence
  ENSG00000284237_4 (sequence is synthesized)
gaggttccagatagtgcagctgtgtggcgccaggcttccagcgggttcttggtgggggttccctctctgccatattctgctgatggagaaatgggatctcacccaaggaaagtgacttgc

SEQ ID NO: 927335 - DNA, 120 bp, Artificial Sequence
  ENSG00000284237_5 (sequence is synthesized)
cagggttacaccactgttctggatgtaagaagtccaaaatgtgtctcactgggctaaaatcaaggtgtcagcaggactgttccttctggaggctctgggggagactgtttccttgacttc

SEQ ID NO: 927336 - DNA, 120 bp, Artificial Sequence
  ENSG00000284237_6 (sequence is synthesized)
tccaggttttcgaggccacctgcattccttggtctgcggccccttctccatcttcaaagctatcagtgaccagccgagtctttctcacattgaatcactgccacctctgcttctgtggac

SEQ ID NO: 927337 - DNA, 120 bp, Artificial Sequence
  ENSG00000284237_7 (sequence is synthesized)
acatctccttctttccctaacactgttttctccccatctcaagaatcttaatataattatatctttaaagttccttttgccttgtaaggtagccgtttcacaggttccagggattaacac

SEQ ID NO: 927338 - DNA, 120 bp, Artificial Sequence
  ENSG00000284237_8 (sequence is synthesized)
ctggacatctttgagtcggagggagcatttatcaaaaaacaaaaaccctagggcctcaaacaaaacatttttaaaagagaaatataaaagcttcaactcttcttcaaataagtaacatag

SEQ ID NO: 927339 - DNA, 120 bp, Artificial Sequence
  ENSG00000284237_9 (sequence is synthesized)
aaaaccaaaaaaaacaaagaaacaaactttcagttcctaactacacccataaaaaatcagactccctggtgtcagggaagaagaaacaatgggtgacaataaatagactccacataaaag

SEQ ID NO: 927340 - DNA, 120 bp, Artificial Sequence
  ENSG00000284237_10 (sequence is synthesized)
aacaatgggtgacaataaatagactccacataaaagggaagggaaaggctccctaggttgagaagttatgatatgtgcttcactgggaatgtaggtacagcctttggaaatgattagttg

SEQ ID NO: 927341 - DNA, 120 bp, Artificial Sequence
  ENSG00000284237_11 (sequence is synthesized)
ttaacaattgtccacagctcttcagctgctctactttataatcctttagtgtagtgacatctaaaacattttttaaataaatcaatcaactgtattttttagaaaaattttagttcacag

SEQ ID NO: 927342 - DNA, 120 bp, Artificial Sequence
  ENSG00000284237_12 (sequence is synthesized)
caatattgagcagaaagtagagttgcttgtcccttcaccctcctcccacttaaaacatttttaaagcattaatagaattcttggctccttattttccccccaaaagaaattcctacctaa

SEQ ID NO: 927343 - DNA, 120 bp, Artificial Sequence
  ENSG00000284237_13 (sequence is synthesized)
aaaataaaaatcgtgctgctctggttcaagtggactcatggagtccctcaacctctgtaaatcctactgcatggtttaacacctgttttgcagttacttctcttgagtggaataatgaga

SEQ ID NO: 927344 - DNA, 120 bp, Artificial Sequence
  ENSG00000284237_14 (sequence is synthesized)
ataactcaagttagaaagtaccctccggaccacagaagtagggagactgtcatgttggaaattattctccaggcttcagaagcaagaattgtcataatattctcccaggaattagaaaag

SEQ ID NO: 927345 - DNA, 120 bp, Artificial Sequence
  ENSG00000284237_15 (sequence is synthesized)
agcaggctcttgttctgacgtagaagcatagagtcttctaggccataaatctgcttattttagttacaatagtgaaagggccagtgggcaacacggtaaaaagtacatgggcccagaaat

SEQ ID NO: 927346 - DNA, 120 bp, Artificial Sequence
  ENSG00000284237_16 (sequence is synthesized)
tggggacttggatggggcagctgggatgtaggggacatattaattaagacctagtgtgggcctttcgtattctgggtcagataagtgaacaagcaggtgaggttctgtgtgggctaccct

SEQ ID NO: 927347 - DNA, 120 bp, Artificial Sequence
  ENSG00000284237_17 (sequence is synthesized)
ggaatacagtgttgcatagggttgtgtgagaggtgcggggaacgcctagaaaactttgcagggagaatgttttctaagccaacacctagaagacaagcaagagtttgctgggcagagagt

SEQ ID NO: 927348 - DNA, 120 bp, Artificial Sequence
  ENSG00000284237_18 (sequence is synthesized)
gaagctgggcgcggctgggatcatggagccggatgtgcacagccgggacatggggaagagctgcagtggagagtggggtatggtggagagcagtcagggccagacgatgctggcgggcct

SEQ ID NO: 927349 - DNA, 120 bp, Artificial Sequence
  ENSG00000284237_19 (sequence is synthesized)
ggaggccttgggagcgctgactttctccaagagctgggggtgccaggacagggtcccaagcagcggccctacgtggcctggtttgctcttcactggcaagctccatggccctgggcaatg

SEQ ID NO: 927350 - DNA, 120 bp, Artificial Sequence
  ENSG00000284237_20 (sequence is synthesized)
tgctgcttctgtttttcttctcatcggtgcctggctgagctctggaatcgtttcctgctctgagcctgaaacttcaagcagtaagaagacggtccacagcccggttactggggctctgca

SEQ ID NO: 927351 - DNA, 120 bp, Artificial Sequence
  ENSG00000284237_21 (sequence is synthesized)
aatgcgacgttcccagtggccctctcccaggctccgggcctccgggtagaggaacttctgtctgtaaaggatgaaggcgaccttgctcaggctgcagcgggatggagaaacgtgacccag

SEQ ID NO: 927352 - DNA, 120 bp, Artificial Sequence
  ENSG00000284237_22 (sequence is synthesized)
cggaggggctttcggctgcgaggtgcgagaggcgacccgaggggtgaaagcaaggcgagtgcggtcagcgcaccgggctgggcggcctcccagccggccggggaattcgttcccagctcc

SEQ ID NO: 927353 - DNA, 120 bp, Artificial Sequence
  ENSG00000284237_23 (sequence is synthesized)
agccgcatctcaccgcctctatcgcgcctttggggcctcagagggaggctgcatggcccggaggcctgaaatccgccatttgttccctcccggggcggcagagccacagctcactgaagg

SEQ ID NO: 927354 - DNA, 120 bp, Artificial Sequence
  ENSG00000284237_24 (sequence is synthesized)
ctgcagcctcggcagccggaagcgctggccgggcgcttggccagcgaccgcctcgggtcggcctcgggtctgcgcaggcgcaggctcgggaagccgggcgcggtggtgtttctgcggccc

SEQ ID NO: 927355 - DNA, 120 bp, Artificial Sequence
  ENSG00000284237_25 (sequence is synthesized)
gcggctgccctctcgtggccgcaaggcgccatggcacggccgcttccacgcagcggaggtgcgctggccggaaggcggcgggtccggccagccagggagaccagccaagcgctgtgtttt

SEQ ID NO: 927356 - DNA, 120 bp, Artificial Sequence
  ENSG00000284237_26 (sequence is synthesized)
tccaggtccgcgcgggccaggggaaccctgcgtgtttgcttggtgggagtggtttactgggaaagtagacggaaggtaccctgcaaatcggcgtgcactgtattgtttgggagtcaacag

SEQ ID NO: 927357 - DNA, 120 bp, Artificial Sequence
  ENSG00000284237_27 (sequence is synthesized)
cctggaaagtaaatatcagtcgctttggaatgtgtttcctctcgtccggggtttgaagattagtcatgaaaaacatcactctgcccttgctgaagtgcatgttggctactcgatcattcc

SEQ ID NO: 927358 - DNA, 120 bp, Artificial Sequence
  ENSG00000284237_28 (sequence is synthesized)
acctgtgtgccccaagacggtctgctaaggagggctcccctcttttccatgccctctcagctccagactccatcccatccatcaacattatcctgtgcccccgagggaggagggcggggg

SEQ ID NO: 927359 - DNA, 120 bp, Artificial Sequence
  ENSG00000284237_29 (sequence is synthesized)
agggtttctgtgcctggattattggtgagaggagagcaagtgcagaaatgaagctatgactcttgcagaagtcatgcattccgttcaaggatattcctttccgtagcctccacacattcc

SEQ ID NO: 927360 - DNA, 120 bp, Artificial Sequence
  ENSG00000284237_30 (sequence is synthesized)
ctctggctgcaggcccctgggatttttctgtgtgaccccgtcacattgcatctgtatagattgtcaaagcacctcatgactgtggaggaagaagtcggggacagaacatggatctggaag

SEQ ID NO: 927361 - DNA, 120 bp, Artificial Sequence
  ENSG00000284237_31 (sequence is synthesized)
gctcacagcatggatttgatctctcccaaaaaggatgcttgtagaaaacgatgattctgaaatggtacaaatccctttcccaaaaggcatctcaaagccagccgctgctactgacttatt

SEQ ID NO: 927362 - DNA, 120 bp, Artificial Sequence
  ENSG00000284237_32 (sequence is synthesized)
gatggctatcacccagtggccttggggaggcggtgggaagcccaaccactgcctgtaataaggagagacaactcagcatccaccctgcagtgaataatagaacaaaaagctgccggcgcc

SEQ ID NO: 927363 - DNA, 120 bp, Artificial Sequence
  ENSG00000284237_33 (sequence is synthesized)
tgcaggatcaaagcacatgagcgatcacagtgtctctgggttaaatagatccgcgaaggccaggcagccagcagatgtcatggaactttttgggggagaagtctgggttatggaggaagc

SEQ ID NO: 927364 - DNA, 120 bp, Artificial Sequence
  ENSG00000284237_34 (sequence is synthesized)
ctcagctggatttcagtaccttacaagatgctcttctgtggctctctcctgctaaccttccttggacatggaataatcttccctttatcctccctcttcaccactgctgttcccaaagtc

SEQ ID NO: 927365 - DNA, 120 bp, Artificial Sequence
  ENSG00000284237_35 (sequence is synthesized)
taaaaagatgggggcaggaggtgagacaggaggggatgggaaaagaatactggaccaggaggcaggagacactggatctgtgagtgaaggcaatgctgaatgacttccatggcctcagtc

SEQ ID NO: 927366 - DNA, 120 bp, Artificial Sequence
  ENSG00000284237_36 (sequence is synthesized)
tccccatctgtaaaatgggaaggttgatatatggcctcaacctttctgcccactttgataaaccatatttcaccaaaaagaggcagaggggatctgttgcttttcagattcctgtccagt

SEQ ID NO: 927367 - DNA, 120 bp, Artificial Sequence
  ENSG00000284237_37 (sequence is synthesized)
tacttctaggtcagacagaatgattgccccaatgattctgggtccgcagactcagtctgtgaaaccccatttcttggaggagttgggatcaggacaggcaagaagactatactattcctg

SEQ ID NO: 927368 - DNA, 120 bp, Artificial Sequence
  ENSG00000284237_38 (sequence is synthesized)
cctcctatttgctccctcttgccagtggggaaatcagtggcaaccttagagtaatcttggaggggtggggggatgagttattattgggatttttatctgcaaagaatattttcagatgtt

SEQ ID NO: 927369 - DNA, 120 bp, Artificial Sequence
  ENSG00000284237_39 (sequence is synthesized)
gtttgtgcatttaaatgtacatgcagttctagaggagaagactctagtggttgcggtgctgtgaggcattttgcatatatttatctcactcaagaagaactgtggggtccttgtgaaagt

SEQ ID NO: 927370 - DNA, 120 bp, Artificial Sequence
  ENSG00000284237_40 (sequence is synthesized)
aagtgtgtatgtgtgtgtgtgtgtgtgtgcgcatgtcctgagtcagcctgagtcctgagccttttgtctttgctcctgagtaagccactgggggaggtaaatatataattggaggaagaa

SEQ ID NO: 927371 - DNA, 120 bp, Artificial Sequence
  ENSG00000284237_41 (sequence is synthesized)
atgtgtcagaaaataacttctttacttgtggaaagtcattgaaaacccttggttttgcgtatgagcacagcaccctgtaggcaggtgaggagtcttagaacacggcggggagcgaaccag

SEQ ID NO: 927372 - DNA, 120 bp, Artificial Sequence
  ENSG00000284237_42 (sequence is synthesized)
acacgtactaaagaaacctccatgtttgatataaacccaatgcacaggtccacacagacagggcatggaggtgtgctccacagggccaccacacggacctctgtgatggcaagcccggat

SEQ ID NO: 927373 - DNA, 120 bp, Artificial Sequence
  ENSG00000284237_43 (sequence is synthesized)
gcatgtacaactaaacatcctcacagatacactttaatgtaggtggagacctggtgttatgggttagactatgtccccccacaaaatatatgctcaagtctcatctgccatctacattat

SEQ ID NO: 927374 - DNA, 120 bp, Artificial Sequence
  ENSG00000284237_44 (sequence is synthesized)
ttggaaatagggtctttgcagatgtaaactggttaagataataaaaaaaaaaataaataaataaaggtaatggcaacaatgaaaaaaaaaagtaagtcatcctgggatagggtgggagag

SEQ ID NO: 927375 - DNA, 120 bp, Artificial Sequence
  ENSG00000284237_45 (sequence is synthesized)
ccctaattcaatgtgactggtgtcctcgaaagaagaggggaatttggacacagagacacagctgaacttactgagcagagcctcccagatgctgcaaactcaaggaggcctctgtgctca

SEQ ID NO: 927376 - DNA, 120 bp, Artificial Sequence
  ENSG00000284237_46 (sequence is synthesized)
ctctctctctctctctctctctgtctctggtacagcgtttatgctttttggcagttctttcctcttcattcccccatctctccaattacacattcatatacacataaacactccgatacc

SEQ ID NO: 927377 - DNA, 120 bp, Artificial Sequence
  ENSG00000284237_47 (sequence is synthesized)
cactccgataccctcaaactaccagaagccacgtcagagacttgagaactttggaccaggaactgatggagacaaagatgacctaggaagatggctacattgggaatggaggcagagatt

SEQ ID NO: 927378 - DNA, 120 bp, Artificial Sequence
  ENSG00000284237_48 (sequence is synthesized)
ggagttatgtggccacaagggaaggaactcctggggctcccagaagctggaagaaacaaggatccttcccctataggctttggagggagcgtggctctgcaacaccttggttttggactt

SEQ ID NO: 927379 - DNA, 120 bp, Artificial Sequence
  ENSG00000284237_49 (sequence is synthesized)
ctagctccagaagtgtaagagaataaatttctgtgatctcatattcagttcatggtgctatatcatggtagccctagaaactaagatacacaggtatgttggatgtatgggtcaggccca

SEQ ID NO: 927380 - DNA, 120 bp, Artificial Sequence
  ENSG00000284237_50 (sequence is synthesized)
cacccagggtgcatacggcctttggttaaaaaaaaactctcatttctgtggggaatccattgccagtggtctggatgacatggccactgcctctcttcagggatgtgcacaagaccctgg

SEQ ID NO: 927381 - DNA, 120 bp, Artificial Sequence
  ENSG00000284237_51 (sequence is synthesized)
cctggccaatcagaatacctcatgcccaggaccacagtaactgggtcaggggttgtcaagatttatataaatgatttacataaaatgtttaaatgttttgttaaaatatttaaaataaaa

SEQ ID NO: 927382 - DNA, 120 bp, Artificial Sequence
  ENSG00000284237_52 (sequence is synthesized)
aatgtttctaagatttcagttgccaattgttttttgtgagtatatacaaatacaactgatttttacatattggttttgtatcctgtatacttgctaaattcatgcattagttgtattttt

SEQ ID NO: 927383 - DNA, 120 bp, Artificial Sequence
  ENSG00000284237_53 (sequence is synthesized)
ctagatttcttagaattttctatgtacacaaatcacaatgtctgtgaatatacacgacattacttcttcgtttccaaaacttatgcttttcacttcttgttcttgccttgttgcactggg

SEQ ID NO: 927384 - DNA, 120 bp, Artificial Sequence
  ENSG00000284237_54 (sequence is synthesized)
tagaacctcagttgtatattaaatatattttttaaaaaggtagacatttgagccttgtttccaatcttgggaagacactattcagtcttttgcccttgtctgcttctaagctgccaaagc

SEQ ID NO: 927385 - DNA, 120 bp, Artificial Sequence
  ENSG00000284237_55 (sequence is synthesized)
ctgtgctgtggtggggaaatgtcactctgtgggccagccatggtgtgagtgtgcagatgggacagcagcagcaggtgcattctcctgggaggccaggcctggtggcaggcatctgtaatc

SEQ ID NO: 927386 - DNA, 120 bp, Artificial Sequence
  ENSG00000284237_56 (sequence is synthesized)
cctgctatttgggaggctgaagctggagggtggcttgagcctgggagttcgagtccagcctgagccacacagcgagacactgtctcttaaaacaaaaaataaaaaacaaaaccaacaacc

SEQ ID NO: 927387 - DNA, 120 bp, Artificial Sequence
  ENSG00000284237_57 (sequence is synthesized)
cccacgcctgcctgccaaattttcctggggaaggcaagacacacaattaagaaagtaaacattatgtcatccttgtctgtatctcagtagccatagttgtggattccttcagttctctct

SEQ ID NO: 927388 - DNA, 120 bp, Artificial Sequence
  ENSG00000284237_58 (sequence is synthesized)
tggtagaaggtggggcctgaataaatgacgacataaagccagctgaacttagtgagcagagcctcccagatgctgcaaactcaaggaggcctctgtgctcagatctttattttctctctc

SEQ ID NO: 927389 - DNA, 120 bp, Artificial Sequence
  ENSG00000284237_59 (sequence is synthesized)
tctctctctctgtctctggcacagcgtttatgctttttggcagttctttcctcttcaatcccccatctcttcaattacacattcatgtacacatcaacactccgataccctcaaactacc

SEQ ID NO: 927390 - DNA, 120 bp, Artificial Sequence
  ENSG00000284237_60 (sequence is synthesized)
agaagccacatcagagacttgagagctttggaccaggaactgatggagacaaagacgacctaggaatggttgcttgccctaccctcaggagtttacaattactgatagagacagaagtct

SEQ ID NO: 927391 - DNA, 120 bp, Artificial Sequence
  ENSG00000284237_61 (sequence is synthesized)
ttgcaggaggtggggggcggggggtaggagaaactttacaaacacacctgtcagcatacacagggataataataggaaagggggttttcatacaagggaagcatctggaaactgggaggg

SEQ ID NO: 927392 - DNA, 120 bp, Artificial Sequence
  ENSG00000285184_0 (sequence is synthesized)
aggggaccaagcctaccccggggatggaaaaatccggctgagacggcctgggccgctgccacgcgcgggcgttattctccacccacctgcggcctgaagatgcctgaggcccggactctc

SEQ ID NO: 927393 - DNA, 120 bp, Artificial Sequence
  ENSG00000285184_1 (sequence is synthesized)
agacccctattgccctttggtgctggaggcccagcggcagcctgaagcccaagagagtggagcctcgcgaaatgaggaacctggcacaaggtttgcttggaagcaggaacgacggagtgt

SEQ ID NO: 927394 - DNA, 120 bp, Artificial Sequence
  ENSG00000285184_2 (sequence is synthesized)
ggctacgtgccctatttgccattaacgctttcttgcatggcagtgagagatgagggcaagggaggtggcataatgctcccggccgcttgggactcggagagacggcatttaataaatcac

SEQ ID NO: 927395 - DNA, 120 bp, Artificial Sequence
  ENSG00000285184_3 (sequence is synthesized)
acgcggtatttgcgaaacagtggtcgagattcgtcttcccgggttcattgcgtcattaataggcgggaacagtgcccctgtgttgaggctgcagaggccctaattggttttcccaagaca

SEQ ID NO: 927396 - DNA, 120 bp, Artificial Sequence
  ENSG00000285184_4 (sequence is synthesized)
gaggggcatatgagattgaacaaatatttgttgaatgaatgaacaaagggaacgccttttagggatgtttctgggggaaaggcctgaggttctccaggagggtctgcagctagggtcggc

SEQ ID NO: 927397 - DNA, 120 bp, Artificial Sequence
  ENSG00000285184_5 (sequence is synthesized)
cgtgggggctcgcagcccgcgggaccaccggacctgcaagcgtccccctgccccgcccccgcctcggcgctctgagcaattggactctgccagctctaactccggcgggactctgaaact

SEQ ID NO: 927398 - DNA, 81 bp, Artificial Sequence
  ENSG00000285184_6 (sequence is synthesized)
tggactctgccagctctaactccggcgggactctgaaactcagagacaggatttcaccatgttggccgtttggcctcccaa

SEQ ID NO: 927399 - DNA, 120 bp, Artificial Sequence
  ENSG00000285184_7 (sequence is synthesized)
cagcttcttcttgaagtgttctggacttggaagatttgttgaattactatgaagtcacatctaaagtttgaaagagatcgggtctcactattttgcccacgctggtcttgaactcctgtc

SEQ ID NO: 927400 - DNA, 120 bp, Artificial Sequence
  ENSG00000285184_8 (sequence is synthesized)
ccaccacgcctggcctgaaattatttttctatacagttcttagaggaagtgtttgggtcacctacataggcatgtagttcttgacactggttactagaggatttatagaggatgttcata

SEQ ID NO: 927401 - DNA, 120 bp, Artificial Sequence
  ENSG00000285184_9 (sequence is synthesized)
tattcaacaagcatttgttgaatacctattaggtgctagccatggaaatatgggattgaaaaaaacagacaaaaatccctaatctctcttacaatctagtgaggacaatcagacagtaca

SEQ ID NO: 927402 - DNA, 120 bp, Artificial Sequence
  ENSG00000285184_10 (sequence is synthesized)
caaaataagcataatatatagtaatcatgtggtagtaagttctatagagcaaaaacaagtttaaagaaggaggttggggggagtgttgagatgcataaggtttgcagttataaatgtggt

SEQ ID NO: 927403 - DNA, 120 bp, Artificial Sequence
  ENSG00000285184_11 (sequence is synthesized)
ggttagggaatcatttgctgaaaaatgaacattgagcaaaaacctgaaggatgttaaaggaataagatacatgtaatccagatgaaagttttttggataaaggaaagagcaattgctaaa

SEQ ID NO: 927404 - DNA, 120 bp, Artificial Sequence
  ENSG00000285184_12 (sequence is synthesized)
tccctgaggtgggagtgggctgttcataagacagcaaagcagccagggtagctgagtgattgacagcggaagatggaaaatggggaatagttggtgtaggacctagttgtgaggatattg

SEQ ID NO: 927405 - DNA, 68 bp, Artificial Sequence
  ENSG00000285184_13 (sequence is synthesized)
tggggaatagttggtgtaggacctagttgtgaggatattgactttgttttttttccaagacagagctg

SEQ ID NO: 927406 - DNA, 62 bp, Artificial Sequence
  ENSG00000285184_14 (sequence is synthesized)
taggatatttacttttattttgaataaggatgccactggaggccagacgtggtggctaacgc

SEQ ID NO: 927407 - DNA, 90 bp, Artificial Sequence
  ENSG00000285184_15 (sequence is synthesized)
aaggcaccagcctaagattattgtgtatcgtcatcatccaatctccttacagaagcatgtagtatatggagaagacagttgacccatgga

SEQ ID NO: 927408 - DNA, 120 bp, Artificial Sequence
  ENSG00000285184_16 (sequence is synthesized)
agaagcatgtagtatatggagaagacagttgacccatggagaactattcttagctcctctgccagtgacactagtcaactcatgggagaacttaccaatttggcctctctgagaataaag

SEQ ID NO: 927409 - DNA, 120 bp, Artificial Sequence
  ENSG00000285184_17 (sequence is synthesized)
tgtctcaaaaaaaaaaaaaaaaaaaaatgccactggagagctttgaggagaggatcagtctggctactgggttgggaattaatcatagcaggcaaaggcaaaagaagtgaggttagttag

SEQ ID NO: 927410 - DNA, 120 bp, Artificial Sequence
  ENSG00000285184_18 (sequence is synthesized)
caaaggcaaaagaagtgaggttagttaggaggctttacaacaacccagatgagagatgggaggttttagccagggagatggagatgttgagagagtagctggactcaggattgtgacagt

SEQ ID NO: 927411 - DNA, 120 bp, Artificial Sequence
  ENSG00000285184_19 (sequence is synthesized)
ggactgaaggaaaagcaggttttgggggaagattgcatttctcccttcaacttcagttacgtagatcacccatatgccacacaactgcaactctgtaacagccaatttttagcttcttcc

SEQ ID NO: 927412 - DNA, 120 bp, Artificial Sequence
  ENSG00000285184_20 (sequence is synthesized)
ttatctaagccatcctgtaggccataggaattaaaactaggttggatcaaggaaaagtgaatgctagatccatacaaaactatttggatatttgcctttgtattttattgttttgaaatt

SEQ ID NO: 927413 - DNA, 120 bp, Artificial Sequence
  ENSG00000285184_21 (sequence is synthesized)
atttttaatggttcaataaactcttactagaactacaagcaatataattatttcctctgctttattagaaatgtttttgtaatcatgttaattatattacttttaactatataaggcttg

SEQ ID NO: 927414 - DNA, 120 bp, Artificial Sequence
  ENSG00000285184_22 (sequence is synthesized)
tgtctcttttttataaattgatgtttatatcctctgtaagataaatataaaggctttttgttcatatgaggatgtgctgtaagattgcagggagtataaaaattggcaatggagtaggtg

SEQ ID NO: 927415 - DNA, 120 bp, Artificial Sequence
  ENSG00000285184_23 (sequence is synthesized)
acttgtattattagtctgatcttaatgttgtaacatactgatcatgcaaaatatataattagtttgtttttgctatttaatatgtgtaggactgtaacaaacagactagagaagatggcc

SEQ ID NO: 927416 - DNA, 120 bp, Artificial Sequence
  ENSG00000231691_0 (sequence is synthesized)
tcgatcagcccgaaacttcaacatctttttggcagctccgtccccagtttggcagcctcagaggacccgccggccaccctgatcctaccatgcctctgagaagctcctgagctgaaaatc

SEQ ID NO: 927417 - DNA, 120 bp, Artificial Sequence
  ENSG00000231691_1 (sequence is synthesized)
aacttgcttctcagagatccttcagatcctgtgggcataagggttaaatgaagctcccgattcatctgctgttattgctgccgctgctgagaagctgagattgattgagcagttctccct

SEQ ID NO: 927418 - DNA, 120 bp, Artificial Sequence
  ENSG00000231691_2 (sequence is synthesized)
tctcttcggtcagcctgcccagccttcttctgtgtggacaggagcataatgaatgaaggtcctctgcccctgtccctccgacttgctcccctcagacagcacggggttgctttccctccc

SEQ ID NO: 927419 - DNA, 120 bp, Artificial Sequence
  ENSG00000231691_3 (sequence is synthesized)
tgtgtggcagtcctaccgatgagaagcaagtcgaccagatgggcgtggatgctgtggaaccagagctggtggctaggatggggctgctcaggcaatattaaaggagagcttcctctcaag

SEQ ID NO: 927420 - DNA, 120 bp, Artificial Sequence
  ENSG00000231691_4 (sequence is synthesized)
gcttgcaaggaagagggcagcaaatggggcttgagagggggtcactgtgtgtttatggctgaaaatcttcccagacacgagatgatacattccagctggggactgtcagatctgctcaga

SEQ ID NO: 927421 - DNA, 120 bp, Artificial Sequence
  ENSG00000231691_5 (sequence is synthesized)
attcttcagcggctaaagatggtcagcgctcccccctttcctaatgtccttcatgtcttaggatccttggactgcaagggccttccgaaggtcatcgctgccatccccctgcttctaggc

SEQ ID NO: 927422 - DNA, 120 bp, Artificial Sequence
  ENSG00000231691_6 (sequence is synthesized)
aagcctgttctccaatcaatcctcattaagttccttggttttctgtaaagagttctagcaaaggaggctccagacccactgctatcttatcctgccaagatgttctttttgatatcacgt

SEQ ID NO: 927423 - DNA, 120 bp, Artificial Sequence
  ENSG00000231691_7 (sequence is synthesized)
ttcagttcctctggctttctatattattccattttgtcttcacatgacagattccttttttgaccaacgtggttctttttagcagcaccaggcagtctgttgacatcacagtctgttgct

SEQ ID NO: 927424 - DNA, 120 bp, Artificial Sequence
  ENSG00000231691_8 (sequence is synthesized)
atggcaattctgtgatgtcacaacagacactgaaaggaaggggctaatctaattttttggatcgagcaagaacttgattggggaataatgtgatcagtgaatggaaaagcaaatggacaa

SEQ ID NO: 927425 - DNA, 120 bp, Artificial Sequence
  ENSG00000231691_9 (sequence is synthesized)
cattattatttaacccataatgagacaagttggtaggatgtaactggggtcaaccgctgctgatatttaaacagcttaatcttaaatccagaaggtcaatatattcagctatttcgtggg

SEQ ID NO: 927426 - DNA, 120 bp, Artificial Sequence
  ENSG00000231691_10 (sequence is synthesized)
acttttgcaaatgatttatcctggtgacaggaggcctcggttttcagatcacatcctttccctgtccctaatccagtttcttgggccctctcctgatgccggcttgaggttcctgcccat

SEQ ID NO: 927427 - DNA, 120 bp, Artificial Sequence
  ENSG00000231690_0 (sequence is synthesized)
gcccttctcgaggccggtgcttgactggaggagggctggcagcagaagtgcagctgaccgggttgcgttttcgtacggctgactaaagcggataccggtggcgactcatttctcgtttta

SEQ ID NO: 927428 - DNA, 120 bp, Artificial Sequence
  ENSG00000231690_1 (sequence is synthesized)
tttttcaacgatttggcggagaagctcctcttgtgaatggactttggatttcttggagctgcgctgcgggtcccacagtgtggctttcggcccgtgctgtgctggcgcctgcacttcctc

SEQ ID NO: 927429 - DNA, 120 bp, Artificial Sequence
  ENSG00000231690_2 (sequence is synthesized)
tggcggggcacggggtggcgctccctggtaaagcagcggccagggggagccgtgagtgaggcgctgcctctcccgctgaagcgggttccaaggccaccgtgagggggaccatccatccag

SEQ ID NO: 927430 - DNA, 120 bp, Artificial Sequence
  ENSG00000231690_3 (sequence is synthesized)
gagagtactgggcaggctgcaaatgtctgtgttaaaacagctctgctgggctaagacaggacagaagcagacagcaggtggatgagacacaatttcctatccagcagaacctgcagcaag

SEQ ID NO: 927431 - DNA, 120 bp, Artificial Sequence
  ENSG00000231690_4 (sequence is synthesized)
ctccacagcaccctccatgggctcagtcttgctcccgggaagatggttaattccatcagctccttctggccggcagcaggaagagtggccctgtgtgtgccaggccctgcagtctctcct

SEQ ID NO: 927432 - DNA, 120 bp, Artificial Sequence
  ENSG00000231690_5 (sequence is synthesized)
ctcagctggtgtctccagtgagggacctgagtcatcgcacacatgagcctgtgctcagcctgcacatctcccgcctcccaccagctgctcctcaactgccagggccagactgtggcaaaa

SEQ ID NO: 927433 - DNA, 120 bp, Artificial Sequence
  ENSG00000231690_6 (sequence is synthesized)
tctcactcctctgccgatgctggggtttccctcgtgtctgggaggtggtgtgcttggtggcctgagcactgcagtgaatccatgtttccctcccagcaccctgttctgtcctccaacttg

SEQ ID NO: 927434 - DNA, 120 bp, Artificial Sequence
  ENSG00000231690_7 (sequence is synthesized)
gccgacagctctggccagggacgcagcccagctggtgcccaccccgcactctgtccatttcataagagcccttggtttcctcacttccctcagattttgccaagagaatggtcctggtgt

SEQ ID NO: 927435 - DNA, 120 bp, Artificial Sequence
  ENSG00000231690_8 (sequence is synthesized)
ggcccagaaaggccagcggggtgcagcctgggactgaaagcagaggcggctctggtggggaaaaagtagctctcccagcctagccctactggtgggcggcacctcctggctccaggccat

SEQ ID NO: 927436 - DNA, 120 bp, Artificial Sequence
  ENSG00000231690_9 (sequence is synthesized)
cttttgtcccagtcctaggtaagaaaaacacaaacaaaagccagtcccatggcactcgagaagcaggaggccgttccctgacagcaacatgctgtgtgcacagacacacgggtggacagg

SEQ ID NO: 927437 - DNA, 120 bp, Artificial Sequence
  ENSG00000231690_10 (sequence is synthesized)
gccgggcagccgtgcacggttgtcgtcctcagcggcaggagccagtttgttgctcagggccttgtctttttacaaagagccccaggccccgggggcttctctgggtgcctctttgctgcc

SEQ ID NO: 927438 - DNA, 120 bp, Artificial Sequence
  ENSG00000231690_11 (sequence is synthesized)
atgtctgcacgcgggcggagagcagaccaggctaccgaccctctcgctttgctgtcttcacgtggaaaagccagtgtcgtagccccaaaggaggggaaactgtattgatttggggagcct

SEQ ID NO: 927439 - DNA, 120 bp, Artificial Sequence
  ENSG00000231690_12 (sequence is synthesized)
ctatgttgatttcaaaacagattgtctcctgtgttctcaaagactggaagcgaaccccacaaccgccttaggccacaaaagctttatcctttctaattagcatccctgtgacctgctctg

SEQ ID NO: 927440 - DNA, 120 bp, Artificial Sequence
  ENSG00000231690_13 (sequence is synthesized)
cgccctgcagatattttgctcagccagccagaaggagggaggccagacaccagcccccacagacctgcggctgcgaccccctgcctggggacgatggggtcggggtccagtagctgcccc

SEQ ID NO: 927441 - DNA, 120 bp, Artificial Sequence
  ENSG00000231690_14 (sequence is synthesized)
agaaacaagtggggctgcaggaggctgatggtgagcttggaggttggcagaattctaaatctgggcactgcagggtccccacaggtcacgaccctactctgctccacccaggctccggag

SEQ ID NO: 927442 - DNA, 120 bp, Artificial Sequence
  ENSG00000231690_15 (sequence is synthesized)
gacctgagcaggaacctctgcagggggggcccggggctccctgtcctctcagcagccggcagtgctccctgacagcccgggcctctccctccagtagttcggtagtttgctgtcaccaac

SEQ ID NO: 927443 - DNA, 120 bp, Artificial Sequence
  ENSG00000231690_16 (sequence is synthesized)
atggctgggcctgggacaggctcctcctctccctccagaagccaggcagtccctcctgcctcagtttctcagactaggccgcctctcccatcgcgagacactgaagaccctcagctgttt

SEQ ID NO: 927444 - DNA, 120 bp, Artificial Sequence
  ENSG00000231690_17 (sequence is synthesized)
ccatctgcccagtctgactgctggatcgccctctgtgtgcgttggtttgctgtgttcttgctactcgcccttggataagatttcttctctactcatgaagctgcgtgtcctggagggcag

SEQ ID NO: 927445 - DNA, 120 bp, Artificial Sequence
  ENSG00000231690_18 (sequence is synthesized)
gaagctgcgtgtcctggagggcagggccgcacctcacatgcatgttgcccacatagctcagcaacagatgctctcacgcttgttaaaagtaaaaccgggccaggcgcagtggctcacgcc

SEQ ID NO: 927446 - DNA, 120 bp, Artificial Sequence
  ENSG00000231698_0 (sequence is synthesized)
actgaaccagtatcattaaagcttgaagtgttgaaataagtggcctgggactggcttccacggtgataaaagattcatctggtagcaccagagtaaaagaagtctcactaaacactggcc

SEQ ID NO: 927447 - DNA, 120 bp, Artificial Sequence
  ENSG00000231698_1 (sequence is synthesized)
gggcagctgctgctcggtgtgagcatcccggggatgcaagcgtgggggaggcatccctttgtttcctgagtcctagaagcaggtccccgacgaggaacaacgatgcctggactcagcttc

SEQ ID NO: 927448 - DNA, 120 bp, Artificial Sequence
  ENSG00000231698_2 (sequence is synthesized)
catcttctccgacagtgttcccatgcacaacttgtggttcgggttggaaatgcaaagtggaaaaatgcatagcagtatcccctcctccaaggcctcagtctctgtgctcatattcactga

SEQ ID NO: 927449 - DNA, 120 bp, Artificial Sequence
  ENSG00000231698_3 (sequence is synthesized)
gactagtgacccccgacttcccactcgccggcccctcctcctccccttccaacataatatgctgtttacttatttattgtgttcattttccgtctcacccaaatctattctagaaaaggt

SEQ ID NO: 927450 - DNA, 120 bp, Artificial Sequence
  ENSG00000231698_4 (sequence is synthesized)
atcccggggatgcaagcgtgggggaggtgagcaaacgggttgagaaaggctaagtcactccacttaggtcacatggcgatcatggagcacaagacatcacctgaaataaccagggatgat

SEQ ID NO: 927451 - DNA, 120 bp, Artificial Sequence
  ENSG00000231698_5 (sequence is synthesized)
agaatttgggatcacaacttcattccaaacgtttgatacaggcaataatggtaatagagaatgcatggaagaagagatcaatgtgaaatactctgtacaagcaaactggttgtcatgttg

SEQ ID NO: 927452 - DNA, 120 bp, Artificial Sequence
  ENSG00000231698_6 (sequence is synthesized)
tttagttgaagggacagaaatatataagttcagatcaattcaaaaaacactgactgcattccatatactgtgttagcaattggagcacagcaacatgttttaaacatccctgccttcagg

SEQ ID NO: 927453 - DNA, 120 bp, Artificial Sequence
  ENSG00000231698_7 (sequence is synthesized)
gagcttcacgtctagaggaggaggttgcagaagggagcattagagtagtatgcccatctccatagctgaaagcatttcagggggctcaagcaatttcctggtacctggaacatatagttg

SEQ ID NO: 927454 - DNA, 120 bp, Artificial Sequence
  ENSG00000231698_8 (sequence is synthesized)
taaaggagtggcccatgtaaaaacattgttttttccccagttgccaaagtttcacttagcagagaaagagcaatttactgaattgtatagaatgactggaagagcgaggtgctttttcag

SEQ ID NO: 927455 - DNA, 120 bp, Artificial Sequence
  ENSG00000255572_0 (sequence is synthesized)
gagaccaaaatagggtccaacgcatcctgagacctcgagctggtaacgtacagggaaggtgaacagtgagtcagcccttccttccgctaagtcaacatagtggccttattcccatcactc

SEQ ID NO: 927456 - DNA, 120 bp, Artificial Sequence
  ENSG00000255572_1 (sequence is synthesized)
agagtgtgctctgctgtcaaacctcaaagtcattgagaaacaaaccctgataatctcacccagcttcaagaccaagggagtcctagtgtcatggagaagagcaaggaggggcccagggct

SEQ ID NO: 927457 - DNA, 120 bp, Artificial Sequence
  ENSG00000255572_2 (sequence is synthesized)
gccgaagatagatgtctaccaactaggaagagagccctcaccaggaaccaaatctgctgacacctggatcttgaacttcccagccaacagaattgtgaggaataaatgtatgtattttaa

SEQ ID NO: 927458 - DNA, 120 bp, Artificial Sequence
  ENSG00000255572_3 (sequence is synthesized)
tgcaagacatgatgtgttaaattaaaaaacatagtctatttaacaaattcttttataaatttttctggattctctggccaaatttttccttgtataaaactaaatcacacatagaaaatg

SEQ ID NO: 927459 - DNA, 120 bp, Artificial Sequence
  ENSG00000255571_0 (sequence is synthesized)
gagccgcggtccccacagccgccccacccgcgccgctgcctcgctggggcccgggcccccttcccggtccttactcccctgctggtgcctccctccttggcgcgcttcccacctgcgatc

SEQ ID NO: 927460 - DNA, 120 bp, Artificial Sequence
  ENSG00000255571_1 (sequence is synthesized)
gatcggcgccctcttcgcagtcacgaactcgccagcagctagcagcactgactagtaggagggcccgccggaggagagccgcgcggcccacagaagcggaacgcgcgtcgagagcgccct

SEQ ID NO: 927461 - DNA, 120 bp, Artificial Sequence
  ENSG00000255571_2 (sequence is synthesized)
gtccgctcgccccagacagatgcccggttattcattaccgcgaggcctagaggaaagagtggctgccgtcttcctgcccacagcccgccggaccctccgtcgcggctgcccggtccccgg

SEQ ID NO: 927462 - DNA, 120 bp, Artificial Sequence
  ENSG00000255571_3 (sequence is synthesized)
agccgcagccgccgagcccggctgtgcgtgtcgtggctgctggggagaaagaggcttccggaagccccagagagattggtgagggtgatttcccaggaagacgcagtgtgctctgacttc

SEQ ID NO: 927463 - DNA, 120 bp, Artificial Sequence
  ENSG00000255571_4 (sequence is synthesized)
tgtgacagtgagcaacgggaccagtggatgtccagatgctggcaatgagacatgctctggagtcagaagacagcgaaaagagaagcagaagccccggtggcaagagtctgaagcaggaag

SEQ ID NO: 927464 - DNA, 120 bp, Artificial Sequence
  ENSG00000255571_5 (sequence is synthesized)
gatgactgtagcctgtggattgtactgcagtaggaaactgtcctagcaaggctccactttgccccagcttcaagctggaaaggaggagaacatgaaacattgcttgaagacaatggccga

SEQ ID NO: 927465 - DNA, 120 bp, Artificial Sequence
  ENSG00000255571_6 (sequence is synthesized)
gacagcaggtcccaccctgcacagccaccagcatctctcccctcagccctgtctcctcttctgcagttgggatctgcacatttaagcctgaaattgtcctgtgaagtgaagtatgatcgg

SEQ ID NO: 927466 - DNA, 120 bp, Artificial Sequence
  ENSG00000255571_7 (sequence is synthesized)
acagcctcttttcagcttttatgacaatggagacagaggaattgtggctcttgccaaggtcacaggattggaatacagagccaagccaccccaggacatgcaagagcctcagaagggaaa

SEQ ID NO: 927467 - DNA, 120 bp, Artificial Sequence
  ENSG00000255571_8 (sequence is synthesized)
aaagcccagcaggaagggagaacaagtagcctctgtcctgaagttgtaacagccaggggccaggatggaggaggaggaccccataatctgcccatctgggacttggcaggggacctggga

SEQ ID NO: 927468 - DNA, 120 bp, Artificial Sequence
  ENSG00000255571_9 (sequence is synthesized)
aaatgtaccccaacccatcccttaagggcctttgtctttggcccattggcctagcatctacttcttcaccgtgtctgttcttgtcacacctagtcaggtctgtttgggtctgaggtgcat

SEQ ID NO: 927469 - DNA, 120 bp, Artificial Sequence
  ENSG00000255571_10 (sequence is synthesized)
ggaacattctgggtaggcctccagcaaacggaagctcttcaccgtgtttccagcctgggaccaagggcagcatactggcaaagttgccaaagcaagggactccagcctcttaggagttaa

SEQ ID NO: 927470 - DNA, 120 bp, Artificial Sequence
  ENSG00000255571_11 (sequence is synthesized)
tgactccctctccccagctgtcctccccttggtgctcctcttcctccctcctcctgctcacagcaggcagggcctagacccgggagccatgctgctgtgctgttgccaggggagcacgga

SEQ ID NO: 927471 - DNA, 120 bp, Artificial Sequence
  ENSG00000255571_12 (sequence is synthesized)
ggcagatctgagctatgcagggaaaaggcccagcctgtcaaagtgtctgagatgaaccgccgccgtccctgtgcagctgggctcagacgtgtctcagctcttgttctgtgcctgagaatg

SEQ ID NO: 927472 - DNA, 120 bp, Artificial Sequence
  ENSG00000255571_13 (sequence is synthesized)
gcgaaacccagtgaggttcaagggcaaactcgctattcattagtcaggggttcttgacgtcccgtctctcccagggatgagttcccccctcctctttctccccctcctatgacacattcc

SEQ ID NO: 927473 - DNA, 120 bp, Artificial Sequence
  ENSG00000255571_14 (sequence is synthesized)
tgggtgcctttggtgaggactgcacaccctcctcctgcctagccccctctccaaaggcccctgaataaactccccccaaggagaccaggcagggcagagacaatggctgcaggaaatcat

SEQ ID NO: 927474 - DNA, 120 bp, Artificial Sequence
  ENSG00000255571_15 (sequence is synthesized)
tcaggcgggacatgctggcctgccctccacccagtccccctgtgggccccactcccttctgattcagggcacccttgggcccccagcctatacaggcctggacaggaagaaaccactggg

SEQ ID NO: 927475 - DNA, 120 bp, Artificial Sequence
  ENSG00000255571_16 (sequence is synthesized)
aaccaccctaaggacaacatgctagtccagtgccattcttcgctggctctgtgggtgcctttgtggcctgtaccgactggctggctaattttgtggtttctgtaccatcacatgcctatt

SEQ ID NO: 927476 - DNA, 120 bp, Artificial Sequence
  ENSG00000255571_17 (sequence is synthesized)
tcaaaatgtaaaaggcacacatacttggtcacaaacaaatggcactatttactctgtgggcatatttgtaaaagttgccaaagaattatatacaaggatgttcatcagagcatttctttt

SEQ ID NO: 927477 - DNA, 120 bp, Artificial Sequence
  ENSG00000255571_18 (sequence is synthesized)
gaagagtaaagaaatggacatgaacctgtggtccgttcatacggtggaatacctatgcagctgtaaaaatcagtgtggtagatctccgtatatgagttgatgtggaaggttggccagttc

SEQ ID NO: 927478 - DNA, 120 bp, Artificial Sequence
  ENSG00000255571_19 (sequence is synthesized)
acatgataaggtgaatagaataagttacagaacaggctgtagagtatgatcttatttgtagatgtttaaaactgagtcataagtatgcttatatacagatcgtttctggaagtatgtact

SEQ ID NO: 927479 - DNA, 120 bp, Artificial Sequence
  ENSG00000255571_20 (sequence is synthesized)
ggaagtctacctctggggagtggggatgggggagtgcactcttctatactgttatattttcttttcatgctcctaaggtacttttattggaagatgtaaagcggttcaatgtaataggct

SEQ ID NO: 927480 - DNA, 120 bp, Artificial Sequence
  ENSG00000255571_21 (sequence is synthesized)
taacttctgtcaactaagttggcgtgggtgctttaagagggtggtagtgatgttgctggagaaagtatcccacagtcactggtggcttcagccacgggccattttggggcctaataatca

SEQ ID NO: 927481 - DNA, 120 bp, Artificial Sequence
  ENSG00000255571_22 (sequence is synthesized)
catatcatcatggttgctagtgttaatcgaaaacctactaagtgccaggcttactgtctctgggtcttgcttacgtggatgtcatttttccagttgcaccaaatcgaaagaggttaattg

SEQ ID NO: 927482 - DNA, 120 bp, Artificial Sequence
  ENSG00000255571_23 (sequence is synthesized)
gtttgttggagttcctttgtaggtgaagggcagagccaggagcttggctagggacaggggaggtgagtgggggatggtggataggtcttggctcccagtttccttctgggcagacattgc

SEQ ID NO: 927483 - DNA, 120 bp, Artificial Sequence
  ENSG00000255571_24 (sequence is synthesized)
ccctctgccctgaggacctgcttgtttgggggaagaggcctttagaggcaccagggtcatgccaggtgttggacatggtgaactgggaagtgctcccatctggccacagcgcagaagtat

SEQ ID NO: 927484 - DNA, 120 bp, Artificial Sequence
  ENSG00000255571_25 (sequence is synthesized)
caccgtgctgggggatggggaacagggctgtgaatgggcctatttgcataagcagcatgtgtctggagagaaagacatcacagagcagaagagtgcgggtgcccaggagtgcacttgcca

SEQ ID NO: 927485 - DNA, 120 bp, Artificial Sequence
  ENSG00000255571_26 (sequence is synthesized)
cccctacttcatccctgaaagagtaaatggcctggaaggtgtctctgagaggtaatgccgcacaccaccctccctgggggcagggtcaggctacacctgccttaggtcgggggctgcagc

SEQ ID NO: 927486 - DNA, 120 bp, Artificial Sequence
  ENSG00000255571_27 (sequence is synthesized)
agcctgagagctctcagtagggcctcagtagcctgggagggagcaggggcagggggcagggaaagaggcgtaatggggctgtccagaggggcctgggaaacctggtccctgaggcctggg

SEQ ID NO: 927487 - DNA, 120 bp, Artificial Sequence
  ENSG00000255571_28 (sequence is synthesized)
cacagctacaatcacttcaaattggctgtggggccagtggactgggaaggaaaaaagcaataagagtgaccaagtgcagaaggctgtcaggtcccaggtcacatgccttagtgcagtgac

SEQ ID NO: 927488 - DNA, 120 bp, Artificial Sequence
  ENSG00000255571_29 (sequence is synthesized)
tcctcatcattttatggggtgtgggtgtcgttggtacacccattttacagatgaggacaccgaggcccagaaaagttaagttacatgtcctaagtcacacagcttgtaagtgccagaact

SEQ ID NO: 927489 - DNA, 120 bp, Artificial Sequence
  ENSG00000255571_30 (sequence is synthesized)
gagatcaaaaccaagtctctttgactttaaagtctgtactctgaccccaaagagatcctgtttggccacttataggaggtccctaaagctgcagactccccttgccggcacccacatata

SEQ ID NO: 927490 - DNA, 120 bp, Artificial Sequence
  ENSG00000255571_31 (sequence is synthesized)
gagacattaacccttcccctgcagggtcacctcaaatagtcttttagctgggcttctcctgcaattccacctaatgccatcccctgggttttgcccaaacctgaactgggcagtggggtg

SEQ ID NO: 927491 - DNA, 120 bp, Artificial Sequence
  ENSG00000255571_32 (sequence is synthesized)
agaggaggggtttacagggttacagagcctcatacagataggagcccatggctgctggtcatctgcattcctgcaggattggctgttccttggggtccttggcaggaaaatgaggattgc

SEQ ID NO: 927492 - DNA, 120 bp, Artificial Sequence
  ENSG00000255571_33 (sequence is synthesized)
tccgaggcctgctccagtacttcccagaggctggcctggtgtggggctctgggaaggctgaggctggagaagcgtaagtaggagggcagagatggcactcaggtagcttgaatcaccagg

SEQ ID NO: 927493 - DNA, 120 bp, Artificial Sequence
  ENSG00000255571_34 (sequence is synthesized)
acccttccaagccccacaggttctgagggagtactagggccagctctgggagaggtctcttcctatgctgtgaaccccctgcctttcttgcagcctacaacgaataaattttctttgcaa

SEQ ID NO: 927494 - DNA, 120 bp, Artificial Sequence
  ENSG00000255571_35 (sequence is synthesized)
gagcccccgctccgccactgccgtgcctgcctcccgcagctgtctgccatgcgctcgccggggcaggggcgcccggagggcggctagagctgggcctgagcccgggaacgcgcctgatca

SEQ ID NO: 927495 - DNA, 120 bp, Artificial Sequence
  ENSG00000255571_36 (sequence is synthesized)
agtgcgtgggggtcccggccccacacagtgctagggtccctctcgagtttctcatctgccttcaggtcactttccaccctgatgccttggcttgtcctgaagctcagggcccctgtagct

SEQ ID NO: 927496 - DNA, 120 bp, Artificial Sequence
  ENSG00000255571_37 (sequence is synthesized)
tgggaaacctcccaagctccccagcgagtggctgtagaccaaggaagggaccctgcccggcttcagggaagaaaggaagaaagttactcccctgctggtgcctccctccttggcgcgctt

SEQ ID NO: 927497 - DNA, 120 bp, Artificial Sequence
  ENSG00000255571_38 (sequence is synthesized)
ggctgctggggagaaagaggcttccggacatgctctggagtcagaagacagcgaaaagagaagcagaagccccggtggcaagagtctgaagggagaaaataacccagtttgggaaggaca

SEQ ID NO: 927498 - DNA, 120 bp, Artificial Sequence
  ENSG00000255571_39 (sequence is synthesized)
gacttgttcttgccttctaaagcagagaggagcttttgtgggtagttcctacagggatacatggtagaaaattcaccaaacccagtgctggagtgtttctcttcctcagaagaaatcaga

SEQ ID NO: 927499 - DNA, 120 bp, Artificial Sequence
  ENSG00000255571_40 (sequence is synthesized)
tgctgttcagagcacgaaggctagaattttaccctggttctcatgctaccttgcacccaggttggatcctgagtacagtttttggcaggaagccccagagagattggtgagggtgatttc

SEQ ID NO: 927500 - DNA, 120 bp, Artificial Sequence
  ENSG00000255571_41 (sequence is synthesized)
gccccggcccggcccgcaagagccagaggagccgagaggagcccagcgccggcccagcggactccagctcgacggagcggccgcgccccgaccagttactcccctgctggtgcctccctc

SEQ ID NO: 927501 - DNA, 120 bp, Artificial Sequence
  ENSG00000255571_42 (sequence is synthesized)
gctgggactacaggcatgtgccaccacagccagacttttatatttattttataaaaataaaaaaatatgttttattttgtagagacagggtctttgttgcccaggctggcctcaaactcc

SEQ ID NO: 927502 - DNA, 120 bp, Artificial Sequence
  ENSG00000255571_43 (sequence is synthesized)
caaactcctggcatcaagcgatcctcccacctgggcctcccaaagtgttgagattacagcatgagccaccacacccagactaaaaggcagtttgattttacaaatcaaaatagcagtaat

SEQ ID NO: 927503 - DNA, 120 bp, Artificial Sequence
  ENSG00000255571_44 (sequence is synthesized)
ctatggagatttacttgtgagattggtaggaaacatcttaaatgtaatcaaacaataacttacatcttgatgaattcacgtgtaggtttctcttcctcagaagaaatcagatgctgttca

SEQ ID NO: 927504 - DNA, 120 bp, Artificial Sequence
  ENSG00000255571_45 (sequence is synthesized)
gagcacgaaggctagaattttaccctggttctcatgctaccttgcacccaggttggatcctgagtacagtttttggcaggtgggcctgcatataagttagcaatgggggatacccagctg

SEQ ID NO: 927505 - DNA, 120 bp, Artificial Sequence
  ENSG00000255571_46 (sequence is synthesized)
cctctcttcatacagctgaggttttggggagtcattcttatagcccctgggttgggcctagtcctgcaaatgaattcaccagccctaaagcccaaattgcagcctctgtcattcaccttc

SEQ ID NO: 927506 - DNA, 120 bp, Artificial Sequence
  ENSG00000255571_47 (sequence is synthesized)
caggagtggaaagggcagtaagtttcatcttattattattgctattttggtggttttgttgaggttggtgtgtgtatgttagtaagataaagctctcagaaattacatagcatttgtcaa

SEQ ID NO: 927507 - DNA, 120 bp, Artificial Sequence
  ENSG00000255571_48 (sequence is synthesized)
ggatataagagggactgtgccacatctggctgtatagaaggtggttccatatctttaaatagagccccaggtccttagccaccagaaaggttttcaggggaagtgtgcaccctcagcagc

SEQ ID NO: 927508 - DNA, 120 bp, Artificial Sequence
  ENSG00000255571_49 (sequence is synthesized)
tgctgctggtgggcaggatgggcacgcatggaacaggctttcctctgtggccaggtgagaagcaggtggtgagacacagagcagtgctgggctctgcttctgaagcctccaacctttcct

SEQ ID NO: 927509 - DNA, 120 bp, Artificial Sequence
  ENSG00000255571_50 (sequence is synthesized)
ccttccctacgctgggtggcgtccacaccctccggcttccattgcctgggtctcctggaggtggtttgctggatgaataccgcatgcacagaggctggccttgggtttgaatatggcagc

SEQ ID NO: 927510 - DNA, 120 bp, Artificial Sequence
  ENSG00000255571_51 (sequence is synthesized)
cagtggacagcatgtgcttcagttatgagactgcccaggagatgcttcttccaaggcagagcacgtgcagagtccagtgctggagaggccgggtgcgcagttgacccatttccagttctg

SEQ ID NO: 927511 - DNA, 120 bp, Artificial Sequence
  ENSG00000255571_52 (sequence is synthesized)
ggggagaaagaggcttccgctgtccgcattgacccaccgcgacctcgaagcaggtcccaggcgtgtgcatttatatgcagagtgaccaagaaacttcagtaatactagtttgtgtctttg

SEQ ID NO: 927512 - DNA, 120 bp, Artificial Sequence
  ENSG00000255571_53 (sequence is synthesized)
accatggcgacggctagggcgccctggcagtgctgcccatcgcagagggcaagtcttcactccgcctagatgggtgtgaagggaagttactcccctgctggtgcctccctccttggcgcg

SEQ ID NO: 927513 - DNA, 120 bp, Artificial Sequence
  ENSG00000255571_54 (sequence is synthesized)
ctgggagtggcgcggctgcttcccgcccgcgcaggatcaggccggcccccgcgggcctggagctggatccagagctagggaaactggaaaaacaggcacaaactcggaagccgcggtacg

SEQ ID NO: 927514 - DNA, 120 bp, Artificial Sequence
  ENSG00000255571_55 (sequence is synthesized)
gcaagagcctaagcaaagaatcctttccaagattcacacctcgtctacaccagggcaccgcctgggcctacggccttccgaacccgaagcgcccgcagcccagagctggcatcaggccat

SEQ ID NO: 927515 - DNA, 120 bp, Artificial Sequence
  ENSG00000255571_56 (sequence is synthesized)
caggccgggaaggtcgtcgcaggccccagagtgcgggcgcggggggcgcgcgcccacaggacgcccggggttgggtaggcaggagagaagggcgccagcaggcccgcggctgtttcccct

SEQ ID NO: 927516 - DNA, 120 bp, Artificial Sequence
  ENSG00000255571_57 (sequence is synthesized)
cggtccgcacagcgggcccgggaggccattttgagagcgcgaagaggggcggcaagatggctgcgtgggcacccggaaggtcgccgcgccaagggcccgctgagcccctcctcccattcg

SEQ ID NO: 927517 - DNA, 120 bp, Artificial Sequence
  ENSG00000255571_58 (sequence is synthesized)
gggcaggggcggaaacggccttccccgcgtggggaacaatggcgttattttggagtctgcaaccgcgagcgcttcaagctctttgattattttcgaggagtgttagctgtccgcattgac

SEQ ID NO: 927518 - DNA, 120 bp, Artificial Sequence
  ENSG00000255571_59 (sequence is synthesized)
aggccaccgctacgcgaccctgagtgcaccttcaagaaggccgggcacgtttctgggcgggcgtggggggtgcctgatatctccgctctattttacagttactcccctgctggtgcctcc

SEQ ID NO: 927519 - DNA, 120 bp, Artificial Sequence
  ENSG00000255571_60 (sequence is synthesized)
cccgggcaggggcggaaacggccttccccgcgtggggaacaatggcgttattttggagtctgcaaccgcgagcgcttcaagctctttgattattttcgaggagtgttaggacatgctctg

SEQ ID NO: 927520 - DNA, 120 bp, Artificial Sequence
  ENSG00000255571_61 (sequence is synthesized)
ggagaaacacacacgggcgggcggaggggacccggggcgagtcatcaagggcgcgtggttcggcgtgccaggcgcgctgctctgcctgctctcttggcttctgtctcccttcgaccgatc

SEQ ID NO: 927521 - DNA, 120 bp, Artificial Sequence
  ENSG00000255571_62 (sequence is synthesized)
gccccctatcctgaagctttccaatgtcatcttggagccccaaagtttcctggggcctccgcgttgtgcgtcccagaaccccttgcctgcccctgagggaaacgcggagccataggcagc

SEQ ID NO: 927522 - DNA, 120 bp, Artificial Sequence
  ENSG00000255571_63 (sequence is synthesized)
gggacgtcgggagccagcccaggggaggccagattcagcatttggacagcggctctggggcgcagtcggcccagcgagtttgccggtgaacagcctcgggcacatggcgggtaggagggc

SEQ ID NO: 927523 - DNA, 120 bp, Artificial Sequence
  ENSG00000255571_64 (sequence is synthesized)
cgcagggctgctctgggtcttgaagaagcaggacccagcctagagggcatccccagctccgaatgggacacgttttcccgagataaaagatcccttctgagctcacacgggagccccggg

SEQ ID NO: 927524 - DNA, 120 bp, Artificial Sequence
  ENSG00000255571_65 (sequence is synthesized)
accatccaatccagcgtggatatccccagcctaaccaacacctgtgctggggggaaagataagacgccccctttcagccaggaggtggacgaccctcatgccctcagctctccattcttc

SEQ ID NO: 927525 - DNA, 120 bp, Artificial Sequence
  ENSG00000255571_66 (sequence is synthesized)
ccaaagcagctcggatccctaagtctggagctgccagcgaggcttccaacccgctgcttgccatcacctcccaggtcgttggtggctccgattactcccctgctggtgcctccctccttg

SEQ ID NO: 927526 - DNA, 120 bp, Artificial Sequence
  ENSG00000255571_67 (sequence is synthesized)
agaagcactgggtaaatgcacgacttgttcttgccttctaaagcagagaggagcttttgtgggtagttcctacagggatacatggtagaaaattcaccaaacccagtgctggagtgaagc

SEQ ID NO: 927527 - DNA, 120 bp, Artificial Sequence
  ENSG00000255571_68 (sequence is synthesized)
ctttgccccagcttcaaggtatatcgtctcaaaatgcaggggacttcagatgagttttgagcaccctttcttttattataaaaaaaattccagacagttcagccaatactgactaagggc

SEQ ID NO: 927528 - DNA, 120 bp, Artificial Sequence
  ENSG00000255571_69 (sequence is synthesized)
tgagaccagttccatgcttttctgtctccagaggaatttgcttccatctggatgcctgaaacggtattttacttcacctcctgtgtcaccggcagcagtcctgggagccctggggaggag

SEQ ID NO: 927529 - DNA, 120 bp, Artificial Sequence
  ENSG00000255571_70 (sequence is synthesized)
tcagtgtgtgtgtctggggctgcctctgggtgtgcatggttttttttgtgtctgcgtgtcagtgtcaggctatgtgtgtctgtttctgtcggcctgtctaggcgcgctcagtgcaacaag

SEQ ID NO: 927530 - DNA, 120 bp, Artificial Sequence
  ENSG00000255571_71 (sequence is synthesized)
ggcgcgctcagtgcaacaaggagctgggggaggtggcggtaaagaggaagggcatttcaaagcccagctgtcctcctcagggacctcaggagatgcgtgtgtgtgtgtgtgtgtgtgtgt

SEQ ID NO: 927531 - DNA, 120 bp, Artificial Sequence
  ENSG00000255571_72 (sequence is synthesized)
ttttccatgctgctcattgtgtggggctgcatgcgagtgtctgaccaggtgtggtgtgagcagccgctgggctgggtgagccccatctgccgtgagctcccagacttgccttctagccct

SEQ ID NO: 927532 - DNA, 120 bp, Artificial Sequence
  ENSG00000255571_73 (sequence is synthesized)
atcgcagggcaggctgggggtcagatgcggatgaagcgggccgggcagtggagctgcatgtttgagcttgccctctccaggcctaagggccagagcttctgctcttctgccttctttgct

SEQ ID NO: 927533 - DNA, 120 bp, Artificial Sequence
  ENSG00000255571_74 (sequence is synthesized)
agtctgaaggtgggttccttcctgacatgggcattgggctgcgcatgtgtgttcgcagttctttccagctgctgttctgacctctttgtgcagtgtatttatgtggctgtagatggatgg

SEQ ID NO: 927534 - DNA, 120 bp, Artificial Sequence
  ENSG00000255571_75 (sequence is synthesized)
tccaaggtagatttaggttttggaatactgttttttttttctacttcagggagaaaataacccagtttgggaaggacatttaaaaggggaaaatattaggtatgatggcacacctgcagt

SEQ ID NO: 927535 - DNA, 120 bp, Artificial Sequence
  ENSG00000255571_76 (sequence is synthesized)
taaaaggggaaaatattaggtatgatggcacacctgcagtcccagctattcgggaggctaaggctggaggatcacttgagctcaggggtttcaggctgcagtgagctatgatcacgccac

SEQ ID NO: 927536 - DNA, 120 bp, Artificial Sequence
  ENSG00000255571_77 (sequence is synthesized)
aaaaaatgtaatttaatttaaaaagggaaaatatccttggtggtccttggaaccagcacttaccaggttgacccatatgaaatttctttcttgttgatgaaaaatagtcaaatattggca

SEQ ID NO: 927537 - DNA, 120 bp, Artificial Sequence
  ENSG00000255571_78 (sequence is synthesized)
atttcttatggttcaacatgttacagttccattcctctgggatggtagagggatccccagaaacacattttaaagagtttctgatactttaaccatttgtgttcctcttcatcctacgat

SEQ ID NO: 927538 - DNA, 120 bp, Artificial Sequence
  ENSG00000255571_79 (sequence is synthesized)
cgggtcgggctcggccagctggggcgagccggcctgttcgctggctcgggcgcccggttccgggctgggcaaggagcgcttggccatgagccgcgggacagcccaggcgggacggatgcg

SEQ ID NO: 927539 - DNA, 120 bp, Artificial Sequence
  ENSG00000215458_0 (sequence is synthesized)
gcacgctggggagatggtccctgcgggaagactccgaggcagtctcctgcagctccttccggcgaatccggttcaggaagtaaaaccagccctgtgtagaggcaggcgagtggaaccaca

SEQ ID NO: 927540 - DNA, 120 bp, Artificial Sequence
  ENSG00000215458_1 (sequence is synthesized)
ggtgcttcccgtcctggtcacaaagtcagagtggctgggccaagtgtcctgagaagagtcacctcctgggatcccatcagcctggccatagcagaacacccagacaggggcccatccccg

SEQ ID NO: 927541 - DNA, 120 bp, Artificial Sequence
  ENSG00000215458_2 (sequence is synthesized)
aggctcaactcaacgcatgcagccactgtagaaaagtctggaaagtagttcttcaaccgactagacatggtgagcccaaaacccagccatgacactcctaggcatctgccccagaggaat

SEQ ID NO: 927542 - DNA, 120 bp, Artificial Sequence
  ENSG00000215458_3 (sequence is synthesized)
aaacgggcagatgcaatgcactgtctgtaccgtgggatgtcactcagccatatgaaggaaagactccagtgtggatgagccctggaaccacggtgctgcgtgatcccgtaacacatggcc

SEQ ID NO: 927543 - DNA, 120 bp, Artificial Sequence
  ENSG00000215458_4 (sequence is synthesized)
agaacagacacggcccggaacctgaggccgggaggatgcgtgcaggtggcggggagacagaggggcgatggcccagtttcttttgggctgaaaatggtctaaagttgactgtggtgatgg

SEQ ID NO: 927544 - DNA, 120 bp, Artificial Sequence
  ENSG00000215458_5 (sequence is synthesized)
ctgtacaactttgaatatgctgaaaactcgaattacacacttcagttgggcgaactgtactccatgtgaattacctctcgatggttctctcctgggctcaggcgcttctcccaccttggc

SEQ ID NO: 927545 - DNA, 120 bp, Artificial Sequence
  ENSG00000215458_6 (sequence is synthesized)
ctcctgagtagctggaactaccattcatgtgcggaaataaaacaactcggtctcaaaaaaaactcaactcaaaactcagtctcaaaaataaaaaaataaaaaagtaaaagaggctaccaa

SEQ ID NO: 927546 - DNA, 120 bp, Artificial Sequence
  ENSG00000215458_7 (sequence is synthesized)
aaggaaggagggtgactgcagagaccggccctgggcagcggtaccaggggcacagggagcctggcccggcccattgtcactggaattcatgccatgcagacttctacatcaaagggaaac

SEQ ID NO: 927547 - DNA, 120 bp, Artificial Sequence
  ENSG00000215458_8 (sequence is synthesized)
aaggtcaggagggccgaggggtccacggcactccgcacccacggggccaggctggcacaacgccccaacgctgcaatcctgggaagagtcacacgcgccctcccgggacccacgtgacca

SEQ ID NO: 927548 - DNA, 120 bp, Artificial Sequence
  ENSG00000215458_9 (sequence is synthesized)
tcaagggagtgtggaggacacatccctcgggggtgacgcccctgcagatggagtttccccatctgtgccacccttgcaaggcctgggaaaggctgcggggccaggcggcaccgggcaagc

SEQ ID NO: 927549 - DNA, 120 bp, Artificial Sequence
  ENSG00000215458_10 (sequence is synthesized)
tgagtgccaggtggtggttgcaacacaccgggcaaatctgaaaccatgggacggacgagctgcacccctgggaaagagaacagaggaaggccggttatcaacgtcctcctgtgcctcagt

SEQ ID NO: 927550 - DNA, 120 bp, Artificial Sequence
  ENSG00000215458_11 (sequence is synthesized)
ttccagaaacaagccagactcagtgcctcagggagaccccgtgtggcctccggagagcacgggacccgccctttgtgcaggtgaggaaactgaaccccagagcagtgagggactggcctg

SEQ ID NO: 927551 - DNA, 120 bp, Artificial Sequence
  ENSG00000215458_12 (sequence is synthesized)
gggaccctgggctcagccctgggcgccttccctctgcccatctcagacgggcacagccagcaccgcctcaccccaacgcgcctccagactggccctccaggggcccccaggcacaatcct

SEQ ID NO: 927552 - DNA, 120 bp, Artificial Sequence
  ENSG00000215458_13 (sequence is synthesized)
ctcactttcttcctcaagcccctgccttcccccttcgcactgtgacccaggggctgctagcagctgggctgggctccaaagcttgaagctgcttctccaggtctctttccagggggcggc

SEQ ID NO: 927553 - DNA, 120 bp, Artificial Sequence
  ENSG00000215458_14 (sequence is synthesized)
ggatggctgctcactcagggacgccaacaccaacaggaagggacccatgcacggatctgacttccctcccaggctctgccttcactcaatgtccctgtggggcagctggggctcccggcc

SEQ ID NO: 927554 - DNA, 120 bp, Artificial Sequence
  ENSG00000215458_15 (sequence is synthesized)
gccctcccctgcccacagccgtgaggttgcttcctagggttctgttttccccacagtcggaactgaggtgctgggaggctccagaagagggatggggtggagcaagtggcctggagcccc

SEQ ID NO: 927555 - DNA, 120 bp, Artificial Sequence
  ENSG00000215458_16 (sequence is synthesized)
ccagggcagaccccaaagagaagggtcagaagtgccctctggggcctgggcagctggggggagcccacaagcctgagaccctgtgggagggaagcgcccccaccccgtggtaagaaaggg

SEQ ID NO: 927556 - DNA, 120 bp, Artificial Sequence
  ENSG00000215458_17 (sequence is synthesized)
gctggtagaggctcctatgtggctccctctgtcccctcccgacctctggccaggcttgggataatccctgagtggacacaggcgccacgatggggtctcgggggtgagggctgaggaggc

SEQ ID NO: 927557 - DNA, 120 bp, Artificial Sequence
  ENSG00000215458_18 (sequence is synthesized)
tgagcctccaaggaccccagggtgcctgttcccactgcacacccaccagggcacagggtagggatagtgccaggagggccacagctgcagggtccatcccaggccgtggtacacaggtag

SEQ ID NO: 927558 - DNA, 120 bp, Artificial Sequence
  ENSG00000215458_19 (sequence is synthesized)
aggtgggtgccagccttcgtgaagcacctgcagaagctccactcagggagagaacgaggcactcgcccaaacagatcctgggtcacacggggcagcaagagagggtggagcaagtggcct

SEQ ID NO: 927559 - DNA, 120 bp, Artificial Sequence
  ENSG00000215458_20 (sequence is synthesized)
ggagcaaagggttggaggccccggggcggcgcgttctcccccaagcccattccagggccatgggcaccccccagaggcagctggtgggactgcagccatgcaggtcctagagggcaggtg

SEQ ID NO: 927560 - DNA, 120 bp, Artificial Sequence
  ENSG00000215458_21 (sequence is synthesized)
acaggggacgtgacagaaggggacaaagggccggcaacatccctgggggaggcacagagagggccagactgccctcggtggactgcggaacccagaacccaacggccaatcctcccccta

SEQ ID NO: 927561 - DNA, 120 bp, Artificial Sequence
  ENSG00000215458_22 (sequence is synthesized)
ctcctcacccacagtaaggggccagggctccatgcaatgagaacccacgggtgatgccacacgggggagaagccacgcgggggagaggccatgcaggggagaggttacaagggggagagg

SEQ ID NO: 927562 - DNA, 120 bp, Artificial Sequence
  ENSG00000215458_23 (sequence is synthesized)
ctgcggggtgagaggtcacatggggcagaggccacgcgggggagaggccacgcaggggagaggtcacatgggggaggccacgcaggggagaggtcacatgggggagaggccacacaaggg

SEQ ID NO: 927563 - DNA, 120 bp, Artificial Sequence
  ENSG00000215458_24 (sequence is synthesized)
agaggccatgcaggggagaggtcacaatggggagaggccgcaggggggagaggtcacatggggcagaggccacgcgggggagaggccacgcaggggagaggtcacatgggggaggacacg

SEQ ID NO: 927564 - DNA, 120 bp, Artificial Sequence
  ENSG00000215458_25 (sequence is synthesized)
caggggagaggtcacaagggggagaggccgcagggggagaggtcacatgggggagaggctacacaggggagaggccgcacgctggggagatggtccctgcgggaagactccgaggcagtc

SEQ ID NO: 927565 - DNA, 120 bp, Artificial Sequence
  ENSG00000215458_26 (sequence is synthesized)
aaaccagccctgtgtagaggtaagtgatgcttgtggggataatctccgagcagctcaccgcggcgctggccattgccgttctcttcacggtagaagagtccatttggggaaaaggtcccc

SEQ ID NO: 927566 - DNA, 120 bp, Artificial Sequence
  ENSG00000215458_27 (sequence is synthesized)
atcagagatggagatgttccctttcagactccaggctatggctgtggggccggctccctaccacgtgggctgggggctgggcacatgcatgcccactcctgggccctcttcctggtaggc

SEQ ID NO: 927567 - DNA, 120 bp, Artificial Sequence
  ENSG00000215458_28 (sequence is synthesized)
cacagcaccacacacactgcaaaccaggcctcttcttcatccaccaccaccgtccaggcctcaacatcaccgcgtggggtcttgtgccctctgggggaacttccgggctaatgagggggg

SEQ ID NO: 927568 - DNA, 120 bp, Artificial Sequence
  ENSG00000215458_29 (sequence is synthesized)
acagtccccattaccggtctatctttataaggcagtatatgcaacagtggaagttctgtgagacatgttccaaccccggggctgctggcagaactgtccccaaacccaccctcgatccca

SEQ ID NO: 927569 - DNA, 120 bp, Artificial Sequence
  ENSG00000215458_30 (sequence is synthesized)
cggccaggaagtgggtccaaaattgcctggccaggtcacacccctgcgtgaaccgccccacaacacccagggcgctgcctgacttgccgtccacctctcagcccctcccctcacccctgc

SEQ ID NO: 927570 - DNA, 120 bp, Artificial Sequence
  ENSG00000215458_31 (sequence is synthesized)
cgcagctgcagggcctaccctcgccgggggctgctccctgcttacctccctcgcccgtgcaatgcctctacttcccgcaaggcctaccgggagatgttacaggtcacggtcatatttgag

SEQ ID NO: 927571 - DNA, 120 bp, Artificial Sequence
  ENSG00000215458_32 (sequence is synthesized)
catgagaagctcacgcagagaacattctggctgagggagaggtcttggggttcaaggctgtttcttggctctgctcagccatgccaggcaggaaaatgggcacctctagtgacccaggct

SEQ ID NO: 927572 - DNA, 120 bp, Artificial Sequence
  ENSG00000215458_33 (sequence is synthesized)
ggctgagagcctgcagggaagagcctttggaacgtgagccactgtgggctggcaggactgcaactggcgtctccatctactggtaccgaggcgaggaggaaaaagcaggggggcccggag

SEQ ID NO: 927573 - DNA, 120 bp, Artificial Sequence
  ENSG00000215458_34 (sequence is synthesized)
acggcccctctaagtctgtaactccagagctgctgctcagtccccagaacgtcacctccgagcagagcctgtgacaactgtcaactgtgaagctgtggcgtgggttgctactgaagctct

SEQ ID NO: 927574 - DNA, 120 bp, Artificial Sequence
  ENSG00000215458_35 (sequence is synthesized)
gaagtcagcgaggacacagcatgtttgttctagaccgtttggctgcgggaggaagctgtacatgcacacactcgcctcaccaccctgcgagtccacaggcccctccccggagtcacctcc

SEQ ID NO: 927575 - DNA, 120 bp, Artificial Sequence
  ENSG00000215458_36 (sequence is synthesized)
aggtaaagggggccctgcgtcgggacttgctctctggggcgctgagatgctctacaatgagctgtgctgcagtgcacggccgcccgactgtgcacccgcaacggggaactgaacgctgca

SEQ ID NO: 927576 - DNA, 120 bp, Artificial Sequence
  ENSG00000215458_37 (sequence is synthesized)
tgaagtacatctccaagttgttctttaagaaggcttagggtccctggaagaccctcgcccacacccagcgtggagcgttgttgctcacgtggccacacctctcgggatggccgtgggtct

SEQ ID NO: 927577 - DNA, 120 bp, Artificial Sequence
  ENSG00000215458_38 (sequence is synthesized)
acaccaccctcccctcacaggagctagagatcttcagagaaatgagagaatctgaacagggccctagggctgcaaacgacttcactgagacaaccaaggactgagggttcgagggttgga

SEQ ID NO: 927578 - DNA, 120 bp, Artificial Sequence
  ENSG00000240535_0 (sequence is synthesized)
ggaggaagtgctctgtgagaggggcctgggagagaatcaggagaacagggtacaacagctggtgagagttttgcttctgatatagacaatgcctggagagcaaaccattacagctaagag

SEQ ID NO: 927579 - DNA, 120 bp, Artificial Sequence
  ENSG00000240535_1 (sequence is synthesized)
agatctttaagtgaaagaaaaggagaaggctccatttcagcttattagaggacttgaatttgtctaatgtcttgcctgggaaaagcagctcagttctctctgaaaaggaaaacccaagac

SEQ ID NO: 927580 - DNA, 120 bp, Artificial Sequence
  ENSG00000240535_2 (sequence is synthesized)
tttgggagaggtgtgtggcaacagtaaagctttctacatgttaaacagaatgaacaaaaccaacgcagagcagtgacttcctgtcagagcagaaggagacccttatagaacagctgtgcc

SEQ ID NO: 927581 - DNA, 120 bp, Artificial Sequence
  ENSG00000240535_3 (sequence is synthesized)
actgctccaaaggcctcgtgtggttctatcccttggactgcctttcttcaacagcccagacacctgctctgtcagatttataagccacaccccctagagccatgccaatcaaagcatggc

SEQ ID NO: 927582 - DNA, 120 bp, Artificial Sequence
  ENSG00000240535_4 (sequence is synthesized)
tggcttagctaaagcctgagcaccaaccagagaaaaccatatgttttgcagcaaacatccctactcatgtcgtttctctaagtttgcccaaatttggttaaattttagttacatttttgt

SEQ ID NO: 927583 - DNA, 120 bp, Artificial Sequence
  ENSG00000240535_5 (sequence is synthesized)
gagatttcataatgttgttaaaggtgaacattggcaactatttttgattcagagtctctcttttactcatttttaattgaaaatggccatgtgtttttccagggacttaataataatgtc

SEQ ID NO: 927584 - DNA, 120 bp, Artificial Sequence
  ENSG00000240535_6 (sequence is synthesized)
tttgtgccagacactgatcagcagtgcaaatataaaatgaatacaaacagatcacgcatcagaatgccaatcacttcctagtaacactgatcaaaatttgcattaaatcaacagatcttt

SEQ ID NO: 927585 - DNA, 120 bp, Artificial Sequence
  ENSG00000240535_7 (sequence is synthesized)
cccagatgaaatgtgttgatcctgtgatgaaggaagaagattctgaagactgagttttgttcttgtaagttttgactttctcaccacaggtgctctaggggtaagattttttttcacacc

SEQ ID NO: 927586 - DNA, 120 bp, Artificial Sequence
  ENSG00000240535_8 (sequence is synthesized)
cacaggtgctctaggggtaagattttttttcacacctaggtgtaaacgttatgtatcagtttggggactttcaggtctgtgcttttagcacttttttgttttgttttgttttgagacgga

SEQ ID NO: 927587 - DNA, 120 bp, Artificial Sequence
  ENSG00000240535_9 (sequence is synthesized)
ttcagcctcaacctcctgggctcagaggacttgaatttgtctaatgtcttgcctgggaaaagcagctcagttctctctgaaaaggaaaacccaagacagaaagcgtggatgtggaagaag

SEQ ID NO: 927588 - DNA, 77 bp, Artificial Sequence
  ENSG00000240535_10 (sequence is synthesized)
ctcctgagttcaacaaaggatgacataaaaatcttcaggatgaatgctctaacagaaaggtgggcacgtgcctaaat

SEQ ID NO: 927589 - DNA, 120 bp, Artificial Sequence
  ENSG00000240535_11 (sequence is synthesized)
ggatgaatgctctaacagaaaggtgggcacgtgcctaaatgactcacacaaagaaggctatgaggagccttgagcatttgagatggagtgaggccatgtggaaggggctgtggaaggttc

SEQ ID NO: 927590 - DNA, 120 bp, Artificial Sequence
  ENSG00000240535_12 (sequence is synthesized)
acaggcgcccaccaccacatccggctaattgcttttagcacttttttgggagaggaacagatgacaatgcattgccaggccttcaatacaaaaggtgtgtggcaacagtaaagctttcta

SEQ ID NO: 927591 - DNA, 120 bp, Artificial Sequence
  ENSG00000240535_13 (sequence is synthesized)
cacatggctggggaggcctcacaataatggtggaaggtgaacggcacatcttacctggtggcagacaagagagaaaagagaaccatgcaaaagcggtttcccgttataaaaccatcagat

SEQ ID NO: 927592 - DNA, 120 bp, Artificial Sequence
  ENSG00000240535_14 (sequence is synthesized)
catcagatctcgtgagacttactcactacgacaagaacagtatgattcaatcatctcccactggggattattcggctactacttcagtgtgaaacagacaccttgttgtcctcaaatatt

SEQ ID NO: 927593 - DNA, 120 bp, Artificial Sequence
  ENSG00000240535_15 (sequence is synthesized)
gtgaaacagacaccttgttgtcctcaaatatttctattgcattctacttggggtagcaaggaagtgggtattgagaagtaatgattatcagtgccaggaaggggaaaaactgtcaaaaca

SEQ ID NO: 927594 - DNA, 120 bp, Artificial Sequence
  ENSG00000240535_16 (sequence is synthesized)
ccatttctctgcagagttcaagacttcaatccccttgacaaccaattcctaaacaacatcagggagttccatttgggctagagtttgtgcaggttactgcggtttgatcactctataagg

SEQ ID NO: 927595 - DNA, 120 bp, Artificial Sequence
  ENSG00000240535_17 (sequence is synthesized)
tgggaaactctccagcaccagtcctccagtatggtaaggcaggacagcagcccatggaagccagtacatcagcccacttctgttttaatattgctgagttgcctttatttgaaaaaaata

SEQ ID NO: 927596 - DNA, 120 bp, Artificial Sequence
  ENSG00000240535_18 (sequence is synthesized)
aaaatgaagagaacagaggtggcaggatatttttgaatcaggtctcatctgcataggtctagccaggtagggccaattatttgtcctccaggaattctgaatgactgacttacgcctgag

SEQ ID NO: 927597 - DNA, 120 bp, Artificial Sequence
  ENSG00000240535_19 (sequence is synthesized)
tcttttcctcttgctccagtgaccagggtggacataaaataaagcataaagccttcttttgcatctgtgtggaaggcaaatatactctgtccacaaccacaaagaagggaggaaatggaa

SEQ ID NO: 927598 - DNA, 120 bp, Artificial Sequence
  ENSG00000240535_20 (sequence is synthesized)
tgattggaatgacaacagcaaaccactttgctctaaaacctttgagcagttttaaaatctggatatttgcttcagtttgactctcaacttcattttgaggccaaagatagaatcaaatag

SEQ ID NO: 927599 - DNA, 120 bp, Artificial Sequence
  ENSG00000240535_21 (sequence is synthesized)
gctctcgaagacagaagtttccaaataaaatactatattcttttaggggtgtagattccaggctttgtggcaacaccacattcatgacctccagagactatagcgtggaagacaccttta

SEQ ID NO: 927600 - DNA, 120 bp, Artificial Sequence
  ENSG00000240535_22 (sequence is synthesized)
cagatcaaggggccccctgagtcaccctggaaggaagaaaaagggcaaatacgtgacagggtctcattttgtcacccagactggaatgcagtggcaagatctcggctcacttcagcctca

SEQ ID NO: 927601 - DNA, 120 bp, Artificial Sequence
  ENSG00000240535_23 (sequence is synthesized)
aaaaaggaagacatgattgtttcagatttgaaaatggcaaatgcctgtggtagagtgggtttgcttatggcagagctgtgactgcctggaatgaccactttttggtttctaccaaaagag

SEQ ID NO: 927602 - DNA, 120 bp, Artificial Sequence
  ENSG00000240535_24 (sequence is synthesized)
tttatttttatttattttgggaattccagctctatttgttgaaaagtttgcctattgcaaaatcaggaccgggtggaaatttctcataggatgtggactggatttcctaggattgatttg

SEQ ID NO: 927603 - DNA, 120 bp, Artificial Sequence
  ENSG00000240535_25 (sequence is synthesized)
aaaaaacacatgtctggaaaagtgtggaggactcaccgatattggcagtgggctgctgtcagcacccactgtggatcaatcagaacacctccacaaacgtgatgtccgccatactggatg

SEQ ID NO: 927604 - DNA, 120 bp, Artificial Sequence
  ENSG00000240535_26 (sequence is synthesized)
tacattacagttcagaaagataggaatgattgtgaaaataattttcatctataatataacaatatagtcagtagaaattcatttaatgtttacatgtagatataggagatacttacacac

SEQ ID NO: 927605 - DNA, 120 bp, Artificial Sequence
  ENSG00000240535_27 (sequence is synthesized)
atttaatgtttacatgtagatataggagatacttacacacatgagtcatataagccccaactattaggaaaaacagagaaaaggaagaaaacttagtcattttaaagatttagatttaag

SEQ ID NO: 927606 - DNA, 120 bp, Artificial Sequence
  ENSG00000240535_28 (sequence is synthesized)
aacttaggatgatccagcagaagttacacctagttgaaggtggtaccattactgttttattcagtgaccttattgccctttggcgagtgtgggtgcaatgggggcagatattacttcatg

SEQ ID NO: 927607 - DNA, 120 bp, Artificial Sequence
  ENSG00000240535_29 (sequence is synthesized)
tgataaaagacaaacagagagtcttctaaattttatttagaataaaaccagcatggtagaaatacatcagtgatacaagtgaaaaagaacttgattccttaataaaatgacttacaagtg

SEQ ID NO: 927608 - DNA, 120 bp, Artificial Sequence
  ENSG00000240535_30 (sequence is synthesized)
caaaaatggaccccatatgtgctctgctttacttacacccaactctaacctgcgagcatattaggaaaaaagaagcaagtgcatccaataaaattatttgtaacttaatttgtatgaggc

SEQ ID NO: 927609 - DNA, 120 bp, Artificial Sequence
  ENSG00000253834_0 (sequence is synthesized)
atattctattggttagatacaagtcacaggtcctacccacattgaagaggaggggaaaataagagtgtaatgccagaaacagggatcatgtagtatcaccttaggttcaatatgtcacca

SEQ ID NO: 927610 - DNA, 120 bp, Artificial Sequence
  ENSG00000253834_1 (sequence is synthesized)
tcactctccttacgttctcttagattcccaattttcttatcagtattatcagggtatgacagaatgatggtcagacatctttcatgagttcaggcagcaccatttctaatgagcactatt

SEQ ID NO: 927611 - DNA, 120 bp, Artificial Sequence
  ENSG00000253834_2 (sequence is synthesized)
tccacaaaggaactcatggcctgttatcaaggtgactgtgcaatgaggaaaagaaaatgatgaaacttttggagagttactgactgaacaccagctgtgaattgatactaatttctggag

SEQ ID NO: 927612 - DNA, 120 bp, Artificial Sequence
  ENSG00000253834_3 (sequence is synthesized)
acaaaacatgagtttgtccaccagtcagtgtcagagcttatggaggtcagaagatcaatggagttttagcttagatccatcttatagtgacccagtgggtcgccaaacccatcctgcagt

SEQ ID NO: 927613 - DNA, 120 bp, Artificial Sequence
  ENSG00000253834_4 (sequence is synthesized)
tacttctccagttccagaataaataattggatagaaatagtcagcaactggcagaattcccatattggtttactgacctctaaagcgagagctattatagtaagaaaataccaaaaggaa

SEQ ID NO: 927614 - DNA, 120 bp, Artificial Sequence
  ENSG00000253837_0 (sequence is synthesized)
aaaacccctctgcttccagccgtcagtgagcgccaccctctccaggaacagatgtcctgcgttctaaatgaagagtgcagagcccacagcaaacaactgtccccagcagcccggatccct

SEQ ID NO: 927615 - DNA, 120 bp, Artificial Sequence
  ENSG00000253837_1 (sequence is synthesized)
ctgacatcagcccccaggaatgtgctgcagaccctctagcacgttcaggcctcccaggggataccctcccctcccctcctccatcccagtgtttcactggggacaggcctctgagctgca

SEQ ID NO: 927616 - DNA, 120 bp, Artificial Sequence
  ENSG00000253837_2 (sequence is synthesized)
gacggaggcccacggagggtggaagacagcccaccccgctccagacctggagactggaggagtgactggagtgagtgaggcagccttgagtggagtggagcgggaagcctgcctgtgaaa

SEQ ID NO: 927617 - DNA, 120 bp, Artificial Sequence
  ENSG00000253837_3 (sequence is synthesized)
gaggcagctaggccaatagctggactgtaggaagaacacggagctggactgattcaaccaagagtcctaccgaccggtgctccccttgccaagagtgaaggcagatgccgtgggattctg

SEQ ID NO: 927618 - DNA, 120 bp, Artificial Sequence
  ENSG00000253837_4 (sequence is synthesized)
ccagctgctgagtacatctatttccatgatgctttccggaagtggggaaatagcacagaatgggtttcagatggacgtaagctaaaaacccataagcccccactttgatgttctgggtct

SEQ ID NO: 927619 - DNA, 120 bp, Artificial Sequence
  ENSG00000253837_5 (sequence is synthesized)
cctagaattactgtcagctcagaaccagtggccagtagtccaaaagatctgattatttccttttctccaatgcacgctcatcctggtgaaaggtgtctttggagaactgggagaaagaat

SEQ ID NO: 927620 - DNA, 120 bp, Artificial Sequence
  ENSG00000253837_6 (sequence is synthesized)
acagtatagatttctggcaggctacgagggtgcttccttgagggtacccagcctttccctcattcaagagcttccagtctgataaaactggctcaagtacgggaatggattgaggggtca

SEQ ID NO: 927621 - DNA, 120 bp, Artificial Sequence
  ENSG00000253837_7 (sequence is synthesized)
acatcatgatcaaccagccaacaccacaggtctgcagcagtcagactgatttctgctttgactccactgtccaatagggtcagcacgtccaccttgcctttggtagtactacagccacgg

SEQ ID NO: 927622 - DNA, 120 bp, Artificial Sequence
  ENSG00000253837_8 (sequence is synthesized)
ggcccccgccaccctggagccaattactccggtcgcattcaggttactggttcagtggctgctgttcctgctgtgaggtctggccttcagagaagagtgatcacagctcctcaaggaggc

SEQ ID NO: 927623 - DNA, 120 bp, Artificial Sequence
  ENSG00000253837_9 (sequence is synthesized)
tggagctcctttcatatatttacttctcaccatcaaggtgaaaggcatgtcttcaggagcttcccagcgtgggtgaggaggtcttaaagggaagccaaacatgccgcagaccacgcggga

SEQ ID NO: 927624 - DNA, 120 bp, Artificial Sequence
  ENSG00000253837_10 (sequence is synthesized)
attcttggccgtccagtgcttgtcacagatctgcttccaggtcttgccctccttcacctccacgtagccctccatcactggggtgcgcttgcggtaggttgagaggatggctcgaatccg

SEQ ID NO: 927625 - DNA, 120 bp, Artificial Sequence
  ENSG00000253837_11 (sequence is synthesized)
aatgtcctccacctggatattcaggttctgggaagaaagaggcgtggaaggagagggttaccctactggcctggctgcagagacaccaggcaaccagtacttctttagcgactatgggcc

SEQ ID NO: 927626 - DNA, 120 bp, Artificial Sequence
  ENSG00000253837_12 (sequence is synthesized)
aggcctgccgcgggcctgcctgtgccctcaggccctgcagtgagctctgggcaaccccgaggggcacacggcccaagctgcagttagaaagcgctatgcatgggagatagtgaggctgaa

SEQ ID NO: 927627 - DNA, 120 bp, Artificial Sequence
  ENSG00000253837_13 (sequence is synthesized)
aggacccaacagggagtggggtgacctggaacagtcagaaaagactcagagaccccatgggcttctcctacatccgaacctaagatcttggagagcaaagggcagcagcctcctcctgca

SEQ ID NO: 927628 - DNA, 120 bp, Artificial Sequence
  ENSG00000253837_14 (sequence is synthesized)
cattggagagattagaaaaccaaggaaagaaacggaggctcttcaaggtcgataagcaccccggggccagtctcctgacgtccaggccctgctgaaacgtgtctgttctcacggctgctg

SEQ ID NO: 927629 - DNA, 120 bp, Artificial Sequence
  ENSG00000253837_15 (sequence is synthesized)
gtcagggctcaaacgacagcaccttggatccattgtggagaacaaagagctaattgaaaacatctgggctgaggttttccaactggcttctcattttggcccggtttccaagcagtcaag

SEQ ID NO: 927630 - DNA, 120 bp, Artificial Sequence
  ENSG00000253837_16 (sequence is synthesized)
ctccactgaaacatacactccctaatcgattgctgtctcaacaacaaaccaatgtttgtcttgctaagttactagcaacagggaagaccctccatgttctaagcggaatgttctgtcgca

SEQ ID NO: 927631 - DNA, 120 bp, Artificial Sequence
  ENSG00000253837_17 (sequence is synthesized)
aagctgccaaagtgacagagatggtgaaaagcagtggcaccctattccatctgcagtgagagaaacccccctcgctaaggacctggaagtcgaccagtgcatcatcaaaggaactgagaa

SEQ ID NO: 927632 - DNA, 120 bp, Artificial Sequence
  ENSG00000253837_18 (sequence is synthesized)
cagctgcaaaccagagaccctaaggagcctgccccaaagagctgctctcttatgaaacttccatggacccccaataatcttccatggaccccttccacatatgcttggtcaatttctact

SEQ ID NO: 927633 - DNA, 120 bp, Artificial Sequence
  ENSG00000253837_19 (sequence is synthesized)
tagatggcagatatgtgaatctgtacttagcccaagacagcatcaccatgcatggtatactcgtttggcctgatttcataacaaaattttttttgttttttgagacagtgtctcactctg

SEQ ID NO: 927634 - DNA, 77 bp, Artificial Sequence
  ENSG00000253837_20 (sequence is synthesized)
aagggcccttttttttccctctacaggcttagtgcttattaactagactactccgattccaatgcaaccagcttctg

SEQ ID NO: 927635 - DNA, 120 bp, Artificial Sequence
  ENSG00000253837_21 (sequence is synthesized)
attaactagactactccgattccaatgcaaccagcttctgggtctgcctgctgaaaagcagggcggttctaggtacaatccagtagatgcctcctcagagctgccaggaaagccgtgtcc

SEQ ID NO: 927636 - DNA, 120 bp, Artificial Sequence
  ENSG00000253837_22 (sequence is synthesized)
ttgggacacaagatgacagtcaaactttggacacaagaaagccattcaatcagaagccaaattttatgttactctttgcttccaatgcctctcctgatgaaagaagagataaatatatat

SEQ ID NO: 927637 - DNA, 120 bp, Artificial Sequence
  ENSG00000253837_23 (sequence is synthesized)
atacaagttaacagatcattaggaaggtgaaaatcataaatgaaattcagttggaatgccagagcccaggacaatggatattattcaagttagactgtgtggggtcacaaatgggtgcag

SEQ ID NO: 927638 - DNA, 70 bp, Artificial Sequence
  ENSG00000253837_24 (sequence is synthesized)
gaaaaccccgtctctactaaaaatagaattaaaaaaatcagctgggcctagtggcgcacacctgtaatcc

SEQ ID NO: 927639 - DNA, 89 bp, Artificial Sequence
  ENSG00000253837_25 (sequence is synthesized)
tgtaatcccagctactcggggggctgagatgggaggatcacttgaattcgggaggcgaaggttgcagtgagccttaaagcaagactctg

SEQ ID NO: 927640 - DNA, 120 bp, Artificial Sequence
  ENSG00000253837_26 (sequence is synthesized)
cactccagcctgggtgataaagcaagactctgtctcaaagaaaaggaaagaaaaaaatctgtggggttacaacaatgtggttatcgctggcttcgtcgctgtggtctaaagaatgaggga

SEQ ID NO: 927641 - DNA, 120 bp, Artificial Sequence
  ENSG00000253837_27 (sequence is synthesized)
tgtgactgggaataggcttagcctcctgattctgaagacaggtgaaggagagcaaccaccttagcttcagctgctataacctcgaacaggggttgagaatcaggacagctgctccctcca

SEQ ID NO: 927642 - DNA, 120 bp, Artificial Sequence
  ENSG00000253837_28 (sequence is synthesized)
gaactccctaaaagggcctgtggtttacctgagctcagagatgctttgggagaacagtctgtgaacaggccaggctagaaaacccagaacgtccctggtgccctccctggtttcactgct

SEQ ID NO: 927643 - DNA, 120 bp, Artificial Sequence
  ENSG00000253837_29 (sequence is synthesized)
ccagcctgaagttcagaggagcttgaggggtcctggaggggcagtcttatccacggtctgaccggcacgttaagcccctaagccccaccggagcaagccctgggcgctggccactttctg

SEQ ID NO: 927644 - DNA, 120 bp, Artificial Sequence
  ENSG00000253837_30 (sequence is synthesized)
tgctcactatacccagaactcttttgccaactctttttcctattctgccaaatcaaaatgaatcaattagctaatattcactgagtgcccaccatgtacccagtgataaagatctggact

SEQ ID NO: 927645 - DNA, 120 bp, Artificial Sequence
  ENSG00000253837_31 (sequence is synthesized)
gatgctggtgaaattcaaataaatttagatgtaaaaaggtctctcatgtcataaacgaagcaccacttcacgtaagcagcttaactcgtaaagccgtgaacacaagacagagtttttttt

SEQ ID NO: 927646 - DNA, 120 bp, Artificial Sequence
  ENSG00000253837_32 (sequence is synthesized)
ttttcaagcatctgtttctttctcctctctttgatgttattccttttataaaccttgatgatttccatgtccacaaagatgacctttccagtactcctggtctcttcgttaatacacctc

SEQ ID NO: 927647 - DNA, 120 bp, Artificial Sequence
  ENSG00000253837_33 (sequence is synthesized)
ctctctcagagactgtcctccatcctgctccagccgctgtcccatggtcatagctcaggtctctcattaccagagattgcacccacccttcaatctccatttcacctttcctgctctgca

SEQ ID NO: 927648 - DNA, 120 bp, Artificial Sequence
  ENSG00000253837_34 (sequence is synthesized)
cccacacacagctcccttcatcttttagtaaacttcttgtatctccatctgaacagagactcgcaatccagtgatcacagcagctatgcacaatccttcaacttctccacttattacaac

SEQ ID NO: 927649 - DNA, 120 bp, Artificial Sequence
  ENSG00000253837_35 (sequence is synthesized)
cctccttacccagcacagtctccttggaccatgagtttaatccttccctttcatattccctccactccttggaacttttcactcttcaccacgcttggatggcaaagtcccacctgggta

SEQ ID NO: 927650 - DNA, 120 bp, Artificial Sequence
  ENSG00000253837_36 (sequence is synthesized)
aaaacctgtctcctactaccccgtgcctgctcctgatagggaaaaaccacaacccccttgtctgacaacaggtgttttaaattgaggttgaaataaaattaagttgtcactggaaaaata

SEQ ID NO: 927651 - DNA, 120 bp, Artificial Sequence
  ENSG00000253836_0 (sequence is synthesized)
agttacacatatttggaagaacacattatttcagaattttgtgaagctgtacggatggtctccagtacaacattgaaaagaagtggtgagagagctaacatccttgccttgttcctgagt

SEQ ID NO: 927652 - DNA, 120 bp, Artificial Sequence
  ENSG00000253836_1 (sequence is synthesized)
ttataaagagtttctagatgcaaacacacacacacacaaaagtgtgcttccagaagatgctgctgggaaggccactgcatccctagggagccaaatcaaagcattttgtcctaatgtgtc

SEQ ID NO: 927653 - DNA, 120 bp, Artificial Sequence
  ENSG00000253836_2 (sequence is synthesized)
caagaatgaagccgtggaccctcgcggaaagatagaatagaagctacaagatctgcagttatgcttcctcttacccaatttacagataatatatgtttgtggctgtgatacacagaaaaa

SEQ ID NO: 927654 - DNA, 120 bp, Artificial Sequence
  ENSG00000253836_3 (sequence is synthesized)
caaaatggactctgcagatgagattaagtttctgcctgcctgacaatcactctgctgatggcaaccaaatattgtcttcttcctggagtctcagggaaaatgtggcctggggcagaccct

SEQ ID NO: 927655 - DNA, 120 bp, Artificial Sequence
  ENSG00000253836_4 (sequence is synthesized)
agttcttcagatggaaggtgaaacttcaatacatcaccgcaacaggaaacaatctcaagaatttgtatttacacatcctggacaaagaaagtgtaaataagtctggaatgcagtcatcag

SEQ ID NO: 927656 - DNA, 120 bp, Artificial Sequence
  ENSG00000253836_5 (sequence is synthesized)
ttcccaggtcctggaaggcaggagtctggagtcaggcagaaagagaaagcaggcacagtgacaaccagcagtacacttaaggattagagtgcagatttttctaagctcccaggccaatgc

SEQ ID NO: 927657 - DNA, 120 bp, Artificial Sequence
  ENSG00000253832_0 (sequence is synthesized)
aaagaagaagaccgacatgaatacttgactcctgtagcttctggtatcctcatcctcccagatcctgacattaggctgaacatctgtgctggatttagaggtggtgtattctcacctttt

SEQ ID NO: 927658 - DNA, 120 bp, Artificial Sequence
  ENSG00000253832_1 (sequence is synthesized)
aagtaatggatattttagtgaaaaggtggtatcagggcctgctgtctagatgccatttttaggaagaagtgtcagaaagtttttaagactgcaaggaaagagaacactctcagggggttg

SEQ ID NO: 927659 - DNA, 120 bp, Artificial Sequence
  ENSG00000253832_2 (sequence is synthesized)
ccaacaggggtggaagtcaaaatgaggacaaagtgaggccctgagcgtcagagatcaaggccaagagggcatagcagagggaatccagttccagacaggcttgcagtgctatggagatat

SEQ ID NO: 927660 - DNA, 120 bp, Artificial Sequence
  ENSG00000253832_3 (sequence is synthesized)
aaagttcaagaacacaacatgcgtgctttcgaggagcgtatcattattcaggaagtcaagacaccagtgaatgaaaagaaaactcactttctgcaatagcgcaaaagagcagtgaagatg

SEQ ID NO: 927661 - DNA, 120 bp, Artificial Sequence
  ENSG00000253832_4 (sequence is synthesized)
gtgctcagatgaactgtaagtgttcagatgagggaaaccatggaagacatcatggaggagatttcttctgttcctggtagaattgtgagatgctgcatctgcgttccagctttcaagaat

SEQ ID NO: 927662 - DNA, 120 bp, Artificial Sequence
  ENSG00000230563_0 (sequence is synthesized)
gttgattcctagaggtggaatccattaaactgacaaagccccagtcccggggtcctaatagtcgggactattaggtcatcctgggtactcaggcctctagactctagactgagctgcctt

SEQ ID NO: 927663 - DNA, 120 bp, Artificial Sequence
  ENSG00000230563_1 (sequence is synthesized)
ggtcactcggggacagttggcagagtattcgtggtcagggaggtgacccgtggtcagcaggatcaggccacccagggacaaagggtgcttctgcgccaggccctggagaaggacagagcg

SEQ ID NO: 927664 - DNA, 120 bp, Artificial Sequence
  ENSG00000230563_2 (sequence is synthesized)
gtggggactcggggtcggccgcagataggggagtcaccacctgccggcaatcagccatgactgcctttgcactgtccatgctctcagcccaccacctcctccccctgccattgcagtggc

SEQ ID NO: 927665 - DNA, 120 bp, Artificial Sequence
  ENSG00000230563_3 (sequence is synthesized)
taacactggagacgaagaccaagacaccaccgcctttctccagtaccactcaaatcagcacaggcaaggacaaaggcctcaatccacaactgctgaagatggaccctggccacatgggat

SEQ ID NO: 927666 - DNA, 120 bp, Artificial Sequence
  ENSG00000230563_4 (sequence is synthesized)
ggtcagacacgcctgcccagctatctgcaggcgaagaggctcagaagaggtttaggggcctgaaggacatcttgcttccatgtccatatgagcaggctatttctgctccatgagtcaatt

SEQ ID NO: 927667 - DNA, 120 bp, Artificial Sequence
  ENSG00000230563_5 (sequence is synthesized)
ttgccatataaaatacttaatttcagccattccagggtgctgtaggatgcacagcttcccatcagcccacctgaactccagccatgccattttaataccaggaataaggtcacctgcttt

SEQ ID NO: 927668 - DNA, 120 bp, Artificial Sequence
  ENSG00000230563_6 (sequence is synthesized)
cctgccccttaggaggccagagccgtggaagcaaaatggcacttctgtttacctgttatattatttttttgtcatccttatatgcttggaaaatgcaattatatgaaaaaagtttagtaa

SEQ ID NO: 927669 - DNA, 120 bp, Artificial Sequence
  ENSG00000230563_7 (sequence is synthesized)
cttactctcatggccgattctgctccacctgggactctgctgtgctgcgggcatcctgtggtcagaatcgcagaggggccatcagggagggccttcccagaggatggacctcacgtgact

SEQ ID NO: 927670 - DNA, 120 bp, Artificial Sequence
  ENSG00000230563_8 (sequence is synthesized)
gctgcgtgggcaagtggcactggccactctgcctggagagaggagtaaatgcagggctggccaggcgacctgcacactctgctactggccttgtccatctttagcctctaatttgaaaat

SEQ ID NO: 927671 - DNA, 120 bp, Artificial Sequence
  ENSG00000230563_9 (sequence is synthesized)
gaggctcacacagaccaagagtatctttgagggttagtacagaccacagaaatgccctgggcctttcactctctccttttgcaaattcccatgtgtggaaatgccgtttggataatgagg

SEQ ID NO: 927672 - DNA, 120 bp, Artificial Sequence
  ENSG00000230563_10 (sequence is synthesized)
gagcctgaaggaggtggacacatgagcagccccgacaggcctggctccatcctctgaaaatggggccccgtgcccggcgtgtggccttactggttcagtcttctttacagtggtaggttt

SEQ ID NO: 927673 - DNA, 120 bp, Artificial Sequence
  ENSG00000230563_11 (sequence is synthesized)
tgagtgcccagatgcccagtgcctcctacctggaacagcacaggatctggcagacccctggaagaatcacatgcacacttaaatattcagggagttcccacccagcagagctcgcctctg

SEQ ID NO: 927674 - DNA, 120 bp, Artificial Sequence
  ENSG00000230563_12 (sequence is synthesized)
tggctaccttggtcttgctgctgatatctgccagaaaaggcctggacttggagacaagcctgggatttacactcagtccttccccatctggctggttccatttccttggctctcactgct

SEQ ID NO: 927675 - DNA, 120 bp, Artificial Sequence
  ENSG00000230563_13 (sequence is synthesized)
ggaagtctgtgctcctgaacatcaagtcagagggggcatctgaatgcagggcagggagcctcagatgggaagaagtcagaggaaccagaatgtgtcagaaaatgccaagtcatgtgcctg

SEQ ID NO: 927676 - DNA, 120 bp, Artificial Sequence
  ENSG00000230563_14 (sequence is synthesized)
agctcaaaagtcagctgggccacaggctggctgtgtgatcttgggcaagttcaaccagcttctttatacctcttttcttgcctcaaaatgataagagaaaccacttcactaatacactga

SEQ ID NO: 927677 - DNA, 120 bp, Artificial Sequence
  ENSG00000230563_15 (sequence is synthesized)
agccctgattcaatgcgcaagggaactaagaaggacatgaatacgaggaggcaggaaccatcacaggctgtcttgcagactggttaccacacacagaaattgggacttgaatccaggcct

SEQ ID NO: 927678 - DNA, 120 bp, Artificial Sequence
  ENSG00000230563_16 (sequence is synthesized)
ctctgatgtcaaagtccttgtacttcactgtgctgccctccccaagcagcctcttgaatctgtggatccctctaagtgtaatgtcaccttcagcctgcaacagtacagaatggataaagt

SEQ ID NO: 927679 - DNA, 120 bp, Artificial Sequence
  ENSG00000230563_17 (sequence is synthesized)
agtgatattaaacatgctgtaagagaagaagagaagcctaggctccttgagcatgattataaaatggggaccagtgaggagaggatagcctcaagaagaagaattgagaggggcttggtt

SEQ ID NO: 927680 - DNA, 120 bp, Artificial Sequence
  ENSG00000230563_18 (sequence is synthesized)
aactatccctaactggacattctgctttttgctgttcctggcatcagctatcagaaagtctctgtggggtcttgctgttgccctggctgcagtgcagtggcatgaacacagctcactgaa

SEQ ID NO: 927681 - DNA, 120 bp, Artificial Sequence
  ENSG00000230563_19 (sequence is synthesized)
gccttgaactctcagactcaatggatcctttcacctcagtcccccaagtagctgggaccacagcagtctggccttccagctggcctccagatgcaaaggcagagtctgatggagacttgg

SEQ ID NO: 927682 - DNA, 120 bp, Artificial Sequence
  ENSG00000230563_20 (sequence is synthesized)
gccggtgaccagagacagacacgtaacatagaaaacgctatcactttgatcatttgtttcaaatggaagaaaaaccgacacaacaatcagccatgactgcctttgcactgtccatgctct

SEQ ID NO: 927683 - DNA, 120 bp, Artificial Sequence
  ENSG00000230563_21 (sequence is synthesized)
ttgaaagggacgggcatttagtaatgagatatgcacagcagcatagtcagctgtgtggtgcattctcagctgtgcctcagcagccctgatgcagacatccagaaggagcacagccacttt

SEQ ID NO: 927684 - DNA, 120 bp, Artificial Sequence
  ENSG00000230563_22 (sequence is synthesized)
ctactcctccttacaatttactgccaggaacactgggcaagagaacttcagtggagcagggattggctgagcatgagccagggttgggggaagtaaataatgggctgttgccagggcctg

SEQ ID NO: 927685 - DNA, 120 bp, Artificial Sequence
  ENSG00000230563_23 (sequence is synthesized)
agcccaacagagaaaggctgtgtgcagagggagggcctcaggtcctggggctcctcctggcctctttcgtcccgactacttcacaccctcctctaacaacgactcccacctccttttcca

SEQ ID NO: 927686 - DNA, 120 bp, Artificial Sequence
  ENSG00000230565_0 (sequence is synthesized)
gaacagcaagctctaccaaagcaaggtctcctctgcttcctcagactgccgaccagtgctgagaacagggacactgaatatctgtgagctgagcgcatccagccatcaactgactcactc

SEQ ID NO: 927687 - DNA, 120 bp, Artificial Sequence
  ENSG00000230565_1 (sequence is synthesized)
actgaagaacgctacattctgggcatatcttccatgacagtccagcagggtagctgttggaaatccaaacatgtccactcctgcttacgacctcagtcaccacctcttcatatgattctt

SEQ ID NO: 927688 - DNA, 120 bp, Artificial Sequence
  ENSG00000230565_2 (sequence is synthesized)
ccatgggctgttcctgagcacctgagggagaaaaacaaacagaaacaaacaggaaagggcagaataattgatatgtgagaaggaaaaagtcaacagttgttgagacataagtgaatgctg

SEQ ID NO: 927689 - DNA, 120 bp, Artificial Sequence
  ENSG00000230565_3 (sequence is synthesized)
ttcagcctcccaaataactaggactacagcacctggttcttcttgacaactgcacattctgctacatgctgtgatgaccaggagaatcatttaaatttttatttggaggactcacttcca

SEQ ID NO: 927690 - DNA, 120 bp, Artificial Sequence
  ENSG00000230565_4 (sequence is synthesized)
acttggaacacaagctgcaaaggaattccctaccagcatgccagcacatcatttggaagttcaaggtattcttgctcaacagctgcacacacattaaaagtccctggggtacatggcgcc

SEQ ID NO: 927691 - DNA, 120 bp, Artificial Sequence
  ENSG00000230565_5 (sequence is synthesized)
tgctgcctggggttggactctgtcgccggggattccagaaattagagtagaattcacagctctgcctctccacctgctgtgaggtcttcaagttacaactccgccgcctatcagggacct

SEQ ID NO: 927692 - DNA, 120 bp, Artificial Sequence
  ENSG00000230565_6 (sequence is synthesized)
ccgtgattagtaagggagaaattgtcatatttttctccctagatcacaggtctgaggaagcagtttccccaagattttgtaaaagtggctttataattaaaaacattgattttcctatta

SEQ ID NO: 927693 - DNA, 120 bp, Artificial Sequence
  ENSG00000230569_0 (sequence is synthesized)
gcccagctcagaaatcagcgctgatcaaataaagcacacattccctttggcactaaatttgactcggcagcgtctgtacagggatcctggcaaaaccagaacattcagcctttagaatca

SEQ ID NO: 927694 - DNA, 120 bp, Artificial Sequence
  ENSG00000230569_1 (sequence is synthesized)
ctggggattggctcaccgctgtgtggaagcacaactgttatttctgaatgccatccacgtggctcagccactgagatgaagcaccattcagaagaagcaaatgtgtgctctatgtttcac

SEQ ID NO: 927695 - DNA, 120 bp, Artificial Sequence
  ENSG00000230569_2 (sequence is synthesized)
ccagtctgatttggccaagatcacacagataggttctacaaagaaagcactattgccattatcatcgaaatacaaatctacttttggaagacaagtgccttataaatacaccaattgaaa

SEQ ID NO: 927696 - DNA, 120 bp, Artificial Sequence
  ENSG00000230569_3 (sequence is synthesized)
ctcccaaagtgctgggattatgggcaagagacactgcacctggcccttgtctgttttatatagtgggtttctacacaagattgtgtgtaaatgtgttttatagcaaaaaaaatagtttga

SEQ ID NO: 927697 - DNA, 120 bp, Artificial Sequence
  ENSG00000230569_4 (sequence is synthesized)
gtgttttatagcaaaaaaaatagtttgacaattagtaacattgacccagctgctaattgacagtgaatatttcacttcagtgactctacttgtttgttgacaaagctactactgagcagg

SEQ ID NO: 927698 - DNA, 80 bp, Artificial Sequence
  ENSG00000248747_0 (sequence is synthesized)
attcatctgtcgtttgggtcagggtctgcggggcagatccccgcagctaatgccctcttgtgagcagcaatacctcactt

SEQ ID NO: 927699 - DNA, 120 bp, Artificial Sequence
  ENSG00000248747_1 (sequence is synthesized)
ccgcagctaatgccctcttgtgagcagcaatacctcactttttatcagcctctggctgcagaagagcaggaccacaatcctggaggctcagcaaacatcccatcaatggtggaaaatgtt

SEQ ID NO: 927700 - DNA, 120 bp, Artificial Sequence
  ENSG00000248747_2 (sequence is synthesized)
tcctcttcgtcccacatggagtttacagatgatgggtttccaacttccagaagaggaaccagctgaagagaacatcccactccccgctccccaccacaaaaaaaagattcagagggtaca

SEQ ID NO: 927701 - DNA, 120 bp, Artificial Sequence
  ENSG00000248747_3 (sequence is synthesized)
agggtacatacgcaggtttgttacctgagtagacttcctgatgctgaggtttggagtacaactgatgccgtcactcaggtacagagcaaaacaggttggagtgcagtggcgcgatcttgg

SEQ ID NO: 927702 - DNA, 120 bp, Artificial Sequence
  ENSG00000248747_4 (sequence is synthesized)
aggcgggagccctcggtgtccagcctagaatatcctcaaatccttccacagtgaccccagtttttatttctacctttctgcattctacattttctttgtacttttcttgagcacacattc

SEQ ID NO: 927703 - DNA, 120 bp, Artificial Sequence
  ENSG00000248747_5 (sequence is synthesized)
agtctggtattagtaacttccacctgcattagccccgtttcttcagaaaatactaaatgtgcagtcccacagaagcaggagtaagtgaaagagaaacaaagtggtgaagaggggagagaa

SEQ ID NO: 927704 - DNA, 120 bp, Artificial Sequence
  ENSG00000248747_6 (sequence is synthesized)
acctcacagggtaggttcctgtatggccagagtctgggacaagccaatttcgtgatttcacaggatgccttcagagagaacattagaagttactgtgaaaggggagaagagggaataagt

SEQ ID NO: 927705 - DNA, 120 bp, Artificial Sequence
  ENSG00000237699_0 (sequence is synthesized)
gatggtctcgatgtcctgacctcgtgatccgcccacctcgtcctcccaatactgggtgaattatcacacttctttctgaccattcacttttctgtctttgtaacagccatcagggtcttt

SEQ ID NO: 927706 - DNA, 120 bp, Artificial Sequence
  ENSG00000237699_1 (sequence is synthesized)
gagaaagttttgtaacttagttcattgatttggaaaattatgccaataaccacccttcctagcaaactgtccctgaagaagaccacgacagttcatttagttttcacaaacagtattagg

SEQ ID NO: 927707 - DNA, 120 bp, Artificial Sequence
  ENSG00000237699_2 (sequence is synthesized)
atatacttctgagcgcaaacccagtggcacagggagtccttggtcgccagggctgtcatcatttctggaggagccgtgttgcacctggggccactgagacccagaagatctgtcctgtgg

SEQ ID NO: 927708 - DNA, 120 bp, Artificial Sequence
  ENSG00000237699_3 (sequence is synthesized)
gagaaaggacttcgcggagctctgtgggggctgcagctgaggagagtgctggagtcttcagtcggatctgcctttcttgctgactcaagaaacagtaaaaggtgacaggaaggtggcccc

SEQ ID NO: 927709 - DNA, 120 bp, Artificial Sequence
  ENSG00000237699_4 (sequence is synthesized)
ggaacaaatggagtcccgcagtggctccagccatgtggaataaaccaaattagtgctggcagaaactgaacctggattatgagtgctggcaaaaatgtaaacaaaattattaaaagaaaa

SEQ ID NO: 927710 - DNA, 120 bp, Artificial Sequence
  ENSG00000248744_0 (sequence is synthesized)
atattaaaagtggagattgaagggaaaatgatgtatagaagagagattttaacttcaaagtgacataagtaatttgaagaagaaatcagggtacagaaggaagatgaagtgagggtacat

SEQ ID NO: 927711 - DNA, 120 bp, Artificial Sequence
  ENSG00000248744_1 (sequence is synthesized)
ggaaaagatagccctctaaaagccaacaagagaggccggagaagacaccaaccttgacagcaccttgttcttggacatttctaccctctagacttctgagaagcatacagcattttggcc

SEQ ID NO: 927712 - DNA, 120 bp, Artificial Sequence
  ENSG00000248744_2 (sequence is synthesized)
cggaaggagtcaaggttattctaccttctccatgctttgataactttaactgtgggattctagttaaaagaacatgattatccaaagaagtgagtgaataacccatgcaaatatcttggg

SEQ ID NO: 927713 - DNA, 120 bp, Artificial Sequence
  ENSG00000248744_3 (sequence is synthesized)
gaggaccaatccaggcacttcaggaatatcaaaaaggccaatatgactgaagcagagtaatgacagagtgatatggattagcctaccatcaagttatttagcctaccatcaagttctttg

SEQ ID NO: 927714 - DNA, 120 bp, Artificial Sequence
  ENSG00000248744_4 (sequence is synthesized)
tttagcctaccatcaagttctttggactacttcttaaaattaagcgggtggagccaagatgactgaataggaacagctccagcctacagctccctgcgtgagcgacacagaagacgggtg

SEQ ID NO: 927715 - DNA, 88 bp, Artificial Sequence
  ENSG00000248740_0 (sequence is synthesized)
tgcgtcgcccacgctggaagctgtagaccggaagcagattgttttgcttattggtgtttaattaaaaaccaaacaacttttcctatta

SEQ ID NO: 927716 - DNA, 120 bp, Artificial Sequence
  ENSG00000248740_1 (sequence is synthesized)
tattggtgtttaattaaaaaccaaacaacttttcctattaacttgatgctacttattaattgaaatgaggagactgactctggatattgggaaaatttatgggcacatacagaggaaaag

SEQ ID NO: 927717 - DNA, 120 bp, Artificial Sequence
  ENSG00000248740_2 (sequence is synthesized)
cagaaaccaacttgactggaatcttgatcttgaacttcttgcttccagaattatgagaaaataaattgttgtttaacccacacagtctattgtacttagttgtagcagtctgagaagact

SEQ ID NO: 927718 - DNA, 120 bp, Artificial Sequence
  ENSG00000248740_3 (sequence is synthesized)
aatacattgataaactggtcagttacaacaatgaatatattatttatacattatataaatgattatagtttctgtattagcttagattttgcaaatttgtcaatagctttgtccaagttg

SEQ ID NO: 927719 - DNA, 120 bp, Artificial Sequence
  ENSG00000248740_4 (sequence is synthesized)
attttctttatatattcctatttcatagactatattagctagatttgtcaatctatcttactcataatgactgaagaacacttttaaattcaatttaaaaggtttttgtcacataaagca

SEQ ID NO: 927720 - DNA, 120 bp, Artificial Sequence
  ENSG00000248740_5 (sequence is synthesized)
agcaacaaatataaaactagaaaaaatataaatatgaatataaatttgaaggaaattaataaaaatcgtattgtaccatatattccagaaattttaaacactgatgaaaacttcaagtgg

SEQ ID NO: 927721 - DNA, 120 bp, Artificial Sequence
  ENSG00000248740_6 (sequence is synthesized)
aaggaatgagagaattgaagtaattcaagtgttatatttcatcttttctatcactaggttgtcatcaattatttcaaatctgtttttttttttattgtaattaaacttctaagttcaggg

SEQ ID NO: 927722 - DNA, 120 bp, Artificial Sequence
  ENSG00000248740_7 (sequence is synthesized)
cattattataccagcaatccagcctgaaggacttagctcatagatgtcttctgaaatgtggaagaaatactttcgtttgtcataaaacctcagcaggagattggagtctggaagagggag

SEQ ID NO: 927723 - DNA, 120 bp, Artificial Sequence
  ENSG00000248740_8 (sequence is synthesized)
tattgggaaaatttatgtctggaatagcaaattgacctcaaaagatatattttgatcaggatgaattccaaagctgaaattagttgttctctgagttcagagttttagattaaacatctc

SEQ ID NO: 927724 - DNA, 120 bp, Artificial Sequence
  ENSG00000248740_9 (sequence is synthesized)
tctcttgatatatatatctatgaccctagtaatcaccattccactctctacttctatgagtttgactaagattccacatgtgaccattattctgagtgttttaaaagcaatatttttcta

SEQ ID NO: 927725 - DNA, 120 bp, Artificial Sequence
  ENSG00000248740_10 (sequence is synthesized)
ttgaagaaatgaaaatagcagtcattcaaaatcctattgtgctatcttttgatcatcataataagcaaacgcaaataattctcccttggtgatccaattaaatgattttaaaatatcagt

SEQ ID NO: 927726 - DNA, 120 bp, Artificial Sequence
  ENSG00000248740_11 (sequence is synthesized)
gtcaaagctgttccttctaaaatttaaggcaaatctaatagattctaaacatagattacaaactcaaacgccctcaggtgccaggcaggagagattagagagccgcctgtcagaatggag

SEQ ID NO: 927727 - DNA, 120 bp, Artificial Sequence
  ENSG00000248740_12 (sequence is synthesized)
tcagaatgacaagaaatcaatagacaatattatcaagtggtcagaatcttgaaagaaggcagaaatttaggtatatttatttctaatttctaaatgttgacaaagatttaaaattttaaa

SEQ ID NO: 927728 - DNA, 120 bp, Artificial Sequence
  ENSG00000248740_13 (sequence is synthesized)
agtaccttgtattttaaattaaccctgttggaagtccagcgtcagctgttggactgctactttgcaattacggcaaagtgggacagctacaaccatctttctggttgagtgcactatcct

SEQ ID NO: 927729 - DNA, 120 bp, Artificial Sequence
  ENSG00000248740_14 (sequence is synthesized)
ctttccctttccgaattcacttatttattaaactacatttgctgctcaagtctgggcttcctggatgtaaaaagttctccgtgatctggcatcactctgccatcctgccttcaaccctgc

SEQ ID NO: 927730 - DNA, 120 bp, Artificial Sequence
  ENSG00000248740_15 (sequence is synthesized)
tgctcccatcagagtggcttccttgcagtcatctgacatattcaacattgttttgccttcactgctgagctcatgaagttggtctatgaatgtgtcatatagtagaaagaaactggattt

SEQ ID NO: 927731 - DNA, 120 bp, Artificial Sequence
  ENSG00000248740_16 (sequence is synthesized)
ggacaaaattctatgctgataaaaaggatgatgaggccaatgctgtggatgtatttatatatctgctgaatctgtcatttaggaattagtaaatagttgctgaatcctttgttttaaata

SEQ ID NO: 927732 - DNA, 120 bp, Artificial Sequence
  ENSG00000248740_17 (sequence is synthesized)
tcgcgtacttgaaaacgataaataatttttcaacctttggttcttcagattgaaaaatttcagctcacagaatctttcccaagatagagaatttctaaacctgtaattatttttgtaact

SEQ ID NO: 927733 - DNA, 120 bp, Artificial Sequence
  ENSG00000248740_18 (sequence is synthesized)
tgcctgtaaactctctttacattttttattctttttgtttcaagtctacaatatttctcgttgtttagaatgaagttgataatattttaatataaagcagagtttctgcattcattagta

SEQ ID NO: 927734 - DNA, 120 bp, Artificial Sequence
  ENSG00000248740_19 (sequence is synthesized)
tgtgtcatagggttttgttgtacagattacttcatgaatccgttattaagtgcagtacccattagttattttttctgatcctctccttccttgcaccctccaccctctgataagaccaac

SEQ ID NO: 927735 - DNA, 120 bp, Artificial Sequence
  ENSG00000248740_20 (sequence is synthesized)
caactgtctgttgttccctctatgtgtccatatgtactcatcattcagcacccacttgtgagaacatacaatatttgtttttctgttcctgaattagtttgctaaggataatggcctcca

SEQ ID NO: 927736 - DNA, 70 bp, Artificial Sequence
  ENSG00000248740_21 (sequence is synthesized)
gtttgctaaggataatggcctccagctgcatgatgctcctgcaaggggcatgatcttattctttcttatc

SEQ ID NO: 927737 - DNA, 120 bp, Artificial Sequence
  ENSG00000248740_22 (sequence is synthesized)
aggtacagaatcaagcaagaattggctaggtgattcttctgctacacctggctaggcttggccgaagctcagggacagctcctctcatatgcctggtaccttgtggatatctggaaaact

SEQ ID NO: 927738 - DNA, 120 bp, Artificial Sequence
  ENSG00000248740_23 (sequence is synthesized)
agttcttgtgtaagtattttagtgtgtgaatagttgtttaaatgtttctgcaagaggatgtgcactggaaggttctatttcatgatcttgacagtgtcactggagcaccctcctggatgc

SEQ ID NO: 927739 - DNA, 120 bp, Artificial Sequence
  ENSG00000248740_24 (sequence is synthesized)
atttctgtatcttcaaaaggaatgccggttaaaatgttaataaagtctctgagcaaagttgcctatacataaaatcccagctacttgagagactgatgctggaggatccttggagcacag

SEQ ID NO: 927740 - DNA, 77 bp, Artificial Sequence
  ENSG00000248740_25 (sequence is synthesized)
gagcacaggagtttgaggtttaagcaagacttcatctctaaaaataaatataaaatgaaataaaatgtcaatgaaat

SEQ ID NO: 927741 - DNA, 120 bp, Artificial Sequence
  ENSG00000248740_26 (sequence is synthesized)
ggcctaaagagagtcttggaacattatgttgtctcctgagagcttgcttagtgggagaatctgacttgcagataatgccaaggggacaataaaagtctagcccaggccctttaagtagaa

SEQ ID NO: 927742 - DNA, 120 bp, Artificial Sequence
  ENSG00000248740_27 (sequence is synthesized)
atggtgaccattattctgagtgttttaaaagcaatatttttctattgaagaaatgaaaatagcagtcattcaaaatcctattgtgctatcttttgatcatcataataagcaaacgcaaat

SEQ ID NO: 927743 - DNA, 120 bp, Artificial Sequence
  ENSG00000248749_0 (sequence is synthesized)
aaggagggacctgtagtcaaaatgcacaaatctgaaggaggcctttgtgcacagaagctgtcctgcctgtaaatgtccccagtcaccagattagtgccaatttattttccagtgaagaca

SEQ ID NO: 927744 - DNA, 120 bp, Artificial Sequence
  ENSG00000248749_1 (sequence is synthesized)
ccaggggtctgggggtggggtggagtttgcaggagggagcaaaaaggaaaaggcatacttagcaccaaccacatgagagccctgctctgaagtaacggccaaatgagcgtccactgagtg

SEQ ID NO: 927745 - DNA, 120 bp, Artificial Sequence
  ENSG00000248749_2 (sequence is synthesized)
aagctgagacacaatcacggaagagcaagatttaaaagccggcagtctgactcctgatctctcactcatccactactgtagacagccttctctgtgtttcattagcacataacaagaatt

SEQ ID NO: 927746 - DNA, 120 bp, Artificial Sequence
  ENSG00000248749_3 (sequence is synthesized)
catgctctcggagtacaaagcagggtttgtaatatcaataaaagagacactttcatagtgttttagctgagtcttgaggagaaaagtagagttttagtgaaggaagaaagaaaggcacta

SEQ ID NO: 927747 - DNA, 120 bp, Artificial Sequence
  ENSG00000248749_4 (sequence is synthesized)
catgctgattgtatgtttgaaggcgctgctgttaagaggtgaagatgctgttgtggaagatgaatctgggatggactaaggatggaacactaacatttaaagaatggaggaagaaaagca

SEQ ID NO: 927748 - DNA, 120 bp, Artificial Sequence
  ENSG00000275286_0 (sequence is synthesized)
aagcaagttatgaatggtttatatgatgtgttttaacttgttttcttgcttgtgcaaaggctataccaatgtacaatgccaccagcaatgtatggagttcattttaaaacacccttttgc

SEQ ID NO: 927749 - DNA, 120 bp, Artificial Sequence
  ENSG00000275286_1 (sequence is synthesized)
caccattgaatattaccaatttagtttttgtcctccattttgtttattttatttgtataacatggtatatttgttttaatttgaatttctttaaataactgtgaaggtaaacatttatag

SEQ ID NO: 927750 - DNA, 120 bp, Artificial Sequence
  ENSG00000275286_2 (sequence is synthesized)
aattttatacgtgagaattagatatcccttataattgttagaaatcctttaacacatttctgcaattttttcaattatattgttatgtttacagcttattttcattataatgaattttaa

SEQ ID NO: 927751 - DNA, 120 bp, Artificial Sequence
  ENSG00000275286_3 (sequence is synthesized)
tatgtatcattgatgatttcttttataacctcttatattttttcaaaattcagaatactgtctctccaaatagctgcttatggacattccagaaataaagaatgtcaccacctccagaaa

SEQ ID NO: 927752 - DNA, 120 bp, Artificial Sequence
  ENSG00000275285_0 (sequence is synthesized)
tccgcctggcaaccgccccgtctgagaaactttccccttctcttgaggtggtgcctgggtatacagggatgttgaaggggtccacatggcatcatgagagtggagtgaagcaggacatag

SEQ ID NO: 927753 - DNA, 120 bp, Artificial Sequence
  ENSG00000275285_1 (sequence is synthesized)
agtaaagaatttaaccttgctcaaagagagacatggcttttgtccttggcccctggaaggtaatctctaagcccttggaatgcttgcctggtaagagtgcctttgtttacctgggggcat

SEQ ID NO: 927754 - DNA, 120 bp, Artificial Sequence
  ENSG00000275285_2 (sequence is synthesized)
tggtccataacagatagtctaacaaggggagccacggcagggcttttgttcacatcatatcagcttaatctctgaagatgctgaagactgagcccagccacatgggcagccaaccagatt

SEQ ID NO: 927755 - DNA, 120 bp, Artificial Sequence
  ENSG00000269926_0 (sequence is synthesized)
ttgaacatcaagtgtattcatgaacagtgagtatcttatcttcatgtaaacagttctagatggaagacccagatggcactcctcccggggaggggttccagcccccaccctctcagcccc

SEQ ID NO: 927756 - DNA, 120 bp, Artificial Sequence
  ENSG00000269926_1 (sequence is synthesized)
tcccctgccagctcaactctgcagtacacgatgggggaaggcttaaacgcagctgccaggtgtaatttttcaagtgtcaaagatcccaagtgatccctgacacccaccccttcctactct

SEQ ID NO: 927757 - DNA, 120 bp, Artificial Sequence
  ENSG00000269926_2 (sequence is synthesized)
tacattcatgcgtctgtaagatagctgcctacaacaggtcataacaaaaataataaggtacatgctacacacacatccagctggaagccttgttggcccctaagcctttgtttcatgcta

SEQ ID NO: 927758 - DNA, 120 bp, Artificial Sequence
  ENSG00000269926_3 (sequence is synthesized)
gaggggtatgtgtccccaatgcacagccacccgcacacaactcaatgagcttcctgggaaacactattcccccacctccaccttaggtggctgcctcagttttccaaccacaggaatcag

SEQ ID NO: 927759 - DNA, 120 bp, Artificial Sequence
  ENSG00000269926_4 (sequence is synthesized)
tccctcagctcctgcctctagtctccaccccaaaagttcagtcgtctctgtcttggagggcactgtcggccccctcaggttgaagttcaacactcctcaatgagcagctgttccgagctg

SEQ ID NO: 927760 - DNA, 120 bp, Artificial Sequence
  ENSG00000269926_5 (sequence is synthesized)
tacagcttcttcttgatgactcggaagccagtgctcagcgtcagggactggctgaagccagggaggaagggagagttggcggagctaaacagcccctggatcttgggccagagtcgtgag

SEQ ID NO: 927761 - DNA, 120 bp, Artificial Sequence
  ENSG00000269926_6 (sequence is synthesized)
tccaggcgcagcacgagggtcagctggaaggtgggcaccaggctggggtcgagtgccagctggcccacgctgtggcagctcttgccctgctccacgcagacgtccagcagcgccccccgc

SEQ ID NO: 927762 - DNA, 120 bp, Artificial Sequence
  ENSG00000248296_0 (sequence is synthesized)
caaggggctcggcaacgtgctttggtgaaaatcctggaggtgtgggtaggctttcttcagcaaggggctcggcaatgtgctttggtgaaaatcctggagagagtttggctatctcttgag

SEQ ID NO: 927763 - DNA, 120 bp, Artificial Sequence
  ENSG00000248296_1 (sequence is synthesized)
ctgcctccagagagcaggtttataaagaagggaactgactgtttgaggtctgcatcaccggactccctgccagctggcttccactgggtttggccaacggcacacacaggcagatcagaa

SEQ ID NO: 927764 - DNA, 120 bp, Artificial Sequence
  ENSG00000248296_2 (sequence is synthesized)
gacagaaggagagaggggttgggtcatgtcttccttgctgcttccctgccttggtgctatatctctggcatgcattcctccatgatggcagcttctgctgaggggccccaccagggttcc

SEQ ID NO: 927765 - DNA, 120 bp, Artificial Sequence
  ENSG00000248296_3 (sequence is synthesized)
cagaaacatggaaaaagttaacatgcttgctgatagtgttgatactggccaacctcattacagcctgcttgcagatttcttgatagggaaggtaataaatatttgtgtggcttatatcac

SEQ ID NO: 927766 - DNA, 120 bp, Artificial Sequence
  ENSG00000248296_4 (sequence is synthesized)
tctttactgagtaattttttacctgttgcaaaattatcctaactgaaacagaggacttgaaaaagtgaggacatggcactgattcaaataaacctcaattgtaacaatgtaaccggggaa

SEQ ID NO: 927767 - DNA, 120 bp, Artificial Sequence
  ENSG00000248296_5 (sequence is synthesized)
aacaaacacacagctgttctggtgaaaaaatcctgcaatcatttaaaatcttggagtcgagccatgtggagccaagatggctgactagaagcagtggcgattgggggctcccgtggaaaa

SEQ ID NO: 927768 - DNA, 120 bp, Artificial Sequence
  ENSG00000272397_0 (sequence is synthesized)
tctcctgtaaggaccaggggagcaggcagctgcaggagaagggggatgcggggggccatgggattacaaattctcacagcagccgagcccaggcagagaaaccctccctgtgaagtgagt

SEQ ID NO: 927769 - DNA, 120 bp, Artificial Sequence
  ENSG00000272397_1 (sequence is synthesized)
tgaatagtgtccttcccccataccccctaaaaactgacgtccacttggaacctcagaatgagaacttattgggaaatagggatttttgcagatgtaatgatttgaggatgtcagggttaa

SEQ ID NO: 927770 - DNA, 120 bp, Artificial Sequence
  ENSG00000272397_2 (sequence is synthesized)
aatgatcagactggtgtctttataagaggaaagtgaggaaggttgggacacagaggcacacagcatagaaggccaggtgaagatggtggcagaggttggagtgatgatgctgcctcaagc

SEQ ID NO: 927771 - DNA, 120 bp, Artificial Sequence
  ENSG00000272397_3 (sequence is synthesized)
taagggacaccgggagccacttgaagccggaagaggcaaggcaggattccccgctagagctttcagaggaggcgtggccctgccaacaccttgatttcagacttttggcctctaaaattg

SEQ ID NO: 927772 - DNA, 120 bp, Artificial Sequence
  ENSG00000272397_4 (sequence is synthesized)
tgagagaataactttctgttttgttaaagtcgtccaagttgtgataatttgtttagacacacgcaggaaactaatacagcctggtgagatgataaggctgggtaaagtccaggaaacaaa

SEQ ID NO: 927773 - DNA, 120 bp, Artificial Sequence
  ENSG00000272397_5 (sequence is synthesized)
ggggctttccagtgctttttagtggcaaagttcctcatcactatggttgtgaaacaggacagctctatccaggaaacttgctctgacttcctgtctggtgtcggtagcaggtgattgata

SEQ ID NO: 927774 - DNA, 120 bp, Artificial Sequence
  ENSG00000272397_6 (sequence is synthesized)
tcttccttgtaagtcatgagtcttaaattgagtggtgcctccatttaagaaaaggaggttagtgcatatttctgagtgcttgcttcttgaatgaatttgagagatattcactagagacat

SEQ ID NO: 927775 - DNA, 120 bp, Artificial Sequence
  ENSG00000272397_7 (sequence is synthesized)
tgaagtaggtactagtcacagacagtgacctcatggcgttttagcaaaaggagaacgagttctgtgaattttggtaaagtgcttttatgtgcttatttatggctgtgctatcatctgaag

SEQ ID NO: 927776 - DNA, 120 bp, Artificial Sequence
  ENSG00000272397_8 (sequence is synthesized)
atgaacaatgctgcatgctgtgcaaatatagcaagagtgccttcataaataatgccagaaacactagtggtgccaaggcagatagaatatatcgatggcaagttaatgtgttaggcccct

SEQ ID NO: 927777 - DNA, 120 bp, Artificial Sequence
  ENSG00000272397_9 (sequence is synthesized)
gggtttgcttaattatataggctgttttaccataggcaaatgaagaaaattgccttagctaaacgcagatttgggaatccataatcctgtctctcttccctacccccaggtttaagatag

SEQ ID NO: 927778 - DNA, 120 bp, Artificial Sequence
  ENSG00000272397_10 (sequence is synthesized)
atccttctaataatgatgcaatttgcttggctccccctgaattctatattcttacaagacccagtgctgttgttctcattttggtgatgagaatggaatgtgttttttcttcttgtaatt

SEQ ID NO: 927779 - DNA, 120 bp, Artificial Sequence
  ENSG00000272397_11 (sequence is synthesized)
atcttctacaagcaaccaaaatggattttgagcttgtccaaagatgtcaacatctgcttattttcaggctgtttgtctgcataggaggtagtagtctaaatctatttctcaatttatgca

SEQ ID NO: 927780 - DNA, 120 bp, Artificial Sequence
  ENSG00000272397_12 (sequence is synthesized)
aaattgcatcacccacacattcaggccatattcctgagatgggaaaatgggagataagtttacttatagggaatttctctctagaatgtgatcatgtagcacgtatttaaaagataagag

SEQ ID NO: 927781 - DNA, 120 bp, Artificial Sequence
  ENSG00000272397_13 (sequence is synthesized)
agagagttttcatggggttgcataagacaaaggtgaattgttctcagaatcataccaaatgacaaggtggtaggcagaataatggccccctacagatgttcacatcctaatccctggagc

SEQ ID NO: 927782 - DNA, 120 bp, Artificial Sequence
  ENSG00000272397_14 (sequence is synthesized)
ctgtgaatatgttacgttacatcacaaatgacattttgcggctgttattaaattcagtatcttgagatggagaggttatcctggattatctggatgagcccagtataattatgatggtct

SEQ ID NO: 927783 - DNA, 120 bp, Artificial Sequence
  ENSG00000272397_15 (sequence is synthesized)
ttataaatagaagagggaggcaggccagttagtgttagactgatgcaccatgagactcaactggccatggccgagtttgaaggtaggcacgaggctacaacacaaggaatgtaggcagca

SEQ ID NO: 927784 - DNA, 120 bp, Artificial Sequence
  ENSG00000272397_16 (sequence is synthesized)
tatagaagctaagaaaggcaatgtatcttggctgacactttgattttagctgagtgagactcatgtcagacttctgaccatcagaactgtcagataataaatgtgtgttgttttaagcca

SEQ ID NO: 927785 - DNA, 120 bp, Artificial Sequence
  ENSG00000272396_0 (sequence is synthesized)
gaaagccatatcatttggcttgtttacacctttggctagtgtgaataatgctgctatgaacaaagacatgcagatacctgctggggcccctgctctcagttcttttcagaatacaccaga

SEQ ID NO: 927786 - DNA, 120 bp, Artificial Sequence
  ENSG00000272396_1 (sequence is synthesized)
tacatgcagccactcctccagcgtcccctctcccatagggcaagtccggatgctccaggctctccccagtgttgctgttagatttctctgcagagctgggatctccattccccatacttt

SEQ ID NO: 927787 - DNA, 120 bp, Artificial Sequence
  ENSG00000272396_2 (sequence is synthesized)
gctgctttttgtttgtttgtttcctgtttctcaaggcatataaagctgcaggaatacagatgggattggatctgcggcacctaaaacaaatgctggataaacatttccagaatgtatgaa

SEQ ID NO: 927788 - DNA, 120 bp, Artificial Sequence
  ENSG00000249160_0 (sequence is synthesized)
ctgttagatcatggcagctctctttagagccatgtggttatggtgggaagaaggaacatctcccagaagaaggttgactattaccctcagcagacaaaagagtcaatgtccgccacatcc

SEQ ID NO: 927789 - DNA, 120 bp, Artificial Sequence
  ENSG00000249160_1 (sequence is synthesized)
ctgctccagcgatctgggtgcgtttctcttctacaactctctttttggggatgtcgccaataatctatatttcaacaagatggataaagctgtgaaaaggatcggattctgcccaggact

SEQ ID NO: 927790 - DNA, 120 bp, Artificial Sequence
  ENSG00000249160_2 (sequence is synthesized)
tcaagtatgtgacctcagcagaactgaccaatacattactggagcagaataatcagtcttgaaataaacccatggataaaggatggattgtccaataaatgacattacgacaattaggta

SEQ ID NO: 927791 - DNA, 120 bp, Artificial Sequence
  ENSG00000249160_3 (sequence is synthesized)
ttgtgtcctcccaaaagatacattgaagttctaacccctggtatcagtgcatgtggcctttttggaaatagggtctctgcagttgtaatcaagatgaggtcattaggagggccctaatcc

SEQ ID NO: 927792 - DNA, 120 bp, Artificial Sequence
  ENSG00000249160_4 (sequence is synthesized)
aatatgactgacatctttataagaagaggaaaagagacacaaacacacaaagaggatgccgtgtgaagacagaggggccgaggctcaagtgattcttctataagccaaagattgctggtg

SEQ ID NO: 927793 - DNA, 120 bp, Artificial Sequence
  ENSG00000249160_5 (sequence is synthesized)
acatcaaagcgaagagaaagccgtggaacagatagatgctcccctagagcccttcaagaaagcacagccctgctgcctccttgcaaacagaaccatgaaagaataaatttctgctgtttt

SEQ ID NO: 927794 - DNA, 120 bp, Artificial Sequence
  ENSG00000249160_6 (sequence is synthesized)
ttccaagggaaccaggcctcagcatcaggcctgttctgccctggcctcggattgtagcactacgccagcctgggacatcatcggcatcgattctactccatcctatcagtcacaagggag

SEQ ID NO: 927795 - DNA, 120 bp, Artificial Sequence
  ENSG00000249160_7 (sequence is synthesized)
ccacaggccagccctgggttcccagggatggagagactctgcttctgcatgcgggaatgacacagtcacactgcagaagaacacgagtgtagaaggcagcatcatggccatttttggtaa

SEQ ID NO: 927796 - DNA, 120 bp, Artificial Sequence
  ENSG00000249163_0 (sequence is synthesized)
gagggcggggaccgctgcgcctacctgcctttccctccatagggacttcccaaaggaaaggagggcgtttaggggctttcacacgcctgatcttaaacacagcgccctgacccctcccca

SEQ ID NO: 927797 - DNA, 120 bp, Artificial Sequence
  ENSG00000249163_1 (sequence is synthesized)
ccaaaaacggcaaaatgtcatttttgggggcaaatctaaggttttccctacaattgttcaagctttcacactaaaacatttacctaaaaacgggcagaaattcagccttaaacccacaaa

SEQ ID NO: 927798 - DNA, 120 bp, Artificial Sequence
  ENSG00000249163_2 (sequence is synthesized)
tctcacgatggtatagaccctgggcccactcaggtttcctgaaaactaaacagttctggagttaggggtttggagaacgggctattgttaaagaaaaaagtatttagtgacacttgttaa

SEQ ID NO: 927799 - DNA, 120 bp, Artificial Sequence
  ENSG00000249163_3 (sequence is synthesized)
agagggctttattcaggaccatcgcaacaggtatagggaccactgactgcaatggagacttgcagtagggaaagagatattgggctcaactcctcatacagcatgggcaagtggagattt

SEQ ID NO: 927800 - DNA, 120 bp, Artificial Sequence
  ENSG00000249163_4 (sequence is synthesized)
atagccaaggagcggtgacaggccaagataatgaggcatcacctgggggatggtggagactgaagaacctgatcagatattgaggatgatcagctatcaaggatgggggtttattgctaa

SEQ ID NO: 927801 - DNA, 120 bp, Artificial Sequence
  ENSG00000249163_5 (sequence is synthesized)
tctgacttagcaaagttctttgcttaaactggattttacaaagaaagtgtacagaagagcctagcagaagattcagaaacctgactaaagttggccaagcaaaaaaaaaaatctttgtat

SEQ ID NO: 927802 - DNA, 120 bp, Artificial Sequence
  ENSG00000249163_6 (sequence is synthesized)
ctgaagggatatgttatcctctggacaaattgagggggactgtgcgttaacaatcttagcagtcctcttcagttgtaccaccatctccactttaataaaaaaaaattttctttcaaatct

SEQ ID NO: 927803 - DNA, 120 bp, Artificial Sequence
  ENSG00000249166_0 (sequence is synthesized)
agagatgtgaaaactggaagagaaacaggaagtacctccaggattcacctaaatagatgctgcggtttctatcaaaccacaggccaccccagcatctcagtggcttctataggttgtcct

SEQ ID NO: 927804 - DNA, 120 bp, Artificial Sequence
  ENSG00000249166_1 (sequence is synthesized)
cagacaccaattccaccctccacctttctgtgtccgtcccagaccaaggcagcccaggactggtatccttctaagaagaggaaggcacatcagaggagaggccatgtgaggacaccatgg

SEQ ID NO: 927805 - DNA, 120 bp, Artificial Sequence; identical to SEQ ID NO: 855827
  ENSG00000249166_2 (sequence is synthesized)

SEQ ID NO: 927806 - DNA, 120 bp, Artificial Sequence
  ENSG00000249167_0 (sequence is synthesized)
gggtaaatgttcaagaaactcttctccaaatccaaattccacttggattccacttcgggaggaaagtccatgtgaagacacagtgagaaggcaagaaggcatccatctgcaagtcaggaa

SEQ ID NO: 927807 - DNA, 120 bp, Artificial Sequence
  ENSG00000249167_1 (sequence is synthesized)
cttggacttcccagcctccagaactgtctcacatgaaggaagatgttcaccctgaggacaaggcccctgcatgcattctcaggacgttcatgttttctttacccattcccttccattcaa

SEQ ID NO: 927808 - DNA, 120 bp, Artificial Sequence
  ENSG00000249167_2 (sequence is synthesized)
aggacgttcatgttttctttacccattcccttccattcaaatgtaagtaaataagagacaaatttttttataggtatgaatttgaatcagctctaatttataaaaagagaaaggttgttt

SEQ ID NO: 927809 - DNA, 120 bp, Artificial Sequence
  ENSG00000249167_3 (sequence is synthesized)
tcaaactttagtttttgcattagataggtttggctagttatgctgcaacaagaaacaactcttcggggcttgccacagcaacattttgtttttcactcaatgtgaacttatagcggaggg

SEQ ID NO: 927810 - DNA, 120 bp, Artificial Sequence
  ENSG00000249167_4 (sequence is synthesized)
gatgctctgctaatcaagaccacccaggcacccagctggcggaaacaccatctcaaagcagctcacagggtcacagagctgagcgaaggtgacatcaccaatcacaaactcattctttat

SEQ ID NO: 927811 - DNA, 120 bp, Artificial Sequence
  ENSG00000249167_5 (sequence is synthesized)
gtttttgccctggaatgacatatcatttttgttctcatttcatgaccaagataagtcacataggccatgccatgtggggacaaggaaaagcaatcttaacatatgctttgagaaggaaaa

SEQ ID NO: 927812 - DNA, 120 bp, Artificial Sequence
  ENSG00000249167_6 (sequence is synthesized)
atggagtatttgtgagtgttctaattaccactacagatttaaaaagagaaaaatcattagtaacaatgagttaggatatacatcactgttctacttgttaattgcacctcctgctagcca

SEQ ID NO: 927813 - DNA, 120 bp, Artificial Sequence
  ENSG00000249167_7 (sequence is synthesized)
ataaaagcttagttgtgccatctcttaagctgaggaggttcttcctggaccatatattctccatgtttactacacggaaagggggctttttggatattttgctgatgtttacatattgtt

SEQ ID NO: 927814 - DNA, 120 bp, Artificial Sequence
  ENSG00000249167_8 (sequence is synthesized)
aaattctagtttagcaaaatttaacattgtacatatatacctatatattgtagcatattgtatagataagcacagggccactctataataggttcaaaaccaaaagataaaaatagttct

SEQ ID NO: 927815 - DNA, 120 bp, Artificial Sequence
  ENSG00000249167_9 (sequence is synthesized)
acacaatgaataaccagactgaaaattccacttaaatggttacctaatattagtctgtatagcatcgtcttctttctagaaatacctacatatgtatatttataatgcttaggaaaaacc

SEQ ID NO: 927816 - DNA, 120 bp, Artificial Sequence
  ENSG00000249167_10 (sequence is synthesized)
aatagtaaatagtatattaatttttattttacttttcttttatccgcattttctaaattttcaatgatgaatgtcctaaataataaaattattatctcattgcatttgtggtcaggtgaa

SEQ ID NO: 927817 - DNA, 120 bp, Artificial Sequence
  ENSG00000249167_11 (sequence is synthesized)
taataaaattattatctcattgcatttgtggtcaggtgaaataactgaaagcaactgtgataggcaggattctgagatagccccaagatcccaagattcctccccacagtgtaccttgta

SEQ ID NO: 927818 - DNA, 120 bp, Artificial Sequence
  ENSG00000249167_12 (sequence is synthesized)
tataaggaacacaccttgtataatcctctcctattgagtgtgggcggcactgtgaataccgtgggatattgctcctgtcactatgttatgttatatgacaaaagggattttgtggatgta

SEQ ID NO: 927819 - DNA, 120 bp, Artificial Sequence
  ENSG00000249167_13 (sequence is synthesized)
attcaggtccaaaataagttgagtttgagttaatcaaaagagatattgccttgggtgggcctgagctaatacagagacaagcagcagcagaggccatcctctactgaccgtgaggaagta

SEQ ID NO: 927820 - DNA, 120 bp, Artificial Sequence
  ENSG00000249167_14 (sequence is synthesized)
agctgcccagttggtagaggaggggaccatggttcagcatgagaaggtggcatctgggaggcctgactgacagccagcaagaaaactggaacctcaggaatatagctgcaaggaaatgaa

SEQ ID NO: 927821 - DNA, 120 bp, Artificial Sequence
  ENSG00000249167_15 (sequence is synthesized)
ttctaccaacaactggcgagcttggaagagggctcttcctctcaggtgagctagcagccctaacctgctacttgattttagcctggcaaagtcttgagcagagaccccagctaacccatg

SEQ ID NO: 927822 - DNA, 120 bp, Artificial Sequence
  ENSG00000249167_16 (sequence is synthesized)
cctggactgctaacccgacaggatcaatagataatgaatttgtgttgtgttaagtcactaagtttgtggccagtttgttacacagtaaaaacaaaacaaaacaaaacaaaatacacagca

SEQ ID NO: 927823 - DNA, 120 bp, Artificial Sequence
  ENSG00000249167_17 (sequence is synthesized)
atgtcaacaactgtcagaagattgttctgcataaagtcaagaaaaagtgaggataaacacatatttaaaaaaaattttttttcaaatggaaatcaaaattgcagttacctttgtgggaag

SEQ ID NO: 927824 - DNA, 120 bp, Artificial Sequence
  ENSG00000249167_18 (sequence is synthesized)
tttgttattgggaaggggcaggcgggagcctgctggaaatgttctacatcttgatccaggtagtgattggtgcagatattaaaattcatcgagatgtatacttaatgacctgtgtgcctg

SEQ ID NO: 927825 - DNA, 120 bp, Artificial Sequence
  ENSG00000249167_19 (sequence is synthesized)
cagcctgagcagattatgacagatgtcaaagagaacttcagccttagctgatatgttagctgtaatcttttaatgttttagaatgagagtgtatgtatgtattactcatgtgactaaaac

SEQ ID NO: 927826 - DNA, 120 bp, Artificial Sequence
  ENSG00000249167_20 (sequence is synthesized)
attaactttttaaagtcaactttgtcttccctcttgccccataaccatgcttttcccctttatcttcctttgaacaatattaattaaggcctgttgcagacatatgcattctgagccttc

SEQ ID NO: 927827 - DNA, 120 bp, Artificial Sequence
  ENSG00000249167_21 (sequence is synthesized)
gtcctgccaaatcagaaaaataaataaaaatagacgtagtgcaggagcgagttacaagaaaggttttgttcatcgattttcttaaatggaaaagttttaaaggatgagggtaagtgaacg

SEQ ID NO: 927828 - DNA, 120 bp, Artificial Sequence
  ENSG00000249167_22 (sequence is synthesized)
gcgagcttttctgattctgattactgttatcaagaggtagattccagaagcgatggacgctctacgtagttagatgaattggatagaagccggtgcggttaaaaatacacttggaagata

SEQ ID NO: 927829 - DNA, 120 bp, Artificial Sequence
  ENSG00000249167_23 (sequence is synthesized)
agaacacagctattaattacgcacatacacacgttaataaagcatgtgaagtaagcaaataaactacagtgcagagaatggcgtttttaacgacggcgatctattttaaaacttaatgaa

SEQ ID NO: 927830 - DNA, 120 bp, Artificial Sequence
  ENSG00000249167_24 (sequence is synthesized)
gttcacattttgtggactggtcttagaaataagtaaacttcagaaataacacgcatacaattccagtgagaacccaaaaggtttatggaagaagaaaatcgcaaccacttccaaggcgct

SEQ ID NO: 927831 - DNA, 120 bp, Artificial Sequence
  ENSG00000249167_25 (sequence is synthesized)
attgttatgatcacatgaagaatggcaggcacagccttctttcaccacttgaactttcaatagctacaaagtcttgcagttacaggcttgtgccaactcgtcgggccacaccacgttccc

SEQ ID NO: 927832 - DNA, 120 bp, Artificial Sequence
  ENSG00000249167_26 (sequence is synthesized)
ctccccctgccgctgcgccccgaaatcaactgcgcgccgcggctcttgctccccaagggggcttcgcagatggtacggatcctagtcgcaacctttaaacaaagtaacatcgggcggccc

SEQ ID NO: 927833 - DNA, 120 bp, Artificial Sequence
  ENSG00000249167_27 (sequence is synthesized)
ccctaattgggactaagaccactaataagtccacgttccctctttggtcgcttctctaagtacagacatctgcttaagaggcttcacgaagaataaatgcacatgggtcaacacccattc

SEQ ID NO: 927834 - DNA, 120 bp, Artificial Sequence
  ENSG00000249167_28 (sequence is synthesized)
tctcttcaggtcagagtccctgaaaataaatcttctcaccacagaactcaggggtgtgtttatttatttttgtttaataaaatatttattgaacttttattgaagttcaattaactttat

SEQ ID NO: 927835 - DNA, 120 bp, Artificial Sequence
  ENSG00000249167_29 (sequence is synthesized)
ttattataaaacaatattatactgatattgtcagaaatttaaagacaagacaatatcctcatcacccctgcactggaaacactgacctgatttctatttttaggtgttactttctgggct

SEQ ID NO: 927836 - DNA, 120 bp, Artificial Sequence
  ENSG00000249169_0 (sequence is synthesized)
aggaatccttggttagagcttctgcatctgcttgcagatgggagaagagagtgagaaagaaaagtggccaaattcaaatacctgtggcacgttcaagtgggaaaataaagaagaaaaagc

SEQ ID NO: 927837 - DNA, 120 bp, Artificial Sequence
  ENSG00000249169_1 (sequence is synthesized)
ccataccacttcagtcttttttgattatattaaatatccagagttgatgagctggagaatgcgactggcagcacaggcctagggcaccagagggcagactgtacagagacctgtgagaat

SEQ ID NO: 927838 - DNA, 120 bp, Artificial Sequence
  ENSG00000249169_2 (sequence is synthesized)
tgtaatacaaatgtaatctttagaagtaattttaaagcagcaaatgtagaaatgccaactctcaagtaaaagaaaacaattttcctaagccaaatgtcttttgtaagagatttcaatggt

SEQ ID NO: 927839 - DNA, 120 bp, Artificial Sequence
  ENSG00000249169_3 (sequence is synthesized)
catttgattttagtttaaagatcatctgaccttatgattcacccgattcttaaatgcacatctcaaatataattgtcttcatttggagttaatgtataaaaaataaaaacagtgaaataa

SEQ ID NO: 927840 - DNA, 120 bp, Artificial Sequence
  ENSG00000249169_4 (sequence is synthesized)
atatccaggtttgtgtgacgcaatcccaagtaatattggtatcactgtactatgagctataagagaaatgttttaaacttcctattttaaggaatagttttttattatatcatggcttat

SEQ ID NO: 927841 - DNA, 120 bp, Artificial Sequence
  ENSG00000249169_5 (sequence is synthesized)
aagactactcaacttgtgaaagtccaacttgcaagcatccttaatatcatttcaggaaaaaagtcacctagctaaatttttacatatataacaatataacaataataacacttattgaaa

SEQ ID NO: 927842 - DNA, 120 bp, Artificial Sequence
  ENSG00000249169_6 (sequence is synthesized)
ctgcactatatgacacaccatgtcatgaatgaagcatatggattattttacttaagccttacaactgccatgagaaatactgttttagtctttactacgacagttggaaatgtacttttt

SEQ ID NO: 927843 - DNA, 120 bp, Artificial Sequence
  ENSG00000249169_7 (sequence is synthesized)
tttcaatgttgggaacaaacagaacttcaactctgtattctacttgagcctttttcctttctccacttaactcttcattccactgtagcttatagatacttctttggagagttactattt

SEQ ID NO: 927844 - DNA, 120 bp, Artificial Sequence
  ENSG00000249169_8 (sequence is synthesized)
ggagacaagttgtaaaaaaagaatgtcactatttttcctgctgagaacatgcttttggttttgcaagtaaaaattcaaagttaattcccacaaagaaataaagattaaaataaaagttaa

SEQ ID NO: 927845 - DNA, 120 bp, Artificial Sequence
  ENSG00000237037_0 (sequence is synthesized)
tgctgctgcccccaaggaggaggctgccgtcttatcccaggagggagagcaggaaaataaaaaggttcaaaaggaagttgctgcgtatccatctgaggcctctgaggacagcaaagagca

SEQ ID NO: 927846 - DNA, 120 bp, Artificial Sequence
  ENSG00000237037_1 (sequence is synthesized)
taacggcagccccatcgtagacagggacattcgcatcccgagccctggatctctgaaaaccagcccagaatttggaagctggaaggaactttagatcgtccattctgagtgtctctcttc

SEQ ID NO: 927847 - DNA, 120 bp, Artificial Sequence
  ENSG00000237037_2 (sequence is synthesized)
gctggcgttttcccactgaggttatgtaaacatgaagaggagcctacaagtgtcaaggaaaaaacgacagctaaccacagggcaggccatgggcaagatatctcagtgttctccgctctc

SEQ ID NO: 927848 - DNA, 120 bp, Artificial Sequence
  ENSG00000237037_3 (sequence is synthesized)
tcccacctcagcctcccaagcagctggaactacagcccacaggggagatggtcaggccagtgtgggggctaatgaataaatgctacactgtgcccactcagagacgcaaagtcaagagta

SEQ ID NO: 927849 - DNA, 120 bp, Artificial Sequence
  ENSG00000237037_4 (sequence is synthesized)
tgggtcatatggtaagtgtaagtgtaagtttaattttgtaagaaactcaaactttttcaaagcggctgtctcaccagcaataaccgagaggttccagttgttctacatcctctccagcat

SEQ ID NO: 927850 - DNA, 120 bp, Artificial Sequence
  ENSG00000237037_5 (sequence is synthesized)
ttgttatctttgaaagccattctaaaaggcatatttcaatttttattagatcggtattgaagatttacattattaaactatgtaaacaggccaggcgtgatagtttacacctataatctc

SEQ ID NO: 927851 - DNA, 120 bp, Artificial Sequence
  ENSG00000237037_6 (sequence is synthesized)
tgcactttgggaggcgaaggcaggaggatcacttgagctcagaagttccaggccagcctggtcaacatagtgagactctgtacaaaaaataaataaataaatcagaaaaaaattagctag

SEQ ID NO: 927852 - DNA, 120 bp, Artificial Sequence
  ENSG00000237037_7 (sequence is synthesized)
ttgagaggtcaacatgggaggatcgcttgagtccaggacttcgagaccagcctggacaacattgggagacactgtctatttaaaaaaaaaaattagctgagtgtggtggtgccctgtgat

SEQ ID NO: 927853 - DNA, 120 bp, Artificial Sequence
  ENSG00000237037_8 (sequence is synthesized)
ccaaggttgaagaggttgtcctgtcataaagcccccctaagacacgatgtcacacatagacaccactctctgtgcgaaagggggggcctgtgcactgaactcccagacttagctgggcct

SEQ ID NO: 927854 - DNA, 120 bp, Artificial Sequence
  ENSG00000237037_9 (sequence is synthesized)
cccaagaggaggtggataagctgcctgacactgatatggtaaaaggattatctgcaaatttctagcgtcatcaagactggcctctttggtcacgacccccaggagacctggaggactgaa

SEQ ID NO: 927855 - DNA, 120 bp, Artificial Sequence
  ENSG00000237037_10 (sequence is synthesized)
ggactacaccatctgtcgctcgctctaacgagccggcgttgccgccaggggacgctcgggccgcaggaggtcgctgggtcgtgagctggcgccggggacgccgagcgactgcggggtttc

SEQ ID NO: 927856 - DNA, 120 bp, Artificial Sequence
  ENSG00000237037_11 (sequence is synthesized)
cctcagcgtcctgctatccggctgcccgccgcgctccttggtagtgtccgtgggcgcgcaggccttgaagaacctcctcgtggcgggaccccgagcgcaggagaggtgtcaaagagctgg

SEQ ID NO: 927857 - DNA, 120 bp, Artificial Sequence
  ENSG00000237037_12 (sequence is synthesized)
actgaacgtctccagcgtgggtccaactgagcagccatggagcactgcagagtgggaggcagcagggcagggaggcagtgctggaggctggctcaaccccaagaccagcaggccaagctg

SEQ ID NO: 927858 - DNA, 120 bp, Artificial Sequence
  ENSG00000237037_13 (sequence is synthesized)
ccatcccaggggagcgaggacgtctgtgcagagctgagaggcagcagccatgtgtgaacagactgggcctcatcctggccccaccgactttgtgtggacagagcctgtttccctgtctgt

SEQ ID NO: 927859 - DNA, 120 bp, Artificial Sequence
  ENSG00000237037_14 (sequence is synthesized)
tttttttttttttttttttggagacggagatttcctcttgttgcccaggctggtggctcccctccattgtgcaatgatgcaatctcggctcactacaaccttcacctctaggcttcaagc

SEQ ID NO: 927860 - DNA, 80 bp, Artificial Sequence
  ENSG00000237037_15 (sequence is synthesized)
tcagcctcctaagtagctgggattacagagaccgggttcttccaagttgtccaggctggtcttgaattcctggggtgaag

SEQ ID NO: 927861 - DNA, 120 bp, Artificial Sequence
  ENSG00000237037_16 (sequence is synthesized)
gctgggattacaggcctgagccactgtgactacctgatacgtctcttctctcttgctgctttcaaaatcctgtcttttgtgggagggcagctgccgagctctggacttctacgggatcat

SEQ ID NO: 927862 - DNA, 120 bp, Artificial Sequence
  ENSG00000237037_17 (sequence is synthesized)
accagtcctggctctttgccccaggagcaaattaaaaggcagcttcgattttcaatcatggatctgatgactttcaacaaactttcctgaggaaagtgctgttctcaccagaagagatct

SEQ ID NO: 927863 - DNA, 120 bp, Artificial Sequence
  ENSG00000237037_18 (sequence is synthesized)
caggacaaatgtagacagccctgcccacaggggagatggtcaggccagtgtgggggctaatgaataaatgctacactgtgcccactcaggtcacgacccccaggagacctggaggactga

SEQ ID NO: 927864 - DNA, 120 bp, Artificial Sequence
  ENSG00000237037_19 (sequence is synthesized)
cagacactgctctagtaccagtcctggctctttgccccaggagcaaattaaaagcttgacggcgtctccaggtctctggatctctgtgcattgctcttcatgcttgttcctgttcctcag

SEQ ID NO: 927865 - DNA, 120 bp, Artificial Sequence
  ENSG00000237037_20 (sequence is synthesized)
agggtactacctcaggcagcttcgattttcaatcatggatctgatgactttcaacaaactttcctgaggaaagtgctgttctcaccagaagagatctcaggacaaatgtagacagccctg

SEQ ID NO: 927866 - DNA, 120 bp, Artificial Sequence
  ENSG00000237037_21 (sequence is synthesized)
ggttgtgtcacccctcccacctccctctgcagagacgcaaagtcaagagtaggaagaagccaacctctgaggtaaggcttcccctggaaggcccagggctggggctctctcctttcagag

SEQ ID NO: 927867 - DNA, 120 bp, Artificial Sequence
  ENSG00000237037_22 (sequence is synthesized)
ctcagttagacccagacacacggcagggagtcccaagggtagtggcaggccccctccaggaaactcacaaggttaccacagctcaactgaaaaggaagaacttcccaggactgtgacacc

SEQ ID NO: 927868 - DNA, 120 bp, Artificial Sequence
  ENSG00000237037_23 (sequence is synthesized)
ggaccgggtctacgtgcccatgacagagctctggctggactggttctgagcctctaacacccccaagactcagaaccgtgaagaaaatctttccaataaatccaagagttgctgctgcta

SEQ ID NO: 927869 - DNA, 120 bp, Artificial Sequence
  ENSG00000237037_24 (sequence is synthesized)
tgcaggaacagcacttcctgccaccgagccgtgtgaccacagtggattgtctctggaggggcccaagggggccctggccacccttctgactgactcggtgccaggggacagaccaacgtc

SEQ ID NO: 927870 - DNA, 120 bp, Artificial Sequence
  ENSG00000237037_25 (sequence is synthesized)
cctctcgtgctgacagccgggccgcaccctggcatgagggcatttacagaaatgctggcggaactgctgccagggaggctgtagggtcctctggcaaaagaggcctcaggtggctcctca

SEQ ID NO: 927871 - DNA, 120 bp, Artificial Sequence
  ENSG00000237037_26 (sequence is synthesized)
gcgcctgggctgcggtggggcttgtcctgccgcctggcggctttctgcagggccaggatatacttacttttctgtaaaccaactcttccttagcgcaggagaggtgtcaaagagctggcg

SEQ ID NO: 927872 - DNA, 72 bp, Artificial Sequence
  ENSG00000237037_27 (sequence is synthesized)
tgcagctttgactacaggtcacgacccccaggagacctggaggactgaatgctgctgcccccaaggaggagg

SEQ ID NO: 927873 - DNA, 120 bp, Artificial Sequence
  ENSG00000237037_28 (sequence is synthesized)
tagcgtcatcaagactggcctctttgaagagatcagcaatgtgtttagatgctgatggaaggagccagaaaaaaggaaaaggagaatattgaggtgagacgagatctccaaatgcccagg

SEQ ID NO: 927874 - DNA, 120 bp, Artificial Sequence
  ENSG00000237037_29 (sequence is synthesized)
gaggctgccgtcttatcccaggagggagagcaggtgaagtccccaggggaggaagcacctagccccattcctgctgagcaggaggtggcaggtaccccagactgggaggtaaggacagcc

SEQ ID NO: 927875 - DNA, 120 bp, Artificial Sequence
  ENSG00000237037_30 (sequence is synthesized)
tgctgctgcccccaaggaggaggctgccgtcttatcccaggagggagagcaggtgaagtccccaggggaggaagcacctagccccattcctgctgagcaggaggtggcaggtaccccaga

SEQ ID NO: 927876 - DNA, 120 bp, Artificial Sequence
  ENSG00000237037_31 (sequence is synthesized)
agtgtctgtggttctctgtcccaggctgttccctaagaaggtctgcccaggactcaggtaatcatatgctcattagaaactcttgggcactgcctgtgtgcccagcccagcccattatgt

SEQ ID NO: 927877 - DNA, 120 bp, Artificial Sequence
  ENSG00000237037_32 (sequence is synthesized)
cggtgaggacagacgtggaggacagcagtccctgcccttggttggggctccaggccagcaagggccacagccccagaaggcagagcaggaagacaggactcggggcaggtgaagcagcct

SEQ ID NO: 927878 - DNA, 120 bp, Artificial Sequence
  ENSG00000237035_0 (sequence is synthesized)
aggttttgtctccagatttttctgaaaatattaatgaagccagctgggaagaggagcagtttggatgagactgggataagaagtggttaataaaatctggttatctattctggaaaaaat

SEQ ID NO: 927879 - DNA, 120 bp, Artificial Sequence
  ENSG00000237035_1 (sequence is synthesized)
aaacagctgataccaccattctgaactattacagtgaattccacataggcactgaaggtgcaagctttcatgaattgcttgcctttgagtcagaatctggaacgctgaggaggtctcttt

SEQ ID NO: 927880 - DNA, 120 bp, Artificial Sequence
  ENSG00000237035_2 (sequence is synthesized)
aagccagaagatgttggggaagctggcaaagagaaaacctgagagttatttactgctcagcctgcagcatccatgagtgactgaagggagtatctggacctttttctcacttccaaaagc

SEQ ID NO: 927881 - DNA, 120 bp, Artificial Sequence
  ENSG00000237035_3 (sequence is synthesized)
aagtgctaccagaaaggaagaagaaaaccttgaagttatcttagcctacaacagtgatatcatccatatctttattgtcatggatgaaaatgggaaataaaagattctgatggctcctaa

SEQ ID NO: 927882 - DNA, 120 bp, Artificial Sequence
  ENSG00000237035_4 (sequence is synthesized)
attgcttgcctttgagtcaggtactgtgttaaggacattatgtttaggactagatttacttctccaaaaagctaattccatgagttctggaggttgggaagtccaagataaagatgccag

SEQ ID NO: 927883 - DNA, 120 bp, Artificial Sequence
  ENSG00000237031_0 (sequence is synthesized)
tgaaggatgttagagcctgggatgctgaggcatgtactgtgggacaattatagcaagttggtaaattcagctgacagatgagatgacaagattacaagcgctttttgtcataagttcttg

SEQ ID NO: 927884 - DNA, 120 bp, Artificial Sequence
  ENSG00000237031_1 (sequence is synthesized)
aaagagaaaaagtaaatcgaaaaatctcattcaacaaaaataagcagaatatgacagttcttatagtactgtgcccaaacatttcagtgatctgtgcattcagtagatgagtcaatgaca

SEQ ID NO: 927885 - DNA, 120 bp, Artificial Sequence
  ENSG00000237031_2 (sequence is synthesized)
aggctaataatgatgagtttttattcaagagacaatggcccaagaaccaaaataaagaaaaacattaaaatcaaaagaggtattaacctggacgaggactcaggggacctgcatgttttg

SEQ ID NO: 927886 - DNA, 120 bp, Artificial Sequence
  ENSG00000237031_3 (sequence is synthesized)
acctaactctgccattcacaagctatatgtctttggcaagtcacttagtttcactacttctgtgtctccctgctcataaaacggagattataattgctatatgcactttctgccccacag

SEQ ID NO: 927887 - DNA, 120 bp, Artificial Sequence
  ENSG00000237031_4 (sequence is synthesized)
gactcctaagcttagatgtataggaaaatgctttaggaaccataaaaattaactaaattcataaatgatggtgataattactgtgcttaataataaaatataacacctaataacaacaac

SEQ ID NO: 927888 - DNA, 120 bp, Artificial Sequence
  ENSG00000237031_5 (sequence is synthesized)
ctttgaggttaataaaaagttgtttagcttcttagcacaaaagattgagaaaagtcaggtggaataacatgtgcattccaaaagaacaatctgcagatgcattcatcatggaagacaagc

SEQ ID NO: 927889 - DNA, 120 bp, Artificial Sequence
  ENSG00000237031_6 (sequence is synthesized)
gcatgcttttgggattagaactgcagaagccccacctctgcttcaaatataatagcaataaatgtgcttttgcatatgcagtatatttgaagaaataaagattattatgtggctaataaa

SEQ ID NO: 927890 - DNA, 120 bp, Artificial Sequence
  ENSG00000237031_7 (sequence is synthesized)
atgaaggatgttagagcctgggatgctgaggcaggatcctgcacacaccctagagattagtggaaagtaaactcagcggagcgtctggaacacctccactaacttcttaaaagatgctgc

SEQ ID NO: 927891 - DNA, 120 bp, Artificial Sequence
  ENSG00000237031_8 (sequence is synthesized)
tgattcactgattctcaaaaattataattcaattttctcagcttttatcctgtaacaatcaatttgtatagtaaatgaaagccaaaagcatattcgttttatttacaaggatgataaaat

SEQ ID NO: 927892 - DNA, 120 bp, Artificial Sequence
  ENSG00000237031_9 (sequence is synthesized)
atatccattttaatccctctgtgagaaattctgctaaattactttactctgtagggtcagagtattcaagataaaacattcctggaaaaatgtatttctaccaggaaaagacagacttaa

SEQ ID NO: 927893 - DNA, 120 bp, Artificial Sequence
  ENSG00000237031_10 (sequence is synthesized)
aaaaggagggggagacagcagggttagaggaaaactgtgtgcccacactttagtagaaattaccgaaaccacagcatgcatggggaaatctccttctatggatgaattactataattggt

SEQ ID NO: 927894 - DNA, 120 bp, Artificial Sequence
  ENSG00000237031_11 (sequence is synthesized)
tctctatattacttgaatttttcatttgggcttttaagctatatttagataaaagaatttgggaaatattaagctgtactgccacaaatatgaatcaaataaaactatatttctaaaaac

SEQ ID NO: 927895 - DNA, 120 bp, Artificial Sequence
  ENSG00000237031_12 (sequence is synthesized)
atgaaggatgttagagcctgggatgctgaggcaggataactgttagttacctggaaaagtctactacctaaagcactcttaaaagaaatggaccataattgcaacaaaacatttagaaca

SEQ ID NO: 927896 - DNA, 120 bp, Artificial Sequence
  ENSG00000237031_13 (sequence is synthesized)
ggattttaaagttccaattcaagccaaataaaacgaaaagtatggaaataaacattcaagttggggaagctgaaatctagggaggaagacaaagtaacatgcccaaatgacactgctacg

SEQ ID NO: 927897 - DNA, 120 bp, Artificial Sequence
  ENSG00000237031_14 (sequence is synthesized)
ggaagtctgtgtgtcctgaatcataatttagtacactttttttctaaatatgattcattcttaacagctaaagtaacgtgctcagagaaaaacaagtagccttaactacatacattaata

SEQ ID NO: 927898 - DNA, 120 bp, Artificial Sequence
  ENSG00000237031_15 (sequence is synthesized)
cacacgaagttacaaaaaacactaactaaatagatggctcaagaattcagaaagaagaggttggaaaaaaactaataaaattacaaacagatattaatgtgtcagaaaacaaaacactag

SEQ ID NO: 927899 - DNA, 120 bp, Artificial Sequence
  ENSG00000237031_16 (sequence is synthesized)
aaattatggataaatcctaaaactagctctaaaccaaaaagatatagaaaatatatttagaacactatcaagaaataataggagaaaaatatccaaaagtaaaaaagataagacagcaat

SEQ ID NO: 927900 - DNA, 120 bp, Artificial Sequence
  ENSG00000237031_17 (sequence is synthesized)
ggattttaaagttccaattcaagccaaataaaacgaaaagtatggaaataaacattcaagccacagcacgagctaatttgtccattcgagaacctgcttcggcaattttcttggcagcat

SEQ ID NO: 927901 - DNA, 120 bp, Artificial Sequence
  ENSG00000237031_18 (sequence is synthesized)
tgaaacaacatatacaacataattagaaatccacttaatgacgggaaagagaccaacctaccatatcctttgtccaggagtctagtgttgtattttatttggcactggccacattagtcg

SEQ ID NO: 927902 - DNA, 120 bp, Artificial Sequence
  ENSG00000237031_19 (sequence is synthesized)
aattttgaatattttcctgcttaactccagtttctatattagtagtcgtttttggaaatattttcccatatttttatgtgcatgttcacattttatcttttacattaagttctatatttc

SEQ ID NO: 927903 - DNA, 120 bp, Artificial Sequence
  ENSG00000237031_20 (sequence is synthesized)
taaacaatggccagttataaaagatcatcacaagagaaatgaaaattttatagttgcttaccgtgtaccaaaagctgttgtacagactacctcattctgactttataacaactctacaaa

SEQ ID NO: 927904 - DNA, 120 bp, Artificial Sequence
  ENSG00000237031_21 (sequence is synthesized)
tgcaacttttcctacataagggaaggtcctttaagcacggaagcctttaaaggtgtgtgaatttggtattgacttgaatgaaggatgttagagcctgggatgctgaggcatgtgtttact

SEQ ID NO: 927905 - DNA, 120 bp, Artificial Sequence
  ENSG00000237031_22 (sequence is synthesized)
ttttaaagttccaattcaagccaaataaaacgaaaagtatggaaataaacattcaagatcccaatggacaagcctcaggaagaagcaaaaaaaaaaaaaatggtttcatggaagaggggt

SEQ ID NO: 927906 - DNA, 120 bp, Artificial Sequence
  ENSG00000237031_23 (sequence is synthesized)
agattgctccaacagaaaagggaggtcctgacagctgaggctggaatacagtaagaacaagctttgtctacttcagagggttgcctggagctggcctcaagcacttggataccaacatca

SEQ ID NO: 927907 - DNA, 120 bp, Artificial Sequence
  ENSG00000237031_24 (sequence is synthesized)
aataaaatgagcccaaaatgatctagtaacttatccaagcttatacaggtcataagtaaaaaattcaaaattttaagcagactctagccaaaataaatgcatatgctttatcttcctact

SEQ ID NO: 927908 - DNA, 120 bp, Artificial Sequence
  ENSG00000237031_25 (sequence is synthesized)
attgtcctcctcatacagaagagcgaatcatgctttacttagacctcacaggtcctaaaccagcatcatttaaaacattcgctaggtgcttctctgaaaaagaatccgtaaaactaccag

SEQ ID NO: 927909 - DNA, 120 bp, Artificial Sequence
  ENSG00000237031_26 (sequence is synthesized)
cagactcccagactcaatgttcaatccccagatgaaaagcaatgcacatttcattgtcccaacacaaggttaatttgtgcactgaaaagtgtatacttctctgtcaactatagcacttgc

SEQ ID NO: 927910 - DNA, 120 bp, Artificial Sequence
  ENSG00000277412_0 (sequence is synthesized)
aggcgtgagccaccgtgcctggccgatgtcacccacgtttcttaggaaagacgttagcatcctctaaatcctcaccgactgtgcctggcgcagcattattttgcagttttctgggattta

SEQ ID NO: 927911 - DNA, 120 bp, Artificial Sequence
  ENSG00000277412_1 (sequence is synthesized)
cgcagcattattttgcagttttctgggatttacagttggcatcatttgcacagcggcagcgtgacgtggctgtggagagcacggaagctctgtccccacggaagtgggctcttctggttg

SEQ ID NO: 927912 - DNA, 120 bp, Artificial Sequence
  ENSG00000277412_2 (sequence is synthesized)
caacatggtggaggccagcgcggcctcaggtgagggaagatgccacagcaaacctctgagcaaccaagatgacaagcacctgcttggaaaaggtgacaagccacaaggccataggcccag

SEQ ID NO: 927913 - DNA, 120 bp, Artificial Sequence
  ENSG00000277412_3 (sequence is synthesized)
ttataaggatgaattgtgttacacgaatggttataaacctgaccgacctcagaaggtatatggaggaggcaattatcaagccccttgatggtctgtggctggatgcaccatactttgcca

SEQ ID NO: 927914 - DNA, 120 bp, Artificial Sequence
  ENSG00000277412_4 (sequence is synthesized)
acggtgtgagcatggcagagaatgtaggggcttactgaaggaggctgtttctttgatggcagtagctggacgccttcatcctgatgggtgtcttctgttttcctgactggggtaagttga

SEQ ID NO: 927915 - DNA, 120 bp, Artificial Sequence
  ENSG00000277412_5 (sequence is synthesized)
ggagtcctcaatccttcaagcctttcttcatgtttttctaagttgggtttcctagacttctcactcttgtgaatagggggaaacattggcctttggctcttgcatgagccttgacagttt

SEQ ID NO: 927916 - DNA, 120 bp, Artificial Sequence
  ENSG00000277412_6 (sequence is synthesized)
gggtttctgggctcctcgtgcaccagtttgctccttctggctgccatgaggtcatgtagctcctgggaagcccgcatgttcccagtaggcatgctctggagatggccctggggcacttga

SEQ ID NO: 927917 - DNA, 120 bp, Artificial Sequence
  ENSG00000277412_7 (sequence is synthesized)
acaaacttgaggctgggtctctgactttgtggccattccaggctcaaattcattaacaacctcctccataagacacagctttcttggatcttgggagacagacactctagggtgtagaga

SEQ ID NO: 927918 - DNA, 120 bp, Artificial Sequence
  ENSG00000277412_8 (sequence is synthesized)
gcttttgctggtccctggagcctcgaaaccatgcacatcctcacttgtggcttggaggtttgccagcatacaggtttccaaggggactctgcattgtggcactgcctcccttgtctctcc

SEQ ID NO: 927919 - DNA, 120 bp, Artificial Sequence
  ENSG00000277412_9 (sequence is synthesized)
agcctttgaagattgggctcctaagctcctgctctgctggatgctgcctgtgaggctgtacgtgaggggcttagatggccacctgccctcctgtccagctggaggaggcttcaagggttc

SEQ ID NO: 927920 - DNA, 120 bp, Artificial Sequence
  ENSG00000277412_10 (sequence is synthesized)
atgatcattccaagatgggattcctcgcggtgccctctggaactgcttccatgcaggtgaggaggccagaagactctctggcatgtgatcagatgctttggtcagcacctgctttctcag

SEQ ID NO: 927921 - DNA, 120 bp, Artificial Sequence
  ENSG00000277412_11 (sequence is synthesized)
acttgccattggtggctttctaaggaacatgtccacctcaacttctgagccagccccagattcacaggtggctgaggagggaccagcaagctgtgtaagggacaaggatgaaaccttttc

SEQ ID NO: 927922 - DNA, 120 bp, Artificial Sequence
  ENSG00000277412_12 (sequence is synthesized)
cagtttaaagcactgaatgggcttgaggaccctgaggggtagaccccacctgtgtttggcccaaaacctcacaatatgggctcccaacccctgctgagtacacggctcgaggaaggaaag

SEQ ID NO: 927923 - DNA, 120 bp, Artificial Sequence
  ENSG00000277412_13 (sequence is synthesized)
cacctgggctgtgttcacacaggctttcccacttttcggggctgctagattgctggttttcacatgggtgttggacacgggaagagcctggttgacagcaagccaggatcgacgcacaca

SEQ ID NO: 927924 - DNA, 120 bp, Artificial Sequence
  ENSG00000277412_14 (sequence is synthesized)
cacggggatcaagccctcgttggtctggcccaagttcctgcccatgtgggctttcaggatgttttctatatgagtcctctctgtgcatcttaataaatcacttcccgagtcactcctcaa

SEQ ID NO: 927925 - DNA, 120 bp, Artificial Sequence
  ENSG00000234193_0 (sequence is synthesized)
aaagacaagatgaaagtatacctagagggacctgttttcctaactgatgttagaaaactgatgtgtcatttgagctaacctcagaatcaaaactttggcataattctggagaatgtggtc

SEQ ID NO: 927926 - DNA, 120 bp, Artificial Sequence
  ENSG00000234193_1 (sequence is synthesized)
accagaaagcacagatgttactctgggactaccacattgtgaaggaattataactgatttctaagacttcaaattcttaattgttggccacttggctttacaatgtgaaaaagaacatat

SEQ ID NO: 927927 - DNA, 120 bp, Artificial Sequence
  ENSG00000234193_2 (sequence is synthesized)
aaacaagtggcagtaccgtttattctcaagcaaaaatatctaaagacaaacattctctgaaatgctgaaattacataacatgaatagtgtagatttttatttactttctgcctaactcaa

SEQ ID NO: 927928 - DNA, 120 bp, Artificial Sequence
  ENSG00000234193_3 (sequence is synthesized)
aaaagatacacaaaatgactttgaaaataattcttttaaagctcctcaaaagaaacaatgtaaatccaaacctgtgacaacaaaaatggaatgtttgtttaaaagaaaaggtgtaggagg

SEQ ID NO: 927929 - DNA, 120 bp, Artificial Sequence
  ENSG00000271155_0 (sequence is synthesized)
gtcgggcgggcctggctcccggccaggcgcccaaacaataaacaatcccccgggtgcgggcagggggtttcgccggccgcagccaggctctaggtgtgcgctggcgaatatctctatcaa

SEQ ID NO: 927930 - DNA, 120 bp, Artificial Sequence
  ENSG00000271155_1 (sequence is synthesized)
ccgcgaggagggaccgggccgggggcgcgggcgccgcggcgggcgctcttaccttccacccacagctcctccacgttggtctcgaggttcgctgcttttaatcccaccgcgaaggcccca

SEQ ID NO: 927931 - DNA, 120 bp, Artificial Sequence
  ENSG00000271155_2 (sequence is synthesized)
aatatgaggaggcccacaaccaagaacttgccgcagtttttttgaatgtaacaacccagtttaaataagagtctctgaaacttcgctctcagccacagcggcgctttccggccagtagcc

SEQ ID NO: 927932 - DNA, 120 bp, Artificial Sequence
  ENSG00000271155_3 (sequence is synthesized)
cagtagccttcccctggggacgaagcagaagggaggagtgagcgccggggagtcgcggcccgcgcgcccacgcccgcttgcgcgcacccgcccggtgagcccccaacagccgtgggggcg

SEQ ID NO: 927933 - DNA, 120 bp, Artificial Sequence
  ENSG00000271155_4 (sequence is synthesized)
cgcggcacacggactcgccctcgagactgcagccccggcggatctgagcgtcatggggggctcggtcataaagccgggccgcagcgtgggagctgcacctcggggacatcagggcgcccc

SEQ ID NO: 927934 - DNA, 120 bp, Artificial Sequence
  ENSG00000271155_5 (sequence is synthesized)
tcgacacagacaatattcaccccagagctgagaagggaggggctgcgtaatcccagcgatggagcccaaggttcaggagccagcaaaccagtcctgctctgtccatcaccctcggggacg

SEQ ID NO: 927935 - DNA, 120 bp, Artificial Sequence
  ENSG00000271155_6 (sequence is synthesized)
ggcgctaggggcgagcgctctttggaacaacatattgcgggttcccccaactggacccccgccgagaatggtagtaagtggggatccacgtggtgagcgcggccgccggagttcactccc

SEQ ID NO: 927936 - DNA, 120 bp, Artificial Sequence
  ENSG00000271155_7 (sequence is synthesized)
gacgcatttccatagcgtggggagaggctgtgtgagctgaattaggaagtggggcagccagctgcaacttacgacaatatttgtgatcggaagagggcagccacatggatctttccctcc

SEQ ID NO: 927937 - DNA, 120 bp, Artificial Sequence
  ENSG00000271155_8 (sequence is synthesized)
tctcccttcctttctggttaaacgtaaaaaacagccgagtgcaaagggaagggctcaggccggcgcaggctgctccccggcgcggcatttccccggcgctggccgcggccccggcgggcc

SEQ ID NO: 927938 - DNA, 120 bp, Artificial Sequence
  ENSG00000271155_9 (sequence is synthesized)
cccgtctgggtgctcgccttccctggattccacacatttcagcgagcctcgtaaacacaatgaacccggcagctccgcagactcgcaccgcgaatttaaggtggcaatttgtttacaact

SEQ ID NO: 927939 - DNA, 120 bp, Artificial Sequence
  ENSG00000271155_10 (sequence is synthesized)
tttcctcccccgaccaggccctaaggagaggcggctcaaaacctggaaaacgggggggatatctttttccgagaataattttttaagggagcagagatttcatgctcaacaaaaccaaaa

SEQ ID NO: 927940 - DNA, 79 bp, Artificial Sequence
  ENSG00000271151_0 (sequence is synthesized)
ctgccgaccttgtgatccgcccggccgaaatacaatttaattaaaatacttattttcttattagaaagctgcctctcaa

SEQ ID NO: 927941 - DNA, 120 bp, Artificial Sequence
  ENSG00000271151_1 (sequence is synthesized)
attaaaatacttattttcttattagaaagctgcctctcaatggcacctactgctacatttacatagtaacccaaaattgcagttgcttagcagggagagaatcacagtgctggatattat

SEQ ID NO: 927942 - DNA, 120 bp, Artificial Sequence
  ENSG00000271151_2 (sequence is synthesized)
ttatactttttcttccaaaacgatttgaggaagtactgtgctggccattgtttacatcatattaggagatctggatgtcactttcttttcccatatcctcgatttcctcactttttaaaa

SEQ ID NO: 927943 - DNA, 120 bp, Artificial Sequence
  ENSG00000271151_3 (sequence is synthesized)
ttcttccctacaaacagaagagacaactaaatacggtttgatctacatctgcaagagcctagccattcagtattaaaaagtgatggccctggttgacggtaccacacctgaagacctatg

SEQ ID NO: 927944 - DNA, 120 bp, Artificial Sequence
  ENSG00000271151_4 (sequence is synthesized)
ccctttccttcacactccctacttctgcatttcttccctcctgaacgtctatcaagtggaccatatgaaattgccagtattcaactgttttttatcttaaaaggtgacaattctatatca

SEQ ID NO: 927945 - DNA, 120 bp, Artificial Sequence
  ENSG00000271151_5 (sequence is synthesized)
ttcaacctaaattaatgtctcaagaacataacctttgtttctattattgtgaccttacttttaaccatcctagagctctttaacctgttcacactggatttcaaggatcttaagttgttc

SEQ ID NO: 927946 - DNA, 120 bp, Artificial Sequence
  ENSG00000271151_6 (sequence is synthesized)
tactacataatcactatcacacttcagaaacattttagtttacattaaatacacttaaccccctcatatttcatctcttcctttctcaaaaatagtaataaataacctcaagccattaaa

SEQ ID NO: 927947 - DNA, 89 bp, Artificial Sequence
  ENSG00000270820_0 (sequence is synthesized)
ggctctgaggcccggggagcgccagttccttgaaggtcctccgtcctggagcagtaagatccttgacgtaactagaaatggcagatgcc

SEQ ID NO: 927948 - DNA, 120 bp, Artificial Sequence
  ENSG00000270820_1 (sequence is synthesized)
cagcctcccgaataggcaaatgaataaaagaacatcttttatttacccgtatctgcgacattcctcatagtatgtttgaaagcccaaatgatggaatccaaaacaagtttaaactgtgta

SEQ ID NO: 927949 - DNA, 120 bp, Artificial Sequence
  ENSG00000270820_2 (sequence is synthesized)
ggtggaatagcaaggaatgctgggaaacaatgagaattgacagcctgaagtagtaagaaaaagttcgttctatgttcaggatattcttcaaagtcctaaaaataagtggtggaaacaaaa

SEQ ID NO: 927950 - DNA, 120 bp, Artificial Sequence
  ENSG00000270820_3 (sequence is synthesized)
ttctcctgcctcagcctcccgaataggtgggattgcaatcacatgccaccatgcccagtatttttattgtatcttttatttttttatggtatttttagtacagacagtttcaccatggtg

SEQ ID NO: 927951 - DNA, 89 bp, Artificial Sequence
  ENSG00000270820_4 (sequence is synthesized)
agtatttttattgtatcttttatttttttatggtatttttagtacagacagtttcaccatggtaatctccccgcctcgacctcccaaag

SEQ ID NO: 927952 - DNA, 120 bp, Artificial Sequence
  ENSG00000270820_5 (sequence is synthesized)
gaagccagcgcggccgcggggggagtccgggtgagtaggagaagatggcggaggcaacggacgggtcgcggttgcgtggcgtcgcccaccacgacccactccacgggctctgaggcccgg

SEQ ID NO: 927953 - DNA, 120 bp, Artificial Sequence
  ENSG00000270820_6 (sequence is synthesized)
ggagcgccaggtcactcgctccgtcctgtcccccgcccctgggcttcgccatttttccccagggcctgggtcggggagttggtgcgggtttctttggtgtccccggcctcttccgcgctt

SEQ ID NO: 927954 - DNA, 120 bp, Artificial Sequence
  ENSG00000270820_7 (sequence is synthesized)
aggcttttggggtacgggaagcaaggagtcaacttgggtgccgggccgggtctacgccgtagccctctttcgggcgcaagggccactccccccggggtctgagagtgaatcagcccaggg

SEQ ID NO: 927955 - DNA, 120 bp, Artificial Sequence
  ENSG00000270820_8 (sequence is synthesized)
taagagtgtaaaaagtatctgtaagcctaaaagacatagaataccaatggaaagttactacagactgacagcactcatgatagtatttagctcttatcaaagtattctgaatctaaccct

SEQ ID NO: 927956 - DNA, 120 bp, Artificial Sequence
  ENSG00000270820_9 (sequence is synthesized)
gttctcccttttttttgggatgatgactaataattacttgcataaggtttcttaaattaataatggaatacaactatatccaatgctggcttacttataaattataataagttgtgtgag

SEQ ID NO: 927957 - DNA, 120 bp, Artificial Sequence
  ENSG00000270820_10 (sequence is synthesized)
agctaaactgtgaagatgtaaaggcataaagatcatataatggactttggggacttgtggggaagggcaggagtgggtgagggataagactacacataaggtggagttcatacacatgag

SEQ ID NO: 927958 - DNA, 84 bp, Artificial Sequence
  ENSG00000270820_11 (sequence is synthesized)
gggataagactacacataaggtggagttcatacacatgagggataagactacacataaagtagagttcatactgctcacatgac

SEQ ID NO: 927959 - DNA, 120 bp, Artificial Sequence
  ENSG00000270820_12 (sequence is synthesized)
attgaaataaaaaaagaacctcatgaatattttttaaaagcctatgggaaaaaaattacaatctaagttatgactattaccaccctttcaccatttctgaaagctcagctgattctatat

SEQ ID NO: 927960 - DNA, 120 bp, Artificial Sequence
  ENSG00000270820_13 (sequence is synthesized)
gaacttctacaacatcactacccagtagaactttgtattacgcaaaccaattattactaggccgctctccccataactcaattctgcctatggactcacttggagtggagtggaacagtt

SEQ ID NO: 927961 - DNA, 120 bp, Artificial Sequence
  ENSG00000270820_14 (sequence is synthesized)
gattaaactgcttataggattttctcagatgttcatatatgtaattcacacactcaaaactctgaacaagtaataccttcctatgtacaattaactatatttgtatttttggattggcag

SEQ ID NO: 927962 - DNA, 78 bp, Artificial Sequence
  ENSG00000270820_15 (sequence is synthesized)
tgaagtttcactcttgtcacccaggttggagtgcaatgacgtgatctcggctcaccgcaacctttgcctcgcgaatac

SEQ ID NO: 927963 - DNA, 120 bp, Artificial Sequence
  ENSG00000270820_16 (sequence is synthesized)
tctccctccgcacacacgccgcacgctccacaccccgccgtggccggctcgccgccctccctttcctcttccgtccggcctccccgccctcggtccaccccctccgcgcgctcgcccacc

SEQ ID NO: 927964 - DNA, 120 bp, Artificial Sequence
  ENSG00000270823_0 (sequence is synthesized)
tgcttgtacctagaagggagacgaggaaacacacatgtagctgagcaaacttaaaccagtgcaccgctgaaaacgagagaaaaaggatacaaacagtccagaaacaatgtactttcctag

SEQ ID NO: 927965 - DNA, 120 bp, Artificial Sequence
  ENSG00000270823_1 (sequence is synthesized)
catcataagctgaagtctgaagctccactgacctgtagagaagctcctgagcaacaatatctccatagtcatgagaaagaaggttgatcctgcggttctggagccccagatgccgcaaaa

SEQ ID NO: 927966 - DNA, 120 bp, Artificial Sequence
  ENSG00000270823_2 (sequence is synthesized)
gcgcttccacgatgctggcctgctcaaatatggaatagtgatgtggtctctgaggaaaggaaagcccacatacacaggatgaagtcatgaggacagctctctctgccagcctgaccctca

SEQ ID NO: 927967 - DNA, 120 bp, Artificial Sequence
  ENSG00000270823_3 (sequence is synthesized)
tagtctgcgtctgcccccacaccccatcaccagccccacataggtgctgcttaccggtttgtcactgaagccaaagcctaagaaatcaagggcaatcacccgatgaaacctcaaggtcag

SEQ ID NO: 927968 - DNA, 120 bp, Artificial Sequence
  ENSG00000270823_4 (sequence is synthesized)
accttcccaaatctacaagaaagaaacgatgatttgggctttctgctcctgcccctccctttcaccagacctacagttgcacaggagcttcagccctatcttggcttaacagacttccat

SEQ ID NO: 927969 - DNA, 120 bp, Artificial Sequence
  ENSG00000270823_5 (sequence is synthesized)
aaagagaaaacgccatgaaactaccacaggtcccacagatgatcctcttggaaaatgctttattcctggtaattaatccctgttgagggagggtaacttggcagtgatcccttccagagt

SEQ ID NO: 927970 - DNA, 120 bp, Artificial Sequence
  ENSG00000270823_6 (sequence is synthesized)
gccaaggagttgtttattcccttcagtaaataaggaacagttcaacatttaatgtttttttaaaagcaattcaaatgtgcaagagccttctggtgctgacaacaaaatccttgaggtttt

SEQ ID NO: 927971 - DNA, 120 bp, Artificial Sequence
  ENSG00000270823_7 (sequence is synthesized)
gccttctggtgctgacaacaaaatccttgaggttttttaaatttttattaaaaaaaaatttttttttgagacagactctcgctctgtcacctaggctgaagtgcagtggtgcaatctcag

SEQ ID NO: 927972 - DNA, 120 bp, Artificial Sequence
  ENSG00000270823_8 (sequence is synthesized)
acctcagcctcccaaagtgctaggatttgagcccccgcgcccggccgagattttttaagacatagtaggacgtagaagtctgacttcattaccttgtaccagtcgtagctggatgttgga

SEQ ID NO: 927973 - DNA, 120 bp, Artificial Sequence
  ENSG00000270823_9 (sequence is synthesized)
aaaaataacctcgaagatgttaaaatctaagtaatctgatacaaagaacaagcaactgtgaccaaattgacattaaaatgacacaattatttgtaaaatgtaagcttaactgcgttaggt

SEQ ID NO: 927974 - DNA, 120 bp, Artificial Sequence
  ENSG00000270823_10 (sequence is synthesized)
gagaacaggccttttctcctttcaatctgtatattaaaacattgtaaaaatcatgctatgtgaaaatacttgaaggcaccttgtttactttcacctaggtgtttttaaacagcatctccc

SEQ ID NO: 927975 - DNA, 120 bp, Artificial Sequence
  ENSG00000270823_11 (sequence is synthesized)
catttctccttttgttctgtaatatgcaaattttttcagtgaaaagtaaattttcagttaaaagcatatgatcacaacacataaactacaaattctttgtactttatcatgaatggcctc

SEQ ID NO: 927976 - DNA, 120 bp, Artificial Sequence
  ENSG00000270823_12 (sequence is synthesized)
acagaaattctctaagatacagcaactattcccaaggaacacctttagcttatgctgtttgctcagcactttttattcagcaggagacccaatctaacatcaaaaacataataaaactat

SEQ ID NO: 927977 - DNA, 120 bp, Artificial Sequence
  ENSG00000270823_13 (sequence is synthesized)
tacaaaatcctgtcaactataaaaagggcttaatcaacataaacatgaacttttttaatgcatatgacaatatggaagcattcagcatcatctaaattaggtaaacatttagacaatatt

SEQ ID NO: 927978 - DNA, 120 bp, Artificial Sequence
  ENSG00000270823_14 (sequence is synthesized)
aaccttgctaatagtatgggattagaacaggtatattcatatactgccagtgacatgaaaatttggtaataaggttttcaaaaataatttagaagcagttaaaaattgtatatactttag

SEQ ID NO: 927979 - DNA, 120 bp, Artificial Sequence
  ENSG00000270823_15 (sequence is synthesized)
cctaagagttttgttcttgagaatctgtgcaaataaaatcattccatttatacaagtagtatagtttgaaaatgtaaggaaaaaataaactgtatggacatgaagcttttacttcaacat

SEQ ID NO: 927980 - DNA, 120 bp, Artificial Sequence
  ENSG00000270823_16 (sequence is synthesized)
tagttttctaaaacagtaaaactggaagtaacccaagccaacataataaaaattgtatacttacttaattgaatatagcaaatgagaggaggtcaggagcaataatgaaaaacggtttat

SEQ ID NO: 927981 - DNA, 120 bp, Artificial Sequence
  ENSG00000270823_17 (sequence is synthesized)
gacaaacatttttcgttattgctcttgacccccgctcaaaacaaatcatttccaatctgtttctcagtttcttcacctataaaatgaggttaatggcacctatctccaaatgctgttgta

SEQ ID NO: 927982 - DNA, 120 bp, Artificial Sequence
  ENSG00000270823_18 (sequence is synthesized)
aagattaaacaatgaaggctgaaaacataactcagtgcctggcatatggtaattacttgataagtagtggtcataataatcatcatcactagcaaattaatttatataatggtatcaaga

SEQ ID NO: 927983 - DNA, 120 bp, Artificial Sequence
  ENSG00000270823_19 (sequence is synthesized)
cttaaatcacagttacactacaaataatctacagaaaaaatgaaatcagggatggtaaggagagagaaccaatggtggttatatctattaatattttatatattacctgacaggttgctc

SEQ ID NO: 927984 - DNA, 120 bp, Artificial Sequence
  ENSG00000270829_0 (sequence is synthesized)
aatgtggcggggcggagggatcgagctttaattttcagcactataataatagctgactcttaattgtcaggcaccttacatcatctcatttaattctcacaacagactgatgaaatattt

SEQ ID NO: 927985 - DNA, 120 bp, Artificial Sequence
  ENSG00000270829_1 (sequence is synthesized)
agctagtaaacggccaaggtggaatttgaagcctggtaacccaacgatatattgcatatgagtttaaccaaaatgctgcacggcccagcggggtgggcccaaggccgcttgggctctgca

SEQ ID NO: 927986 - DNA, 120 bp, Artificial Sequence
  ENSG00000270829_2 (sequence is synthesized)
gcaggaaacgggctggaaaagctcagagagccagcaaagacgttttccgggaaggcatggtatctgagccaaaccctaggtgttgtgcagaagttgaccgagtaaagaagtgagcaaagt

SEQ ID NO: 927987 - DNA, 120 bp, Artificial Sequence
  ENSG00000270828_0 (sequence is synthesized)
agaatgggcagaactcactctggaagagctggtgggaataatgccatttgggaagcacacaacataggcagcacagtggagcacaagaaagtccggagctgttagctcccaggtcctgaa

SEQ ID NO: 927988 - DNA, 120 bp, Artificial Sequence
  ENSG00000270828_1 (sequence is synthesized)
ctggattccactgtagacaaaatcctctctgcatcgccaaatgactcttattttcctaaacttactctaagaatatcttttaacagcaatttgaataaaccgactcacatgccactgtga

SEQ ID NO: 927989 - DNA, 120 bp, Artificial Sequence
  ENSG00000226969_0 (sequence is synthesized)
ctgcatccactgaagcccagacctgctgcctgcaggacctcacccaggcaccaggtcgtgcctggcgcctccttgatgccaggccctggggagacctgtggccacagaacccatgttctc

SEQ ID NO: 927990 - DNA, 120 bp, Artificial Sequence
  ENSG00000226969_1 (sequence is synthesized)
cccaccgagccatctctgcccctctctacagcaaagcttccgccaagccggccctgctccctgtctacctctcctgccaccacccactcacacgttttaaatacaagccgtcggttctca

SEQ ID NO: 927991 - DNA, 120 bp, Artificial Sequence
  ENSG00000226969_2 (sequence is synthesized)
cctgcggcgcgcgctgccagcccgagggccccgccgtccaggggtcccctgacatctcacacttgcggactgaagctgcgaggagcggagaacccggccagggtcacggacgggagcgtc

SEQ ID NO: 927992 - DNA, 120 bp, Artificial Sequence
  ENSG00000236634_0 (sequence is synthesized)
tgtgttcccttaactacaaaactgcgataattttgtaaaagctgccactccaagctcaaagtattgttatgaggatcaaatacttaaatgtgcttcacagattgtaaagtttcatacaaa

SEQ ID NO: 927993 - DNA, 120 bp, Artificial Sequence
  ENSG00000236634_1 (sequence is synthesized)
tgccttttttaataacttattattattaagatcaaataatgatgcgtctccaggagcaaagatgagagagatagcgggggaaaacgagcaagtgcatccctgaaagaagcaaagtctcta

SEQ ID NO: 927994 - DNA, 120 bp, Artificial Sequence
  ENSG00000236634_2 (sequence is synthesized)
caactttgacgaacgatccatgtttgaagatgcaattagaaaaacctctctcttacttgtaagatgaaaaagcatgatacagatgagactgaaagaaatatctaactcttaagcatcctg

SEQ ID NO: 927995 - DNA, 120 bp, Artificial Sequence
  ENSG00000236634_3 (sequence is synthesized)
atctaaggaattcagcttgattttccccccaaggcacagcaatattggggaaaaacagctcagaaacttggggtttttttttaaggtttatttgttccaagaaactaactttctttccat

SEQ ID NO: 927996 - DNA, 120 bp, Artificial Sequence
  ENSG00000236635_0 (sequence is synthesized)
acaggtctcacccagctcgcaggcagcccaaaagttctggaagtactcactgcagagacaaatggaaatgagtccactctaggaagaagaataactggaagcttgagctgtgtaaatgtg

SEQ ID NO: 927997 - DNA, 120 bp, Artificial Sequence
  ENSG00000236635_1 (sequence is synthesized)
acttggaaatgtgacttcaggagaaagaaccaggtagaaaaccctgatggtgaaagcaagttttaactgaaatgagaagaaactgaaagttacattaccatggcttttatgagtcaaaga

SEQ ID NO: 927998 - DNA, 120 bp, Artificial Sequence
  ENSG00000236635_2 (sequence is synthesized)
agagacattatgggtatgtgaactaaaataatgacatttggcatggggaaagtgatagatacagtaatttcaattttctgcaagatagagaacacacagagaagtagtgattgatataca

SEQ ID NO: 927999 - DNA, 120 bp, Artificial Sequence
  ENSG00000236635_3 (sequence is synthesized)
gtatgagaatccatcccctatgatgtgtgcaaaggaaattaatatgactggctagaccctggaaacgtttaatactataaatcaccggtgtgaaaaaaaaggtgggtatgaaaattggaa

SEQ ID NO: 928000 - DNA, 120 bp, Artificial Sequence
  ENSG00000236635_4 (sequence is synthesized)
taattggataataaatactaaacaatgaaactttccacttcagtgtacagaatgcctggcaggcaaggatttatcccgttagccaaataaaagaaagaaatcacaaaaaaacaacaacaa

SEQ ID NO: 928001 - DNA, 89 bp, Artificial Sequence
  ENSG00000236635_5 (sequence is synthesized)
atgttgccacttctgggaaagtcagcagaagacagacagcagacaaaatctctaaaaataatatttttaattaaaaatgtacatgcaga

SEQ ID NO: 928002 - DNA, 120 bp, Artificial Sequence
  ENSG00000236635_6 (sequence is synthesized)
atattggacactataaataaaaaagattaaacaaaaaatgactgcagattcaaaaattacaatccagggaaaagcaccaacttagaagagtttaacatccaactaataagaacatagagt

SEQ ID NO: 928003 - DNA, 120 bp, Artificial Sequence
  ENSG00000236635_7 (sequence is synthesized)
gagaaaacagagggaagaaattttcaaagaaataatagaaaacaatattatagatctgaagttccatgtgagtctttagataagtgccaagcatgtgagttgtaaattgaataataaaaa

SEQ ID NO: 928004 - DNA, 120 bp, Artificial Sequence
  ENSG00000236635_8 (sequence is synthesized)
aggacccctgcaagaaaaagtcaggaatggattcctggaacaaagaatgtccacagggctcttgatgctgctgcctctacccctatattttatatagttctggaagtactcactgcagag

SEQ ID NO: 928005 - DNA, 120 bp, Artificial Sequence
  ENSG00000268388_0 (sequence is synthesized)
ccggcaagggcggccctcgcgcacctggctgccagcccgcagggggctcgcacgcagacctgcccttgccacctcagcgctcgggtgcgggctgggggcggtggagccacgaaaggtggt

SEQ ID NO: 928006 - DNA, 120 bp, Artificial Sequence
  ENSG00000268388_1 (sequence is synthesized)
agccacgaaaggtggtgccgagagcggagcgcaggacagcgcaggagccccggcgcatcgcggcgcgcacagacccaggatttgtgaagaggtgacccaaatttcaagacaatgttggat

SEQ ID NO: 928007 - DNA, 120 bp, Artificial Sequence
  ENSG00000268388_2 (sequence is synthesized)
gcaaacggatttgccagcaactgcatcactgtcaaaaccagctctgcccgtgtcttccgaagataccaagtgaaatacatgtagatgggatttacatctgaaaaaccaagtgagaaactg

SEQ ID NO: 928008 - DNA, 120 bp, Artificial Sequence
  ENSG00000268388_3 (sequence is synthesized)
aagaccagagagggtgagtggtttactcagtttggcacaactgaccccaacctagccctccatgaggactgagcgcatgagagatcctgagccacagccgcccagccctgctcctctcga

SEQ ID NO: 928009 - DNA, 120 bp, Artificial Sequence
  ENSG00000268388_4 (sequence is synthesized)
atttctgacctacaggaactgcaagaagtaatgaaagactgctgtttaaagccactgcattttggcatgatttgttatgcagtcgtagataaccagaaaacatcggatttacattttaag

SEQ ID NO: 928010 - DNA, 120 bp, Artificial Sequence
  ENSG00000268388_5 (sequence is synthesized)
gattacttcatgcacataaaagaaaacgcaactacagtggaccctgaacaacgtaggaaacagagaagcaaagaagttagcaagcttgttttggcagaagaaaaaacacaaaatacccaa

SEQ ID NO: 928011 - DNA, 120 bp, Artificial Sequence
  ENSG00000268388_6 (sequence is synthesized)
ccacagatcctcaaaaatattgctaagcactaattttgctaacatgttagacagccttcggatctaggcaatcttgttcctcagctggaaagagttcctgccagccatgtgattccaaat

SEQ ID NO: 928012 - DNA, 120 bp, Artificial Sequence
  ENSG00000268388_7 (sequence is synthesized)
ccaccctggacatatggggataatgagaaaatcagctccggccttccctggccttccagccaagtgaatgggggcatcccctggtgcttcagcccggggcccacccagaggatgctagct

SEQ ID NO: 928013 - DNA, 120 bp, Artificial Sequence
  ENSG00000268388_8 (sequence is synthesized)
ggcctgcagaggcctcaaccatgccctcctggactcaggtaagactgaggtttccatgccctcaaaacaattgttcagacaaaaactcactgcccaggtcaaagtcacagcaccagaaag

SEQ ID NO: 928014 - DNA, 120 bp, Artificial Sequence
  ENSG00000268388_9 (sequence is synthesized)
ccaacctgaggatgaagacaaagctctttgttggcacagtcccctgatcattcgaggtcagcatctccatcaaaatggacccaatgctgaggcaagaaggagaacatcactgttaagaag

SEQ ID NO: 928015 - DNA, 120 bp, Artificial Sequence
  ENSG00000268388_10 (sequence is synthesized)
atggaaaatgcatttgaggtggactgaacacagccaggagtttttgcttatcgacagcactgaatcctgccttgactagagagactcgtcatgtgatcaactgtggccagagggcatcct

SEQ ID NO: 928016 - DNA, 120 bp, Artificial Sequence
  ENSG00000268388_11 (sequence is synthesized)
gactcttatgagtatttaagcatcttcagggaagcgattgactgtcttataatggtcttacaagtacggaactttattacctgctaataatcagagcacatgatggcacaatagaatata

SEQ ID NO: 928017 - DNA, 120 bp, Artificial Sequence
  ENSG00000268388_12 (sequence is synthesized)
cgagtgaagttctaaatgcaaggttgttcttattctgtgagtggcaaaactcatgcagtgagcagataaagctggcaggaggcattggcgccctaatgctgggcactaaccacctgcccg

SEQ ID NO: 928018 - DNA, 120 bp, Artificial Sequence
  ENSG00000268388_13 (sequence is synthesized)
gactgcgaatatctgttgggtcctttctatatctggtctattctcgtgtttgattatatcctggtggcaagaatagcaaaatcaactctccttcctatcccatgtggagaggcatgattt

SEQ ID NO: 928019 - DNA, 120 bp, Artificial Sequence
  ENSG00000268388_14 (sequence is synthesized)
gagtcagagagcattatcctctctgcgttatccaaccccatgtcccatgatgcactttgtagacaagcaagtgtccctggtggagaatccacagccacacatcctcattggttgcaagga

SEQ ID NO: 928020 - DNA, 120 bp, Artificial Sequence
  ENSG00000268388_15 (sequence is synthesized)
tcagtgtccaatatctactgccatgatcattctcagttttacatccacagagcttcatagaattctaacaccacaggtccaagtagaggttttggcctcagagtgggctagattccacct

SEQ ID NO: 928021 - DNA, 120 bp, Artificial Sequence
  ENSG00000268388_16 (sequence is synthesized)
ctgacagcagctgtgggactgtttttccatctgtaaaatggagacaagagtatcacctacctcatggtgttggtgggatcgttaaacagaattccgatcatgaaacccttagcctgctcc

SEQ ID NO: 928022 - DNA, 120 bp, Artificial Sequence
  ENSG00000268388_17 (sequence is synthesized)
ctgcataggctgcatgcgctcagtgagctatggctctgtttcatgctgactttaccatcatgtaagcagttttaaaaatgctagaagctttagtcatagaattaccatatgatacagcct

SEQ ID NO: 928023 - DNA, 70 bp, Artificial Sequence
  ENSG00000268388_18 (sequence is synthesized)
ctagaagctttagtcatagaattaccatatgatacagcctactgcagagtccagaggctgaggcaggaga

SEQ ID NO: 928024 - DNA, 120 bp, Artificial Sequence
  ENSG00000268388_19 (sequence is synthesized)
cacaaaaaagaagacatgtgtccccatcacagtatcatacagagtgcttccactgccctaaaataccctgtgctcttcctattcatccctctcttcaaccccagcaaccactgatccttt

SEQ ID NO: 928025 - DNA, 120 bp, Artificial Sequence
  ENSG00000268388_20 (sequence is synthesized)
taccatctccatggttttgcctttcccagaatgtcatattgttggaatcatacgctatgtagcctttgcaaatgggcttctttcaccgagcaatgtgcattgaaggtgcctctatgactt

SEQ ID NO: 928026 - DNA, 120 bp, Artificial Sequence
  ENSG00000268388_21 (sequence is synthesized)
ttcaagggttgatagctcattcctttttattgctaaataatattccattgtctgaatgtaccacattttgtttatccattcacctactaaaggacatcttggttgcttccaagtttgggc

SEQ ID NO: 928027 - DNA, 120 bp, Artificial Sequence
  ENSG00000268388_22 (sequence is synthesized)
agcagtgtgcacatccagacacatcatctccatcctccagaagccccctcctgttatcgccactcacaggtcacccgtctcctgacttgcagccacagagatagtcctgcctaattctga

SEQ ID NO: 928028 - DNA, 120 bp, Artificial Sequence
  ENSG00000268388_23 (sequence is synthesized)
acgtggtacaaacggaatcatacagaatgggcttggcttctttcactctgggctgtgtttatgagcatcacccagattgctgcatggaagccatcgtttgttcattttcaccaccataga

SEQ ID NO: 928029 - DNA, 120 bp, Artificial Sequence
  ENSG00000268388_24 (sequence is synthesized)
gtattctactgttgatgggacataggctatttattccttctactgttgagggacgcatagttatttccagctggagactggtatatgtctcttggctaccttctgcatgcatttctgttg

SEQ ID NO: 928030 - DNA, 120 bp, Artificial Sequence
  ENSG00000268388_25 (sequence is synthesized)
gaggttgtttcaggtatctcttaacgtataacagaccaccctcaaattgagtccttgaaacaattaccattttcttctttctcaggatttggtgcatgggatgggctcagttgggcagtt

SEQ ID NO: 928031 - DNA, 120 bp, Artificial Sequence
  ENSG00000268388_26 (sequence is synthesized)
cttctgttccatgtgatggtactggggctgcagtcattcagaggctcaactgggctgaacgtgcaaggtttcttgctcacgtggccatcagtggtgctggctgctgttgggagctccact

SEQ ID NO: 928032 - DNA, 120 bp, Artificial Sequence
  ENSG00000268388_27 (sequence is synthesized)
ggacttctgtccagagctcctcagctcacctctctgtatccttgccctgtggctcaggcttctaacaatacagaggctggattccaagaggagggaattagaagcgttcagccttcttaa

SEQ ID NO: 928033 - DNA, 120 bp, Artificial Sequence
  ENSG00000268388_28 (sequence is synthesized)
gaccaggattcagatgtcccagactgtcactgtattgaccggagcatttacaggccagcctagtaatttttccatcttgggcaggaatgggtggcatatgctgggggtaggggtagcatt

SEQ ID NO: 928034 - DNA, 120 bp, Artificial Sequence
  ENSG00000268388_29 (sequence is synthesized)
tatgcttgcttgtggagagtggattgtgtgctcagagtccacaaggatttaagaatccgagccctgctgcccttgcctcagcctgtgcattagggcccggtggtgagagcactgagccat

SEQ ID NO: 928035 - DNA, 120 bp, Artificial Sequence
  ENSG00000268388_30 (sequence is synthesized)
tgtgaatcaaggcccctccctcgacctgcatactaacaggccagaagagcttgcttgattttggtcctaggctcctgcctgtgggttggattccaggggcactctctcctccacaaacca

SEQ ID NO: 928036 - DNA, 120 bp, Artificial Sequence
  ENSG00000268388_31 (sequence is synthesized)
gacggtggcaggtacatcccctcaatggaaattgcccacacttcaccctaaagacagatcctgctgttcagcaacaatgtgagtggcccacacatttgtccagcatgaaaccgtttgcag

SEQ ID NO: 928037 - DNA, 120 bp, Artificial Sequence
  ENSG00000268388_32 (sequence is synthesized)
attcctttccagtacacagtcccgtcagccggtcacttcacgatgacagctcctcgaagcaccttttggtttgcagttgtgtagcttagaagtaggagcctgcacggcttcaggaattca

SEQ ID NO: 928038 - DNA, 120 bp, Artificial Sequence
  ENSG00000268388_33 (sequence is synthesized)
cagaaggagcacactttgtgcttggagaagttaattataggaatatcctgcaacctgctgctctgagcctgtgcacctggggtgtttccctggaggtcctgtgtatgaggatactcatca

SEQ ID NO: 928039 - DNA, 120 bp, Artificial Sequence
  ENSG00000268388_34 (sequence is synthesized)
gcatggggtttgggaagcctagcagtggagacaacctaggtggtcctctccaggggagtaggtaagagccctacagcagtgaaaagcattgaaggaaaagtgtgttcagcagtgctctta

SEQ ID NO: 928040 - DNA, 120 bp, Artificial Sequence
  ENSG00000268388_35 (sequence is synthesized)
atctgatcagagcagcctgaacacattctaaacacagggcatttagaactagggtagaggcactagagcaccatagatacaaactcagattctgaaggtaaatgcccaggttcaaatcca

SEQ ID NO: 928041 - DNA, 120 bp, Artificial Sequence
  ENSG00000268388_36 (sequence is synthesized)
agccccctcgccaagtgaccatgactcccccgagtcacctgacctctgtgtttacatcctcaaagttaagtagtcaggaaagggggcttggggcttgccacatggatggttgccactctc

SEQ ID NO: 928042 - DNA, 120 bp, Artificial Sequence
  ENSG00000268388_37 (sequence is synthesized)
ctttgcaaagtgtagtccccaaaaacaggtggaagagggaagggtccaattagaaggccgagtaccagctgccatgaatatgccagagctgctggctagtgataaataactgaaacccag

SEQ ID NO: 928043 - DNA, 120 bp, Artificial Sequence
  ENSG00000268388_38 (sequence is synthesized)
ggggacagcagagcttgggtgaccatacattctaggaaagaaaacatgcctgttgtcctggctttttatccagcttagacaaagatgggcaaagaaaataatttagaaaatggtagagat

SEQ ID NO: 928044 - DNA, 120 bp, Artificial Sequence
  ENSG00000268388_39 (sequence is synthesized)
gggcacagagaaagggcacggagggaggcacaaacagaaggccaagtgatggtggaggcagacattggagaaatgcctttacaagccggggaatgccaaggatgctggcaaccctgggag

SEQ ID NO: 928045 - DNA, 120 bp, Artificial Sequence
  ENSG00000268388_40 (sequence is synthesized)
tgggaagaacctggaacacaccctccgtcagagtctccagaaggaactggcccttcatcacctttcggacttctggcctccagaactgggcaagaaaatgtttctgctgttggaggccat

SEQ ID NO: 928046 - DNA, 120 bp, Artificial Sequence
  ENSG00000268388_41 (sequence is synthesized)
ccagctggtggtcatttgttatggttgccacagaaaacgaatatagatttagacatctaatttgcatatatagatatgcatgtgtatttgttaaataaaagataaagcatgacaactcga

SEQ ID NO: 928047 - DNA, 120 bp, Artificial Sequence
  ENSG00000268388_42 (sequence is synthesized)
ttactttcatatattttattttttctgtaataaaacaaattaaaatcacctgtcgtgacctcacaggggccagtgtgggttgtggcgtgaggcaggaagctctgcagagttccttggtca

SEQ ID NO: 928048 - DNA, 120 bp, Artificial Sequence
  ENSG00000268388_43 (sequence is synthesized)
aaaggattaattacaaaagaactccatgaacaccgagaagaagagaagggaatcctggcatttaaagccacaaagaaacttgatatggtcttgtctccttctctcaattgacagtgagaa

SEQ ID NO: 928049 - DNA, 120 bp, Artificial Sequence
  ENSG00000268388_44 (sequence is synthesized)
agaggatggtggtgaacattttccttctttcacacacacatgccttggcattgcgtttgcctgcatgcagctatggcctgcagccactgaagaatgcttgcataaggagctcttctctgc

SEQ ID NO: 928050 - DNA, 120 bp, Artificial Sequence
  ENSG00000268388_45 (sequence is synthesized)
acataccccgacacagtgatggtatcttgcagctgctgcttctgtccaaggcactgcagcctactcgtcaaaagcccgaagcccagctctgccagcagtgcactgtgtgctcttaggaaa

SEQ ID NO: 928051 - DNA, 120 bp, Artificial Sequence
  ENSG00000268388_46 (sequence is synthesized)
ttctttgaaagaaatacacagaaccaaaccaattttaattaaagatcttgtctttgtaatcaggcagccacaaatgaaggcaaaactgctttcatgtggcataatatacacagagctgaa

SEQ ID NO: 928052 - DNA, 120 bp, Artificial Sequence
  ENSG00000268388_47 (sequence is synthesized)
ctagttttcccataaaagggcaggttcttttcttcaaataagaaaagagtttgttcctaacaatatgggggatgcaacagaaagctgtcttttgcaaagtataaaattgcagatcctccc

SEQ ID NO: 928053 - DNA, 120 bp, Artificial Sequence
  ENSG00000268388_48 (sequence is synthesized)
gtggaagccatttcttgatgctaaaccaatgcgaacgtttgccaaacgcacatgcgagccgggattatcctaccctttgagattagacatgtgatcctgatttttaagtgaaaaacgcag

SEQ ID NO: 928054 - DNA, 120 bp, Artificial Sequence
  ENSG00000268388_49 (sequence is synthesized)
ccagaggccaaataaacatacctacaagtacatcgaaagctcaaatggttgagaaatgattgtaacacaccccggtgtgtatttctgaggaagaatcaacatgcacatggaaattgatgt

SEQ ID NO: 928055 - DNA, 120 bp, Artificial Sequence
  ENSG00000268388_50 (sequence is synthesized)
atttggccccgcggccccgttttcaaagcgcaggttccgatttcccgagagatggcaaaggccctggcaggaagtttacagggtttaacgtaaacaagttctgggggattctttaataat

SEQ ID NO: 928056 - DNA, 120 bp, Artificial Sequence
  ENSG00000268388_51 (sequence is synthesized)
aataatagagaattccgcgtgcgcagggcgggaggggggagttggcctaatgcccctgtgggctcggcctgccgccgccgcggggcctctgacactgcgcgccaggccaggttcctgaga

SEQ ID NO: 928057 - DNA, 120 bp, Artificial Sequence
  ENSG00000268388_52 (sequence is synthesized)
ggtaaaactgcccaggccccgggtatcaggatcatactcaaaccccaacccctgcccgccccagccaggaggggagacggttgggagtgggaggcctcggcgctgttctctggatgcaac

SEQ ID NO: 928058 - DNA, 120 bp, Artificial Sequence
  ENSG00000272540_0 (sequence is synthesized)
ggggcaaagccaggcataaagaaatggagacgtgggaaggggaccatgttgactgccaacttgcggaggtcagcattgagctggccagggaaacggaggcaggtggtgacaccactcatg

SEQ ID NO: 928059 - DNA, 120 bp, Artificial Sequence
  ENSG00000272540_1 (sequence is synthesized)
gtggctgagacaaggtggttcagatccccgtaggttggtgtggtcagcttcagagtgcggaagcagatatcatagagggcctcgttgtcaatgcaataggtctcatcagtattctctacc

SEQ ID NO: 928060 - DNA, 120 bp, Artificial Sequence
  ENSG00000272540_2 (sequence is synthesized)
aactgatggacggagagggtggcattgtagggctcgaccacggtgtcagacactttgggtgaaggcaccacactgaaggtattcatgatgcgatcagggtattcttctcggatcttgctg

SEQ ID NO: 928061 - DNA, 120 bp, Artificial Sequence
  ENSG00000272540_3 (sequence is synthesized)
ctggaagccctgcaggcagtcacagctctctgcctccttccgtaccacatccaggacagaatcaaccagctcggcgccctctgtgtagtggcctttggcccagttgttacctgccccaga

SEQ ID NO: 928062 - DNA, 120 bp, Artificial Sequence
  ENSG00000272540_4 (sequence is synthesized)
ctgacctggaatgcagtcaggagaaaagctcaattaacagggtatggaagatacatgatgtttccatctttcaacttttcaaataattccctcggatgtatcttctttctccttcactgt

SEQ ID NO: 928063 - DNA, 120 bp, Artificial Sequence
  ENSG00000272540_5 (sequence is synthesized)
gatatattctccccctactgccccataatttaccagcaatagtaggcactacctctaccctccgttagatttcagaacacatttctgtattagcactccaatacaacaatcatctcctaa

SEQ ID NO: 928064 - DNA, 120 bp, Artificial Sequence
  ENSG00000285835_0 (sequence is synthesized)
aggggctctgggagtggctgccaggttctggaggtggagctgacacttgtttcttctttcataaacacgggataatgcttttcatcccagatgaaagggaggggatgtgccttttgattt

SEQ ID NO: 928065 - DNA, 120 bp, Artificial Sequence
  ENSG00000285835_1 (sequence is synthesized)
taatgcttttcatcccagatgaaagggaggggatgtgccttttgattttttgagaaactcaactcaacatttcctgaatggggagaaaagaaaatgttccaactagctccagccagataa

SEQ ID NO: 928066 - DNA, 120 bp, Artificial Sequence
  ENSG00000285835_2 (sequence is synthesized)
tttggcccaggacactgacattatttattgagggtcggtgaaaggacatgtcccgtctttctgtcctttgattcttcctttctcccgcttgatttgtggctgctgacgttaaattgatcg

SEQ ID NO: 928067 - DNA, 120 bp, Artificial Sequence
  ENSG00000285835_3 (sequence is synthesized)
cagggagcatgcagtgatgtccccaagggaagcatattcatagaagtcaatgccaaccccacagtgaaacccaaggcctagaggagttattttgttttgttttgaaagagagggagaatt

SEQ ID NO: 928068 - DNA, 120 bp, Artificial Sequence
  ENSG00000285835_4 (sequence is synthesized)
ttggtaacagattcagtttatttaatttacataagactattcagctttttctttcattttgtataaatttttataagttatgtcttaagaaatctgtttcatgtaaaggatcaaatttgt

SEQ ID NO: 928069 - DNA, 120 bp, Artificial Sequence
  ENSG00000285835_5 (sequence is synthesized)
tagtccaaagttgtttataatattctttgttcttttaatgtatagagtctattgtaacaaatcctacacattaagcattcattactgatactgttgatttgtattctcttttactcatga

SEQ ID NO: 928070 - DNA, 120 bp, Artificial Sequence
  ENSG00000272542_0 (sequence is synthesized)
tatttttttccgtgtcataaagaaatttcattttaatcctcattcctctaaaataatttttatggttttatcagcatgatacttacaaagagcatatccccctttagacaaattatttta

SEQ ID NO: 928071 - DNA, 120 bp, Artificial Sequence
  ENSG00000272542_1 (sequence is synthesized)
ggcagccaagtttagtttatttgggtttcatgctataaattatgctaatttatgaaggttatttcttgttggatgcttgtagtattcatataatatttaaatgcaaaagagaatattaat

SEQ ID NO: 928072 - DNA, 120 bp, Artificial Sequence
  ENSG00000272542_2 (sequence is synthesized)
ataaagcattatcaattaaattttattcaacctgataatgttttctgtgatacatgatcatcgtaggtgtataactaattttgcattaccatttatgagtgatatagttgtgttcttttt

SEQ ID NO: 928073 - DNA, 120 bp, Artificial Sequence
  ENSG00000272542_3 (sequence is synthesized)
aaagtgtgtatgcaattagtagtggttatattcatttcgtgaaatctctttgaaggtcctttgttttaggagtgtaagtaattttcattataatatattcataaatttttaaatctcatt

SEQ ID NO: 928074 - DNA, 120 bp, Artificial Sequence
  ENSG00000272542_4 (sequence is synthesized)
atggggtcattcttagaatgaaataactctattcagaaggacgcagtcaaaagctaggaattcatttgttatccctctgtagttgttaggacaggagcactaatctggccaactaacctt

SEQ ID NO: 928075 - DNA, 120 bp, Artificial Sequence
  ENSG00000272542_5 (sequence is synthesized)
taaaagaacatgcaaagtcaaagatgtcaggttgtaccagtaaatattcaccggcaaactttttatatcaaagactggaactttcgaagatgctcctgggacttagtgtactctaacatc

SEQ ID NO: 928076 - DNA, 120 bp, Artificial Sequence
  ENSG00000272542_6 (sequence is synthesized)
tattaatccctggtaccttaggtgacttgtcatagaagtgctacatttacaagtagtatgcaaggaggcccaagaggacaaattcagttaaaggtcaaggaagcaattaacgttctctac

SEQ ID NO: 928077 - DNA, 120 bp, Artificial Sequence
  ENSG00000272542_7 (sequence is synthesized)
ttttccctaaagaacttccacagcaaatgttgccctccccctgcatccccaatcttaccaaggcaagtgcatatagtgaaatggaagttaaagttcaaataaaacatgtttccaatatta

SEQ ID NO: 928078 - DNA, 120 bp, Artificial Sequence
  ENSG00000261302_0 (sequence is synthesized)
cggacctcgcctttcccacttggttagagtcggctctgccgggagaaagcgattccagaattccctaagttaaaggaatttcttactccttcttgagcgccatccaagggccaggcctta

SEQ ID NO: 928079 - DNA, 120 bp, Artificial Sequence
  ENSG00000261302_1 (sequence is synthesized)
gtctaggaactggcaacaccgtggcgaccacgtcagacaagatcgctgccctcattgagttcccaggttggcaggggaaacaaaaatgtaataaataactgcactttgcaagaagagcta

SEQ ID NO: 928080 - DNA, 120 bp, Artificial Sequence
  ENSG00000261302_2 (sequence is synthesized)
tgaagaaaaaacagggtgatgggagagagaatgcttggatgttgaagggaggcctttctgagatggcgacatcttgagctgaataaagaaggatgagaaaggatggggcttgcaaagttc

SEQ ID NO: 928081 - DNA, 120 bp, Artificial Sequence
  ENSG00000261302_3 (sequence is synthesized)
acaagagtgaagtctccaggggaagccagcttagtgtttggagactagaaagaaggggtgtgcggctggaagatgggatgagaaaactaaaaatccagggggattttagcaacttgccta

SEQ ID NO: 928082 - DNA, 120 bp, Artificial Sequence
  ENSG00000261302_4 (sequence is synthesized)
cctcacacaactagcagcagagccaggattttaacccagacagttccagggctcaggtccttaccctctgggctggccttccccctctactgccccctgataccctcacttttctgaaca

SEQ ID NO: 928083 - DNA, 120 bp, Artificial Sequence
  ENSG00000261302_5 (sequence is synthesized)
ttggactcattcctgtagctggaggtagaggacggaaactcaaaagatgattgaagattaaaaaacaagatgattgaggctggacttctcaaaaccttgctgcagcctgagcttgagcgt

SEQ ID NO: 928084 - DNA, 120 bp, Artificial Sequence
  ENSG00000261302_6 (sequence is synthesized)
agaaggggtgtgcggctggaagatgctggaggtagaggacggaaactcaaaagatgattgaagattaaaaaacaagatgattgaggctggacttctcaaaaccttgctgcagcctgagct

SEQ ID NO: 928085 - DNA, 120 bp, Artificial Sequence
  ENSG00000261302_7 (sequence is synthesized)
cttctccaaccccaaatctcccagtttgatccgagagccctgaagatttgccttcacccggcgccccccagatgcttctttttaagccttgcttgtaaataggtgtcagtaagggtctca

SEQ ID NO: 928086 - DNA, 120 bp, Artificial Sequence
  ENSG00000261302_8 (sequence is synthesized)
ccatgcaggatgtgggcgtgtgggtgctccagatccccacaccggctgtcaccatccccctgctgttgccagtgcatcccttgaggatgcctggcaggttacaccccaccccgggggcaa

SEQ ID NO: 928087 - DNA, 120 bp, Artificial Sequence
  ENSG00000261302_9 (sequence is synthesized)
atggtgactgacaacagaacaagtgctcacctgcttgccccacagcaggacagttcagtgggaggaatttgttctagagcaccctggatcaggccaaggctttccccttccatattcggc

SEQ ID NO: 928088 - DNA, 120 bp, Artificial Sequence
  ENSG00000261302_10 (sequence is synthesized)
ttcttttgctcctctaataagtcacgcatgtggagccctaaggagctaaaagaaaattggaaatgagcttagctggcaagaacagacacaggggtagaggggagtgaatgttctgagaaa

SEQ ID NO: 928089 - DNA, 120 bp, Artificial Sequence
  ENSG00000261302_11 (sequence is synthesized)
tagggtcaacagcaaacagctcactagcacccaaacatcctgttgcaagcattcagctcacagcccacctgcacccaagcttcctgtctgcaagccttcagcccagacagcacaacttta

SEQ ID NO: 928090 - DNA, 120 bp, Artificial Sequence
  ENSG00000261302_12 (sequence is synthesized)
taaagtcccctgcagcccctgcctttttgcagacagcattccctctgctatgttgctcgttgctcccttggaacatatgtcccgcttttctctaataaatctacctttctttcccaacaa

SEQ ID NO: 928091 - DNA, 85 bp, Artificial Sequence
  ENSG00000273424_0 (sequence is synthesized)
tggggagtggaggggccttgctttgcttcttcttgactgactggtactctttttattatgtatgtatttatttattcatttagca

SEQ ID NO: 928092 - DNA, 120 bp, Artificial Sequence
  ENSG00000273424_1 (sequence is synthesized)
gactcctgggctcaagcgatcctcttgccttggcctcccagcatgttgggattacaggcatgaactaccgcacccggcccgtactctgtcttcacctcctctgggaagccttcctcagtc

SEQ ID NO: 928093 - DNA, 120 bp, Artificial Sequence
  ENSG00000273424_2 (sequence is synthesized)
tctggctctcaggtcgcccgtgcatacctgtcctgaaactgctttcccacctgtgttcccagggcagagagtggatgcccatggatggtttgtcaaaggaataaattagccttttttgga

SEQ ID NO: 928094 - DNA, 120 bp, Artificial Sequence
  ENSG00000261307_0 (sequence is synthesized)
agagcactcactgcagcctagtgtgggatggaggccaaggaaggtgccccagaaagggggatttctaaccatttacaataaatgacagaacagttggacaatctgcaacttgctgattgc

SEQ ID NO: 928095 - DNA, 120 bp, Artificial Sequence
  ENSG00000261307_1 (sequence is synthesized)
aaaaaatgtatcacaatgtttggaatggtgcagtggcagctaggggagctctggggaaatggtgtccttggagcagggctgggacaagagccgtgggcctggcttcctgaggacagtgaa

SEQ ID NO: 928096 - DNA, 120 bp, Artificial Sequence
  ENSG00000261307_2 (sequence is synthesized)
caagctgacaacccagtgggagaatctaggtgtaccctgagagagatgctgcattcatatacattcatttggatgacaagagttcattcattcattgattctcactgagcacctattccc

SEQ ID NO: 928097 - DNA, 120 bp, Artificial Sequence
  ENSG00000261307_3 (sequence is synthesized)
tgcactgagaactggtggtacacagaggaatccgaggagagactctgccctcgaggagctgacggtagaagaaggaagccatgcacttatagtcattcattcactcaggcagacactcat

SEQ ID NO: 928098 - DNA, 120 bp, Artificial Sequence
  ENSG00000261304_0 (sequence is synthesized)
atggagtaacagggtaaaaacagtcagaaggcatctcaccagcagcctctggaagagctctatagtcaaatagtttggagtttcaacttttaaggcagaagatgacagtgaagtgtactc

SEQ ID NO: 928099 - DNA, 120 bp, Artificial Sequence
  ENSG00000261304_1 (sequence is synthesized)
agttcagatttcatctgccaatgttgaaaggttgatgagaaaggactgctatgctgaagagcaaggtttccaaaaacagaatagctcaacctacaaaatgatgttggaaagaagttgcag

SEQ ID NO: 928100 - DNA, 120 bp, Artificial Sequence
  ENSG00000261304_2 (sequence is synthesized)
aggagcaggcgaaggccaaggacctaaaaaggaaaagcaggcatggggaaatggggctggagagctcacaaatatttatggggcatgcagctcctctgctaagtgctttcacagctcaaa

SEQ ID NO: 928101 - DNA, 120 bp, Artificial Sequence
  ENSG00000261304_3 (sequence is synthesized)
tcatttaattgggaaggtataatcccaaagctatatcaaatagcatttagagttacaaaacagaatttatatttcaggctaaaagcaatatcagggttagaaggaagcgacactgcctga

SEQ ID NO: 928102 - DNA, 120 bp, Artificial Sequence
  ENSG00000261304_4 (sequence is synthesized)
gaaatagatgtgggaagaagggccatagcaacaatgtgtcttggaatgggccataagaaccaattattggccgaggttatcgggaaaatactagggcatatgttgtgatcataagcaaag

SEQ ID NO: 928103 - DNA, 120 bp, Artificial Sequence
  ENSG00000261304_5 (sequence is synthesized)
tccggctccaccaggaaactctcctcttccaggaaagaggagtagcttataggatgcacccagaggagacacctgcatacctgatgctgccctgactgattggggagctaagtctcttgc

SEQ ID NO: 928104 - DNA, 120 bp, Artificial Sequence
  ENSG00000261304_6 (sequence is synthesized)
agcgggcatatttgggaatccattgttgctgcacatgtaaatcatggccttcaaatccagctgaccctgtagcagaaacacagtccccattctgtttcagaacttggttaccagtgattt

SEQ ID NO: 928105 - DNA, 120 bp, Artificial Sequence
  ENSG00000261304_7 (sequence is synthesized)
ttatctgcattggatctactttaataaaccccacagcctgaatagcagctactagggtagtgccagtggatgtatatggagactgggctggaatggctgagtgtgtgggtgcgcagctgg

SEQ ID NO: 928106 - DNA, 120 bp, Artificial Sequence
  ENSG00000261304_8 (sequence is synthesized)
gagcagccatggcagtaagtagacagccagtaacttctgataaaagggagtatctgaaaactgaaaggccccataggaatgccaacaacatttcagaagttttcaacccaaattaaagac

SEQ ID NO: 928107 - DNA, 82 bp, Artificial Sequence
  ENSG00000261304_9 (sequence is synthesized)
gccaacaacatttcagaagttttcaacccaaattaaagacgaaaaaagtgaagtagatgatgcaataaagagttggcaaatt

SEQ ID NO: 928108 - DNA, 120 bp, Artificial Sequence
  ENSG00000261304_10 (sequence is synthesized)
atagaagaagaaagaattcatcatcatttctaggaatatccccaatcataatcctaagactccagctcaaaacaataactggcaactcttcaataattaattaaaggaaggcacaccctc

SEQ ID NO: 928109 - DNA, 120 bp, Artificial Sequence
  ENSG00000261305_0 (sequence is synthesized)
tggcccagccggagcagctccatcctggaggaggcctgccggcagttccaggacacactgcaggagtgctgggacctggaccgccaggccagcgacagcctggcccaggcggagcaggga

SEQ ID NO: 928110 - DNA, 120 bp, Artificial Sequence
  ENSG00000261305_1 (sequence is synthesized)
ggactctggcgcctgcaaccttgatcgacagcaaagatgtccagtgtgtatcctgcatctgcctttcctgaccattcctcgtgccccattctccgtgggatagattctcatggggagtgg

SEQ ID NO: 928111 - DNA, 120 bp, Artificial Sequence
  ENSG00000261305_2 (sequence is synthesized)
gggagccttcgggtgtggcagaacggcatgatggaattcataaggtgagcagaaactcaaggaaaactgtccaaataccggctcgactcctgggtacgctggagcaaggatgaagaagct

SEQ ID NO: 928112 - DNA, 120 bp, Artificial Sequence
  ENSG00000261305_3 (sequence is synthesized)
ctgagactttgcacgtcagtaaccaccaacaccatgcctctggttcccacaccgcagggatcacctgaagtagaggatctcatgtaacttcatggctctctctgaacttctgtttcttta

SEQ ID NO: 928113 - DNA, 120 bp, Artificial Sequence
  ENSG00000261305_4 (sequence is synthesized)
tctgtaagatggggatcagaaactctgtcttaaggagttgttttgaggattaaatgaagaaacatgaaaagcaactgatgtccagtgccgagcacaaggcttttgtcccctacttacgca

SEQ ID NO: 928114 - DNA, 120 bp, Artificial Sequence
  ENSG00000261305_5 (sequence is synthesized)
ccaggtgtctgaaatcccaccactacttagggtacttcactccccagctgtgagctactcagccgcccttaagcagaaagagatgggatccgtgttccctgaaagctttagatggggtta

SEQ ID NO: 928115 - DNA, 120 bp, Artificial Sequence
  ENSG00000261305_6 (sequence is synthesized)
gagagaaaagatgcacccaaagatgtttcccagcccaagaacttgaaggaaaccaaaatatttcaccccaaaaaatacttctttgacacatttcaaggtggctgttcagaatggttggaa

SEQ ID NO: 928116 - DNA, 120 bp, Artificial Sequence
  ENSG00000261305_7 (sequence is synthesized)
atagaataaccaaaaagctgtctttttgtggagagatttgcatctgtagaggaaatctgcattgatgtagccaggctttctccgaggctctcccttgtctaactctaggaaagattaact

SEQ ID NO: 928117 - DNA, 120 bp, Artificial Sequence
  ENSG00000261305_8 (sequence is synthesized)
gagaggctgacacctttacagatctgaaagaaacatttaccctcagttctttctgagggctgctacctgtgaggtgtcatctacctaacaagactccctttgccaaccaggcctcctctt

SEQ ID NO: 928118 - DNA, 120 bp, Artificial Sequence
  ENSG00000261305_9 (sequence is synthesized)
ccctcccttccataacctgtcttgccactatctgagcccccatatttgtataaactcaagatggtggataagcttctgtatcccactgaggggttggggtaatcactttgtggttctctc

SEQ ID NO: 928119 - DNA, 120 bp, Artificial Sequence
  ENSG00000261305_10 (sequence is synthesized)
cgcgccctccctccccatcccacccccctccttcccctcgatccagccctcatgaccctgaccctggccgcggctgcaggcggctcgcccaggcgcgcagccctcggtcccacctccctc

SEQ ID NO: 928120 - DNA, 120 bp, Artificial Sequence
  ENSG00000261305_11 (sequence is synthesized)
tggctcgggcctgagcattccgcagcctcggccggcccgggcctcttctccgctgctctgctcccccaaggactttctgtgccccactcctacccaggcagggctgccctgtcttgggtc

SEQ ID NO: 928121 - DNA, 120 bp, Artificial Sequence
  ENSG00000261305_12 (sequence is synthesized)
ctttacgggggaccattccccagcgtccctgagacactcatcctgggatttcttcccctaaatacagacattctcaaaccaaatgagacctcgaggtccctacacctgatcctgcctccc

SEQ ID NO: 928122 - DNA, 120 bp, Artificial Sequence
  ENSG00000273428_0 (sequence is synthesized)
cacaatcaggtcccattctatagatggggaaactgaggcttgaggtcacataggcgtcgttcaaggctggtatacctgcaccctctcccatgtgaacaacatggttctgggtaatggggg

SEQ ID NO: 928123 - DNA, 120 bp, Artificial Sequence
  ENSG00000273428_1 (sequence is synthesized)
ctgtcatccagtctcctccctgcccctgctggtgcacttcctgcctctgctggtgcactttctgcccctactggtatatttgctgcctctgctggggcgcttcctgcctcggctggtgta

SEQ ID NO: 928124 - DNA, 120 bp, Artificial Sequence
  ENSG00000273428_2 (sequence is synthesized)
acttcctggctctgctggcgcacttcctgcccctgctggtgtatttcctgcccctgctggtgtacttccttcccctgctggtgcacttcctgcctctgctggcgcacttcttgcctctcc

SEQ ID NO: 928125 - DNA, 120 bp, Artificial Sequence
  ENSG00000273428_3 (sequence is synthesized)
aggccctacctagcctctccctcttatatatggaagtcttcccagttcactgacactggtaacagggactctgctcttggtgttgctgtctgccctggggatgggcatctgtgtcttcct

SEQ ID NO: 928126 - DNA, 120 bp, Artificial Sequence
  ENSG00000273428_4 (sequence is synthesized)
ttactactgctggctcaggacccagagctttgaagcatgtccagatgcaggtccgggcaccagagtctaaggagcccctacacccaccaggattttccaataaagagatgttcaccaatg

SEQ ID NO: 928127 - DNA, 120 bp, Artificial Sequence
  ENSG00000264488_0 (sequence is synthesized)
ccgcgcagatgccaggggcggaacctcctctccagcctgggtccctgctgtcctcagcttgagaagagaagggtatggtgccttcaaggaactggaagaaaaccattattgctggtggat

SEQ ID NO: 928128 - DNA, 120 bp, Artificial Sequence
  ENSG00000264488_1 (sequence is synthesized)
atcccccctccccaccagaaacagcaaagaaacagcaactggaagataacagaatcatgaaagcatgattgaagaacaaaaaaatgggacagctgacacttccacttctgttaagagttc

SEQ ID NO: 928129 - DNA, 120 bp, Artificial Sequence
  ENSG00000264486_0 (sequence is synthesized)
cggagctggaactcaggatggaactcaggatgggactgaaactggagcaggcccaggtgtgcagcgtcccgcagggtctcagccaggcacagattcagctggagacctgcccctggagcc

SEQ ID NO: 928130 - DNA, 120 bp, Artificial Sequence
  ENSG00000264486_1 (sequence is synthesized)
agagaaatcttggataagacacacccatctcttctgcctcaggaactgagactttgatgagactttgtttgcattggagacctgcccctggagccagagaaatcttggataagacacacc

SEQ ID NO: 928131 - DNA, 120 bp, Artificial Sequence
  ENSG00000264486_2 (sequence is synthesized)
catctcttctgcctcaggaactgagactttgatgagactttgattgcattcgtaggcacagattcagctggagacctgcccctggagccagagaaatcttggataagacacacccatctc

SEQ ID NO: 928132 - DNA, 120 bp, Artificial Sequence
  ENSG00000264486_3 (sequence is synthesized)
cagattcagctggagacctgcccctggagccagagaaatcttggataagacacacccatctcttctgcctcaggaactgactgagattttgatgagactttgattccattcgtaggcaca

SEQ ID NO: 928133 - DNA, 120 bp, Artificial Sequence
  ENSG00000264486_4 (sequence is synthesized)
ttgatgagactttgattccattcgtaggcacacattcagctggagacctgcccccggagccagagcaatttgctgctgcacatcaggatctgtatgacaagctgactcagcaagaaacgt

SEQ ID NO: 928134 - DNA, 120 bp, Artificial Sequence
  ENSG00000264486_5 (sequence is synthesized)
agaagtggttccaatgcaagactaggaccagaaccaggccctagcttagcttttcacctcaaaagtaggttgaaaatgtagaccaggatctgtatgacaagctgactcagcaagaaacgt

SEQ ID NO: 928135 - DNA, 120 bp, Artificial Sequence
  ENSG00000275703_0 (sequence is synthesized)
agagtactcatgcagaagagcaaagatatatctatggggatttaaacagcgttatttgtaatatggacaatttttaaaaaaaagttaatatccatcaatagggaacagttaaaagtctag

SEQ ID NO: 928136 - DNA, 120 bp, Artificial Sequence
  ENSG00000275703_1 (sequence is synthesized)
tgggcaggaaacaggacctcgactttggaccagattcaagactggctgaaacagggaagaggcacagaaagcacttctccgtaagacacgcccaccagcacgacagtttaccattgccat

SEQ ID NO: 928137 - DNA, 120 bp, Artificial Sequence
  ENSG00000275703_2 (sequence is synthesized)
ggcgacacccagaagttactgcctttttccataacaacctggaagttaccaccccttttctggaaatttctgaataacccactctttaatttgcatgtaattaaaagtcaatataaatgt

SEQ ID NO: 928138 - DNA, 120 bp, Artificial Sequence
  ENSG00000275709_0 (sequence is synthesized)
gcactccagcctgggcgacagggcgagattccatcttaaaaaaaaaacattatcctggattgttccagtgggctgattgtaatcatagggcctccaaaactgcaaaagagagtcaagagt

SEQ ID NO: 928139 - DNA, 120 bp, Artificial Sequence
  ENSG00000275709_1 (sequence is synthesized)
tccaaaactgcaaaagagagtcaagagtgacaagtaactatgaagaatgattagagagatacaacattgttggctttgaatatagaggaagggagcctccagcattgtgggtgacctcca

SEQ ID NO: 928140 - DNA, 120 bp, Artificial Sequence
  ENSG00000275709_2 (sequence is synthesized)
tcctcatgtgatcaatgttggacttctgaccaacagaactgtgaaataatctgtgtcttaagtttgtgataacttgttataacaccaataataatgtacggtatacccttcaagacattc

SEQ ID NO: 928141 - DNA, 120 bp, Artificial Sequence
  ENSG00000275709_3 (sequence is synthesized)
tttattccatgtgagcattctcctaaaattatgccctttcatgtctgcagtgctcttgcctatgcttcaacctgaaatattctatccttttgtaaaccaaaaataaaattataaacccca

SEQ ID NO: 928142 - DNA, 120 bp, Artificial Sequence
  ENSG00000234678_0 (sequence is synthesized)
aagagatcagaattcagcttccccagggacagcaaggccaagaaggtgtccagatcctggcctctctccagatcttggactctctcaaggccaagactctctctcttaagatctctatct

SEQ ID NO: 928143 - DNA, 120 bp, Artificial Sequence
  ENSG00000234678_1 (sequence is synthesized)
caaggccaagatctctctccagatattggcctctctcaaggtacttccaagatctcagagggccattcactgtggatctaatatgaagacagagaaaccagccttccagaggagcggaca

SEQ ID NO: 928144 - DNA, 120 bp, Artificial Sequence
  ENSG00000234678_2 (sequence is synthesized)
acactttgtgtggaatccacagatctgccctgatgatcatgaaggaatgcgaaagagcctggtaaaacgatatggacttgtgcaaatgcaaagcaatggtgaagtcatcacgaaccgcac

SEQ ID NO: 928145 - DNA, 120 bp, Artificial Sequence
  ENSG00000234678_3 (sequence is synthesized)
agactggacagaactcctatctggctgcaatggcttgggttcagtcagcccaggggccagagaattggctacaaagagctctggagtgcccctccctccaaataaagtattctaagcgtg

SEQ ID NO: 928146 - DNA, 120 bp, Artificial Sequence
  ENSG00000234678_4 (sequence is synthesized)
tgcatattcagtgccacttggcccggatcttagcaggcagtgctgggaaatcaggcccggctggtttaatgattgtcagagtctgtcatcccgcaccctctggggttgggcacggggcac

SEQ ID NO: 928147 - DNA, 120 bp, Artificial Sequence
  ENSG00000234678_5 (sequence is synthesized)
tggcctgggcaggtggcgggaacgttgctggggtgggcatctgtgctttcggctgccctctggcccaggaaattcctcccaggggccaggccagagatgggccaggcagggggagggcaa

SEQ ID NO: 928148 - DNA, 120 bp, Artificial Sequence
  ENSG00000234678_6 (sequence is synthesized)
gtgagggaacatgaacccctggctgacctgagtcagaaagctgctggcccctaaattccagagattcagcaacaaagaggcctagtagggagaggagttactaggtttaggggtttttcc

SEQ ID NO: 928149 - DNA, 120 bp, Artificial Sequence
  ENSG00000234678_7 (sequence is synthesized)
cagaacacccaggactctggccaggggctggaaggtgctccaggctcaatgctgggcaatactcatggattaattggtgctggctgggcctgccagcctagtcgtggccccagggtcccc

SEQ ID NO: 928150 - DNA, 120 bp, Artificial Sequence
  ENSG00000234678_8 (sequence is synthesized)
actaaagggctccttctccagcgcccactctgttggcaaggtcttcactaccatcacctgcctggactccatccaagcatcagggttgctgcagtcgctcctgaagagacccggctctgc

SEQ ID NO: 928151 - DNA, 120 bp, Artificial Sequence
  ENSG00000234678_9 (sequence is synthesized)
gaggagcctcctggacctggttcaatcttcacgcggagcttgttgagtgggttttcctctccagtgatgtccatgtgctgacgcagcagagcccgccccgttgcagcctccaagcaggtg

SEQ ID NO: 928152 - DNA, 120 bp, Artificial Sequence
  ENSG00000234678_10 (sequence is synthesized)
tacgcagcgcctggtgcagaatcaaacgtaagcctcgggaaaacgtctgtcaccacatccaagtgtattttcctgacagagacactgtgctgcctccttgtggcctcaagaagaacagcg

SEQ ID NO: 928153 - DNA, 120 bp, Artificial Sequence
  ENSG00000234678_11 (sequence is synthesized)
acagatacctgaagcttaataacattaccctcctggggacccagggcaaatagggacagttacagagagcctgactcagtccctagctccctgttgctgtgggctacaaaggacttggtt

SEQ ID NO: 928154 - DNA, 120 bp, Artificial Sequence
  ENSG00000234678_12 (sequence is synthesized)
aactcaggctgttggtctctctcctaagtgaggactgggggaatcgcacctttctgacagttacctttccttatcaaagtactgtatttttattttatcttatttcatttattttattat

SEQ ID NO: 928155 - DNA, 65 bp, Artificial Sequence
  ENSG00000234678_13 (sequence is synthesized)
aatttttgtatttttagtagagagggggctttaccacgttggccaagctcaaactcctgatctca

SEQ ID NO: 928156 - DNA, 63 bp, Artificial Sequence
  ENSG00000234678_14 (sequence is synthesized)
agcccagcccccggccttatttttagaaaatgatttgattttttttttttttttgagacagag

SEQ ID NO: 928157 - DNA, 66 bp, Artificial Sequence
  ENSG00000234678_15 (sequence is synthesized)
gtgagccaccatgcctggcaatgacttgatcttctgtgaaaacttagaattattttcatctaactg

SEQ ID NO: 928158 - DNA, 120 bp, Artificial Sequence
  ENSG00000234678_16 (sequence is synthesized)
tgatcttctgtgaaaacttagaattattttcatctaactgtttctgtcagacaaaagaaattatcaaccccaaatttttaaggatctctaagtctccttctgcattaaaaacaatgactg

SEQ ID NO: 928159 - DNA, 120 bp, Artificial Sequence
  ENSG00000234678_17 (sequence is synthesized)
agggaacagtggaggggtggggcacagggttttggaaccagccagctctgccctttcctagatgttttgactctgagtaagtggcttagcctctctcagcctcagtttcttcaactgtac

SEQ ID NO: 928160 - DNA, 120 bp, Artificial Sequence
  ENSG00000234678_18 (sequence is synthesized)
aatgggataaaaatatttgcttgcaggattcctaatggctgattaagatattcacaaacaggctcttgctatatatattctgaatgaaagtacagaatttgtacaaactttctggaagat

SEQ ID NO: 928161 - DNA, 120 bp, Artificial Sequence
  ENSG00000234678_19 (sequence is synthesized)
aatggacaatatgtactaaaaagactatgtaatttaaaacgttcagggccgggcgcagtggctcacagctgttgtctcagcactttgggaggcttagacaggcaggtcacttgaggccag

SEQ ID NO: 928162 - DNA, 75 bp, Artificial Sequence
  ENSG00000234678_20 (sequence is synthesized)
tctactaaaaacatagggagtgggatgtgggggagctgaggcaggagaattgcttgaactacggaggtggaggtt

SEQ ID NO: 928163 - DNA, 88 bp, Artificial Sequence
  ENSG00000234678_21 (sequence is synthesized)
tacagggagtgggatgtgggggagctgaggcaggagaattgcttgaactacacgctgcactccagcctggcaacagaacaagactctg

SEQ ID NO: 928164 - DNA, 120 bp, Artificial Sequence
  ENSG00000234678_22 (sequence is synthesized)
ttatgtttctaagaatttatcattgttgaaatcatctgatatgaatagacatttatgtgtaaggaaatttgtcaacatatttcaatggaaaattggaaacaaccagtaaattaaaaaaca

SEQ ID NO: 928165 - DNA, 75 bp, Artificial Sequence
  ENSG00000234678_23 (sequence is synthesized)
ttcaatggaaaattggaaacaaccagtaaattaaaaaacatccatatatgcagctatagaagaaaatctagaggc

SEQ ID NO: 928166 - DNA, 70 bp, Artificial Sequence
  ENSG00000234678_24 (sequence is synthesized)
taatgacctggggaaatgtttttttaaaaaaaagtcagttgtcaaaccatgtgtggtttgacaattcata

SEQ ID NO: 928167 - DNA, 120 bp, Artificial Sequence
  ENSG00000234678_25 (sequence is synthesized)
aaagtcagttgtcaaaccatgtgtggtttgacaattcatacatacagaaaaatgttggatacacactactgcctcgtctcttcacacccacttgtattctgaaaccccataaggagatca

SEQ ID NO: 928168 - DNA, 120 bp, Artificial Sequence
  ENSG00000234678_26 (sequence is synthesized)
cactggccccacaggttaagaatgggaggcagactccttaggagaggggtgggcactttaccaaagaggatggtggagatcctcctctgggcgtacatggtgaaaccttcattgagccag

SEQ ID NO: 928169 - DNA, 120 bp, Artificial Sequence
  ENSG00000234678_27 (sequence is synthesized)
aattcaccccagttggcgttggtgaccaggttcccaaaccaactgtgggagatctcatggatgatgacatctgccaaggagcggtccccagctagcaggcagggggtgacaaaggtcaga

SEQ ID NO: 928170 - DNA, 120 bp, Artificial Sequence
  ENSG00000234678_28 (sequence is synthesized)
caagggttctccattcctccaaatggaaaggacggtggcatgaagagcaagtcatacctgccgagaagcggggaggtcaccaagaggccctggcttcccggagcagaccctacctcgcct

SEQ ID NO: 928171 - DNA, 120 bp, Artificial Sequence
  ENSG00000234678_29 (sequence is synthesized)
ccctttccagcctatttccaagccctaacagatgcagtcactaaacaggcagagtacgacttcgggcccagtgcggaaaataaagcccaggctcctcaatgcttctcccacgtggctccc

SEQ ID NO: 928172 - DNA, 120 bp, Artificial Sequence
  ENSG00000234678_30 (sequence is synthesized)
ctgccttgctgggacttccctcatcgaggtggtgtctgctctcctggagctcactctccaggcatttgtttccctctctccttccaagcaggggtggaggtgataaatgtattatcagct

SEQ ID NO: 928173 - DNA, 120 bp, Artificial Sequence
  ENSG00000234678_31 (sequence is synthesized)
ccatcacatggagttccctggaggccaacttggggtcataaagaccaacctggagccttttatctaaggagcctaaagtctgaagatgtcaaagttaaaaacagagtgtggggaaacttc

SEQ ID NO: 928174 - DNA, 120 bp, Artificial Sequence
  ENSG00000234678_32 (sequence is synthesized)
cagcaatgggaaaacacaggtcaacaaaggaccttgacggtgctgccccatctcaaacttggcaactgcaggtcacattttgaacacctcaagaacctcttctctgccgggcctggtggc

SEQ ID NO: 928175 - DNA, 84 bp, Artificial Sequence
  ENSG00000234678_33 (sequence is synthesized)
ctcatctcctaggccctctcctcagcaacagtgagaagcctggctcataccctcctctcttcctcctctccttcacttctggga

SEQ ID NO: 928176 - DNA, 120 bp, Artificial Sequence
  ENSG00000234678_34 (sequence is synthesized)
tcataccctcctctcttcctcctctccttcacttctgggatcagggaaactttgctctgggaggcaggaggtggaaaagccacacgaagaggaagaatggaagccagtgactcagtttaa

SEQ ID NO: 928177 - DNA, 120 bp, Artificial Sequence
  ENSG00000234678_35 (sequence is synthesized)
caggagacactagagtcaatgtgataccacaccttccccaaacataaggtccaaaaagcttctctcctgttgccaaaaattcttctatcaccccgttgtactcctccttggcagcatcaa

SEQ ID NO: 928178 - DNA, 120 bp, Artificial Sequence
  ENSG00000234678_36 (sequence is synthesized)
tcaggcagggctcagcccacacccggctcctaaagacaagagagcagagaaagcagaatggtgtttagagaccatcgcagtgacctgatcctgaaagcacctgtaggaaattggcctccg

SEQ ID NO: 928179 - DNA, 120 bp, Artificial Sequence
  ENSG00000234678_37 (sequence is synthesized)
ccaagtgaatgtgacaatgcagtcagccacagtgacggagtgcaagatcggatcaccacacagatccaagagaccgctcaccacacctgagaaacaagaacccaagacagcctcatggag

SEQ ID NO: 928180 - DNA, 120 bp, Artificial Sequence
  ENSG00000234678_38 (sequence is synthesized)
gtggaaccgtgctacgcagttatggcttcactactgaatgcgatcttgcaaaagtgatttaacctctgtgagcctcagtttcctcatctgtaaaatgagtgaagattaaataagacaaca

SEQ ID NO: 928181 - DNA, 120 bp, Artificial Sequence
  ENSG00000234678_39 (sequence is synthesized)
cacaaaagcccttcaaacatttatacagtaaatgttagttttcttctccctacttagaggagagataagaaagcgttctaatagtagaatctggaattgaataaaaccttaagagacaaa

SEQ ID NO: 928182 - DNA, 120 bp, Artificial Sequence
  ENSG00000287249_0 (sequence is synthesized)
cccgggccattcttttaaagcccaggcagagcgcgggtgggaagcgtgcgaggagagctgagccagggagttgcggggaggagaagaattagaggagacagcactgatgggagtgacaga

SEQ ID NO: 928183 - DNA, 120 bp, Artificial Sequence
  ENSG00000287249_1 (sequence is synthesized)
agcggtgccggttaactccccaccatcaaaagtatcttctgctgtagtctggcacaaggagtgaaaggttaatagccaagaaagaaagaaggaagaagaaaacagctccccgtacagaga

SEQ ID NO: 928184 - DNA, 120 bp, Artificial Sequence
  ENSG00000287249_2 (sequence is synthesized)
tacagagacagaggaaggggggatttgaacaaagaaaaaaccccgtgtgcgtcggaaaagtggctgcttatacgtatcccaaatctaaaggaagttttttttttttttgagacggagtct

SEQ ID NO: 928185 - DNA, 120 bp, Artificial Sequence
  ENSG00000287249_3 (sequence is synthesized)
caatctaaaggaagttttaaaaggttacttccttttgatttctgttaagaaaagggagtgtttatgtgtttgtttccaaatattatttctcagctgaaaatccattttttaaaacactac

SEQ ID NO: 928186 - DNA, 120 bp, Artificial Sequence
  ENSG00000287249_4 (sequence is synthesized)
cttaaaagttcttctaccactcctgtggaaatatatgagcccatcttcaagaaataacagtttgaaatgtgaaaacttaagctttcctttaagaaagaggaatatgaactagaacggcaa

SEQ ID NO: 928187 - DNA, 120 bp, Artificial Sequence
  ENSG00000287248_0 (sequence is synthesized)
atttattcaggatatgaaagtgaaaaagcattcaaaacgtttgcatctaaatcttaatctggtgaaatttcttctttcaattacagttcaaaggcagttattaactactcattgtgtgag

SEQ ID NO: 928188 - DNA, 120 bp, Artificial Sequence
  ENSG00000287248_1 (sequence is synthesized)
ggacacaggaaaaagagtatacaatccttaatgggaataagcttccattttactttggaggcaaaaatatgcagaaacactttaagtacaagtctcctaaggataaaaatgaatacaata

SEQ ID NO: 928189 - DNA, 120 bp, Artificial Sequence
  ENSG00000287248_2 (sequence is synthesized)
tttcctaacatgaagttgtcaggaaacaactgattccaagtattacctacccgtcccaggtgtcatgtgaggtcacacttcctttgatgcccaaatcacataagactgaacttccactat

SEQ ID NO: 928190 - DNA, 120 bp, Artificial Sequence
  ENSG00000287248_3 (sequence is synthesized)
acctcaccaaaggatgcacaggacccctcctccacatgtttctaaggatccccagggagtgctttcgggattctgttttttgctggattttgctgtttttaaattaattcatttgtttat

SEQ ID NO: 928191 - DNA, 120 bp, Artificial Sequence
  ENSG00000287248_4 (sequence is synthesized)
tttggttgggtgcacttccctttagcacaatccactggaacagcataatatatgacatcaatacataaccctaaatctaggttattcaggattccagaacactgcagaaggactttagca

SEQ ID NO: 928192 - DNA, 120 bp, Artificial Sequence
  ENSG00000287248_5 (sequence is synthesized)
gaacagcaagggttgcttccaggcatcccagcaaggacagtgcctccaccataatataaactgtgttttataaaaattaaatgagaagaatgcatgtgaaaatgcctaacatggtgtttg

SEQ ID NO: 928193 - DNA, 79 bp, Artificial Sequence
  ENSG00000287248_6 (sequence is synthesized)
atgagaagaatgcatgtgaaaatgcctaacatggtgtttggcactgtatcagtctgttttcacgctggaaagtttaact

SEQ ID NO: 928194 - DNA, 120 bp, Artificial Sequence
  ENSG00000287248_7 (sequence is synthesized)
tggcagaaggcgatggacgagcaagtcacatcttaagtggatggcagcaggcagagagagctcatgcagagaaactcctgttttcaaaaaccatcagatcttgtgagacccatttactat

SEQ ID NO: 928195 - DNA, 88 bp, Artificial Sequence
  ENSG00000287248_8 (sequence is synthesized)
ctatcagaagacccatctcccaccgggtccctcccacaaaacctgggaattatgggtgctacaagatgagatttgggtggggacatag

SEQ ID NO: 928196 - DNA, 120 bp, Artificial Sequence
  ENSG00000287248_9 (sequence is synthesized)
aagagggtagaatatggtatatattgcattattcagtactaaaagagctcagaatgacattgtttaacccgtggtatttgccacctccaatccaaggagccatattccagagttacaaga

SEQ ID NO: 928197 - DNA, 120 bp, Artificial Sequence
  ENSG00000287248_10 (sequence is synthesized)
gaaagagaaaacatttcaagttgatgcctgcgtttctaggtagaatcacatgatgacttccttcccgttattatagccctggctccctgttagtcagggaagatgaacctagaggaagta

SEQ ID NO: 928198 - DNA, 120 bp, Artificial Sequence
  ENSG00000287248_11 (sequence is synthesized)
gaaggaagaagagtgacatgcaggaagcttccctagaaacattctcattagccttccttgggtctgtgcctcgatacaccagcccatcatcatcatgatcatcaacaccattatcatcat

SEQ ID NO: 928199 - DNA, 120 bp, Artificial Sequence
  ENSG00000287248_12 (sequence is synthesized)
cattgtgctctgtagcagccacagacctggcagttctcaatggccatttacagaatgcccacatgtgctgggctctgtgagagactatacagacactggacaatcaagtgaagagtgatt

SEQ ID NO: 928200 - DNA, 120 bp, Artificial Sequence
  ENSG00000287248_13 (sequence is synthesized)
ctgcttgcaaatggacagtgaagagagtgcttcccatcccttcgtatttgcctttgatgactaagaatgaggcacattgttgcctgtggagttaggaaaacaactttccaatgacccact

SEQ ID NO: 928201 - DNA, 120 bp, Artificial Sequence
  ENSG00000287248_14 (sequence is synthesized)
ttcccatatctcttagctattgcagctcatacaatctcagggctggaaaagatcctagaaatgatcagactcactttgcaaaaggacatgaaagtccagagaagctgtgactcacctgaa

SEQ ID NO: 928202 - DNA, 120 bp, Artificial Sequence
  ENSG00000287248_15 (sequence is synthesized)
gtcagggaactcatcaatgagaacaggaacaggagcctgggttacctactttcaagctcagcagactttccagcataccaccatgcctctcttcttgaataatttcctgaagttctaaga

SEQ ID NO: 928203 - DNA, 120 bp, Artificial Sequence
  ENSG00000287248_16 (sequence is synthesized)
aacatgagtagaatatacctgatactaaaacaatatgagtatttctggtagaagtagtaaattgcctgtttctatattagaacaatgattttataaagattattattactaagaagacaa

SEQ ID NO: 928204 - DNA, 120 bp, Artificial Sequence
  ENSG00000287248_17 (sequence is synthesized)
agagaatatttctgaaatgttgacagttggtatacttttctggaattccaatttgctttcctggttaaattttggagtctcaaattttattattaaattatcatatctttaactattaaa

SEQ ID NO: 928205 - DNA, 120 bp, Artificial Sequence
  ENSG00000287247_0 (sequence is synthesized)
ccattttataaatggaaagccactgcaaggtttctaagcaggagaggaacaaaatcaagtttgcactgtgcaaagatcattccagctacagtgtacagaatggattaaagagaaggaagg

SEQ ID NO: 928206 - DNA, 120 bp, Artificial Sequence
  ENSG00000287247_1 (sequence is synthesized)
gtgaatgtgaggagaggggttaagaggctattgcagtgaggggggtgagagatgatggtggctgggccccaggtgggggcagtgaaaaggagagaaatgagcacattcaagagcccttta

SEQ ID NO: 928207 - DNA, 120 bp, Artificial Sequence
  ENSG00000287247_2 (sequence is synthesized)
ggaagggaaccctcagttcaccctccacacagcagcaagatttggaaggcaagtcagataaaaactgtcctcaatttaaatcctttcaaaggcttcctggtgcccttgggatggaatctg

SEQ ID NO: 928208 - DNA, 120 bp, Artificial Sequence
  ENSG00000287247_3 (sequence is synthesized)
gaatcatttccaacaagactgtctccgggcctctctctgctgtccgcattgccagcccctggctctctgtttccatgtttttcgcatgctagttcctctgcctgaagccctcttccgaca

SEQ ID NO: 928209 - DNA, 120 bp, Artificial Sequence
  ENSG00000287247_4 (sequence is synthesized)
acttccacactgagggctcctccttgttttttaagcctcagcttaaatatcccctcctcccagcaaacttcctggaccatcccatcaaaaaaagctattaagaaagaggaaaagttgaag

SEQ ID NO: 928210 - DNA, 120 bp, Artificial Sequence
  ENSG00000287247_5 (sequence is synthesized)
acagaagctgaataaagaaatctttcaatggaagatacctgcaatgaaacaactcttcccttctttttaaaaacacttctagaaatgggaaaaaaaaatgaagaaacagatcgaggaggt

SEQ ID NO: 928211 - DNA, 120 bp, Artificial Sequence
  ENSG00000287247_6 (sequence is synthesized)
gtcagactctaacactctcaaacctgaatatggagtacagtataatgaaacaacaaagtccccttgctaagtcttatcaaacatttctgaaaacatccattagcctctttttcctttcaa

SEQ ID NO: 928212 - DNA, 120 bp, Artificial Sequence
  ENSG00000287247_7 (sequence is synthesized)
tatgtgactgttctgccagagtgttgctttttagctggacattttaattcaacaatgagaaagaaaatcctccttttaccatcttaacagaatcaagacattaatgggatcaaattgtca

SEQ ID NO: 928213 - DNA, 120 bp, Artificial Sequence
  ENSG00000287247_8 (sequence is synthesized)
caatagctgattttctatcctcagctgtgtaagggaattcaccatgtctatttgttcatgcgtattataaacattttcaatgtcttttgtgaaaatttcattataaccagctaagggcat

SEQ ID NO: 928214 - DNA, 120 bp, Artificial Sequence
  ENSG00000287247_9 (sequence is synthesized)
tggtttttcaaacctctggaagtgttaagaagagtttgggtagactgtcttctgaataaaagaaggattactctgattgttcttcctaaggaatattttaagattatgaatgcattgtat

SEQ ID NO: 928215 - DNA, 120 bp, Artificial Sequence
  ENSG00000287247_10 (sequence is synthesized)
catgtgcatttaactcaactctacttttttatgagcatctagtgggctcttaaaaacacaataaaatttgagacaaaattccacaaaaactcagataagagaaaattacctatttctgaa

SEQ ID NO: 928216 - DNA, 120 bp, Artificial Sequence
  ENSG00000287247_11 (sequence is synthesized)
tcctccttggagaatgttttagagagattgaaaaaggacattgatggattcctgcagaagaaagtttaagaagtaataatatctgagctgagtcgaaaaaaaaacaaaaagatgctgaag

SEQ ID NO: 928217 - DNA, 120 bp, Artificial Sequence
  ENSG00000287247_12 (sequence is synthesized)
tgtttccagtgtattctgctgatgctttaagttctacactgtagtaattggaatgggatttcattacgagaagtttttacccaatcacaccaactgcatccttgtaagagcgatggagac

SEQ ID NO: 928218 - DNA, 120 bp, Artificial Sequence
  ENSG00000287247_13 (sequence is synthesized)
taagcgtacctgtgatgaccattaccatcaagtctccagggaaacaactcacaaagttatcaaatctataaaagtatagaggaaaagcataacatgctgccaacaagcccagcactccaa

SEQ ID NO: 928219 - DNA, 120 bp, Artificial Sequence
  ENSG00000287247_14 (sequence is synthesized)
aatgcttgaagctttgaagctttaaaataaaataaacaaataagttacagaattccacctaaacaatcatgaagaaaaatactttattttgaagattttaatactacaaacaacacattt

SEQ ID NO: 928220 - DNA, 120 bp, Artificial Sequence
  ENSG00000287247_15 (sequence is synthesized)
cccttgagaaatattactcatatttcttttttcttcaaagaatatacagatttagtaagattgtcaagtacagtgcagttgaaagtttaggtaaagttaaagttagccatcaatgcagat

SEQ ID NO: 928221 - DNA, 120 bp, Artificial Sequence
  ENSG00000287246_0 (sequence is synthesized)
gactggggatgatgaccccggcatcccgcagaaacaccttaaggatttaacgttttacctgcatctacattaaaacgcacagtatctctcagatatgtatgtgtatgatcgccagatggg

SEQ ID NO: 928222 - DNA, 120 bp, Artificial Sequence
  ENSG00000287246_1 (sequence is synthesized)
agctatccgtatctttctgaaacagtcactggcgctgttgctgtaatgaaaagcacttgaagaagaaaaaaagaaacctgaataacagatgcgtttgcattatttcaaagacccatctgg

SEQ ID NO: 928223 - DNA, 120 bp, Artificial Sequence
  ENSG00000287246_2 (sequence is synthesized)
catgaaaggtcttggcaaaaggcagcctctgtatgttgacttcattcttctctttttgcaactggcttctgttactggtccacacggcagaagtcaaggccacccagagcttcaaacatg

SEQ ID NO: 928224 - DNA, 120 bp, Artificial Sequence
  ENSG00000287246_3 (sequence is synthesized)
gtgaggatccagcctatgataaagaaattgaatccatcttttagtcacagttctaaagccttggggatactctggaattaggtcctctaaagagaagaatcctctgtttcagttcataaa

SEQ ID NO: 928225 - DNA, 120 bp, Artificial Sequence
  ENSG00000287246_4 (sequence is synthesized)
gaaccgtcataggtgctgtgagtcacccatgtgatcatgtggatttgcagaagggtcagtagaaggactggggaatgggagtgggaaagtcctccaatttgtgaatcgcaaacttcacaa

SEQ ID NO: 928226 - DNA, 120 bp, Artificial Sequence
  ENSG00000287246_5 (sequence is synthesized)
ctttaatagtaatggaaacatgtctgtttaatgaaaatcattatttattatcaaatccaaatgttaatgtgcattaaaagattgttcttaaaacagaatacttccaatttcacatttaat

SEQ ID NO: 928227 - DNA, 120 bp, Artificial Sequence
  ENSG00000287246_6 (sequence is synthesized)
taatcaaagccaacatgaattttaatgtttattaagggacacatacagcattgcctctgaaatctgtaagaaactattagattcagtgacccagaaacacacacacacacacacacacac

SEQ ID NO: 928228 - DNA, 81 bp, Artificial Sequence
  ENSG00000287246_7 (sequence is synthesized)
atagttatatatgcatagctatatttatgtaacttttatataatatatatgaatgtgggatggggggaaagttcatcaggt

SEQ ID NO: 928229 - DNA, 120 bp, Artificial Sequence
  ENSG00000287246_8 (sequence is synthesized)
tatatatatgaatgtgggatggggggaaagttcatcaggtagtggcaaacaataacatagccagaattggtctggatttggcaagcaggtctagaggtctgcgttttctaaagtctcagc

SEQ ID NO: 928230 - DNA, 120 bp, Artificial Sequence
  ENSG00000287246_9 (sequence is synthesized)
atgctcctcataacacttcctgtaattcatttcagcattcagcagcagccccccatgaagtaagtctggcattatatcttaaagagctttatgaaaggatgccttgctcaattgtgagca

SEQ ID NO: 928231 - DNA, 120 bp, Artificial Sequence
  ENSG00000287246_10 (sequence is synthesized)
atctttttgaagtgcacaccatgctttcaacaagaaaatacatttggagtgtttatagaaacagctcttatccactgtgttagaaagtggattcttgctagacctttgccataaagcaaa

SEQ ID NO: 928232 - DNA, 120 bp, Artificial Sequence
  ENSG00000287246_11 (sequence is synthesized)
atgggcctaatcaaatagcacctaagcagggtgcagcatctgccctcatgtatctcagccaatggcatttctaagccaaattgttaaaggcatttcctggacataggagcaatcacagat

SEQ ID NO: 928233 - DNA, 120 bp, Artificial Sequence
  ENSG00000287246_12 (sequence is synthesized)
gggtgaaattttcagcattagcaccagtttactttgtcctcttgagctctgaaatgctactgaatctgctactaatctcttctcttctttttacactcagtgaactagggaggtaggatg

SEQ ID NO: 928234 - DNA, 120 bp, Artificial Sequence
  ENSG00000287246_13 (sequence is synthesized)
agtaatttgaagataacaaaacatatcagagaagagaattttcccttaaaataacgcggtcatttttgctaaagtcaatattctacgtgtattgtcatgtataacttttatttttttaac

SEQ ID NO: 928235 - DNA, 120 bp, Artificial Sequence
  ENSG00000287245_0 (sequence is synthesized)
gaaccagagtgggttctcagagtcttggctttctttctgcagcctgtctgcctcctaagcagctgagattgtttccccactacagatgagtgataagctgactgcaccctcacggataat

SEQ ID NO: 928236 - DNA, 120 bp, Artificial Sequence
  ENSG00000287245_1 (sequence is synthesized)
tctatcaactcctgggaccatcgcatagagggtgcttgagacatgctgcactggacgatgcacacaccccatctctccaacatgactaggccaccaggatgcatcacagtcctgacccca

SEQ ID NO: 928237 - DNA, 120 bp, Artificial Sequence
  ENSG00000287245_2 (sequence is synthesized)
atgcaggagactgaaagtcaccaaggactgagacatgctgtcgagccacaatcagaagagaaactggagttgaagaagagccaggtctggccacacagagaagtgaaaacctccatttaa

SEQ ID NO: 928238 - DNA, 120 bp, Artificial Sequence
  ENSG00000287245_3 (sequence is synthesized)
tggtcagaggcaaagtacaaagttaggcatcagagaagtgttccgttttggtcactattatttcttaagaatctttctgaacactccagaactaaaggactagaagtccagggcccttgc

SEQ ID NO: 928239 - DNA, 120 bp, Artificial Sequence
  ENSG00000287245_4 (sequence is synthesized)
tctcagtgtctgattagctgctgtcatctgcctcgaaagctgccccatggttttttccatccttgctagcagcacaaaccaactggtttagcctaacattgataaaactacagaatctca

SEQ ID NO: 928240 - DNA, 120 bp, Artificial Sequence
  ENSG00000287245_5 (sequence is synthesized)
gatttggaaggatgcttttaaagcaaatagccaagctcctagctaattttctaattttgttgctacaagaataaagaatttaatgtgggtgtggagggagagttatttgagtccattttt

SEQ ID NO: 928241 - DNA, 120 bp, Artificial Sequence
  ENSG00000287245_6 (sequence is synthesized)
cttctggtctttccccttttccaagtatataggcaatcctgcactcattgcctcagggaggggaggcaattagtcagaagatataaatagccaattggcactttttgtctctgtgtttta

SEQ ID NO: 928242 - DNA, 120 bp, Artificial Sequence
  ENSG00000287245_7 (sequence is synthesized)
aaagagggaacttagaattttggggatgatgtcaagatcaaatgtgtgggagaaacagaggtcaaagagcattgacttcctccacccaccacctagaataggattctctgaggtctgagg

SEQ ID NO: 928243 - DNA, 120 bp, Artificial Sequence
  ENSG00000287245_8 (sequence is synthesized)
catggagagtgaagagcagataatgatgagaacagacagaatgaggggttcaagagccaggttcccttctttctgggcagtaggtagcaataccccaaagcaggaggtagcaatacccca

SEQ ID NO: 928244 - DNA, 120 bp, Artificial Sequence
  ENSG00000287245_9 (sequence is synthesized)
aataccccaaagcaggaggtagcaataccccaaagaggagatggcttcgtgcagggtctaggcacaccagttcattgcctcttaaagatttctggtgtgaacctgggaggcgaagcttgc

SEQ ID NO: 928245 - DNA, 120 bp, Artificial Sequence
  ENSG00000287245_10 (sequence is synthesized)
caaacaaacaaacaaacaaacaaaaaccaaacaagatttctggccctcaagctatgcagcaaaatatctctgtgagcctccagttctaaaaggccatgctgcaagccaaatactctctca

SEQ ID NO: 928246 - DNA, 120 bp, Artificial Sequence
  ENSG00000287245_11 (sequence is synthesized)
aaaggccatgctgcaagccaaatactctctcagggtaactcaatgggaacagatggctcagggaccagaaggctcaccctccctcaatgtactgctaaaggcactaagtaaatcccaaca

SEQ ID NO: 928247 - DNA, 120 bp, Artificial Sequence
  ENSG00000287245_12 (sequence is synthesized)
gggtctttgtctcaacccccgggaagaagagagaaaccaataataatcggagagtgttacccttagcctgctagtacaaagataaaacatcaaattgagttagaggaaatgttatttttc

SEQ ID NO: 928248 - DNA, 120 bp, Artificial Sequence
  ENSG00000287245_13 (sequence is synthesized)
tagatcaatgcagtctatggactgagattcatagatctactatacacataaacacatgtaaaactacttaacacataaaatgttacctatattattagcaatgtaatattatcagtgagt

SEQ ID NO: 928249 - DNA, 120 bp, Artificial Sequence
  ENSG00000287245_14 (sequence is synthesized)
tgaaagtcagctacaaaatctgaatgtcaattgacctccacgtggttatcttatgtccagatggaaaaacgttggttcaactcattgtctttttaaaatccattcttaaaagagaaaata

SEQ ID NO: 928250 - DNA, 120 bp, Artificial Sequence
  ENSG00000287245_15 (sequence is synthesized)
cttcattcagcactctgacaattccctggcaaagtgtagaatgtatatgcatctccattagattttttcgtctgctagatttgactatttgtttcaactacgctcctttttttttttttt

SEQ ID NO: 928251 - DNA, 120 bp, Artificial Sequence
  ENSG00000287245_16 (sequence is synthesized)
ttttttttttaagagatggagtcttgctctgttatccaccctggggtgcaatggcacagtcatagcttactgtaatcttgaactcctgggcacaagtgatcctcccacctcagcctccca

SEQ ID NO: 928252 - DNA, 120 bp, Artificial Sequence
  ENSG00000287245_17 (sequence is synthesized)
gctgagattacaagtgtgagccactgtgcacagcccaattatgctacttttgagtattaattaagacaactgagattctggctgcccacccaacatcacattatgctaaatttaagcacc

SEQ ID NO: 928253 - DNA, 120 bp, Artificial Sequence
  ENSG00000287245_18 (sequence is synthesized)
atatgaatgtacttctttaataacttctttactattttccttgttcttccactttactatttctgcaaacctcctaatatagaccattcagtctatctcccttttcctctcctacaccct

SEQ ID NO: 928254 - DNA, 120 bp, Artificial Sequence
  ENSG00000287245_19 (sequence is synthesized)
gctagctcagcatgagctgctggagaaaactcccacatcagtgcagattggtgtcacaaccgaagcaaggcttccaaatgcagctggccatcagcatttcacaggaatggctctcctccc

SEQ ID NO: 928255 - DNA, 120 bp, Artificial Sequence
  ENSG00000287245_20 (sequence is synthesized)
ttggccagtggcatcactctctcctgattctcctcctacctccccgctttttgtttctctgtcttctttataagctctttttcttcttttcttagatattcattcttcctgcgttctggc

SEQ ID NO: 928256 - DNA, 120 bp, Artificial Sequence
  ENSG00000287245_21 (sequence is synthesized)
tggggcgctcattcaacatgcccctcctgggaaatcttaggcattgtgataactttgacaatctatacaagctaatgattcccagatccttatctccagcctagggccttctgagctctg

SEQ ID NO: 928257 - DNA, 120 bp, Artificial Sequence
  ENSG00000287245_22 (sequence is synthesized)
tgtctgtaagttaatagacatctctagctacatcattaacacattttaaacacaagtcctaaaattaactcattttctattatctcatccagcaactcctgtatttccaattttgaaaaa

SEQ ID NO: 928258 - DNA, 120 bp, Artificial Sequence
  ENSG00000287245_23 (sequence is synthesized)
gcccatctttttgtgtgggcatgtgtatacttggtttgatctctgttccattctttccggaatgtttgattgtatcccatgttcattaacaggtgaacatattggctgtttctccaataa

SEQ ID NO: 928259 - DNA, 120 bp, Artificial Sequence
  ENSG00000287245_24 (sequence is synthesized)
aaaatgaaacagaccatgtgtctgcacctaactagtattcaataaatggttgctgaataagtgaatcatttccatgatccactagtttaataatcttatcaaaaaagacaataagtatac

SEQ ID NO: 928260 - DNA, 120 bp, Artificial Sequence
  ENSG00000287245_25 (sequence is synthesized)
tgataaaactttcatttaagaaccaatgaccccaattatactcattattttcctttcctaaatgctgatgatcaattcatttactatttcacttggggtacacatcaagcttattggttt

SEQ ID NO: 928261 - DNA, 120 bp, Artificial Sequence
  ENSG00000287245_26 (sequence is synthesized)
ataattcataaagtcatgagaatgagtagacacttcctcttctttcttttggaaatcagaattaaaatgggtctctgtggttgtaagggaacatgctcatgctctgtaattcctcatcga

SEQ ID NO: 928262 - DNA, 120 bp, Artificial Sequence
  ENSG00000287245_27 (sequence is synthesized)
ttgtcatttatgtttccacaaccttacctgccctttcttccaggaaccaatgacctggtttatacaaacatggctaatatgaactcatttggatagctctttgtgattcttagataaatc

SEQ ID NO: 928263 - DNA, 120 bp, Artificial Sequence
  ENSG00000287245_28 (sequence is synthesized)
taagaatttagattcctcttactaatatttatttttcccttctgactgaaaatacttctctttgaccaagaagaaaaaaattcaaacaccaattcaatatttctcgaatttttttcctat

SEQ ID NO: 928264 - DNA, 120 bp, Artificial Sequence
  ENSG00000287245_29 (sequence is synthesized)
tgtctattaacattaattttccttaatcaatattctttccttatttttctaactctaaaaatgactgtgagactccacttttgttgtcctttgtgctttttgcaaacctctactcattct

SEQ ID NO: 928265 - DNA, 120 bp, Artificial Sequence
  ENSG00000287244_0 (sequence is synthesized)
gggacaggctcccggccgggacctcggaagagcttaggctccgccctacttgctcagcgttcccgccctcgctccgcctctccacggcctcaggcgcatctgcgcttctcgcgatacctt

SEQ ID NO: 928266 - DNA, 120 bp, Artificial Sequence
  ENSG00000287244_1 (sequence is synthesized)
cggggatttgtgatgttttggtttccatggagctgccctctgggagcacgaggggtacaattggaacgaaggcggcgcacagttaactggaactctgcagccgtccaagcccaaagaagg

SEQ ID NO: 928267 - DNA, 120 bp, Artificial Sequence
  ENSG00000287244_2 (sequence is synthesized)
tggggagcttgggaaagaagttcctcataatcggagcaggaggagcccgcccagcctcgctcaaaggaggagacgagactctgagggacaatttagaagtgtgtcctcaatttaagacac

SEQ ID NO: 928268 - DNA, 120 bp, Artificial Sequence
  ENSG00000287244_3 (sequence is synthesized)
gcagtccttccaggagggattggacagatattcaggcgtccggtggcctgcaggcccccatcagagtgggctgcaattggcccagacctgcttcctactttgttttctccggtttcaccc

SEQ ID NO: 928269 - DNA, 120 bp, Artificial Sequence
  ENSG00000287244_4 (sequence is synthesized)
ccagcttctctcgcaagcaaccacctggtgattcctgacgaggcctgacttccggaaggcaagccacgccctccgggctcccctgcctctctttggctccagcttggcatgtataggagc

SEQ ID NO: 928270 - DNA, 120 bp, Artificial Sequence
  ENSG00000287244_5 (sequence is synthesized)
tgcccaaggaatgacagacttcttgttcttgaggtgttggcaaagcttcctgcactgctgacctatccaagtcctgccttgtagctgctcttgggcataggttactcttggctctgccaa

SEQ ID NO: 928271 - DNA, 120 bp, Artificial Sequence
  ENSG00000287244_6 (sequence is synthesized)
ccacccgtacaggactaattgcagttttacctcaacgtgcgctttttacaattaaaaactgacttaatggcttctatttccctgcctcaacaaaaaaaatttactctctctgaacccaaa

SEQ ID NO: 928272 - DNA, 120 bp, Artificial Sequence
  ENSG00000287243_0 (sequence is synthesized)
gtgtctttttcctgccactgagtaagggatgatcttcacacacatgccccactccgcccccatctcggcgcaccgtttctccaggaaggcatcttctcagagacaaaagattctgagaga

SEQ ID NO: 928273 - DNA, 120 bp, Artificial Sequence
  ENSG00000287243_1 (sequence is synthesized)
catctaattccctaccaaaagtgtctcagtgtttgtgcaatcaaaggaaatcagaaaagaaatgatcctcaccgctctgtggtccaatcctctcattttacaaataaggaccccaagatt

SEQ ID NO: 928274 - DNA, 120 bp, Artificial Sequence
  ENSG00000287243_2 (sequence is synthesized)
ggagagaggaggacatttgcccatggtccatcagcaagcagaggacccagctccccagcctcctgactttcagtccgacactctgcccccacccaacactgcttctgcttgtgcatgcct

SEQ ID NO: 928275 - DNA, 120 bp, Artificial Sequence
  ENSG00000287243_3 (sequence is synthesized)
tctgtgactaaccagggaggaggggagctgaaacaagctcccaccgaaataggctgctgcctgtgcgtgattatgttgctatgagaacctcagtgggtgtgtttcctcctttcgctgttg

SEQ ID NO: 928276 - DNA, 120 bp, Artificial Sequence
  ENSG00000287243_4 (sequence is synthesized)
aaatcttttgctttgcttggcttctccccaagcacagacacgtctccctttggaatggggagtggagaggctgagatggagagctatattttcatggcaagagttttctgtcccaaccca

SEQ ID NO: 928277 - DNA, 120 bp, Artificial Sequence
  ENSG00000287243_5 (sequence is synthesized)
tccaacccagagccagcctggggctgtgagtgaggagcctatgccactagggtggttccataaaggctggagtacaggagtgaactgttttgaaagtggatactctagccccctgttgag

SEQ ID NO: 928278 - DNA, 120 bp, Artificial Sequence
  ENSG00000287243_6 (sequence is synthesized)
ctgtcttagaacaaagaggtgctgttcctgctatgtaaccacctaagaacaaattcacaagcaagctaattattactttaagagacgaagtttggggtgatttgttatacaccaagagat

SEQ ID NO: 928279 - DNA, 120 bp, Artificial Sequence
  ENSG00000287243_7 (sequence is synthesized)
gacctgaacattcacatcttatgattgtgaaaagtgcctagcacatagtaggtactttgtagaactattttctcagcatccctaccattcctgtgaattcagtctttctctatctctttt

SEQ ID NO: 928280 - DNA, 120 bp, Artificial Sequence
  ENSG00000287243_8 (sequence is synthesized)
gcaaaaatatattagcatagtctttcaccaggttaattagtttagtcatcccacaaataatttactaggcatctcttaaatgcccagctcattaataggcactagccttaacaagaggca

SEQ ID NO: 928281 - DNA, 120 bp, Artificial Sequence
  ENSG00000287243_9 (sequence is synthesized)
acaaaacatattgaattgaccattgatgagctcttaatgtagtcatgttggatgcttttacaggtacagatcttctgtagaactcttaaggagattttcatgggaggcaagaaaacatgt

SEQ ID NO: 928282 - DNA, 120 bp, Artificial Sequence
  ENSG00000287243_10 (sequence is synthesized)
gggatgataaggggttcagagagttcactagtgtgtgagtcaaatgggtagtttgaaacaatagaccctaccaggtaaagaggttctgaagacgcattttatttatgtaatttttcttat

SEQ ID NO: 928283 - DNA, 120 bp, Artificial Sequence
  ENSG00000287243_11 (sequence is synthesized)
actagatcttcaacacaacaaaagtagagtgcttagaacaatgcctatctcatggcaagtgcacaaatattatgtcaacattcgctaggccctgtcctaggcacatgagttaaattttat

SEQ ID NO: 928284 - DNA, 120 bp, Artificial Sequence
  ENSG00000287243_12 (sequence is synthesized)
agaacacttgctaagtcttatagaacacttactatatgccagagattattcttgacctacctgtgttctcatgtagcccgttcaacagctttttgaggtagatacaattatccccatata

SEQ ID NO: 928285 - DNA, 120 bp, Artificial Sequence
  ENSG00000287243_13 (sequence is synthesized)
acagatgagaaaacaaaaacacaaggaattgcccaagtggtagaggcaagattcaaatctaagatacctgattccatagcataaacctcaagaagttgaccaggttcagggagcaagaca

SEQ ID NO: 928286 - DNA, 120 bp, Artificial Sequence
  ENSG00000287243_14 (sequence is synthesized)
gtggttctcaaccttggctatacagtggaatcatctggagagctttaaaaataccagtgctttagttctacccccagagagtatgatttagtgaggtttgggcatcaggattctttaagc

SEQ ID NO: 928287 - DNA, 120 bp, Artificial Sequence
  ENSG00000287243_15 (sequence is synthesized)
ctctaattctaagggacagtgatgattggaggacaactggacaagaatatctggagacaaaaacacctgcagaggaagaagatccctaagttacagaagatccaaaacaagaaccccaca

SEQ ID NO: 928288 - DNA, 120 bp, Artificial Sequence
  ENSG00000287243_16 (sequence is synthesized)
ctgtaaggaggtctatctctaactcacaggttcttgagaggcctggactggaggaaagctgtgttgatggttgggatgagacccttggggagggttacaattacaaaggttatccagctt

SEQ ID NO: 928289 - DNA, 120 bp, Artificial Sequence
  ENSG00000287243_17 (sequence is synthesized)
tgtgagatgctgcagaagaagtgagtttcctattactggaaaggctcagttagattaattgttggcgtaaatgatgtagaggccccacaaacgccagaaggttgagcaagccctctgagg

SEQ ID NO: 928290 - DNA, 120 bp, Artificial Sequence
  ENSG00000287243_18 (sequence is synthesized)
ttccacctgccttgtgctgggactctgtaattctgtctcctgtcaactctgagcccatgctggaaccccagaaggtgaagactgtaccatacttcatctccaggggccaaccaacacttc

SEQ ID NO: 928291 - DNA, 120 bp, Artificial Sequence
  ENSG00000287243_19 (sequence is synthesized)
cttttgctgctgcccaaaatcccaggcccctagaatcaggaagcagcattttaactgcggaccatgctgcctgggaaatctcaggctctagcttgttccaatggtcgttgctgctgaaag

SEQ ID NO: 928292 - DNA, 120 bp, Artificial Sequence
  ENSG00000287243_20 (sequence is synthesized)
gggcgacatattatgtggttttctcctcctcctcccaggggacctcacacatggccagggttcacatatggccacagcacactgcagtgaatccacgactcctcgagaatcaggccagag

SEQ ID NO: 928293 - DNA, 120 bp, Artificial Sequence
  ENSG00000287243_21 (sequence is synthesized)
ccatgatccatcaccacctcatggcagctaccccagcagtgttcttagtgtcttctgggccagatgggagccaagccaaggctgcagcagccagctacctggctgagcctccaggcagcc

SEQ ID NO: 928294 - DNA, 120 bp, Artificial Sequence
  ENSG00000287243_22 (sequence is synthesized)
ccacacctgggccgttctcctacacaaaagcctctgtggtcctattcctccctaacccaaggcccaatatttttaaactgcattccaaagaacaactcgctgagtgccaccaatacctgc

SEQ ID NO: 928295 - DNA, 120 bp, Artificial Sequence
  ENSG00000287243_23 (sequence is synthesized)
aaagcaatatgaggtgggatttttcttttgccattaaaaccagaatgttatttcttccttgctctgataatgtctgattaaatcaattcactgcggttttgtgctggatatgatactatt

SEQ ID NO: 928296 - DNA, 120 bp, Artificial Sequence
  ENSG00000287243_24 (sequence is synthesized)
tacctacctttctctaaggatgagaaagacccaaaagattctgttgtgctgccacaacagaattagctttttctactgggtggacgttgtatactctactcctttcctcctttttaaatc

SEQ ID NO: 928297 - DNA, 120 bp, Artificial Sequence
  ENSG00000287243_25 (sequence is synthesized)
tttcattaaggctcacctttttatgggaaatctctctggaatccctgaaagccaactggaagccattcagtctttccagtgcaataacttaatacatatttttttctgttaactttatat

SEQ ID NO: 928298 - DNA, 120 bp, Artificial Sequence
  ENSG00000287243_26 (sequence is synthesized)
gactatgggccaagcaagtgctaagtattctggactaaaaggtgaagagacttatctctgcactggtgacccttatcttccaggaagagttggttaaatgactaactctaatatactaac

SEQ ID NO: 928299 - DNA, 120 bp, Artificial Sequence
  ENSG00000287243_27 (sequence is synthesized)
tgttataatagatttaggtaccatcgggggtcttatgcattggttctcataggttaaatatatatatataatataatcaatggcttacagtcaggtaggccctgcaagaagtatctactg

SEQ ID NO: 928300 - DNA, 120 bp, Artificial Sequence
  ENSG00000287243_28 (sequence is synthesized)
atatggaccgggagaccctggaggctgtagggcctcaaccagaagcatggtagattccaagtgtgcctggagacacattctttttaccaagataccaaagttcttgtatgccttggaaac

SEQ ID NO: 928301 - DNA, 120 bp, Artificial Sequence
  ENSG00000287243_29 (sequence is synthesized)
ttttacagatgagaagttttatagccttttctctccaaatgcactatttaccaatgtcacttgtggcataacacattgtcatctgccttagcatagggctgacctctggtgcgtcagggc

SEQ ID NO: 928302 - DNA, 120 bp, Artificial Sequence
  ENSG00000287243_30 (sequence is synthesized)
aacccgacctgaaaacgcataatgagtggaggtggtaaaacaaagctgtgattgagtccaccttttcctttctggaccatgtaaccattctgatccctttcttctcaggggattttattt

SEQ ID NO: 928303 - DNA, 120 bp, Artificial Sequence
  ENSG00000287243_31 (sequence is synthesized)
taatttaaactttgctagatttttctttcatttaaaacttcacccccttaaggtaatattaacattttactgtgtactcttctctattttttgctcatgcaaatatatataagacctaag

SEQ ID NO: 928304 - DNA, 120 bp, Artificial Sequence
  ENSG00000287243_32 (sequence is synthesized)
ttatatatataaaagtgtgtgctgttggtgtatgctgtatataaatggaatcatgttatatacattactcagaaacttgctttcttcattaaacagtgtataatgggcctctttccaggt

SEQ ID NO: 928305 - DNA, 120 bp, Artificial Sequence
  ENSG00000287243_33 (sequence is synthesized)
tactacatgtagatccaagttatttttaaaagtgtataacatctcactgtatggataaaccatactttccaaacaattcacctactgatgaattttcaagttctaagcaatattttaata

SEQ ID NO: 928306 - DNA, 120 bp, Artificial Sequence
  ENSG00000287243_34 (sequence is synthesized)
aatgagttttaaatatacccttatgaacagaagcttttattttcatatgatagtttcccccaaagtgatattaccttaatatccattgccagttcctcatgaaattgtaatttctaagac

SEQ ID NO: 928307 - DNA, 120 bp, Artificial Sequence
  ENSG00000287243_35 (sequence is synthesized)
tgtagctggaacaatcagaaggtgcaaatctaattatctttccctttcctacccaacatcgccctggatcacgcacttgaggaggaagatccatgaaataaaagacgtaatcctgtttta

SEQ ID NO: 928308 - DNA, 120 bp, Artificial Sequence
  ENSG00000287243_36 (sequence is synthesized)
aatgtgtttctatagcaagagtcttccaatgcctggggaaaggctcatgagagatgctgagacctggggcattctttccgagaggtctttacagagaacagatcacttccaattgctggg

SEQ ID NO: 928309 - DNA, 120 bp, Artificial Sequence
  ENSG00000287243_37 (sequence is synthesized)
caacagagcatggatttcatgttaccaagaagtactgtgatccgaaaaacttaagattttcttaattggcatcagttacctgtctcttaggtagaactaccacaaaggacactcaggcct

SEQ ID NO: 928310 - DNA, 120 bp, Artificial Sequence
  ENSG00000287243_38 (sequence is synthesized)
gaggtgcaccctctctttcctttccttccagaggttgtgcctgcaggagagcctggattgatagcagcctgccacccctgcccataccagtgcctagtagaagcccactccctcagaaac

SEQ ID NO: 928311 - DNA, 120 bp, Artificial Sequence
  ENSG00000287243_39 (sequence is synthesized)
cacactccccactccccagaaggtcttgtttgactcccttttaaaccaacattttctgtattcagacttgcctgtaataagtgacttacccattgccctcaacctaaggaagccttgcca

SEQ ID NO: 928312 - DNA, 120 bp, Artificial Sequence
  ENSG00000287243_40 (sequence is synthesized)
tttaaaacctcccaatggagcctatcaaagcgtgcttcaaagtgtgagggaggctgagagaggaagtaagtgagatgaaggaggcgtttaacagagcctaggagaaagagctttgtggtc

SEQ ID NO: 928313 - DNA, 120 bp, Artificial Sequence
  ENSG00000287243_41 (sequence is synthesized)
ttacagaacagtaagttaacctctccatctgtgtacaaacagcttaatggtgatcactgcctggctaaggggttgtgaggacaaaatgagccaatgcagatgaagcatctggcacagttc

SEQ ID NO: 928314 - DNA, 120 bp, Artificial Sequence
  ENSG00000287243_42 (sequence is synthesized)
ctgggacatagtattgttaacacaggtgagtttccttttcttcagctcgtcctaaaagaccgtatttaaccatagcagacagagacacagagtaagaaggagaaagagcatgacagcagg

SEQ ID NO: 928315 - DNA, 120 bp, Artificial Sequence
  ENSG00000287243_43 (sequence is synthesized)
ggtcagcgtgcctgtgcactactagtcccagctctgtcatttagcagccaggtggccttaggaaagtcatttaacttttctgggcctgtttcctcctctttaagagatttgcctgagaca

SEQ ID NO: 928316 - DNA, 120 bp, Artificial Sequence
  ENSG00000287243_44 (sequence is synthesized)
aaccccgcatcctccttctgtttgccatttcattcatgatgtggattatgatgctaaccacctccaaatgacagcaaagactggtcagaggcatctcaaatcaaaattcaactctgatgg

SEQ ID NO: 928317 - DNA, 120 bp, Artificial Sequence
  ENSG00000287243_45 (sequence is synthesized)
ccaaaataaaggctgaagagcagaacgccccctccttcccactgtaaaactgatgggaagggaagtcagcctgccatcagttcaggggtttacaaaggaggcctgtaagtaatgttaatt

SEQ ID NO: 928318 - DNA, 120 bp, Artificial Sequence
  ENSG00000287243_46 (sequence is synthesized)
actgtgttcattccagcactgggctctagtttagcttttccagaggtcgaaagaggtgccattttttaagagccccatttggctccagcagcctcaatagtagtagccaagcagccatta

SEQ ID NO: 928319 - DNA, 120 bp, Artificial Sequence
  ENSG00000287243_47 (sequence is synthesized)
taagtagtcatcactcgatttcctcatcacttgtcaggaggcagagcttgatggggaagtcaatgaatttctcagcaatacaggctactgggctgtaagtcagcataaccccatagctct

SEQ ID NO: 928320 - DNA, 120 bp, Artificial Sequence
  ENSG00000287243_48 (sequence is synthesized)
caatgatccatgtcaatacatgaatgacacaaatcgcagattattgaaaaaaaattgttctttgactcattgtatgtattatgtatttttacatgcaaataaaatttctacctgtctatc

SEQ ID NO: 928321 - DNA, 120 bp, Artificial Sequence
  ENSG00000287243_49 (sequence is synthesized)
cttctcgtgcccccgaccccctccccgcccctctccacccgcgctgcgggctaagctcgagggaagcagccccgaagcctccgcggcggcggcggcggcggtcgcggatcctctccaggc

SEQ ID NO: 928322 - DNA, 120 bp, Artificial Sequence
  ENSG00000287243_50 (sequence is synthesized)
tgctcgcaaagtccggccggccggaggcagccgccaactcctctcaacttctgccgatccgctgggcgaagcaacacgcttcctgcgcgtctctcctaggggctgagccgggacactcag

SEQ ID NO: 928323 - DNA, 120 bp, Artificial Sequence
  ENSG00000287243_51 (sequence is synthesized)
gctgactccttaaaacagctgtacttttaagctttcaacctacgagtcaaggactgagacctataagatgctccctgagcacccggctgtcttcacttcatctctgtacttgtttgggga

SEQ ID NO: 928324 - DNA, 120 bp, Artificial Sequence
  ENSG00000287243_52 (sequence is synthesized)
ggtccctcccaaatgccctatttgctttttatcatcaccttcgataactgggaagtgtgagcctgactgtcctcaactaaccccagagtccattgaagaaaaggtctagaatcattctca

SEQ ID NO: 928325 - DNA, 120 bp, Artificial Sequence
  ENSG00000287242_0 (sequence is synthesized)
gccactgaatggaggctctccaggatggcggggccaccggggccctggaaccctaaatgactgcagggagcagagctctgcctccccatcaacccacttcagattcggctatgcctgaaa

SEQ ID NO: 928326 - DNA, 120 bp, Artificial Sequence
  ENSG00000287242_1 (sequence is synthesized)
cgcagatgcaagggctggagctctgcagacactgggaccagaggtgaccttgaggatggaagccatgtgttgggaaaatggaacagaaagatgagtggaacttggactatgaatgtctct

SEQ ID NO: 928327 - DNA, 120 bp, Artificial Sequence
  ENSG00000287242_2 (sequence is synthesized)
tgccatacttggactgtctgcctccagacatcctctaaaagaagatttttaaaataacaatatacctttgtcccatttgagccacaactgttgagtttactgatctatactgccaaacct

SEQ ID NO: 928328 - DNA, 120 bp, Artificial Sequence
  ENSG00000287242_3 (sequence is synthesized)
aattccaccaatatacctcacgacccagcaattacgctcttcagaaactgccctagagatgctcacacatgcacacagaggcacaaagatgttcagtgttgcttggactagcaaagacaa

SEQ ID NO: 928329 - DNA, 120 bp, Artificial Sequence
  ENSG00000287242_4 (sequence is synthesized)
acagacaaacgacaatatgtatcttctctatggccacatatatatgaatgtaaataagtaggaaaaggcctggaaggaagcacagcaaattgatgatggtgggtacggctggggatggcg

SEQ ID NO: 928330 - DNA, 120 bp, Artificial Sequence
  ENSG00000287242_5 (sequence is synthesized)
gggagtcacaggaaaccatattcttcccctcaggaagatatgttcttattacctgtgaagttaaaacttacacgtcaagttaaaaagataataaaatccaaagggagaataaaagtaaac

SEQ ID NO: 928331 - DNA, 120 bp, Artificial Sequence
  ENSG00000287242_6 (sequence is synthesized)
ttgatactgcagaaacgtcacaggcatgacctcatccaggctatcaaggtcgacatcaacagtgatacagtatgttgacggaatgtacccaagatgctctgaaactggaactttctctct

SEQ ID NO: 928332 - DNA, 120 bp, Artificial Sequence
  ENSG00000287242_7 (sequence is synthesized)
gcggtcctcctcccaaaacccatcaccccagtctaatcatgagaaaagcaccagaccaatcccagtagagggtcatcctacaaaatacctgaccagtgcttctcaaaagtgtcactgtca

SEQ ID NO: 928333 - DNA, 120 bp, Artificial Sequence
  ENSG00000287242_8 (sequence is synthesized)
tcaaaatgaaggagagatgagagactgtcacagccaaaaggtgcctaaggagaccggaagaccaatgcgacacctgggaaactgtgacctgccacgacgaaggggaccgtgcagacatga

SEQ ID NO: 928334 - DNA, 120 bp, Artificial Sequence
  ENSG00000287242_9 (sequence is synthesized)
agcgtcctggaatatctagattatcttcctgcggcctcattatcttcgcctaatgggattatcaagagtacagaggccagagattaagcagacagcactgggcagataaaccctcagctg

SEQ ID NO: 928335 - DNA, 120 bp, Artificial Sequence
  ENSG00000287242_10 (sequence is synthesized)
gccccaccctcacaccctcccgccatcccagcacaggggacggcacgtactgaacctgcaggtgctgacgttctgaattccagactccaggcacgggcagaagccttcgttgggtgggta

SEQ ID NO: 928336 - DNA, 120 bp, Artificial Sequence
  ENSG00000287242_11 (sequence is synthesized)
gatggacccgttggcaaacagggttttgggagccacgaagcgataggtggggatgccttcaaacacccctgactccttgtacattagcttcatggatctgcaggggacagacaggatgag

SEQ ID NO: 928337 - DNA, 120 bp, Artificial Sequence
  ENSG00000287242_12 (sequence is synthesized)
aggggacacccagacccggcggccagagccaggccctgccaaaggctgcccagatccagccacttctccccacgggcgctaccacctcccgggtccaaaccgcccccatctctcacccgc

SEQ ID NO: 928338 - DNA, 120 bp, Artificial Sequence
  ENSG00000287242_13 (sequence is synthesized)
ggagctgcagcgacctcctaacaggcctctccgctccgactctgcctccccacccacatcaatgtattagccgtggccagatggagttttacaaaagaacagaggccaggcattatggct

SEQ ID NO: 928339 - DNA, 120 bp, Artificial Sequence
  ENSG00000287242_14 (sequence is synthesized)
aggtgggaggatcacttgagcccaggagtgtgagaccagcctggggaacatagtgagacccagtctctaaaaataaaattgtttttgaaagttatgaaattaaaaaaagaacagaatata

SEQ ID NO: 928340 - DNA, 120 bp, Artificial Sequence
  ENSG00000287242_15 (sequence is synthesized)
aagttatgaaattaaaaaaagaacagaatatatcatgcccctgctgaaaatctgtgaccctttctagtctaacctaccattaggattcattgaccttatctagcccctgcataagctctg

SEQ ID NO: 928341 - DNA, 120 bp, Artificial Sequence
  ENSG00000287242_16 (sequence is synthesized)
ctcagccctgccccaacttcctgtgcccagggcctccctgcagttcctaagcacactcactcctgccccaggccctttgcatcactgctccctctgcctaagaacagtctcctctggcat

SEQ ID NO: 928342 - DNA, 120 bp, Artificial Sequence
  ENSG00000287242_17 (sequence is synthesized)
cttcatccaccagacttcagcccttcagtcagatctcagttcagctgtcacttcctcgggtggcagcaccgtcccccacacccaccccatccaccctccatccattcatgctcctgtact

SEQ ID NO: 928343 - DNA, 120 bp, Artificial Sequence
  ENSG00000287242_18 (sequence is synthesized)
ttctcaaaagcacttctgaacttgaacatgcactgtgctacccactctgtccacggcagccactcagcacgcatggctgtccatcccgcccttgacatggggtgagtccaaattgggatg

SEQ ID NO: 928344 - DNA, 120 bp, Artificial Sequence
  ENSG00000234676_0 (sequence is synthesized)
ggatatgtttgtttcttcaccacgcttcagtgctttttggaaaaagtggaaaacagcggggcggctggaagacaaacattttatgtgaacgtttggttttcttgataatcagagcaacct

SEQ ID NO: 928345 - DNA, 120 bp, Artificial Sequence
  ENSG00000234676_1 (sequence is synthesized)
ctaggacggcatagcgtacacaacgcatcatgaagtatggatgcgattctggcaccaactgttccgttcctgctttcaccagaagctttgcgtctttaagcttcctttcattagaatttg

SEQ ID NO: 928346 - DNA, 120 bp, Artificial Sequence
  ENSG00000234676_2 (sequence is synthesized)
gatccaagtttgtggggaagactgtgaattcaatggaaagtgtcctttttttttttttttttaatttaagaactacttcaccttaaatcccacttctctaataaaataacttttactgta

SEQ ID NO: 928347 - DNA, 120 bp, Artificial Sequence
  ENSG00000234677_0 (sequence is synthesized)
caggaggaggggcaggaaagaagccaaatgtctctcacaataagaaaagcccatcatctgcaagatcatcctcaggcacagggcaggctggatctcctcccaaattgcatgctccatgcc

SEQ ID NO: 928348 - DNA, 120 bp, Artificial Sequence
  ENSG00000234677_1 (sequence is synthesized)
cttcctgcctttaagagctttatctctgcggacctggagctgctggtcaccatggaaacagaagcttttgttcaccacttcctcttctctttttctcgctccccacccctcgtctttcct

SEQ ID NO: 928349 - DNA, 120 bp, Artificial Sequence
  ENSG00000234677_2 (sequence is synthesized)
tcctctcctcacacccacttgccctcctctctactttctttcctctatttttattcctaattttctatctcacttgccctgatttcctcatctatttatttaaaacttatttaaatttta

SEQ ID NO: 928350 - DNA, 120 bp, Artificial Sequence
  ENSG00000230952_0 (sequence is synthesized)
ctggacagccgtgaaagaaattgggactgatctttggacaggaggatggctgtgtcccctcctgaggtcagagggggacactgcttccagacagggcctgcagctgagcttacagcctct

SEQ ID NO: 928351 - DNA, 120 bp, Artificial Sequence
  ENSG00000230952_1 (sequence is synthesized)
cccgacatggccacgtgatgatttggtcatgccttctgatgaatggctatctgcttatgtgcctagatccaccagagttgtcacagttacaggccagttactaggaggcctcttctgaat

SEQ ID NO: 928352 - DNA, 120 bp, Artificial Sequence
  ENSG00000230952_2 (sequence is synthesized)
gtgacatgggaggagggtctccccttttctcttggggagacactgaggtgaaataggcctgcaccagccaatacagaggcagcaagtagagtcctgaagacactcacttggctgcaaaag

SEQ ID NO: 928353 - DNA, 120 bp, Artificial Sequence
  ENSG00000230952_3 (sequence is synthesized)
agaccaggggtttcctccagctgcctggttggctgctgctctgagaagataccaggcctctgctccggtggcttcagggaggccaccctggacacagccagcagaagcaggtcatcgatg

SEQ ID NO: 928354 - DNA, 120 bp, Artificial Sequence
  ENSG00000230952_4 (sequence is synthesized)
aagctgcttctccaaacttcagtgaccacacctgtgttcctgcagctgagtgtctctcagaatgggtgtctcttagggacacactgctgtagctcaacacaggagcattgccaacacttt

SEQ ID NO: 928355 - DNA, 120 bp, Artificial Sequence
  ENSG00000230952_5 (sequence is synthesized)
gagctggagaataacacaaaccacagatgagcctcttggaatgaccactgtggggacctgaaggtgtgtactggaggctggacaagcgttgaggggctcccctggcgagcatctgtgaca

SEQ ID NO: 928356 - DNA, 120 bp, Artificial Sequence
  ENSG00000230952_6 (sequence is synthesized)
ggtttgatgaggcctgttcccagcagtggcagtgagactggcatgtctggatgacctctacccagaggcccagctttattgcaggctggctctgaatcctttcatctctggccgcagccg

SEQ ID NO: 928357 - DNA, 120 bp, Artificial Sequence
  ENSG00000230952_7 (sequence is synthesized)
gacaaagtgccagagctgagcagctgcctcagttctccagcccctgtgctctgagaggccacacaggggacagagatcagaggagccgacaccaaagtgatgcaactgccctcccaggaa

SEQ ID NO: 928358 - DNA, 120 bp, Artificial Sequence
  ENSG00000230955_0 (sequence is synthesized)
cactgttaaaaatacatttatcattaaaatatattacacatggagacaggatgcatcatatacagtttggaagacttgctggcccagaaaatcccacttgtttcaccgaacactcatttt

SEQ ID NO: 928359 - DNA, 120 bp, Artificial Sequence
  ENSG00000230955_1 (sequence is synthesized)
aacactcattttttcagtgattttacattttatttttagagacggggtctccctctctcacccgggctggcgtacagtgatgtggtcataggtcactgcagcctcaaactcctgtgctca

SEQ ID NO: 928360 - DNA, 120 bp, Artificial Sequence
  ENSG00000230955_2 (sequence is synthesized)
cgtcagcctcccaagtaactgggaccacaggcatgcatcaccacacccagctaattttttaaaaatgtttttgtagagagggggtctccctgtgttgcccagcctggtcccaaactcctg

SEQ ID NO: 928361 - DNA, 120 bp, Artificial Sequence
  ENSG00000230955_3 (sequence is synthesized)
ggggtctccctgtgttgcccagcctggtcccaaactcctggtctcaagtgatgctcccacctcagtctcccaaagcaggtggatcacctgaggccaggcattcgagaccagcctggccaa

SEQ ID NO: 928362 - DNA, 120 bp, Artificial Sequence
  ENSG00000272072_0 (sequence is synthesized)
gtaaaatgaggatataatctacaaatagggtaattaatattaaataaattaacattatatatatagtaggcactcaagtttgttaaatcatattacctgaacagaaatgtcaacttcaaa

SEQ ID NO: 928363 - DNA, 120 bp, Artificial Sequence
  ENSG00000272072_1 (sequence is synthesized)
gagtcaaaactgactgttttaaacccgcctgaggcctagaaggttggcctcaattctcaatgtttcagaatgggctacttacaacagaaccttgaattatgtatgagagctcatcaactg

SEQ ID NO: 928364 - DNA, 120 bp, Artificial Sequence
  ENSG00000272072_2 (sequence is synthesized)
attgctgacttctgattcttcctgagctagaaactactcacatgtcctctgtaaaccatgacccgagaatttgcttggagcagtccaacttggactttttcctcttcttacctctttctc

SEQ ID NO: 928365 - DNA, 120 bp, Artificial Sequence
  ENSG00000272072_3 (sequence is synthesized)
ggcatcatctcccttaaccagtctaatccacaatgaaaataaagtcactttcagcttctcaattttttcctggtttctccatgatgataccacccatttccactcctttgcagggtgggt

SEQ ID NO: 928366 - DNA, 120 bp, Artificial Sequence
  ENSG00000272072_4 (sequence is synthesized)
gctcctgctgttatattgaagtcactcaacagtaaaatgagaccaatgactaacatcatcttgggagtgattattattcagtgagatcaaatggtaagaatttgctatctcagaaaagca

SEQ ID NO: 928367 - DNA, 120 bp, Artificial Sequence
  ENSG00000272072_5 (sequence is synthesized)
ggaattaggcaggcaagttttcccttttactttaaaaaagtttggtgctatgtaataatatgtaaactttacatatatttgtaagttatgaagcatacaaataaatgagtgaacccacaa

SEQ ID NO: 928368 - DNA, 120 bp, Artificial Sequence
  ENSG00000262652_0 (sequence is synthesized)
ccaccgcacccgtcacttgatctcttttaaagggaggactgtactctggactcaccctcacccttgcacttttggaagcgttcctggacattagacccatcctctgaaaggaacttgtcc

SEQ ID NO: 928369 - DNA, 120 bp, Artificial Sequence
  ENSG00000262652_1 (sequence is synthesized)
tgttccttctcctcagtttctgtacacgtccttactgtgcagagtgcacacgggagcgcactcagggctgggtgaggaaacagacaaaccgtccttgagaaacgtgaggtctgcttagga

SEQ ID NO: 928370 - DNA, 120 bp, Artificial Sequence
  ENSG00000262652_2 (sequence is synthesized)
cagaattgcaaatccttttcttcatgtttagcgttaaagaataacagcccacgttttctctgaaagctttaaaatttctgaatcattagagtccagtcaatgtggttttaatacatgtag

SEQ ID NO: 928371 - DNA, 120 bp, Artificial Sequence
  ENSG00000262652_3 (sequence is synthesized)
caacagaatgaaggaacatccatcctgggtttgatcaaattacaacagccttaaattaccttagaaacatagttactttattctatttgtgtctacattaaatgtctcattaattcctca

SEQ ID NO: 928372 - DNA, 69 bp, Artificial Sequence
  ENSG00000248554_0 (sequence is synthesized)
gtctgggatgtgaggagcgcctctgccgggccgcgaccccatctgggagtgcctggcagccgccctgtc

SEQ ID NO: 928373 - DNA, 120 bp, Artificial Sequence
  ENSG00000265689_0 (sequence is synthesized)
gaaactgagattctggaagtccctctgaatggcccatacttccccaggtgtctctgcaggaaacaatgtggacaatcacagtagttggaaggacaatgactgacctaatggagttcagga

SEQ ID NO: 928374 - DNA, 120 bp, Artificial Sequence
  ENSG00000265689_1 (sequence is synthesized)
tggcacctgatgtgcacagctgctcccatctgcgcagagagaatataaaggcagtggcgctgaaacatctgctgctttcactcaccatcaagatggaactgactgtacatgcaagcaaat

SEQ ID NO: 928375 - DNA, 120 bp, Artificial Sequence
  ENSG00000265689_2 (sequence is synthesized)
tttgatgaagagagtgatctcagagtgcgaagataagttgtttctccttgacacctaggaatgcacctggccaagaccctcagttgaaagacaatatcaaataaatgcaaaatctaaata

SEQ ID NO: 928376 - DNA, 120 bp, Artificial Sequence
  ENSG00000272077_0 (sequence is synthesized)
actaaaggtcataattaaaagaatagtgatatgataatagcacacagtaatattaaataaatgatgcaaagtacaaaataaaacactgtacagagagctgagttttctgagatgcacatg

SEQ ID NO: 928377 - DNA, 120 bp, Artificial Sequence
  ENSG00000272077_1 (sequence is synthesized)
cataggaaagaaagaaattgggggttaactgtggttaaatttccagcagtctacattttctacaatgagcctgtattacttttatgatcaggaggggaaggttaataaaagagaaagatc

SEQ ID NO: 928378 - DNA, 120 bp, Artificial Sequence
  ENSG00000272077_2 (sequence is synthesized)
atggcttgttcagagtggtgagactttcttgtgaagtgtgaaatgggtagtggggaataatagaataagggtctggagaagtaaggtccctatttttatccattgttagcattttatggt

SEQ ID NO: 928379 - DNA, 120 bp, Artificial Sequence
  ENSG00000272077_3 (sequence is synthesized)
taccaagaacctaataccaggtgaaggagttcagcagaagaatatatatttgtgacattgttctggctggacagtggaggctgagctggtgaggggagaaaggaatcctgaagaccatat

SEQ ID NO: 928380 - DNA, 120 bp, Artificial Sequence
  ENSG00000272077_4 (sequence is synthesized)
tggcagtttttttcagagcccaagagagacagtgggattctgacccagccactagaagggggccagaggagaaggaatagatgtgatgttttgaagataaaatgagcagaccttaaggga

SEQ ID NO: 928381 - DNA, 120 bp, Artificial Sequence
  ENSG00000272077_5 (sequence is synthesized)
cacggaagatcaagcagcaaattcccaagccagaagtctgggcctctacatcctggtgagacctacgacatgacaaatgaggccaggcccaggtccgagaggcactgctttccttgcagc

SEQ ID NO: 928382 - DNA, 120 bp, Artificial Sequence
  ENSG00000272077_6 (sequence is synthesized)
tctctggagctaccctgtcttcacagtggctaatgcctctctgatgttgggaagggctggagacaagggaggagacaacccaactcatagcaggctacctggctatcgtaggctaccttg

SEQ ID NO: 928383 - DNA, 120 bp, Artificial Sequence
  ENSG00000272077_7 (sequence is synthesized)
acactgactaggttccctacttgtaccatgtgtggttttccaggattcctgtgatctctggtattttccctccaaggactggggttccctcaaggcaagtcaccctactgaaccaatagc

SEQ ID NO: 928384 - DNA, 120 bp, Artificial Sequence
  ENSG00000272077_8 (sequence is synthesized)
gttcctgtgtgccaggcaccatactaaatgccaaatgtgttacatctcatttaatcttcacctgaggagggaagttctcttatgccatttgcaaagccagtagtcccagtcaggattaga

SEQ ID NO: 928385 - DNA, 120 bp, Artificial Sequence
  ENSG00000272077_9 (sequence is synthesized)
acaactctgatgtacaagtctgtgcccctttctcccaggtgaacttctcagtgcacccccaaggactcctctccccatgtaagagttctttgttaaattgaaagagcagttcttgcctgt

SEQ ID NO: 928386 - DNA, 120 bp, Artificial Sequence
  ENSG00000272077_10 (sequence is synthesized)
agtaaaaaggtcagtggtgcaaaagcatacaaagagatgtgagactccctcccagtccacataaccagtctcctaccccagtggtagctatttttaaatgtcttgatttttcctcaagat

SEQ ID NO: 928387 - DNA, 120 bp, Artificial Sequence
  ENSG00000272077_11 (sequence is synthesized)
agtcccagcatttacaaccttatgtatcccccttaaagaaacacgcacaaaaaatgaaaagcttaggatacagtctacaccttgcttttttcagtgtcttggagatggctttctattagc

SEQ ID NO: 928388 - DNA, 120 bp, Artificial Sequence
  ENSG00000272077_12 (sequence is synthesized)
ctgtaagatctacctcatttttttcactgctttgtgatatccattgtatgaatgtaccataattcatacagtccccctgttgatgggcctctaggttcttttctgccttttgctattaca

SEQ ID NO: 928389 - DNA, 120 bp, Artificial Sequence
  ENSG00000272077_13 (sequence is synthesized)
aacagtactgtgccaaatatccccgcacactgtccctggataaattgatgaaattaaatcgtaggtgcatttgttattttgatagaaattggaaatgtagttcccagtgtgtgtatgaaa

SEQ ID NO: 928390 - DNA, 120 bp, Artificial Sequence
  ENSG00000272077_14 (sequence is synthesized)
atgttcattcccctgaatcctctgaaactattgtgttgtttctgatctcataaatgaaaaatgctctcatattttaatttgcattcaactatgagtgaaactgggtaccacagcccatgt

SEQ ID NO: 928391 - DNA, 120 bp, Artificial Sequence
  ENSG00000272077_15 (sequence is synthesized)
ttaaaagtcatttgtatttattttctgtgactggcttatttgcgttctttagcagtttttctgttcatccttttaataatcaatttgtacaaactataaagaaattatccttatctgcta

SEQ ID NO: 928392 - DNA, 120 bp, Artificial Sequence
  ENSG00000231373_0 (sequence is synthesized)
gaaggaaagagtggggacagttggctgcctgtgcaactctccagactagaaagagaccattacacatgttgtaaagcccagaggaatagttttctgcacatcttgcctggcaagtgctct

SEQ ID NO: 928393 - DNA, 120 bp, Artificial Sequence
  ENSG00000231373_1 (sequence is synthesized)
tctacaatgtaaaacaaacttctctgaagtacagaacttggtaatagctaaaccccgcttgaaagtagaaaacgaagttccagaaatagaagaagggcttggaaacaagtataaagtgcc

SEQ ID NO: 928394 - DNA, 120 bp, Artificial Sequence
  ENSG00000231373_2 (sequence is synthesized)
agaggtatcatcagcaggaagagggtgaggacgcacctggaagccacacacattggaggacacaggttcttcactgcaagtctgtgaagcccaataaaagaagctttggtgaaaaaggta

SEQ ID NO: 928395 - DNA, 120 bp, Artificial Sequence
  ENSG00000231373_3 (sequence is synthesized)
gcctgttcaggacacagcagaatgtgatttttcacttctgaagaaaagggaaatttggacacagaaccagagaggacagtgctgtggacacgcagacacagggaagaagccaggcgaagg

SEQ ID NO: 928396 - DNA, 120 bp, Artificial Sequence
  ENSG00000231373_4 (sequence is synthesized)
cagaggcagaggctggaggcaagcatctacaagccaacggacggcaaggatttccagccaccaccagaagctggggaagaagccgacaacagattctctcagagcctccagttagaacca

SEQ ID NO: 928397 - DNA, 120 bp, Artificial Sequence
  ENSG00000269846_0 (sequence is synthesized)
gttgcctcggatggcagtaaagtcgtccagggcttcggccgcgctcccctcgtccaggttcagctcctggcacagggcctgtagcgcctccccggctgcggcgaccaccgccgccccctc

SEQ ID NO: 928398 - DNA, 120 bp, Artificial Sequence
  ENSG00000269846_1 (sequence is synthesized)
agcgtggggcttgtcctcgaacatcccttcaggccccgcgggctgcgcgccacggcccccgacttctttctccctcccaggcgcgctacccacaaccacctgcgccaaagcgcgcgaaaa

SEQ ID NO: 928399 - DNA, 120 bp, Artificial Sequence
  ENSG00000269846_2 (sequence is synthesized)
tctgcagctgcgggacgtgttgtcatccaccgtctgcctccgcttttctcctcaaaaaaagtccgtttttcctccggagctcctagcagtccctccccggaaatgtgataagaagatgta

SEQ ID NO: 928400 - DNA, 120 bp, Artificial Sequence
  ENSG00000269846_3 (sequence is synthesized)
cctcagattctgaaagacctgtccttggcccttggctggtcgcggggggcccagccggcgggacagaaaaagagcggagggatcctcagcccgcgcgcagagcctgctgggaggtgtagt

SEQ ID NO: 928401 - DNA, 120 bp, Artificial Sequence
  ENSG00000269846_4 (sequence is synthesized)
ccatctcttgggagatgaagcccgcggcctccccctgtcttcctggttaggctcttgggttttggggcagggctgggctgcctactgcgaggtggcctcgtgcagcgtagtgagatgcct

SEQ ID NO: 928402 - DNA, 120 bp, Artificial Sequence
  ENSG00000269846_5 (sequence is synthesized)
ggagatggaggctggaagagaaaaaagtagcccctggacgaagaggggcctcttgggactctccccaaagtcctagtgcccagtgagtggttcgctaaatgacagaggggaaggattggt

SEQ ID NO: 928403 - DNA, 120 bp, Artificial Sequence
  ENSG00000269846_6 (sequence is synthesized)
gacagaggggaaggattggtgacggatattagaagacgaatcctcatctcatgctagtcgctaaaagaggcaggcagagaagactgcagtaaatgaggcaggagaatagggtctggaggc

SEQ ID NO: 928404 - DNA, 120 bp, Artificial Sequence
  ENSG00000269846_7 (sequence is synthesized)
acgtgacttcttagaactaaattgaaaggaaaaccccaactttccacgcctaagtaacaaaagaaccagaggctgttcccttggaccttttctgcatggcagatgggaaattggctgtct

SEQ ID NO: 928405 - DNA, 120 bp, Artificial Sequence
  ENSG00000269846_8 (sequence is synthesized)
gcaacaaatcacactgagcgccttccagtctttgtttgcaactttgtaacttcactccagcctctgaacggttgctgtccacaaccaatcagactgatggcgggagagtcttcctttgca

SEQ ID NO: 928406 - DNA, 120 bp, Artificial Sequence
  ENSG00000269846_9 (sequence is synthesized)
tagaagtataattttgttaacttcaccctggcctctgattggttgctttctgcaaccactcagactgattgtgggctaccacttcagttacatcaagagagcataaagtggccaatggga

SEQ ID NO: 928407 - DNA, 120 bp, Artificial Sequence
  ENSG00000269846_10 (sequence is synthesized)
aacttctagagggtatttggaccccagaagattctgtgtctgggcccttgagctgctgcgtgggttcgcttccccactatggagtgtacttttgttttcaataaatccctgtcttcgttc

SEQ ID NO: 928408 - DNA, 120 bp, Artificial Sequence
  ENSG00000269843_0 (sequence is synthesized)
taattttaagtattttatgttttcaatggtattataacaaaaggctttcaatatctcttaaaatcttaaatcctggctgtctgcagtggctcacacctgtaatcccgacactttgagagg

SEQ ID NO: 928409 - DNA, 120 bp, Artificial Sequence
  ENSG00000269843_1 (sequence is synthesized)
ccaaggctagtatccactaccacctcagcctcccagagcaatccttactctcagttacggtttgtggaactataaattggtacagcttcagaggagagtaatgtgaatgcttttctctaa

SEQ ID NO: 928410 - DNA, 120 bp, Artificial Sequence
  ENSG00000269843_2 (sequence is synthesized)
tacaaaagaacatactctcagattcagttaactccacttctagtaatgtctcctatgatgtacaagaaagtgtgcaaaatcacctagattcatcaaagaactgtttacataatgaaaaat

SEQ ID NO: 928411 - DNA, 120 bp, Artificial Sequence
  ENSG00000269843_3 (sequence is synthesized)
aggaaaccaacatatgcaccaagatattggttaaacaaattatgatgcattcatttgatagacttggtccatcagaaccccagcagaaaaatatgagtgcttaatggagggacttttttt

SEQ ID NO: 928412 - DNA, 120 bp, Artificial Sequence
  ENSG00000269842_0 (sequence is synthesized)
cttcaacatcttcgattccattttgggtgcctccatggggactgtgtgtccctgtactggaacgcaagtgaagacttggctcagagtccatttgctgttctctagaaatccagcctaatc

SEQ ID NO: 928413 - DNA, 120 bp, Artificial Sequence
  ENSG00000269842_1 (sequence is synthesized)
ctcttgtgcaaatataatatatatctagtaggcattgctttttctttctggagacaaaacacaggaggattgccccttgatgaacaggactaacctgctgattctttgaagcaaggaact

SEQ ID NO: 928414 - DNA, 120 bp, Artificial Sequence
  ENSG00000269842_2 (sequence is synthesized)
ggaaatggtccttttagggatttatgctctggattccagaaaacacgcaaacagggccaataaatgcatctttatttttgtgtccattttgacctggtcaaggaagattccaacaaaaaa

SEQ ID NO: 928415 - DNA, 120 bp, Artificial Sequence
  ENSG00000269842_3 (sequence is synthesized)
tccacagtgccggagcaagaagatctcaggctgtgtccctctacagggaagcgctttctgttgtctgaaagaaaggaaagtgcatccttttagagtgttactgtttgagaaaagcaacgt

SEQ ID NO: 928416 - DNA, 120 bp, Artificial Sequence
  ENSG00000269842_4 (sequence is synthesized)
tgaagttgatgctgattttggtaatacatttgcagagcatgcttatcatcagacttggatgatgttgggttctgtttttgctttgtttttttttccaagacagtgtgtttgttgcccagg

SEQ ID NO: 928417 - DNA, 120 bp, Artificial Sequence
  ENSG00000269842_5 (sequence is synthesized)
ctggagtgcggtggtacttcccacctagatctcttgggctcaagaggtctttttttatttttctttctcaagagagagtctggtggtgacacccaggctggagtgcagtggtgcattatc

SEQ ID NO: 928418 - DNA, 82 bp, Artificial Sequence
  ENSG00000269842_6 (sequence is synthesized)
tggtggtgacacccaggctggagtgcagtggtgcattatcagctcactgcagccttcccctccccggttcaagtgattcttt

SEQ ID NO: 928419 - DNA, 120 bp, Artificial Sequence
  ENSG00000269842_7 (sequence is synthesized)
agggttttaccatgttggggaggctggtctcaactcctgtcctcaagcgatccacctcccttgcctcccaagtactgagattacaggcgtgagcaactgcgcccggcctcaagtggtcct

SEQ ID NO: 928420 - DNA, 120 bp, Artificial Sequence
  ENSG00000269842_8 (sequence is synthesized)
aggcgtgagcaactgcgcccggcctcaagtggtcctcttaagtcagcctaccaagttttgggactacatggggcatgccaccacacttggctaagtttttaatttttttttttttttttt

SEQ ID NO: 928421 - DNA, 120 bp, Artificial Sequence
  ENSG00000269842_9 (sequence is synthesized)
caggcgtgagccaccgcgcccggccgatagtttttaatttttgatagaaagggaatctctcttgcctaagatggtctcaactcctgagctcaagggatcctaaaggtgtgagccgccttg

SEQ ID NO: 928422 - DNA, 120 bp, Artificial Sequence
  ENSG00000269842_10 (sequence is synthesized)
ctcaagggatcctaaaggtgtgagccgccttgtcctgatgacccatttcaaacgtagctgacatggccaggcatcatggggcacacagtcccagctactgcagaagccggggtgggaggg

SEQ ID NO: 928423 - DNA, 120 bp, Artificial Sequence
  ENSG00000269842_11 (sequence is synthesized)
tcctttgatttccaggctataccatgtgctgatcacacttttgatcccgagtagctgggattacaggcagccaccgccaggccggctaatttttatttatttacttattttttcagacgg

SEQ ID NO: 928424 - DNA, 120 bp, Artificial Sequence
  ENSG00000269842_12 (sequence is synthesized)
attacaggcatgagccattgtgcccggcccatttcatttatttttatgtgtgctgctgaagcaagcacttatgtgtaggaattgttcttcctgtgagcatatgttggccagcctggacca

SEQ ID NO: 928425 - DNA, 120 bp, Artificial Sequence
  ENSG00000269842_13 (sequence is synthesized)
ctggaccacataccaagatcccatctctttaaaaacacagattacgtggcacctggcacctggtcccagagacttcatttgggttggtcatttgaaacactagcctcccatcaatttagt

SEQ ID NO: 928426 - DNA, 120 bp, Artificial Sequence
  ENSG00000269842_14 (sequence is synthesized)
gtaatcaatccaaatcatgtgtccttcattaagagactaagaacgcctccacgtctatccagtctattttgtaatccccaacggttgtcaatattaataaaatttcttttctttttccta

SEQ ID NO: 928427 - DNA, 120 bp, Artificial Sequence
  ENSG00000265359_0 (sequence is synthesized)
gcaaaccatcctctttgcttcctttgtgatggacactccttagcttctgcgccttaataagcccctgaaggtgtttacagcctccgttgtctgctcacccttgggcctccccgtccagca

SEQ ID NO: 928428 - DNA, 120 bp, Artificial Sequence
  ENSG00000265359_1 (sequence is synthesized)
tctccagctccaggcgggccttgacattcagcagccgctggtggtccacgttctggcgctctgcgtccgcgcgcacctggagcagctgtgcctccaggttgctgatgagctgctgcacct

SEQ ID NO: 928429 - DNA, 120 bp, Artificial Sequence
  ENSG00000234091_0 (sequence is synthesized)
cgagccaaggcaaacgccgacagaagagaacgataaatccgcggcgcactcggcagaacgtacaccgcaccgcataatttagcggggcaatgccgccgggagtccacgccaagttaatgg

SEQ ID NO: 928430 - DNA, 120 bp, Artificial Sequence
  ENSG00000234091_1 (sequence is synthesized)
ttaccaggctgcagcctgcaggttgcccatccaatgtgcgaactccagcgggggcaggaaagcccccgaagaatggtgctgtttgctttctggtcttaataaatctcatgctgggagaat

SEQ ID NO: 928431 - DNA, 120 bp, Artificial Sequence
  ENSG00000234091_2 (sequence is synthesized)
cctgttttagtgattagcatcagtatatccagtcctcggaaacaaaaatatttccaggtcccagaagagggtccagagtaacacagctttactgatctggtttcaataaatcttgttaac

SEQ ID NO: 928432 - DNA, 120 bp, Artificial Sequence
  ENSG00000265352_0 (sequence is synthesized)
acaccaggtcacctctgatcactttaaggacatcagcattgtcttcctcaacatatctcccaaagccttgatgaaaagaatctctcctggacatttccagagtagatggtggttcttccc

SEQ ID NO: 928433 - DNA, 120 bp, Artificial Sequence
  ENSG00000265352_1 (sequence is synthesized)
ttttaagtaaggaaaataaaattaacttttctggggcgagatgacagacgaatgtgcaaaggctttcctgttttcaagaagcagtttcttacactatgctttttattcacgttaaatgaa

SEQ ID NO: 928434 - DNA, 120 bp, Artificial Sequence
  ENSG00000265352_2 (sequence is synthesized)
gactccttcatcatcaggatgccagataatattttaaaagctgactccaccagagacccgattcttgaacttttaatgcacatttggaaatcccgtgtttagttggcttagattataaac

SEQ ID NO: 928435 - DNA, 120 bp, Artificial Sequence
  ENSG00000265352_3 (sequence is synthesized)
tgcaggagaacaagaagtgtatcaattatgttccagtttctaggatgtactcttctagtggatccacaagcaaaagggaagaggggagtgtgaaggcagagaaaataaagcacagcctat

SEQ ID NO: 928436 - DNA, 120 bp, Artificial Sequence
  ENSG00000265352_4 (sequence is synthesized)
ctaatagaggctattccgtatacttactagaatatatgagttttacaaattggaatgataggcattgatattgacacatctggagaaggagtgatcaaagagaagtggccctggagctct

SEQ ID NO: 928437 - DNA, 120 bp, Artificial Sequence
  ENSG00000265352_5 (sequence is synthesized)
ccccatgaaaagattaaatttttaagaagatgctgctcacctaaaacttatcaataaagtcaactatagtttccaattggtaaatcattgtatgaaaaaacaataaaactatgaaataaa

SEQ ID NO: 928438 - DNA, 120 bp, Artificial Sequence
  ENSG00000265352_6 (sequence is synthesized)
ttacagttcttcccccaaattacaaggaatggaggctgggaaactacatttctgagactccttcatcatcaggatgccagataatattttaagtttttattgctgctgcagtcaaaatgt

SEQ ID NO: 928439 - DNA, 120 bp, Artificial Sequence
  ENSG00000265352_7 (sequence is synthesized)
ttggtttgacattttgcaaaatcctactgtcttcatttgcaaggtagaatggaaagtttatggagacttgggcaactttcctatgaaatctgccaattaaataaacaattgagattggaa

SEQ ID NO: 928440 - DNA, 71 bp, Artificial Sequence
  ENSG00000260495_0 (sequence is synthesized)
ggatgtttaatggggatgtggagattcattgtactgtttctatatttttgtggatgttgaaaaatattttc

SEQ ID NO: 928441 - DNA, 75 bp, Artificial Sequence
  ENSG00000260495_1 (sequence is synthesized)
caggctggtaactggaattacaggcataagccaccacacccggccgaaaaatatatttaaaaaggtaagaaacac

SEQ ID NO: 928442 - DNA, 120 bp, Artificial Sequence
  ENSG00000260495_2 (sequence is synthesized)
acacccggccgaaaaatatatttaaaaaggtaagaaacacacaagacaagcagcttggacttatcttctccatgatacctacccagtatccctgtgagcagctgacattcctttctccaa

SEQ ID NO: 928443 - DNA, 120 bp, Artificial Sequence
  ENSG00000260495_3 (sequence is synthesized)
gcagttgctgtattttgaacattgctcgagcaagaaactttttataatgggtttatttatccatgtcacctgctatactatgtttattgtagctcagcatgatttccaggtaccaagcac

SEQ ID NO: 928444 - DNA, 120 bp, Artificial Sequence
  ENSG00000260495_4 (sequence is synthesized)
agtacttggtgcgtaatagtgctaactgaatgttggatggatggagggattaaaaaaaagaaaaacacctgaatatcagacacttaataaatgtttcttgggaggccgagatgggcggat

SEQ ID NO: 928445 - DNA, 120 bp, Artificial Sequence
  ENSG00000260495_5 (sequence is synthesized)
aaataaatgttttctgaactgtattctctatctgttcttagttaatttgtgtttgccatttttaaagtcaaaaaccagggagagttctctacacaatgtaaatatttgataagtacttat

SEQ ID NO: 928446 - DNA, 120 bp, Artificial Sequence
  ENSG00000260495_6 (sequence is synthesized)
taattgcttattgtgctagtctattctttaaatatcagaggttccaaaacaaagagctccaatagtaggatcacagtcaggtaaccaattatccgagtaggaaggttgccttagttgaag

SEQ ID NO: 928447 - DNA, 120 bp, Artificial Sequence
  ENSG00000260495_7 (sequence is synthesized)
taactggaggtgaatggggatttgtcaggcaggctcttccagataaaggtgaaccttccctgttgttttgatagaaggaggaaatggaatgaccatcaagagaaaggtagttgctggctt

SEQ ID NO: 928448 - DNA, 120 bp, Artificial Sequence
  ENSG00000260495_8 (sequence is synthesized)
ttttaataccacccacactgttgctagtattccccaccactccattggcctggtgaactcttattcatccttcaaaacccagcttaaccatggccttcaggaaatcttgagctggcttcc

SEQ ID NO: 928449 - DNA, 120 bp, Artificial Sequence
  ENSG00000260495_9 (sequence is synthesized)
caggacagagtgggtcagtcctctgcatgctcctgctgctgtgctgtactcaccatactgtactgtaatttactggtttgtaagtcatttccactgctgggttgtgagctcctccaaggc

SEQ ID NO: 928450 - DNA, 120 bp, Artificial Sequence
  ENSG00000260495_10 (sequence is synthesized)
aggggctttgccttatctgcctatgttcccaggacttacacagtgcctgatgtgtagtaggtaccccatgaatgttttacataattagcaggagcgtatcaggtaaattagcaaagcaaa

SEQ ID NO: 928451 - DNA, 120 bp, Artificial Sequence
  ENSG00000260495_11 (sequence is synthesized)
ctgtgggatgtgggatgtcagacaataggagtaggtgggcttatgggagctgaagagcacatgctcctcagctctgattgattgctctgtgcgataggggcccagtggtggtggatctaa

SEQ ID NO: 928452 - DNA, 120 bp, Artificial Sequence
  ENSG00000260495_12 (sequence is synthesized)
caactttttaagagattctgacaattcagactttacatgttgaatattccggattttcaacattagcaactaattccatttggaggaaaaaatgtagcatgggtctacagacaagatctg

SEQ ID NO: 928453 - DNA, 120 bp, Artificial Sequence
  ENSG00000260495_13 (sequence is synthesized)
gctgtaattcatgttcagaggtaatcaggaaacgattagtttactgaaaatgtagtcgacaatcaaatggctgctaggttgccaataaaatgtgttgagtggaattcacatgccccagaa

SEQ ID NO: 928454 - DNA, 120 bp, Artificial Sequence
  ENSG00000260495_14 (sequence is synthesized)
agctcctcctggtgctgtgggcaaggaagagggcccaagtgtgggaagaaggattcaggaggcagagccaactctcccagtgctgccggagccactcttgcttgagctgaagtactgtgg

SEQ ID NO: 928455 - DNA, 120 bp, Artificial Sequence
  ENSG00000260495_15 (sequence is synthesized)
actgttttgcagccttcttgatattgctcaaactgagccacccttgatattgtgcctatcagaatgatggattaaatgttattgtttccttatattccataggcatcagatatcaactgt

SEQ ID NO: 928456 - DNA, 120 bp, Artificial Sequence
  ENSG00000260495_16 (sequence is synthesized)
cattgtgaaacatattacaatgtaagagatttgatattgtcctaacagctttagtctctggtggctttactgagctcttctggtttagaggtgaaacaacccagagaaaggatttattta

SEQ ID NO: 928457 - DNA, 120 bp, Artificial Sequence
  ENSG00000260495_17 (sequence is synthesized)
tgtattcgtttttggtctgaagaccaaaaaggatgtttgcaagatattaacagtaatcattcattcaacaactgtttttaaagcacctgctgtacgatacctgctacagatacagtgatg

SEQ ID NO: 928458 - DNA, 120 bp, Artificial Sequence
  ENSG00000260495_18 (sequence is synthesized)
gtgaaagtatagttgtctcagtgttattatagaagcttttactctgtattttcctcgatttctattttctgtactgatcatgcataattttttacaatcattaaaaaaacaagaaagcaa

SEQ ID NO: 928459 - DNA, 120 bp, Artificial Sequence
  ENSG00000260496_0 (sequence is synthesized)
atgccgtggccagcagtggttgggatttcacggactttagacagctgccagtgtcagggtcccgggggcttttcccggccgccaccccccccgccaaatggagccatcagctccctctcc

SEQ ID NO: 928460 - DNA, 120 bp, Artificial Sequence
  ENSG00000260496_1 (sequence is synthesized)
ccagtcatggagaccgcactgctgtccttccttccaggccaggaggagcccccgccatgtgatgagctgggacggaaaatcaaatctcctggggagaaacggcttctgtgtccaaatgag

SEQ ID NO: 928461 - DNA, 120 bp, Artificial Sequence
  ENSG00000260496_2 (sequence is synthesized)
ctttccgagtccaggtgcaaatggtttggggagctccaggagcaaaaatacggtttcaattttccaaagcaggccgagatccccgagtttaacccacatggccgagaagcgagcccccgc

SEQ ID NO: 928462 - DNA, 120 bp, Artificial Sequence
  ENSG00000260496_3 (sequence is synthesized)
gcaggctgtgtggtaaccgagggcaccgtggcagtgaggcaggagcagtcggcgcccacacgccggatctgccgcacccgctgccacccacagtcctctggcgagctctcagatgggagg

SEQ ID NO: 928463 - DNA, 120 bp, Artificial Sequence
  ENSG00000260496_4 (sequence is synthesized)
agtaaccatggccgccctcatggcagctcacctgttttggggtattttattcgcatctgcagagtagagaggaacattccagaatgtgaagacttcagaacgtggaccctgggttctgga

SEQ ID NO: 928464 - DNA, 120 bp, Artificial Sequence
  ENSG00000260496_5 (sequence is synthesized)
gagcagcccagctcgggaaacaaatgctccttccagcagcagcagagagctgtagagccggggctccgggcagcttctgaatccagctcccaggccacagatcacagggacaggacggga

SEQ ID NO: 928465 - DNA, 120 bp, Artificial Sequence
  ENSG00000260496_6 (sequence is synthesized)
gcctcccacacagacgccaggcagcaggaccccggaaattcacactcggattttgtccggcattcccactccctgccctgcttggagaggcaggaccgcaggtctgccggccccaacggc

SEQ ID NO: 928466 - DNA, 120 bp, Artificial Sequence
  ENSG00000260496_7 (sequence is synthesized)
agcgccacagtgcccggcacagaggcctgcggtcgcgcatacaaagcacccgccggccattatcattccggagccggccagagcctcccggctgcatctcatcggtcattcagcagcccg

SEQ ID NO: 928467 - DNA, 120 bp, Artificial Sequence
  ENSG00000260496_8 (sequence is synthesized)
gaacctcacaggcgggcgtgtggagcgggaggcgggggtggggtgaggcctccagaccccatggaagattgaaatgtcatctgtctcgttttcaaaggaagctcagcgggctccatcccc

SEQ ID NO: 928468 - DNA, 120 bp, Artificial Sequence
  ENSG00000260496_9 (sequence is synthesized)
gccttttgcaagaagatgactcttctgccagatgggaggggacgcccacctccgccacgccagcttctgtcttcctcccggtgacggcaccacagctcccccggcaccgcgtacattcct

SEQ ID NO: 928469 - DNA, 120 bp, Artificial Sequence
  ENSG00000260496_10 (sequence is synthesized)
gatacacccacaactcagtgggaggacccccagccgctctggagacctggctttccagtaggtctgcatagctctgaattgattttggaagaaaccgccctgaactgtttttctcactgc

SEQ ID NO: 928470 - DNA, 120 bp, Artificial Sequence
  ENSG00000260493_0 (sequence is synthesized)
gggtgttggcgcgtgtgtttcacactcgcctccctggcgttcgcgagctgacccgaggagtggtaatctcacgcggcaaagcagggaggaagaaaaaaaggagacaaaagaaaaaaagac

SEQ ID NO: 928471 - DNA, 120 bp, Artificial Sequence
  ENSG00000260493_1 (sequence is synthesized)
ttttatctgggcagaaagtcacaatgcctagcggccaaacgtttgtgagcggtgaagttggttgactgctcaagtttgcagagcttcagcaattgcatcactaaagagagcaagcacaca

SEQ ID NO: 928472 - DNA, 120 bp, Artificial Sequence
  ENSG00000260493_2 (sequence is synthesized)
aaaaaaaaaaatctgacgatcaaagaagcccctcctcacactaccaaaggtttaaagacaacggaaaaaagtggtatagacagatcctcaaagcctctcaccatgtcctattctcaatga

SEQ ID NO: 928473 - DNA, 120 bp, Artificial Sequence
  ENSG00000260493_3 (sequence is synthesized)
gacatagcctaagaaaacggaatctaaaagcaagacagatacattaccaacaaatacagtagtttgtagatgaaaacaaaaaatgatttaacaaaaataaaataatccattgaaagctga

SEQ ID NO: 928474 - DNA, 120 bp, Artificial Sequence
  ENSG00000260493_4 (sequence is synthesized)
ctttctctggacggtttctgctatctttgctcttttcgagctctagcatcgtttgcaaatatttcaatgacttggaccaagtgcagagttttacttcatagctcacccttttagattcgg

SEQ ID NO: 928475 - DNA, 120 bp, Artificial Sequence
  ENSG00000260493_5 (sequence is synthesized)
agtacagaaaaaggcatcgtggagttttagggttggttttcatcaatcctttccaaggcctttactttctacatggagaaacgtgtagagggagaggttgtgaattgccaaagacatgcc

SEQ ID NO: 928476 - DNA, 120 bp, Artificial Sequence
  ENSG00000260493_6 (sequence is synthesized)
gttagattccagatctcctgtgtttgaccaaagttcttgaccaaagttcttaatatcttatttgaaccaaattatattgtatttggaatattgggtagccacaggcccttggacttcagt

SEQ ID NO: 928477 - DNA, 120 bp, Artificial Sequence
  ENSG00000260493_7 (sequence is synthesized)
ttttttcctcattatattacaaactcttgagaatccagactaaattttaaatgacttgttgtcacactcaacactttgaatatagtagacaataaagattaggcgaatgagaccaggcgc

SEQ ID NO: 928478 - DNA, 120 bp, Artificial Sequence
  ENSG00000260493_8 (sequence is synthesized)
aaattagcggggggtggtggtgcccgcctatagtcccagctactccagagcctgaggcaggagaatctcttaaacccaggaggcagacgttgcagtgttgcagtgagccgagatgccacc

SEQ ID NO: 928479 - DNA, 120 bp, Artificial Sequence
  ENSG00000260493_9 (sequence is synthesized)
ggcaacaaagcaagactctgtctcaaataaaaaaaaaaaagattaggtgaatgaaaattctatatggcaataattaatcaagaagatttcatgcaagaaagattttgcttaattttaagt

SEQ ID NO: 928480 - DNA, 120 bp, Artificial Sequence
  ENSG00000260493_10 (sequence is synthesized)
ttgcttaattttaagtaacaataaactaacaaaaaaggtcactgaagcgacatcaaatacaacagcattaactagtaaagctgaacacaccatttataacacatcataggcacagaactt

SEQ ID NO: 928481 - DNA, 120 bp, Artificial Sequence
  ENSG00000260492_0 (sequence is synthesized)
caaccacggggagagggggagggagagaccctgtggaagagagacggagactgcggcaaaaagaggaaaggagggttacgggcaccgagggggagctggagtcagccgcaaggagagagg

SEQ ID NO: 928482 - DNA, 120 bp, Artificial Sequence
  ENSG00000260492_1 (sequence is synthesized)
gagcgggggaggaaaagaggcgggagagagaccctaaaaagcaagctagactctccagccggccgctctggtgtggggagggagcgtcatctcaaggacactgaaaaagctgtttgccgt

SEQ ID NO: 928483 - DNA, 120 bp, Artificial Sequence
  ENSG00000260492_2 (sequence is synthesized)
tttgctgtttgcctccttgtcacgacctcagcgacggcagatggagccagtggagggagagagacagacggcaatgcttgggtagccagggctccctgccggccccactcctcctgcaga

SEQ ID NO: 928484 - DNA, 120 bp, Artificial Sequence
  ENSG00000260492_3 (sequence is synthesized)
cacgagcacgcacacacacacgcgcgcaaaacacacacgctgcccttcgccacacgtagccaagtaaaatacacaaaaagcaactgagataccattcgcacatgaccacatggaaacaca

SEQ ID NO: 928485 - DNA, 120 bp, Artificial Sequence
  ENSG00000260492_4 (sequence is synthesized)
caaatgaacaaacgcattcaggcatagccacatgccagtcacacagatggatagacaagagcctggggtacaaagccacatggcacaaagccacctggatgtatatgcccctacacacgc

SEQ ID NO: 928486 - DNA, 120 bp, Artificial Sequence
  ENSG00000260492_5 (sequence is synthesized)
tcacacactctacctgacacgttagtgcatccccattgggccccagtttctctcagcaaattcagatcacccagcctgacttcaaaacctgcccccttccattccccttcatgctggttc

SEQ ID NO: 928487 - DNA, 120 bp, Artificial Sequence
  ENSG00000260492_6 (sequence is synthesized)
ctgaatccagctcgttgctccaggctagcaaagctgtccacagcctcatttgtggtttgctcacctgcctcagcaccatcagccagagggggcgaggaacgcggctctgcggaggagcgg

SEQ ID NO: 928488 - DNA, 120 bp, Artificial Sequence
  ENSG00000260492_7 (sequence is synthesized)
aatcttctcagcagcgatctgcgaagggctcagcggccacaggagggcggcagagaacagcgctccctacagatccagacgtcggccctggatgctgtctggaatccaggcaaggccagg

SEQ ID NO: 928489 - DNA, 120 bp, Artificial Sequence
  ENSG00000260492_8 (sequence is synthesized)
ctgggctgccctaggccggggacgtctttagctcgagcaaaaacccatgaatttcagaattcaggaatccttgcatcccttctcaagctctctagtccctgaaatgccatcgccctcctc

SEQ ID NO: 928490 - DNA, 120 bp, Artificial Sequence
  ENSG00000260492_9 (sequence is synthesized)
agcctcccttccatttctcgttctcctagcactggggctgctggcacagaaggaccctgtggcttttccttcatggtatagcagatgacacccacgctcctccgtgacattccctagggt

SEQ ID NO: 928491 - DNA, 120 bp, Artificial Sequence
  ENSG00000260492_10 (sequence is synthesized)
cccagctgataactggagctagaactagaacccacgacttcttggttctctgcgcaggggtcttcccattgtgtcagctgcagctcctgaaataaaaccataccctacaggccacaacca

SEQ ID NO: 928492 - DNA, 120 bp, Artificial Sequence
  ENSG00000260492_11 (sequence is synthesized)
tcccccacctcatccacctctgactgtggagaggggaagaagagatgttgggctaatagtttccaagggccacagttcctccctctcccctcctttttatccacacatctgtttcctgag

SEQ ID NO: 928493 - DNA, 120 bp, Artificial Sequence
  ENSG00000260492_12 (sequence is synthesized)
atcaggttatccaaaaaactggtgctggggaaagcatatgggatttgcagagaagaaagaaccagaggatcttgggcaagatgaagacagctggtgagacatggactggatagctgtttg

SEQ ID NO: 928494 - DNA, 120 bp, Artificial Sequence
  ENSG00000260492_13 (sequence is synthesized)
agacagcacgtcgataatgaaatcatcgttaaatgacttcaagccctaattaataatccaggccaaccgaggccatgcctgactggggtcgggggaggggatgtcattgttggggagcac

SEQ ID NO: 928495 - DNA, 120 bp, Artificial Sequence
  ENSG00000260498_0 (sequence is synthesized)
ttcctgccaccctgcaggccgggaagttggcaggtgtggcgggtggggtgaggggtccgagtcccatggcctaggacgttcatttctccgaggctcggtctctcctctggtgggaccatg

SEQ ID NO: 928496 - DNA, 120 bp, Artificial Sequence
  ENSG00000260498_1 (sequence is synthesized)
tctcgaagagcccctggcttggcttctggagctggcggccaggtaggagcccccaggaaagctccatcggctgctgctgagccgagctctcctgaacccggcctgcgctgcccccagcgc

SEQ ID NO: 928497 - DNA, 120 bp, Artificial Sequence
  ENSG00000260498_2 (sequence is synthesized)
tgtgatcccaccactttggggggccgagagccaccaggaagatcaaggagccagggccaccctcacgttgcctaggcaacagcatccgtgatcagactgtaaggcaactgggacccatgc

SEQ ID NO: 928498 - DNA, 120 bp, Artificial Sequence
  ENSG00000260498_3 (sequence is synthesized)
gtgctccccgggggaggctgcaggttcacgtcggtgtccgggtatcttacagaatgttcttaatcttcacgtgcttcttctgagatcagtgataaagaagacacggatacagcaagaagg

SEQ ID NO: 928499 - DNA, 120 bp, Artificial Sequence
  ENSG00000260498_4 (sequence is synthesized)
agggctgggagtggagagtcagaaatggggacctggtcagggcaagggggcagatgctcggctcacgtcgtacctggtaatttagaaatgcagcaagtctagtcatgtagatctctggct

SEQ ID NO: 928500 - DNA, 120 bp, Artificial Sequence
  ENSG00000260498_5 (sequence is synthesized)
ttctctctcgttgcttattcttttattattattaaatgaatgttaatgtggaaacgccgtgtgcacgtgggcagagccaaccgttcatgagcagtgtgcttgtcgccccctgccggccgg

SEQ ID NO: 928501 - DNA, 120 bp, Artificial Sequence
  ENSG00000260498_6 (sequence is synthesized)
tgccgagagtgctggcatgcagcagagaaggctgtaagtgactgtgaggtttccttcattatactcatctgcattttccaaattttgaaaatgagtatatattaattacacactaaaaaa

SEQ ID NO: 928502 - DNA, 120 bp, Artificial Sequence
  ENSG00000260498_7 (sequence is synthesized)
aggctcaggcccgcctgcgggctggtccccatccttcctcttagaccccgcgagggtgatgcaaccttcgcatactgcggttgcgaggctccaaggccgccttctgcgcgggaggagtga

SEQ ID NO: 928503 - DNA, 120 bp, Artificial Sequence
  ENSG00000233901_0 (sequence is synthesized)
tatggcgatatctggacactcctaagtccgggtctgttttagtaaacattattaatttgttcccttaaccataaacctctaggggctcggaatacccacctttctggtaatgcagcccag

SEQ ID NO: 928504 - DNA, 120 bp, Artificial Sequence
  ENSG00000233901_1 (sequence is synthesized)
cgggtcccagcctcgttttccagccctcactcaaaatggagtcgctctggttcgaacgcctctgacaagtgtgtacctacgtgtcaggcccatccttcctgcaggcctttgtcttggtgt

SEQ ID NO: 928505 - DNA, 120 bp, Artificial Sequence
  ENSG00000233901_2 (sequence is synthesized)
tgtgtgactgctgccaggagcctgctcacatgaccgtgtggagaaagttctttccctgaggaccatctggagtggacgcgtgcactacccctctctgaatacaccctccccacgaggccc

SEQ ID NO: 928506 - DNA, 120 bp, Artificial Sequence
  ENSG00000233901_3 (sequence is synthesized)
tctggagcatcctgtagagccagcccctacccagagaccctgagcccagagaatgcgctgggtggtgagcctggggacgaatgcagagccctaggtctcctctccagaaagaccggattt

SEQ ID NO: 928507 - DNA, 120 bp, Artificial Sequence
  ENSG00000233901_4 (sequence is synthesized)
accagccgaatactcttgcactgtgcactcttcgtgttcatcatcagtcccccggatgggtgtttaaggcatttccaaagctctgttattaaaaacacgatgcaatgagtttctttcagc

SEQ ID NO: 928508 - DNA, 120 bp, Artificial Sequence
  ENSG00000233901_5 (sequence is synthesized)
agagcctcacacttgctgcctcctctgcctggaactctctccctctgctctcacagggttccctaagtgtcgcttcctccaagaagccctccctgatgagttgagccactttagtttgtg

SEQ ID NO: 928509 - DNA, 120 bp, Artificial Sequence
  ENSG00000233901_6 (sequence is synthesized)
ctcaggctcaccctgcacgtcttggttgctctcatcactgtaatgatctaaaacacacgtctgctcatgagacccgcatcccacccccgatgctggggccgctcttggattttcatgcct

SEQ ID NO: 928510 - DNA, 120 bp, Artificial Sequence
  ENSG00000233901_7 (sequence is synthesized)
cttctgctgggggcatgtgcaggcatggagactgcccggccccttcctgtcctgttggggcatgattttcaacagagggaggattctgggcatgttttcctttggaagtctcaccaggct

SEQ ID NO: 928511 - DNA, 120 bp, Artificial Sequence
  ENSG00000233901_8 (sequence is synthesized)
cactgtggccggggcatggctccttcaccccggggctcaccctcggtgtccgtgaagtccagccgacggtgaccctaagtcctccctccactcgcctatgtttggggatagcccatcctt

SEQ ID NO: 928512 - DNA, 120 bp, Artificial Sequence
  ENSG00000233901_9 (sequence is synthesized)
agtagctgggaccataggtgcatggcactgtgcctggcactgtctgaatgcatacagctgcgtagcatcgtggtaagaacacccgccctgacatcacacagacctgcatccacgtcccag

SEQ ID NO: 928513 - DNA, 120 bp, Artificial Sequence
  ENSG00000233901_10 (sequence is synthesized)
ctgagcctcagttctcacatctgcaaaatggggagaacaacagcagcagcgtcctgaggctggggtgaggaccgagtgaaaaacctttgtcgcatctttgggcatcgcaggagttcaata

SEQ ID NO: 928514 - DNA, 120 bp, Artificial Sequence
  ENSG00000233901_11 (sequence is synthesized)
gcacaatttcccaaacggattttatgaactgattttggtttggctgctaggaggtcctatctgcagtgggggctgctggacctgggaggctggggtgctgaggctcctctgcacactcca

SEQ ID NO: 928515 - DNA, 120 bp, Artificial Sequence
  ENSG00000233901_12 (sequence is synthesized)
tcctctgcacactccactttgggtgacattgttctagaacctccaggtccagcttccagaggaccatgagtgggtatgataaggtttgaagtggggccgggcatggtggctcacgcctgt

SEQ ID NO: 928516 - DNA, 120 bp, Artificial Sequence
  ENSG00000233901_13 (sequence is synthesized)
ggctgcacagtcacacgcggcgccccattaaagcggccgtcccgggcgcgcgcctcattcgaggcgacgggctccgggccctgatagatggggtgcggggacggagacaaatgacggcct

SEQ ID NO: 928517 - DNA, 120 bp, Artificial Sequence
  ENSG00000233901_14 (sequence is synthesized)
cctcagatgacggttcatgctgggagtggcctcaaggccttctgggacctggcatgggccaagctctcccacctggggctttcctccccttcctctctctcctccagaaacacagattga

SEQ ID NO: 928518 - DNA, 120 bp, Artificial Sequence
  ENSG00000233901_15 (sequence is synthesized)
gccgtcctcaccgctccctccttccctgcagcattccccagcccccggcccaccctcctcccacccgcttcctgacccaggctcccgggccttcccctcgtggccacctagctgtgtgct

SEQ ID NO: 928519 - DNA, 120 bp, Artificial Sequence
  ENSG00000233901_16 (sequence is synthesized)
aaaaaaagggatagcggtaaaaagacagctactccgtagacagagtaggatgttcctgaaagtaagaggaggagcgaggaacgcatccaccctaggggctcggaatacccacctttctgg

SEQ ID NO: 928520 - DNA, 120 bp, Artificial Sequence
  ENSG00000233901_17 (sequence is synthesized)
aaaagtggaatcgcttggtcaaagggtgggtgcatttagcaacctgatggctttccaggagacaagtgctgcctcccggccacgagcttttaagaagaactgttgatggaacccgagctg

SEQ ID NO: 928521 - DNA, 120 bp, Artificial Sequence
  ENSG00000233901_18 (sequence is synthesized)
gagtcccagggaccggggcgagttctccatcccaggggattttcagatgggacactggggagaagctgccctgcccatctgaactctatgatcccagtactaacactggtagctgtgcca

SEQ ID NO: 928522 - DNA, 120 bp, Artificial Sequence
  ENSG00000233901_19 (sequence is synthesized)
acagcatgtgacccccacttcccagccaggcctgggtcctcttgggttccgagatcccagccccctgctgtgatcctcagggatcccttcttgactggcgtctcccagaggcacttgtgt

SEQ ID NO: 928523 - DNA, 120 bp, Artificial Sequence
  ENSG00000233901_20 (sequence is synthesized)
tcccccagagcttgctctccacaagtttctgaaactcattgctgctgctggagactccattgggtctagctcttggctgctctggttgtgcaatcacccgtctgcacgtttttctttcgt

SEQ ID NO: 928524 - DNA, 120 bp, Artificial Sequence
  ENSG00000233901_21 (sequence is synthesized)
tttttctttcgtgcagagaaagatctgcctcatctttctgcaagagcatcttggtatttatacactttttgtcttgattttacaatttttggctgggcacggtggcttacgcctgtaatc

SEQ ID NO: 928525 - DNA, 120 bp, Artificial Sequence
  ENSG00000233901_22 (sequence is synthesized)
aaaaaaaaattatttcttggttgggcaatgtcactgttgtttctgaaaaaatacacccttattgtaccataaactgatgagttgaagcaacactggaaactacaagaaagaaggtaaaag

SEQ ID NO: 928526 - DNA, 120 bp, Artificial Sequence
  ENSG00000233901_23 (sequence is synthesized)
tcatcaacacgcttcacctggagatgactctggttaatgtctaggtggacgtccttctgcagagtgtacacatttcgccccatcccctctaatgacaatgaaaacctctctgtttcttgc

SEQ ID NO: 928527 - DNA, 120 bp, Artificial Sequence
  ENSG00000233901_24 (sequence is synthesized)
tgaaggtggggtgtgtaagtcactggagtggatctgagggcctgaaaatctccatcccctcccctcccacagcgtaaacaaacagcctcccagcacccctcccgcactgccaggttggaa

SEQ ID NO: 928528 - DNA, 120 bp, Artificial Sequence
  ENSG00000233901_25 (sequence is synthesized)
gccaccgctccagctccagggagcaaggcttggtgcccactaagcaggtgctaatgattcccccactctcaaagaaagttccattcactccccaaggttccactcccctaccttccagac

SEQ ID NO: 928529 - DNA, 120 bp, Artificial Sequence
  ENSG00000226370_0 (sequence is synthesized)
attctgattatcttggtggaatcttggaaaagctaagcagcttcactcttaataaacagaccttgatcagcaacaagtagtgcagagggagctccttacaactcgaccagtgaacccaat

SEQ ID NO: 928530 - DNA, 120 bp, Artificial Sequence
  ENSG00000226370_1 (sequence is synthesized)
ttgagaactgaaggagaaatcaatatctatgcagatcagttccacagggaagacatcctatggggactgtttcttcctgggatgagtagaatggaagccctatgcataattcagttcgtg

SEQ ID NO: 928531 - DNA, 120 bp, Artificial Sequence
  ENSG00000226370_2 (sequence is synthesized)
agaagagcaaaggctggactcatggtcccaatttggaggtgaagcatggtgacaaacgtcaatgggaagcatacacattgcaaagtggcttctctcagcgtctgctgtaaacaccgggtc

SEQ ID NO: 928532 - DNA, 120 bp, Artificial Sequence
  ENSG00000226370_3 (sequence is synthesized)
gtgagttgtctgtgagtgtatgaatgaaaacattccatagagattgtgtggccataatacacaaggagctggactccagcaaatggcccagatcaacattctgaaattgaacttagaaaa

SEQ ID NO: 928533 - DNA, 120 bp, Artificial Sequence
  ENSG00000226370_4 (sequence is synthesized)
ctatcagatatctggaagtgaagtaaagcttatgaagaaaaaagcagtgtggaactgcagtgatttaaaagaaacaagatgggacccatacactcagcattaaaacatataaatctgtaa

SEQ ID NO: 928534 - DNA, 120 bp, Artificial Sequence
  ENSG00000226377_0 (sequence is synthesized)
gcggccgctccgccctcacctgagcctgaggttggccatgaactcgggcatggagacggtgtccatcagcacgaagtctgccttgccgaattccaggctctcctgctccgccatggcgcc

SEQ ID NO: 928535 - DNA, 120 bp, Artificial Sequence
  ENSG00000226377_1 (sequence is synthesized)
agcgcgggggctcaggattattgcggatgtcttgagcatgggaccattctttttgcatccaccaaataactattgtactactttgcatatataaatatgaaatccatactggttcagtgg

SEQ ID NO: 928536 - DNA, 120 bp, Artificial Sequence
  ENSG00000226377_2 (sequence is synthesized)
aatgaagtgagttgacatcttctattacaaaatctacgaggaaatctagaggcctccaaggacctggctgggcttcaactctggctgagtttgagatgagtaaaccagactgaaggacct

SEQ ID NO: 928537 - DNA, 120 bp, Artificial Sequence
  ENSG00000226377_3 (sequence is synthesized)
tgcccaaggcctgcttcagctgccagccacccacacttgctaagagaaaggaaaggagctttgtcacctcctgagggactgcctctgccatcagaaaaccaccccaatccctggcaccag

SEQ ID NO: 928538 - DNA, 120 bp, Artificial Sequence
  ENSG00000226377_4 (sequence is synthesized)
cagagctgggttgcatctgactaccgttagcagctgtccttcagaaggaggagatccacctgtctcgatatcagtgtcctcatttgtggaataaaagctctggaataaggtaggactgtc

SEQ ID NO: 928539 - DNA, 120 bp, Artificial Sequence
  ENSG00000226377_5 (sequence is synthesized)
ctatggttgggtcatttgtggaggtgtcggtcagtggctaagtaggttattgcatagggtatggttgtattcctaatgtttgtattggcatgttttaacataagcagaactgaacttcaa

SEQ ID NO: 928540 - DNA, 120 bp, Artificial Sequence
  ENSG00000226377_6 (sequence is synthesized)
gaaggaaagaaagaaatctcaaactgtatgcactttggagcatccagggaccacaccccaaaaccttttggtaaattatatatgtgtgttccctgagctctgtaggtgttaaaaattagg

SEQ ID NO: 928541 - DNA, 120 bp, Artificial Sequence
  ENSG00000226377_7 (sequence is synthesized)
gcaaaatcccaggtaccaggaaaagaaacatcacggcttgcagatgatgagagagttgcagaaattgtacagtggttaggagctatggtgggatacaatgtggtttccaaatggccaaag

SEQ ID NO: 928542 - DNA, 120 bp, Artificial Sequence
  ENSG00000226377_8 (sequence is synthesized)
taagagatcctcattttaatcaacatcttatataggaacccaacatataaaacacatatacaacatatgcaaagggtattttattaatttcttgtataagtccaaattagtataaaatta

SEQ ID NO: 928543 - DNA, 120 bp, Artificial Sequence
  ENSG00000226377_9 (sequence is synthesized)
ggcattgatgctctcatgatgaacccaaatctgctcaatggggctcactattagcctcaggattccagtttacttttgtatgttgttttcattgtactgtgtcaagcaaattcttgtttg

SEQ ID NO: 928544 - DNA, 120 bp, Artificial Sequence
  ENSG00000226377_10 (sequence is synthesized)
tataactaagcagtaatttgttacccatacaactttacattcagcatttctaggccaatgtgcagttacaacattattaatcaatgacacacttgagcaaagttcaggtatatgcacagc

SEQ ID NO: 928545 - DNA, 120 bp, Artificial Sequence
  ENSG00000226377_11 (sequence is synthesized)
cggcaggagagactgaatactctggtctgcattcagtcaaggtaacctagagcagattagctcattatgaatgttctttgtgataaaatttgaatagaaacacatttggagatgcatgtt

SEQ ID NO: 928546 - DNA, 120 bp, Artificial Sequence
  ENSG00000226377_12 (sequence is synthesized)
aaaataaaacaaataaaagtttatatccccaatcatgagacacacagacaccatgagcctcctgatatggtctcctgaaaaagacacatatcatttacctgctaaaaatacgtaaatgga

SEQ ID NO: 928547 - DNA, 120 bp, Artificial Sequence
  ENSG00000226377_13 (sequence is synthesized)
atctaatcatgaagaagcatcaaacaaactcacattaaggggcatcctacaaaacaattgacctgtattcttcaaaaatatcaatgatgtgaaagacaaagaggctgaggcacatcacta

SEQ ID NO: 928548 - DNA, 120 bp, Artificial Sequence
  ENSG00000226377_14 (sequence is synthesized)
ttaaaggcaatgggtgattctggactggatctccaaccagaaaaatgtaaaggacattgttgggataattggtgaaattcaaatatagacgcgatgttagatagtaggatagtatcaatg

SEQ ID NO: 928549 - DNA, 120 bp, Artificial Sequence
  ENSG00000226377_15 (sequence is synthesized)
ctagtttttctgaacttgatcattttactgggattctgcaagataatgtccttgtttctagcaggtatctgctaaagtatttaggagtaaaatgatgtctcgaactgtttggcaagaata

SEQ ID NO: 928550 - DNA, 120 bp, Artificial Sequence
  ENSG00000226377_16 (sequence is synthesized)
ataaaaataataagatgaggaggtggaaggagggcgtgcatatatattggtagacatataaatgattaaagcaaatgatgcaaaatactaacaagtggtaaagtcattaaaaatatatgg

SEQ ID NO: 928551 - DNA, 120 bp, Artificial Sequence
  ENSG00000226377_17 (sequence is synthesized)
aaaaatatatgggacttttgaggggattttcttttgtactatcctcacaacttttctgtaactttgcaattagtttgaaatttattcatttattttgagacggagtcttgctctgccgcc

SEQ ID NO: 928552 - DNA, 120 bp, Artificial Sequence
  ENSG00000226377_18 (sequence is synthesized)
ggcctgaaatttaaacttaaaaattaaatagtaatctaaaactgtgctaaataaaaatttttaatttaaaaatattaaataacacttagaaatcaaagtcacatcagaattttgcaaacc

SEQ ID NO: 928553 - DNA, 120 bp, Artificial Sequence
  ENSG00000226377_19 (sequence is synthesized)
ttccagaactgaagaaccagcagatatttttgaaaaccctggtccagggtacctcttagctctatttggcatagatgtgctaggagattataaacactgaacaggtaattctaaaaacaa

SEQ ID NO: 928554 - DNA, 120 bp, Artificial Sequence
  ENSG00000226377_20 (sequence is synthesized)
aaataattagatgtcaaatatacccatatgcccctgagaaggtgcatcctgttctctgcctgaagttctccccgccaccccacccctcactcctatgacctagctaacttccgctcatcc

SEQ ID NO: 928555 - DNA, 120 bp, Artificial Sequence
  ENSG00000226377_21 (sequence is synthesized)
ctccgctctcagtctcaacatcacttcctccaagaaggcttccataatctcctgagtcagaattggctgttcctcctctgtgcctcctgcagcatcctggaagtgctgcccccattacag

SEQ ID NO: 928556 - DNA, 120 bp, Artificial Sequence
  ENSG00000226377_22 (sequence is synthesized)
tactaaatgcccttgagcctactgtctgtctctctcactcgtttgtaagggccatgagggctggaagctgtcttttctggtttttgatgtaaatgtaattctggcacctcctagcatagt

SEQ ID NO: 928557 - DNA, 120 bp, Artificial Sequence
  ENSG00000226374_0 (sequence is synthesized)
gagggacggatgaaaggaaatcaaggaagattttcagagggcaggtggggggaggctggggaccttcctgtgggggcacaaatcttgtcctgtcactggaggatgcacacagctcatgga

SEQ ID NO: 928558 - DNA, 120 bp, Artificial Sequence
  ENSG00000226374_1 (sequence is synthesized)
gaccacgtcaaccaccggcctaaggaaagcagcgggaaagctaaagtgtgacgcggcttaagcagcttgtctgagtttgcacagctggcaaatggctgagccatgactcacacccaggtc

SEQ ID NO: 928559 - DNA, 120 bp, Artificial Sequence
  ENSG00000226374_2 (sequence is synthesized)
catccaccgccaaagctccagatctctggcatccttctaaggtcagaaagggaaagaaatccctaataaggagcctgtgtgacggcgtgcccccctccactttcccacccctgccaagga

SEQ ID NO: 928560 - DNA, 120 bp, Artificial Sequence
  ENSG00000226374_3 (sequence is synthesized)
cccgtttgaaggctgttcacgccagtcactgcaatcaccattgagcacagagatgacagttccagcaagcactgaccttccagcccactctgcggaggagaagactgaggggcagagagg

SEQ ID NO: 928561 - DNA, 120 bp, Artificial Sequence
  ENSG00000226374_4 (sequence is synthesized)
accctaatttcccggcgctgactcaaactcatcaggaacactgctttcactgagtgtatgaagtggtttctccatccgtgtggctttacctgaactcacaccggtcccacggcccaggtg

SEQ ID NO: 928562 - DNA, 120 bp, Artificial Sequence
  ENSG00000226374_5 (sequence is synthesized)
tggagccgagcactcccctctgcctcctccctggactgcaggacctgtgtctcgctttatgaaagagatgccatttggggaagactcgcattgtcgggagcgctgtggacgctccagaag

SEQ ID NO: 928563 - DNA, 120 bp, Artificial Sequence
  ENSG00000226374_6 (sequence is synthesized)
gagatcaacacgatgatgacgatgccgggtggagggaatgtgcacttctcgggagccagaaaagaataatctgaatgtctccagcatcaagaaaagaccagtattgaaggtgatggatgc

SEQ ID NO: 928564 - DNA, 120 bp, Artificial Sequence
  ENSG00000226374_7 (sequence is synthesized)
cttaattacgctgattggatctttacaaattatattaatgtattaaattattacatgtatgcagaaagtctgtacacctattatgcaccaataaaaaagaaattttttaaagtgagcaaa

SEQ ID NO: 928565 - DNA, 120 bp, Artificial Sequence
  ENSG00000226374_8 (sequence is synthesized)
ctttgtagccagcaacatgccagatccatgcaccttgttgatgcagccgactctgcaggggtgcaggagggatcactggattcaaaaggcgctgagaagcattttctcctcccgtctttt

SEQ ID NO: 928566 - DNA, 120 bp, Artificial Sequence
  ENSG00000226374_9 (sequence is synthesized)
ggaggtgtttgtgaagatctgatattaactcctcttcagatgtttggtagaattcagcagtgaagctgtctgcggggcagatgcctatgaaaggcgccctggtgtgttcgaggcacgatg

SEQ ID NO: 928567 - DNA, 120 bp, Artificial Sequence
  ENSG00000226374_10 (sequence is synthesized)
aggagcctcctactcacctggcctccaccgcccacccagcacccctggggactgtccccatccccccagggactccagagggaatgtgttttgtgccgtgtggaaaacaagccatgctca

SEQ ID NO: 928568 - DNA, 120 bp, Artificial Sequence
  ENSG00000226374_11 (sequence is synthesized)
ctgcacaccacgacagtcccttcaagctgtcagagtccctgcatgtggagtgaaaagggggaaaaaagacaatttacaattgcaaattggaacccctctctcggagtggagtgataatcc

SEQ ID NO: 928569 - DNA, 120 bp, Artificial Sequence
  ENSG00000226374_12 (sequence is synthesized)
agctagggagacagacggtgaggaagtgctccaggaacatgttacaacacatcactgcctagcagagacgagaggctccaggaaggacctggtgcctgccattccaaccttgaggggctc

SEQ ID NO: 928570 - DNA, 120 bp, Artificial Sequence
  ENSG00000226374_13 (sequence is synthesized)
ctggagggacgctgaggacaaggcggctgtcccatcacctcactcttgtctctgccctcacctctccccaccgtgcagggctcaggactacgggcgcccagacacaaaggcccagagcca

SEQ ID NO: 928571 - DNA, 120 bp, Artificial Sequence
  ENSG00000226374_14 (sequence is synthesized)
cagaacagtgaactccacactgtgcagctgttggcgggaggggcggggagagagaccagagtcccatttctgctgccttttaaataaaagacaaggaggatggcgaggaggaggtcaaaa

SEQ ID NO: 928572 - DNA, 120 bp, Artificial Sequence
  ENSG00000226374_15 (sequence is synthesized)
gaccacgtcaaccaccggcctaaggaaagcagcgggaaagctgtgagttgaagccagagatgaatccatgctcaacctgtgtgtggcagactcctaagtacttgctagggagggtcctca

SEQ ID NO: 928573 - DNA, 120 bp, Artificial Sequence
  ENSG00000226374_16 (sequence is synthesized)
aaaccagctccaggtcctcaaaattagtgtacaagctgtggacaccacagagcaaagccactgctcagagaaagcacacatcctggttgctatgtcttccatgcacggggccctcactat

SEQ ID NO: 928574 - DNA, 120 bp, Artificial Sequence
  ENSG00000226375_0 (sequence is synthesized)
gaaaaaaatcaaggaatggataatataagagcctttcaagaatgtagatttacactagagatttattaaatttgagggcctataacaaaattaatttatttaaacaaatatttgttaaaa

SEQ ID NO: 928575 - DNA, 120 bp, Artificial Sequence
  ENSG00000226375_1 (sequence is synthesized)
attcttttataaagtacctgccactgtgttaggtgttctggggaatctgagagaaatagaaagacactagaataatatggttggtctaaagcactcaagatttagaatcaatggaggctt

SEQ ID NO: 928576 - DNA, 120 bp, Artificial Sequence
  ENSG00000226375_2 (sequence is synthesized)
tgccatcatacaaattatctcataggattgttttgaggattaaacaaaacaccaaccacgggtcacagattatgacattttcaagaaggacacgtttgcttcccctgccaccattgtaag

SEQ ID NO: 928577 - DNA, 120 bp, Artificial Sequence
  ENSG00000226375_3 (sequence is synthesized)
tcccctgccaccattgtaagtttcccaatgcctccccagccctgcagaactgtgagccagttaaacctctttcctctataaattacctagtctcgggcagttctttatagcagcatgaga

SEQ ID NO: 928578 - DNA, 86 bp, Artificial Sequence
  ENSG00000226375_4 (sequence is synthesized)
taaactggtaccacagagagtggggtgctactgtaaagatacatgaaaatgtggaagttactttggaactgggtaacaggtagagg

SEQ ID NO: 928579 - DNA, 120 bp, Artificial Sequence
  ENSG00000213994_0 (sequence is synthesized)
ctgttatcccctcgtcccgttgtcccctcgggacgtctggcacagcttccccgactaattccggcccctcacctcaactgtgctggccgggaggagagcagagacgcagtcctgcccagt

SEQ ID NO: 928580 - DNA, 120 bp, Artificial Sequence
  ENSG00000213994_1 (sequence is synthesized)
aatgcagctcctttagggccatggagccccaatactctgcattcctaacacgcgctgtggggcaggcgcagtccaggtacacctactttctcctgcctctgccacccctgagacagcaag

SEQ ID NO: 928581 - DNA, 120 bp, Artificial Sequence
  ENSG00000213994_2 (sequence is synthesized)
tcccagtctactcaacatgaagacgacagagaggaagacctttatgaggattcacttccacttaaggaataatgaatatgttttatcttccttaaaaaaaaaataaaagatgtggaggat

SEQ ID NO: 928582 - DNA, 120 bp, Artificial Sequence
  ENSG00000263218_0 (sequence is synthesized)
tgcagggccaactttaatacgggccggcctgtctgggggtcgaggtggccgctccctttgtccttgtggctttccacgggcaggggcggtcccagcgagatcgtctcataaccaaaccag

SEQ ID NO: 928583 - DNA, 120 bp, Artificial Sequence
  ENSG00000263218_1 (sequence is synthesized)
cccaccagcagggaagctgaggtgcgccgggaagccaggccaagggagggaccccttaacggaagcctgcaccagctaatgggagcagcgaggagcaagaggaagcgcggggaccccaag

SEQ ID NO: 928584 - DNA, 120 bp, Artificial Sequence
  ENSG00000263218_2 (sequence is synthesized)
agttccatgagccccagccgcggggacccccatggacaaacttccggggctgcacctgccggagcagcgtctcccaagcatcggagcaagaggaagcgcggggaccccaaggtctggagg

SEQ ID NO: 928585 - DNA, 69 bp, Artificial Sequence
  ENSG00000250619_0 (sequence is synthesized)
acagggcttccgaggcgatcaggcagcatcagtcttcagccactaaaccgagaagatctgagaaatcca

SEQ ID NO: 928586 - DNA, 120 bp, Artificial Sequence
  ENSG00000250619_1 (sequence is synthesized)
gaaaataggaagaaaggaagaattaaagaaagaagaaaggaaagaagaaaagaaggcaggaaggaagaacaaaaggagggaatgaaggacaaaaacaaagataaagaaagagagaatgaa

SEQ ID NO: 928587 - DNA, 120 bp, Artificial Sequence
  ENSG00000250619_2 (sequence is synthesized)
aaggtcattcaggaatttaaaatgtgaaccgcaaagtttcaccaggacttccaaacagcccaggcctaaggaagagcggctttatgaaggagtttccaagacagggacctctgtgaatgg

SEQ ID NO: 928588 - DNA, 120 bp, Artificial Sequence
  ENSG00000250619_3 (sequence is synthesized)
tcccaagactggctcttcaggacgtcactatggaccagacaggtggacttccaggccaacagcatggcaaggagcttcctggaatgccatgaaatccaaaagtcagaataagattatttg

SEQ ID NO: 928589 - DNA, 120 bp, Artificial Sequence
  ENSG00000250619_4 (sequence is synthesized)
ccccatggaggacttgcctaattaccagaataaggttggcagtttgtgatatcttctggttaagttttcaactttagttatgaagttaccacgagaagcaggagttatgaatacaaagca

SEQ ID NO: 928590 - DNA, 120 bp, Artificial Sequence
  ENSG00000250619_5 (sequence is synthesized)
ttcagaaaatttgccagcatggacttatatctctaaaataggattggctcaagtgatttcaaggcaccataccaagacctgtgttatgtcggagcaaacaaaagacaacagatattcctt

SEQ ID NO: 928591 - DNA, 120 bp, Artificial Sequence
  ENSG00000250614_0 (sequence is synthesized)
gcaccggctgttggagtgccggtccagggtccaacatttagtaaccaacatcaaatgtacttgtctctcctaagctgcacagactgccaagtctctcgtcaggtcttcgccacaaatctc

SEQ ID NO: 928592 - DNA, 120 bp, Artificial Sequence; identical to SEQ ID NO: 868918
  ENSG00000250614_1 (sequence is synthesized)

SEQ ID NO: 928593 - DNA, 120 bp, Artificial Sequence; identical to SEQ ID NO: 868919
  ENSG00000250614_2 (sequence is synthesized)

SEQ ID NO: 928594 - DNA, 120 bp, Artificial Sequence
  ENSG00000250615_0 (sequence is synthesized)
gataaaaacccacagccatacactagctggcctgtcctgagggttgtgaggcacaaaatgctaggagactagagaagtaagaaatgtcttgacatgaggagaaatcaaggaaagcatggt

SEQ ID NO: 928595 - DNA, 120 bp, Artificial Sequence
  ENSG00000250615_1 (sequence is synthesized)
tgtatcgagactgaagaggctttttaaagtggagggaaggcaaactgaggcatagagatgccaataccaggtcttgtcaggaagaacagagtccaatttggctgcaggatagggcatatg

SEQ ID NO: 928596 - DNA, 120 bp, Artificial Sequence
  ENSG00000250615_2 (sequence is synthesized)
taggggaggggataagactggcatgggggcagagggggacttgaatgtcaggtgacagagtcaaagcttgcactcaagtaggtgattgataggtgatactaactcccctgaacctgtctc

SEQ ID NO: 928597 - DNA, 120 bp, Artificial Sequence
  ENSG00000250616_0 (sequence is synthesized)
gcttgtggcccgcgcaggggcggggtcggaaggtctaggccgggcgcggagcgaggaagcgggtggcgctgggacgcatgctctgggggagatgagtataatgacccgcgtttgtccgcc

SEQ ID NO: 928598 - DNA, 120 bp, Artificial Sequence
  ENSG00000250616_1 (sequence is synthesized)
gcccgtgccccgctcaatccccgcatcaatcccgtgaggccgtttctcccgttggctccactgtaccgggggctgaggcccagggaggtctcgcggctccctaggttatccagctagtaa

SEQ ID NO: 928599 - DNA, 120 bp, Artificial Sequence
  ENSG00000250616_2 (sequence is synthesized)
gaggcgaagctggaattctcactgtgggcccattccatggcttttgccagagcgccagggacacactcagttcaccttctagcagggaagacccaaagatgcgcgcccctggcagccagg

SEQ ID NO: 928600 - DNA, 120 bp, Artificial Sequence
  ENSG00000250616_3 (sequence is synthesized)
gcgtcggaccaggcaattcctactgtccagcatcacctcctccaggcctctcggatgcctctgttgggacagctaagttcctcttcaaagactcaatttcctggtcataagctgtaaaca

SEQ ID NO: 928601 - DNA, 120 bp, Artificial Sequence
  ENSG00000250616_4 (sequence is synthesized)
gattctactcccgctttttcttctttgtcgcacgtctaccctatttgggaaagtttaaaccttagccaatcgggatcagctcagattgtgcggtccaaccccccagccaatggggaaagg

SEQ ID NO: 928602 - DNA, 120 bp, Artificial Sequence
  ENSG00000250616_5 (sequence is synthesized)
acacagaaacaggaactgcgttagggttaaaaaccacttccctcctttgttggcgggtgctcttgggattgcaaccagcgcaagcagcacccttctgcagaagtaaagatgccttgctgg

SEQ ID NO: 928603 - DNA, 120 bp, Artificial Sequence
  ENSG00000250616_6 (sequence is synthesized)
ttgggaggggtagcgattacttttcctcgtgagacacgtcccactgccttgttgcagtggcccaaggagcggaggatcgggtccacccaaagtgaggaataaatccggactttcagcaac

SEQ ID NO: 928604 - DNA, 120 bp, Artificial Sequence
  ENSG00000250616_7 (sequence is synthesized)
gtgggcaggaaggagccttaaaattcccaggcaagtgggtaactctgtgcacagaccaagccgccgacgggaccatcacaaaagctttacaaggccttaccaccctggcaaatgaattag

SEQ ID NO: 928605 - DNA, 120 bp, Artificial Sequence
  ENSG00000250616_8 (sequence is synthesized)
ccgaaaattctggactagataacccttttatgggtctcatggaaaagtggtttggaaaatggaaaggactcctggcttcaatctttacctctcttgcaattgtaacaagtgtacttatcc

SEQ ID NO: 928606 - DNA, 120 bp, Artificial Sequence
  ENSG00000250616_9 (sequence is synthesized)
ttgtgggctgccgcatcataccttgtattcgtgggttaactcaaaggctcatagaaacagccctcactaaagccttcctctcttctctccctccatacttggacaagctcttgctcctgg

SEQ ID NO: 928607 - DNA, 120 bp, Artificial Sequence
  ENSG00000250616_10 (sequence is synthesized)
ataatcaagaagaacaacgaagccaaatcctgttaaaattttttgcagaggaagaagtatcaaatagaagagaggaaattgttgggacagctaagctcttcaaagactcaacttcctggt

SEQ ID NO: 928608 - DNA, 120 bp, Artificial Sequence
  ENSG00000250616_11 (sequence is synthesized)
cataaacttctccccgtttttcttctttttcgccagtctaccctgtttgggaaagtttaaaccttagccagtcgggatcagctcagattgtgcagtccatccccagtcaatggggaaagg

SEQ ID NO: 928609 - DNA, 120 bp, Artificial Sequence
  ENSG00000250616_12 (sequence is synthesized)
acacagaaacaggaactgcgttagggttaaaaagcccttctctcctttgtttggggtgctcttgcgattacaagctgcgcaagtagcaccgttctgaagtaaagatgccttgctgggaaa

SEQ ID NO: 928610 - DNA, 120 bp, Artificial Sequence
  ENSG00000258444_0 (sequence is synthesized)
ctgcactgcctcctccacttcagtctggagctgggacaggaatgagcaggggagctgctcacctgggaatgcagcagctgcacccgctcactagtctcaatcagctcctgctccgccagc

SEQ ID NO: 928611 - DNA, 120 bp, Artificial Sequence
  ENSG00000258441_0 (sequence is synthesized)
ggcagaggaaatggtgtctttgaactgtagtctgtagtcctagaaattgaataaactatttcctaaatagaggtaagagactaggatcctagcaacttctctaagttaacaaaaggggaa

SEQ ID NO: 928612 - DNA, 120 bp, Artificial Sequence
  ENSG00000258441_1 (sequence is synthesized)
aaatatccccataccatttttctcttcattctattaatgagggctagagtcgtttcatagattgaatagtttcaagagcatattgagcagtgcctggctaacagctgaaagtctgccatt

SEQ ID NO: 928613 - DNA, 120 bp, Artificial Sequence
  ENSG00000258441_2 (sequence is synthesized)
tcatgcaactttgttaggctttagaagtgaagcaggaatatagagaaaatacagcttctcccacccacaacgtgtattttaaaccatttcttctggcccagaagacaaacttttccaaat

SEQ ID NO: 928614 - DNA, 120 bp, Artificial Sequence
  ENSG00000258441_3 (sequence is synthesized)
atcttgggaaaaccacagtttctactctttggagacaagagtctcactctcacacccaggctggagtgcagtctcaactcactgcaacccctgctctcaggttcaagtggttctcctgcc

SEQ ID NO: 928615 - DNA, 88 bp, Artificial Sequence
  ENSG00000258441_4 (sequence is synthesized)
accacacctggctaattgtgttggtcaggctggtcttgatctctggccacctcagccttccaaagtgctggtattacaggtgtgagcc

SEQ ID NO: 928616 - DNA, 120 bp, Artificial Sequence
  ENSG00000258441_5 (sequence is synthesized)
tggtattacaggtgtgagccactgtgtctagccaagtttctactcttgatgcctgccatggactattacaagcacctggcagtgacattgcacgagttctaaagaaagacttggtctttc

SEQ ID NO: 928617 - DNA, 120 bp, Artificial Sequence
  ENSG00000258441_6 (sequence is synthesized)
tttcccacagggacattaatgtgaaagaggtccagtgacaaagattcagtcacttttgcagaccctcacaagccacaataatgaagttgcagtgaatttgggacatagccttccctcccc

SEQ ID NO: 928618 - DNA, 120 bp, Artificial Sequence
  ENSG00000258441_7 (sequence is synthesized)
aaaattcttgatccaagaatccacccgtcaagttcaatgactcagactccatttctagtgtggtcgttggttaacaactttactagtttccatccaggcttaacctttctatggaccata

SEQ ID NO: 928619 - DNA, 120 bp, Artificial Sequence
  ENSG00000258441_8 (sequence is synthesized)
atgtcttggtgtctgctgcatttattgtccctccctgttttaaggatacttaagtttttaaagaggcataaatacttcaaagtccccattggccctcctgggggaaattacctcaaacca

SEQ ID NO: 928620 - DNA, 120 bp, Artificial Sequence
  ENSG00000258441_9 (sequence is synthesized)
cagggtagtctgctaaataaccagctagagctagctgccagcccaactttgcccagatctacaatattattctcgttactttagtttactcatccccccaaacttagctttcccccagaa

SEQ ID NO: 928621 - DNA, 120 bp, Artificial Sequence
  ENSG00000258441_10 (sequence is synthesized)
ctttatatccactctccataaaagcttctgtagcaccagcttggtcagtcccaaggtcccaggtgccactggggtctggttgacaaaattgttggtatggtttggctgtttctccaccca

SEQ ID NO: 928622 - DNA, 120 bp, Artificial Sequence
  ENSG00000258441_11 (sequence is synthesized)
ttgttggtatggtttggctgtttctccacccaaatctcatctgtaattgtaatcctcataatccccgtccccaggttgagggagggactcggtgggaggtgactggatcatgggggcagt

SEQ ID NO: 928623 - DNA, 120 bp, Artificial Sequence
  ENSG00000258441_12 (sequence is synthesized)
gagatctgatggctttatgaggggctcttccccctttgcgtcctacacaaaccctgtctcgcctgctgccacgtaaaacgtgcctgcttcactttctgccatgattttaagtttcctgag

SEQ ID NO: 928624 - DNA, 120 bp, Artificial Sequence
  ENSG00000258441_13 (sequence is synthesized)
gcctccccagccacgcagaactgtcaaacaagatcctttataaattacccagtcttgggggggttttatacagcagtatgaaagcagcctaaacagttgttttcatacgtgctggaaatg

SEQ ID NO: 928625 - DNA, 120 bp, Artificial Sequence
  ENSG00000258441_14 (sequence is synthesized)
ctgtgatctgccctgccattgtccccatcctggactgaccctcagtatttttcctttgagtggtgacccagctctttgccttgagcagcaggagtagcccttggtagaatctagttcccc

SEQ ID NO: 928626 - DNA, 120 bp, Artificial Sequence
  ENSG00000258441_15 (sequence is synthesized)
aggggaaatcaaagcagctttatcttctcactgttagccaagcacctctggagacagccttagtgtttgctcttttatcccctctcacctgggaatacaattgcccctgcaacataatgg

SEQ ID NO: 928627 - DNA, 120 bp, Artificial Sequence
  ENSG00000258441_16 (sequence is synthesized)
ccctactgttccctcaccaactcccccagcatggggatcagaaatatggcagtactcctcagtgaagtatatgctgctttgttttaagcactcacctgaatgtgtaaggacatctttcct

SEQ ID NO: 928628 - DNA, 120 bp, Artificial Sequence
  ENSG00000258441_17 (sequence is synthesized)
caagagcttctcacttcctgaggagtctgtagtcttcattcaaatgtcttgatggctcattttccagaaatctctgtaggtcttgagaagcattgtcctagctttggtttatctgaatag

SEQ ID NO: 928629 - DNA, 120 bp, Artificial Sequence
  ENSG00000258441_18 (sequence is synthesized)
tcctatttaaacttgtcccacacagatagcagcctcttgcttgcccttctgtttgtacacttgtctattttctctttctttaaatgccttttgggtgttaatacttcattggtggttcca

SEQ ID NO: 928630 - DNA, 120 bp, Artificial Sequence
  ENSG00000258441_19 (sequence is synthesized)
tagccttgtccccctctcttttgcaacttgaaggcaattctcagttctcttcttgagcacattcatacttagcagcttctgaatatcccacccacaattaaggtacaatctggtcacata

SEQ ID NO: 928631 - DNA, 120 bp, Artificial Sequence
  ENSG00000258441_20 (sequence is synthesized)
actttttccctaggaagaaatgtgctactcaagactaatagccaaggttaagaacgtgcatactcctgaatcggatgtaaatgcattagtctatttgttctgtttagaaataaagatgga

SEQ ID NO: 928632 - DNA, 120 bp, Artificial Sequence
  ENSG00000258441_21 (sequence is synthesized)
acatattttatagctactgttagtgcccatgtgccttctaaatatcttttgaatagttttacttctctccatcttgacagctaccatgccaatccaagcttccatcaccttgctcctggc

SEQ ID NO: 928633 - DNA, 120 bp, Artificial Sequence
  ENSG00000258441_22 (sequence is synthesized)
cttcatccacttttatctctttccaatcacttgttcatacaacagccatattgggtttttttcaaaacacacatataatcagggcacttctcaacttaaaaccatttctggcattacttg

SEQ ID NO: 928634 - DNA, 120 bp, Artificial Sequence
  ENSG00000258441_23 (sequence is synthesized)
cccttaggataatgacaaaactttttaacacagtccacaaggccagagatagcctgacccttgctgatctgtccagcctctgctatatgtccccttattttctctgttccaaccacattg

SEQ ID NO: 928635 - DNA, 120 bp, Artificial Sequence
  ENSG00000258441_24 (sequence is synthesized)
gactttgttcctcttactagtcatgctccccacctatttggttccctagttaacttctcttcatccttcgatttcaacttgtgtcacttcctccagaaagcctaccctttctttcttaac

SEQ ID NO: 928636 - DNA, 120 bp, Artificial Sequence
  ENSG00000258441_25 (sequence is synthesized)
caggccgataggctgtcaaaaccaggaatctcttcttcgtagcactacagtcatactcattgatacgtgtgattattaatgtgggttttttaaaaaattagaatgaaactcaagagcagg

SEQ ID NO: 928637 - DNA, 120 bp, Artificial Sequence
  ENSG00000258441_26 (sequence is synthesized)
gaccacatctattacttgtgattaatatattcctagtggttagcacagtgtctagacaaatatatgttgaatgaataaatagaaaagggagaggaaaaagggaaggattgaccctctgtg

SEQ ID NO: 928638 - DNA, 120 bp, Artificial Sequence
  ENSG00000258441_27 (sequence is synthesized)
aggcagtcttgcaaacagcagaaatgcaaagcaaagctgaagaactaactattcaacacacacctagaggagcgttgtaatgtcttgtgcctgtctcaaatgggtgcattcttatgggta

SEQ ID NO: 928639 - DNA, 120 bp, Artificial Sequence
  ENSG00000258441_28 (sequence is synthesized)
agttttactagtccagctttcactgtaatagttcacattcctctcctagtgtcagtctccaacaaatccctcagtaattcgtaatcagtaatctcatgccaaggatgagagaggggcatt

SEQ ID NO: 928640 - DNA, 82 bp, Artificial Sequence
  ENSG00000258441_29 (sequence is synthesized)
gtaatcagtaatctcatgccaaggatgagagaggggcattatccaaaaagttgggtgtgtccattttttttatggtcttggc

SEQ ID NO: 928641 - DNA, 74 bp, Artificial Sequence
  ENSG00000258441_30 (sequence is synthesized)
gtagctgggattacaggcgcctgctacctcgcccggcttttttgttgttgatgaactcgtgaccttgtgatccg

SEQ ID NO: 928642 - DNA, 90 bp, Artificial Sequence
  ENSG00000258441_31 (sequence is synthesized)
tcatctgtttttcaatacctttaagttcagtttcccttacaaagcccacttttttcttagtgggaatctcttgtaccacttaacacctac

SEQ ID NO: 928643 - DNA, 120 bp, Artificial Sequence
  ENSG00000258441_32 (sequence is synthesized)
tttttcttagtgggaatctcttgtaccacttaacacctacattccttaatttttaaagttaaaacacttatatactataaaatggacacatcttaagcatacagcttgatgaagatttac

SEQ ID NO: 928644 - DNA, 120 bp, Artificial Sequence
  ENSG00000258441_33 (sequence is synthesized)
aaagtaaacatgccagttgaaacaccactctgatcaggatgtggaacataaccagcactccagaaatctctctgccatcattaccaccactggttatcctagccactcttctgacttgta

SEQ ID NO: 928645 - DNA, 120 bp, Artificial Sequence
  ENSG00000258441_34 (sequence is synthesized)
tcaccatagataggttttacttgttttgaagccatctataaatggaatcatggaagtttgggcttccctgagagcagatcttcagagaaaaaaaacttgagtgcagtagtttatttggcg

SEQ ID NO: 928646 - DNA, 120 bp, Artificial Sequence
  ENSG00000258441_35 (sequence is synthesized)
tttggctccaggatgcaggagtgggaaagatggtagagagacagaagaaaaatcaatagaaaggtattacggaggttggatatataatgcttcccagaattgtctgactgaacaggaggc

SEQ ID NO: 928647 - DNA, 120 bp, Artificial Sequence
  ENSG00000258441_36 (sequence is synthesized)
tgaaatatttatccgctggctcctgtttccaattgattgagggatgcccccaaggaagttaacttcactgcaattctgagctgtaattgactttaataagctccaacagcactgaaagac

SEQ ID NO: 928648 - DNA, 120 bp, Artificial Sequence
  ENSG00000258441_37 (sequence is synthesized)
gtttggattattttcagtttgggataatactactatgaacattcctgtacatgtcttttgagaacacgcatgtgtacatttgtgatgggtatgtaatggggtggaattactggttcatag

SEQ ID NO: 928649 - DNA, 120 bp, Artificial Sequence
  ENSG00000258441_38 (sequence is synthesized)
aatatgtgcatattcacctttagatatagaggctgccaaccatttttctgaagtgattatactaatttatattctcactatctgtaaatgaacatttctgttgctccacatccttgctgg

SEQ ID NO: 928650 - DNA, 120 bp, Artificial Sequence
  ENSG00000258441_39 (sequence is synthesized)
cacttggtattgattgatttctcttttaattttaggctttttaatacgtgtgtagtgatatctcacttgctgtttgtttgctttttggtaaattttttattgaagtataatttacataca

SEQ ID NO: 928651 - DNA, 120 bp, Artificial Sequence
  ENSG00000258441_40 (sequence is synthesized)
gaaaatcacacaaattgtgtacaggtgtgatttttcacaccgtgaatacatgcaaaaactagtatgaaattaagagttggaacatcaccagtactccagaagccccatgcatgttctctt

SEQ ID NO: 928652 - DNA, 120 bp, Artificial Sequence
  ENSG00000258441_41 (sequence is synthesized)
ccagttactataccactatcccaaggatggtctattaattcaacagcatagatttattttgcctgtttttcaacttcaaataaatgaaataatatgcactcttgtgtctggcttctttga

SEQ ID NO: 928653 - DNA, 120 bp, Artificial Sequence
  ENSG00000258441_42 (sequence is synthesized)
ctcaacagtatgtctatacaactcatctgtattgttgcatgttgtagttcgttcattcatactgttgtatacagtattgaattgtataaattactcattctgttactatgcatttgggct

SEQ ID NO: 928654 - DNA, 120 bp, Artificial Sequence
  ENSG00000258441_43 (sequence is synthesized)
gtttccagttttggctattatgaataaagctgctatgaacattctagaattgtcttgttgaacatatgtatttctgctgggtataaagcttaaaaaggaaattactggaaaataagagta

SEQ ID NO: 928655 - DNA, 120 bp, Artificial Sequence
  ENSG00000258441_44 (sequence is synthesized)
ttgcctcatgttacctacctgctattttcactgtaatttcatctattctggttgatgtgtaatagtgtcatattagcattttttctttgcttttataaaataaatgtttttatgttggaa

SEQ ID NO: 928656 - DNA, 120 bp, Artificial Sequence
  ENSG00000258441_45 (sequence is synthesized)
taggaaggagttagaacccaagataaatgcagataggaagaggaaagcatgtttggattgtttttttcaagtggcactcagaaataaaagtttggagaaacatggctctgaagctctgac

SEQ ID NO: 928657 - DNA, 120 bp, Artificial Sequence
  ENSG00000258441_46 (sequence is synthesized)
aaatttgcatttgcaaaaataactcctacaagactttcagaagtctaggaaaattgtggcttttggattattacattaccaaatttgtggagtttaataggtttcaactgtcaatgtgca

SEQ ID NO: 928658 - DNA, 120 bp, Artificial Sequence
  ENSG00000258443_0 (sequence is synthesized)
cccgctttctctatccctctatcttactaaagaggcaatgaagggtggaactgtaaagttggcaagactttgggaacaatccatctcttctctatctacccttctcccttctctcacttc

SEQ ID NO: 928659 - DNA, 120 bp, Artificial Sequence
  ENSG00000258443_1 (sequence is synthesized)
gagatattctcccacttcgagatattctcccaccaaggtgctatgttggaaaaaatcagggctttggagtcaggcacatttgggtttaaatcctggctcagtatttttttagtaaccttc

SEQ ID NO: 928660 - DNA, 120 bp, Artificial Sequence
  ENSG00000258443_2 (sequence is synthesized)
agtaaattatataattcctctgagccacaagtaccttatttgtgaagtgatgttaacaaaaatgcactttgagtagagtagatgagaaagcatctgtaatgcttcttgctcaatgtctgt

SEQ ID NO: 928661 - DNA, 120 bp, Artificial Sequence
  ENSG00000258443_3 (sequence is synthesized)
caagctgtttcttcttcccaagccccatcttgttcctaaactgctgcagctgaaagtcttctcaaagtgtttaacaaaattactctaagtattcatgactgatgagattaattaggtgcc

SEQ ID NO: 928662 - DNA, 120 bp, Artificial Sequence
  ENSG00000258443_4 (sequence is synthesized)
taattaggtgcctcttttttagtatctagctttttataagggataaggcctctaagtggttacataggttcttttcttttgttttcttttctattgagacggagtcttgctctgtcgcca

SEQ ID NO: 928663 - DNA, 120 bp, Artificial Sequence
  ENSG00000258443_5 (sequence is synthesized)
acttctgggctcaagtgatgcaccctcttcagactcccaaagtgttggaactacaggcatgagccactctcccagccagaggattctttttcaataacagctttattgagcttgaattta

SEQ ID NO: 928664 - DNA, 120 bp, Artificial Sequence
  ENSG00000258443_6 (sequence is synthesized)
catactataaaattaatcctgttaaaccatacaatttgatgaggcaggcagatcgcttgagcctagcagtttcagactagtctaggcaacaaggtgagaccccgtctctacaaaaaaata

SEQ ID NO: 928665 - DNA, 120 bp, Artificial Sequence
  ENSG00000258449_0 (sequence is synthesized)
ggactagtggcaaatgactaagacctggaaaagctgaaccctaaaaaaggcagtaagaaaagcctagaagcaacctacactgcacctcagtaaggttgatggtttgcccacaaagaaatt

SEQ ID NO: 928666 - DNA, 120 bp, Artificial Sequence
  ENSG00000258449_1 (sequence is synthesized)
ttggaattctacttctctaaggacaaatacacacagatgcatatacaaggatatttactggagcattgtttataacagaaaaataccaaaaacatcctgaaatgattgaatacaaggaat

SEQ ID NO: 928667 - DNA, 120 bp, Artificial Sequence
  ENSG00000258449_2 (sequence is synthesized)
atttatatctactcaaccagtagaataccataaaatggtgacatagaaatgaagacaggttacctgattgatggctcccaacatctcagccctactggccactcgtgctgcacactggct

SEQ ID NO: 928668 - DNA, 120 bp, Artificial Sequence
  ENSG00000258449_3 (sequence is synthesized)
aagaaactttatactcttctccagcttcttaatgatttcctgtgcctggttgtcatcttcacacagaggtgttaaagactgtatagaaaacagcatattaaaagatatctaacacaagca

SEQ ID NO: 928669 - DNA, 120 bp, Artificial Sequence
  ENSG00000227021_0 (sequence is synthesized)
ggcaaatcattatattgctcccagccttaaaaatcttcaataagttaaagagaggactcaggcttaatggcaatcctgttatcttaccaatgaggagactaaacacctagttggagatca

SEQ ID NO: 928670 - DNA, 120 bp, Artificial Sequence
  ENSG00000227021_1 (sequence is synthesized)
cctccttactggctcagagcttcaggaaatagctcaaggatgtgcaaatactaaacagtagagctgggatttagatccacatctacttaattttagtgcgtatgctctaactgctgccac

SEQ ID NO: 928671 - DNA, 120 bp, Artificial Sequence
  ENSG00000227021_2 (sequence is synthesized)
accataaagacagctatcaacaaaagacttgaattctaacttgttatctattgcaggaaagtgcctgcaatatggtgactcctgcagagcacctgacaatcagagaagagttagaataca

SEQ ID NO: 928672 - DNA, 120 bp, Artificial Sequence
  ENSG00000227021_3 (sequence is synthesized)
ttaagctcagcatcacatatgtagtttgaatacaactccacctccttctctttctttctcttctttcctgcctttgttgccctacccaggattaaaaccttaggtcttatgttaaaagaa

SEQ ID NO: 928673 - DNA, 120 bp, Artificial Sequence
  ENSG00000222012_0 (sequence is synthesized)
aacgggatgccttggaaagcatcgttctgcagcaggactgctcaaccggccaatcagaacacagggaaccatgaaagagccccagctctgtccctgtgtgaatctcagggctgtttcgag

SEQ ID NO: 928674 - DNA, 120 bp, Artificial Sequence
  ENSG00000222012_1 (sequence is synthesized)
gatgaaaaggaggtgtttagccccgagcctcacgtggaaacatctgatgagcctttgccaatatgctcgggacctggggacggctggggtgaccccatcgcaaggccgggccgtggaaac

SEQ ID NO: 928675 - DNA, 120 bp, Artificial Sequence
  ENSG00000222012_2 (sequence is synthesized)
aatctcagccctggaaccagcgcctgggaagtcccgcggtggatccgcgtcacgggggaggattggctcagcactggtcctgcggaatgtgtttttatcaatgacttgacgacgtgaaaa

SEQ ID NO: 928676 - DNA, 120 bp, Artificial Sequence
  ENSG00000222012_3 (sequence is synthesized)
acatgtttataaaacgagcagatggtgccgagctgagagggaggtgacgcagtgactcaggaaccacaagctctggaggctgaacgagaatcggttacaggagatgaacacaaggctcga

SEQ ID NO: 928677 - DNA, 120 bp, Artificial Sequence
  ENSG00000222012_4 (sequence is synthesized)
ttctcctgttaaacttgactgtcaccaacggggggtggggggtgcgcgaggccctgggctccaccgaagaccttaaggaaaagactctggatgttagtgggttcggcctcagaatcagcc

SEQ ID NO: 928678 - DNA, 120 bp, Artificial Sequence
  ENSG00000222012_5 (sequence is synthesized)
ggcgctgagatgtgcacctggcaggatgaacgtaacttctggtggataaagtgggaggcctgatccaggaagaagcacaccgtggcctggggcccctctggagggtaggtcttccaagtc

SEQ ID NO: 928679 - DNA, 120 bp, Artificial Sequence
  ENSG00000222012_6 (sequence is synthesized)
acgggaaacagggcgcccaggagacggtgagcccggctgctgccaccccgaaggccaggctcgccccacactgtgagaccctccccacacgaagattctgtaagcggaatcggaaggagg

SEQ ID NO: 928680 - DNA, 120 bp, Artificial Sequence
  ENSG00000222012_7 (sequence is synthesized)
atgtgagaaggacgggtagccatgccacaccaggccagacatcttaccaacctatcggttcagttttaagaaagagagcaaagaggatctaaaatctgaactttgagcagctgaactgtg

SEQ ID NO: 928681 - DNA, 120 bp, Artificial Sequence
  ENSG00000222012_8 (sequence is synthesized)
tggagtatcaacgtggctcctgacaaccccaccggcactgtttctttgcactggaggtcctgaagagctcacggaaggtgcacttgcagttgtagttcagagatgatgcttttagacaat

SEQ ID NO: 928682 - DNA, 120 bp, Artificial Sequence
  ENSG00000222012_9 (sequence is synthesized)
ctttcccttcgagaagtagcctaatgagaaggactctgtagatctcttcctaaaaaagaatcctcagtctctggcagaacagctgcccagaacagcttctgcctgtgaggtagcaaagaa

SEQ ID NO: 928683 - DNA, 120 bp, Artificial Sequence
  ENSG00000222012_10 (sequence is synthesized)
aaaggcccacacagaatttgctgggatattttctttccaacaccaacaaaccgacagccttcccaaatcctagggcagagtcggctggcactgagatcaaaaggggtgaagggaaggcag

SEQ ID NO: 928684 - DNA, 120 bp, Artificial Sequence
  ENSG00000222012_11 (sequence is synthesized)
ccaggctgggagtctctctccagcaactttcttggcgaggtgacatatatgcccagaacctttttctatggaaggaaaaagaaaaccctggcttaatcatcagagttaggagaatcaccc

SEQ ID NO: 928685 - DNA, 120 bp, Artificial Sequence
  ENSG00000222012_12 (sequence is synthesized)
acgtattcatctttaaaagcaaatcatgataacttttggtcactcagaagtaaccaaggcaaaatattcctcttaggggactctgtttagagttttgggagagaaaaaaaaaaaaactaa

SEQ ID NO: 928686 - DNA, 120 bp, Artificial Sequence
  ENSG00000222012_13 (sequence is synthesized)
accaaaggtttatttagaaataaattgttttctgagtattctaaggaaagctatgcttagccaaagtgcttcagcccttgtacatgtttcaaatacttctgtagaagtttgaaatggaca

SEQ ID NO: 928687 - DNA, 120 bp, Artificial Sequence
  ENSG00000222012_14 (sequence is synthesized)
ctctaaaccccaaagttcttgtcggccaagtgggggggtttcttgtgaggaccagaggtggcacatccacgggcatgggggacgctggctcacgatgccccagtgatgccgtggttagga

SEQ ID NO: 928688 - DNA, 120 bp, Artificial Sequence
  ENSG00000222012_15 (sequence is synthesized)
cactgctcacgcagctgcagcgcagagcacgggggacgctggctcacgatgccccagtgatgccgtggttaggacgccgttcacgcagctgcagcgcagagcacgggggacgctggctca

SEQ ID NO: 928689 - DNA, 120 bp, Artificial Sequence
  ENSG00000222012_16 (sequence is synthesized)
cgatgccccagtgatgccgtggttaggacgccgttcacgcagctgcagcgcagagcacgggcgacgctggctcacgatgccccagtgatgccgtggttaggacgccgttcacgcagctgc

SEQ ID NO: 928690 - DNA, 120 bp, Artificial Sequence
  ENSG00000222012_17 (sequence is synthesized)
agcgcagagcacgggcgacgctggctcacgatgccccagtgatgctgtggttaggacgctgttcacgcagctgcagcgcagagcacgggggatgctggctcacgatgccccagtgatgcc

SEQ ID NO: 928691 - DNA, 120 bp, Artificial Sequence
  ENSG00000222012_18 (sequence is synthesized)
atggttaggatgctgctcaagcagctgcagcgcagggccagtgtggtgaccctgactcctgggaacggtgatcagctgggcctctgcctcactggaccacgctgcaaggcaagggcctgg

SEQ ID NO: 928692 - DNA, 120 bp, Artificial Sequence
  ENSG00000222012_19 (sequence is synthesized)
gagatgcccacagccgcgcctctggctgtgaggcagctgtggtcctccagcagcaatgccctcagaagctgggagatgtgaaccccacatgactctcctccttgctgtcttcctgtccct

SEQ ID NO: 928693 - DNA, 120 bp, Artificial Sequence
  ENSG00000222012_20 (sequence is synthesized)
gagccttcagctcttcgttgtctctgtcttgtctctctgcattgtttgtcctggttctctctctctctctcgttattacaacatagagccaaaaatacttttttgtttaggatatggcac

SEQ ID NO: 928694 - DNA, 120 bp, Artificial Sequence
  ENSG00000222012_21 (sequence is synthesized)
caaaatagtatcatatccctgttcttcatctgaaatgcagacaagcgaaatgctgcataattcttttttaaacattcaaaaaacagaaaatgcatgttaagttctttaaacttctgagat

SEQ ID NO: 928695 - DNA, 120 bp, Artificial Sequence
  ENSG00000222012_22 (sequence is synthesized)
aatacaactagacctagcatggtgccagccaagcattgcataatgtgtgtttccttctcctttgggggctcattccgatcagggtgcatctgggaagtcgggcgactgtgtccatctcct

SEQ ID NO: 928696 - DNA, 120 bp, Artificial Sequence
  ENSG00000222012_23 (sequence is synthesized)
gggtggaagaatgacccagggaagtgctccatggggaaggcggggcatgagagaagggaggggtggtcccgaggaccctttccatagacctgggagttcccggtgagcacgcggaaagga

SEQ ID NO: 928697 - DNA, 120 bp, Artificial Sequence
  ENSG00000222012_24 (sequence is synthesized)
cgcggtgggagcggcaggtgcagagggaggacttgaaggttccatccctaacagaggacagcgtggccgagtactcatgcttccaaccctgcacagaggatagtgcatgcccagcatgca

SEQ ID NO: 928698 - DNA, 120 bp, Artificial Sequence
  ENSG00000222012_25 (sequence is synthesized)
gactcgcttccatcgcgacacagaggacagcatggagcccagctcgagtgccgtccccccaccatgacagcgcagcatgggccttccaagccacagagccacagggaagccagtcctcct

SEQ ID NO: 928699 - DNA, 120 bp, Artificial Sequence
  ENSG00000222012_26 (sequence is synthesized)
ggaccgtgtgtggctgttttggagccagttgtgtcctgtgaagagcgcagcggccgcaggtgaggcaggagtgaagatggaggaggcggccatctctctggggcctggcaacagcgagag

SEQ ID NO: 928700 - DNA, 120 bp, Artificial Sequence
  ENSG00000222012_27 (sequence is synthesized)
cttttgccaagccactgtctcccggaggacaagatctccttcccaaaagcaagatggccaagagtatggagaagaaagtaggtaatacaagtttgctcagaataaacctatgtgttcatg

SEQ ID NO: 928701 - DNA, 120 bp, Artificial Sequence
  ENSG00000267449_0 (sequence is synthesized)
cccaattttgttggcaacatccaaagcatcgtaaccaggagccagtcgaacatatgccttcttctctccatcaggtgggtgacgtgcggatcttcttctttttgtggctgtggacacctt

SEQ ID NO: 928702 - DNA, 120 bp, Artificial Sequence
  ENSG00000267448_0 (sequence is synthesized)
agctgaggcctcccaccaacagccacatgagggagccagagtaggagtggctcctccagccccagtcgaaccttcagatgtgacagacttggctgctgacagtttgcaatctcatgagac

SEQ ID NO: 928703 - DNA, 120 bp, Artificial Sequence
  ENSG00000267448_1 (sequence is synthesized)
gagaggcgttttgaacattaagacgctttgctgcttctcacctgaaacacgtaacaggaacaccaacctcttcagccgcgggaaatcttctttgacacaaaactcaaaccgagtcaaccc

SEQ ID NO: 928704 - DNA, 120 bp, Artificial Sequence
  ENSG00000267448_2 (sequence is synthesized)
aaagttccaagttctttgctttctcttctgtgtgtgtgttggtttgtcccaaaagtcagtttgcaagttgaaacttcatgaaattactcgtagcagaaataaagtacattgtacaaatca

SEQ ID NO: 928705 - DNA, 120 bp, Artificial Sequence
  ENSG00000222017_0 (sequence is synthesized)
ttctccaccactttctcttagatttatgtgagtcctcatgtatcaggccaaggcggtgggaccgaagttacctctggagtatgaaaataagcaacaccattatgaaaagtcaaaagaact

SEQ ID NO: 928706 - DNA, 120 bp, Artificial Sequence
  ENSG00000222017_1 (sequence is synthesized)
ttggagtcaaacagtcctgcatttgaaggctagtgctaccactcaccattaggctatttaaccccatacttcttaaagttggataagggatggatggtataccaggagatatgaaaaagc

SEQ ID NO: 928707 - DNA, 120 bp, Artificial Sequence
  ENSG00000222017_2 (sequence is synthesized)
agaggctgaacatagtaatcttcctacagaatcagttttattcaattgtttttgggaaatatttttatattcaaataaacaatatgatattatggaacagaatgcaaattatacatgatg

SEQ ID NO: 928708 - DNA, 120 bp, Artificial Sequence
  ENSG00000222017_3 (sequence is synthesized)
catgccaagattaactctcctctacctttaggagtatttcagcagaaacatttttaaaacaatgactttatctttttgggattgaattttctatttacaaaaatagagataacaatacat

SEQ ID NO: 928709 - DNA, 120 bp, Artificial Sequence
  ENSG00000222017_4 (sequence is synthesized)
catgggattctatgaagattaaatgaaaactcataacattgacccttgcactaagtagttttgaaaaaactatttgtatatgtgaaagcattcagcatagtgctgatttattttctattt

SEQ ID NO: 928710 - DNA, 120 bp, Artificial Sequence
  ENSG00000222017_5 (sequence is synthesized)
cagcaactggtagatcatactatgagcattactatttagtacatattgctggtgataatgggctaacggaccgttactatatgttctagcttaacctttgcaagtaacaacagtagattg

SEQ ID NO: 928711 - DNA, 120 bp, Artificial Sequence
  ENSG00000222017_6 (sequence is synthesized)
aaaatattcagcattctgccatatttagtgcattccattttgtattaacctactgaggatactttgattgtctcctaaattaacaaatactaagtcaaaattaaacttaatatacatcaa

SEQ ID NO: 928712 - DNA, 120 bp, Artificial Sequence
  ENSG00000267443_0 (sequence is synthesized)
aaggttcccggtgcgtttggaaggcagaggctcctgggcttgcaggtttgggaaaattatccagaacttggaaaggggtaaaaacatcactgcctgctctttggatcctggaccctcggc

SEQ ID NO: 928713 - DNA, 120 bp, Artificial Sequence
  ENSG00000267443_1 (sequence is synthesized)
acggtgggcctcagagctgatcattccctggggtggggccgtcctgggcactgctgggtgctgagcagtgtccctggcctccgcccactccacaccaggagctcccctagtcgtgacaac

SEQ ID NO: 928714 - DNA, 120 bp, Artificial Sequence
  ENSG00000267443_2 (sequence is synthesized)
agaggatcagttgtattccagagcctcgaccagcccggccacccgggggtcactttgtggacgcttccctccactcttgccagtgtcctggctctggggttggacgctgcttgggattga

SEQ ID NO: 928715 - DNA, 120 bp, Artificial Sequence
  ENSG00000267443_3 (sequence is synthesized)
caaatgcggatgagttttgtccctgagcggcaggtgcctccttcctcctgctgcgtataaaactcagtccagtcctgccgttccttagtaaacactcggacgcacctttgacctacagtg

SEQ ID NO: 928716 - DNA, 120 bp, Artificial Sequence
  ENSG00000227028_0 (sequence is synthesized)
ccctgggaatgggaggtgatggttttttacttcggccctagtacagagtatgctcttgaagctggattccatcagcaggcaagggcagtgactggaagctgggagagagggtcaacagct

SEQ ID NO: 928717 - DNA, 120 bp, Artificial Sequence
  ENSG00000227028_1 (sequence is synthesized)
gaatctcagcctgatggaggccaccatttaataagtaaatacatgcacggctatttagatcctgcatcagacaggtcatcagaaaacatgaagctaaatgcagtaaagaattactctctt

SEQ ID NO: 928718 - DNA, 120 bp, Artificial Sequence
  ENSG00000227028_2 (sequence is synthesized)
gaactcttgaaaatatcaaaaacatgaagctaaatgcagtaaagaattagtctcttgaactcttgaaaatatcattttcttatagaaatggtttaaaaatttcttttttattatttctaa

SEQ ID NO: 928719 - DNA, 120 bp, Artificial Sequence
  ENSG00000227028_3 (sequence is synthesized)
aaattgtgagttttaacctacaacacatacactccaaggtaatgccactctaatgctgtctagttgatctgaataactaactggtcaattatcagatccaccaaactgtctctctggaga

SEQ ID NO: 928720 - DNA, 120 bp, Artificial Sequence
  ENSG00000227028_4 (sequence is synthesized)
ttaacttctgccagcatattggtttctgttcattttcacaagattgacaggctcattacagcaatattaacatcttcctttgagcactcacactgtgcaattgtaattttgcatatgttg

SEQ ID NO: 928721 - DNA, 120 bp, Artificial Sequence
  ENSG00000227028_5 (sequence is synthesized)
atgagcaggcaattacatcaaagagtgaacactgggctgatgtgcaaggcactatttaattataaaaacagtataggattgagccctgtcactgagtcttccattccttctatctcgcct

SEQ ID NO: 928722 - DNA, 120 bp, Artificial Sequence
  ENSG00000227028_6 (sequence is synthesized)
gtttctaatttatttctctatttcttcatttcttccttgactgtcttcattctttgctttttatttctttctccttaaatgacagaccttttcttagatgccatttctctatgtctgcgc

SEQ ID NO: 928723 - DNA, 120 bp, Artificial Sequence
  ENSG00000227028_7 (sequence is synthesized)
acagggagcgttccacttggctgggagcagataatgtgtgcatcccgagagcagacagaaccaagagcaggcaaacttagaagacactcagctaagcacttgctgacttcttacaggttc

SEQ ID NO: 928724 - DNA, 120 bp, Artificial Sequence
  ENSG00000227028_8 (sequence is synthesized)
ctgggaaccatgatagataaaaacttaccaggaagagcaaaacatcaagagagtctgacaaaagctctgccctcctctgtaacccagcagcctctgcagaatcatcctttcttcattgtt

SEQ ID NO: 928725 - DNA, 120 bp, Artificial Sequence
  ENSG00000227028_9 (sequence is synthesized)
ttaaaatgttgttaaataccttgtcagttgctttaaagggacccagacccattctgatatttttacaaaataaatccagtctttgggtaaaggtatagtaatactatccatggatctgat

SEQ ID NO: 928726 - DNA, 120 bp, Artificial Sequence
  ENSG00000227028_10 (sequence is synthesized)
aatcatcaggtggtgaagccagcctgacttgtgtccttcccttcatggtgttctgcaccaattcaaatgagagaccctagaaaggagcctccagggaactccagctactgtatacatcat

SEQ ID NO: 928727 - DNA, 120 bp, Artificial Sequence
  ENSG00000227028_11 (sequence is synthesized)
ctgtggttttcaagcttcttgagccttgtaattatccagttgatatttatcttgttccagtcacctttagaaagctgtttgtaattaatcaaactcaataacagcacaaaagtaacaact

SEQ ID NO: 928728 - DNA, 120 bp, Artificial Sequence
  ENSG00000227028_12 (sequence is synthesized)
caggtgaaaagaaaactcacttatgtcttcaatgtccaatcaacattgccaaatgggagaacagagaacaaagattgaagaaggtatgggcagtttgtgaatccagactcctggatttgt

SEQ ID NO: 928729 - DNA, 120 bp, Artificial Sequence
  ENSG00000227028_13 (sequence is synthesized)
tgatcacacattcacacagcccaatcaactatcacagagactggtgtccaagagagaatccaaggggtgctgacaaggtctagataactgatacatttgacaacggacagagtgtccaag

SEQ ID NO: 928730 - DNA, 120 bp, Artificial Sequence
  ENSG00000227028_14 (sequence is synthesized)
gaaaatatcaagaagcttcatcatgttcaactccgactgtgactacacaatggttttggaaatcactagtgggtaaaaaagaccaatttgcaactaggctctcatgctctgttgaaaact

SEQ ID NO: 928731 - DNA, 120 bp, Artificial Sequence
  ENSG00000227028_15 (sequence is synthesized)
gcagataatgcgcgtctgccatactcgggggcatgatttcagtatgaagaaaaaatgccgacctttgtcttgtatgtctgacaagaagaaaaaaatgccactcccctccaagctggatgt

SEQ ID NO: 928732 - DNA, 120 bp, Artificial Sequence
  ENSG00000227028_16 (sequence is synthesized)
tctgtgaagccaaagatttacagtctaatgaaacctccaccacagttattacggtgtcagaattcttgcctttgtttgggaaagtaagcttattgcagcaagttgtgttggtgccacaag

SEQ ID NO: 928733 - DNA, 120 bp, Artificial Sequence
  ENSG00000227028_17 (sequence is synthesized)
agagactaaaggtcttgtagcttgttctactcatctagagcttgtgtacatctgctaagtcacctggggattgctctcggaaaccatttaagcaacagacatgaaggtgtttggtcataa

SEQ ID NO: 928734 - DNA, 120 bp, Artificial Sequence
  ENSG00000227028_18 (sequence is synthesized)
acaacacattctacaagagtaattatccagttgatatttatcttgttccagtcacctttagaaagctgtttggttttggaaatcactagtgggtaaaaaagaccaatttgcaactaggct

SEQ ID NO: 928735 - DNA, 120 bp, Artificial Sequence
  ENSG00000227028_19 (sequence is synthesized)
agaatcatcaggtggtgaagccagcctgacttgtgtccttcccttcatggtggtaattatccagttgatatttatcttgttccagtcacctttagaaagctgtttgtttaggatcaggga

SEQ ID NO: 928736 - DNA, 120 bp, Artificial Sequence
  ENSG00000227028_20 (sequence is synthesized)
cccagcaatgcagaactgtaattatccagttgatatttatcttgttccagtcacctttagaaagctgtttggcaagggcagtgactggaagctgggagagagggtcaacagctgaatctc

SEQ ID NO: 928737 - DNA, 120 bp, Artificial Sequence
  ENSG00000227028_21 (sequence is synthesized)
tcacttttgccatgaagcccagagcataaagctcctgggtctctgcacatgcccgagtggctactctgccaagattccatacagctctgtttgtcagactgaaggcgctggtgtagtgta

SEQ ID NO: 928738 - DNA, 120 bp, Artificial Sequence
  ENSG00000227028_22 (sequence is synthesized)
ttcatgaggggatctcctgaccagaggattgcaaagatccacgggagaagcatggcttcctggagtcacacattcactcactgctttccttggtagaggaggttccgttagctctgtgtt

SEQ ID NO: 928739 - DNA, 120 bp, Artificial Sequence
  ENSG00000227028_23 (sequence is synthesized)
actcaatatcatgtttactgtgggtttgtcatatacagcctttgttatgttgagaagtttacgaagacaaaagaggaatgacgactcagcatattgtaatgtatattcaatatgtgcttt

SEQ ID NO: 928740 - DNA, 120 bp, Artificial Sequence
  ENSG00000227028_24 (sequence is synthesized)
tcctactgaaaactaaggtaattatccagttgatatttatcttgttccagtcacctttagaaagctgtttggcaagggcagtgactggaagctgggagagagggtcaacagctgaatctc

SEQ ID NO: 928741 - DNA, 120 bp, Artificial Sequence
  ENSG00000227028_25 (sequence is synthesized)
tgattgatctgagttggcagatgagttggcaggcctcaaattcctgttcccagtgatatgagtacccacagataattcactggcaagggcagtgactggaagctgggagagagggtcaac

SEQ ID NO: 928742 - DNA, 120 bp, Artificial Sequence
  ENSG00000227028_26 (sequence is synthesized)
ggggttgcttgctggctgaaaggaaggagaatcaaatttagaaatatctgaaaggaaatccagatataggctattaatagatgagaggtgaagctaggctatatcagctgctgaggtact

SEQ ID NO: 928743 - DNA, 120 bp, Artificial Sequence
  ENSG00000227028_27 (sequence is synthesized)
accaattatacttagattaaggagaggattttaaataagagcatgaacctaaggccatgagagtgggaggaatagtgagctttcaaaacttctaattttcagaggcaagacctcaaccat

SEQ ID NO: 928744 - DNA, 120 bp, Artificial Sequence
  ENSG00000227028_28 (sequence is synthesized)
tttgagggactatcttaaagtttcaatagtgccataagaggaaaaaaatagaagaatatagaataatgaaattgtgaagactctctggcttaggaggcatccatcgtttactgctgccca

SEQ ID NO: 928745 - DNA, 120 bp, Artificial Sequence
  ENSG00000227028_29 (sequence is synthesized)
gaaatgatcacacatttcatgtcaaatttccaggcctcaaattcctgttcccagtgatatgagtacccacagataattcactggttttggaaatcactagtgggtaaaaaagaccaattt

SEQ ID NO: 928746 - DNA, 120 bp, Artificial Sequence
  ENSG00000227028_30 (sequence is synthesized)
cagtcacctttagaaagctgtttgctctcaaatctccaggcagcctctattgattgatctgagttggcagatgagttggcaggcaagggcagtgactggaagctgggagagagggtcaac

SEQ ID NO: 928747 - DNA, 120 bp, Artificial Sequence
  ENSG00000227028_31 (sequence is synthesized)
aaactcccaccagctatcaaatgaaggcgtcgggggagaatatatacagtctacagaactcgggagagttaaagagtagcaagttccaatcaagaagaaatgttttattcagtaattact

SEQ ID NO: 928748 - DNA, 120 bp, Artificial Sequence
  ENSG00000227028_32 (sequence is synthesized)
gaatttttttaagagcccctgaaaatactggatttctgcaggggatattgcgaaaatactaaaatactaaggcaagggcagtgactggaagctgggagagagggtcaacagctgaatctc

SEQ ID NO: 928749 - DNA, 120 bp, Artificial Sequence
  ENSG00000227028_33 (sequence is synthesized)
atgagaacagcatggaggtaattatccagttgatatttatcttgttccagtcacctttagaaagctgtttggcaagggcagtgactggaagctgggagagagggtcaacagctgaatctc

SEQ ID NO: 928750 - DNA, 63 bp, Artificial Sequence
  ENSG00000227028_34 (sequence is synthesized)
caagggcagtgactggaagctgggagagagggtcaacagctgaatctcagcctgatggaggcc

SEQ ID NO: 928751 - DNA, 120 bp, Artificial Sequence
  ENSG00000227028_35 (sequence is synthesized)
aatcatcaggtggtgaagccagcctgacttgtgtccttcccttcatggtggtaattatccagttgatatttatcttgttccagtcacctttagaaagctgtttgttcatttcaggtggcc

SEQ ID NO: 928752 - DNA, 120 bp, Artificial Sequence
  ENSG00000227028_36 (sequence is synthesized)
ctgttcctttcactcagaaactttgaagcaggttcttaccaaatgctctttactgtatcaggagaacaaagattgaagaaggtatgggcagtttgtgaatccagactcctggatttgtgc

SEQ ID NO: 928753 - DNA, 120 bp, Artificial Sequence
  ENSG00000227028_37 (sequence is synthesized)
tgctttgtgcattcatgatcacacattcacacagcccaatcaactatcacagagactggaaaatctcaagacctgaagatactacctttgatcaaactgtgacaatatttatggaattaa

SEQ ID NO: 928754 - DNA, 120 bp, Artificial Sequence
  ENSG00000227028_38 (sequence is synthesized)
acagatcagtgaaacaaaagaagaaaaaaaaaatccttgtcctgtccttgagatgagacaggtgcatgtaatatataataattaaagtatttagtatgctagatgtgctatggaaagagt

SEQ ID NO: 928755 - DNA, 120 bp, Artificial Sequence
  ENSG00000227028_39 (sequence is synthesized)
agtcctcatctgcagtgatgacagtagtaggtggaacatgcctgtccttgggcaacagggcagtgcacgtgccagcaccaagtggttccagaagtttacgaagacaaaagaggaatgacg

SEQ ID NO: 928756 - DNA, 120 bp, Artificial Sequence
  ENSG00000227028_40 (sequence is synthesized)
actcagcatattgtaattatccagttgatatttatcttgttccagtcacctttagaaagctgtttggtgagtacaatgttaatatagagacaatcagaatggtgtgtgcttttgtacaaa

SEQ ID NO: 928757 - DNA, 120 bp, Artificial Sequence
  ENSG00000227028_41 (sequence is synthesized)
aaaagaattcagcaatggtgaggcaaatgatctttgtaataagattttcccaacttgaaatgttgaataaaagaccctatatcaaacttacacaggtcttggctcatggtaatctctgga

SEQ ID NO: 928758 - DNA, 120 bp, Artificial Sequence
  ENSG00000227028_42 (sequence is synthesized)
tgtgtgtgttgggtctgaatccatttatcttattagtggaagacagaatgtgaaattaagaaaattaatatttctatttctgttagaggaaagtttcttgataggtttcaaaatggcccc

SEQ ID NO: 928759 - DNA, 120 bp, Artificial Sequence
  ENSG00000227028_43 (sequence is synthesized)
gtgttaattttcttaaattactctgttttgaattctttatataccatttagggtacctaatataatactttgcacaaaataaatgcttgatttatgaaattgtacatctgaagaaatata

SEQ ID NO: 928760 - DNA, 120 bp, Artificial Sequence
  ENSG00000227028_44 (sequence is synthesized)
aaaggctctaacttttgattttaaaattgtttcactctcttgactgtatagtttatgagcctatgatcctggaaaacacgcttgctaaactgaccaattttttgctttttttttggtttg

SEQ ID NO: 928761 - DNA, 120 bp, Artificial Sequence
  ENSG00000227028_45 (sequence is synthesized)
atttcttttttattctttttccttaggtaattatccagttgatatttatcttgttccagtcacctttagaaagctgtttggcaagggcagtgactggaagctgggagagagggtcaacag

SEQ ID NO: 928762 - DNA, 120 bp, Artificial Sequence
  ENSG00000227028_46 (sequence is synthesized)
atgacgactcagcatattgtaattatccagttgatatttatcttgttccagtcacctttagaaagctgtttggcaagggcagtgactggaagctgggagagagggtcaacagctgaatct

SEQ ID NO: 928763 - DNA, 120 bp, Artificial Sequence
  ENSG00000227028_47 (sequence is synthesized)
attagtctttcagctctcaaatctccaggcagcctctattgattgatctgagttggcagatgagttggcaggcaagggcagtgactggaagctgggagagagggtcaacagctgaatctc

SEQ ID NO: 928764 - DNA, 120 bp, Artificial Sequence
  ENSG00000227028_48 (sequence is synthesized)
gagataagaaagaaaggattttgcacgttcctgggaatctaggcacgttttccttgtacctgttaaacgagactgccaggtatcacatgtttaaatatcagactatttctagaaccatcg

SEQ ID NO: 928765 - DNA, 120 bp, Artificial Sequence
  ENSG00000227028_49 (sequence is synthesized)
gatttcctggctccattccacttttatgcttcttcttggaggcagcttcacctccactcacattccggagataagcatgaactttggtaatacgatgaagacatgcttctttcttcttcc

SEQ ID NO: 928766 - DNA, 120 bp, Artificial Sequence
  ENSG00000227028_50 (sequence is synthesized)
atgcccagattttttcttaatccaaaataagttttaaagtgattgggggaggtgagggggaatactaatgatttaaatttttaccaaaacccatttacatttggatggtttcactttcca

SEQ ID NO: 928767 - DNA, 120 bp, Artificial Sequence
  ENSG00000227028_51 (sequence is synthesized)
acaaatcaaagccttaaggatttatcaacctggagagagtgcagcccttctagactgagctgcaaagatggccctgcctccatgccttgttgaacatgatgatgcccctgggaatgggag

SEQ ID NO: 928768 - DNA, 120 bp, Artificial Sequence
  ENSG00000227028_52 (sequence is synthesized)
gtgatggttttttacttcggccctagtacagagtatgctcttgaagctggattccatcagcaggaaaatcttggtccactacagaaggttgaacaacagtgacttaaacttcttgatggg

SEQ ID NO: 928769 - DNA, 120 bp, Artificial Sequence
  ENSG00000227028_53 (sequence is synthesized)
tagaacacaggggtttagagcacatttgagctgggggacttcaaatcctgccttcgcagctgactgtgtgactctggaagattacttaacttctctgggcctcaatttcctaatctgtta

SEQ ID NO: 928770 - DNA, 120 bp, Artificial Sequence
  ENSG00000227028_54 (sequence is synthesized)
aatggggatggtactgctcacttcagagtgctgttgttcatttcaggtggccctgttcctttcactcagaaactttgaagcaggttcttaccaaatgctctttactgtatcaggagaaca

SEQ ID NO: 928771 - DNA, 120 bp, Artificial Sequence
  ENSG00000227028_55 (sequence is synthesized)
tgctggattttctggaaaactttttgcttttcttctaaaaggaacagatgtcaggaaacccagtgttgcatcacctgcttcttttctgtcttgagtgcaggtatgaagccttatgcagtg

SEQ ID NO: 928772 - DNA, 85 bp, Artificial Sequence
  ENSG00000227028_56 (sequence is synthesized)
acttgaccaaggtcttgctctgtggcccaggctggtgtgcagtagcaagattacagctgactgcagccttgacctcccaggctca

SEQ ID NO: 928773 - DNA, 120 bp, Artificial Sequence
  ENSG00000227028_57 (sequence is synthesized)
tcaagtgatcctcccatctcagcacccccttcacgctaccctgagtagttggactacagggaaagtaagcttattgcagcaagttgtgttggtgccacaagatgccacccttcccttgaa

SEQ ID NO: 928774 - DNA, 120 bp, Artificial Sequence
  ENSG00000227028_58 (sequence is synthesized)
ctccctccagggttccccagtgtctattgtttggatctttatgtccacgtgtatgcaatgtttagctcccattcatcataagtgagaacatgttgtatttggttttctatgttaatttgc

SEQ ID NO: 928775 - DNA, 120 bp, Artificial Sequence
  ENSG00000227028_59 (sequence is synthesized)
ttaagataatagcttctagctgcatccatgttgccgcaaaaagtatgatttatttatttttttaaacttttaagttcagggtacatgtgcaggtttgttacataggcacatttttgtcat

SEQ ID NO: 928776 - DNA, 120 bp, Artificial Sequence
  ENSG00000227028_60 (sequence is synthesized)
tacagattatttcatcacccaggtattacgctgtattagtctgttctcatgctgctcataaagacatatccgagactgagcaatttgtaaaggaaaggggtttaattgactcacagttca

SEQ ID NO: 928777 - DNA, 61 bp, Artificial Sequence
  ENSG00000227028_61 (sequence is synthesized)
aggggaagcaaacatgtccttcacatggtggcagcaagaagtgtggagtgaagtgggggca

SEQ ID NO: 928778 - DNA, 120 bp, Artificial Sequence
  ENSG00000227028_62 (sequence is synthesized)
ggatgagctacttgggcttagctcttttagaggccaaagtttattttcccgacaatcctcctcacatgcttgggccccactctggactcttaatgtagaagtaaaaaccgatgctgataa

SEQ ID NO: 928779 - DNA, 120 bp, Artificial Sequence
  ENSG00000227028_63 (sequence is synthesized)
cagaaagaaatgcatgattttctttggtaactcagtaccatttcatcattgtccgtcacgctgagggatgccttataaattcaatggctcatgcaatgcaaacaaatacttcctttagta

SEQ ID NO: 928780 - DNA, 120 bp, Artificial Sequence
  ENSG00000227028_64 (sequence is synthesized)
aggatggctgtgttgaatcttggcctgaaagatctttgacctgaaacaaaactacaacatccacagaaacgctacataaagtgtacagatctggagtgaagacgaagtatctggatggca

SEQ ID NO: 928781 - DNA, 120 bp, Artificial Sequence
  ENSG00000227028_65 (sequence is synthesized)
actctctgtatatttgtcatgcattctgaagtggtaattgaaggcactgatgtgagctaatagacttttttccaaaggagtgaccttaaaagaaaaatcaaagaaatgtgaaatccaata

SEQ ID NO: 928782 - DNA, 120 bp, Artificial Sequence
  ENSG00000227028_66 (sequence is synthesized)
ttgtaataatatcactgctctcaaatctccaggcagcctctattgattgatctgagttggcagatgagttggcagttttttatctacaagttgggaataatatatgcattacgaagagat

SEQ ID NO: 928783 - DNA, 120 bp, Artificial Sequence
  ENSG00000227028_67 (sequence is synthesized)
tacaagtactaactggagaaaacaatctgagaccttggcaaataatagattatccaacttaattccaatattattaaaattagtgatcattagctggcactttacaacagaaatgatctg

SEQ ID NO: 928784 - DNA, 120 bp, Artificial Sequence
  ENSG00000227028_68 (sequence is synthesized)
aataaattttcaacatatacatgctctgataccatgacaggaaaatgcaagggcagtgactggaagctgggagagagggtcaacagctgaatctcagcctgatggaggccaccatttaat

SEQ ID NO: 928785 - DNA, 120 bp, Artificial Sequence
  ENSG00000227028_69 (sequence is synthesized)
agtgatatgagtacccacagataattcactggtaagatcaccgagtgacccaggaatgaaacctaccattgaagatgtttatttagagctgtatccactgtccacagccaagggaaatag

SEQ ID NO: 928786 - DNA, 120 bp, Artificial Sequence
  ENSG00000227028_70 (sequence is synthesized)
ccttttctagactggatatatttgaccagtagatggagtaagtggatcccagaaccaccaactaaccacccagaacctgctgatcaatgctgttgtctttcaatattctatcaaaaaggg

SEQ ID NO: 928787 - DNA, 120 bp, Artificial Sequence
  ENSG00000227028_71 (sequence is synthesized)
ataggcttttttttttttttgaggaaaaagaagaaagagaaagagacaaaggaaaaggagaaagacaagagaggaagaagcaggaggaaaacagtggagagaagaagaaaaaagagaaaa

SEQ ID NO: 928788 - DNA, 120 bp, Artificial Sequence
  ENSG00000227028_72 (sequence is synthesized)
aataaattacagctatctgggcttccatgggagtgccaactctgacagctgagacatctctgacttggctctttcacctcttgtgcaagggaagaacagcactatttttaaaggaggtca

SEQ ID NO: 928789 - DNA, 120 bp, Artificial Sequence
  ENSG00000227028_73 (sequence is synthesized)
aatcatcaggtggtgaagccagcctgacttgtgtccttcccttcatggtggtaattatccagttgatatttatcttgttccagtcacctttagaaagctgtttgctctcaaatctccagg

SEQ ID NO: 928790 - DNA, 120 bp, Artificial Sequence
  ENSG00000227028_74 (sequence is synthesized)
aggcagagagggagaaataacaagaatggaagagtcgttcttccaaaaagggccatctgtgaccctgagagataaacctggcagaccagggctcacatcttagtaaatcacctgtaaata

SEQ ID NO: 928791 - DNA, 120 bp, Artificial Sequence
  ENSG00000267440_0 (sequence is synthesized)
tggatggaacattctgctctttctccatctgctgcctacccatgatgtcttgggactcctagaaccctaaaggaagcccctggacacgcaggaaggtgatccagaattactcccgaactc

SEQ ID NO: 928792 - DNA, 120 bp, Artificial Sequence
  ENSG00000267440_1 (sequence is synthesized)
taccagctgaaatcctcctcaactcacatcagacaagacggccctgccacttacctgtcagatcactttgggcagtttacaggagagaagatgcagcctgggagagatgcagcaggtgtc

SEQ ID NO: 928793 - DNA, 120 bp, Artificial Sequence
  ENSG00000267440_2 (sequence is synthesized)
tgaggccacacagcaagtcacccagggccaggatctgaagctgggtctctccagctccactgcctgggcactttctcctccacagcgaccttcaggtcatcatgaggagcctttcggact

SEQ ID NO: 928794 - DNA, 120 bp, Artificial Sequence
  ENSG00000267440_3 (sequence is synthesized)
aaagctagagagctgggattccaacagttcagcaacccatgacttctccatggcagctgctgcctgaccacctagtgcctttccactaagattgttccttccctctcctgaagattatcc

SEQ ID NO: 928795 - DNA, 120 bp, Artificial Sequence
  ENSG00000267440_4 (sequence is synthesized)
gattatcctcctgcccctctctcccaaacatctgcggtgtgcacctgctgcccaaagttgaacttttttttgttagagacagggcctcactgtgtcatccaggctggagtgcagtggcgt

SEQ ID NO: 928796 - DNA, 120 bp, Artificial Sequence
  ENSG00000267440_5 (sequence is synthesized)
tgggctcaagcaatctgtctgccttggtctcccagctcgctgggattacaggcatgaatcaccatgcccggtcctccaaagttgaacttttgagactcagtttccttcttggtaaattca

SEQ ID NO: 928797 - DNA, 120 bp, Artificial Sequence
  ENSG00000267440_6 (sequence is synthesized)
ggctcctaggtgctacctcctcagagacatcctccttgaccacatcacatgacctctcgcagaggccagattctttaatgtattcatttgtctattatcatgtttccccagtagaagttg

SEQ ID NO: 928798 - DNA, 120 bp, Artificial Sequence
  ENSG00000267440_7 (sequence is synthesized)
cacaaacggcaggggcttcatctgttttgtttgccgttatgtccttagcacctaaaattgtgcctggcacatatagtactcagtatgtatttgctgggtcaatgagtgagtgaatttata

SEQ ID NO: 928799 - DNA, 120 bp, Artificial Sequence
  ENSG00000267440_8 (sequence is synthesized)
ctaataacagcagctaccatttctagagtgtttaccatatattgggcactgtgtcaatcttcccaacaacccacagacgaagatcaattattacacccattgtacagatcaggaaactga

SEQ ID NO: 928800 - DNA, 120 bp, Artificial Sequence
  ENSG00000267440_9 (sequence is synthesized)
gtcaggttaagaaacttgccctaaatcctacagtctcacttagaacttctgactgcagtgctcatcagaatgcattgtcaacccaaaggtcatttccagctcaggtggcttctatcaaaa

SEQ ID NO: 928801 - DNA, 120 bp, Artificial Sequence
  ENSG00000267440_10 (sequence is synthesized)
gagctcatcctggcctttccaagagccagacctccgacatcggtggagccctgtgcatagctggcctctcctgggcgtcttgtcccaagtacagagacctggatcctttcccactcatgt

SEQ ID NO: 928802 - DNA, 120 bp, Artificial Sequence
  ENSG00000267446_0 (sequence is synthesized)
tccccgcacagagagagagggcgcttcctccgcaggcttccctgcctgctgggggccagggaggagaccagcttgttggaagcggagacgtctaaggagtttccaaataggaaaaccagc

SEQ ID NO: 928803 - DNA, 120 bp, Artificial Sequence
  ENSG00000267446_1 (sequence is synthesized)
gcgagccgcagcctcatcccgcgagcgggcgttcctgagctgcctgcaccgtagtaccttcatatgctttaaaaatgtaaagcggccgggagcggtgcctcacacgcctgtaaccccggc

SEQ ID NO: 928804 - DNA, 90 bp, Artificial Sequence
  ENSG00000267446_2 (sequence is synthesized)
acgcaccaggagttggagggcagtctgggcgacagagggagaccccccgtctcgacaaataaaataaaataaagatataaagatctggaa

SEQ ID NO: 928805 - DNA, 120 bp, Artificial Sequence
  ENSG00000232170_0 (sequence is synthesized)
gggcatccgttcaaataaaaatgcgtcatgatattgtgttttagaggatgacaggtgctgtggagttgggagactgagactgtcaggagcgaggagggatggctgtaattttaaatagtg

SEQ ID NO: 928806 - DNA, 120 bp, Artificial Sequence
  ENSG00000232170_1 (sequence is synthesized)
gcatcatcaggatgaaccttgctgaactgaagccccttccatgacactaaagtaagaagataattctggtcatttcatccaagcccttcagattggcaggtgtttggttcaaacatatat

SEQ ID NO: 928807 - DNA, 120 bp, Artificial Sequence
  ENSG00000232170_2 (sequence is synthesized)
tcaggacatgacttattttgatatttgaggagccctcttctctccatcccctccggaaaaaaaaaaagttgattttccttgtgattcttctggaactccgaggcaacctgttttcccaag

SEQ ID NO: 928808 - DNA, 120 bp, Artificial Sequence
  ENSG00000232170_3 (sequence is synthesized)
aacagggcaccgaggtggtcgcaagggtgcggagggaggatcgcccctgtgggagaggcgcgccggtctctctcagggacctgtagctacacgcagaagatgctgccaattgcgcggagg

SEQ ID NO: 928809 - DNA, 120 bp, Artificial Sequence
  ENSG00000232170_4 (sequence is synthesized)
ctgacgcttggtgctgaggacattgtactaatttaaatggtatcagagtgaacacgatgctacatgtagaatgaaacttcccaagccctcacctgaagagacaaggctgaagtcataaac

SEQ ID NO: 928810 - DNA, 120 bp, Artificial Sequence
  ENSG00000232170_5 (sequence is synthesized)
atcatacgtggtttgtaaatgaaaagtattgcaaacctgcttctcttctgtgctggggtctgtaccaatgttcattgaaccaaacaaggtccctatcttacagaagatgcttcttgaagg

SEQ ID NO: 928811 - DNA, 120 bp, Artificial Sequence
  ENSG00000232170_6 (sequence is synthesized)
atggcgtgttaatcttctaagtatgttctggttgcgaggatagagcactgtcacagctacagctatacctgtgcaaagccaggaataacacgctccctaggagagtctctagccttaatc

SEQ ID NO: 928812 - DNA, 120 bp, Artificial Sequence
  ENSG00000232170_7 (sequence is synthesized)
tgtagctgcaaatagaaatgacaattcattttctcaataatgaaatgtttttgggtagggctaaaagcagaatgaaccaccaaaaagccccttttgacatggtgcctgtgtaaagacaaa

SEQ ID NO: 928813 - DNA, 120 bp, Artificial Sequence
  ENSG00000234956_0 (sequence is synthesized)
gcataatggtcttagtaagcctggccatcatctgagttaaacagcctagtatattaggaagaaactggactagaatttggaacaaccctggtgcaaatcccagctctgctactaacaagt

SEQ ID NO: 928814 - DNA, 120 bp, Artificial Sequence
  ENSG00000234956_1 (sequence is synthesized)
ggtgtaccgttaagcaagtgccctaacccttctggatctcagtttcttatcccaaaatgggtttaaagtctcagccatatatcacaaaatttttgtgaggattcaatgaaatacgatatt

SEQ ID NO: 928815 - DNA, 120 bp, Artificial Sequence
  ENSG00000234956_2 (sequence is synthesized)
gtagatggtggcttttaaaaaaattactcatttgggcgaaatcctatcaaaaataaaactcctagccagagggtcagaactagaggtggtggagtgaacgccgcaccaggcaatggaaga

SEQ ID NO: 928816 - DNA, 120 bp, Artificial Sequence
  ENSG00000234956_3 (sequence is synthesized)
agcttgagcgtgcaccactgtcacctggagggcttgttccaacacggatggctggactcacccccagaatttcagatttattaggtctgcactgggccctgagaatgtttatttaaaaca

SEQ ID NO: 928817 - DNA, 120 bp, Artificial Sequence
  ENSG00000234956_4 (sequence is synthesized)
aattcctggatgctactggttcagttgccacactctgagacccgctggctttgagcttagaagatgtgggtttgattcctggattccacagtttactagctgtgagttagagaatttaaa

SEQ ID NO: 928818 - DNA, 120 bp, Artificial Sequence
  ENSG00000234956_5 (sequence is synthesized)
ttacttacctgagtcttggtttcttatttgcaaactgaactgtaaactatttgttctacccattttataagacttttgtaaggataaaataaaagaatacatatgcaaattactgaaaaa

SEQ ID NO: 928819 - DNA, 120 bp, Artificial Sequence
  ENSG00000234956_6 (sequence is synthesized)
agtctagccaatcctggtgcacttacaacatcatttctgcacctacaaaattatggaccagattttggagagcaacaagttcaccaagggttttgctctgttgtcctggctagggtgcag

SEQ ID NO: 928820 - DNA, 120 bp, Artificial Sequence
  ENSG00000234956_7 (sequence is synthesized)
tggtatgaacatggctcactgcagccttgacctcctgtactcaagcaatcctccctcttcagtctcctgagtagtgagtagttgggaccacagagggtcagaactagaggtggtggagtg

SEQ ID NO: 928821 - DNA, 120 bp, Artificial Sequence
  ENSG00000264243_0 (sequence is synthesized)
cttcatggaggcagggggtttcgttcattgcactactcccagtgcttggaatggtgcctgggactctataagtgctttagatgggtgtctcgctgtgttatccaggctgatctcaaactc

SEQ ID NO: 928822 - DNA, 90 bp, Artificial Sequence
  ENSG00000264243_1 (sequence is synthesized)
tgccgaatctttgagtctggacaccagtaggtggtcatggtccagttccttgcccagatgcccacagggacttccagcttccaggctgca

SEQ ID NO: 928823 - DNA, 120 bp, Artificial Sequence
  ENSG00000264243_2 (sequence is synthesized)
tgcccagatgcccacagggacttccagcttccaggctgcaatcacagagaatgaagaaggaaggctgttcgagaaatatgggcagctcttacaggaaagccccccagcctctaacaggcc

SEQ ID NO: 928824 - DNA, 120 bp, Artificial Sequence
  ENSG00000264243_3 (sequence is synthesized)
ccgccctcctcctctctacctgatggtgccaggtaaggcttcaggcatggcagaggctgaactgagagccaccctaccttgttcctgtggctccatccccctatccacacccaagagatg

SEQ ID NO: 928825 - DNA, 120 bp, Artificial Sequence
  ENSG00000264243_4 (sequence is synthesized)
agatcctggggcagttggcatctgacagcctggcatcgactcatgccaacagcttggaagctgcagtaattagaaggggagagggagagagggggagagaaggagagcgaaagcaagctc

SEQ ID NO: 928826 - DNA, 120 bp, Artificial Sequence
  ENSG00000264243_5 (sequence is synthesized)
tagagagaaaccttctcctgcctgccgcagggcaaactacttcaaacgaattcgtttcgctcttgtgaaactgaagacaatttccttttctgtcataaaacaaattattgctcatcagga

SEQ ID NO: 928827 - DNA, 120 bp, Artificial Sequence
  ENSG00000256513_0 (sequence is synthesized)
gacctcaaactgagagttataccattggcttccctggtctccggctttacaacttggactgagccacactactggcttctccggttctccagcttgcagaaagttatatgggacttctca

SEQ ID NO: 928828 - DNA, 120 bp, Artificial Sequence
  ENSG00000256513_1 (sequence is synthesized)
gtccgtttctccagtaacaaaagtatgcctgacaagaggctctaagctgtcctggatgccaatctttgtgccgactactttacagtgattgattgctcatacttcacggcaaccctgtgg

SEQ ID NO: 928829 - DNA, 120 bp, Artificial Sequence
  ENSG00000256513_2 (sequence is synthesized)
aatagataacatcatcatcccccttttactgaggtgtggggaagttacctctattgcccatgatcatagtttagctggcgctgctttataaaagaatgaatgaataaattaatgaatgaa

SEQ ID NO: 928830 - DNA, 120 bp, Artificial Sequence
  ENSG00000256512_0 (sequence is synthesized)
ggactgaacactggtaaggattcactgtagggctccatcattataagtttcctaaaaagtagtgtgcaaacaaaatatctgaacacagaaccctaaacatactagatgtatgtgtgggta

SEQ ID NO: 928831 - DNA, 120 bp, Artificial Sequence
  ENSG00000234431_0 (sequence is synthesized)
agagagggagggggagagggctatttttaaaattttttaaaattgctgaacaggggtacctctgggcagtgtgtcagaataccactttttaaatattttatgatttatttatttttctat

SEQ ID NO: 928832 - DNA, 120 bp, Artificial Sequence
  ENSG00000234431_1 (sequence is synthesized)
aagagacagttttcaggaacaacaagcaattattcctactttccaagttattttgatgccatggtggctcatacctataatctgagtactttgggaggctgagtgagtggatcccctgag

SEQ ID NO: 928833 - DNA, 120 bp, Artificial Sequence
  ENSG00000234431_2 (sequence is synthesized)
cccagagaggtcaaggttgtgatgagctgtgatcacaccactgcacttcagcatgggagacagagtgagaccctgtttcagaaaaaataaataaataaaaccaccagcaccacaaacaac

SEQ ID NO: 928834 - DNA, 120 bp, Artificial Sequence
  ENSG00000255389_0 (sequence is synthesized)
ccctaaatcaacacatattcctaggatgtgggaacatatgcaatacttaaatgcacaggctctgggttcagactccctagggttaaattctccctgtgccggctagctgcatgattagat

SEQ ID NO: 928835 - DNA, 120 bp, Artificial Sequence
  ENSG00000255389_1 (sequence is synthesized)
ttgtgatcttgacaaagttacctaacgtctctgggcctcacttttctcatctgcaaaatagggaaaatagcaacacttctccataggggtgtggtgaggataaagagtagatgtaaataa

SEQ ID NO: 928836 - DNA, 120 bp, Artificial Sequence
  ENSG00000255389_2 (sequence is synthesized)
agtgttgaatgtagagcctggcacatatcaagctcttaaaaagcaatggccattttgttatttttaccgcaacgacaactgcagttattatctggcttcagagctctctttttaaaaaca

SEQ ID NO: 928837 - DNA, 120 bp, Artificial Sequence
  ENSG00000255389_3 (sequence is synthesized)
gtattccctggttttacacccaggtgctaatactattctatgaagctaatgtatagagaccatatctttttaacaaacgtgtatatatgagtcatttccggcacatttgatacacatcat

SEQ ID NO: 928838 - DNA, 120 bp, Artificial Sequence
  ENSG00000255389_4 (sequence is synthesized)
ctcgtttggtccttaaaacaagcctaggccataagcagggtacgtgttaccactttgccattcctgttttacagaggcttagacacattgagaagcttttccatagtcacttaacaagtg

SEQ ID NO: 928839 - DNA, 120 bp, Artificial Sequence
  ENSG00000255389_5 (sequence is synthesized)
atgggtgaagccaaatcaagcctttagatctccaagctctttccattaaaccatataaatcacgggttggcaaactttttctgcaaaggggacagatagtaaatagtttaagccttatgg

SEQ ID NO: 928840 - DNA, 120 bp, Artificial Sequence
  ENSG00000255389_6 (sequence is synthesized)
gccacatgctgtgtctgtttcatattctgctccttttttatttttattttttttaagaaaagacaccctttaaacatataaaaaccattctgagcaacaggctggtgctaaaaacaggtc

SEQ ID NO: 928841 - DNA, 120 bp, Artificial Sequence
  ENSG00000255389_7 (sequence is synthesized)
atggtaaccattggctctagggttgtagtttactgttgatatagattgtacactgataagccaaaatacaaacctaatgaaactgacatacttaaggaactttactctttgttagcaatc

SEQ ID NO: 928842 - DNA, 120 bp, Artificial Sequence
  ENSG00000255389_8 (sequence is synthesized)
attgttaatatttattgaatggtgactacgtgggaaatgctgttccaagtgtgatagatatattaacttacttaatcctcacacccactctaatttcctaagtactattgtcagactcat

SEQ ID NO: 928843 - DNA, 120 bp, Artificial Sequence
  ENSG00000255389_9 (sequence is synthesized)
tttacagacaggaaaagcaaggcatagagaaggtaagtaacttttccgaggtcacatggctattaagtagcagagctgtgattcaaatataagcggtttggcaccagatcctgtgcactt

SEQ ID NO: 928844 - DNA, 120 bp, Artificial Sequence
  ENSG00000255389_10 (sequence is synthesized)
gagcactgactggttcagctattgggagggaagaaaggggatggggaagccacataacccctaggagattctgtaataaatatgcttcagagccattcaccttgaagctgaggaggcatg

SEQ ID NO: 928845 - DNA, 120 bp, Artificial Sequence
  ENSG00000255389_11 (sequence is synthesized)
gaagcaggccacctgtgttctgtacagcatcaccaggctggaaatctgccatggctttccttcacgccatcacaagaggatacagatgaggctgcagaggcatcttgatttgagaaaagc

SEQ ID NO: 928846 - DNA, 120 bp, Artificial Sequence
  ENSG00000255389_12 (sequence is synthesized)
atttgactggatctcattaaattttaatcattaactgaattcaaaataaattgaaaactggttgacagagcaccaacaaagggtgatgataaatggtgatgcatctagaggggagctatc

SEQ ID NO: 928847 - DNA, 120 bp, Artificial Sequence
  ENSG00000255389_13 (sequence is synthesized)
ttccaggggacaactctaaggcaaggacggatgggatttaatgaaggtgttatgtccccagaagaagacaaatagcacagcaaggaacagaggaaggacaggagtgagcagcctgagtaa

SEQ ID NO: 928848 - DNA, 120 bp, Artificial Sequence
  ENSG00000255389_14 (sequence is synthesized)
ttaataaaccatattaacagctcctccataatcaggccttggtgatcacaactgcttggattttttcttaagctttctttgagtcaggaataggtttgaagcgtcctagagacacacagc

SEQ ID NO: 928849 - DNA, 120 bp, Artificial Sequence
  ENSG00000255389_15 (sequence is synthesized)
atgaatatttcaggtggacattaaaaagaaatctataaatttacagctgggaggatcctgagatctacttcggatcagaaactttcaattacaagattcccaaggccttacttcattccc

SEQ ID NO: 928850 - DNA, 120 bp, Artificial Sequence
  ENSG00000255389_16 (sequence is synthesized)
cagagagtaatctttttaataaatgtccaaaagtcatggatttaaaaaaaaatctttaaactcattaatgtcctttgtttcctgcccaaatgcatgcaaactttcataacactggtttgc

SEQ ID NO: 928851 - DNA, 120 bp, Artificial Sequence
  ENSG00000255389_17 (sequence is synthesized)
tgagtggaaggttggttttgagtgaactgtttggctcagattcaaactccaatgaacaaatacttccaagtttacttgctgaatttcccatacagagaagttcttccactgggcttgcca

SEQ ID NO: 928852 - DNA, 120 bp, Artificial Sequence
  ENSG00000255389_18 (sequence is synthesized)
gaggatttgaaacagtggtgagccctggaaggaagggaatatttactggcccttggacataaacccagcacagtaagactcacatcaggctgaaggcagtgcagtatgaaccgacctgat

SEQ ID NO: 928853 - DNA, 120 bp, Artificial Sequence
  ENSG00000255389_19 (sequence is synthesized)
ttgaggaagtttgctctgggactcctctgagctactaaatgaggaggagaaggactaatgggaacacactgactccatcacattagaagttataataaacatttagagaacaacctcaaa

SEQ ID NO: 928854 - DNA, 120 bp, Artificial Sequence
  ENSG00000226816_0 (sequence is synthesized)
tgcaagcagcttttagccctggcagcacagaagcagaagaattgaggaattctctgccactcctgtagtatcctttaacaggttaagtggttgtcaagcttcttttttaaatttgtaaac

SEQ ID NO: 928855 - DNA, 120 bp, Artificial Sequence
  ENSG00000226816_1 (sequence is synthesized)
ctatttgaatcaatttgtgactcctgcattccggcccggcagaaagagctcgaagagacgcagagcgcggcgcgctcccccacggccctccaggccggcgggtgagatggggagatgagc

SEQ ID NO: 928856 - DNA, 120 bp, Artificial Sequence
  ENSG00000226816_2 (sequence is synthesized)
tagggggccccggactggctgcgccctctgccctgcagacacggggggccccgctgtggctgcccactggccgggcgcaggcctcgaagccgcggcgaacctctcttccccaccccacct

SEQ ID NO: 928857 - DNA, 120 bp, Artificial Sequence
  ENSG00000226816_3 (sequence is synthesized)
cggtgactgttggcggcggctctccctgcccagaccccgccgccggatcctgcccggcctcgacgaaaccccgccgagccgccgagacgcagtgtctccgggtggcggcgggagaggcgg

SEQ ID NO: 928858 - DNA, 120 bp, Artificial Sequence
  ENSG00000226816_4 (sequence is synthesized)
gccgggaagcatggcggccgccccaacaccgcgcggcggagaccgttagggtgtgcagggcccgggaaggcggtctcgcgacgcaggcaagctcggccgcctctttaggccacggagccg

SEQ ID NO: 928859 - DNA, 120 bp, Artificial Sequence
  ENSG00000226816_5 (sequence is synthesized)
cgcgagtccgggcccgggtgaccgctctgttcccactggacgagacctgccgagtcctcaggacaacggacaaaggccttaacgggcttgggaggtgagcgaagtcccgaacgatgacgg

SEQ ID NO: 928860 - DNA, 120 bp, Artificial Sequence
  ENSG00000226816_6 (sequence is synthesized)
gtggaacagttagcggccttcgggcggttggtctcgttctaccagagcttgctgtcggaagagagaaatggtggaatgacaagccacgtctggcctcttggaaatgcccaccaccctttg

SEQ ID NO: 928861 - DNA, 120 bp, Artificial Sequence
  ENSG00000226816_7 (sequence is synthesized)
ggaagatttactggccgtttatggaaggcctgtgtatttaatatgaaacagctgctctcaacactacccaaaccttttaatagaaaacatttgccacatctagcccttctatgagctaga

SEQ ID NO: 928862 - DNA, 120 bp, Artificial Sequence
  ENSG00000226816_8 (sequence is synthesized)
tggaaagaggttgctgatgtatgataaagttagaaaatcacacatcttgtaaattctcatttgcttaaaagaaatcatagaaaataaatgtcttctggagacgacttttggaaatggagt

SEQ ID NO: 928863 - DNA, 120 bp, Artificial Sequence
  ENSG00000226816_9 (sequence is synthesized)
ccagactggtcatatttagaagacattttcatattctctccattgttttgtgtgcatttcattcctcactactgtgtatatggttgacaatgctaagcttttttgaaatgtctattcttt

SEQ ID NO: 928864 - DNA, 120 bp, Artificial Sequence
  ENSG00000226816_10 (sequence is synthesized)
ttagatattctgaagtgcctgatatatgtagaaaaaaataaccttttgtaaatatctttttgttacaattcatatgaaatgtttggtgggggaatggcccaatcacctgttgagtaatac

SEQ ID NO: 928865 - DNA, 120 bp, Artificial Sequence
  ENSG00000226816_11 (sequence is synthesized)
tcattgtgtttgtgcactggttcaggggaggagggggaagtgcagagatctctatgccactgtgcttacagcgaggcaagattaatcattatctctgcgcattttgttttacttgtctgt

SEQ ID NO: 928866 - DNA, 120 bp, Artificial Sequence
  ENSG00000226816_12 (sequence is synthesized)
gtatatagtgtacataaaggacagacaagtcctgatttacaacatctagtctttctagatattaaagaggttgccagtacatgataaaagtagagttagtaaactaatatattttgtaca

SEQ ID NO: 928867 - DNA, 120 bp, Artificial Sequence
  ENSG00000226816_13 (sequence is synthesized)
ttttgttttagaagtcctaggaaagattgtcttctgaaaatttgagcattcttgcccgctgggttgatggagatgggaagggttctaggccagaatgttcctatttggaagactctttca

SEQ ID NO: 928868 - DNA, 120 bp, Artificial Sequence
  ENSG00000226816_14 (sequence is synthesized)
aattataactgttgtcacatgtttgcagtttattcaagactgctgtgttcgtagtggacaaatgaactccttacttgaaacatctagtctatctagatgtttagaagtgcccaatgtatg

SEQ ID NO: 928869 - DNA, 120 bp, Artificial Sequence
  ENSG00000226816_15 (sequence is synthesized)
ttaaatgtagaggtagtaaaataccacttcgtaaatatctttttgctaaaattcatggggaatgctgtcttttggaaattgaattgtgaagccacctttgtgagcagtatagtactgtct

SEQ ID NO: 928870 - DNA, 120 bp, Artificial Sequence
  ENSG00000226816_16 (sequence is synthesized)
atacttgttcagtggtttagaggagatgggagggaagacattgcaaaagataatatgccagtgtgttcatacttggacattttcagacaccattttttgcatgttttgtgcatgttgttt

SEQ ID NO: 928871 - DNA, 120 bp, Artificial Sequence
  ENSG00000226816_17 (sequence is synthesized)
tgctctgtatatagtgtataaaacggacaaatgagtcctaattttgcaacatctagtgtctagatgttaaagaggttgccagtgtatgacaaagtatttagtacaattagcatattttgt

SEQ ID NO: 928872 - DNA, 120 bp, Artificial Sequence
  ENSG00000239300_0 (sequence is synthesized)
agacaaactcttaatgtaaaaccaccatcagagccaccctggagttatggcaaggccaccacagtctcctccaaaggccactgatatggaactgggaacctccctccatagaatgctaaa

SEQ ID NO: 928873 - DNA, 120 bp, Artificial Sequence
  ENSG00000239300_1 (sequence is synthesized)
tggctgatgtgaacttggttaaggatctataattcttcttacgaaggttaaaatggagttaaaattcacagtgaacagataagaagacctcttcactgatttgtcagagttacaactccc

SEQ ID NO: 928874 - DNA, 120 bp, Artificial Sequence
  ENSG00000239300_2 (sequence is synthesized)
gagcactaacgataaaaggaccaacccgcaactctggctttctgcctacacatccctgaagatctggcagcttctgtttgcatccttgtcataagacttcctcttccgttcagcaaacct

SEQ ID NO: 928875 - DNA, 120 bp, Artificial Sequence
  ENSG00000239300_3 (sequence is synthesized)
tcctaagaagttacaatctcaaagaggaaagttctggaagaccaaagaaaatatgtcatgaaatcaagccattaagaagttgtgactccaaaaaagtaaaagcgtgagctactgtacaca

SEQ ID NO: 928876 - DNA, 120 bp, Artificial Sequence
  ENSG00000239300_4 (sequence is synthesized)
gatctataattcttcttacgaagaggaaagttctggaagaccaaagaaaatatgtcatgaaatcaagccattaagaagttgtgactccaaaaaagtaaaagcgtgagctactgtacacac

SEQ ID NO: 928877 - DNA, 120 bp, Artificial Sequence
  ENSG00000226813_0 (sequence is synthesized)
ctctgcctgaactgtcctcccaacaaaatcctgctcaccctttaaaacatacctctgacagctccttctctgggcaagtcgcatgagcctctcctctcaagtctcaccaggaatttaaga

SEQ ID NO: 928878 - DNA, 120 bp, Artificial Sequence
  ENSG00000226813_1 (sequence is synthesized)
gtaattcccaaattgcttctgggccttgactttctgtcatctattcaaatgtcaaaaccttttcctggaagaatgtgctacacctgctgcaggagaaaggcaattagtaaatgtagaaga

SEQ ID NO: 928879 - DNA, 120 bp, Artificial Sequence
  ENSG00000226813_2 (sequence is synthesized)
agaaatggaatttgaaaatcactatttggccaccatcatggtaataattgcttgagtcaagaatcatcagtggatcattctaatgggtggaagtttaaccactaacaggatatttcatgg

SEQ ID NO: 928880 - DNA, 120 bp, Artificial Sequence
  ENSG00000226813_3 (sequence is synthesized)
aaagcagaaacttcagagcaaagaagtctgacagacactgccaaaatcagtcaagccaatatcatgtgtttcctaatacaatgcactaagagaggcacaatatcacttctgcagcatcct

SEQ ID NO: 928881 - DNA, 120 bp, Artificial Sequence
  ENSG00000226813_4 (sequence is synthesized)
tgccaaaaacacctaatgatagttttattatgatgaaacaatgaaccactttcaaactgaggacattttatgaaataatttgtcagaactctcaaaaattatcaaataaatgaaatataa

SEQ ID NO: 928882 - DNA, 120 bp, Artificial Sequence
  ENSG00000226813_5 (sequence is synthesized)
aaagagctgttaaggacttggaggactgttagattatagaaaagtaaaaagtctttacagctaaatgcaacaaataaagatgcaatatttttataaaaaacattgaacaactagcaaaaa

SEQ ID NO: 928883 - DNA, 120 bp, Artificial Sequence
  ENSG00000226813_6 (sequence is synthesized)
tgaacatctattatgagcaagataccacattggatgctagataaaaagaacagagaaataaagtctattcttaaaggcagcacagtcaagggaggtatggacaagtgaataaagtgtgac

SEQ ID NO: 928884 - DNA, 120 bp, Artificial Sequence
  ENSG00000226812_0 (sequence is synthesized)
tcttcctttcatctaacatatttattgagcacctactatgtaccaggccttgtgctagactctggggatatggaaatgagcaaagtagatgtacccccgaaacttgtggactaatggagg

SEQ ID NO: 928885 - DNA, 120 bp, Artificial Sequence
  ENSG00000226812_1 (sequence is synthesized)
agacggaccttaatcagatcgtcattcaaagatactattacaaactgttctgagagccgaggaagcaggaaggagctgtgagagactgagctctaaccttggccatcaaagacaagctgt

SEQ ID NO: 928886 - DNA, 120 bp, Artificial Sequence
  ENSG00000226812_2 (sequence is synthesized)
gcagctctggttttttgagggcaggacatggagggtcaggcccagctggaggcgcaccaaagcccagagaaaattcagaaccacgtgaacttgttggatttcagccccttgaagcacatg

SEQ ID NO: 928887 - DNA, 120 bp, Artificial Sequence
  ENSG00000226812_3 (sequence is synthesized)
aggaggagcacggctttcccatcttgtacggggactcgccaatccagttgcccctggaagagaaaaggacccagggagacagaggagcattaggctactaatgacttcaagaacatcaga

SEQ ID NO: 928888 - DNA, 120 bp, Artificial Sequence
  ENSG00000226812_4 (sequence is synthesized)
ataatacaatagaaagaatttggaatttggaatcaaaagactgattcttctgaaccagctctactacttgttggctttgtgacatttggtaaattactcaacctgcctgagcctcaattt

SEQ ID NO: 928889 - DNA, 120 bp, Artificial Sequence
  ENSG00000226812_5 (sequence is synthesized)
cttaatttgtaaaaagaatgtcctcctagggttcccccctttttccttctttctttcatctcttcaatgagatagtgtgaaagtagtttgtaaatgattaaaggctatgtgacagtaaaa

SEQ ID NO: 928890 - DNA, 120 bp, Artificial Sequence
  ENSG00000226812_6 (sequence is synthesized)
gggagaaaaagaatcagagatgcagagaccaaaacaaaaacaggcagagatagaacggacagtagacaaaagagagagagaccgaggcagagatagagaaaaaaaggcccagagagagtc

SEQ ID NO: 928891 - DNA, 120 bp, Artificial Sequence
  ENSG00000263312_0 (sequence is synthesized)
atgccctctatctctctacgctgactccctgaagccataacttacggcacacccagcgcaggcccagtggacccaggggatctgcagggcaggaggtagagctgtttagaggcggaagtg

SEQ ID NO: 928892 - DNA, 120 bp, Artificial Sequence
  ENSG00000263312_1 (sequence is synthesized)
aggagcacaggccctgctctgcatttgcctacctgagcaacgggaataaagccggactccgcctcccctggtgctgtgtggcttcgcgggccgaggcgctcagcactgagcccagggcct

SEQ ID NO: 928893 - DNA, 120 bp, Artificial Sequence
  ENSG00000263312_2 (sequence is synthesized)
aggcacctgagagcgcggacgaggaatgggagggccttgagccgtctcgccctgtctgtgaggtgctaatggacccagtgtgcaatgcatcagacatctcgggagacagagagaggaatc

SEQ ID NO: 928894 - DNA, 120 bp, Artificial Sequence
  ENSG00000263312_3 (sequence is synthesized)
gcccaatccgtcaccctggagagctgtcaggaaagagagtgtggctctgcccctccccctgtgaatgacacaagggtagaccccagggtgtttgacctggaaagggcctctgagtcacct

SEQ ID NO: 928895 - DNA, 120 bp, Artificial Sequence
  ENSG00000259436_0 (sequence is synthesized)
cttttcccggagccgcacccaggtcccccaccatcatgtaccccttacccaggcctctgaggggccaggcaccccccaccactcccctacagcaggagagcttagggaggctgagagctt

SEQ ID NO: 928896 - DNA, 120 bp, Artificial Sequence
  ENSG00000259436_1 (sequence is synthesized)
ggacagccgggagagggggccggatctctggatctccccagcctccagatctcagtgtggctctctctggagacaaaagctaagactcaacccacaggcaacactcaacacagagatcca

SEQ ID NO: 928897 - DNA, 120 bp, Artificial Sequence
  ENSG00000259436_2 (sequence is synthesized)
gctcagaaaaaaaggagctgaccagggaggaatggagaggccaagacacataatgaagactaagaaaaggaagaaagatgatgctggggctggagccaaagggagaggaagaggaaagga

SEQ ID NO: 928898 - DNA, 120 bp, Artificial Sequence
  ENSG00000259436_3 (sequence is synthesized)
aggaaagccaggggcagagacctggcagggcagcgtgagcccaacaaccacggggtgggggtggggcgcgcatcaagatttctaacaagcgcagctgaaaacacccagggccgttctctg

SEQ ID NO: 928899 - DNA, 120 bp, Artificial Sequence
  ENSG00000259436_4 (sequence is synthesized)
aggccttctctctgcctaccagccctcaccagtgcttcgaagagccctgaggaacgtctctctatttgaagtcagagccgagtgcctgctctcggcacctggggctccatgcttaccagg

SEQ ID NO: 928900 - DNA, 120 bp, Artificial Sequence
  ENSG00000259436_5 (sequence is synthesized)
atggtgggtacttgaccttcatttgctgtgggactgtcagggattccagggacccactggtccccgaactggctcagagatgcaagccatttttacctcctacacatctataatccccac

SEQ ID NO: 928901 - DNA, 120 bp, Artificial Sequence
  ENSG00000259436_6 (sequence is synthesized)
cccatggctgacaaatattcccagtccacagctgtctccacccacccagtgacagagcacaggcagccaaaaggatcaagcaatctcttgccacctcccagcaccccagaatgctaaaca

SEQ ID NO: 928902 - DNA, 120 bp, Artificial Sequence
  ENSG00000259436_7 (sequence is synthesized)
gaccctcacatctggactccacatccagcgaggagtgcccctgcccaccacccagatcacacagctgccagttacagaccaccctataggtcccaccacacggccatagcccaccagcat

SEQ ID NO: 928903 - DNA, 120 bp, Artificial Sequence
  ENSG00000259436_8 (sequence is synthesized)
cccagccatccttcaagccacatctggaatagcacacaccctattccactagccaaagcccccaggggtgtaattcagaaggaggcagactgggcctggggcatgtggacaagtccctga

SEQ ID NO: 928904 - DNA, 120 bp, Artificial Sequence
  ENSG00000259436_9 (sequence is synthesized)
caccacgccctggcttctccggcttgtctgaagaacctgaactgcccttaaggcctgcgcctcccatcccagggcagcccccccgccatacctacactcttggccatgggagaatgtcct

SEQ ID NO: 928905 - DNA, 120 bp, Artificial Sequence
  ENSG00000259436_10 (sequence is synthesized)
catgtgcggctaaacatcctcctcatgcagccttgaattctgttccttccacgtcacctcaccagacccaggatgaaagccgctcacctagagcaaagcttctgcttccgaggcattcag

SEQ ID NO: 928906 - DNA, 120 bp, Artificial Sequence
  ENSG00000259436_11 (sequence is synthesized)
gactcccctcagggtgtgtgagcaccctggggcacatgcctgttgcttatgtctgggttacctctgtgaccctgggaccgctccacattgaaggccgttgtgtctttttgtggaaggatg

SEQ ID NO: 928907 - DNA, 120 bp, Artificial Sequence
  ENSG00000259436_12 (sequence is synthesized)
gaaggacagaagggaaggagagacaaagtggtaccacagccctgttcttgccctggcacttggagggcaccagatacccaggggactgtagctggctgtgaggactctaaggccaggcca

SEQ ID NO: 928908 - DNA, 120 bp, Artificial Sequence
  ENSG00000259436_13 (sequence is synthesized)
gcatacacagtccccaatagtgagtaggagcccagtcagtccacaccccttcccatccactcgaaatgtaacttagccctcggcttctccttacctttcaggagttctctccttaccccc

SEQ ID NO: 928909 - DNA, 120 bp, Artificial Sequence
  ENSG00000259436_14 (sequence is synthesized)
aaagacttcctgaggaccccctaggccagccagcctatccctctctcccctaacccagcatcctgcagtcccctggttcagattggtggtgtctgtgcctgaacccccacgagcctgaaa

SEQ ID NO: 928910 - DNA, 120 bp, Artificial Sequence
  ENSG00000259436_15 (sequence is synthesized)
gcccctcaaaggccacatgggtctcccgcctctctgcatctccagatggtggcacgaggcctagcacacaaggaatcccagaaaatgttggctgaaggaataaatggatggatctaggtt

SEQ ID NO: 928911 - DNA, 120 bp, Artificial Sequence
  ENSG00000205786_0 (sequence is synthesized)
atcagctagcaagtattcacaggcacatccaacctccatccttacattccacaaggatttgagtgtctgttataggtataaaagcctgccgttggtggaaaaggaaaaggtggtccagtt

SEQ ID NO: 928912 - DNA, 120 bp, Artificial Sequence
  ENSG00000205786_1 (sequence is synthesized)
agacaagatgccaccggcttctgaaaccagacatctttgaaaacccacccatctacctgcaggaaaaggcaagggacctgacctcgcctgggctcagggaagaggttgctgggatcataa

SEQ ID NO: 928913 - DNA, 120 bp, Artificial Sequence
  ENSG00000205786_2 (sequence is synthesized)
ccccaggaagagacgggatggaaggagagcatgcagggagcagaggacaggctactctccaaggaggagagggaagaggccacagaaatggaaaaggggccaggacaagtcagtggagag

SEQ ID NO: 928914 - DNA, 120 bp, Artificial Sequence
  ENSG00000205786_3 (sequence is synthesized)
atggtcagggcctggcgaggaggagcaggacaaaagcggtggagctcagccccgtggcggcagggccactcccattcatctggtcctctacttctgaagttctcgaatgcagaatgagat

SEQ ID NO: 928915 - DNA, 120 bp, Artificial Sequence
  ENSG00000205786_4 (sequence is synthesized)
tctcgaatgcagaatgagatgtacagatgggccagcaggtgatatgctatctgtcataggttaaggcctcattattttattcatttttaaacttttttttttttgagacagggtcttgtt

SEQ ID NO: 928916 - DNA, 83 bp, Artificial Sequence
  ENSG00000205786_5 (sequence is synthesized)
acgaggactacaggtgcacaccgccatgcccagctaatttcttaacgttttgtagagaaaggctctcactgtgttgcccaggc

SEQ ID NO: 928917 - DNA, 85 bp, Artificial Sequence
  ENSG00000205786_6 (sequence is synthesized)
aggactacaggtgcacaccgccatgcccagctaatttcttaacgttttgtagagaaaggctgactcaagcaatcctcctgtcttg

SEQ ID NO: 928918 - DNA, 120 bp, Artificial Sequence
  ENSG00000205786_7 (sequence is synthesized)
tacaggtgtgagccactgctcccagccacaagttttattttaaatgtttacctttcaatgatcacttcgaggagatttaagcttactctttcttttttttttttcttgagatggagtctt

SEQ ID NO: 928919 - DNA, 67 bp, Artificial Sequence
  ENSG00000205786_8 (sequence is synthesized)
gttggtctcgcatgagccaccatgcctggctcattgtctagtttttaccaagaagatgatgagatat

SEQ ID NO: 928920 - DNA, 120 bp, Artificial Sequence
  ENSG00000205786_9 (sequence is synthesized)
ggctcattgtctagtttttaccaagaagatgatgagatatgccagagggctccgtatctgctatgagaacgtcccccaagagcagctggccgtggtgctgcagctggagctgtgcttgga

SEQ ID NO: 928921 - DNA, 120 bp, Artificial Sequence
  ENSG00000205786_10 (sequence is synthesized)
gctcttcttcacccccatggcggtcaccaccttctgccactggcactttgtgcagatcatgctctctggccccaagtggggacctggaggtgctgaagagccaagagactggctgccgtg

SEQ ID NO: 928922 - DNA, 120 bp, Artificial Sequence
  ENSG00000205786_11 (sequence is synthesized)
accctcttcaacttcctggtctgcttggaccctgtgctttgtctcccatggtgggttcccccagtggaagagtcaaattggtgggcaggcgcagtgttgttcagtgctctcgatgctgca

SEQ ID NO: 928923 - DNA, 84 bp, Artificial Sequence
  ENSG00000205786_12 (sequence is synthesized)
tgtatttttagtagagacgaggtttcaacccctactcaggctggtgtcaaactcctgaccgcaattacaggcgtgagccaccat

SEQ ID NO: 928924 - DNA, 120 bp, Artificial Sequence
  ENSG00000205786_13 (sequence is synthesized)
gccaccatgcccagcctaaccccttgattttctgtttctcttcctccaccgtgcgcaaagcctttgacagagggccacggaggtggcagcacggcgggggtctcactgtctgggtggtgg

SEQ ID NO: 928925 - DNA, 120 bp, Artificial Sequence
  ENSG00000205786_14 (sequence is synthesized)
tgaaagctctggagagccagctgcagagagaagatgtggatcttagggacggccaatgtcaccttcacaggagattagaggcgccagcttggggtaaccttttggggaaggagggctcaa

SEQ ID NO: 928926 - DNA, 120 bp, Artificial Sequence
  ENSG00000205786_15 (sequence is synthesized)
aaagaggaacaatgaaacagaactaaggtgagttctcctgtgcccagtttcagaggtcaaggagagtagtagatagctcaaacccaactcagccattgagtgagtgttttcattttgttc

SEQ ID NO: 928927 - DNA, 120 bp, Artificial Sequence
  ENSG00000205786_16 (sequence is synthesized)
cttggggtctatgatattttctattttcttttctttccttttgttttggtttgtttgtttgtttggttggttggttggttggttggttttagagacagggtttccctctgtcacccaggc

SEQ ID NO: 928928 - DNA, 85 bp, Artificial Sequence
  ENSG00000205786_17 (sequence is synthesized)
ggttggttttagagacagggtttccctctgtcacccaggctggaatgcagtagtgtgatcacatcacactgcagcttctaactca

SEQ ID NO: 928929 - DNA, 120 bp, Artificial Sequence
  ENSG00000205786_18 (sequence is synthesized)
cagggtttcactatgttggccaggatgttcaacaacttctgccttcaagcgatcttccctcctgggcctccccaagtgctgagtttacaagcatcagccaccacacccagcctatgacat

SEQ ID NO: 928930 - DNA, 120 bp, Artificial Sequence
  ENSG00000205786_19 (sequence is synthesized)
ccacacccagcctatgacattttcttcattatggctggtactgcctcatgaaaagggggttcctcatgctggatctgaacaacccagcacaggcaagtctggggagcaaggcaggagcct

SEQ ID NO: 928931 - DNA, 120 bp, Artificial Sequence
  ENSG00000205786_20 (sequence is synthesized)
gcatgtggactcaaaggaccggcacccgaaacaaagcagtggctggcacaggtggacaaaccaggcaagaaaagcaactgtccttcggagcagagtccacgtgatgggaagaaacagaca

SEQ ID NO: 928932 - DNA, 120 bp, Artificial Sequence
  ENSG00000205786_21 (sequence is synthesized)
aaagctgccaaggtcctcttcaacgtgatggcgtaaatccagctctttctgcaagaaggctcaccagccttcccaccagctcttctccccaccccagccctgcagccctgcagcctgacc

SEQ ID NO: 928933 - DNA, 120 bp, Artificial Sequence
  ENSG00000205786_22 (sequence is synthesized)
ctaggtaatgagtggtggggagtgacccaggcatgcacgacctgcccagaggaaagggagttcaaagaaggacccgagaccctcacaggaacctagcagattggcacaagtgccagatgt

SEQ ID NO: 928934 - DNA, 120 bp, Artificial Sequence
  ENSG00000205786_23 (sequence is synthesized)
atccaggacagacactttccccaggactccaggggtaaaggagtgccccacctctccactccttgcctttcttaactgaattcagattgtcgtgaacattcaagaaaagcattgtggctg

SEQ ID NO: 928935 - DNA, 120 bp, Artificial Sequence
  ENSG00000205786_24 (sequence is synthesized)
ggataagcagtgttgaaacatttggaagctcctgcagatgctgaataactgacctccagcctctgttccaccagccacaactacagctttgattggagaagagactgatttcagccactt

SEQ ID NO: 928936 - DNA, 120 bp, Artificial Sequence
  ENSG00000205786_25 (sequence is synthesized)
tctcctggtataaaagcctgccgttggtggaaaaggaaaaggtggtccagttagacaagatgccaccggcttctgaaaccagacatctttgaaaacccacccatctacctgcaggaaaag

SEQ ID NO: 928937 - DNA, 120 bp, Artificial Sequence
  ENSG00000205786_26 (sequence is synthesized)
ctcagcctcccaagtagcttggattacagctttctctttccacagggtggttaggaaggtagaaggtaatcctggagcttcccgccaccacgcaggaggaatttgcctgagagcaaagcc

SEQ ID NO: 928938 - DNA, 120 bp, Artificial Sequence
  ENSG00000205786_27 (sequence is synthesized)
agcatagagaagcagagctgagtcatggagacaggtggctgaaagtttcatttcggcatatggatctcaccattcctgaagccactttcaactcttcaatttcatagctaataaattctc

SEQ ID NO: 928939 - DNA, 120 bp, Artificial Sequence
  ENSG00000205786_28 (sequence is synthesized)
acatttggaagctcctgcagatgctgaataactgacctccagcctctgttccaccagccacaactacagctttgattggagaagagactgatttcagccactttctcctgtacatgtcag

SEQ ID NO: 928940 - DNA, 120 bp, Artificial Sequence
  ENSG00000205786_29 (sequence is synthesized)
tcagccaccacacccagcctatgacattttcttcattatggctggtactgcctcatgacacagtctcactctgttgcccaggctgaagtcaacggcatgatctcagctcactgcaacctc

SEQ ID NO: 928941 - DNA, 120 bp, Artificial Sequence
  ENSG00000205786_30 (sequence is synthesized)
acttttgagtggttacatcctactgtgtttgtgccttcttttttcctttctcagtcttgccaagagacccattaatttgtcttttcagaaaaccaagatcctctccagcatttatctttg

SEQ ID NO: 928942 - DNA, 120 bp, Artificial Sequence
  ENSG00000205786_31 (sequence is synthesized)
tacaggagaaagaacctctcttctactgatcttgaacttgaaggctggtccctctcttctgggggccattgtgaagagaggctgcctaagcctgaagtcaacttaaaggaaggtgaaaca

SEQ ID NO: 928943 - DNA, 120 bp, Artificial Sequence
  ENSG00000205786_32 (sequence is synthesized)
gagaaaaaccacacattcaggcatttgatgtcctaaagcagatctactctggggatttttagatttgaaaaccaaatattctccttccttagcttaaagcaagtttgaagctgagatgga

SEQ ID NO: 928944 - DNA, 120 bp, Artificial Sequence
  ENSG00000259430_0 (sequence is synthesized)
agtgaagaagggaatgagggacggaaagagagagacagcgaagagaggagaaagctcttagcatatgaaactgcagctaggactaaaaccagaggaaggcacacagaatcttgactgctc

SEQ ID NO: 928945 - DNA, 120 bp, Artificial Sequence
  ENSG00000259430_1 (sequence is synthesized)
ggagcaggagacaggcaaggccagtgaaggagtgtggctccgataggattgacaactactaccttagatgatgaatcaagctcagaagggatccctctggatttccctgcggtaagagtt

SEQ ID NO: 928946 - DNA, 120 bp, Artificial Sequence
  ENSG00000259430_2 (sequence is synthesized)
tattagatggatgaataggatgggtgcgtgtcatgcaagcttgaatgatataaattggaaatcaataaatctctctttatattcaattttaccttgtacagtccatctttcatataacag

SEQ ID NO: 928947 - DNA, 120 bp, Artificial Sequence
  ENSG00000259430_3 (sequence is synthesized)
atgaacaaagtaatatacccaagatcacattgccagtgaatgggagagctgacgtttcaatctacacagaacctgtgctcttagctatctaaccgctttacttggaagtgatgtgagatt

SEQ ID NO: 928948 - DNA, 120 bp, Artificial Sequence
  ENSG00000259430_4 (sequence is synthesized)
ggaagtgaagaagggaatgagggacggaaagagagagacagcgaagagaggagaaagagtttcagaatttggcaaaagtctcaaggctcaagctggttgtctgaagcctttcaaaccccc

SEQ ID NO: 928949 - DNA, 120 bp, Artificial Sequence
  ENSG00000259430_5 (sequence is synthesized)
agttttatcaccacatatgagggaataagaagaggattccttcctaattgctagcttctgttagcagtagctgatgccatggcccctgctgccagctctcaatcttcacctgagccaggt

SEQ ID NO: 928950 - DNA, 120 bp, Artificial Sequence
  ENSG00000259430_6 (sequence is synthesized)
ggcacccctttgagaaatagggtactaccccttcacctccttcacctgccaatctgggcttcctctgtggaggtcccaacacccactggtctgtgtcctcttctcagaggtcccagcacc

SEQ ID NO: 928951 - DNA, 120 bp, Artificial Sequence
  ENSG00000259430_7 (sequence is synthesized)
aaccgcaccagccacaggactcctcttctcggtggtacaaccagcagcttccaggcccagccacatatccagagcttggggatcaggtatagagagccaatcccctgggaacccatgcat

SEQ ID NO: 928952 - DNA, 120 bp, Artificial Sequence
  ENSG00000259430_8 (sequence is synthesized)
tagtcccagggggcctctcctccaagcgcctacattctggaaaagcctcaagtttctacagtcatgatacctgggaaactcagtgctcccttttggatttttcttagcccttcaacacct

SEQ ID NO: 928953 - DNA, 120 bp, Artificial Sequence
  ENSG00000259430_9 (sequence is synthesized)
tgtttgaatagagtgtcattccctgctgagccctaactgatacgctgtgtttccagtgtccctcatccactagactcagtggtgtcaggaatggtgtggtattttgttataaatttaact

SEQ ID NO: 928954 - DNA, 120 bp, Artificial Sequence
  ENSG00000259430_10 (sequence is synthesized)
ccttagatggacacacagagagcctcgataaatatttttaatccatcaatgcaaggagtgtggttgtcagaagtcagctaaaagtccaagtttaaatctaagctccgccgttcacagctt

SEQ ID NO: 928955 - DNA, 120 bp, Artificial Sequence
  ENSG00000259430_11 (sequence is synthesized)
gggtgacctcagcttcttttttggaaatgaagttcatattttccgagcactttttctgtgccaggtgcttccaaatgtatctcgtttaatcctcacaacatacctcagaggaagacatca

SEQ ID NO: 928956 - DNA, 120 bp, Artificial Sequence
  ENSG00000259430_12 (sequence is synthesized)
tttttacaagtaaggaaatagaggctcagagagatgaagtggttgacccgggctgtctatcttgtaaatggtgggctgtgattcccacacgactggagtttctggagtcagaggctgcct

SEQ ID NO: 928957 - DNA, 120 bp, Artificial Sequence
  ENSG00000259430_13 (sequence is synthesized)
ggagtcaggggctgcctgactccagaaaccattttctgtgcatttcatgtagctccacctcaattgccttcctttcctcatctgcagactgattaaataaaatgtataatttggatgaaa

SEQ ID NO: 928958 - DNA, 120 bp, Artificial Sequence
  ENSG00000264750_0 (sequence is synthesized)
tttgagacacagtgatgtggccatggaaggaatttaaagaaacctcctggcaggcgccgctcggacaccgctgacaccactgtctggatcggcgaaccccaaagtcgaggaaccgccggt

SEQ ID NO: 928959 - DNA, 120 bp, Artificial Sequence
  ENSG00000276702_0 (sequence is synthesized)
cagaaactttagaaaacaagttgaaatatctactgtcaggaaaattgatcaatgtgataatatacataatggaaaatgctacagctttgaaaatgaacaaactatagctatatacatcaa

SEQ ID NO: 928960 - DNA, 120 bp, Artificial Sequence
  ENSG00000276702_1 (sequence is synthesized)
cataggtgagttcccaaacaatgctaaaaaaaattcaagtgacagtataatgtatatagtataattccacttatattaagttccaaatagtcaaaatagtcaaaatatatttagggacaa

SEQ ID NO: 928961 - DNA, 120 bp, Artificial Sequence
  ENSG00000276702_2 (sequence is synthesized)
actaatatcactgattgctaattatttaagaattaatattactaaccactaatgaacatcaaaaatgtagatagctgtgggttgggaagatataatcagggaggataatacaggggattt

SEQ ID NO: 928962 - DNA, 120 bp, Artificial Sequence
  ENSG00000276702_3 (sequence is synthesized)
ggggatttttaagctctcagtaatgttctatttttttaacctttttggtttataattatactgtaaaatgtacatatacattttatatgttcttatgtgtgcttaacaatataaaagtaa

SEQ ID NO: 928963 - DNA, 120 bp, Artificial Sequence
  ENSG00000276702_4 (sequence is synthesized)
aaaagaaagctcccatgacatacagttaactgaaaaaaagcacgttacaaaacatgaacatgtactatgatgccattgtgaaaaaaaattaaacattggtctatctaacattttaaaaaa

SEQ ID NO: 928964 - DNA, 120 bp, Artificial Sequence
  ENSG00000276707_0 (sequence is synthesized)
cgcccgcctgccaggcgcacacgcccgcggggtctgtctacggatccgggtccaggtgggagttggggagaggtctgcgtttcctttggggagccccagttctgcacgtcgacagccagt

SEQ ID NO: 928965 - DNA, 120 bp, Artificial Sequence
  ENSG00000276707_1 (sequence is synthesized)
gcgcggatcccagtcccacctcgaggccgatttggatcctatttcgtgtcccccttttccatccggtctccccagaaggagaatggttctcgaggctggaggaagggggtggggacttgc

SEQ ID NO: 928966 - DNA, 120 bp, Artificial Sequence
  ENSG00000276707_2 (sequence is synthesized)
cgcagaccgtgcgagaccccgctaccacacggccgcctcgttcatttcgggggggtgggacaggcggagagaaagatgacagcgagaaagagggaagatgtaaaaagtggaggaagtagg

SEQ ID NO: 928967 - DNA, 120 bp, Artificial Sequence
  ENSG00000276707_3 (sequence is synthesized)
agaggaggaatggagcacagaaagaagggaagagagagataaagagaggcagaattccggttaagcaggtgaggaggcagcaggagagagagcgcggcaccagggaagagttagggaggg

SEQ ID NO: 928968 - DNA, 120 bp, Artificial Sequence
  ENSG00000276704_0 (sequence is synthesized)
ttgacctaccacatctcaattcaaacaagtcacatttcaagtgctcagtagccgtatgtggccacaggctgccatattggacaacagaggtctaaggtgtatatgatttggggaaatgct

SEQ ID NO: 928969 - DNA, 120 bp, Artificial Sequence
  ENSG00000276704_1 (sequence is synthesized)
ttatttctctaagcttcagtttccttatctgtgaaatagagattagcatgcaccttccagagtccttgttagaattaaatgagataatgtattttaacattcccaaaacaataccagtac

SEQ ID NO: 928970 - DNA, 120 bp, Artificial Sequence
  ENSG00000276704_2 (sequence is synthesized)
acagaaattgctcaaaaaattctagctgtcattcttactttaataactttgtcatttatcttccttaaatgttacccttgatataaatgtaattttagaagaaataaatttgtaattgca

SEQ ID NO: 928971 - DNA, 120 bp, Artificial Sequence
  ENSG00000261801_0 (sequence is synthesized)
gaaatgagggagaaggtggatgaggggctccttccttttgtcctcagatgacccaagccaagtgcagaaggcgagcctcctcccaaagctcggctagtccctccaccaaagccaggatca

SEQ ID NO: 928972 - DNA, 120 bp, Artificial Sequence
  ENSG00000261801_1 (sequence is synthesized)
gagcccacacctgcctggccaacccctggcactgatgatgcctgggtgcgggttaagctgggaggagctcctgcctgcctggatgaagaggaggtcaagactttgtcccccactccgcaa

SEQ ID NO: 928973 - DNA, 120 bp, Artificial Sequence
  ENSG00000261801_2 (sequence is synthesized)
gataccctctctgttccggagcggtgggtccctcccctgttaggaccttgtctccctcaggactggacctggatcctgggcctgcagtcagattgccagtttcacttagaggtggaaatg

SEQ ID NO: 928974 - DNA, 66 bp, Artificial Sequence
  ENSG00000261801_3 (sequence is synthesized)
cctgcagtcagattgccagtttcacttagaggtggaaatgtcaacccactggttggaatgggaagg

SEQ ID NO: 928975 - DNA, 120 bp, Artificial Sequence
  ENSG00000261801_4 (sequence is synthesized)
cgtgagccaccgtgcccggccaaaaataacttttaaaaacatgagtatagcatacacacacacaaaagtccacaaatcctaggtgtaccacttgatgaatgatcccaacgtgagcacacc

SEQ ID NO: 928976 - DNA, 120 bp, Artificial Sequence
  ENSG00000261801_5 (sequence is synthesized)
tctggattaccacctggatcaagaaataggacatcacagcagctggcagcttccaaggagaagctctggaaagttctgcctgtctcagcacctggctggatcggaaacgagttttcttta

SEQ ID NO: 928977 - DNA, 120 bp, Artificial Sequence
  ENSG00000261801_6 (sequence is synthesized)
accagatttttaatgactgacttatgtggacaaatcataactgaatgaatcacctcctttgttgatttttttgggtactttatttgctattataaatgatgctgtaataagcacccttga

SEQ ID NO: 928978 - DNA, 120 bp, Artificial Sequence
  ENSG00000261801_7 (sequence is synthesized)
agaaatcttcatatctgcctctcctgtgtagcaggtcacagtgcctgggtttggttctagccctcatttgtgaactgtgtgactcaccatgccttttttctttctgtaagacaggaataa

SEQ ID NO: 928979 - DNA, 120 bp, Artificial Sequence
  ENSG00000261801_8 (sequence is synthesized)
tggtaagaatttaaatgggggtaatatggagcgcgtttagttcagagcctggtgcatacaagcactcaataagtactggcgattattagacctttagattaatttattagaagttggatt

SEQ ID NO: 928980 - DNA, 120 bp, Artificial Sequence
  ENSG00000261801_9 (sequence is synthesized)
tttttgaggctttggcacagaatacccagctggtcccagaaaggtggttcccatttacctgcccgaaggtaattcacccttactgatactgagtactgttttctaaaagaacattaaaaa

SEQ ID NO: 928981 - DNA, 120 bp, Artificial Sequence
  ENSG00000261801_10 (sequence is synthesized)
ttggataggttaaaaacaggtgaatacatttttttagttgcatttttttggttacccgtgagagtgaacatgttgccatgtgtttgctgacctcctaaatggtctatttgctcctacctt

SEQ ID NO: 928982 - DNA, 120 bp, Artificial Sequence
  ENSG00000261801_11 (sequence is synthesized)
tgtaccccaaaagtctgctctcaagatggtagccagaatgatcctttttgagacataagtcaaaatttcactcttctccttaaagctctgcaatggttctcaggttaaaagccaaagtcc

SEQ ID NO: 928983 - DNA, 120 bp, Artificial Sequence
  ENSG00000261801_12 (sequence is synthesized)
tgttcaaggcctccagggtcctcaccacttggtcccttgctctttctgttctagccaacttggccttctcctgcccctccgccgcaccatggcaatttcccctgctctgtgtggtcaact

SEQ ID NO: 928984 - DNA, 120 bp, Artificial Sequence
  ENSG00000261801_13 (sequence is synthesized)
acctgaatctgttcaaagctttgctcaaatgtctccttcctgatgagacctccccagcccctgagctccccatgcctcactcctgatcgccttacttaacccttctttttcttttttgcc

SEQ ID NO: 928985 - DNA, 120 bp, Artificial Sequence
  ENSG00000261801_14 (sequence is synthesized)
agtagtacttatcaccgtctaaaatacttcataatttacttgtttattgtttgcccctctccaatagaatgtaagctccttggggcagggacctttgtcctttgtcttgttcactgctgt

SEQ ID NO: 928986 - DNA, 120 bp, Artificial Sequence
  ENSG00000261801_15 (sequence is synthesized)
gtcccatgtgtaaacttgtctggcacagaagaggtgctcgataaatatttgttgagtgaatgaatggtaaattttctgttcatattctttgactattttctattgtaatgttcatctttt

SEQ ID NO: 928987 - DNA, 120 bp, Artificial Sequence
  ENSG00000261801_16 (sequence is synthesized)
tagtattggtttataagatgtatatttagcaccttttcatatatcactctttgtcacatattatgcaactaatttgtcatttccatcaatttttaaaatactttcttgatgcttcatttt

SEQ ID NO: 928988 - DNA, 120 bp, Artificial Sequence
  ENSG00000261801_17 (sequence is synthesized)
taagctgtcagattattaatcttttctttatggtcttggactttattgttgcataaccgctgccttcaccaggaacatataaattttcaattaaatgttcttctgagattttatgatttc

SEQ ID NO: 928989 - DNA, 120 bp, Artificial Sequence
  ENSG00000261801_18 (sequence is synthesized)
actttttatattaaactcttcattttgtcttcatgtgtggtgagaggtaagaacataactttaaagcaaattaaccaactatccccaaatgaattataaataaattaatcattttccaat

SEQ ID NO: 928990 - DNA, 120 bp, Artificial Sequence
  ENSG00000261801_19 (sequence is synthesized)
gcctctgaggaagggaatcgagcagggagtaggaggggacctctggggactcgggcctggtgccacggcttaccaatggaagattaggccagatggctcctgagagtgctttgggagatt

SEQ ID NO: 928991 - DNA, 120 bp, Artificial Sequence
  ENSG00000261801_20 (sequence is synthesized)
ctctgttccttctgggaatggcagggataggagggggtcccagaagtttgaacgctttggcatccaagaaatcacactccaaatactgctcttctggcctcccctgggctgccttctcca

SEQ ID NO: 928992 - DNA, 120 bp, Artificial Sequence
  ENSG00000261801_21 (sequence is synthesized)
ggaaaacccatgtggcagagaaccgagggtggtggctggccaacagcaagccaggagctgaggcccacagtccaacaactggtgaggaaccacatgctgccagcagccatgtgagggaac

SEQ ID NO: 928993 - DNA, 120 bp, Artificial Sequence
  ENSG00000261801_22 (sequence is synthesized)
agtccctggagttcccagccaagccacagacctgcctctgaggaagggaatcgagcagggagtaggaggggacctctggggactcgggcctggagctcctgcctgcctggatgaagagga

SEQ ID NO: 928994 - DNA, 120 bp, Artificial Sequence
  ENSG00000261801_23 (sequence is synthesized)
gctaaaaacgcctggcttccctgggcctgctgcacctgctctggctaggttggagagggctgcagggaggaccgcagtcagcagagggcgccaaagcctctcaacacaagcatggcccag

SEQ ID NO: 928995 - DNA, 120 bp, Artificial Sequence
  ENSG00000261801_24 (sequence is synthesized)
gcctggcccagaaggagagcgctgagagccaggactggcgggctacgtgcgccctgtggattcccccatttcccatgcttcatccagccatgggcctgcagtgcactcacaaatgtgcat

SEQ ID NO: 928996 - DNA, 120 bp, Artificial Sequence
  ENSG00000261801_25 (sequence is synthesized)
ataccctcctgtgtgtgtgttacactcatcaaattgtctctgaatttgcttggcttcatgtgttcctgtgtgtgtttatgtgtgtgtgtggtgtgtctggtgtatctggttccccaggaa

SEQ ID NO: 928997 - DNA, 120 bp, Artificial Sequence
  ENSG00000261801_26 (sequence is synthesized)
ggcccggggggcccggagcagtttccagtggccaggggtacgcgcggccggaggggcgccggggccgtactcaccgcggccgttctggttgggccggtacacgctgcccacgctgaggcg

SEQ ID NO: 928998 - DNA, 120 bp, Artificial Sequence
  ENSG00000261801_27 (sequence is synthesized)
cccacagtccaacaactgagactgggtcccaccatattgcctgggctggcctcggactcttgaccccaagtgatcctctggcctcagcctcccaagcagctggatttacaggcaggcacc

SEQ ID NO: 928999 - DNA, 120 bp, Artificial Sequence
  ENSG00000261801_28 (sequence is synthesized)
tttgacagccccacagtcagggtcagggcacagggacagatactgtgtctataacaatccataacactgattttgttcatctcaataaatgtgagaatgaaataaaaattaatgtagaat

SEQ ID NO: 929000 - DNA, 120 bp, Artificial Sequence
  ENSG00000261801_29 (sequence is synthesized)
ggcggcccgtacgcctcgggcggcgggttggcgtagggcgggtaccagcccaggcgtgggtctccgccatgggcctgcgccgcctcgggaccggggtcagggtgccacggcttaccaatg

SEQ ID NO: 929001 - DNA, 120 bp, Artificial Sequence
  ENSG00000261801_30 (sequence is synthesized)
tcaacccactggttggaatgggaaggtagggtgtggggtcggggagtaccttcatttctatctgcccaggaggccagccgcttcctgcatagcatttccttcctgcagtatgggaaggac

SEQ ID NO: 929002 - DNA, 120 bp, Artificial Sequence
  ENSG00000261801_31 (sequence is synthesized)
gggcctcatccctggcccaagaatcctgctccacagccttcttgtgtccctgtaggaggagaaacacctggcaacttaaattttttaaaataacttttttttttttttgagacggagtct

SEQ ID NO: 929003 - DNA, 120 bp, Artificial Sequence
  ENSG00000261801_32 (sequence is synthesized)
cgttggcctatcacatcgttcttacattggtatttgttgccctattttaatgattgtaactttttaataagggttaatgactgagaatacaagtcccattgttttgttttattattttta

SEQ ID NO: 929004 - DNA, 76 bp, Artificial Sequence
  ENSG00000261801_33 (sequence is synthesized)
cattgttttgttttattatttttatttagtagcactatctcggctcattgcaacctctgcctccctggttcaagtg

SEQ ID NO: 929005 - DNA, 120 bp, Artificial Sequence
  ENSG00000261801_34 (sequence is synthesized)
aaagtgctgggattacaggcgtgactcaccacgcctggcccatttttttcttttgaggtgttctttgtggcaattcatatattctttaagataaattctaaactttttttttctgccgag

SEQ ID NO: 929006 - DNA, 120 bp, Artificial Sequence
  ENSG00000261801_35 (sequence is synthesized)
ttttctgccgagataaactagcagacaaatcccactggacattgcaattggattagttttgtagattaatttagtgataatcaacttctttgcaccattgagtgcttctgtccgggaacg

SEQ ID NO: 929007 - DNA, 120 bp, Artificial Sequence
  ENSG00000261801_36 (sequence is synthesized)
tggcatatctttctattattaaggtcttttttattataggtctttagggaagctttattttatagatgaatgtagtgtgtttggtgcttattttcataaaataaagcaatgacatctgtg

SEQ ID NO: 929008 - DNA, 120 bp, Artificial Sequence
  ENSG00000261801_37 (sequence is synthesized)
gcaggcagcttctgaaatggctcccaatgatccttaccttctgatagtcacccccttggagaatccctttcctttgtgtgtgggctggatctagtgacttgcttctcataaatagaatat

SEQ ID NO: 929009 - DNA, 120 bp, Artificial Sequence
  ENSG00000261801_38 (sequence is synthesized)
ggcaaaaaatgatgggttgttacttctgagattaggttataagaggcgaatttctgttttgctgtaattttgtctctctaaccctcttgctttcctgtgctcatgaaaccagctgctgtg

SEQ ID NO: 929010 - DNA, 120 bp, Artificial Sequence
  ENSG00000251329_0 (sequence is synthesized)
gactacttaaacaaacaaaaccagatcaccacctgtaacaacaccaaacaaacaaaaccaagaactaggaaaatgaggaaaaaatatctgactgaatgaaaattattacctgaagcaata

SEQ ID NO: 929011 - DNA, 120 bp, Artificial Sequence
  ENSG00000251329_1 (sequence is synthesized)
cagaaggagtacttaatgttcaaataaagtcattgaccaaagtatggaacagaaaatataaatgcatatttttaaagcaaacatttcatctcctaaagacaagataagacatggaatgag

SEQ ID NO: 929012 - DNA, 120 bp, Artificial Sequence
  ENSG00000251329_2 (sequence is synthesized)
aaggagaaataaattaatcccaccatccaacagtgaaagaaaaaacacagaacatgaggaggaccagaaagcaatgtgaaaaagagttgaaaggagtcactgctgagctattttagattc

SEQ ID NO: 929013 - DNA, 120 bp, Artificial Sequence
  ENSG00000251329_3 (sequence is synthesized)
tatccagccatgaacctatcagcgatcatgcctaactattgcataccccattagacaacctaatgtgaatgtaggaagcctattcatctaaaggacatggaaccgagtagatgtaactga

SEQ ID NO: 929014 - DNA, 120 bp, Artificial Sequence
  ENSG00000251329_4 (sequence is synthesized)
tacttcactattgacctatagcctattaagatctaccatgagtcatatacatttgacaccgtggttttcatttcataatacatatcttcactaattttgtctatcattttgtcaaagggc

SEQ ID NO: 929015 - DNA, 120 bp, Artificial Sequence
  ENSG00000251329_5 (sequence is synthesized)
taaaactatagtaatgagtacattcttaatgagtttttctttaactaccacaatttgtatctaaattttgtctcatcttatgttctaaaattgtcacagcaaagtgatcaaggaagctag

SEQ ID NO: 929016 - DNA, 120 bp, Artificial Sequence
  ENSG00000251329_6 (sequence is synthesized)
agattttacatatgttcttctcaataagatggctgtatctcttctatatcaagtaaataaatccttgatacatgaatgaagtaatggttcagtaaacaaattaaatatgatacgacttta

SEQ ID NO: 929017 - DNA, 120 bp, Artificial Sequence
  ENSG00000261800_0 (sequence is synthesized)
catgcgcggtgcacgagctgatttctcaaggcacagtgactcccaccgtcgctcgagtgatgggtccatgaggctgggcgaagcaggagcccactgtggcagtgcgtcggtatcgaggct

SEQ ID NO: 929018 - DNA, 120 bp, Artificial Sequence
  ENSG00000261800_1 (sequence is synthesized)
ccagcctgacctctcccaggggtcaacaggatggtctccggacgccaggagtcgcggagggccgaccaggtttgtgaaggccggttcgacctggggagctgcgttggtcccacagggatt

SEQ ID NO: 929019 - DNA, 120 bp, Artificial Sequence
  ENSG00000261800_2 (sequence is synthesized)
gaaacctccccatcctgagcgtcctactttcgaggatcaagacaaccacaccacacccaaggaccaaagcctcccaggagcttattgtcctgcaggagtgcgtgcagaccaacatcaaag

SEQ ID NO: 929020 - DNA, 120 bp, Artificial Sequence
  ENSG00000261800_3 (sequence is synthesized)
aagatggttctaactcctcccacctcccaccttctcctctcattaagaaatgtagccccaccgcgacagtcttggagaagaagccgggaacgggacgcggcaaggatctctgtgacttaa

SEQ ID NO: 929021 - DNA, 120 bp, Artificial Sequence
  ENSG00000261800_4 (sequence is synthesized)
tggcctctgctctgtactccctcttgctctatctgccataggagcctagaggcttggtctggcttaaagtcttcaacaaagaacactttggagtccgtgagggagaaatttcgtggagat

SEQ ID NO: 929022 - DNA, 120 bp, Artificial Sequence
  ENSG00000261800_5 (sequence is synthesized)
ccgtttcacagttgtttccctctccaaacctatttctggtcgattaggcaggtgccatgatcctctgggcttccatacctgtcttggacagggaagctcccttggtctccatgtcccacc

SEQ ID NO: 929023 - DNA, 120 bp, Artificial Sequence
  ENSG00000261800_6 (sequence is synthesized)
tgatggctgcgtggtttgtttcagtctaggatgagcgagtctcgctgtgtcacccaggccggagtgcagtggtgcgatgcaccatctcggctctcggcacgctgcaaccttcgcaacctc

SEQ ID NO: 929024 - DNA, 86 bp, Artificial Sequence
  ENSG00000261800_7 (sequence is synthesized)
accatctcggctctcggcacgctgcaaccttcgcaacctctgcctcccgggttcagtcgattctcttgactcagcctcctgcgatt

SEQ ID NO: 929025 - DNA, 87 bp, Artificial Sequence
  ENSG00000261800_8 (sequence is synthesized)
gtagagacgggggtttcaccatgttgggcaggcttgtctcgaacgcctgacctcgtgaacgaagtgttgggattacaggcgtgagcc

SEQ ID NO: 929026 - DNA, 120 bp, Artificial Sequence
  ENSG00000251326_0 (sequence is synthesized)
gaatgggacaggtgcttataaaagaggcatgagatagcttttttgccacttctttcatatgagaatacagttcaaaagtactatctgtgaggaatggtccctcaccaggcattgaatctt

SEQ ID NO: 929027 - DNA, 120 bp, Artificial Sequence
  ENSG00000251326_1 (sequence is synthesized)
ccagtaacttgattttggactttccaatctccagaactgtgagaaatacatttccttggtttacaatataatcgatgtttagtattttgttaaagcagactgaacaggctaggatatatt

SEQ ID NO: 929028 - DNA, 120 bp, Artificial Sequence
  ENSG00000251326_2 (sequence is synthesized)
acccttaatataatcattccaacaagagaagaagccagcagaattggtagagcgtataggcagtgggggttcagcaaccatgtgaatcaaagttaaaagttcaaccaggaactataaaag

SEQ ID NO: 929029 - DNA, 120 bp, Artificial Sequence
  ENSG00000251326_3 (sequence is synthesized)
ccagccttggcaacataacaagaccccatctctagaaaaagaaaaaaaagacaaggagacttcagtcaagactcttgcaatatggatcaagactgtttcaataaaagagagcaattatat

SEQ ID NO: 929030 - DNA, 120 bp, Artificial Sequence
  ENSG00000251326_4 (sequence is synthesized)
tcaacttcactgaaagaaaagctaacaagtgaggctgcttcagtttcatggatacatccagaagataaaaatctcctggagctgcgtaaaaagactattacttacagcacagcaggcagc

SEQ ID NO: 929031 - DNA, 120 bp, Artificial Sequence
  ENSG00000251326_5 (sequence is synthesized)
agttgttttatgtttacatatattttttgtgtctcccaagactcacaggagcaatgcagaagcaggcacaaggggatgctgcccatacaatgtgtttgtgtcacagctaagggattccaa

SEQ ID NO: 929032 - DNA, 120 bp, Artificial Sequence
  ENSG00000251326_6 (sequence is synthesized)
atctaggaagcccatattttgtaaaggaggctgccaacctggcttaccttagccatagactttttttttttaattctggatagacaataaatctcctctgtttcccagagaaagacacca

SEQ ID NO: 929033 - DNA, 120 bp, Artificial Sequence
  ENSG00000251325_0 (sequence is synthesized)
ctatgaagactgctcagaattccaaaatgaggtacttctgaagccggatgccagtttcttcagcaacgtgcctgaaatggaaagcctcaagtcctctctttgcttgttttgcctgatcca

SEQ ID NO: 929034 - DNA, 120 bp, Artificial Sequence
  ENSG00000251325_1 (sequence is synthesized)
gatggcctccttcatctgtctggatccttcattcttctttcctcagggatattttagaatcagcttccacaaagatgaacatttctttaccgtgagacttgtactaacctacagggacct

SEQ ID NO: 929035 - DNA, 120 bp, Artificial Sequence
  ENSG00000251325_2 (sequence is synthesized)
acttcctaatcaaccgagacaagaattctgtcacatttagagaaggctgaaggctttctctgttaacttcccagatgtttccaggatcaggaaaaaaaaaaggaaaagaaactaagaatt

SEQ ID NO: 929036 - DNA, 120 bp, Artificial Sequence
  ENSG00000251325_3 (sequence is synthesized)
ctaaattgttttaacctgaaggccaaaatactgatactttagcctcttttggctcattactggaagatgtttccaagcatattcttaagaatgacataaaatattttcaatttgcttcat

SEQ ID NO: 929037 - DNA, 120 bp, Artificial Sequence
  ENSG00000251325_4 (sequence is synthesized)
tttcatggtcagaattattgtgtaagttttggggtctaagaattagaactgatgtcacatgcagagtttgtcaagtgcttgttaaattaaaaagaaaataataaaataatattctgtaca

SEQ ID NO: 929038 - DNA, 120 bp, Artificial Sequence
  ENSG00000251324_0 (sequence is synthesized)
aagcaaaatttccagttcctagagatcctcacctcctctggattttcacatcctccagctggtccagcatgagctctggaggctaaggaaaggcaatgcagtagcagaaacaagctgggc

SEQ ID NO: 929039 - DNA, 120 bp, Artificial Sequence
  ENSG00000251324_1 (sequence is synthesized)
ctgtggggtttcagctcctgtatcactgggttaggttttgagaatgctgaggtgaagatgacatggagcctgccttcaaatagatcacactttagcagaggagatagtgtgacttgtaga

SEQ ID NO: 929040 - DNA, 120 bp, Artificial Sequence
  ENSG00000251324_2 (sequence is synthesized)
cagctgcatccctagagttactttagagagccctgtcgttcccaagcagagagatttgtctgcacagccagcctctgggtgaagtacaaatgcaaaataaataaatgccttcttctagaa

SEQ ID NO: 929041 - DNA, 120 bp, Artificial Sequence
  ENSG00000251323_0 (sequence is synthesized)
ggtgacactccaaaatgcagctaggatttccgcattttcacgtgttagtgttgaaatcatttttacttcaggaaaccaagggttggacaatggcttccagactttctcctttcgttatgc

SEQ ID NO: 929042 - DNA, 120 bp, Artificial Sequence
  ENSG00000251323_1 (sequence is synthesized)
tccttcagcgccttatgcaaataccggttgtcttatgctgccattcgtctcctctgccagaatgtgaggtccgcgacagcagggataagaatgcattcatttttatatctgcagtgcctt

SEQ ID NO: 929043 - DNA, 120 bp, Artificial Sequence
  ENSG00000251323_2 (sequence is synthesized)
ggagagtgtctgacacatagtgggcactcatttagaaaccaccaattgaatcattaaggtgaccaaaaacagggtgggggaaatacgtccatcagacaacagggaaatatttcttaaaaa

SEQ ID NO: 929044 - DNA, 120 bp, Artificial Sequence
  ENSG00000251323_3 (sequence is synthesized)
aaaaatttcccaaaactagcttttccctccttatgtgtctgaaatatctcataaaattttaaactatccctttcagcacaaatctgcctggagctgtttcctgaacacaggaccaaaagg

SEQ ID NO: 929045 - DNA, 120 bp, Artificial Sequence
  ENSG00000251323_4 (sequence is synthesized)
caggaatcaaaagtagtaatgagtttagttatctgtctgttactgaaggtgacttctagggcatcctcctggcattgcttctggaatacagtgacttagacttattcggaagaacatctc

SEQ ID NO: 929046 - DNA, 120 bp, Artificial Sequence
  ENSG00000251323_5 (sequence is synthesized)
gacactggaccttggagatgcttgcagaccacagctgtttgccctgttgaagcaactgcttgagagctcctccggaagatacatctgggtgtcactaagatacattttgggtttagtttt

SEQ ID NO: 929047 - DNA, 120 bp, Artificial Sequence
  ENSG00000251323_6 (sequence is synthesized)
gtttctcaacacaaatgtaggagggaaacaaaccctgttctgctggggtgcctggtgggagctgaaaaccttgtgattctccagcagtcaaaagtcatctcaattaccaaagagaaggga

SEQ ID NO: 929048 - DNA, 120 bp, Artificial Sequence
  ENSG00000251323_7 (sequence is synthesized)
acctgagatcttttgtttcagttttctataggaaggatgtaagaggaaggaaattcaaatctgttgagtattgctcttgccagcaaaaagaagtggaactgactagtgagatggtggtga

SEQ ID NO: 929049 - DNA, 120 bp, Artificial Sequence
  ENSG00000251323_8 (sequence is synthesized)
gattttctttggtggctgtgtgcagtggtatcaacccaggagagtagactgttcaattgtgaagaattttgcaagatggttgttaaagtagaacatcgttaaaattaagttgtaataaaa

SEQ ID NO: 929050 - DNA, 120 bp, Artificial Sequence
  ENSG00000251323_9 (sequence is synthesized)
aaagggaaataagcattggaaaagatgtggacagattggaaccctcatacattgctgatgggaatgtaaaatggtgtagccactgtggaaaaaaggtcagcagttccttaaaaagttaaa

SEQ ID NO: 929051 - DNA, 120 bp, Artificial Sequence
  ENSG00000251323_10 (sequence is synthesized)
cagtgtcaccatatgactcagcattttcactcctagataaatacgtagattgaaaacgtatgtccacacaaaaacttgtacaggaatgatcgcaacagcattattcataatagccaaaaa

SEQ ID NO: 929052 - DNA, 120 bp, Artificial Sequence
  ENSG00000251323_11 (sequence is synthesized)
gcctgtgcatagtaaatgctcagaaaagaaaaaacaacaaagtttccagctcttactctagattgacactggaccttggagatgcttgcaggtaatttgactgcacctactttccttttt

SEQ ID NO: 929053 - DNA, 120 bp, Artificial Sequence
  ENSG00000251323_12 (sequence is synthesized)
ttctggcttttgtttcagccactaaatgtaatgccacatgattgttgacccaacaataatccagttaaaaaacagtcttcagagttactacatcatcagaattaaccctgattacatcaa

SEQ ID NO: 929054 - DNA, 120 bp, Artificial Sequence
  ENSG00000251323_13 (sequence is synthesized)
agcctgtggtggttgccgaagaactttaattacagtgtcagagtgttcagggacagtcccaactcccttcatgtgaggattgcagaaatgggcttggatcgtatacagacagcgttatga

SEQ ID NO: 929055 - DNA, 120 bp, Artificial Sequence
  ENSG00000251323_14 (sequence is synthesized)
gcggtatataaagaactgtcaagtgcttcaacatggatgaaacttgaaaacattatacaaagcgaaagaggttagacacacaggtcacatattgtatgaatatggttatgtgaaatgtct

SEQ ID NO: 929056 - DNA, 120 bp, Artificial Sequence
  ENSG00000251323_15 (sequence is synthesized)
agaattggcaaatccatagagatgaaaagtaggttagcggttgccagctgatgggattgggggaatggagagttgctaatggatatggtgtttcttttggggtaatgaaaatgttctgga

SEQ ID NO: 929057 - DNA, 120 bp, Artificial Sequence
  ENSG00000251323_16 (sequence is synthesized)
attagatagctgtggtggttgtcaaagttgatgaatatattagaaaccatgaattataaactttaacatggtgacttttgtgatacgtgaatatcttaattaaaaattaagttatataaa

SEQ ID NO: 929058 - DNA, 120 bp, Artificial Sequence
  ENSG00000251321_0 (sequence is synthesized)
ctggttttgaaaatggagaaaaagagtgaggaactgagaaacatggatggccttgggaacgtggaaaagggtcactgaaatgggacgacatgaactcaaggaggctatttatgaccatgt

SEQ ID NO: 929059 - DNA, 120 bp, Artificial Sequence
  ENSG00000251321_1 (sequence is synthesized)
aagaaagcttatctggagtgaaagtaaatgagaccaacagagatgagagacccggagaaatcctggttacactgcttgaatcctacacatactaacaaaaggccacatgaggacacagtg

SEQ ID NO: 929060 - DNA, 120 bp, Artificial Sequence
  ENSG00000251321_2 (sequence is synthesized)
agaagctggaagtctacaacccagaagagagccctcaacagaacctaaccatgctggtaccctgatctcagacatccagcctccagaagagtgaaaaaatataattcttatttctaagca

SEQ ID NO: 929061 - DNA, 120 bp, Artificial Sequence
  ENSG00000251321_3 (sequence is synthesized)
caaaaagaaacttgactaagagacaatataagaatttaatgtgtaattaagaaagaactctccaccacggggaatgtgaaaggtatatgagtcccttttcacgatgcgatgtcatgtctt

SEQ ID NO: 929062 - DNA, 120 bp, Artificial Sequence
  ENSG00000251321_4 (sequence is synthesized)
ttaaataagccatactttatgttcaataaaaagagaataagcaggattcgcaagagaacacaatccctttttaactgctgggaagatacttttagtcattaatgactggacgacaatttg

SEQ ID NO: 929063 - DNA, 120 bp, Artificial Sequence
  ENSG00000251321_5 (sequence is synthesized)
ggacacatatatggatattggccggtttgtgatgatgtgattgggcctctaagtgacaacattgttccctgtatagagtgagtggcaagtgcatttataaaattggccatcatggctgtt

SEQ ID NO: 929064 - DNA, 120 bp, Artificial Sequence
  ENSG00000251321_6 (sequence is synthesized)
aaatttatgagtctagaagtgtgcctctcaaacaagtatttgagaggttatcatgaagaaaaacaaaattaaaattattctgctgagctctcaaaggcagaactattgaatcaaaattat

SEQ ID NO: 929065 - DNA, 120 bp, Artificial Sequence
  ENSG00000251321_7 (sequence is synthesized)
aggaaggaaggttcaaaccaacaataagaatgcctctcttgcattcctcatcactagaagtttctgataagatttttagaaaaatttagacagtattcttgaattgagcagggggataac

SEQ ID NO: 929066 - DNA, 120 bp, Artificial Sequence
  ENSG00000251321_8 (sequence is synthesized)
taaacttcaattattctagcctccaagacctacacataactgtgcaatgtgcaaattattcaatagtaacatagaattctgaataattagcattttctcatggtttgatatttgtataaa

SEQ ID NO: 929067 - DNA, 120 bp, Artificial Sequence
  ENSG00000251321_9 (sequence is synthesized)
gcaatcttagcagtctgaataactagaatacttcaaagcaatatgttttattgctttatatttaaagaaaccatgtcagacatttaaaatgaatggctgctatcaggaaaatggatctca

SEQ ID NO: 929068 - DNA, 120 bp, Artificial Sequence
  ENSG00000251321_10 (sequence is synthesized)
agacacaagaaataaatcacaatgacttccttatttgtggaaattcttcttgtactagaaaggaaaagtagaagtatgggaaaatgtcttccagaaaattacattttcccaaagtttatt

SEQ ID NO: 929069 - DNA, 120 bp, Artificial Sequence
  ENSG00000251321_11 (sequence is synthesized)
ttaaattttaataatttaatcaaccatctgattctgatttcaagtgtcacagaagttcattttattataaacaacaacaaaaaaactttgtagtcttgtaaacactggtgacagagaata

SEQ ID NO: 929070 - DNA, 120 bp, Artificial Sequence
  ENSG00000251321_12 (sequence is synthesized)
acaccactaaccatgctgagcagaaaacaggagccaagtaagggaaaaagattctttatgtcactcatcaatttaaaagtgtttttcaccccaggaccatcctgaagccaaaactgggga

SEQ ID NO: 929071 - DNA, 120 bp, Artificial Sequence
  ENSG00000251321_13 (sequence is synthesized)
aacatttactacttttacaaacaaaaatttatattccatcccttgcatgatgtgtgtgtctccgacatttggtttctgtcttaagtgtctaaagaaaggccttatttagagcaaaataca

SEQ ID NO: 929072 - DNA, 120 bp, Artificial Sequence
  ENSG00000251321_14 (sequence is synthesized)
tttttgtgggcattgatgtgaatttcaggtctgggttatcaatgacctaaattgagaaaatagaggggctgtgtggacaaggagagagaagagagcatacagctgccctatgccgttgct

SEQ ID NO: 929073 - DNA, 120 bp, Artificial Sequence
  ENSG00000251321_15 (sequence is synthesized)
ctgttcacagtaaggattgagccattctaatccccttggattttttatctaccaaaacagcttgggcccatcagcaaattgcagtggcatatggtccaggtttacgagtaatctggcaca

SEQ ID NO: 929074 - DNA, 120 bp, Artificial Sequence
  ENSG00000251321_16 (sequence is synthesized)
tgattaaggcaagggggatgtcatctttcagcaaatactgaaaatattgtagaagaatttggtagagtttttaaattcaaactgataaaattgtaactattaaatacttccccaaatcaa

SEQ ID NO: 929075 - DNA, 120 bp, Artificial Sequence
  ENSG00000251320_0 (sequence is synthesized)
gataggcagtacaaccagacaggtaagtacaatttatttgctacattattttttattttagaaagcaaccagatgaagagctcgcaggctattgaggcagattaaagacagcagagggcg

SEQ ID NO: 929076 - DNA, 120 bp, Artificial Sequence
  ENSG00000251320_1 (sequence is synthesized)
ctcattattagcaaaatcaaggaaaacatttgtgtatatatgcaaggtagataatgagaaatatcagcaccttctattgcattaaatttttcactggggattcacaactaaatggcaact

SEQ ID NO: 929077 - DNA, 120 bp, Artificial Sequence
  ENSG00000251320_2 (sequence is synthesized)
ctgatactgacaatgaccataataacagtgatagctattggtcattcattgtttcctccatatattttcgattcagcaaataattattgaatattagttgcaggatctttgctggacagg

SEQ ID NO: 929078 - DNA, 120 bp, Artificial Sequence
  ENSG00000251320_3 (sequence is synthesized)
aagcatacagtaataaattgtcatgacccatatctccatagatttcacagtgtaaagggagagatagaaaccacacaaataaacatgggtaaaaggataattataagttatgataataac

SEQ ID NO: 929079 - DNA, 120 bp, Artificial Sequence
  ENSG00000227851_0 (sequence is synthesized)
gagcccagcaactctgtccctgggtttctccttttctaggtggccaacagtttgttggggcagatttgagtccctgatgtatccctagctgcaccatggaaaacagcacatccattttgt

SEQ ID NO: 929080 - DNA, 120 bp, Artificial Sequence
  ENSG00000227851_1 (sequence is synthesized)
gattgtggaagcttgaaacaaagcaggaagaattgtttaggcacagcacacccaatgagaatggaaccaaccaacacttctagttctttttcaacctgcgtaccagtgtctagggctaaa

SEQ ID NO: 929081 - DNA, 120 bp, Artificial Sequence
  ENSG00000227851_2 (sequence is synthesized)
gaagatgaggacagccaaccattccaaggatagaagcctgaattaaccaagataattggcaaagggtcacagaaaatgtccttttaaaaataataatgcttactctttttcttaactgtc

SEQ ID NO: 929082 - DNA, 120 bp, Artificial Sequence
  ENSG00000250716_0 (sequence is synthesized)
ggggctcttgctgggcctgcggaggagagcaggtgcattttcaagagaggagatacccataaaaaattcaggaaaaagagtttcactcttgtcttccaggctagagtgcaatggggcaac

SEQ ID NO: 929083 - DNA, 120 bp, Artificial Sequence
  ENSG00000250716_1 (sequence is synthesized)
tgcaacctccacctcccaggctttcgtacattttgctatgagttgtcttgcggttttcaatgtggttttctatatggtccattgatcttcttggagtgtcttctctggatacaactacat

SEQ ID NO: 929084 - DNA, 120 bp, Artificial Sequence
  ENSG00000250716_2 (sequence is synthesized)
accctgatatatcagcgaggactgtccagtctgctcataggaagttgtgtgactccaaagcctggacctcacagttcattcatcaatctctgccatacttgtggactttcatcccaccat

SEQ ID NO: 929085 - DNA, 120 bp, Artificial Sequence
  ENSG00000250716_3 (sequence is synthesized)
taactgtgtttttattctgtgtagcttggaaccgccttttctatattgtggtccaaaatgtttctccgtctataaaattgagaaaataatatgtctcatctcatttgttccccttttgtc

SEQ ID NO: 929086 - DNA, 120 bp, Artificial Sequence
  ENSG00000250716_4 (sequence is synthesized)
cccaaggatcatagtcctaatatacctgtagttcaatatctgaagaggattctttttcatatattttttacaattttctagttttaaatttgggcatgttggatttttcagggtgtgcct

SEQ ID NO: 929087 - DNA, 120 bp, Artificial Sequence
  ENSG00000250716_5 (sequence is synthesized)
aacaagatttttgctaaaacaaaagtatcagtgctgttcattggatttgaatataatacaggctcttataacataatatttgaagtgtccaagatacaatccaaatctacttgacataaa

SEQ ID NO: 929088 - DNA, 120 bp, Artificial Sequence
  ENSG00000227857_0 (sequence is synthesized)
gtagaagatactggaagatcaactctaatttgtggctgccttcccagcagtctctacttcagcatatctgggagccagaagcactcaagtttgataactcaaaagacagaacaatcagtc

SEQ ID NO: 929089 - DNA, 120 bp, Artificial Sequence
  ENSG00000227857_1 (sequence is synthesized)
ctattccttccctgttgatgtcagtgtgtgaaattctaaattatgtcatgggtgtatacgttcaaaagcaatatattttcaaataaacaaaaaatataattggccatcacatataccaaa

SEQ ID NO: 929090 - DNA, 70 bp, Artificial Sequence
  ENSG00000280776_0 (sequence is synthesized)
cctgtctcagagagagagagagagagattgagaagagagaagtgcaagatcacacttctgcagctctttt

SEQ ID NO: 929091 - DNA, 120 bp, Artificial Sequence
  ENSG00000280776_1 (sequence is synthesized)
agaagagagaagtgcaagatcacacttctgcagctctttttttctccttctggcacatttttcatttttaagaccccacgtcctccatatatgctttcctggcccacccatttccctcct

SEQ ID NO: 929092 - DNA, 120 bp, Artificial Sequence
  ENSG00000280776_2 (sequence is synthesized)
ccccttacacagatggagaacttcctttctggtgttctctcagcactcagcacagattgctagtgcttttatgtgctgagcctttcccttcaacctggactgaaagaggatggcaatctc

SEQ ID NO: 929093 - DNA, 120 bp, Artificial Sequence
  ENSG00000280776_3 (sequence is synthesized)
gctgaagctgtttctttttcttcacaacatataggaaagtgttgcccctttttggagaaagtaacaacctccaccaacactacttgaatcagtactgaacgaatgtcaggtccttgggaa

SEQ ID NO: 929094 - DNA, 120 bp, Artificial Sequence
  ENSG00000280776_4 (sequence is synthesized)
attctccaatcctgtctcctgtcctggccgggtgtgctcctggtgcaccattcgactaagtcaatttgaactatttgggagacctttgtacctacgtttccttctgcttggaagatcctt

SEQ ID NO: 929095 - DNA, 120 bp, Artificial Sequence
  ENSG00000280776_5 (sequence is synthesized)
tctgttttgtcagctcttacttccatgttgtggaaaactgatctgacctcctagtcctgaatcaggggccataaagaaaattgatgaggacaactggcctcccagtatgtggattcagtt

SEQ ID NO: 929096 - DNA, 120 bp, Artificial Sequence
  ENSG00000280776_6 (sequence is synthesized)
tccatatgtcaatttaccaactcccactggtagtctgaagagatatggctactggagaacagaaaatcaccagtattaataaaagcaattttaagtgtttaccttttagtatttgaatag

SEQ ID NO: 929097 - DNA, 120 bp, Artificial Sequence
  ENSG00000280776_7 (sequence is synthesized)
ctttgttaaagagacgtactcaagaatactatgaagagactcttattgtactccttacctggagataattgtgatgccagaaattcaaatttatattcaacaatatggtttttcaaccat

SEQ ID NO: 929098 - DNA, 120 bp, Artificial Sequence
  ENSG00000280776_8 (sequence is synthesized)
caatattataaacatctaggcagtgtctattgtttgcgcatttgccatcctctaaaatgagattattctaagcataaattatacttcatcattcaagattataaacatttataataatca

SEQ ID NO: 929099 - DNA, 120 bp, Artificial Sequence
  ENSG00000280776_9 (sequence is synthesized)
taatattcacagacatttccctgctctcaaatcactagagctaataggcaaagtagatacagctacaaacagtgggagaaaatatttctggctgacctacaaatagctgtgcaataatgt

SEQ ID NO: 929100 - DNA, 120 bp, Artificial Sequence
  ENSG00000280776_10 (sequence is synthesized)
agagaggaaaatatagtctcacttacagtgtctgaaattgagtttccctctttaaaggacaaagtaattttcaaaaatatttgagtattattctgtgtaaaaaatctctgttttaactgg

SEQ ID NO: 929101 - DNA, 120 bp, Artificial Sequence
  ENSG00000280776_11 (sequence is synthesized)
cttattgaattgtatttctttattgtgtttgtattcacttttccatttgtgggtggaatttattataattaccagttttatactgaatgaaacaaaaatctcatagatttaataaaactt

SEQ ID NO: 929102 - DNA, 120 bp, Artificial Sequence
  ENSG00000280776_12 (sequence is synthesized)
taaattccttgtcattaataataaaatgtatatgctttctctaataagtccatactttattgtttaaaacctgtttttcctctttctcaagcacatggattgttaatttaaattctgaaa

SEQ ID NO: 929103 - DNA, 120 bp, Artificial Sequence
  ENSG00000280776_13 (sequence is synthesized)
taaagccaattaatccataaacatggactgtggataatgtcgatattacatgtaaatttctcagtgtgtgtttcgtggacccaatagcatcagcattagctggggacttacgaggtggcc

SEQ ID NO: 929104 - DNA, 120 bp, Artificial Sequence
  ENSG00000280776_14 (sequence is synthesized)
ctctgtcttaaaaataataataaaaatcaaataaaataaaatttgcaaatgtatcccaccccaggcctattgaaacaaaaagtctgttggtacggtttagcaatatgtctttcaacaagc

SEQ ID NO: 929105 - DNA, 120 bp, Artificial Sequence
  ENSG00000280776_15 (sequence is synthesized)
ccttctgggcaactctaatgcatgctgaagtttgagaaccactggtctgtggctttccaggatactcaggtgctgtattatcttattgcctacagggaatacctttgttcaagtgtggaa

SEQ ID NO: 929106 - DNA, 120 bp, Artificial Sequence
  ENSG00000280776_16 (sequence is synthesized)
gtatgcacacagtgtgtaaggaggtgggttgaatctttctacaaatgttttaagtaagtcacctgcctcatatatgtggactagattatttagatatttggatccatactgacccttaac

SEQ ID NO: 929107 - DNA, 120 bp, Artificial Sequence
  ENSG00000280776_17 (sequence is synthesized)
aattttttttctctccttagactcaattttaaatatttgttgcaatctaaaaatggaggccttatcttaatagtttatttaattttgcaagatatactataggacaggaagtatgcctga

SEQ ID NO: 929108 - DNA, 120 bp, Artificial Sequence
  ENSG00000280776_18 (sequence is synthesized)
ttcttttacataaatttgatatcagtgatgcttcaaaacagttcttcacgttaactatcattatttttgtagctttaatgcgttaaaacttactcagtataaaagccacctacttaaaat

SEQ ID NO: 929109 - DNA, 120 bp, Artificial Sequence
  ENSG00000280776_19 (sequence is synthesized)
gtacaactcaaaaatttccagtaaattaataaagttgtgaagccatgaccacagtgcaattttaacacatttccattgtgccaaaaagatccctcatgctcaattccaaccagttcccac

SEQ ID NO: 929110 - DNA, 120 bp, Artificial Sequence
  ENSG00000280776_20 (sequence is synthesized)
tgccacccccagtatcagacacgacaatctgctgtctctacatttcaggacatttagtgtaaatacaattatacaatatgtggtctttgtgtctggcttctttcacttattatgtttttg

SEQ ID NO: 929111 - DNA, 120 bp, Artificial Sequence
  ENSG00000280776_21 (sequence is synthesized)
aagtttatccatgtagcttgtatcaagcttttgttccttcttttttgttgaataacattttatttatccattaattaatgtacagacatttgggatgttttcagttttaggttcttatga

SEQ ID NO: 929112 - DNA, 120 bp, Artificial Sequence
  ENSG00000280776_22 (sequence is synthesized)
ataatgtatctatgaatatttacatacaattctgtaagaatacataatttttaatttgtttgaatagtagagctgttgagatatatcataagtttatgtctaacttcataagaaattgcc

SEQ ID NO: 929113 - DNA, 120 bp, Artificial Sequence
  ENSG00000280776_23 (sequence is synthesized)
aaaccattttccaaggtggctgtacattctcaccagcaatgtatatatgtttcaatttctccacattgtcttcaacactttctatagtctatcatttgattatagccattctatggatat

SEQ ID NO: 929114 - DNA, 120 bp, Artificial Sequence
  ENSG00000280776_24 (sequence is synthesized)
aaagttatcatggtggctttaatttgcattttcctaatgactaatggtaatgaacatttcataggttcattagtcatttgcttatacctacttaaatatttagcctatttttactcggga

SEQ ID NO: 929115 - DNA, 77 bp, Artificial Sequence
  ENSG00000280776_25 (sequence is synthesized)
cttatacctacttaaatatttagcctatttttactcgggaggcggagcttgcagagagcggagatcgggccactgcc

SEQ ID NO: 929116 - DNA, 120 bp, Artificial Sequence
  ENSG00000280776_26 (sequence is synthesized)
gggttgttgtttttctcattatatagttctataagttatttatgcagcttggataaatgttcattatcagatataatttttacaaatattttctatcagattgtgttatttttaattttc

SEQ ID NO: 929117 - DNA, 120 bp, Artificial Sequence
  ENSG00000280776_27 (sequence is synthesized)
tctttagaagcaccagagttcttaattttgataaagtgtaatttaaccatgaccattcttttatagattttgattttagtgtgtccaaaaactgttggctaaccccaaatcatgaagatt

SEQ ID NO: 929118 - DNA, 120 bp, Artificial Sequence
  ENSG00000280776_28 (sequence is synthesized)
tcccttcctgttttcttctggaaagtttatagtttgggtgcttatatttggatctatgatttaatttgacttatttttgtatatgctgccaggtgacagtctatttgctttctgtgtgtc

SEQ ID NO: 929119 - DNA, 120 bp, Artificial Sequence
  ENSG00000280776_29 (sequence is synthesized)
taattcttttgtaatcttctagtcttgttttattatttcttgtgggttaagtagaatttttctagtgtactatttttaattcctttgatgttttcttgtttcattgttttgaatagtttt

SEQ ID NO: 929120 - DNA, 120 bp, Artificial Sequence
  ENSG00000280776_30 (sequence is synthesized)
tatcctttttaaaagttatttttaatagaaataaaattgtatatacttatcatgtacagtatgttgttttttgaaagatgtatatattgtggatatgtatacaatggctaaatcgagcta

SEQ ID NO: 929121 - DNA, 120 bp, Artificial Sequence
  ENSG00000280776_31 (sequence is synthesized)
acaatggctaaatcgagctaattaacataggtgttacctcacatatcactttttgtggtaagaatatttaaaactcctcactgcattttttcaagaatacaatacactgttattaactat

SEQ ID NO: 929122 - DNA, 120 bp, Artificial Sequence
  ENSG00000280776_32 (sequence is synthesized)
tgtcaccacattttacaacaaatctcttcaattgattttttctaactgaaattttatattcacttggccaacatctccccaaccacacccacctccccagctcctggtaatcatcattcc

SEQ ID NO: 929123 - DNA, 82 bp, Artificial Sequence
  ENSG00000280776_33 (sequence is synthesized)
aaccacacccacctccccagctcctggtaatcatcattccccctctccttcgataagttcagctcttgtaggtttcacatac

SEQ ID NO: 929124 - DNA, 120 bp, Artificial Sequence
  ENSG00000280776_34 (sequence is synthesized)
tttcataaatgaaaaaatttccttttaagaaaaagtaaaatactattctaacattgtatttatgtcacattttctttataaattcactttttggtgtacacctaggttggttaacattat

SEQ ID NO: 929125 - DNA, 120 bp, Artificial Sequence
  ENSG00000225563_0 (sequence is synthesized)
aaagatcacgatgctgaaatgactcagaacagtgcctggagtggaagagctgctgggaaaataataactgctatttctacatcagttatgccagttctttttgacctaagaaactccagc

SEQ ID NO: 929126 - DNA, 120 bp, Artificial Sequence
  ENSG00000225563_1 (sequence is synthesized)
tccttgacagactgtggagcacacctaagccaccttgcttgccatagggtttggctccatgaccttgatgtgagttcatagatttgtttgcagttgtgaaaattaaatgagagagcgaga

SEQ ID NO: 929127 - DNA, 120 bp, Artificial Sequence
  ENSG00000225563_2 (sequence is synthesized)
ggttgttatgggagtggaactggtgtctttataagaagaggaagagagacctgagctagaatgctcagcctttgtgccatgtgatcatgtgatgccctgtgcagccttgcggctctgcag

SEQ ID NO: 929128 - DNA, 120 bp, Artificial Sequence
  ENSG00000225563_3 (sequence is synthesized)
aggccccatcagcaagaagcctctcaccagatgactctcctcaaccagcttctagaactgactgcttgggagtccgtggacacctggttaaggattcctatggacagatcaattaaccca

SEQ ID NO: 929129 - DNA, 120 bp, Artificial Sequence
  ENSG00000225563_4 (sequence is synthesized)
agggctccaggagatgcagatcaaagaccgccacacaagaaagaggccacacagataaagagcccaggacctgctgtcagacctccccagattcagattcttaggcctgccccttatagg

SEQ ID NO: 929130 - DNA, 120 bp, Artificial Sequence
  ENSG00000225563_5 (sequence is synthesized)
ccgtaacatggacacagagtagagagcccatttatctcaactggattcttctcagtggacttcgagcttcttatcagaaaaacactttgatgacagcgcttagtgcttaacagcttaaga

SEQ ID NO: 929131 - DNA, 120 bp, Artificial Sequence
  ENSG00000225563_6 (sequence is synthesized)
gcagttcaaacatgcgccagaggcttgctgaggaggcccgccctccagattctgcaaatagatacactggggtgtgacattcttaaccctgtctttaatacaactgccacatcccagcgt

SEQ ID NO: 929132 - DNA, 120 bp, Artificial Sequence
  ENSG00000185904_0 (sequence is synthesized)
ttttgattctgatactggtcacttgtgttctttcatcttttttccttaatcagttttgcctgcactctccctggatgctggaggctggaggcagtgacgcagcaacagcgcgaggcgact

SEQ ID NO: 929133 - DNA, 120 bp, Artificial Sequence
  ENSG00000185904_1 (sequence is synthesized)
ttggagcggcctcatatagcgacctcgccttccgctgcgcgtcctcccagagcccaagaagcccggaacctgtggcatccatctctgaaaggagaagacggcaacccagccgaggcacta

SEQ ID NO: 929134 - DNA, 120 bp, Artificial Sequence
  ENSG00000185904_2 (sequence is synthesized)
ctgggttggggtctccacgaccgagctggtctcatcaagtggcgtccaacaaggggctcaaacccgggttgaggggttgctggagcgacggagaacgtggaactacactggaggacacca

SEQ ID NO: 929135 - DNA, 120 bp, Artificial Sequence
  ENSG00000185904_3 (sequence is synthesized)
gagtactcttaagcaatcccttgcactggccgtctacatggccaattcaacccactcgatttaacacagttgaagttggtaaagcctctgaagtatatcaaagcagtgatattttgcatc

SEQ ID NO: 929136 - DNA, 120 bp, Artificial Sequence
  ENSG00000185904_4 (sequence is synthesized)
atgaaggactcgatggacaatctgggactattcaaccaattgtaacttctgtacctgtaaatttatggggaagagatttattacagcaatggggagcacaaatgttaattccagaacaat

SEQ ID NO: 929137 - DNA, 120 bp, Artificial Sequence
  ENSG00000185904_5 (sequence is synthesized)
tatatagctctcagagtcagcatatgatgcaagagatggtgtatgtgcctggcatgggattaagaaaaaatttacaagggttaaagaaaccccttcaagtgaaaggacagaattctcatc

SEQ ID NO: 929138 - DNA, 120 bp, Artificial Sequence
  ENSG00000185904_6 (sequence is synthesized)
agagttaggatatcatttttgatggaggccattgttaagcctccagaacctatgcctttaaaatggttaacagataagccagcttggttagaaaaatggcctctgagtaaagaaaaactg

SEQ ID NO: 929139 - DNA, 120 bp, Artificial Sequence
  ENSG00000185904_7 (sequence is synthesized)
gaacaattagaaaaaggacacatagttccaacattttccccctggaattctccagtccttgttattaagaaaaaatcacataaatggagaatgttggcagatcttagagccgttaattca

SEQ ID NO: 929140 - DNA, 120 bp, Artificial Sequence
  ENSG00000185904_8 (sequence is synthesized)
gttattaagaaaaaatcacataaatggagaatgttggcagatcttagagccgttaattcagttatacaacctactggggcattgcagcccaggttgccttctcctgctatgattccaaaa

SEQ ID NO: 929141 - DNA, 120 bp, Artificial Sequence
  ENSG00000185904_9 (sequence is synthesized)
aagactgtttcattactaactccttagctgagcaagactgtgaatggtttgcatttataattcctgcagtaaacaacacgcagcctgctaagcattttcactggaaagtgttgccacaag

SEQ ID NO: 929142 - DNA, 120 bp, Artificial Sequence
  ENSG00000185904_10 (sequence is synthesized)
taggacaagcaattgaacttactcataaaagatttgtcacagtgttaaattattcattatatggacaatattctttgtgctgcccccactcgggaaatattactccaatgttatgatcac

SEQ ID NO: 929143 - DNA, 84 bp, Artificial Sequence
  ENSG00000185904_11 (sequence is synthesized)
tactccaatgttatgatcacttgcaaaacccgatttctcctgccagtttaattgtctacttagggaccttagtaaatgacacta

SEQ ID NO: 929144 - DNA, 120 bp, Artificial Sequence
  ENSG00000185904_12 (sequence is synthesized)
accatacgtaggcctcaattgaaaactttgagtgactttcaaaaattactaggggacattaattggacacgacctgctctaggcattcctatctatgccatgagtaatctattttctatc

SEQ ID NO: 929145 - DNA, 120 bp, Artificial Sequence
  ENSG00000185904_13 (sequence is synthesized)
cttacaggaaatcctagtctcactagccctcagcaattaacaacagagactgaggcagagatacagctgattgagaagcaagtgcataaggctcaaataaatagaatagatccagaaaag

SEQ ID NO: 929146 - DNA, 120 bp, Artificial Sequence
  ENSG00000185904_14 (sequence is synthesized)
actttagacttattgatttttccaactcagcattcacctactggtggtgttgtccaagagcaggacttggtagaatggctttttcttccacatagtaattcatggactctaactccttat

SEQ ID NO: 929147 - DNA, 120 bp, Artificial Sequence
  ENSG00000185904_15 (sequence is synthesized)
ttagatcaaattgctactctgataggaaatgggagaactcaaattgttaaattgcatggatatgaccctggaaaaattattgtccctcttacaaaggcacaaatacaacaggcctttata

SEQ ID NO: 929148 - DNA, 120 bp, Artificial Sequence
  ENSG00000185904_16 (sequence is synthesized)
aaatacaacaggcctttataaatactcttaattggcaaacccatttagctgatttcatgggtgttcttcataatcactttccgaaaacaaagttatttcaatttttgaaattaactaatt

SEQ ID NO: 929149 - DNA, 120 bp, Artificial Sequence
  ENSG00000185904_17 (sequence is synthesized)
aaatttaaaccaattgaatgttctgaaaatgtttttacaggtaggtctagtaatggtaaagcttcttattccagatcaaaaaataaagttttccagacatcctatacttcagctcaaaaa

SEQ ID NO: 929150 - DNA, 120 bp, Artificial Sequence
  ENSG00000185904_18 (sequence is synthesized)
tttcaccctgctccaggcagcgtggtctgtatggctccgccctgggcaggaggagaaagaagagggccaggcaccacgtgcctgcactctccctggatgctggaggctgctccgccgtgg

SEQ ID NO: 929151 - DNA, 120 bp, Artificial Sequence
  ENSG00000185904_19 (sequence is synthesized)
gcaggaggagaaggaagagaactgggtgccgcctgcctgcactctctccggatgctggaggctggaggcagtgaggcagcaacagcgcgagggcgaggcgactttggagctgcctcatgc

SEQ ID NO: 929152 - DNA, 120 bp, Artificial Sequence
  ENSG00000185904_20 (sequence is synthesized)
agcgacctcgccttccgctgcgcctcctcccagaacccaagaagcctggaacctgtggcgtccagccctgaaaggaggagacggcaacccagccgcgcttttgcctgcactctccctgga

SEQ ID NO: 929153 - DNA, 120 bp, Artificial Sequence
  ENSG00000185904_21 (sequence is synthesized)
tgagccagatactgaggaagagattttgggaagaacccaaggaccccccagttgcagccatgtcaagactgacaataaggaagacatcagtcccagcaagcaacattcatcgggcacagc

SEQ ID NO: 929154 - DNA, 120 bp, Artificial Sequence
  ENSG00000185904_22 (sequence is synthesized)
cacccatgtggggccagatcaagaagttgacacagatggcggaagaaaatctgaagaaagcggatgaccagctacaatgagtaatctaatgtctgcagatgtggatcccgaatcctgcga

SEQ ID NO: 929155 - DNA, 120 bp, Artificial Sequence
  ENSG00000185904_23 (sequence is synthesized)
gaagtagcccaccatgacgaagctgcctttgcttttatcgctttgcaaaaacagaaaaggggacatgctgggaacaggccctaagcctgtcataaacaggccttaaactgaccatgaaca

SEQ ID NO: 929156 - DNA, 120 bp, Artificial Sequence
  ENSG00000185904_24 (sequence is synthesized)
cacccggagcggaaaactgctcaaaccacaaacaacagcatgagtggcctgagccttaacaacatgtttttgctgcagataatcggccagagactgtttctctactcctctctaagtatg

SEQ ID NO: 929157 - DNA, 79 bp, Artificial Sequence
  ENSG00000185904_25 (sequence is synthesized)
aatcggccagagactgtttctctactcctctctaagtatgctttgtttttcgtaaggaatgcttttagctaatctgtaa

SEQ ID NO: 929158 - DNA, 120 bp, Artificial Sequence
  ENSG00000185904_26 (sequence is synthesized)
gctgttttccccctgattcccactttgcactttatttctgtgtgtttgtcttcattcctctagcaccactgggttggggtctccttgaccaagctggtctcggcacatatgcatgtatgc

SEQ ID NO: 929159 - DNA, 120 bp, Artificial Sequence
  ENSG00000185904_27 (sequence is synthesized)
ccaggtcctgaaatcagccttgtggagcctgtgggtaggaaaagtcaaccctctgtgcatgtaggcctggaacctgaccaatactgtattttcctaccacgtttggtttcaaatgtggaa

SEQ ID NO: 929160 - DNA, 120 bp, Artificial Sequence
  ENSG00000185904_28 (sequence is synthesized)
actgcccatacggacctactgcatttgtttttaaaaatcctctgtaagtggacctgcacagttcaggcccagattgttccaggatcaaccctacagtagaaatcaagtatctttttcatt

SEQ ID NO: 929161 - DNA, 120 bp, Artificial Sequence
  ENSG00000185904_29 (sequence is synthesized)
atctttttcattgtctcttgggatctgccttttcaccaataaaatatgagggctgttgggagcaggcccccccaaatctggccataaactgtccccaaaactggccataaacaaaatctc

SEQ ID NO: 929162 - DNA, 81 bp, Artificial Sequence
  ENSG00000185904_30 (sequence is synthesized)
ctggccataaacaaaatctctgcagcactataacatgttcataatggccataacgcccaagttggaaggttgtggatttac

SEQ ID NO: 929163 - DNA, 74 bp, Artificial Sequence
  ENSG00000185904_31 (sequence is synthesized)
catgctcctgctgcagttaactagcccaacatattcctttaattcagtccatcccttcgtttcccataagggat

SEQ ID NO: 929164 - DNA, 120 bp, Artificial Sequence
  ENSG00000185904_32 (sequence is synthesized)
agggagccctgatcaggacccggtgagagggcgctggagcccgggagcggcaggagccttgagcggcagcccgggaagaggatggggtcaccttctgccccaggtcccccactgccagga

SEQ ID NO: 929165 - DNA, 120 bp, Artificial Sequence
  ENSG00000185904_33 (sequence is synthesized)
cttattgggcatatattccttttccaccagtttcatggccagtgacatggttagaccccccagtggaggtatacactaatgatagcttttggatacctggttctacagatgatagaggcc

SEQ ID NO: 929166 - DNA, 120 bp, Artificial Sequence
  ENSG00000185904_34 (sequence is synthesized)
catctcacccccaaaaggagggaacaattatgaatatttcgttgggatttgagcatttaactacttgcttgggaaaagccaacaggtgcttacctcccagtcatcaatcttggctggcaa

SEQ ID NO: 929167 - DNA, 120 bp, Artificial Sequence
  ENSG00000185904_35 (sequence is synthesized)
tagtgcctgaaggtaacatctctgtggcacaattacatatgctttctgaccttagtatttattacaatgattatgcccctgtaaccaaagtttaccgccctcaaaaacctatctgtatag

SEQ ID NO: 929168 - DNA, 120 bp, Artificial Sequence
  ENSG00000185904_36 (sequence is synthesized)
tggattgaacatgttcagaaaaaaatgaagatatttacttgggaagattgtattgcagggcaagcaaaggtgttgtgtaatgattcatatggagtcactattgattggtcccctaaaggg

SEQ ID NO: 929169 - DNA, 120 bp, Artificial Sequence
  ENSG00000185904_37 (sequence is synthesized)
gcatttataaggctcacttctcaatctgtaggtaatggtcaccctgcatctaaagaaaatgatcagatggtagacactataaaaaatacaacaaaagttcctattatttggacatatggt

SEQ ID NO: 929170 - DNA, 120 bp, Artificial Sequence
  ENSG00000185904_38 (sequence is synthesized)
gatatggtggaacctcgaccccaaatgatacgacctgctgtaggagctaaacataaggaattgtggaaaatattaatggcactgaaaaagataaaagatttgggaagggaaatatactaa

SEQ ID NO: 929171 - DNA, 120 bp, Artificial Sequence
  ENSG00000185904_39 (sequence is synthesized)
gccatcccaatataatcctaattacatgttagaattggctcacaatgattcagtctggatacatagttgtgtctgtcctccctttctgcttgtagtgagtgatttaaaacttgatctccc

SEQ ID NO: 929172 - DNA, 120 bp, Artificial Sequence
  ENSG00000185904_40 (sequence is synthesized)
taatcatcatgtgactgtcaagaatgtagattgttttcttgtgtgaattcttccttgtataatactgatcattctatcttagtggtaagagcccgagaaggagtatggatacctgtaaag

SEQ ID NO: 929173 - DNA, 120 bp, Artificial Sequence
  ENSG00000185904_41 (sequence is synthesized)
tgtgcatattattactgaaattcttcaaaagattttgaggcactctcagggtttcattgctactttaatcattatgggattgattgctgtcacagctactgccacggtagctggagttgc

SEQ ID NO: 929174 - DNA, 120 bp, Artificial Sequence
  ENSG00000185904_42 (sequence is synthesized)
tttaccaacacagtacaaacagcagattatgtaaataattggcagaaaaattctactttgctgtggaattcccaaactaatatacaccagaaattaaccaatcagattaatgatctccga

SEQ ID NO: 929175 - DNA, 120 bp, Artificial Sequence
  ENSG00000185904_43 (sequence is synthesized)
caaactatcgtatggttgggagatcatgtagttagtttaaaatatagaatgcagttaacaatgtgattgaaatacttctgatttttgcattactcctcacctgtataatgaaacagagca

SEQ ID NO: 929176 - DNA, 120 bp, Artificial Sequence
  ENSG00000185904_44 (sequence is synthesized)
tgagtgggaaagagttaagagacatttaaaggatcatactggaaatttatctttggatattgcaaaactgaaggaacacatatttcaagcctctcaggcacatctgacattaatgacagg

SEQ ID NO: 929177 - DNA, 120 bp, Artificial Sequence
  ENSG00000185904_45 (sequence is synthesized)
aactaaagtgcttgaaggagctgcagatggattagcagctattcacccatacaagtggatcaagacacttggagactttgtgatttcaatgatgattgtgcctttaatctgtattgtttg

SEQ ID NO: 929178 - DNA, 120 bp, Artificial Sequence
  ENSG00000185904_46 (sequence is synthesized)
aacccagccgcgcgtgagtccgggagtctgggataccggcggcagaggaaggacaggcaggagtctcggcctctcggggagcgacgtgccgggaaagttttgcctgcactctccctggat

SEQ ID NO: 929179 - DNA, 120 bp, Artificial Sequence
  ENSG00000185904_47 (sequence is synthesized)
gccgagccaggacccctctgatgcacaggcgtctcaggagcccgtttctttcttgaatccggggcccagtgcggcttgaacctagcccccgacctcctcctcgccctctcagagtccgct

SEQ ID NO: 929180 - DNA, 120 bp, Artificial Sequence
  ENSG00000185904_48 (sequence is synthesized)
ggggtgggcgctgaaggagcccgggtcggagaggagccctccccttctctcctgcgtggaagccctgcagcctccgtttcttttgggactggggtccggggccttctgcctgacccgggg

SEQ ID NO: 929181 - DNA, 120 bp, Artificial Sequence
  ENSG00000185904_49 (sequence is synthesized)
caaaattctctgattatcttgttataatactgttacgtaggctgttgttttgattctgatactggtctcttgtgttctttaatcttttttccttaatcagttttgctagtggtttattaa

SEQ ID NO: 929182 - DNA, 120 bp, Artificial Sequence
  ENSG00000185904_50 (sequence is synthesized)
tatgtttttttttccatttcattgatgtttgttatctttattattgccttcatcctgtattctttgcacttgatttttctttcttgattcttgagaaaaaagttgaggtgccgggcacgt

SEQ ID NO: 929183 - DNA, 120 bp, Artificial Sequence
  ENSG00000185904_51 (sequence is synthesized)
accgaacaaaacttcttctcaagaaaaaaaaaagaagttgaggtgattgattttcagtgtttctggactcctgccctgcagagatcctcttgctgtaacctgtttcatgtgaggtagagt

SEQ ID NO: 929184 - DNA, 120 bp, Artificial Sequence
  ENSG00000185904_52 (sequence is synthesized)
ttagaaaatatttattggcctctgtgccttacttttcttcatatactcttcttattttgttgatttatctttagggatttttttccttatgttaaattgaaggacttattgttaaaatct

SEQ ID NO: 929185 - DNA, 120 bp, Artificial Sequence
  ENSG00000185904_53 (sequence is synthesized)
gtaagttagccctttattggcttatttttgtcataggttcttgttctctagtttgatttttgttgtttcatttctttgtgttcatagttgtatatagtaatctggttgataatgatcttg

SEQ ID NO: 929186 - DNA, 120 bp, Artificial Sequence
  ENSG00000185904_54 (sequence is synthesized)
tatgcagtagctttgcttaatttatttattaattgtaacactttatgtcatgttaggctgtgctgagtgcttctgggagcagccaggtttccatgaactcccagtttactctaaatactc

SEQ ID NO: 929187 - DNA, 120 bp, Artificial Sequence
  ENSG00000185904_55 (sequence is synthesized)
tagcagcccacatgtgcacacactggataatggtcatgcatgtagagcaatgatgctggggaggcaccgactctgtcattctgtgaatccaccgcacaatcacaaacattagcattaaaa

SEQ ID NO: 929188 - DNA, 120 bp, Artificial Sequence
  ENSG00000185904_56 (sequence is synthesized)
gtgttcttattttatgctatttttgtgccagttttagtaagttgggttcagcatctgttgcgatctctgttgtcagacttttgatcatatgtatttcacaaaattctctgattatcttgt

SEQ ID NO: 929189 - DNA, 120 bp, Artificial Sequence
  ENSG00000185904_57 (sequence is synthesized)
gagcttcaagttcctcatactcagccactgacctcagggttcttggtacacaggcatacatgtgcagacacacatacaggcacacatatacacatgaatgcacatatgtgcacacatatt

SEQ ID NO: 929190 - DNA, 120 bp, Artificial Sequence
  ENSG00000185904_58 (sequence is synthesized)
tacaggcacatgcagatgtgcacacacagacctgggtgagaaagtcagatgtacatggaacagcccctgctttgtaagctgtctggctttgtagggagaaagaggtgaaacaacacactt

SEQ ID NO: 929191 - DNA, 120 bp, Artificial Sequence
  ENSG00000185904_59 (sequence is synthesized)
gttatcttggaagaggagatgaagggagctgagctggatatgtccagtggggagaaagccaggagccactccaccgaaaatcgaggtctccacatggatgatacccacaaaacattggca

SEQ ID NO: 929192 - DNA, 120 bp, Artificial Sequence
  ENSG00000185904_60 (sequence is synthesized)
ggaaggacacagccagcaccacatcagtggtgactttcatgagtgtcaactgtggccatccaaattaaaggcctggcaatgggataagttagcaactgaactttctgtatgttaccttat

SEQ ID NO: 929193 - DNA, 120 bp, Artificial Sequence
  ENSG00000185904_61 (sequence is synthesized)
taactttctgtatattagcttattaactttctgcaatcaaatgctgattaagcattttctgagccaaaagctttgtgtaatttgaatctagtgaaaaaatgttatgcgtttaacactata

SEQ ID NO: 929194 - DNA, 120 bp, Artificial Sequence
  ENSG00000225564_0 (sequence is synthesized)
tatagagctatgttacattgaatggcaaaagtgactttgtagaggtgtcgtttatccggatgctgcatgattaagaccaccatactcttatcaagcatacaggtgttaatgtctatttta

SEQ ID NO: 929195 - DNA, 120 bp, Artificial Sequence
  ENSG00000225564_1 (sequence is synthesized)
aagaggagagaactcaagaagttctgtagaaactgctttcttcatcatatctcaaaggatttgctgaggatttcagaggtgccacgagttgagagaagacttcggacatttcacttaatg

SEQ ID NO: 929196 - DNA, 120 bp, Artificial Sequence
  ENSG00000225564_2 (sequence is synthesized)
ctgaaaattcactctactgccactactcaggacttctgatgggcatgaaaatccaagcctgctttatgatattaacctctgaatttcataaaccgcttaaaactttagaatgtccagaaa

SEQ ID NO: 929197 - DNA, 120 bp, Artificial Sequence
  ENSG00000225564_3 (sequence is synthesized)
acactggtagaatacggacacatgagacaaggccagaaaggaagtcaataaaatgtgattactaagcaaattaccaccagagaagcagaaggaaatccctcttcaatattttgagagaca

SEQ ID NO: 929198 - DNA, 89 bp, Artificial Sequence
  ENSG00000225564_4 (sequence is synthesized)
agaagcagaaggaaatccctcttcaatattttgagagacagtaaagaacattccctggagttaggacaaatgaagagcaagaagtttcg

SEQ ID NO: 929199 - DNA, 120 bp, Artificial Sequence
  ENSG00000225564_5 (sequence is synthesized)
ctgcctcagcctcctgagtaactggggttacagagtgaatagacaacctacagaatgggagaaaatacttgcaagctatgtatccaacaaaggactaatatcgagaatttacaaggaact

SEQ ID NO: 929200 - DNA, 120 bp, Artificial Sequence
  ENSG00000225564_6 (sequence is synthesized)
ttacaaggaactcaaacaaaactcaacaagagtaaaacaaccccaataaaaaggaaagtgaacacatttggaaatattggctcagcattgcagctataccctttagacaggaaacacact

SEQ ID NO: 929201 - DNA, 75 bp, Artificial Sequence
  ENSG00000225564_7 (sequence is synthesized)
ctcagcattgcagctataccctttagacaggaaacacactttccagttctccttgacagagaggctgaagctgct

SEQ ID NO: 929202 - DNA, 120 bp, Artificial Sequence
  ENSG00000225564_8 (sequence is synthesized)
atgtctggacaaaaggaataagtggactacatgcagaggcagagtgaggctggaaaatacatcctgccatgggtatacaacccaagctatctatgtagattttttttgtttttttgagac

SEQ ID NO: 929203 - DNA, 120 bp, Artificial Sequence
  ENSG00000225564_9 (sequence is synthesized)
gcaggcatgagccaccacacctggcctatgtagatttttttgttgccttttgattttttttttttttgcttattctgattctaattgtacaaatcaataataaaaatgttaaaaacagac

SEQ ID NO: 929204 - DNA, 120 bp, Artificial Sequence
  ENSG00000225564_10 (sequence is synthesized)
aaacagacttaaaatattcatgactatgcaaatgattcaaatatagttatttaaagtttctttcttttttaaattgggacatggtcttgctcttcaacccaaggctgggtggcataggtg

SEQ ID NO: 929205 - DNA, 120 bp, Artificial Sequence
  ENSG00000225564_11 (sequence is synthesized)
gctcttcaacccaaggctgggtggcataggtgaaagagcaagaccaaggcatgaccaaggctcactgcagccttgacctcctgatctcgttatcctcccacttcagcctcccaagtagct

SEQ ID NO: 929206 - DNA, 120 bp, Artificial Sequence
  ENSG00000225564_12 (sequence is synthesized)
ttgcccaggctggtcttgaattcctgagttcaagtgatccttgcttctcaggctccctaagtgctaagattacgggtgtgggtccccagccaaaacaatcttcctagggaagccctcaca

SEQ ID NO: 929207 - DNA, 120 bp, Artificial Sequence
  ENSG00000225564_13 (sequence is synthesized)
tcttcctagggaagccctcacattttcaagggttttacctttagtacctccataaattcgtatcaagcaacaaaatgtactgtcaaggaacaaaaaatataaagggaccttaaatgcata

SEQ ID NO: 929208 - DNA, 120 bp, Artificial Sequence
  ENSG00000225564_14 (sequence is synthesized)
tttctaagaccaagaagtcagtctgaaatggctacatactatataatcctatatgactcctatatgaaagatatgacattctggaaaaggcagaacaatagagtaaaaagatcaatggtt

SEQ ID NO: 929209 - DNA, 120 bp, Artificial Sequence
  ENSG00000225564_15 (sequence is synthesized)
gcttgggtttggtatgcatgtgtgttagagggcagggtggctggtgagaggaatacataggtgaagcacaagtgatttttatggcactgcaactgttctgcatgataccataataataat

SEQ ID NO: 929210 - DNA, 120 bp, Artificial Sequence
  ENSG00000225564_16 (sequence is synthesized)
aaatgacatttttcatttgtcaaaacacatagaatgtacaagagaaagagtagaacttaatgtaaattatgaactgtagttactattgatatgtaaatattggtgttctaattgtatcaa

SEQ ID NO: 929211 - DNA, 120 bp, Artificial Sequence
  ENSG00000225564_17 (sequence is synthesized)
atgcaccacaccagtgaaagacattagtaataggagaaatgtgtacgagtttgggaggttatatggcaatttctgtactatctgctcttgtttttattgtaattttaaaattgtgctaaa

SEQ ID NO: 929212 - DNA, 120 bp, Artificial Sequence
  ENSG00000225564_18 (sequence is synthesized)
ataaagtttattagtttaattttcaagagattaagaatgtatgtttaaatgtaataatatatatgcagagctttatgtctatccatatacttcaagccaaatctacttttggtgagttcg

SEQ ID NO: 929213 - DNA, 120 bp, Artificial Sequence
  ENSG00000225564_19 (sequence is synthesized)
ttcgtctgtttataaaacacacagaaataggaagaaaaataattgacaaatatttactatgaaataactttataagcagtaaattgaaagcacatacatatattttaaaaaggcatttat

SEQ ID NO: 929214 - DNA, 120 bp, Artificial Sequence
  ENSG00000225564_20 (sequence is synthesized)
ttaagcaaattattttccaaatatagaatattagccagccaacaaataatgtttaagaaagtttgtaattttctgagacaatacggatgataaaatattaagtaaagaacaactttgttg

SEQ ID NO: 929215 - DNA, 120 bp, Artificial Sequence
  ENSG00000225564_21 (sequence is synthesized)
taatgtgatatataacatgacataaataaaaagaaaaaatctagattaatgtgtagtcaataagaattgccatgaaacattgtcaaactgatatttgaaatttattgttttaaagcccct

SEQ ID NO: 929216 - DNA, 120 bp, Artificial Sequence
  ENSG00000225564_22 (sequence is synthesized)
taatgtttattctttgagaatacatagtagttgcacatatttaaggcatacatgtgatattttgatatgtgtgtatcacgtgtaatgatcaaatcagagtaattgggatatccatcacct

SEQ ID NO: 929217 - DNA, 120 bp, Artificial Sequence
  ENSG00000225564_23 (sequence is synthesized)
gaaacatttatcatagctttaaagggccaaagccaggatttaactctcttagattccaaagtccacgttcttagaaatattaattaaaataatgacaatgtttgcctctgggttatgcta

SEQ ID NO: 929218 - DNA, 120 bp, Artificial Sequence
  ENSG00000225564_24 (sequence is synthesized)
tgggttatgctattatgagaaatttaatatttttaaagcagaaattgaaatttttgtaataggaagatatttaataaatatggaaatgtataactgattttttctcctatgtcattattg

SEQ ID NO: 929219 - DNA, 120 bp, Artificial Sequence
  ENSG00000225564_25 (sequence is synthesized)
cttcatatcttacgtaaatatattctagatcatctgacagattttataatttctcattataaattaagatttttttttattatcttcggtggtgaaaaatacgctcgccaaactgacagg

SEQ ID NO: 929220 - DNA, 120 bp, Artificial Sequence
  ENSG00000225564_26 (sequence is synthesized)
aaaatgtaatgtaatgctaattgcttaattgattattactaggagtccacaattttcagtgcttttctttctatttctgtgtattttataaagagacaaattcaccaaaaatcagtttgg

SEQ ID NO: 929221 - DNA, 120 bp, Artificial Sequence
  ENSG00000225564_27 (sequence is synthesized)
cttgaagtatatggacacacataaagctctgcacatgtattattacatttaaacatacattcttaatctgttggaaattaaactaataaactttatttgagcacaattttaaatatgaaa

SEQ ID NO: 929222 - DNA, 120 bp, Artificial Sequence
  ENSG00000225564_28 (sequence is synthesized)
agaggacttccattgatcaatagccactcagatgttctgtgtttgccatgagtatcggacttcagtcttctggaaagatggctgtggtgcctaaacacatctgtgcctggcctcacccgc

SEQ ID NO: 929223 - DNA, 120 bp, Artificial Sequence
  ENSG00000225564_29 (sequence is synthesized)
acaataattatacctaatcctcaaatctcaggcaacactaaacctttgcttctgatgtgtctatgagtctaaacgggggttctgatgctctcacctgaattcgtttatgtgcatgagtta

SEQ ID NO: 929224 - DNA, 120 bp, Artificial Sequence
  ENSG00000225564_30 (sequence is synthesized)
gctgagggacaactgatttgcattatgctcagctgggattggcttcaatctgcaagtcgcatccagatccattcctcatgtctcccacggtcctgaaaccaacaagctctcaggagaagt

SEQ ID NO: 929225 - DNA, 120 bp, Artificial Sequence
  ENSG00000225564_31 (sequence is synthesized)
acacatttggaaatattggctcagcattgcagctataccctttagacaggaaacacactttccagttctccttgacagagaggctgaaggtcaactgatggtccagaatattgctggagc

SEQ ID NO: 929226 - DNA, 120 bp, Artificial Sequence
  ENSG00000225564_32 (sequence is synthesized)
tccagccatcatttctgaatgccaagaaacagaaatggggaaaagcttgactgcaaaaggatcctcttatcagctaagccagcttactttccacagatgtcttggaaatctttcacaaca

SEQ ID NO: 929227 - DNA, 120 bp, Artificial Sequence
  ENSG00000225564_33 (sequence is synthesized)
cttttatttttgtctcagtgaccagctcttgccatgtggtcacacctggatgaaggacaaagaagtacagccttttggctaggcacatttctgctctgaataaaatttggactaaagaag

SEQ ID NO: 929228 - DNA, 87 bp, Artificial Sequence
  ENSG00000282686_0 (sequence is synthesized)
ttgtaaccgcccaagattcatcaagacagaagacctgcatttctctcctgagtcacctgcacttgggtgccccagctggaagagcca

SEQ ID NO: 929229 - DNA, 120 bp, Artificial Sequence
  ENSG00000282686_1 (sequence is synthesized)
tttgaaaaactggcagtgtccactaaactaacttgtaagtatctcctaacacacagcatttccaccactaaataaatactcaacagaaacagatttgtattcacccgaagacactacagc

SEQ ID NO: 929230 - DNA, 120 bp, Artificial Sequence
  ENSG00000282686_2 (sequence is synthesized)
ttaaagtttatagcagccttaaccacgttagtccaatgctggaagaaactcaaatagccatcaaataagaatgggcaaatagacggtggcatgttcttgtaattaaacactacactgcaa

SEQ ID NO: 929231 - DNA, 120 bp, Artificial Sequence
  ENSG00000268240_0 (sequence is synthesized)
tgggcagggcccaggcatgagatcagagtcacaacatgtaggtgctgggccaagtgatatgtcacaatgcccactgtagacaggttccaggaagaaaaggagcatcacatcatctaggtg

SEQ ID NO: 929232 - DNA, 120 bp, Artificial Sequence
  ENSG00000268240_1 (sequence is synthesized)
ccagtggtatgaaagtcaacacctgtattttgggtctaagtacatgagacacaatggtggacaatctatactgagagcctcaattcttcctgtagacagtgtctcctcagtggagtaaaa

SEQ ID NO: 929233 - DNA, 120 bp, Artificial Sequence
  ENSG00000268240_2 (sequence is synthesized)
gcctcacggtgtgttgaatcttggtctgagagtcgccaacccactggtggaccggatccacttacaagagtcaatgttcaaactttcaactgtctccagctgtgagattcagaacctcaa

SEQ ID NO: 929234 - DNA, 120 bp, Artificial Sequence
  ENSG00000268240_3 (sequence is synthesized)
ttgtgggatgggggtgcatatgagtgttacagtctcatctgtgtactaggccctgttaggacgcttactggcctgaggctttaactggtatgcatgagagtcacaattctctctgagtcc

SEQ ID NO: 929235 - DNA, 120 bp, Artificial Sequence
  ENSG00000268240_4 (sequence is synthesized)
ctatgttggtattaacccatgatcatacctatggccctgaacccaggtatgagaaccaacatctcttcaactgtctgggtccagataggagagtcttctactggctataagctgggttaa

SEQ ID NO: 929236 - DNA, 120 bp, Artificial Sequence
  ENSG00000268240_5 (sequence is synthesized)
gaaattagtcagcattccaactgtggctggatgtttacatataatgctcgcaatacaaactgcatgctgagctcagctgcccccctcctctagaaagccttcctgggtttctccgtgtca

SEQ ID NO: 929237 - DNA, 120 bp, Artificial Sequence
  ENSG00000268240_6 (sequence is synthesized)
ccataagatcatgtctgcctatctctaacagctccaacttttctagtttgtcattgtctccctttgtcatggtgctttaaattccctcaggactgcactgtttggcttctagaatgtccc

SEQ ID NO: 929238 - DNA, 120 bp, Artificial Sequence
  ENSG00000268240_7 (sequence is synthesized)
cagagtacagggcaagggctggcccagataaggaaccccatgagagtttactaagcaaatgctgaatggtgtgactaagcccccacctgtggtccccaaccactggcccaccctgcccca

SEQ ID NO: 929239 - DNA, 120 bp, Artificial Sequence
  ENSG00000268240_8 (sequence is synthesized)
gtgacttgcagctctcctctgaggattccactgtgaggtggtgcaggcctctggaaaggtggcgtgggtcccatcaggtgacccctgggtgctggccctgccagaccacagcagactgag

SEQ ID NO: 929240 - DNA, 120 bp, Artificial Sequence
  ENSG00000268240_9 (sequence is synthesized)
gagcagcagcaggccacctgtgccacaacagaaggaactgacccactggagccggggctggggtccccaggcacagggtgttctgtgggtgggacagctggccaggctgggcacgtgcat

SEQ ID NO: 929241 - DNA, 120 bp, Artificial Sequence
  ENSG00000268240_10 (sequence is synthesized)
tccaccaagtcaagcagtgtcccagccacaagaaccaccatggtgctgaccatcatgcaatagtagaggcccccatcacacatctggacacaggagagagaagacgaaatgggtcacatg

SEQ ID NO: 929242 - DNA, 120 bp, Artificial Sequence
  ENSG00000268240_11 (sequence is synthesized)
aaaggtactggagacctaggtgttagtatttctctaccctaggtcactttacaaccttggagaggtcatttgacacctctgtgcctcagtttcttcatctgcaaaatggagatggtgtcc

SEQ ID NO: 929243 - DNA, 120 bp, Artificial Sequence
  ENSG00000268240_12 (sequence is synthesized)
cggactttgcagcactattttgaaggtcagagataatgggtatcagcactgcgcctgggacatggtaggaactaagtgtgacactctaggcctctccccagtcctcaggagcctcatcta

SEQ ID NO: 929244 - DNA, 68 bp, Artificial Sequence
  ENSG00000268240_13 (sequence is synthesized)
acactctaggcctctccccagtcctcaggagcctcatctactgctgcatattaagattccccacccac

SEQ ID NO: 929245 - DNA, 120 bp, Artificial Sequence
  ENSG00000268240_14 (sequence is synthesized)
gcgaaggttgcagtgagctgagatcacgccatcgcacaccagcctgggggacaagagcaagactttgtctcaaacaataataataataatgattgcccaccctgatgccttatgggaagc

SEQ ID NO: 929246 - DNA, 120 bp, Artificial Sequence
  ENSG00000268240_15 (sequence is synthesized)
tgagagggaggagaatgaatacttgttgggtggaccaggcctgccagaatcagggtttgctggctatgctctgccttacttcacgtggtcacaatcccatgagatccacgctgttaactc

SEQ ID NO: 929247 - DNA, 120 bp, Artificial Sequence
  ENSG00000268240_16 (sequence is synthesized)
cactggacaaagaagacactgggacctagggcaaacagaacattgaaacagagcattcaaatgtctgaaactgaaactaacaacatggagcaaaactttgtgcaaaaagatgttcaccat

SEQ ID NO: 929248 - DNA, 120 bp, Artificial Sequence
  ENSG00000268240_17 (sequence is synthesized)
gcccttgtttataagggttatcatttgaaaaatgctcaagtgtccaattataaagaaatggggatgcaggttatgaagatgagagcgtgagacagcgagctgtaagggaagcaggttacc

SEQ ID NO: 929249 - DNA, 120 bp, Artificial Sequence
  ENSG00000268240_18 (sequence is synthesized)
cagggatggacagaggatgggccctggccctcatgttatgaagcttctccacgtggtgccttcctctgtcaaatgggcagaagaatatccttttgatagaattaaaatatacgaaaacca

SEQ ID NO: 929250 - DNA, 120 bp, Artificial Sequence
  ENSG00000267213_0 (sequence is synthesized)
agactctgagcgcggccgcggagctgcagtggcggggagtggggtgcggatcttgtgtttgcgcacgcagtcgccggccacctcaggccggagctagagatacggctcgggataggaggg

SEQ ID NO: 929251 - DNA, 120 bp, Artificial Sequence
  ENSG00000267213_1 (sequence is synthesized)
cccggcggctctgaggcaggttcgcctcgagccgcacggcccggagcagcggctccgcggtggtccccggggcttgagaggggtgcgggcctgggagcccctgagggcctgatttacgga

SEQ ID NO: 929252 - DNA, 120 bp, Artificial Sequence
  ENSG00000267213_2 (sequence is synthesized)
actccccctccttcctcctttctgccgttccctgctctgtggcggatgcgcagggatcagtagggacggcagcagtagggccactcgggcctgccccgcttcccgcattgcccggtttgg

SEQ ID NO: 929253 - DNA, 120 bp, Artificial Sequence
  ENSG00000267213_3 (sequence is synthesized)
cgcgccgcctccgggccttggcaaagccccagcgcccgattgtcactgaccagtgcttggaagtcctttaccgactgcccgtcagcgtcccgcggagaggattttgcgtctccaaagacg

SEQ ID NO: 929254 - DNA, 120 bp, Artificial Sequence
  ENSG00000267213_4 (sequence is synthesized)
caaagacgcccctcttccgaaaacaggctcctctgtgttctcagtcgggtatatttttctgtctccaaactagattggcagccgttttttgagagcagggtcttgctctgttgcccagac

SEQ ID NO: 929255 - DNA, 90 bp, Artificial Sequence
  ENSG00000267213_5 (sequence is synthesized)
ctcccatctgagcacagggttgctccaggtgggcccaaatgctgaagagcctcatgttagagtttttcacctctgcgatggaactgtggt

SEQ ID NO: 929256 - DNA, 120 bp, Artificial Sequence
  ENSG00000267213_6 (sequence is synthesized)
ctcatgttagagtttttcacctctgcgatggaactgtggtggactccagtatcatcattccagggaggcatagccgcaccaactgtgttcccaggtttcacatggagaagggttttagaa

SEQ ID NO: 929257 - DNA, 120 bp, Artificial Sequence
  ENSG00000267213_7 (sequence is synthesized)
agtgcagatagccttgaaaccattggtttcctaccactgtttatttcagcataactttttttgtgtggaatgctagctctggaagagcagaaataaatacagcttaagctttgaaccata

SEQ ID NO: 929258 - DNA, 120 bp, Artificial Sequence
  ENSG00000279141_0 (sequence is synthesized)
atgagatggacagggtgggggcccacaccccaggctactcggacagcaggggtcaatcccgacggctggagaaacctcaggccccaagtgcaccaatggcccagatggctggagacctct

SEQ ID NO: 929259 - DNA, 120 bp, Artificial Sequence
  ENSG00000279141_1 (sequence is synthesized)
tcctttgtctcctctgtctccaagatccaggagcccaggctcagcctgcgaaccacctggccctggccctggagggggatggggagggtctgtgaccatcctggggggtatctgcgcccc

SEQ ID NO: 929260 - DNA, 120 bp, Artificial Sequence
  ENSG00000279141_2 (sequence is synthesized)
cacgtgcctgacgatgggagccaggccagcccctcacacgggtgctcctgggcagcctctctggtagcctggacgagtcaccccaggggcacatgctccaggcagccccctcacctcagg

SEQ ID NO: 929261 - DNA, 120 bp, Artificial Sequence
  ENSG00000279141_3 (sequence is synthesized)
gggcatgggaggcgctgggggtcttcagctggtgatggggtgactgacgaggatcagccccaaccccggggtcctctggccgctggcaaccggagcactcccccagttggagctgaacca

SEQ ID NO: 929262 - DNA, 120 bp, Artificial Sequence
  ENSG00000279141_4 (sequence is synthesized)
acccccatcacccccaggtcgccctgcaggcactgtgtgtttggacagctggaagcagagctcggcctgtgacctgcctggtccagcaactggaccttctggaggtgagcctgggagtgg

SEQ ID NO: 929263 - DNA, 120 bp, Artificial Sequence
  ENSG00000279141_5 (sequence is synthesized)
ccgagcagaggaaatcacccccatggggaggtaggggaggggtgaggccccccccaccaggttctggaatgttccgtgggctggatcctggagaacccacttctctgggctccagaaagg

SEQ ID NO: 929264 - DNA, 120 bp, Artificial Sequence
  ENSG00000279141_6 (sequence is synthesized)
caagggcaatgtttctttgacctgagaaagcaaagcagccccccgacatccttccacacactcatcccctctggtggggagccggggggacacatatgagatggacagggtgggggccca

SEQ ID NO: 929265 - DNA, 120 bp, Artificial Sequence
  ENSG00000279141_7 (sequence is synthesized)
gctggtgggatccgagtgggcagaggggagacggaggagggaaaggcagccccagcctgcggtggtgcttgtcctgggcgggaggggccctgctgtcactgacgtgggaaccaccgagtc

SEQ ID NO: 929266 - DNA, 120 bp, Artificial Sequence
  ENSG00000279141_8 (sequence is synthesized)
accggaggggcaggggcagaggggtctcggtggaaagggggtccccagaggccttgggagacgggggaggtgcctagggctctctggccttggtctctaccagctcaacgagggctttgt

SEQ ID NO: 929267 - DNA, 120 bp, Artificial Sequence
  ENSG00000279141_9 (sequence is synthesized)
tccaggggcccctgggtccctctgcctccaacaatctgggctgcgttttctgagcacctactgtgtgctgggtgtgggcgtccgggcaggcactgactaagccttgtccctccccagagt

SEQ ID NO: 929268 - DNA, 120 bp, Artificial Sequence
  ENSG00000279141_10 (sequence is synthesized)
cacagtgagacacacagccacatcctgtaaatgaagacctcgtggctcagagaggtcaggtaacttccccaaagcctgtctggcctcccagcaccatccctagtcccagaggggaggtgg

SEQ ID NO: 929269 - DNA, 120 bp, Artificial Sequence
  ENSG00000279141_11 (sequence is synthesized)
aatgaaggcagggctaaggccaggctgcatggaggcagaggcacctgccggcctgcaggaccaaaggttctattggaggcagtgcctgggcagacaaaggccctcagattcacaagctga

SEQ ID NO: 929270 - DNA, 120 bp, Artificial Sequence
  ENSG00000279141_12 (sequence is synthesized)
agccctagcacccagggccccagtgtgctactgtgtttggagacaggtaaaggttgtcaaggtaagacagggtggccctgatccaatatgactggcgtccttgtaagaagaggagattgg

SEQ ID NO: 929271 - DNA, 120 bp, Artificial Sequence
  ENSG00000279141_13 (sequence is synthesized)
gaagacggtgtgcaagagcgggaagcggggcctcggaagagccagcccttggatctcgggcttccaggagaatcagttcctgcagttgaagccaccagggtctgtgcaactttgtcacag

SEQ ID NO: 929272 - DNA, 120 bp, Artificial Sequence
  ENSG00000279141_14 (sequence is synthesized)
ctgcccgagctgacaaattcacctgacttaagccccccgccccacccgaccacagtgtcacccagatgcttggcaggtgctgtggcaggggctgggtccctgctcgaccttcgggtgccg

SEQ ID NO: 929273 - DNA, 120 bp, Artificial Sequence
  ENSG00000279141_15 (sequence is synthesized)
gggtgtcccgtataagagcagcacagccaccgccacggccactcgcagttccaggctccgggcagcatctgggaccccagttcctgttgtgagaggctccccactgccatcccaccccct

SEQ ID NO: 929274 - DNA, 120 bp, Artificial Sequence
  ENSG00000279141_16 (sequence is synthesized)
gcaaggtgcctcggagagcggctggaggctgacgggtcgaggcctgggttttacggtcctgcctgggtttctgtgtggcctggggctgcctaccatctttccctctctggtcccccctac

SEQ ID NO: 929275 - DNA, 120 bp, Artificial Sequence
  ENSG00000279141_17 (sequence is synthesized)
tctcatataccaggctgggtgactggggcccaggagcggcccccccctcctctgggcttcctggtggcacccctggcctgacagcccctgggaaggcctcccctctccatctcggggccc

SEQ ID NO: 929276 - DNA, 120 bp, Artificial Sequence
  ENSG00000279141_18 (sequence is synthesized)
agcccggccccacctgctgagctgcagcctccaaggcctccttcgcacgcgtgtcagctctgacctcagggctccccacgcgtgttcccctctaggaaggcccccccaggggctccccaa

SEQ ID NO: 929277 - DNA, 120 bp, Artificial Sequence
  ENSG00000279141_19 (sequence is synthesized)
aatcctgtcctccctgaagcacctgttcttcgtgctcctccatgagggcccgcacggggccgctgaccgcagtctcagtcacagcctgggagcgcctggaggttggggggcagcaggcgc

SEQ ID NO: 929278 - DNA, 120 bp, Artificial Sequence
  ENSG00000279141_20 (sequence is synthesized)
tcagtcagtcctcgggtcaccatggatggccttgctgtgtgatccacactgaggcccagtggtcagctggggggctggacaggaggcagccacttcctggcctggctggtgactcacagg

SEQ ID NO: 929279 - DNA, 120 bp, Artificial Sequence
  ENSG00000279141_21 (sequence is synthesized)
cccgtttctgggaaaactcccacccacccccactcaatccggatggcgcagagctcgctgtggggaccagctgtgggaagtgcattgtgattaggggccgggtctgggggtggggaaggc

SEQ ID NO: 929280 - DNA, 120 bp, Artificial Sequence
  ENSG00000279141_22 (sequence is synthesized)
gggagccggggcggagggtggggtggggtgtgggacgtctccaccagaggcctgcctgggctgctgagctgtgcatcccgtgtgccctgacgctccacatgctccctcaccgggcagggg

SEQ ID NO: 929281 - DNA, 120 bp, Artificial Sequence
  ENSG00000279141_23 (sequence is synthesized)
tcgggggccccgaatatcatcacagggagaccacacgaggctcctgcctgaacccctcctcaggtccctcacgctcaggggtgcctggcccagcctcgccttgcccagccttgccaaggc

SEQ ID NO: 929282 - DNA, 120 bp, Artificial Sequence
  ENSG00000279141_24 (sequence is synthesized)
cagcacagcccaggagtaagccagagaaaagaaaatgccattcggaaaatcctaaggaagagaggatgcatttcctcgtctccacgtggaagcggatcaccctaaaggtcttcatcctgg

SEQ ID NO: 929283 - DNA, 120 bp, Artificial Sequence
  ENSG00000279141_25 (sequence is synthesized)
tctttttcatgctgaggaggctggggaggagaaggaagaggaggggctggtcttgctgacccaggagcagcagagaaaggagaaaatccacgtgcaggggctggccagcgctgggcttct

SEQ ID NO: 929284 - DNA, 120 bp, Artificial Sequence
  ENSG00000279141_26 (sequence is synthesized)
cgggaatggaatcacacacggactgtggcgtacacatcacaactttaaaccccgtccgtactgaagcctgcgtccgaatttcttctgtttttgtggcggaaggataaatattccattgta

SEQ ID NO: 929285 - DNA, 80 bp, Artificial Sequence
  ENSG00000283480_0 (sequence is synthesized)
ctcaggctgggcgcgtcgggcgagcagcccgcgccctcctcctcgtacaggcccagggggtcgctggggtcggctcccgc

SEQ ID NO: 929286 - DNA, 120 bp, Artificial Sequence
  ENSG00000283480_1 (sequence is synthesized)
gcccacgccgcccacgggcgacgacgacgtgcccaggccgccgaacaggtgactgatttgggctttgaatccctgtgaaccctctgggttacattaaggggtcctggaatctacatatca

SEQ ID NO: 929287 - DNA, 120 bp, Artificial Sequence
  ENSG00000283480_2 (sequence is synthesized)
agtattatcaaggacagaataacgtattgcaatatgtgtactgctctttttcatgcttctctgttatacagaattcatatttgggctcaaacacattttctgcaggagctggaaggctga

SEQ ID NO: 929288 - DNA, 120 bp, Artificial Sequence
  ENSG00000283480_3 (sequence is synthesized)
tgtctcctgggccatagcccagccatttgtcacacctgatgccatttttggaagtagacctttcgctctgaaaatgaacaagcccaaagtggctgggccaggagacccacactgcagaag

SEQ ID NO: 929289 - DNA, 120 bp, Artificial Sequence
  ENSG00000283480_4 (sequence is synthesized)
gagacagggcaaggagagcagcatgctcttccctttctttgaacttacagaacttattgcctggaactctgggtctgtaataactgtttctgactttactctgtattctcttttacaggg

SEQ ID NO: 929290 - DNA, 120 bp, Artificial Sequence
  ENSG00000283480_5 (sequence is synthesized)
gattgtatttgaaccttgggtaccacggtgataacgttattctctttttgtgcttttgtggctgggccgggatgggtggaagttagagggcttctgcaccacctctcctcagctgcttca

SEQ ID NO: 929291 - DNA, 120 bp, Artificial Sequence
  ENSG00000283480_6 (sequence is synthesized)
cttccctctccctggggtagtgatcttgctttccataacactctggcggcagagaatctgtgggacccattccatgggcaagccaaggccaacagcaaaagcaaaggggagatgtctccc

SEQ ID NO: 929292 - DNA, 120 bp, Artificial Sequence
  ENSG00000283480_7 (sequence is synthesized)
gcttaatctcattaacagaggagcgcttagctctgaaaaagacagtatgtctcagcaggtgtacagattgacgttaggttctgcaagtaaaaacatagtcaagaataaagctatgttacc

SEQ ID NO: 929293 - DNA, 120 bp, Artificial Sequence
  ENSG00000283480_8 (sequence is synthesized)
tgtaagggtaagaggcttgattgtacattttggatacagcgacccttaatacagtacatggttttaatctggtttctctaaaatctttaaaatcatgctgaaactatgcctatcgataat

SEQ ID NO: 929294 - DNA, 120 bp, Artificial Sequence
  ENSG00000283480_9 (sequence is synthesized)
aaccctgttgaattgtaatgctatgattacagaatttatacagaaatagcactagccctttaaatatccatgcaccataagaggcaggaacaacaggataaatctccattctctagaatc

SEQ ID NO: 929295 - DNA, 120 bp, Artificial Sequence
  ENSG00000283480_10 (sequence is synthesized)
ccacgttggttgtatatggtgtttttgtgtgtttgtttgtttgttgttaataatctctttaaaatgccttttttcaatatcagtccaaataatgtcaacctaccgtgatgaacaattgaa

SEQ ID NO: 929296 - DNA, 120 bp, Artificial Sequence
  ENSG00000283480_11 (sequence is synthesized)
aaggagaaagaagaaggaggagaaacaagaggaaaataaccatagctaaaggccaggggaggcgtgcctgtgtgaggatccatgctattaagtggtttaaatgcgccacttcgtgtagtg

SEQ ID NO: 929297 - DNA, 120 bp, Artificial Sequence
  ENSG00000283480_12 (sequence is synthesized)
tacataactatctaagaaggacacattatcagccctgtgtgacacaagaggaagatgagtcccagagaaggggatcaacttgtccaaggtcacacagataattagtggtataggcaggac

SEQ ID NO: 929298 - DNA, 120 bp, Artificial Sequence
  ENSG00000283480_13 (sequence is synthesized)
tcaaacataggccaactgacccaagagctttaggcttaaccattgggatttttatttttaagcattttggatttggggattgaaataaatgaacacatgaaacaaactggcataattaaa

SEQ ID NO: 929299 - DNA, 120 bp, Artificial Sequence
  ENSG00000271522_0 (sequence is synthesized)
aagaaatgtcatctgctttctaatttaattcccttttttctactctttattatttttccttattatagaagaaatggttttccattaatacaaaattcagacatcatcaaaactataata

SEQ ID NO: 929300 - DNA, 120 bp, Artificial Sequence
  ENSG00000271522_1 (sequence is synthesized)
aacatttgctgtgatcctacctgctaaagataaccatcattaagttcaatgcatagtcttcctttttcatatttatacatatgctaacatatattagaattattcatttacttttacaag

SEQ ID NO: 929301 - DNA, 120 bp, Artificial Sequence
  ENSG00000271522_2 (sequence is synthesized)
aagaaggtcaggctggggacatggagggctcctacctgcgtaagcagaggtcttgcacctgcataagcagggccatgatcatgcctgtaatcccagtgctttgagaggccacggcaggga

SEQ ID NO: 929302 - DNA, 120 bp, Artificial Sequence
  ENSG00000271522_3 (sequence is synthesized)
gtctcttgagtccaggagttctagaccagcctgcacaacagggtgaaaccccatgtctacaaaaaatttaaacttagctgagtttaatggtatgtgcctgtggtcctagctacttaggag

SEQ ID NO: 929303 - DNA, 120 bp, Artificial Sequence
  ENSG00000271522_4 (sequence is synthesized)
ggtatgtgcctgtggtcctagctacttaggaggctgaggcagggggacaccttgggcctaggaggtcaaggctacagtgagccatgatcatgctactgtactccagcctgggtgacagag

SEQ ID NO: 929304 - DNA, 120 bp, Artificial Sequence
  ENSG00000271522_5 (sequence is synthesized)
aataatgttgcaatttttctaccacttttaaaatcctttgaaacatttcttgtgttggtatatgtagatcttatctgactgtattcttgtaaatagatatataacataacattgggtgca

SEQ ID NO: 929305 - DNA, 120 bp, Artificial Sequence
  ENSG00000271522_6 (sequence is synthesized)
agggtataacactattagtgattccagacttcattctctcccctaggtgggaatgatttatcttactgttgaaactaggagaagaaactaggcataagcggccctgccctctttgagctt

SEQ ID NO: 929306 - DNA, 120 bp, Artificial Sequence
  ENSG00000271522_7 (sequence is synthesized)
ttagtcccagtggctggccgtcaaagatgccaggagtacagtgactgggggacctctgcttctgcaggtgggagactgaatcctgggtgggcgtattagtctgttctcacgctgctataa

SEQ ID NO: 929307 - DNA, 120 bp, Artificial Sequence
  ENSG00000271522_8 (sequence is synthesized)
ctcttcacatgatggcaggacggagaagtgccaagcaaaggggaaaaaggcccttataaaaccatcagatctcatgagatctcattcactatcacagaacagcaagggagtaactgctcc

SEQ ID NO: 929308 - DNA, 120 bp, Artificial Sequence
  ENSG00000271522_9 (sequence is synthesized)
catgattcaattacctcccactggatccctcccatgacacatggggattacaggaactacaattcaagatgagatttggggacacagccaaatatcaatgggccatcttggagagtggag

SEQ ID NO: 929309 - DNA, 120 bp, Artificial Sequence
  ENSG00000271522_10 (sequence is synthesized)
gaaggaaatagaaagctcacctgtggcctcatattttgcttacattctccagtgaagtttagtgtggattttgaatttcatctgtcctaagcttatggcttttcaaaaaaaaaaaaaaaa

SEQ ID NO: 929310 - DNA, 120 bp, Artificial Sequence
  ENSG00000228509_0 (sequence is synthesized)
tctgatgccatttccagagaacgtgcacatagtggccctaaaggcataggatattctaaagatgtaccttgtccatctgagttatcggaagtcaagccgttaggactgtgctcttctgag

SEQ ID NO: 929311 - DNA, 120 bp, Artificial Sequence
  ENSG00000228509_1 (sequence is synthesized)
ctctgcctgtaaagccctgcagacaacctcctctcggcatgctgcagtctctcatagccagcttggttgcaaaggaactccatctgctttgccatcaccttttcaggctgctactgaaag

SEQ ID NO: 929312 - DNA, 120 bp, Artificial Sequence
  ENSG00000228509_2 (sequence is synthesized)
tggactcacagagggctgtgttccagtggacatgttattcattccgtctaagcagaaggattccaacctcacttactaactagctgaagaaacgtttccctagagatttcattccaaatg

SEQ ID NO: 929313 - DNA, 120 bp, Artificial Sequence
  ENSG00000228509_3 (sequence is synthesized)
gttttttaatgtttaacataccctgtaaggaggaacactatttaaggacaacagattatcttgattacttctatgcaatgtgtatactgctattttttttttaaatcaaataagtaacta

SEQ ID NO: 929314 - DNA, 120 bp, Artificial Sequence
  ENSG00000228509_4 (sequence is synthesized)
tcctttaagggggaacaacctactacataaataagagctttccaggtagaaaaatcagacaagtcaatgaattataacttcattccacccaagccttcatgtatagatcaggaaaacaca

SEQ ID NO: 929315 - DNA, 120 bp, Artificial Sequence
  ENSG00000228509_5 (sequence is synthesized)
gtatttaggaacgaaagatcttactgagcttgaacacagcactacttgtattagtgtaccctaatgcattaataatgacaagcaaaaaaatgtttctctttcctttacatgtcaaattat

SEQ ID NO: 929316 - DNA, 120 bp, Artificial Sequence
  ENSG00000228509_6 (sequence is synthesized)
ttgttttcctcagtaaatattagcaataacttaaatgtttataagattcatctcatggattcttggggatatgcatggaatcaggtacagacagtgcaaaggtggtgtgcctagtgagct

SEQ ID NO: 929317 - DNA, 120 bp, Artificial Sequence
  ENSG00000228509_7 (sequence is synthesized)
ccttgccttctgccatgattgtgaggactccccagccacgtggaactgtacagacagtgcaaaggtggtgtgcctagtgagcttggatgtatcaaacagctgtaagaaaatctctccaac

SEQ ID NO: 929318 - DNA, 120 bp, Artificial Sequence
  ENSG00000228509_8 (sequence is synthesized)
ggatgtatcaaacagctgtaagaaaatctctccaaccttctctgaataaaggaggaatgtggtgtttattgaggaacaggcaacccttacatttgaataaaagatgccatatactgaaag

SEQ ID NO: 929319 - DNA, 120 bp, Artificial Sequence
  ENSG00000228506_0 (sequence is synthesized)
gtttaacggccggtcaggaacccaacaattagtcccttctcgtccgagaggaaactctgtgagaagatgggaccgtgagcactctctttaacaaggacatttccttttcagcgaaagcag

SEQ ID NO: 929320 - DNA, 120 bp, Artificial Sequence
  ENSG00000228506_1 (sequence is synthesized)
cgctctgatttaccaagtctggcggaccgcagcgctttaaaggaatgaggttccagcggtcgcgccaagcagcgtacgcagcctattttaagttatgctaccttcgccacagaaaccaag

SEQ ID NO: 929321 - DNA, 120 bp, Artificial Sequence
  ENSG00000228506_2 (sequence is synthesized)
aacgttgtaatggtccggcaagtgcccacgtataattgttctccatcacttacccactctagttcgggaacacccttgtcgccgccgttccggtaacacctctccaacgctttcgatgct

SEQ ID NO: 929322 - DNA, 120 bp, Artificial Sequence
  ENSG00000228506_3 (sequence is synthesized)
tctacttcttcgggaacaagacaagatggcgcccgatttgtctcacccggaagtaaagaataataacatccgtttgtcatctgaagccataccatctctcatccaggtttgtgaacacgt

SEQ ID NO: 929323 - DNA, 120 bp, Artificial Sequence
  ENSG00000228506_4 (sequence is synthesized)
gattgtgcggattgacatgtttcggcgccattttttttgtgggcaaaaccatctctactctggtcaacaccgggcaactgaaccattcctgcacgttactttttaacgtagctggcgcca

SEQ ID NO: 929324 - DNA, 120 bp, Artificial Sequence
  ENSG00000228506_5 (sequence is synthesized)
ttcccgacccatctttatagtggccagaaagccaagaacgtaagtgttctacacatagggcgccttcaaattttttactttagcaacgtgatcttcctttaaggggaagtatgttccctc

SEQ ID NO: 929325 - DNA, 120 bp, Artificial Sequence
  ENSG00000228506_6 (sequence is synthesized)
ctagaaacactcccgccttggagaaggggttgagttcgcaactccacttacagactacggaggaaccccagggtcaaaccaaaccaaaccaattctggccagttgcttagcgcagttcaa

SEQ ID NO: 929326 - DNA, 120 bp, Artificial Sequence
  ENSG00000228506_7 (sequence is synthesized)
gttacttagtgcgctggaagcggcatttcaggcaatccaacttctggctcgaaccttctcggagtattccaaggatggaatactctcacttgagcgctgccgagggtgccgcttgaggaa

SEQ ID NO: 929327 - DNA, 120 bp, Artificial Sequence
  ENSG00000228506_8 (sequence is synthesized)
aacgtgagtttgtgaagaatgtttgttgcagatacagttccaccactgtacattaagtatgtggaaaacagaagatatccttttggttcctgggtctccagaacagtaggagcaaacatc

SEQ ID NO: 929328 - DNA, 120 bp, Artificial Sequence
  ENSG00000228506_9 (sequence is synthesized)
caaatctgatatagcacttccagagagcctggtcttggaggataaaactttaccttgatgggacttttggccccggtcccttaagagttgggatttggggttgtactgcagcacaactca

SEQ ID NO: 929329 - DNA, 120 bp, Artificial Sequence
  ENSG00000228506_10 (sequence is synthesized)
tatgaaatggcttcagaagtgtccatgaaccttcaaaattacatacaagaattagggagatacatttttctgggaacatacagatgttaagacttcccttctccgtctctatattgccag

SEQ ID NO: 929330 - DNA, 120 bp, Artificial Sequence
  ENSG00000228506_11 (sequence is synthesized)
aagagagggccccagaattaaaaccccatccttcctacaacactcagctttctctttcaggaatatcagtactaatatcaccatgccttttatctctaggatatcttcatcccctgtacc

SEQ ID NO: 929331 - DNA, 120 bp, Artificial Sequence
  ENSG00000228506_12 (sequence is synthesized)
ttaatttctgcatgacttcatagggagtccatattgcttgatttttctccatatcattaccattgacataaattttccttacattcttagaatgtgtatttcctcaccttttagatttct

SEQ ID NO: 929332 - DNA, 120 bp, Artificial Sequence
  ENSG00000228506_13 (sequence is synthesized)
caccttttagatttctggctcttatgttgactgctgtatccctagtacctaccacacaacaggtattcaacaaatacttttttttttttgagacagtctctgtcacccaggctggagtgc

SEQ ID NO: 929333 - DNA, 64 bp, Artificial Sequence
  ENSG00000228506_14 (sequence is synthesized)
ctcaggtgatttgcccacaatacttactaaatgactaaacaaataaaagatagtctctaacttt

SEQ ID NO: 929334 - DNA, 120 bp, Artificial Sequence
  ENSG00000228506_15 (sequence is synthesized)
tactaaatgactaaacaaataaaagatagtctctaactttcatcataatctcaaagagcttcatgatctggaagaagtttagacacaaatgggtaggcaaagtatttcttaattgctggt

SEQ ID NO: 929335 - DNA, 120 bp, Artificial Sequence
  ENSG00000228506_16 (sequence is synthesized)
gcaagaccttacccttgtcttaataattatcctgtctaagtaatacaccttttaagaaacccctgaaaggaagatgatcgtccttggtagatactgaaatctgaggtaaagtggcccata

SEQ ID NO: 929336 - DNA, 120 bp, Artificial Sequence
  ENSG00000228506_17 (sequence is synthesized)
aactgttttgaaatagagaatttctaaaatatgtagggtattttgaatatagctgagaaagctgctatgaactgaaggtttacgtcccctacaacattcacaaatcccaaatgtgatggt

SEQ ID NO: 929337 - DNA, 120 bp, Artificial Sequence
  ENSG00000228506_18 (sequence is synthesized)
atttggagatagggcctttgagaagtgattaggtcatgaggatggaaccctcatgaatgggctgcatggaaaaggacccacagagatgccttgtacttttcccatgtgaggacacagcaa

SEQ ID NO: 929338 - DNA, 120 bp, Artificial Sequence
  ENSG00000228506_19 (sequence is synthesized)
gaaagcactgtctttatgaacagaagtgggccctcaccagaccccaagtctgctggcaccttgatcttgaagttcccagctcccagaactgtgagaaataaatttttgttaatacaccac

SEQ ID NO: 929339 - DNA, 120 bp, Artificial Sequence
  ENSG00000228505_0 (sequence is synthesized)
gatggacaacccagctggctcatgctccgttttgatgaggttctgggaagcaagccagataaggaagtttcctgatgcccacaaagtttaaataacggactcgaggttacccagcaataa

SEQ ID NO: 929340 - DNA, 120 bp, Artificial Sequence
  ENSG00000228505_1 (sequence is synthesized)
ttggctttcagagtttgtgttttggacaactatattctactttggacagcactgtattttctcattgtaaaagcaggcaggatggagtaaaaaataaaagtcaaaacaatttgaaaacaa

SEQ ID NO: 929341 - DNA, 120 bp, Artificial Sequence
  ENSG00000228505_2 (sequence is synthesized)
gatggacaacccagctggctcatgctccgttttgatgaggttctgggaagcaagccaggtgatgtgaacctgctgaaatgctgcagggatttcaggcaagttagccttggcagtgagaac

SEQ ID NO: 929342 - DNA, 120 bp, Artificial Sequence
  ENSG00000228504_0 (sequence is synthesized)
ctttgagtaagtgaaatgaagcgtgaataactgcctaattagtggacatgaaaactggacagtctccaaagtcatcagagatgaccacgcttgccaggcaacttactagactaagggtga

SEQ ID NO: 929343 - DNA, 120 bp, Artificial Sequence
  ENSG00000228504_1 (sequence is synthesized)
tctccaaggctggcgagagcaacttgtctgctttgagaaatgcagatctatcaggatccagaatcggactctgaaaaagctgtcatttcatgtctctaaaacagcctttgatttaatgta

SEQ ID NO: 929344 - DNA, 120 bp, Artificial Sequence
  ENSG00000228504_2 (sequence is synthesized)
caagatgtcaagaagtaaaggacaataaaataaaaaccaaaaaaggagaactatttcaattaagaagcattcctatatcaattcttggaaatcacataaaataaaagctgtcagaatcaa

SEQ ID NO: 929345 - DNA, 120 bp, Artificial Sequence
  ENSG00000228503_0 (sequence is synthesized)
atccccagcagctgcctgttctccccctccactgggctagagctgtgtcacacaggctgagcggccaggaagctgggcaccatccagggagtgtgtgatcgtcggggtcctgttgattcc

SEQ ID NO: 929346 - DNA, 120 bp, Artificial Sequence
  ENSG00000228503_1 (sequence is synthesized)
aatccaatgaaattctctaaatctccaccctcctcagggtgcagagttggctgcttctctgtgccccctgctgatcacggcaacccctgggtgcctcggcctgcgaagccccagctgtcc

SEQ ID NO: 929347 - DNA, 120 bp, Artificial Sequence
  ENSG00000228503_2 (sequence is synthesized)
tccgtctgcagacaagccgaggtatgaaagcctcctcgctggcccaggagcctgtcattgtcctccagcagctctagcctggatgcggtcccagagataaatcatatctctttaaaaagc

SEQ ID NO: 929348 - DNA, 120 bp, Artificial Sequence
  ENSG00000233848_0 (sequence is synthesized)
gccatgatcacgtcactgcactccagcatgggcaacggagcaggactctatcccccaccaccctcaaaaaagaaggatgtcaaattagtttaaaattcctacatcaagacaaattgcaag

SEQ ID NO: 929349 - DNA, 120 bp, Artificial Sequence
  ENSG00000233848_1 (sequence is synthesized)
tctggtgtacacatgtgcacgaaggtaaggggaggatgcacacatcagcttactgcaagtatgaagagtttgttaatgacagcaatgacacctagaaaaagatattaaaatgagaaaaga

SEQ ID NO: 929350 - DNA, 120 bp, Artificial Sequence
  ENSG00000233848_2 (sequence is synthesized)
tccaaaaagacagaactcaaagtataaatcagagtataagtagagagcccactaaggtactgatgttaccaaggtgcatttccagagtttaacaaagcatgaaggttccaacaccttacc

SEQ ID NO: 929351 - DNA, 120 bp, Artificial Sequence
  ENSG00000233848_3 (sequence is synthesized)
tggtggactggggaggaggcgaagtatcttacagaaaatgaggaaaggcttgtgagagcagacctgaactccattctacgtctgaccactcagcccaacatgatggcagcagcaacaata

SEQ ID NO: 929352 - DNA, 120 bp, Artificial Sequence
  ENSG00000233848_4 (sequence is synthesized)
attactgagaaactgccaaagtttgagcagagaaaggcagtaggcaaaggagctgtagactgaaaaacaagtgatggagcaatgatcttcaggaagtagaccgagcaaaatctaaaacat

SEQ ID NO: 929353 - DNA, 120 bp, Artificial Sequence
  ENSG00000233847_0 (sequence is synthesized)
tctggggtagaacttagtgtagaaaatgtagaaggtaaggcagtgattttagtagtccagatgtgcagtaaaggcaagagttttatcaaatgagcttgatgtgaacatgccagtgtcatg

SEQ ID NO: 929354 - DNA, 120 bp, Artificial Sequence
  ENSG00000233847_1 (sequence is synthesized)
atctctacaaaacagcaatcaaaatttacattaactgacttataaaacaaaagttaacagaagacttctgcaaccctatgcagatacaaccgtgatgcttttggattccttaagatgaag

SEQ ID NO: 929355 - DNA, 120 bp, Artificial Sequence
  ENSG00000233847_2 (sequence is synthesized)
gtttgggaccttaaaacatttgtggtgctatctgaaggaatgagaacacaaagaaggaaagtcttaagtgccagctctggcattaaaacagctgcaaaaatacaagaactatagtgccta

SEQ ID NO: 929356 - DNA, 120 bp, Artificial Sequence
  ENSG00000233844_0 (sequence is synthesized)
ttcaaagaaaggaacgatgtggacctgacctcaaagaaatccattggagaatatgacagatttagatttaatgatcaactttacttttcctatacagatgggaaaacagcctgcaaaaat

SEQ ID NO: 929357 - DNA, 120 bp, Artificial Sequence
  ENSG00000233844_1 (sequence is synthesized)
gttaagtagcttcctcaggatcaagtactattggagccagcattggtggtcaatcctgtatagaaatgacttcagttgtagatctgtgaccttccttacttaccttcctctaccaaagtg

SEQ ID NO: 929358 - DNA, 120 bp, Artificial Sequence
  ENSG00000233844_2 (sequence is synthesized)
aggacttactcacatcagctacatcagttactgggatggagaaaattgaagcctagaaagatcaagaaactttctccaggccataaatagaggaatcaggattcaaatcagatagacccc

SEQ ID NO: 929359 - DNA, 120 bp, Artificial Sequence
  ENSG00000233844_3 (sequence is synthesized)
agggcttgttctcttcaacaccacattaccctacattattattcaattattaaataaaaccttgcattagtggcatttccaaatgcataacaaaaaaataaaaaaaagtaacactggtca

SEQ ID NO: 929360 - DNA, 120 bp, Artificial Sequence
  ENSG00000233845_0 (sequence is synthesized)
gctataggaactgggctctgggcaaagcatgctcgctgtgacccctcttgcaagcattttcctgtttaagctgtggaagcccatgtgaagtaaacactgaggtcttttaaggccgaacgc

SEQ ID NO: 929361 - DNA, 120 bp, Artificial Sequence
  ENSG00000233845_1 (sequence is synthesized)
ccttgccacgccatcggcatcgaaggatgatatgaaaacaaacaaaacaacctgtgtcatctaccctagaagtctgaatgtaggcagaccactaactggagaatgatgaccatcaacttt

SEQ ID NO: 929362 - DNA, 120 bp, Artificial Sequence
  ENSG00000233845_2 (sequence is synthesized)
aggccacagaggttctcacgggacaacccacgaagggaaatgctgaatgtcaactcagcttagctaatgaggaactgacctttggggaaggatccggcgctgccagtgattatgactggc

SEQ ID NO: 929363 - DNA, 120 bp, Artificial Sequence
  ENSG00000233845_3 (sequence is synthesized)
ttaacacttccctctgccacgtggcttgcaaggttcccccatggctggtgtcttcctcaggggctgtggcagccaaacgtgtttaatgaacccagcaaagtgataaactatgtttgtgtt

SEQ ID NO: 929364 - DNA, 120 bp, Artificial Sequence
  ENSG00000226031_0 (sequence is synthesized)
agagaggccgggagctcgggcggccggacggaggagggacgaggcagcgcgcgggggagcgcgccctcgccctggcccctccgagtcttcgactagtccttgcaacttcttggcgtgata

SEQ ID NO: 929365 - DNA, 120 bp, Artificial Sequence
  ENSG00000226031_1 (sequence is synthesized)
atcgggaaaagttggcccgtgccaggtttccgacagggatcaaacaggaaaatgcatggcacattattaatgagacttgagaagggggcatctctctgtgatctgtctgtctacggacct

SEQ ID NO: 929366 - DNA, 120 bp, Artificial Sequence
  ENSG00000226031_2 (sequence is synthesized)
acaggaaactatgccaaagtcacatccatcttgagaaggcctcagaggagctgtaaggaagctgaggggacctgctctcaagaggcatctccaggagagagacagaaacccaaacagatg

SEQ ID NO: 929367 - DNA, 120 bp, Artificial Sequence
  ENSG00000226031_3 (sequence is synthesized)
tgactgtgatgagtaaaaatgagagaactcagacagcctaatcgggagcagcctcagtccattctgagcagaaaggaattggctgtctttctgaaattctgaaaatgagaaatttcaaac

SEQ ID NO: 929368 - DNA, 120 bp, Artificial Sequence
  ENSG00000226031_4 (sequence is synthesized)
ttgttctccttctacactaacagttcaccaaaatatctgagtgggaagttacctggtcaaggactgatgatgagctcaaagaaaggaaatgttggcagattcaaatgcaccaacgtcgag

SEQ ID NO: 929369 - DNA, 120 bp, Artificial Sequence
  ENSG00000226031_5 (sequence is synthesized)
taacactgggatctccccattcactaagtaaggcagcagagagagtatttacgagatgaggtagccaagtaccaccttttgtggtctaattatgtacaaaggctcagagaaacaactgga

SEQ ID NO: 929370 - DNA, 120 bp, Artificial Sequence
  ENSG00000226031_6 (sequence is synthesized)
tctaattatgtacaaaggctcagagaaacaactggatagaaatacaaatgaggagtttagagaaaagctaacagaataggctcttttcagccagccaggcacagtggctcacacctgtaa

SEQ ID NO: 929371 - DNA, 120 bp, Artificial Sequence
  ENSG00000226031_7 (sequence is synthesized)
aggatcccttgagcccaggagttccaggctgcagcaagctatgatcctgccactgcattccaccctgggtgacagagtaagaccctgcctctaaaaaaaagaaaaataagaaaaaagaaa

SEQ ID NO: 929372 - DNA, 120 bp, Artificial Sequence
  ENSG00000226037_0 (sequence is synthesized)
cagatcctaagcactgggtatgaaggccaagcaaaaagccttggttctgggcaggatctgcagtcacatttctagattaccagctcatccaggacttgagagaccaagacccaggagaaa

SEQ ID NO: 929373 - DNA, 120 bp, Artificial Sequence
  ENSG00000226037_1 (sequence is synthesized)
aggaaacctcagagaggtcttaattttcatccagaccaccttcagcccacttctactgaccacaagcttttggatcctgccctgggtctctgagcacagcagaatacaggagaatccctt

SEQ ID NO: 929374 - DNA, 120 bp, Artificial Sequence
  ENSG00000226037_2 (sequence is synthesized)
gccacatccttgctaccaccctcttactacttcctattccagccaaactgtattagtttttaatttatttcactcagttattcttattacagtttaaatatagaaaatacaaaatatgga

SEQ ID NO: 929375 - DNA, 120 bp, Artificial Sequence
  ENSG00000226037_3 (sequence is synthesized)
tatttattttatttcttattatacaagcatatccatgttatctttgatattgctacttggtccacacaggtggataaggtaccatatttaccatctgaccctttatagaaaaagttagct

SEQ ID NO: 929376 - DNA, 120 bp, Artificial Sequence
  ENSG00000226037_4 (sequence is synthesized)
gacccctcgtctaaactatgaagacagaaacatctgtttttttccttattgtagtcccacaacaggtgtaaatgtgtcctaaatgaatatcattaagtgaataaatgatggaaaaattgt

SEQ ID NO: 929377 - DNA, 120 bp, Artificial Sequence
  ENSG00000283157_0 (sequence is synthesized)
acattctcctaagatgggagcaagaattgtagaccaccctcagaagacttgctccaagatgcctcggatgacccagatgctgctgtcacagtccgtctgcttttggttggttatctggga

SEQ ID NO: 929378 - DNA, 120 bp, Artificial Sequence
  ENSG00000283157_1 (sequence is synthesized)
aactcccaacacagcaaattgaggacaaatacaaaattctttcagaaagttgtctggaaggcaagaggactgtcccaccccatggggttggcactgtaatttggcatctgcacttcaagc

SEQ ID NO: 929379 - DNA, 120 bp, Artificial Sequence
  ENSG00000283157_2 (sequence is synthesized)
tgccttggatgtagttgtgaatactgctctacaggagaactgttaaaaatattttcaaagtgatagtaactccttacttctaagcacatacccgcagcctacaataaataaactgtgtga

SEQ ID NO: 929380 - DNA, 120 bp, Artificial Sequence
  ENSG00000283157_3 (sequence is synthesized)
ctgtaataactctggtactgctgtttatggcatacaaaatacattcacatatattacctgatctgatcctcataatgaatatgtgaggagcagatgtttgacccctattttacaaagagg

SEQ ID NO: 929381 - DNA, 120 bp, Artificial Sequence
  ENSG00000253215_0 (sequence is synthesized)
tctcctttatcaaggaactggacttcattctcctgcaaaagctgcttgatcttgacctgttgctgtttgacccgggtctcaagcaggcgcacctgggctctgagccgcatctgctcctgg

SEQ ID NO: 929382 - DNA, 120 bp, Artificial Sequence
  ENSG00000253215_1 (sequence is synthesized)
gcacagtcctcgagcgcctgcaaaacagttcccatttcagaatattattccaaagagaaagtggcttgaaaagttctaatactgcctactatttgaagaattggaaattatggcttatgc

SEQ ID NO: 929383 - DNA, 120 bp, Artificial Sequence
  ENSG00000253215_2 (sequence is synthesized)
ctatgctaggagctttatagttgtctcctttgatcctcataacaattccatgcggtaggaaagggctcagtcttgatgcccagtgggtaagcggaggtgggattcaaattcagttcaagg

SEQ ID NO: 929384 - DNA, 120 bp, Artificial Sequence
  ENSG00000253215_3 (sequence is synthesized)
actgtgctctcaatctctatatgacattgcttatgtgttttctaaacagtaatgtggtttatagaagttaattgtactgttggcatgtaaatctccataataaatgaggtttttgaatgg

SEQ ID NO: 929385 - DNA, 120 bp, Artificial Sequence
  ENSG00000253214_0 (sequence is synthesized)
ttctttttcctagcctagcctcccttataaaccacctgtacccaagcccttattttaagctgtgctttcaagggaactcaaaccaagacattaagctagatttgttcatgtgtggatgtg

SEQ ID NO: 929386 - DNA, 120 bp, Artificial Sequence
  ENSG00000253214_1 (sequence is synthesized)
atggaactgaagtcgctaggttcatgctacctggaacatgagactgacaaatagaggagcactgagtcaaatgaatctcggagaaatggagctggaagaaaactggatggcatactctca

SEQ ID NO: 929387 - DNA, 71 bp, Artificial Sequence
  ENSG00000253214_2 (sequence is synthesized)
tggcatactctcattttatccatttctgacaggaatgaaagaaaagatatacgcaaagtggattctaatca

SEQ ID NO: 929388 - DNA, 64 bp, Artificial Sequence
  ENSG00000253214_3 (sequence is synthesized)
gccgtgccctgctgaaacttatttgtttgagcaataaaagccacatatttcctcttttgataaa

SEQ ID NO: 929389 - DNA, 120 bp, Artificial Sequence
  ENSG00000253214_4 (sequence is synthesized)
agactgtgtctattctaggaaggctgacacatgatgagaagagtcagtggtcctgaggtacagtacttaagataaccctgtgaaggctgagattgatatttgaaattcacaactgatctt

SEQ ID NO: 929390 - DNA, 120 bp, Artificial Sequence
  ENSG00000253214_5 (sequence is synthesized)
ggagcctggtacagcagtcatggagccatattggattgtgaaaggaactcagttgacctggcctattgcagatttattctgagaatttcaattcagtctttgctgctgtttggaaatctt

SEQ ID NO: 929391 - DNA, 120 bp, Artificial Sequence
  ENSG00000253214_6 (sequence is synthesized)
actggatattgttttaaatattgaagaaaagcaaacaaatcaacatcagccataacattgcttcatatgccaaaaccaggatgaaataatgcttttatagaagatgtgacctgggatcaa

SEQ ID NO: 929392 - DNA, 120 bp, Artificial Sequence
  ENSG00000253214_7 (sequence is synthesized)
atagcatcatttaccaaatgcaaaggattggtgtagctcttgacttcaaggcatattaaatctagcaaagctaagattcaatatagatgtaggtccaatttcatgacaaaaaatcaaaga

SEQ ID NO: 929393 - DNA, 120 bp, Artificial Sequence
  ENSG00000253214_8 (sequence is synthesized)
aaccaaccaaaatcagagaacttagtaagtttgtgggtatgcaatctacagaagtgaattatatatatatgataaaagagaagaaaagactctatttacaattcaacaaaaaagataaaa

SEQ ID NO: 929394 - DNA, 120 bp, Artificial Sequence
  ENSG00000253214_9 (sequence is synthesized)
cgcttaggaataagtatgagagatgggcatgatttatataaagaacattttaagatgctaccaaaaaacacaaaataaaatgaataaatgggaaagcatataatttcttagataggaaaa

SEQ ID NO: 929395 - DNA, 120 bp, Artificial Sequence
  ENSG00000253214_10 (sequence is synthesized)
gtcaacatcacaaaaatttaattcaataaaaatagcaacagcatttttattttgtaatcagagacaagctaatactaaagttcaaatgaaaaaataaaaaacaaaaatagtcaagaaaaa

SEQ ID NO: 929396 - DNA, 120 bp, Artificial Sequence
  ENSG00000253214_11 (sequence is synthesized)
ttgcagccaaaggctcttaatgagaaaatggctctacctagttttctgaaattgcctcagtctctccactcttccctattacaaaggtcatctctttaattcacatccaataactgatag

SEQ ID NO: 929397 - DNA, 120 bp, Artificial Sequence
  ENSG00000253214_12 (sequence is synthesized)
acatcctctcattctctcctaattcacctttcatactgttgccaggtgacttttcctaaaagacaactttcatgatgtcactctacttcataaattcttataatggtttctttttgcttt

SEQ ID NO: 929398 - DNA, 120 bp, Artificial Sequence
  ENSG00000253214_13 (sequence is synthesized)
tagtccaaactcctcaggttcgttttcaaggcttttcataattgaatttcttttatatacctaagatgatttctctgtgttcccaaatgtacaattgacagtccttcctcctgatgttct

SEQ ID NO: 929399 - DNA, 120 bp, Artificial Sequence
  ENSG00000253214_14 (sequence is synthesized)
ctccagtaggaaatgtttgctctatgtaaattcagtatagcttttagtctctattcaagttctaccttcttcataaacttctcctgaatagaatcagcctataaccatttaaactgtctt

SEQ ID NO: 929400 - DNA, 120 bp, Artificial Sequence
  ENSG00000253214_15 (sequence is synthesized)
tattaggtgcacactatgtgccaggtactcaacaaggcagtggaactatgaagacagataatcacagtccctcttgcctctgggagcaggcagttgaatgcaatgctttttaaagtttta

SEQ ID NO: 929401 - DNA, 120 bp, Artificial Sequence
  ENSG00000253214_16 (sequence is synthesized)
agtaacgtggtcatgcaaaatcttatagatatacatttgaatgtacagagtttaattaccaagctagtgagacttaatgtttcaattaataaaaagtttggaatcaaggtatatagataa

SEQ ID NO: 929402 - DNA, 120 bp, Artificial Sequence
  ENSG00000253214_17 (sequence is synthesized)
tggttgctatgttaatattttaggcttaaaggaccagaattaattcattcagtcttatctctgatgcgttggttttctgtcaaaaattcctgacagaattaacagtcaaaatgaagcagg

SEQ ID NO: 929403 - DNA, 120 bp, Artificial Sequence
  ENSG00000253214_18 (sequence is synthesized)
ataattggagacggagccatgcagccgatcatgccatccttggaattattgggcacaccatcatctcttgcttggattcaggatcttggcattgcattcttacagaaaagcctctttgca

SEQ ID NO: 929404 - DNA, 120 bp, Artificial Sequence
  ENSG00000253217_0 (sequence is synthesized)
attatttaaggaatgtccttccagtctgcaggcagataggctctccaaggagattttggcaggggtgaaatgactggcattttgacctgagcgaaatttctgaatttccgagctgtgata

SEQ ID NO: 929405 - DNA, 120 bp, Artificial Sequence
  ENSG00000253217_1 (sequence is synthesized)
gacactggagcttctggctcttgggactctagcagaaccccacctgctcacccgcaggcctcaggccttcagattaggactgaattccaccactggctttccgggttctccagcttgcag

SEQ ID NO: 929406 - DNA, 120 bp, Artificial Sequence
  ENSG00000253217_2 (sequence is synthesized)
ctctctatctctgtcttactctctcttgattctgtttctctgaagaaccctaactaatacagataccttcattttacaaatgaataaagtgcagtgccagagaagttctgtgaattgtct

SEQ ID NO: 929407 - DNA, 120 bp, Artificial Sequence
  ENSG00000253217_3 (sequence is synthesized)
agggtcatacactccttcatttatttaattgtgcattaagtcaactagtattctaggtaccaaggaagtcaacatactagaccacattgcctgtcttcaagaaagttatgttttggttag

SEQ ID NO: 929408 - DNA, 120 bp, Artificial Sequence
  ENSG00000253210_0 (sequence is synthesized)
atgacagggcgttgaagggaaggaaaagttgagggaaacgaggaaactatttccataggagaatgctttttcactgaagtcgaaactggcttggtactgacgcccagcaggggaaactcc

SEQ ID NO: 929409 - DNA, 120 bp, Artificial Sequence
  ENSG00000253210_1 (sequence is synthesized)
ccggacactcacagacattcatctggttacttgcaggaacatctgcctttcctggtgacaccctctgccctgcagtcttcattttccctggatagcccagcgtcatttaaatactcagaa

SEQ ID NO: 929410 - DNA, 120 bp, Artificial Sequence
  ENSG00000253210_2 (sequence is synthesized)
tctgcaaagagatgaacggacctgtgcagacggctggccagtgacgccgggatctctaggtccttccaaagtgcctacggaaagctttgtcccatccttgaaaaattgctaatgggtttg

SEQ ID NO: 929411 - DNA, 120 bp, Artificial Sequence
  ENSG00000253210_3 (sequence is synthesized)
gagatacgaggtggagatgactagcaatcaaactcaaaggtggaagtcacatcgaggcagatgagcagatgaggggacctagagaagaagagaggtgcaaggagagcccagccagcagga

SEQ ID NO: 929412 - DNA, 120 bp, Artificial Sequence
  ENSG00000253210_4 (sequence is synthesized)
agcactgccccacatcagagtcgaggaaagcaaagctcggattggataaaagaaacttgcaaacacggatgaagggaaaagcttcatgacattggatttggcagtgattccttggatatg

SEQ ID NO: 929413 - DNA, 120 bp, Artificial Sequence
  ENSG00000253210_5 (sequence is synthesized)
accccaaaagcacagataacgaaagaaaaaatagttaaattgtcttcatcaaaattaaaacttttgtacatcaaagaactctttcaaaagagtgaaaaagtcacagaataagagaaaatc

SEQ ID NO: 929414 - DNA, 62 bp, Artificial Sequence
  ENSG00000253210_6 (sequence is synthesized)
agttactattcagaatatattaagaattcctacaactcaacaacaaaaaaaaatccaaccca

SEQ ID NO: 929415 - DNA, 120 bp, Artificial Sequence
  ENSG00000253210_7 (sequence is synthesized)
agaattcctacaactcaacaacaaaaaaaaatccaacccaattaaaaaatgggcaacagacccaaatagacatttcttagaagacacacaaatggccaataagctcatgaaaacatgttt

SEQ ID NO: 929416 - DNA, 120 bp, Artificial Sequence
  ENSG00000253210_8 (sequence is synthesized)
taatcattagggaaatgcaaatcaaagctaaaatgagataccacgtcacactcattaggtgttattttttaaaaataacacaacaacaaaaaataagaaatgtgggcgaggatgtgaaga

SEQ ID NO: 929417 - DNA, 120 bp, Artificial Sequence
  ENSG00000253210_9 (sequence is synthesized)
tgtgaagaaattgaaacccttgtggactgttgttggggatgtaaaatggcgcagctgctggggaaaacagtatgggagttcctcacaaaactaaacagaattgccaaacgacccagcgat

SEQ ID NO: 929418 - DNA, 120 bp, Artificial Sequence
  ENSG00000253210_10 (sequence is synthesized)
cctgcctctgacatatactggaaagaactgaaataaggcgctggaacagacacttgtaacccatgttcacagctgagccaaaaggtgggagtaacccaaatgtccatcagtggatgaata

SEQ ID NO: 929419 - DNA, 120 bp, Artificial Sequence
  ENSG00000253210_11 (sequence is synthesized)
ctggcaataaaagctgtgtctggaggccactccgtttcacacagctctccacacgggtgagggcacagccttctcgtctctttcctatgctgcatcttcagagctagctatgatatgata

SEQ ID NO: 929420 - DNA, 120 bp, Artificial Sequence
  ENSG00000253210_12 (sequence is synthesized)
gagggaggaatgggcggggtcctcaggtgcccggcgacgtcatccagcccccaaggctccaggacgcaaagggtcccctgatctggcagtccctggacctaccctggagagcgtgggggg

SEQ ID NO: 929421 - DNA, 120 bp, Artificial Sequence
  ENSG00000253210_13 (sequence is synthesized)
acaaaggccggacgcgccgcccgctgccgcctccaggaagccctcccttgccaggacagtggagttggccgggtccttccaaagtgcctacggaaagctttgtcccatccttgaaaaatt

SEQ ID NO: 929422 - DNA, 120 bp, Artificial Sequence
  ENSG00000253210_14 (sequence is synthesized)
gtgaaacgggtttactgctctaactctcagggacactgtgaagaccaaacgagaaaatagaaacaaacataatttataaaccataaagtactgacaccaaaagaggggcgagcacagcat

SEQ ID NO: 929423 - DNA, 120 bp, Artificial Sequence
  ENSG00000253210_15 (sequence is synthesized)
tacaggcatgagccaccacacccagccttggtggcctcatttttagcagcctctgcaaagcacacagcctgaatccgtcacctagagtccccagcatgcaggagaggcgctctcaacccg

SEQ ID NO: 929424 - DNA, 120 bp, Artificial Sequence
  ENSG00000253210_16 (sequence is synthesized)
ggctggagccatgagccactccctgagggcacacagggcctgagtctggctcctgtgtgttgctgtgtgacaggtgagctcaacagccctaagccgtgacttcctgaggggcagtggtca

SEQ ID NO: 929425 - DNA, 120 bp, Artificial Sequence
  ENSG00000253210_17 (sequence is synthesized)
agatccaagggaggtaaacacatggcagctcttgccaccaggacccagtaaggctcacgcgagagcaggtctctgctgtccctttatcaccaagaggccaaatgctttaaggaagagagc

SEQ ID NO: 929426 - DNA, 120 bp, Artificial Sequence
  ENSG00000253210_18 (sequence is synthesized)
tccagcagtgcacagagcttgcaatccactcctttatgcccccttttcctcctccttaaaaccagataattgggccagatgacctctgaggggctcccagttctgcactttttaatacgc

SEQ ID NO: 929427 - DNA, 120 bp, Artificial Sequence
  ENSG00000277895_0 (sequence is synthesized)
gaccagtctttggttatacatttggcaattacttgggagttgttttgaggccacctactaagaatacttgggatagagattacaaattaaacccataagccaggtagacgaggagcaagg

SEQ ID NO: 929428 - DNA, 120 bp, Artificial Sequence
  ENSG00000277895_1 (sequence is synthesized)
aaatgtctgggaattcgtatttcatcggcatatatttaaaacatcttatgcttctaatttccggtgtgagtcaacctctgcggactgaacatcactaaaactctaaggaaacgtctcttt

SEQ ID NO: 929429 - DNA, 120 bp, Artificial Sequence
  ENSG00000277895_2 (sequence is synthesized)
ttaatcctctgaaaaatcaatacatttaaaaactgcccgttgtgtcgacgctcggaaagagggtagaaaacagcgagtctaagggaaagaggtgcccctgcctccccaggcagccagggc

SEQ ID NO: 929430 - DNA, 120 bp, Artificial Sequence
  ENSG00000277895_3 (sequence is synthesized)
ccaggcccggtaacggagtcgtcctctttatgcccaaagccgccggacgggatgcaggtcgaggaccggccgcgcggcgcggagcggggatgcaggtaacagggcccgcgcgaccattcc

SEQ ID NO: 929431 - DNA, 120 bp, Artificial Sequence
  ENSG00000277895_4 (sequence is synthesized)
accggctacggccacccgacacacaccccagaggcagtgtccacgcagccggggtcctggatggcttggcctcgggtcgtccggggcttctcggtgcgcccgcccccgcccccgctctga

SEQ ID NO: 929432 - DNA, 120 bp, Artificial Sequence
  ENSG00000277895_5 (sequence is synthesized)
tacccagccgggtctccgccgcgccaccgccggcgggctcccgcggcctcctcgagactcaggacacttccggcttcgcaagccctggccggaggccacgtgaccgacggccggcgcgcc

SEQ ID NO: 929433 - DNA, 120 bp, Artificial Sequence
  ENSG00000277895_6 (sequence is synthesized)
ggtgcgggtgcgcgtgcgcacgcctatggcccgtctggtagtcaccacagccgcggcggcaactgccgagtcggcttccgcggccacggtaatgagggggatgtctggagacaccccgtc

SEQ ID NO: 929434 - DNA, 120 bp, Artificial Sequence
  ENSG00000277895_7 (sequence is synthesized)
cactgttgccctcgccctttactctaaaggggaatgaggagccctgagcagcgaacacagtaattgggattcccgcaactgcaaatcccgccccttccccgagcgctggccgacagtagg

SEQ ID NO: 929435 - DNA, 120 bp, Artificial Sequence
  ENSG00000277895_8 (sequence is synthesized)
gcggaccgacgctgagcaagggattacatcccaagatttacaggtgtgcagaacgtgggacacgtggggggcaggcacagacggccggcagagctgggagggatggattctatgttttaa

SEQ ID NO: 929436 - DNA, 120 bp, Artificial Sequence
  ENSG00000277895_9 (sequence is synthesized)
gggcccactttggctgcagtggagccagattatcgtctcgcagtaattcagactttacattgtttttttcattttcccatcacccagaaatacattaaattcttaatgtaaaaatgttca

SEQ ID NO: 929437 - DNA, 120 bp, Artificial Sequence
  ENSG00000287489_0 (sequence is synthesized)
gggtcttcgaggaacagccattagagccagttgcctgtctctcttctagagagttggtggaacatttcctgactccactctgatatgctgctgagaaggtaatcttgatttttggtattt

SEQ ID NO: 929438 - DNA, 120 bp, Artificial Sequence
  ENSG00000287489_1 (sequence is synthesized)
ctttctgcccttctccctccagagtgcacgtttccattttccagtcccattaacaccaccgttatcacaactgctaggattttgctaagtacttaaagcagaaagaggcctggattagaa

SEQ ID NO: 929439 - DNA, 90 bp, Artificial Sequence
  ENSG00000287488_0 (sequence is synthesized)
gaagggacttggccttagaggaataggaattttagctaggcacatggacatcaagttgaagattactttcttggactggaaggaagcaat

SEQ ID NO: 929440 - DNA, 120 bp, Artificial Sequence
  ENSG00000287488_1 (sequence is synthesized)
tcaagttgaagattactttcttggactggaaggaagcaatatacgctatttcagagttatgtggtttacgagaaaaggggcaggttcttcctattctttccctattgtaattttgttgga

SEQ ID NO: 929441 - DNA, 120 bp, Artificial Sequence
  ENSG00000287488_2 (sequence is synthesized)
gtatggatgtaatggtgggggttagaacagccatctcagacctgagataagacctgcatgaggaagctggcaaagccataaactggcagggcctgtattatttgatgtcatgaaacagat

SEQ ID NO: 929442 - DNA, 120 bp, Artificial Sequence
  ENSG00000287488_3 (sequence is synthesized)
tgcttccacttggaaagggttatatatttgccgtttgcctgagccactgctattttttcattttttgtaacagccacaccacaccctaaaaaatacaacatctaaatcatttcaagaaaa

SEQ ID NO: 929443 - DNA, 120 bp, Artificial Sequence
  ENSG00000287488_4 (sequence is synthesized)
cttgaacatgttaatagtagatcagcgccgtccaacagaacgttctgagatgatataaatgttttccattatccaattcagcagctattagccacgtatagatattggacatgtatatat

SEQ ID NO: 929444 - DNA, 120 bp, Artificial Sequence
  ENSG00000287488_5 (sequence is synthesized)
gataagttatattagattctgctattgagttttccaaattgtgcaaatttgcctccccatttgcagtttatgaaatttccattgttcctcctgcactccaattcttagttagtactttta

SEQ ID NO: 929445 - DNA, 120 bp, Artificial Sequence
  ENSG00000287488_6 (sequence is synthesized)
attttagccactttggtaagtgtgttgttttattttagttttagcttgtaaatttcccttatcactaatagtcttagcatattttcttatgtttaattggctgtttgggcgtcctttttt

SEQ ID NO: 929446 - DNA, 120 bp, Artificial Sequence
  ENSG00000287488_7 (sequence is synthesized)
aaaaattgcttgttaacacctcttgttcatttttctactgtttttctttttctcattcctttacagaattaaaaatgaattctgaatataattccctttgtcatttatatgtgttacaaa

SEQ ID NO: 929447 - DNA, 120 bp, Artificial Sequence
  ENSG00000287488_8 (sequence is synthesized)
cttactgttctagtctaagacttttctgtttggtctcttgatggtgtcttaataaacagaaattgttaattttattgtaatctaatttataaatttcccctttattcatgtatcttgcat

SEQ ID NO: 929448 - DNA, 120 bp, Artificial Sequence
  ENSG00000287485_0 (sequence is synthesized)
ggaagaaaggaagtgaaggagagagggagggaggaaaaaaggaagggaagaaggaatccttatttgacctgtactcctttagaacccaaagttagttctagtcctctccgtttctttgga

SEQ ID NO: 929449 - DNA, 120 bp, Artificial Sequence
  ENSG00000287485_1 (sequence is synthesized)
tactcattttcctacactgggatttctaccttccttctttcccaaactcaaaaacacagtaatgatcttgcttttaagacatatcatatcatgtttttcagttttggatgttgctgccaa

SEQ ID NO: 929450 - DNA, 120 bp, Artificial Sequence
  ENSG00000287485_2 (sequence is synthesized)
gggcagtcagctcatttgactctatctactatgctgcatttgagattttgtcaatgccattgaatacaaaggtgaaagcaagagcccataaatatggctgcatcaaaaagacatgcatag

SEQ ID NO: 929451 - DNA, 120 bp, Artificial Sequence
  ENSG00000287485_3 (sequence is synthesized)
aatggtgaaaaatttgagttgcttgatgttcacatttctcggctgaggttgaatgaggctccagaaactgaccagcaagcctgcagaccagcagatggatggaggaatgacggggcagag

SEQ ID NO: 929452 - DNA, 120 bp, Artificial Sequence
  ENSG00000287485_4 (sequence is synthesized)
aaagggagaagaggaggaacatctgaacgccaagaggaataaggctgggggcagtccgaaaggattctgtttgctgggcggcccgaccccaggggaggatcattttcccactccatcccc

SEQ ID NO: 929453 - DNA, 120 bp, Artificial Sequence
  ENSG00000287485_5 (sequence is synthesized)
tgcttctgactccccatttatcctgctgaaagtcacctccacctccacctccaccactcaataaaacttcgcattcatccttcgagttcgtgcgtgacccgatttttccgggaggctgga

SEQ ID NO: 929454 - DNA, 120 bp, Artificial Sequence
  ENSG00000287485_6 (sequence is synthesized)
caaaagcccgggatacggaaagctgtcacgctggccctctgcccttgcaaaaaggcagagggtccattgagctgattaacactaaagccatctgtggagagcaaagctgaaagagctctg

SEQ ID NO: 929455 - DNA, 120 bp, Artificial Sequence
  ENSG00000287485_7 (sequence is synthesized)
taacactggggttgcaggaaaccacctctagactgtaccgccgggctggagcccaaagcgctcttccggcctgtatacctgctaatctgcacgctccccgtctttcaagaggtttgagca

SEQ ID NO: 929456 - DNA, 120 bp, Artificial Sequence
  ENSG00000287485_8 (sequence is synthesized)
gcagggctactgaacaggcaagccacacttctgttgcacatcctgtgaggggaatcagggacctgtctggttgcaaaggaattacagacatgagccactgtgtctgacccatttatctta

SEQ ID NO: 929457 - DNA, 120 bp, Artificial Sequence
  ENSG00000287485_9 (sequence is synthesized)
aatttaaggggataacaatgcgggaagctggaatctagaggaaccacagtaactttgatctctagctgtgaggaagaacatgcctgcttcccaagtgaccatcctcccagcaccatgata

SEQ ID NO: 929458 - DNA, 120 bp, Artificial Sequence
  ENSG00000287485_10 (sequence is synthesized)
tctatgagatcaagggctccagagattacagagacagcttttggcgagtgtcagtgtccaggttgactgctggacatttcctgccaatgtgttctagggagaactagcctctgccatccc

SEQ ID NO: 929459 - DNA, 120 bp, Artificial Sequence
  ENSG00000287485_11 (sequence is synthesized)
ctgcatggccaacataaatgaatagggtctgctccagtgatcaattacttttcaatttagcaaggggaggcaggcaggtttactggtaagtgaatgtgggagttttagatagtaaaatat

SEQ ID NO: 929460 - DNA, 120 bp, Artificial Sequence
  ENSG00000287485_12 (sequence is synthesized)
cataaataaaggcagcagagaggagtagaaagggcatggatgggctttggaattagatagccctgagcttaaatcttgccttcaccaattactagcagagttatatataatttgataaaa

SEQ ID NO: 929461 - DNA, 120 bp, Artificial Sequence
  ENSG00000287485_13 (sequence is synthesized)
ggagacacaaaattctcagaataaaagtcctaaaaattcattcttctgttaatttttagaatcttgcagctcttcccctgaagccctattcactgcaatcatttcactctgtgaagcatt

SEQ ID NO: 929462 - DNA, 120 bp, Artificial Sequence
  ENSG00000287485_14 (sequence is synthesized)
ttagtatttttttcttttcccatgattagaaaataagctaagagcagaaagaggagactatgtcttacacctctttgtatcctcttcagtgaagaaacgtccttcactgttgggactcta

SEQ ID NO: 929463 - DNA, 120 bp, Artificial Sequence
  ENSG00000287485_15 (sequence is synthesized)
ttggccattcctggatatttagcatctctggaccacaacactaaacaccagtaatacctgccagtcatggtgaccagttcccacccctcaaatacccttacaaatttccaaaggtcttca

SEQ ID NO: 929464 - DNA, 120 bp, Artificial Sequence
  ENSG00000287485_16 (sequence is synthesized)
tcagggtggtacaacctttggttgaaaaccactacagtgtccaatatatagtaagtatatatttgttcagcacacatggttgttttgttagttgcagtaggaaaatttctgcctgaaatt

SEQ ID NO: 929465 - DNA, 120 bp, Artificial Sequence
  ENSG00000287485_17 (sequence is synthesized)
tattactttttttaaacaaaaatgcttaagaaattggttcatttgacatcctttcaatcctagttccacctattaatttttgtgggtgaaaaggtctttttgtctatgttacaggttgct

SEQ ID NO: 929466 - DNA, 120 bp, Artificial Sequence
  ENSG00000287485_18 (sequence is synthesized)
ttccctgagatctgaggaggatattagtgtgcaggaagtttattatggagtgcttttggggatcaacactagtggaaggaaaaaaaaaggaagtaagattaagcggaagaagttggacta

SEQ ID NO: 929467 - DNA, 120 bp, Artificial Sequence
  ENSG00000287485_19 (sequence is synthesized)
taatgcagtttcaacaaaagcctgaactaagcccaaaaatagctctgaaatggaggtggcccttcagagttgtaccaagctggaacaaggggaccagatgttactgttccctgtcaatca

SEQ ID NO: 929468 - DNA, 120 bp, Artificial Sequence
  ENSG00000287485_20 (sequence is synthesized)
gtgattgggtgtagactatcttagaaatagggcatgagctggcatgaggcaactctgttcagcagaaggcaggtatgtaagagagctgcaagctgagggctctctgtgggccatgctctc

SEQ ID NO: 929469 - DNA, 120 bp, Artificial Sequence
  ENSG00000287485_21 (sequence is synthesized)
agcagctggtggagtaagtaagttcatcagtcctaaaggggtatgttggagtgtgcatcatcacagcatgcactgcagtatgtatcagtttatctgtacacaaatgagacctcaaatagc

SEQ ID NO: 929470 - DNA, 120 bp, Artificial Sequence
  ENSG00000287485_22 (sequence is synthesized)
tgtaattttaaaaagttaaaaactagttactcttctacataagtcaaaagagagttagctccaaataatatgagcgttctgttactaaaaaacaaacaaacaaacaaaaatgccagggga

SEQ ID NO: 929471 - DNA, 120 bp, Artificial Sequence
  ENSG00000287485_23 (sequence is synthesized)
acagatgttatggtctgaatgtttgttcccgtctatattcatgtgttggaattctaacccccaagtggttgtataggaggtggggcatttggaaggtggttaggttataaggatggagca

SEQ ID NO: 929472 - DNA, 120 bp, Artificial Sequence
  ENSG00000287485_24 (sequence is synthesized)
ctcatggatgggattagtgctcttataaaagagaccctggagagctagctatgtaatagttccttctgcagtgtgaggtttcagtgaaacatttctgtctatgaaggaagcaggccctca

SEQ ID NO: 929473 - DNA, 120 bp, Artificial Sequence
  ENSG00000287485_25 (sequence is synthesized)
ccagaacccacctgtgctggcaaactgatcttggacattctggcctgttataaaaatagagagtagaatggtattgtaagaaataaacttctgtccgggcacggtggctcacgcctgtaa

SEQ ID NO: 929474 - DNA, 120 bp, Artificial Sequence
  ENSG00000287484_0 (sequence is synthesized)
agtctcagggcactgatgaaaagaccagggtcccagtggcccacaaaccctctggattaggggcttcagctccaaggactgagccctgagccatggccttcctccatcatggcttccctg

SEQ ID NO: 929475 - DNA, 120 bp, Artificial Sequence
  ENSG00000287484_1 (sequence is synthesized)
gccgatgatgtgccagtgtatggtgggcctcagccaatcagctgaaggccttaacagaaagaagactgagatccctgaggaggaaggaattctgccagcgacagactcgggactcacaat

SEQ ID NO: 929476 - DNA, 120 bp, Artificial Sequence
  ENSG00000287484_2 (sequence is synthesized)
gaggcatcaactcttccctgggtctccaacctgccctgaggttttagacttgctgcctccataattacacaggccaactttaaacaataaatccctctctctccgcatatatacctatca

SEQ ID NO: 929477 - DNA, 120 bp, Artificial Sequence
  ENSG00000287487_0 (sequence is synthesized)
agcccgatcgggagtggcaatgggcgcctcgatggatcaggagcacagcggacaccctgccagatctggagggatggaagtcagcggtgggtctgcgaaagcgcaaacaggagtggtgga

SEQ ID NO: 929478 - DNA, 89 bp, Artificial Sequence
  ENSG00000287487_1 (sequence is synthesized)
tcagcggtgggtctgcgaaagcgcaaacaggagtggtggacagcaagtgaaagctcacctcgagccgtaaggaacacggaacaaaagga

SEQ ID NO: 929479 - DNA, 120 bp, Artificial Sequence
  ENSG00000287487_2 (sequence is synthesized)
gagatgtgggtagacagcagtaaatatgccccatggcactgattaactcaaagtggctccaggccaaagattttatgcttcagtggagatatttttgccaggaaccatgtttaccagaga

SEQ ID NO: 929480 - DNA, 120 bp, Artificial Sequence
  ENSG00000287487_3 (sequence is synthesized)
tgtttcccaagatggacaacagactgaccatgttgattcagaactaagtactaataaaaaggagtttaataagaagtctaatagaaatcaaattgtatttatcaactttaattctatttt

SEQ ID NO: 929481 - DNA, 120 bp, Artificial Sequence
  ENSG00000287487_4 (sequence is synthesized)
aatgcacgagtcctaacagccaaacgactaatatgctgacatttcttaattcattttttctgactgtgctcccaaaaggtgtgtgaaaatgcagtttataaattaaaaccttatacatgt

SEQ ID NO: 929482 - DNA, 120 bp, Artificial Sequence
  ENSG00000287486_0 (sequence is synthesized)
cacgtccgggctgcactcaaaccagaagccctgtccaaggtgcactcagtaggacccggccataccataaggccccaccagggacctgctggaaggctctggagccactcacgcagggcc

SEQ ID NO: 929483 - DNA, 120 bp, Artificial Sequence
  ENSG00000287486_1 (sequence is synthesized)
ctcggtttcgtgtggcccaagccaacttctgaggaggggctgtttcttcaccccaagactgcgtccctctgagccgcccctcctgttctctgcaatccttccagttccttctgcctgagg

SEQ ID NO: 929484 - DNA, 120 bp, Artificial Sequence
  ENSG00000287486_2 (sequence is synthesized)
aaggacgtatgtccagctccactgcgagcctggcacccgccctgggaggtgaaatttccacaacacagaaagaacagaaagtagaagctgttaagctcaggaccgcaggatggagtagca

SEQ ID NO: 929485 - DNA, 120 bp, Artificial Sequence
  ENSG00000287486_3 (sequence is synthesized)
gagggaggccgtgtcagagatgacgcgcaggaaaaatgtggggttcttccaaacttgctgatgaaatgggagctgcagcacacatgcgtgaaacctgagaggatggcggacagcgtcaga

SEQ ID NO: 929486 - DNA, 120 bp, Artificial Sequence
  ENSG00000287486_4 (sequence is synthesized)
tgtgcgtgcatgaatgcacatgcatgggtttcctcatgggcacaggtgcacacacacggatgcatgcatgcatgtctgtgtgtgtgcttgtgtgtgcgagtagctgcgtgtctgtgtgtg

SEQ ID NO: 929487 - DNA, 120 bp, Artificial Sequence
  ENSG00000287486_5 (sequence is synthesized)
cacaggtacactgcgtttctgtgcaccatctgtatgaacacgcatgtggaggctgaagcagctccatcctggatgccagccccccatgctggcttctgattagcccctgttccgggaagg

SEQ ID NO: 929488 - DNA, 120 bp, Artificial Sequence
  ENSG00000287486_6 (sequence is synthesized)
cctctaaggtttccagtttatccattgttccttgtgtaccagcaggtacttatcatgaatcctgcccttcgtcagacaaccttgatgtcatcgtatatcaacgtcctgcgcatcccttct

SEQ ID NO: 929489 - DNA, 120 bp, Artificial Sequence
  ENSG00000287486_7 (sequence is synthesized)
gagccacccgcccctgtggtgcataaaccctgggtctggggtgatggtgtgaggacccatcatctcatctcactgacaccgagacaccgacttggcttctgtgtgtaggttaagttccta

SEQ ID NO: 929490 - DNA, 120 bp, Artificial Sequence
  ENSG00000287481_0 (sequence is synthesized)
gccctattttgaccttacagttaagtgaaggtccgtgttgtgtggtatgcctcagctctctgctctgctggagtctaaccaccagacattttgatttcaacaagagtgctgatgaaaaat

SEQ ID NO: 929491 - DNA, 120 bp, Artificial Sequence
  ENSG00000287481_1 (sequence is synthesized)
aaataagctggaggtaaaaaaaagaggcagtattcacatagaatattatcagggctgctgtgtgactgtgccagaggtgactaagggaaaagaagaaagcaagcttctgaaatgagggtt

SEQ ID NO: 929492 - DNA, 120 bp, Artificial Sequence
  ENSG00000287481_2 (sequence is synthesized)
caggaagtaactgagtgtggcttcttggtgctgctgtggtgacagaacaggctacgtggccaaggcaagatctactaaagctgaacatgtacatattttatgacccaacaattctaatcc

SEQ ID NO: 929493 - DNA, 120 bp, Artificial Sequence
  ENSG00000287481_3 (sequence is synthesized)
tgtggctacatccaatccagataagtgctatgtctaccctcctgcctgaagtaaccaaaaatggacaaaatatatgaagcaatggtttttaaggcattgtatatcaagcaatgaagcata

SEQ ID NO: 929494 - DNA, 120 bp, Artificial Sequence
  ENSG00000287481_4 (sequence is synthesized)
actggcagattccctgagttgaagcgagtgctgagaacccagggataccaagatggctaaaattcttaagacagagtactagagaagagagacacagagaaaactctagagatctgcaga

SEQ ID NO: 929495 - DNA, 120 bp, Artificial Sequence
  ENSG00000287481_5 (sequence is synthesized)
gatttgcctatgacaattcagctgagtgattcccatcatatgtttgtgaggaaactatctgaggtttaaaaaataatcactcaaaatgaatagaggatacagtactccatgctcacacag

SEQ ID NO: 929496 - DNA, 120 bp, Artificial Sequence
  ENSG00000287481_6 (sequence is synthesized)
ggctgggaatagtgcctgtttccatcatccagactggaaaaacctcaagattcctggggcactgagtagaatacagataaaagtcctgcttcattagtgaggaataattagccctagaca

SEQ ID NO: 929497 - DNA, 120 bp, Artificial Sequence
  ENSG00000287481_7 (sequence is synthesized)
agcaatgctctagtcctgtacaacaaatgtggtatgaagattatatggtattgagtttataaaatatgaaaaagtaaaatatatagcaacagtagcaaaatttgggatgggagaaatgaa

SEQ ID NO: 929498 - DNA, 120 bp, Artificial Sequence
  ENSG00000287481_8 (sequence is synthesized)
agtgaactattggacagttctcatactatacatgaagtagtgtattactcgaaggtagagtatgctaaagatatatgctataaactctaaaataactaaacgaaaccactaaaataacaa

SEQ ID NO: 929499 - DNA, 120 bp, Artificial Sequence
  ENSG00000287480_0 (sequence is synthesized)
agtggcagagagattgacgctgaggaagaatgactataccgacgctgtaaccgtggaactgggtcttaaacaagttcatgaggcagaaggagcacttgtgcaaaggcagggagacagggg

SEQ ID NO: 929500 - DNA, 120 bp, Artificial Sequence
  ENSG00000287480_1 (sequence is synthesized)
acaccgcaacttatcctgagaactagaagaatgatgggagcccgggggtgcggagtgaagcagaaacccacaatgatgatgaaattagaaaggaagacaagaacaacaaggttgtggaat

SEQ ID NO: 929501 - DNA, 120 bp, Artificial Sequence
  ENSG00000287480_2 (sequence is synthesized)
tcagaagccatagagacaagaggtaacacacctgagaaagatgatccctaagtttgtcttggagaaaactcagaagtacctgactacatcgtagacctcccaaacagcttccaaatgtca

SEQ ID NO: 929502 - DNA, 120 bp, Artificial Sequence
  ENSG00000287480_3 (sequence is synthesized)
gataccactgaacatggggataaagaccactagagatcagaaaattattctctggggtatctgaccacttccagaggaaagacataaagatgctgatgtcaagaatgacccaactaaacg

SEQ ID NO: 929503 - DNA, 120 bp, Artificial Sequence
  ENSG00000287480_4 (sequence is synthesized)
gcccagccacatgacccagttgaagctggtggacaagaagtttcattcatggaatcagaacttccaataaggtcttttagtacctcactcctaaatttgaatagactaccaaagattatc

SEQ ID NO: 929504 - DNA, 120 bp, Artificial Sequence
  ENSG00000287480_5 (sequence is synthesized)
agacatctaaggagaactaccagcatgaaaggtagagaccaaagcaaacaaacaaacaaagaaaataatttggaactaaccaagactatgctgggagaagaaaactattattaatatcca

SEQ ID NO: 929505 - DNA, 120 bp, Artificial Sequence
  ENSG00000287480_6 (sequence is synthesized)
aaaaatagaaccatcataattcaacaatcccactgctagatatataccccaaagaaaggaaatcagtatattgaaaagatatctgcactctcatgtttactgtagcactattcataatag

SEQ ID NO: 929506 - DNA, 65 bp, Artificial Sequence
  ENSG00000287480_7 (sequence is synthesized)
acagatttttttaatgtcatttgcaacaacatggttggaactggaggaccttatgttaagtgaaa

SEQ ID NO: 929507 - DNA, 120 bp, Artificial Sequence
  ENSG00000287480_8 (sequence is synthesized)
acaacatggttggaactggaggaccttatgttaagtgaaataagccaggcccaaaaaagcaaatttcacatgttctcactcatttgtgggacctaaaaatgaaaacagttgaactcaggg

SEQ ID NO: 929508 - DNA, 120 bp, Artificial Sequence
  ENSG00000287480_9 (sequence is synthesized)
agatagagtaagatgatggttaccagaggctggaagggtagttgtggtgggaggtgggtggttaatgagtacaaaaatataattagatagaatgaataaatctaatagttgctagcacaa

SEQ ID NO: 929509 - DNA, 120 bp, Artificial Sequence
  ENSG00000287480_10 (sequence is synthesized)
cagggtgactacagtcaacaataatttaccgtacatttaaaataactaaaagagtataattggcatgttagttacacaaaaaaaggataaatgcttgaggcaacggatataccatttacc

SEQ ID NO: 929510 - DNA, 86 bp, Artificial Sequence
  ENSG00000287480_11 (sequence is synthesized)
aaaaggataaatgcttgaggcaacggatataccatttacctggatttggttatcacacattgtatacttgcattaaaatacctgcc

SEQ ID NO: 929511 - DNA, 120 bp, Artificial Sequence
  ENSG00000287483_0 (sequence is synthesized)
tagtacctaaaataaacccacactgcgggaggcagagctaagacagagaaaaatggaattctgaagatattattagagctgctatcaatctggccctagccccgaacttttcaattactt

SEQ ID NO: 929512 - DNA, 120 bp, Artificial Sequence
  ENSG00000287483_1 (sequence is synthesized)
gggccaatagattttctcctcccaccccatcttcttggctgaagccagtttgaattagtttttgtcttttgccaccaacactgaaagagttttgatatagagacggatgaaaagacagca

SEQ ID NO: 929513 - DNA, 120 bp, Artificial Sequence
  ENSG00000287483_2 (sequence is synthesized)
ttcctgatcctgaggcggcagacgtaaactcaagtgtgagaaattgttgggaagattgaaagagcagattcgaggaggctatgcttcaagagcagctttccagaaccacaccacaggact

SEQ ID NO: 929514 - DNA, 120 bp, Artificial Sequence
  ENSG00000287483_3 (sequence is synthesized)
ggctgcttctgggccccacagccacgatgcctctgcaccaatcaggaagctgctggttttagaataaccaaatgtctccacccgtgtttgccagtaaaatcatctccctatgcctggttt

SEQ ID NO: 929515 - DNA, 120 bp, Artificial Sequence
  ENSG00000287483_4 (sequence is synthesized)
cctcctcatcaggcttcatttttccttccatgttttgtgaggagtctgtcattactttttgccattaaaagtaatggcaaaatccgcaattacttttgcaccagcctactaccttcccaa

SEQ ID NO: 929516 - DNA, 120 bp, Artificial Sequence
  ENSG00000287483_5 (sequence is synthesized)
gaggggacctagctgtctgggagtctgggaaatgtagtttttagctttcaagattttattacataggaagaaggttaggatgaatgttgagtaaaccaatctgcaatatttagcccagta

SEQ ID NO: 929517 - DNA, 120 bp, Artificial Sequence
  ENSG00000287483_6 (sequence is synthesized)
tttattttattttattttatttttctgagacagggtctcattcccatcatccaagataaagggcagtggtgcaatcacagttcactgcagccttgacttcccaggctcaggtgatcctcc

SEQ ID NO: 929518 - DNA, 120 bp, Artificial Sequence
  ENSG00000287483_7 (sequence is synthesized)
atatagtaaaactaaatgtaatatacacatttagtaaatacagggttttgccatgttgccctggctagtcttgaactcctgggctcaagcatcctgtctgcctctgcctaccaaagtgct

SEQ ID NO: 929519 - DNA, 120 bp, Artificial Sequence
  ENSG00000287483_8 (sequence is synthesized)
gggattacaggcatgagctactatgcctggcccattgcccagtattttattctgatcatataatctacacgtttgccattttcagtaaccacacatttattctttataaattcattcatt

SEQ ID NO: 929520 - DNA, 120 bp, Artificial Sequence
  ENSG00000287483_9 (sequence is synthesized)
cattcagtcagtcagtcagtcactcatcaagtgtcaggcagcatgctaggtgctatgtatcaaagatgatgaagttaatgtctgcgtgggtggtggaatttcagaagatgagggccaata

SEQ ID NO: 929521 - DNA, 120 bp, Artificial Sequence
  ENSG00000287483_10 (sequence is synthesized)
gcaaagccaattgtggagtactggagggtgctgacagccacttctcatggccaatctgttatttccatggaagattgcagtctccatgtggtcagatccccccacagtcaagcgaagcca

SEQ ID NO: 929522 - DNA, 120 bp, Artificial Sequence
  ENSG00000287483_11 (sequence is synthesized)
aagtctaaaatttcatgcaaattcttttttttttcttgtaacacagattgtatttatttgtagagacagggtcttgctatgtttcccaggctactttcaaactcctggccttaagtgatc

SEQ ID NO: 929523 - DNA, 120 bp, Artificial Sequence
  ENSG00000287483_12 (sequence is synthesized)
ctcccaccttagcctcccaaagtgctagaaatacatgaattcttcagatccttaaaaatcaatggttcttaatactagctggacgtcaggataaccagggtatcttttaaaaattactga

SEQ ID NO: 929524 - DNA, 120 bp, Artificial Sequence
  ENSG00000287483_13 (sequence is synthesized)
tgtctaccccagcctaatcatgaaaaaaacattaaacaaatcccaaatgagaggcattgtacaaacacctgaccagcactccccaagactgtcttgatcatcaaatccaaggtaagtctg

SEQ ID NO: 929525 - DNA, 120 bp, Artificial Sequence
  ENSG00000287483_14 (sequence is synthesized)
agaaactatgatgaccaagaagagcccaaggagacacaccagataaatagaatgtggtgtcctagatgggatactggaacagaaaagatcatcagggaagaactgaggaaatctgaataa

SEQ ID NO: 929526 - DNA, 120 bp, Artificial Sequence
  ENSG00000287483_15 (sequence is synthesized)
aactcaagtgtgtctctctctagggctctgtctggatttctgaaaacatgaaggggctgattacaaatctccttaccagataatagagctattcctcactctcccagccttggctaccca

SEQ ID NO: 929527 - DNA, 120 bp, Artificial Sequence
  ENSG00000287482_0 (sequence is synthesized)
gcaaggcacaggggacattacaggagttttgaaacaaaaccttcccaactgaatgattcctgacaacagtttgtaattaattagccatagtcacttgactatccacataactaaaaaatc

SEQ ID NO: 929528 - DNA, 120 bp, Artificial Sequence
  ENSG00000287482_1 (sequence is synthesized)
tgcttgttgcttggaacagggtaagtacagaaaatcaatgtttccaagattttggtctcgaaggccaaaggccccgagtattactaaaattagaatctctcttaaaatatacaaagactc

SEQ ID NO: 929529 - DNA, 120 bp, Artificial Sequence
  ENSG00000287482_2 (sequence is synthesized)
aatgaaggaatattcctattagccaacaatatccatctaaaatccctagaattagaaatttcattatttcacattaaaatgtttaatgaagcatctaatttaatctatcatctaatgctt

SEQ ID NO: 929530 - DNA, 120 bp, Artificial Sequence
  ENSG00000287482_3 (sequence is synthesized)
caacccactcttcaattttcacatatttcttttagtgaaagaataaatagcaagcaaagactgataatttctttctaattgactacataatatacctatacatgctgatactcactaaga

SEQ ID NO: 929531 - DNA, 120 bp, Artificial Sequence
  ENSG00000287482_4 (sequence is synthesized)
atgttgtggcgtctacgaaaatagtgtgaatgactcgagtgctggcacagccatttctacagtgttcactcctctgacgctggtaccccaaagcctgattactaggtgtttgaaggctgt

SEQ ID NO: 929532 - DNA, 120 bp, Artificial Sequence
  ENSG00000287482_5 (sequence is synthesized)
cagccatgcacttaaatcattgtcatgtaattcccgaagatatataggcctctgtacaattcatctgctctaacatatgcaagtgggttcgttttggtaccagttcctgaccaaactgaa

SEQ ID NO: 929533 - DNA, 120 bp, Artificial Sequence
  ENSG00000287482_6 (sequence is synthesized)
cgccctccacgggtttgcctggtatggtccctgtgctggacctcagctcacagaagtgtcttggtcactcattttgttcagatttccaaggtttccatttttttaagtcatcatcgatcc

SEQ ID NO: 929534 - DNA, 120 bp, Artificial Sequence
  ENSG00000258998_0 (sequence is synthesized)
attgtcctagatggcctgctggggaaatggattatgtaattatgaagagctgagatttaacacttatgccagtatctgctggccaggctggagggcagtggcaatcatagctcactgtag

SEQ ID NO: 929535 - DNA, 70 bp, Artificial Sequence
  ENSG00000258998_1 (sequence is synthesized)
agctcactgtagccttgaactcctgggcttaggtgttctcctgactcagtcttaaatcttttgcagagat

SEQ ID NO: 929536 - DNA, 120 bp, Artificial Sequence
  ENSG00000258998_2 (sequence is synthesized)
tgttgcccagactggtctccaactcttggactcagacgaggttttgccatgttgcccaagctgatctcgaacttcttggctcaagtgatctgcctgccttccaaagtgctgggattacag

SEQ ID NO: 929537 - DNA, 120 bp, Artificial Sequence
  ENSG00000258998_3 (sequence is synthesized)
gcatgagccaccaagcgcagccatgatttattagatcacttctaaaagccctctctccatctccaagccagcaagtgcatacagctaacctggtaactccaaactggatgagctcattcc

SEQ ID NO: 929538 - DNA, 120 bp, Artificial Sequence
  ENSG00000258998_4 (sequence is synthesized)
ttgagactggaattacaaaattggaacagctcactaataattgaagatgatttgggaaaaccattatccttcctcaggttttacaaggtttttatgactcatttataaggtcctacagct

SEQ ID NO: 929539 - DNA, 120 bp, Artificial Sequence
  ENSG00000258998_5 (sequence is synthesized)
aaaaaaaatcatgctgtatttcagagaagtttaacttgaaaatatttttttcactaattaaaaattcccattataccttatagttgcaattgtatccttattgctgaaagatatccatac

SEQ ID NO: 929540 - DNA, 120 bp, Artificial Sequence
  ENSG00000258998_6 (sequence is synthesized)
tatccttattgctgaaagatatccatactacctaccacttctttaaaatttaaaaaattctataaataaaaaatataacaattgcaaatatgtaaataacttccaacataaaacaaaatt

SEQ ID NO: 929541 - DNA, 120 bp, Artificial Sequence
  ENSG00000258998_7 (sequence is synthesized)
aaattaagttgtaattatgatagaaataatctgtaaaaggtatttttagcaaaatttattaatacgggtagcaataataatacccaattatatatgcatattgtttgtattttagaacct

SEQ ID NO: 929542 - DNA, 120 bp, Artificial Sequence
  ENSG00000258998_8 (sequence is synthesized)
acctgtgacaaatgaaaatggttttcctagataagaacgaaactgtgttgggtggctaacaagattgaaactcatctgactttgagaaataaatcaatttggtttgtttatttacaatcg

SEQ ID NO: 929543 - DNA, 120 bp, Artificial Sequence
  ENSG00000258998_9 (sequence is synthesized)
ttatttttccttttaccaatacctaagttatttcactgtaaaactttcatagaagaatttcaggaaaggcttgtatttacgtgttatagatgaggtacaccacagtgatttagatcagca

SEQ ID NO: 929544 - DNA, 120 bp, Artificial Sequence
  ENSG00000258998_10 (sequence is synthesized)
agtttcatggaagacaatttttccacagatcaggggtgggcagagtttgggggaatggtttctggatgattcaagcggattacatttgttgtgcaccatatttctattattattattgca

SEQ ID NO: 929545 - DNA, 120 bp, Artificial Sequence
  ENSG00000258998_11 (sequence is synthesized)
aagcggattacatttgttgtgcaccatatttctattattattattgcattgtaatatgtaacaaaatagttatacaactccataatgtagactcagtgggagccctgagcttgttttcct

SEQ ID NO: 929546 - DNA, 120 bp, Artificial Sequence
  ENSG00000258998_12 (sequence is synthesized)
caaagtgtgctgcttatgtccagtctacttcgtaatctcattttgattgctgtcactgcagaaaaccctgtaacattctcaaaattctattctctctagggtaaaattaaactgcgggac

SEQ ID NO: 929547 - DNA, 120 bp, Artificial Sequence
  ENSG00000258998_13 (sequence is synthesized)
atagcgcagaagacttgtcacaatttaggaccaacctaccaagacttcttgatctctttccacttcttgcccctcactgtgtttgatttctgccttccagtctgaacttctcactatatt

SEQ ID NO: 929548 - DNA, 120 bp, Artificial Sequence
  ENSG00000258998_14 (sequence is synthesized)
ccagaaaaggcctgttaaagagatctggtagtcaaaagcaacctcttttttgcttgtgctctctgttatacataagaaaccagtcctgctgcagctccatatttgcattactaatttaat

SEQ ID NO: 929549 - DNA, 120 bp, Artificial Sequence
  ENSG00000258998_15 (sequence is synthesized)
cagttagcgggacacatgctctttataacccaaaaaattgaagcatgaaatttgggagtcatacccatcacccaaatgtggcataacaatgttcttcttccccgcaaagcagtgtccttc

SEQ ID NO: 929550 - DNA, 120 bp, Artificial Sequence
  ENSG00000258998_16 (sequence is synthesized)
cccaaagaaattctggggattggcattttcttcatccactcctttcattatttcctttacctatttctctgagtctattagcatccttggaggggggaatgtatcttatttattgttata

SEQ ID NO: 929551 - DNA, 120 bp, Artificial Sequence
  ENSG00000258998_17 (sequence is synthesized)
tctcccaggctcacacatcactcaataaaggtttgttgaatgaaacaataaatggatgcaagactaaatgaacaaagaaaagccacggggaagataacaatgttatgtcataattcagga

SEQ ID NO: 929552 - DNA, 120 bp, Artificial Sequence
  ENSG00000258998_18 (sequence is synthesized)
tcatctttttctgttttttcccctccagctttattgaggtataattgacaaataaaaattatatatattcaaggtgtccaacaagatgttttgatatacatatacattgtgaaatgatta

SEQ ID NO: 929553 - DNA, 120 bp, Artificial Sequence
  ENSG00000258998_19 (sequence is synthesized)
ccacaatcaaactaattagcatgtccattacctcacataattaccttttttatgtgtgctgagaatacttaagatttgctttcttagcaaattttaagtatacaatacattatgattaac

SEQ ID NO: 929554 - DNA, 120 bp, Artificial Sequence
  ENSG00000258998_20 (sequence is synthesized)
tatagtcatcatactttacagtaagtctccagaacttacttcatctgcaggtttgtactctgaccaacatcatcttatttcactccccaccccactttcagcactggtaaccacatttct

SEQ ID NO: 929555 - DNA, 120 bp, Artificial Sequence
  ENSG00000258998_21 (sequence is synthesized)
attctaagccttctggtgaaatttctttcttatttcactcccagtgagtaacacaagagaaaaataaacaacaaaagccagtcaataattataaagtgaatcttaccagtatagagttat

SEQ ID NO: 929556 - DNA, 120 bp, Artificial Sequence
  ENSG00000258998_22 (sequence is synthesized)
aagccttgtttttacttcactgataatgttgtcgtgaacactgtttgaataatgaagactaaaggaatgatggcatgcactgtgagttcttgatgtggttgaagcaaaattcccaacaaa

SEQ ID NO: 929557 - DNA, 120 bp, Artificial Sequence
  ENSG00000258998_23 (sequence is synthesized)
cagacattttgctatttcattagtgtttatggctgataaataccttgtatgtttgctatactattgtgttagtaacataattttatttttatgtaacactaacaataaatagataaaagc

SEQ ID NO: 929558 - DNA, 120 bp, Artificial Sequence
  ENSG00000258998_24 (sequence is synthesized)
gctgggattacaggcatgagccaccaagcgcagccatgatttattagatcacttctaaaagccctctctccatctccaagccagcaagtgcttctttgcaccccagctctaaaacaaagc

SEQ ID NO: 929559 - DNA, 120 bp, Artificial Sequence
  ENSG00000258998_25 (sequence is synthesized)
ctaaaacaaagcccttggggacacaatcaaagacagtagttgccaagaggaatagggagcatggaaagaaggtgctggatgtgcatacagctaacctggtaactccaaactggatgagct

SEQ ID NO: 929560 - DNA, 120 bp, Artificial Sequence
  ENSG00000256894_0 (sequence is synthesized)
gtggcagcagcggcaggtcggatcacgttgctggccctgtgctggtacccgtttgagaccggattaaggagggaggctttggaggtgccagcggtagtaaacgagcggattgcaagttgc

SEQ ID NO: 929561 - DNA, 120 bp, Artificial Sequence
  ENSG00000256894_1 (sequence is synthesized)
aaaaagccacgttcacattcctgcaccgtaacaacggacgaacccagggagtcgcattttggagccaaggaagctcaggctgccccgcacccctgcacccccactcccccctcctcctgc

SEQ ID NO: 929562 - DNA, 120 bp, Artificial Sequence
  ENSG00000256894_2 (sequence is synthesized)
cgactgcatcgcctttgggaagatgaatagcttggccgaagttgtttttcctttccggtggccctgatcaggtgtccccgccccctcctgccgttcgccttctctcgccgccttctcccg

SEQ ID NO: 929563 - DNA, 120 bp, Artificial Sequence
  ENSG00000256894_3 (sequence is synthesized)
agacgcgactcccgcagacacgtgacctcctcccagccgccgcttcccgcgacccagatccgtccccggaacccgtgcccggcggggcgggccgggggacacgtagcgggcgccccagtc

SEQ ID NO: 929564 - DNA, 120 bp, Artificial Sequence
  ENSG00000256894_4 (sequence is synthesized)
cctgctgcgccctggtgcatgtacctttggcgttcttctcccctcggttcacttatcaccggcaataatcaacgtttcagagatcaccccggggagaatgagcacacgcggccccaaacg

SEQ ID NO: 929565 - DNA, 120 bp, Artificial Sequence
  ENSG00000256894_5 (sequence is synthesized)
agacacttggattgcgacattcggacccagtgacaacgttttcatgtatcttaaatccttcaaggagcggattgcaagttgcttcttctcgaggcaacctctccacccagcgccaaggag

SEQ ID NO: 929566 - DNA, 120 bp, Artificial Sequence
  ENSG00000256897_0 (sequence is synthesized)
gccagcactttgggaggccaaggcagatgactaaagaagtgacaaaatgaggcactgttgctcctccagtaactggtctcaaatcagcattctgctgtcagcatctgggagtaaaaccag

SEQ ID NO: 929567 - DNA, 120 bp, Artificial Sequence
  ENSG00000256897_1 (sequence is synthesized)
cagcattctgctgtcagcatctgggagtaaaaccagacaggtctcttccagactgccatacccttcctctgctccaacctagctccctgcaaatgcaagccacaaaattcaatgcctaga

SEQ ID NO: 929568 - DNA, 120 bp, Artificial Sequence
  ENSG00000256897_2 (sequence is synthesized)
ttacagtgtaaagaaagtttacactgtaaagaaggttacacgcatgtcataaggtgatgcaacaaagaaaaaaagcaatctcagtctggcacaagttcaaagcacttgtcattatcctgt

SEQ ID NO: 929569 - DNA, 120 bp, Artificial Sequence
  ENSG00000256897_3 (sequence is synthesized)
tagtcaggaagctcttcccctagaataccctacactgcttcttcccatctccaggcataagctaaattcctctattcccatgtcctagactcctggagaaaacaagaaaacaaatttctt

SEQ ID NO: 929570 - DNA, 120 bp, Artificial Sequence
  ENSG00000256897_4 (sequence is synthesized)
cctgtctgagctctgggttctgacttcaacttcaagctgccttattagcggtcacctgcctctttagctgggcaggaaacctaccccactctgtccgcggcactcctctgactgcctttc

SEQ ID NO: 929571 - DNA, 120 bp, Artificial Sequence
  ENSG00000198590_0 (sequence is synthesized)
acatcctcagaatgcaggaagtgcctgtgcttgctgtgagtctttgtggacagaggcaggatcatgctggctagaatctagtggacaagggcagcacattccccctgttcccaggtgggt

SEQ ID NO: 929572 - DNA, 120 bp, Artificial Sequence
  ENSG00000198590_1 (sequence is synthesized)
ccagagatgtcgcctgggagccagggcctggagttctgttactgtggctgagcttgcacccaagctacaagatgacatcctactcttccctcacctttctacaagtagaggagtctcttc

SEQ ID NO: 929573 - DNA, 120 bp, Artificial Sequence
  ENSG00000198590_2 (sequence is synthesized)
tcatggccaccattgtcccaggatgtgaggtctggaacagctgcagccattttgccaccatgggaaacctgggacatctgaactgactccatgaagcctgaagagaaagctaataagaag

SEQ ID NO: 929574 - DNA, 120 bp, Artificial Sequence
  ENSG00000198590_3 (sequence is synthesized)
gcagagagaagaggaagagtcttggtctttggaaatatcttttggagctgctggatcaagtatcacttgaagtattattgaatttattccccgaaggagagcggctaagagtattgccca

SEQ ID NO: 929575 - DNA, 120 bp, Artificial Sequence
  ENSG00000198590_4 (sequence is synthesized)
gccacaggctctcaaccaccaacccgagcctcagattctcctcacacagccacagctgtaccacatggcccacgtgaaatctgaatccacatgaaaacaatggcaacaagaaaaaggtgt

SEQ ID NO: 929576 - DNA, 120 bp, Artificial Sequence
  ENSG00000198590_5 (sequence is synthesized)
aaactttccagaacaggcccagaatttgaaaatgtgataaagaggttattgtgcgcccgaacttttcacacaagaattggaggagatttaacacatggaataataaacagaggaaggcgg

SEQ ID NO: 929577 - DNA, 120 bp, Artificial Sequence
  ENSG00000198590_6 (sequence is synthesized)
tctttggggcaatcataaatatggctgcttcagtttctggggtgattggtggtctaaagttttcaagaacctactatgtgaaaggcatttgacattcactaatttaatcccaactactac

SEQ ID NO: 929578 - DNA, 120 bp, Artificial Sequence
  ENSG00000198590_7 (sequence is synthesized)
tccattttgaaggaaaaaaatgaaggctctgaaagtgtaaatcgcttactgaagggcacacggccaggatgacagcggagccaggatcaccccaggtctgtctcattgcatatgtcatgg

SEQ ID NO: 929579 - DNA, 120 bp, Artificial Sequence
  ENSG00000198590_8 (sequence is synthesized)
caggtctgtctcattgcatatgtcatggctctgcaaactggggcaataggtgagcagggagaagagtcatggccaaataaaattgagacataccgatacacacacacacacacacacaca

SEQ ID NO: 929580 - DNA, 120 bp, Artificial Sequence
  ENSG00000198590_9 (sequence is synthesized)
tattaaggtacaactaatgtacaataaggtgtacatatttaaaggatactatttgataagttttgacatatgtctgtacctgggaaaccatcactacaatcatgatggtgagcatatcta

SEQ ID NO: 929581 - DNA, 120 bp, Artificial Sequence
  ENSG00000198590_10 (sequence is synthesized)
atactctcaaaagtttcctcttgccttttgtaattccattctgccatcccacctgtccctcccactcctgatcccaggcaaccactgatctgctttctgtcactatagattagttacatt

SEQ ID NO: 929582 - DNA, 120 bp, Artificial Sequence
  ENSG00000198590_11 (sequence is synthesized)
ttctagaattttatataaatgaaataatacaatatgtactatttttctgtgtttctttcactcagcaaaattattttgagattcattcatgttattgcttgtttattcctttatattgtt

SEQ ID NO: 929583 - DNA, 120 bp, Artificial Sequence
  ENSG00000198590_12 (sequence is synthesized)
gagtagttattccattgtatgaatatgccacaatttgtttatctgttcatctacatatggacatctatagatgtttgcacttttgggctattaaaaatcaagttgatgtgaatgtttgta

SEQ ID NO: 929584 - DNA, 120 bp, Artificial Sequence
  ENSG00000198590_13 (sequence is synthesized)
gctgctggcagatctgggactgcaaaccagccttccattgctccacacaggtgtctcttctcacgtggaatcacagcattggatggactgaaaagaggaagaggctgcaatggagcagca

SEQ ID NO: 929585 - DNA, 120 bp, Artificial Sequence
  ENSG00000198590_14 (sequence is synthesized)
cacctggtgcgtggggatgcctggaaaacaaaattaggagagccctgggtcagcattgctctggcactggctgggccgggggccatcctgattctagaattatcttggttcctgggatag

SEQ ID NO: 929586 - DNA, 120 bp, Artificial Sequence
  ENSG00000198590_15 (sequence is synthesized)
ccactcttgctgtgcaaactcaatttcctgtatcctactctacgtattttcgaagcagtcatcgccatatggtatactctctctagattattttcttgggcatttgcctattgtcacctt

SEQ ID NO: 929587 - DNA, 120 bp, Artificial Sequence
  ENSG00000198590_16 (sequence is synthesized)
ttcttctcactagcatgtggctccatgagggcaaatacttaatctgttatgttcactggggcatctccagaacttgcctgaaacccagtaggtgttcaataagttctggagggatgaatg

SEQ ID NO: 929588 - DNA, 120 bp, Artificial Sequence
  ENSG00000198590_17 (sequence is synthesized)
aatgactcctctcactgtaaggaagtttgggatatgtagtctatctgggcacatttctatctgttctctttgcaggggagaaagggatgaggatgttggataagcagctcagcatgttcc

SEQ ID NO: 929589 - DNA, 120 bp, Artificial Sequence
  ENSG00000198590_18 (sequence is synthesized)
cccagagtggagaagttcagttcaatccaacatccttatattgcaatgaggataaagaccacagaccctatggcctgtatgacccagctgcccatttctaggaacccattcctacagaaa

SEQ ID NO: 929590 - DNA, 120 bp, Artificial Sequence
  ENSG00000198590_19 (sequence is synthesized)
tgacaacatgcgtgtgcaaacagcaacaatgacaaacataccctgggatgctttccctctgtggtttgttatagtaagatagcggctacagcttatatatcatcaacagaggactggcta

SEQ ID NO: 929591 - DNA, 120 bp, Artificial Sequence
  ENSG00000198590_20 (sequence is synthesized)
aatgatggcacttcattctgcagaatctttttttgtagtcaaaaagaacaagttagatctatatgtgtgaacatggaaaggtgtacatgacttaagtagaaaaattaagttgcagaacga

SEQ ID NO: 929592 - DNA, 120 bp, Artificial Sequence
  ENSG00000198590_21 (sequence is synthesized)
ggctgaatcagaggggaggccaagagtttgtgagtggagcaccagatgagtctgatagaaactttcagacccctgtaggtggggagctagacttgagcttcttacataaacccaggaggc

SEQ ID NO: 929593 - DNA, 120 bp, Artificial Sequence
  ENSG00000198590_22 (sequence is synthesized)
actgaagactggtccatccattaaaccagaagtaaaaaaaacaaaaaccaaagaccaaaaccctctgctatccagtctgggaaagcagaagaagctgcactttgccccggtcagtggata

SEQ ID NO: 929594 - DNA, 120 bp, Artificial Sequence
  ENSG00000198590_23 (sequence is synthesized)
gaagaagagttgcctgtgagcaattcgaggctgagcctgaactgtgtgcgtgtgtgaagttcagattcacaccacgtgagtgatgcaggaacataaagtcatgcaggaactccaggcaag

SEQ ID NO: 929595 - DNA, 120 bp, Artificial Sequence
  ENSG00000198590_24 (sequence is synthesized)
gagtggaacataaacactgccctgaagccctcagaatcccagcataagctgatgagaagctaaaagatgcctgcatatcccagggtgctggaacttccatggagaatcaccctgctgaag

SEQ ID NO: 929596 - DNA, 120 bp, Artificial Sequence
  ENSG00000198590_25 (sequence is synthesized)
acgagctagcgggaaagattccaagccatgagaagaaatgaattcgtgagagggagcagccacagacacacaaataagattgcatcccaagaaggagagatgataaaacaatctggaaga

SEQ ID NO: 929597 - DNA, 120 bp, Artificial Sequence
  ENSG00000198590_26 (sequence is synthesized)
aaccttaacataggtacacagaagaaagtgctggtgtcatgagagccaagaggaggagcacctaactgatcattgagagagtgacacctggtcttaggcttagaagaggagtagaagaga

SEQ ID NO: 929598 - DNA, 120 bp, Artificial Sequence
  ENSG00000198590_27 (sequence is synthesized)
gctcatgaaatttgcctgccttctaatcagtgcgtggagactgcaagagtgtacttctacttattaaaaaaagttgactgtagaacagcctcaggcaggtcctctaggaggtgttccaga

SEQ ID NO: 929599 - DNA, 120 bp, Artificial Sequence
  ENSG00000198590_28 (sequence is synthesized)
agaagacattgttatcatcagagatgacagctccatatgcgttactgctctgaagactatcagtgggacaagatgtggaggtggaagactgatattgatggccctgagcctgtgtcggcc

SEQ ID NO: 929600 - DNA, 78 bp, Artificial Sequence
  ENSG00000198590_29 (sequence is synthesized)
tttctttgttaactttatctgataggattttgaattcctttcctgtgttattttgaatttcattgagtttactcaaaa

SEQ ID NO: 929601 - DNA, 120 bp, Artificial Sequence
  ENSG00000198590_30 (sequence is synthesized)
tttcctgtgttattttgaatttcattgagtttactcaaaaattctaaattctcttgtctgaaaggtcacatatttctgtctcttcttgattggtcactggtgccttatttagctcaattg

SEQ ID NO: 929602 - DNA, 120 bp, Artificial Sequence
  ENSG00000198590_31 (sequence is synthesized)
gtgaagtaatgttttcttggatggtcttgatgcttgtggagtttgttggtatctgggcattgaagagttgggtatttattgtagtcttcgaaatctaggcttgtttgtactcatccttct

SEQ ID NO: 929603 - DNA, 120 bp, Artificial Sequence
  ENSG00000198590_32 (sequence is synthesized)
tcagaagactttccaggtattcagagggacttgggcattgtgatctaaatttttggtcatagcagccatatctgtatgagggggcaccccaagcccagtaatgctgtggcttttgcagac

SEQ ID NO: 929604 - DNA, 120 bp, Artificial Sequence
  ENSG00000198590_33 (sequence is synthesized)
ttgtagaggtactgccttggtgttcttagataagatctggaaagattcactggattaccaggcagagactcttgttctcttccattactttctcccaaacaaatggagtctctctctgct

SEQ ID NO: 929605 - DNA, 120 bp, Artificial Sequence
  ENSG00000198590_34 (sequence is synthesized)
gagctgcctggagctgggggtggggtgacatatgcacccctatgattacaactactgggactatgctggtcaggcctgaagccagctcagcaatgggtctcaatcaaggccctcagtaac

SEQ ID NO: 929606 - DNA, 120 bp, Artificial Sequence
  ENSG00000198590_35 (sequence is synthesized)
ctctgcctggctgccacctatgtttgtgcaaggccctaagggctctaccattagcaggtggcaaagccagccaggcttgcgttcttctctgcagggcagcacattccccctgttcccagg

SEQ ID NO: 929607 - DNA, 120 bp, Artificial Sequence
  ENSG00000198590_36 (sequence is synthesized)
gttctttatgttgtaagccagtttgaggtggatttcctgtcacttatggctaagagaacccttgcttattctatacctaactcacaggcttgttgtgaggtttaagtaaaatagcactta

SEQ ID NO: 929608 - DNA, 120 bp, Artificial Sequence
  ENSG00000198590_37 (sequence is synthesized)
caaataatactcaatgaatggtaagcaatattgttatgatgcatttatttttacagcgttatgtgacctttttattctctactccaacattggcatgtttctgttattcttttcagtatt

SEQ ID NO: 929609 - DNA, 120 bp, Artificial Sequence
  ENSG00000198590_38 (sequence is synthesized)
gtatggtgctaattcctctgacatctaattttcactttttggcaatatttggtctcatcaagctttacacataaatattttcagcaaagtgctccaaatgcctttttcagaaatctgaat

SEQ ID NO: 929610 - DNA, 120 bp, Artificial Sequence
  ENSG00000198590_39 (sequence is synthesized)
ttttttttttttttcctggtattgtatattttagttctaaaattcccacttggctctctatagcttccgtttctttgatgagaattgtttgtttgtttcaagcatgtttgtaattgctca

SEQ ID NO: 929611 - DNA, 120 bp, Artificial Sequence
  ENSG00000198590_40 (sequence is synthesized)
ttgaagtgttggtaggatagctgctttaaaaaatctttgccagatatttctaacatctctgtcatcttggtgttggtatctactgattatctatttccactcaagtagagattttcctgg

SEQ ID NO: 929612 - DNA, 120 bp, Artificial Sequence
  ENSG00000198590_41 (sequence is synthesized)
ttcttggtatgtctagtgactttcaactgaaacctgaaccttttggatattatgaaactctggatcttctgttttagctggccctttttgacacactttgacggggaagggcacctagtt

SEQ ID NO: 929613 - DNA, 120 bp, Artificial Sequence
  ENSG00000198590_42 (sequence is synthesized)
gggggcacaccattactgccaggtgagggcagaagtctaggttttccacttggccctcattaacacctggagttggggagggtctccttattactgttgggtggaggtgtagagttaggg

SEQ ID NO: 929614 - DNA, 120 bp, Artificial Sequence
  ENSG00000198590_43 (sequence is synthesized)
ggtctccttattactgttgggtggaggtgtagagttagggttccccagtaggcctcctctgatacccagtaggcctccactaattacatatatgtatacacatatacacacacacacaca

SEQ ID NO: 929615 - DNA, 120 bp, Artificial Sequence
  ENSG00000198590_44 (sequence is synthesized)
aatatgatagtacaggataacattaaggttgtttgacctaagggcaggatttagtaagtatgtgaaagaaatctcagaagaattcccgcaactggggttaattagcatccaagatgaagt

SEQ ID NO: 929616 - DNA, 120 bp, Artificial Sequence
  ENSG00000198590_45 (sequence is synthesized)
tgttttacccttcacaggggtggaagtccagacttcccatatggtctccactgacatggggacatgatatggtgggaaggtctcactgcctcccaccagggatgcttcctacgtggcctt

SEQ ID NO: 929617 - DNA, 120 bp, Artificial Sequence
  ENSG00000198590_46 (sequence is synthesized)
ttctgacatcaccctggacagagtgtgcttcctttacagcttggcagatgttagaggtctaggctgtccactcgacatttgctggcatgaatgggggtgggcctgcagtattttctgtgg

SEQ ID NO: 929618 - DNA, 120 bp, Artificial Sequence
  ENSG00000198590_47 (sequence is synthesized)
tgtttggctggagtagacagttgtctgaaagctttctgtcttgctaggctgcctctgtcctggttccttggctagagagaggagttcttttttggagattattttttttttttggtctga

SEQ ID NO: 929619 - DNA, 120 bp, Artificial Sequence
  ENSG00000198590_48 (sequence is synthesized)
attcagcatttccaggtagctggcttcttcagctccaagtcagggatctatgaagcaaagagaaaacccagggaactcaccaccatggcattccttaggtcccaaggtctctagctggtc

SEQ ID NO: 929620 - DNA, 120 bp, Artificial Sequence
  ENSG00000198590_49 (sequence is synthesized)
tggcttcgcttcgtcttttagagtgttatatttgttttatatataatgtccagtgtttctagttgcattctgtgggaggcatagggagaagtatgtctatcttcccagaagcagaagtct

SEQ ID NO: 929621 - DNA, 120 bp, Artificial Sequence
  ENSG00000198590_50 (sequence is synthesized)
tacaatgtgattttatttatgtaaattttaaaagttgtatgtattgtcacagatatacatacttttaataaatgtatgcatatataaactggaaggatatatagttaattcaccatggtg

SEQ ID NO: 929622 - DNA, 120 bp, Artificial Sequence
  ENSG00000198590_51 (sequence is synthesized)
ggtgtttataactgatcttccctgatcactaccacccaatctctgtttcctcacacttctttagttttttcttatggcatctagtattgtctgccctcatgttgtgtgtttatttgttta

SEQ ID NO: 929623 - DNA, 120 bp, Artificial Sequence
  ENSG00000198590_52 (sequence is synthesized)
ttgtctttttcctcatactagaatgaaaactccaagagggcaggaacattatccatcctgctcactgttgcatccttaacacttagaatatgtagtaagcactcaataagcatgtactga

SEQ ID NO: 929624 - DNA, 120 bp, Artificial Sequence
  ENSG00000198590_53 (sequence is synthesized)
gtgaataaattaatgaaaaagtgagtaagaaaggggataaaatgtatcagtactttctctgtaattaaaaacaaaacattttgaaaagactgagaatatcacctctttctccaatgagaa

SEQ ID NO: 929625 - DNA, 120 bp, Artificial Sequence
  ENSG00000198590_54 (sequence is synthesized)
ggcacatggaaatgcaagggagtatgagaaacacagttatgggcagaatatggactcttattttataagtcaattaatcacaaatactgctattttaaggaaccaattacttgtaacaca

SEQ ID NO: 929626 - DNA, 120 bp, Artificial Sequence
  ENSG00000198590_55 (sequence is synthesized)
actcacaactgatcaagacacaccagtgggaatgagtacagctggaaaaagctctctattgttttaattcctactttattattattgtttttttaaattttttaaacaacttttaggttc

SEQ ID NO: 929627 - DNA, 120 bp, Artificial Sequence
  ENSG00000198590_56 (sequence is synthesized)
agaggtacatgtgcagctttgttatataggtaaactcgtgtcataggggtttgtcgtagagattattttatcacccaggtactaagcctagtactcaatagttattttttctgatcctct

SEQ ID NO: 929628 - DNA, 60 bp, Artificial Sequence
  ENSG00000198590_57 (sequence is synthesized)
atttgacccagcaatcccattaccaggggagaaagggatgaggatgttggataagcagct

SEQ ID NO: 929629 - DNA, 120 bp, Artificial Sequence
  ENSG00000198590_58 (sequence is synthesized)
ggtgagtactgcctggctacccctgatattcactcaagacccaagggctcttcagtcagcttgtagtgaatgcttctagacctaggactctcccttcagggcagtggtctcccctctggc

SEQ ID NO: 929630 - DNA, 120 bp, Artificial Sequence
  ENSG00000198590_59 (sequence is synthesized)
ccagagcaggtccagaaatatcatccaaaagccaaggcctggaatcaggaaccccatgagcctacctggtgctctaccaaactgtggccaaagtggtatgtaagctgcaaacaaagtccc

SEQ ID NO: 929631 - DNA, 120 bp, Artificial Sequence
  ENSG00000198590_60 (sequence is synthesized)
ctttattcttacctctccttttctcaagcagaaggaatctctccccatagccgctatagtttcaaatgtgctgggttatacctgaagccagcacatctctgagtctcaccttaaggccca

SEQ ID NO: 929632 - DNA, 120 bp, Artificial Sequence
  ENSG00000198590_61 (sequence is synthesized)
tggtgagtactgcctggctgccactggtgatttttcagaccccaagggctttttattcagcaggtgatgagagatgccaggactgggtccttcccttcaaggcagtgggtttccttctgg

SEQ ID NO: 929633 - DNA, 120 bp, Artificial Sequence
  ENSG00000198590_62 (sequence is synthesized)
tccagggagtatctaggaatattatccaggagctagggcctggaatgggagcctcagggaatgggaactctgcctgtgccctatcctgctgtggctacgctggcatccacactgcaaggc

SEQ ID NO: 929634 - DNA, 120 bp, Artificial Sequence
  ENSG00000198590_63 (sequence is synthesized)
aaagtcctctttattcttctctctctgctcctaaagcagaaggaaggagtctttcccagagctgccagctatactacctgtggttgagggagggttggcgtaagcactcccttggacacc

SEQ ID NO: 929635 - DNA, 120 bp, Artificial Sequence
  ENSG00000198590_64 (sequence is synthesized)
cttagctagtgtttcactgcgtcatgtggcccccaactgctctgcctccaagtccaagacagcaccaggacgtgcctagaaattgcaggccttgtggtgtagactgcctctcaagtttat

SEQ ID NO: 929636 - DNA, 120 bp, Artificial Sequence
  ENSG00000198590_65 (sequence is synthesized)
ttagaatcacagagcactttagcccatggtggcaagacttgccagaacccaagttctgactgctgggatgggtgattcccctctggctggggctggtctaaatgctccctctgtggtcgc

SEQ ID NO: 929637 - DNA, 120 bp, Artificial Sequence
  ENSG00000198590_66 (sequence is synthesized)
tgcctgagttctgcctggtgttgttttctgctgtgacaggcaagcactgatttccaatgcaaagtcccacaatcactgtgctgttccttcctcaagtgcagattatctctccatacctcg

SEQ ID NO: 929638 - DNA, 120 bp, Artificial Sequence
  ENSG00000198590_67 (sequence is synthesized)
gattatctctccatacctcgtggctggagctgagaatgggggatgaatggcatagccaactcaagactgtcttttctactgtcttcagtgtctctttcagtgatatgaagttaaaaccag

SEQ ID NO: 929639 - DNA, 120 bp, Artificial Sequence
  ENSG00000198590_68 (sequence is synthesized)
gtttttggttcttatggaggtgcattttttttgtatgtggatagttgttcaattttatattcttgcgttgaggacaattggtggaggcttctatttggccatcttgctccacctccttgc

SEQ ID NO: 929640 - DNA, 89 bp, Artificial Sequence
  ENSG00000198590_69 (sequence is synthesized)
gtggaggcttctatttggccatcttgctccacctccttgctattattattttgaacaaactgttatctgtcagatcaattcagaataag

SEQ ID NO: 929641 - DNA, 120 bp, Artificial Sequence
  ENSG00000198590_70 (sequence is synthesized)
tcacacagccacagctgtaccacatggcccacgtgtgctccaaatgcctttttcagaaatctgaatccacatgaaaacaatggcaacaagaaaaaggtgtaaactttccagaacaggccc

SEQ ID NO: 929642 - DNA, 120 bp, Artificial Sequence
  ENSG00000198590_71 (sequence is synthesized)
ctgatcattgagagagtgacacctggtcttaggcttagaagaggagtagaagagagccagtgaagtcagggaaggcttccaaggcaaaaggaccagcaaaagggcagcacattccccctg

SEQ ID NO: 929643 - DNA, 120 bp, Artificial Sequence
  ENSG00000198590_72 (sequence is synthesized)
actgtggctgagcttgcacccaagctacaagatgacatcctactcttccctcacctttctacaagtagaggagtctcttctcatggccaccattgtcccagattatctctccatacctcg

SEQ ID NO: 929644 - DNA, 120 bp, Artificial Sequence
  ENSG00000277270_0 (sequence is synthesized)
gattacaactgctcttaggatgaagtgactggagcccagataccttatttagcaatcagtgctcggcacaaggacttgctgtgccaacgaaaaggaagcgaggcattttggctagtcacc

SEQ ID NO: 929645 - DNA, 120 bp, Artificial Sequence
  ENSG00000277270_1 (sequence is synthesized)
gcgtttttgctgcgtcacagggagacagaagatgggctgctatttcgtcggctaaatgctatcattttaagcaccgttccaaagaaaacagggatcttgccagaggaaaataacatatac

SEQ ID NO: 929646 - DNA, 120 bp, Artificial Sequence
  ENSG00000277270_2 (sequence is synthesized)
ttgctagacgagtcatttctctggttgaaaagcagttgagaaaggcaagacaaggggggcgggggcccagcagggcacctctgagcccttcctgctgctcttcaaagacagacgcatttt

SEQ ID NO: 929647 - DNA, 120 bp, Artificial Sequence
  ENSG00000277270_3 (sequence is synthesized)
cctttctacggtctccttgcaagtcttctgtaggccctgccaccttcaggctgactgactgcctccttcaaatatcagcatttggaagggtactggggagtcgacaccctcatgtctgtg

SEQ ID NO: 929648 - DNA, 120 bp, Artificial Sequence
  ENSG00000277270_4 (sequence is synthesized)
agctgactgcaggacgtctcctgtccaggtgctggcacctcatctaacatttgaaggtaaaagcagctctggcctcctgcaggtgcaaggacccgggagccgctctgtgggctgggctca

SEQ ID NO: 929649 - DNA, 120 bp, Artificial Sequence
  ENSG00000277270_5 (sequence is synthesized)
ctgactgcctccttcaaatatcagcatttggtgagttcccaccatgtcccaggccctgcgctgggtgctaggacgcaggagggggcaaaacaggccaggccttgcctttctgagcttgct

SEQ ID NO: 929650 - DNA, 120 bp, Artificial Sequence
  ENSG00000277270_6 (sequence is synthesized)
gcaggcagagcagacaagaggcctttgtccttgggccctggtatggagcatctaaaaacccttggaatttcctgagagattggagtgtctttgttatgctaatgaagtgactcactgttg

SEQ ID NO: 929651 - DNA, 120 bp, Artificial Sequence
  ENSG00000277270_7 (sequence is synthesized)
gcccctgggtggttttaggatggggaggctggtcgccagaaagaccaggcacaggaccagagagttggggacttggagctagcctgacctccagatgggggtgggggggtgttggagact

SEQ ID NO: 929652 - DNA, 120 bp, Artificial Sequence
  ENSG00000277270_8 (sequence is synthesized)
gagttcaatcgtgaggccaatgtgttaattaatcatatctacataacaaaacacaataaaaatcctggacactgaagctcagcagagctttgtgctggtggacagatggatgtgctggaa

SEQ ID NO: 929653 - DNA, 120 bp, Artificial Sequence
  ENSG00000277270_9 (sequence is synthesized)
ggagacccctgctgacccctgctgactccatgacagagggatggaaattctgcccctcccagacctcaccctatgcgttctgtttcctttataatgaaagcacaattagaggaagggtac

SEQ ID NO: 929654 - DNA, 120 bp, Artificial Sequence
  ENSG00000277270_10 (sequence is synthesized)
caatccggcttcagcaaagcatgagttaattcaacttcatactcgtgaacgtgaagcgggggttggaaggaatgaaggctgcaggacacccatgtaccaagaaaaagaaagacaaattgg

SEQ ID NO: 929655 - DNA, 120 bp, Artificial Sequence
  ENSG00000277270_11 (sequence is synthesized)
ttgttttatctactttacatcatgatggagtcctaaaaagggccccatgaaggcaggcagcccagggaggaatgactggacggtgacattgtgcagggggtctggaagttgccagcgcag

SEQ ID NO: 929656 - DNA, 120 bp, Artificial Sequence
  ENSG00000277270_12 (sequence is synthesized)
gggttagcagctgcagcctggcctggtcctgtctgcctggctgtcaaacccagaagaccgtggtttctggtggcctctgtgtgacagcggaggaggtggggcgaggcctggaagtgaagc

SEQ ID NO: 929657 - DNA, 120 bp, Artificial Sequence
  ENSG00000277270_13 (sequence is synthesized)
gccaccaaagcaatttcctctgcagcccctcatacttcgcacactggaagcttgcattctttcccagaggacagccggattacagcaccgcctctaatgcaacccgatctggtttctttg

SEQ ID NO: 929658 - DNA, 120 bp, Artificial Sequence
  ENSG00000277270_14 (sequence is synthesized)
agcgccgcggtgaacgtgcaatctatctcataaatgcatcgcagtgttccacaaatcacccacgttcatcccttgagacgtctttaactcggggcttagagttgcaaatgaattctccta

SEQ ID NO: 929659 - DNA, 120 bp, Artificial Sequence
  ENSG00000277270_15 (sequence is synthesized)
tggatctattattccatcaaatagcggagagaggggactagcttgtgcagagccttcatagagctgggctaaattcgattatgcaaagtctaacgagcaccattcagcaaaaccatggtg

SEQ ID NO: 929660 - DNA, 120 bp, Artificial Sequence
  ENSG00000277270_16 (sequence is synthesized)
ggtgtgagctgcaggccagcccctccactgggccattatccaggggtaaacaccactcgtgggttagttccacgagttactggctgatttgacctgtgatactccaaggtggaagtaacc

SEQ ID NO: 929661 - DNA, 120 bp, Artificial Sequence
  ENSG00000277270_17 (sequence is synthesized)
aaataatatgtatcatgagccccaagaacgaagccagtggagagtggtacatgctagagggtaacgcctggccctttgcaggacagcacgtcagccatgcgccatgggacgatggtggtg

SEQ ID NO: 929662 - DNA, 120 bp, Artificial Sequence
  ENSG00000277270_18 (sequence is synthesized)
gctgggacacaggaggccacggcaggaaatgggcaggtgggtgggtctatgtaagctggctttagacttcaatccacaagcatttgcagctcaactactcagcgtcttatcttatttaat

SEQ ID NO: 929663 - DNA, 120 bp, Artificial Sequence
  ENSG00000277270_19 (sequence is synthesized)
cctttcagcaataaacactcttttcacatgtagtaaggttaaggagtctacatcacaccctttatcattattaataaagggacacaccctccagggatcctagggaacctcctacccacc

SEQ ID NO: 929664 - DNA, 120 bp, Artificial Sequence
  ENSG00000277270_20 (sequence is synthesized)
ctgtggtcactctagggaaaggaaagctctcagggaccgacgggagcctgggcacatgcgccaccactctctcctttatcccctctagcccggcttgctggctctcactttcttttgtgc

SEQ ID NO: 929665 - DNA, 120 bp, Artificial Sequence
  ENSG00000277270_21 (sequence is synthesized)
actagaactcacgtacaagttgcacacccaaacccttgcatgctgcatttcagagtcaacttcagtgatttttgagagtgattttgacaatcccagtcaaaattctagcaggtttttttt

SEQ ID NO: 929666 - DNA, 120 bp, Artificial Sequence
  ENSG00000277270_22 (sequence is synthesized)
ttttacatgacaagtggattctaaaattcataggaaaatgcaaatgacctagaagagccaaagcaattttggaaggagtaaagtcgaatggctgacgctaccagatttcaagattcactt

SEQ ID NO: 929667 - DNA, 120 bp, Artificial Sequence
  ENSG00000277270_23 (sequence is synthesized)
gaaacgcacaggaatcaagacagggtggtgtcgacagaaggaaggcgtcagagcagggtgacaggaggcagggccacacacagacggctgattgatacccgacaaaaccgccgaggtaat

SEQ ID NO: 929668 - DNA, 120 bp, Artificial Sequence
  ENSG00000277270_24 (sequence is synthesized)
ttcacagggaaaggaactcttttgaacaaatggtgcaccaacaattggataaccatacggaaaaaatttaaaaaacagaagaacattgacccttcacgcacatcaaacataaattaactc

SEQ ID NO: 929669 - DNA, 77 bp, Artificial Sequence
  ENSG00000277270_25 (sequence is synthesized)
gaacattgacccttcacgcacatcaaacataaattaactcagaatccatcataggctgggtgttgtggctcatgcct

SEQ ID NO: 929670 - DNA, 120 bp, Artificial Sequence
  ENSG00000277270_26 (sequence is synthesized)
agaggtaactgagttctgtgagtcattccagtgagttatccattctgagcatgttgtgggaactccagaatttgtagccaaggtcccccgggacttgtggcttgcatctgaagtgggggt

SEQ ID NO: 929671 - DNA, 120 bp, Artificial Sequence
  ENSG00000277270_27 (sequence is synthesized)
agtcttttggagacttttgtccttaacctgtggggtctgagctgcctctgctagacagtgtcagaagtgaattgcaggatacccagttggtgtctggccagtggggttgaaatggaatcc

SEQ ID NO: 929672 - DNA, 120 bp, Artificial Sequence
  ENSG00000277270_28 (sequence is synthesized)
tgtctttgaatcttactttccatcctccacctcctccggccgcagtgcaccaagctggaagcagcaccctgcagccgggctggaccactctggagagcagtgagcccagcagagcccccc

SEQ ID NO: 929673 - DNA, 120 bp, Artificial Sequence
  ENSG00000277270_29 (sequence is synthesized)
tagggatcttcagccccagctatgagtctcagaagccatgccccagggctgtggtttcacaggtgcaggtccaaccctcctttctctgccttgtggctgcctgtcctggggcaggttacg

SEQ ID NO: 929674 - DNA, 120 bp, Artificial Sequence
  ENSG00000277270_30 (sequence is synthesized)
ttgcccctgggagcctctgttttctgtaaaatggtcccagtaatggcatgcaaactcctgagcgctgtaaggatggacagagacagcatggcgcagtcagtccctgttactacggaaccc

SEQ ID NO: 929675 - DNA, 120 bp, Artificial Sequence
  ENSG00000277270_31 (sequence is synthesized)
atatcagcatttgatggatgtgctggaaggagacccctgctgacccctgctgactccatgacagagggatggaaattctgcccctcccagacctcaccctatgcgttctgtttcctttat

SEQ ID NO: 929676 - DNA, 120 bp, Artificial Sequence
  ENSG00000225775_0 (sequence is synthesized)
gaaagattagctgagtttttctgctgacttaactgttgaatagcatcatcctcaggcactaccaaaagtgtttagagcactctgttgaaaatggcagtatttgaagaaactggatgtcac

SEQ ID NO: 929677 - DNA, 120 bp, Artificial Sequence
  ENSG00000225775_1 (sequence is synthesized)
ttaaaatatgatccttggataaacatcacatgctgctggccttcttacaaaatgagtgtgagtgaagtgcttggctctgcgagatggtcctggaatatcttcaccactcttcacaattac

SEQ ID NO: 929678 - DNA, 120 bp, Artificial Sequence
  ENSG00000225775_2 (sequence is synthesized)
ttcactgtctcttaattcaaattctccacatgtaaatacaagtcagatcaccttacaatttaatctttaagcaaaactgtaaatcatcatttcccgcgacattacaattgttgggggaaa

SEQ ID NO: 929679 - DNA, 120 bp, Artificial Sequence
  ENSG00000225775_3 (sequence is synthesized)
ggtgtttggtgtcacatctaatggcttgaaaactcggagcatctctggacacagtcaatatccaggtctcaaatatgcatttactgtgtttattataatgactgcctttgtattcactgc

SEQ ID NO: 929680 - DNA, 120 bp, Artificial Sequence
  ENSG00000225775_4 (sequence is synthesized)
aatcattttctactgtttcttcctttgtgtaatcatttcttcccttcccctccattgtatttttttagagtaattctatattctgtttttgaatacacacttctctttcttttaaaataa

SEQ ID NO: 929681 - DNA, 120 bp, Artificial Sequence
  ENSG00000235397_0 (sequence is synthesized)
agacgtcgttgtgagacaggcctgaatgggcccttctgaccacctgagcctggccttggctctgctctgaggatctgaaggttcagagctcacagggaccaagggaaaaagcaagtgctg

SEQ ID NO: 929682 - DNA, 120 bp, Artificial Sequence
  ENSG00000235397_1 (sequence is synthesized)
ggggatgtgccactctctcattgttgcaggttgctttcccagacactcactggaaggaagaacgggaattgttagtttaagctcatcactaaagtcgcatcaaatgcacggaccttctcc

SEQ ID NO: 929683 - DNA, 120 bp, Artificial Sequence
  ENSG00000235397_2 (sequence is synthesized)
ccttctcccaggaaggcggccttttgcattatgaaccccactggaagagctccaagtcttcacttgctgtggtcaagaactgtaaccacaggagagacgggatttcactatgttggccag

SEQ ID NO: 929684 - DNA, 86 bp, Artificial Sequence
  ENSG00000235397_3 (sequence is synthesized)
aacactacaccagacctatgattcagatctgtcagcacttttggggatgtgggtcttgccctggccttcagttcctctccagatta

SEQ ID NO: 929685 - DNA, 120 bp, Artificial Sequence
  ENSG00000235397_4 (sequence is synthesized)
cagtggtcagtctatgcagccagggccctgtcactaaaatctgtaggctgttcagtgtgaagatgaggagtgactgacagtccaacgtcagggcaaggatgacttagggatcttcaccca

SEQ ID NO: 929686 - DNA, 120 bp, Artificial Sequence
  ENSG00000235397_5 (sequence is synthesized)
gaggaatactatgtacaactgttaaaatgtttacagggtgtgtaggaaccacagaaaatgcttctgtttcaatgtcacaagacaaaaagcaggaatgcaaagttgcgttcacagtgtgaa

SEQ ID NO: 929687 - DNA, 120 bp, Artificial Sequence
  ENSG00000235397_6 (sequence is synthesized)
aaagaaaatgcttgggaaaaagtccagaaggaactacaccaacacgtggccaggcatgatggctcagtcccgtaaccccagcactttgcgaggccacagcaggaggattgcttgaggcca

SEQ ID NO: 929688 - DNA, 120 bp, Artificial Sequence
  ENSG00000235397_7 (sequence is synthesized)
ggagttccagatcagcctggccaacataggaagacctcgtctctactaaaaattaaaaattcggctgcgtgtggtggtgtgcgcctgtacttccagctactaggcaaggctgaggtagaa

SEQ ID NO: 929689 - DNA, 120 bp, Artificial Sequence
  ENSG00000235397_8 (sequence is synthesized)
ggatcgtttgaacctaggagttcgaggctgcatgggccatgattgtgccacaatgctccagcctgggcaacagcaagacactgtctcaaaacaaataaataaaaataaaaataaatacac

SEQ ID NO: 929690 - DNA, 120 bp, Artificial Sequence
  ENSG00000231557_0 (sequence is synthesized)
aggtttaacagtggattttgtacttttacagctgctctttgataaaagatgaagatgaaaataaatttatattgctagcttgatgagctcaagagtctaggtgaagatttacaatttctc

SEQ ID NO: 929691 - DNA, 120 bp, Artificial Sequence
  ENSG00000231557_1 (sequence is synthesized)
tgggccaggaatccaggcacacttggctgggccctttgactttcaaggtgacatcagggcatggactcacaacatgcatttcatcagaacagcaagtaaggagaaccagaaagagagaat

SEQ ID NO: 929692 - DNA, 120 bp, Artificial Sequence
  ENSG00000231557_2 (sequence is synthesized)
ttagaagtgagtcactgtttctagccaacacatttaagaggaggagattatagcggggcaggaataccaggaggcgtggatcgttgggacccagcttagaaggttcacaaccacactgtc

SEQ ID NO: 929693 - DNA, 120 bp, Artificial Sequence
  ENSG00000231557_3 (sequence is synthesized)
tgatgaattcttggtgctctaaacctgattttatccacctctctgaaggagattctgagggtcagctacaatatggcattgggtgttttagtgtgttaacgtcttaaatttacactttat

SEQ ID NO: 929694 - DNA, 120 bp, Artificial Sequence
  ENSG00000279932_0 (sequence is synthesized)
tggctgcatgaatgtcttcctttgataagtgtctgttcatatcttttgcccgctttttgatggaagacagtgtggccattcctcaaggatctagagccagaaatgaaataccatttggcc

SEQ ID NO: 929695 - DNA, 88 bp, Artificial Sequence
  ENSG00000279932_1 (sequence is synthesized)
cctcaaggatctagagccagaaatgaaataccatttggcccagcagtcccatcatggctaggaaaacacatccaaacccatgtttatt

SEQ ID NO: 929696 - DNA, 85 bp, Artificial Sequence
  ENSG00000279932_2 (sequence is synthesized)
gacatgttctcactcataagtcggagttgaacaatgagaacacttggatacgtggaggggaataacacacactggggccggttga

SEQ ID NO: 929697 - DNA, 120 bp, Artificial Sequence
  ENSG00000279932_3 (sequence is synthesized)
ggatacgtggaggggaataacacacactggggccggttgaggagttgggggcgaggggagggagagcattagcacaaatagctaatgcatgcggagcttaaaacgtagatggcaggttga

SEQ ID NO: 929698 - DNA, 120 bp, Artificial Sequence
  ENSG00000279932_4 (sequence is synthesized)
taggtgcagcaaaccatggcacacgtatacctacgtagcaaagctgcacattctgcacttatatcctggaacttaaagtaaaattaaaaaaaaaatctatagaaaaaagttaagcatttt

SEQ ID NO: 929699 - DNA, 85 bp, Artificial Sequence
  ENSG00000248152_0 (sequence is synthesized)
ttttcgccatgattataagtttcctgaggccttcctagctactgggaactgaaaatgaatttcatactccagtagtgttaccaaa

SEQ ID NO: 929700 - DNA, 120 bp, Artificial Sequence
  ENSG00000248152_1 (sequence is synthesized)
gaactgaaaatgaatttcatactccagtagtgttaccaaactacatttccccatcatggtagcctaagccaggaagtggagaaaagagaaggatgtcattaagtggaaaataatcagcaa

SEQ ID NO: 929701 - DNA, 120 bp, Artificial Sequence
  ENSG00000248152_2 (sequence is synthesized)
tctattgttgatggcagagacagcccatccagagtggccgctgtgaaaaagctggctgcagcggtgcggccgggattgcacactccatggggccagagggagcccagaacagggggagcc

SEQ ID NO: 929702 - DNA, 120 bp, Artificial Sequence
  ENSG00000248152_3 (sequence is synthesized)
ccaaccccaccgagtttgcatcaggagcccacgctctcggtcaggctgcagccacacagccacagctccaaacccaggtaagcccctccacctgcaggctcagaagtgcctgttcccact

SEQ ID NO: 929703 - DNA, 120 bp, Artificial Sequence
  ENSG00000248152_4 (sequence is synthesized)
tgggggcaggaatgacatgccagccccctgctgcctcagccccctttggactttgggcactgacgagtgtggaagaggggccaggggagtggctgagggcagctctgcctgggcctaaag

SEQ ID NO: 929704 - DNA, 120 bp, Artificial Sequence
  ENSG00000248152_5 (sequence is synthesized)
gtaaccctcagcacaaacagcctgggcgcgtggactacatgttgatgtcaggagggagactggttactgggcggaaaggggcgggtttccggagaaatctcaccttcaagccagggaggg

SEQ ID NO: 929705 - DNA, 120 bp, Artificial Sequence
  ENSG00000248152_6 (sequence is synthesized)
gctgaagcctggggccaggctaccagttccagacagaatctgcctcggaaagtgagaacttatcatgctttttccgagcccgcccatggccccccatggaccaatcaacatgcacttcct

SEQ ID NO: 929706 - DNA, 120 bp, Artificial Sequence
  ENSG00000248152_7 (sequence is synthesized)
ccctcctgagtccgtaaaaaccaccggacccagccagactcacacagatgtcaggactatcagctgcaagaaggagctacccacttcggatgtcctaaacttgtcaggacaatctgcctg

SEQ ID NO: 929707 - DNA, 120 bp, Artificial Sequence
  ENSG00000248152_8 (sequence is synthesized)
cagaaaatggctacccatttcaggtctcctgataactgttctgtcgctcagtgaagctcctctctgccttcttcaccctccagttgtccacatacctcattcttcctaggcatgggacaa

SEQ ID NO: 929708 - DNA, 120 bp, Artificial Sequence
  ENSG00000248152_9 (sequence is synthesized)
aaaactagctagggaaatttagaccaatttgttaatctttctaaacttcattgccttttcctacaaagtgaaataatgaaattttcctgaggataaaggagataatccatttgcacttcc

SEQ ID NO: 929709 - DNA, 120 bp, Artificial Sequence
  ENSG00000248152_10 (sequence is synthesized)
tgatgcatagaaagcacttaataaattctgaatgctactgctattgttgatttccagtgggaagatggaggaagcagcagctctggtccaagttcaactatattatctcttccttccttt

SEQ ID NO: 929710 - DNA, 120 bp, Artificial Sequence
  ENSG00000248152_11 (sequence is synthesized)
tacttcattttccctctcttcacagaaatcttacaattctgttttttgatgtgtgattatctaaatggaataccaggtagtatgttaatttagtaacaaaagaaagtaggccttttgggt

SEQ ID NO: 929711 - DNA, 120 bp, Artificial Sequence
  ENSG00000248152_12 (sequence is synthesized)
tagcatttgatgctgtagttgattcaatccctctcactctttacattagacacaggaaattagcaggtccccctttaatggaaaacattttcttgctaaatctgtattgctttccaattt

SEQ ID NO: 929712 - DNA, 120 bp, Artificial Sequence
  ENSG00000248152_13 (sequence is synthesized)
aggcccttgtcattgtgttcccacaaataacacaatttaacagtgcatgggtggattctctagagactgagaaggttcatgaaaatattcataagagaggtgtgtcatttcccctcagca

SEQ ID NO: 929713 - DNA, 120 bp, Artificial Sequence
  ENSG00000248152_14 (sequence is synthesized)
cagatgggtctcctggcctctttccaatacataatttaaattgtttttcaaagacactacaaatcaaaagctgactgatgctgcaaacaatttatgtgtttcagagaatcaagtgacaag

SEQ ID NO: 929714 - DNA, 120 bp, Artificial Sequence
  ENSG00000248152_15 (sequence is synthesized)
gtcagtgtacagcactgctttaattattatgccttttaatgacttgctttttagtgtgatagcttgtagaatgagtagtttcgggttttcttggattgtaataaaacattccttactttc

SEQ ID NO: 929715 - DNA, 120 bp, Artificial Sequence
  ENSG00000248152_16 (sequence is synthesized)
cgccatctatccagtcagatggactgtggctaacccctaacaacaatgcagtggcccacatgaaatgtttcaggttttaattcagctccttaatggagaaccagctactttacacaaccc

SEQ ID NO: 929716 - DNA, 120 bp, Artificial Sequence
  ENSG00000248152_17 (sequence is synthesized)
atcacccaaagtatgaccatttggactgaagaaacaatagctagaagtggccttgcatctgcattatttaacatttcagtcactatcctaaattacagcagaagaaacatgcttattaag

SEQ ID NO: 929717 - DNA, 120 bp, Artificial Sequence
  ENSG00000248152_18 (sequence is synthesized)
tttgcatagaaagccaggctgggaaggaaggcagaggatagcatctgagaaaacacttaccagctctctatgatcatgtccattttgatcctttatcaaaagcaatgcaactgaactcag

SEQ ID NO: 929718 - DNA, 120 bp, Artificial Sequence
  ENSG00000248152_19 (sequence is synthesized)
taaagagagaacagacagcaggatggaaagagaagatggaacagcgctgaactagtcagaagctctgcagtcaaagacttaactctgccatttgctacatacacgaacatcttgagcaca

SEQ ID NO: 929719 - DNA, 120 bp, Artificial Sequence
  ENSG00000248152_20 (sequence is synthesized)
tcactttgcttttatatcttagtatatcttaatttgccaactataaagagtgataaaaatgctctgccacgcctatttgctagagttttgtgaaaattaaactgcatcttcttaattttc

SEQ ID NO: 929720 - DNA, 120 bp, Artificial Sequence
  ENSG00000248152_21 (sequence is synthesized)
gagacacacagagagaagatggccatgcaaagacagaggcagaaattggagtgatgtagctacaaggcaagggatgccaatgattgccagcaaccactaaaagctgggaagaggcagggg

SEQ ID NO: 929721 - DNA, 120 bp, Artificial Sequence
  ENSG00000248152_22 (sequence is synthesized)
agggtccttctccagagccttcagaaggaacatagccctgaagactccgtggttttgcacttctagtcttcataactaaaacacagacattggaagacgtatgagactacggaaactaat

SEQ ID NO: 929722 - DNA, 120 bp, Artificial Sequence
  ENSG00000248152_23 (sequence is synthesized)
tttctcaaggtcaacaaatagagttggaaaataacgaaggaacaaagaaatgctgacagaaaatgaatttcatactccagtagtgttaccaaactacatttccccatcatggtagcctaa

SEQ ID NO: 929723 - DNA, 120 bp, Artificial Sequence
  ENSG00000248152_24 (sequence is synthesized)
tctgaggtatggatggacagagagcaagcactggcaagaacaagaagagacgaataggtcgggctctctctgtgggtataaaactctgagcagttcacttcaattcattggatcttggtg

SEQ ID NO: 929724 - DNA, 120 bp, Artificial Sequence
  ENSG00000248152_25 (sequence is synthesized)
ggcctcagacccactaattactatagtttcttgaggcctcaaggttcattttctaaagaagaactccggccacgttcatttatagctatcttttaaaaatacccaaatctggctgcgcag

SEQ ID NO: 929725 - DNA, 63 bp, Artificial Sequence
  ENSG00000248152_26 (sequence is synthesized)
ttaaaaatacccaaatctggtgctttagaccagcatgggcaacacagcaagaccccatctcta

SEQ ID NO: 929726 - DNA, 120 bp, Artificial Sequence
  ENSG00000248150_0 (sequence is synthesized)
aaatgcaatgatcaactatgtggaggagatatgtgagaaatgccttagcagatgatgaagaaagagatcaaaaggctccgagaagcaggaatgctacggtggatatgcagtcagctctct

SEQ ID NO: 929727 - DNA, 120 bp, Artificial Sequence
  ENSG00000248150_1 (sequence is synthesized)
gtatctgtgggttcattcaacctcggactgaaaatattcagcatttgggaaaaaagtggcatcccatactcaacatgatgtgaattgtccctttgtccagtggatacacactgtcaacac

SEQ ID NO: 929728 - DNA, 120 bp, Artificial Sequence
  ENSG00000248150_2 (sequence is synthesized)
ttccctccagttagccacttcaccatctcggtgatcagatggactgtcgaggtatcgcagtgcttgtgttcaaggcaccctcattttacctaataatggccccaaagcacaagagtggtg

SEQ ID NO: 929729 - DNA, 120 bp, Artificial Sequence
  ENSG00000248150_3 (sequence is synthesized)
atgctggtgattcaaatatgccaaagggaagccgtaaagtgcttcctttaagtgaaaagaaccaggggtcctgataattgacagtggatctccatgaagtcaagtaattacttaatatat

SEQ ID NO: 929730 - DNA, 120 bp, Artificial Sequence
  ENSG00000248150_4 (sequence is synthesized)
ctattaccactaccaaatgtccaacctgccagcaacagaaaccaacactgagctcttcaacaaacacagtccccagaggagactaaccagccacttgctagcaacttgatcacatcagat

SEQ ID NO: 929731 - DNA, 120 bp, Artificial Sequence
  ENSG00000248150_5 (sequence is synthesized)
tcctttcaatctggaaatggcagtaattgattttgactggaattgacacatattccagagatggctttacctttcctacccacagggactcaggcagcatgaccacctgtaagcttatag

SEQ ID NO: 929732 - DNA, 120 bp, Artificial Sequence
  ENSG00000248150_6 (sequence is synthesized)
attatatgataaactgacatggaatcctgcataacgtgactgtggaccactggccccattttatagcaaaagaaggacaacaatggacatatgatgataggataacaccatccagaaact

SEQ ID NO: 929733 - DNA, 120 bp, Artificial Sequence
  ENSG00000248150_7 (sequence is synthesized)
caatggacatatgatgataggataacaccatccagaaactgcctatctactagaggtttttgacagcacagctaaagtgccagcctgcaggtgatactgtgtccggaattggtgggttct

SEQ ID NO: 929734 - DNA, 120 bp, Artificial Sequence
  ENSG00000248150_8 (sequence is synthesized)
agcattcggcattgggagcactgtcactaaaactgcagcctcattcaacaacacatccttatcgagcacttgcaggtactccattgaatgttagaaatgcattgatgatggagacacagc

SEQ ID NO: 929735 - DNA, 120 bp, Artificial Sequence
  ENSG00000248150_9 (sequence is synthesized)
accggctcatgaggaccttccagcctaggcagcaggactggacatacgcactttggtagatttatttttagaaattggcttatgcaagtgtggggctggcaagtctaacaactgcagggc

SEQ ID NO: 929736 - DNA, 120 bp, Artificial Sequence
  ENSG00000248150_10 (sequence is synthesized)
aggtcaggaggctggagacccagggaagagttgatgctgcagtctctagtctgaaggcagtgcagaggcagaattccctctttctcggaggatctcaggctttttctcctaagtccttca

SEQ ID NO: 929737 - DNA, 120 bp, Artificial Sequence
  ENSG00000248150_11 (sequence is synthesized)
accaagtggatgaggccacccgcattagagaagggaaagctagctgatatgttatgaggacatttgagcagccccatggagaagtccacgtggaaggaactgaggcctcttgctaccgtt

SEQ ID NO: 929738 - DNA, 120 bp, Artificial Sequence
  ENSG00000248150_12 (sequence is synthesized)
atgtgagtgagccatcttggaagcagatcctccagcctggttgatcctttggatgactgcagccccaggtgccatcttgactacaacatcaggaaagattccaaattagactcccccatc

SEQ ID NO: 929739 - DNA, 120 bp, Artificial Sequence
  ENSG00000248150_13 (sequence is synthesized)
ccaggcctggcccagagaaagagatgaaagctgacacgcagctctcagaatcacccttgctatcaggtttggcttctggagctgatgggaatctgagagacgtcagggtagaagccgcct

SEQ ID NO: 929740 - DNA, 120 bp, Artificial Sequence
  ENSG00000248150_14 (sequence is synthesized)
gtcttggtgagcttcccgtgctcatctggctttgggaaagactctcagcctcatttgcttatcctccatcacggaccaagcacttggtttgggaataaggggcccttggcacttactgtt

SEQ ID NO: 929741 - DNA, 120 bp, Artificial Sequence
  ENSG00000248150_15 (sequence is synthesized)
gtgttcttggcctttggggccttggccaagagtcaggtggaaagagttccaccctaacatcttctcctatgcttcctcccagagcaggggatgggaaagtatggggagaaaaaggctcct

SEQ ID NO: 929742 - DNA, 120 bp, Artificial Sequence
  ENSG00000248150_16 (sequence is synthesized)
tagggaattacttcatgttaaaaaatatttactaggcacttaacacgtacgcagaaatttaccagtggctgaagtgggtaatagggatgtatcaattaactaataaactaattaattaga

SEQ ID NO: 929743 - DNA, 81 bp, Artificial Sequence
  ENSG00000286524_0 (sequence is synthesized)
ttggccaggctggtctcaaactcccacacccccaacctcaggtgatctgcttgcctcagcctctccaggtttggaattatt

SEQ ID NO: 929744 - DNA, 120 bp, Artificial Sequence
  ENSG00000286524_1 (sequence is synthesized)
gaattattaacaaagctgttacaaatatttttacacctatatcctggtacacatgcacaataatttatctgggaaatatttctaggatgggaatagccaggtcataggatatgtacatgt

SEQ ID NO: 929745 - DNA, 120 bp, Artificial Sequence
  ENSG00000286524_2 (sequence is synthesized)
acacctttatcggaaaataccaaattgtattccaaaaaggctgtattagtttgtactttctaagagtttcccattctcccacattctttagattttttgttaaactttaatctcttatga

SEQ ID NO: 929746 - DNA, 120 bp, Artificial Sequence
  ENSG00000286524_3 (sequence is synthesized)
ggtaaattaatagatttttccaaaattaaagcaactccacattccttggagatagccaaccaggtcgtgatgtacttctttatattaaaatatatttctggctttggaggtctaatgttt

SEQ ID NO: 929747 - DNA, 120 bp, Artificial Sequence
  ENSG00000286524_4 (sequence is synthesized)
tgcatgggatttctgtatattcatggagcatataggcctatgattttcctttcttttatgctccctggttacattagcctcataaaatgagctgcggcatcctttcccattctctgaaag

SEQ ID NO: 929748 - DNA, 120 bp, Artificial Sequence
  ENSG00000286524_5 (sequence is synthesized)
attacattgatctctgcaaaatatatggtcttgtacatttttcattaccaatactatttatttgtgccttttctcctttgttcccaaatgattcttgctataaattggttatttcattag

SEQ ID NO: 929749 - DNA, 120 bp, Artificial Sequence
  ENSG00000286524_6 (sequence is synthesized)
actttccaaatcaacaacttgtgattttgtgattctttctagtcaatgttttctatttcagtagtttctgccatctttatcatttccttcctcccactttccttgggtatattctgttct

SEQ ID NO: 929750 - DNA, 120 bp, Artificial Sequence
  ENSG00000286524_7 (sequence is synthesized)
aactcctgaattttgagcagttcttctttgctgatataagcagttaaggctatacagtcatgcatcctttaatgacagggatacgttctgagaaatgcatcattgtgtgaacatcaaaga

SEQ ID NO: 929751 - DNA, 120 bp, Artificial Sequence
  ENSG00000286524_8 (sequence is synthesized)
cattgtgtgaacatcaaagagtgtactttcacaactctaggtggtacagcctactacacacctaagctatgtggtatagcctattgctctgaagctacaaacctgtacagcatgttactg

SEQ ID NO: 929752 - DNA, 120 bp, Artificial Sequence
  ENSG00000286524_9 (sequence is synthesized)
cctaacacaatggtaggttttgtgcatctaaacatacgtaaacttggaaaaggtgcagtaaaaatacaggggtacttaaaaaatatttaactgctgtgtatatactgctgtccactttta

SEQ ID NO: 929753 - DNA, 120 bp, Artificial Sequence
  ENSG00000286524_10 (sequence is synthesized)
tgacaggagcatttttatgtaaaatcacttgtatcaccgaattattatattttctatgtgataaggaaagtaggagtagaaattttcaaatgtgagatcatggaatattttactaaagtg

SEQ ID NO: 929754 - DNA, 120 bp, Artificial Sequence
  ENSG00000286524_11 (sequence is synthesized)
cacgaatcaaggaacaaataagtgaaagagttgaggagctgctcataatctgggcaaaattccaagtaacaaaccttataataaacctcttttttcaatttaccacccctccctctgaac

SEQ ID NO: 929755 - DNA, 120 bp, Artificial Sequence
  ENSG00000214650_0 (sequence is synthesized)
aggaacaaagggctcattgtcatgcaaatgaacgactccggaggaagagggcagttcctccactctggggtgcccctcctgccctctaacttctaagccacactggaaactgacccccaa

SEQ ID NO: 929756 - DNA, 120 bp, Artificial Sequence
  ENSG00000214650_1 (sequence is synthesized)
ccttcagaagtgtgggcatctctgggcctctgctctgggctaaatgaggcgcactctctcagcctgggaaacgggcccctgccagttctgagccagatccccagaaaacaggacccgcct

SEQ ID NO: 929757 - DNA, 120 bp, Artificial Sequence
  ENSG00000214650_2 (sequence is synthesized)
cggaagatagggatagtagagggacttttggggatgaaacaggatgatccccttaacatgctaagcatgaccttgagcaaagaagcaactgccttggaaatgccattcagttggtaatac

SEQ ID NO: 929758 - DNA, 120 bp, Artificial Sequence
  ENSG00000214650_3 (sequence is synthesized)
ctgtgccgactttacaaggctatgggaaggacacaatgaactaagactccagtgatcacaaccagtccatgctgagctgcctcgtcacaaaggccctggtgctgacttctgttctgaacc

SEQ ID NO: 929759 - DNA, 120 bp, Artificial Sequence
  ENSG00000214650_4 (sequence is synthesized)
tcacccaggactcttctccaccgggtttctacaaaacatgagagctctctgcaaagaagaaaagaaaaatggacggaactcgaacttaaatccaaccttgtggttacaattacggaggcc

SEQ ID NO: 929760 - DNA, 120 bp, Artificial Sequence
  ENSG00000214650_5 (sequence is synthesized)
cacccaggccagcactgtgcgggccccttcaggcttctctcaggctctcccgagacacaccggcaggctgcagtgctaccactgtggtaaaggacaaggaaactgaggctctgtgggatt

SEQ ID NO: 929761 - DNA, 120 bp, Artificial Sequence
  ENSG00000214650_6 (sequence is synthesized)
ccgggacttgcccaaggtcacaccatccttgaggggtcgagccaggactggaacctcagtccggccactacaacttcataaataccatcgccctgagatgctgaaatcccaggggccccc

SEQ ID NO: 929762 - DNA, 120 bp, Artificial Sequence
  ENSG00000214650_7 (sequence is synthesized)
tgctacatacccagtgctggggacacagcggtgacaaagatgaacaaaatcctggatggaggggtgctggagtgtgaatgtttatgtccccccaaaatctgcatgttgagacctaatcac

SEQ ID NO: 929763 - DNA, 120 bp, Artificial Sequence
  ENSG00000214650_8 (sequence is synthesized)
gcccctcttcctgggagaagccaccatctatgaaccaggaaacgggccctcgtcccatgtgacaccaaatctgccagcatcttggtcttggacatccagcctccagaactgtgagcaata

SEQ ID NO: 929764 - DNA, 120 bp, Artificial Sequence
  ENSG00000214650_9 (sequence is synthesized)
aagttctattgtttgtgagccacccagtccaaatagactaaaacaaggtggggacaggggtgatgggcataccgcagaccctggtggtgacagtgttacaaggagtagtgaaggtgtcac

SEQ ID NO: 929765 - DNA, 120 bp, Artificial Sequence
  ENSG00000214650_10 (sequence is synthesized)
agggagtcacaactgacatcaggcctctctcaggaggcgccattagcagaggcctatatcagggaggctgaaggtctcaggaaagggtgttcccagaagaggttacagccaggccgggtg

SEQ ID NO: 929766 - DNA, 62 bp, Artificial Sequence
  ENSG00000214650_11 (sequence is synthesized)
aaaattacctgaaagaaaggtggccacagctctgcactccagcctgggggagtgagactttg

SEQ ID NO: 929767 - DNA, 120 bp, Artificial Sequence
  ENSG00000240708_0 (sequence is synthesized)
aggtagacacttaggagtggaattgctgagtcatacagtaattctatgtttaacattttgaggagctgccaaactgtttccaaaatggctgcaacattctatatttccatcagcaagaag

SEQ ID NO: 929768 - DNA, 120 bp, Artificial Sequence
  ENSG00000240708_1 (sequence is synthesized)
ggcccatgtggcaaggaactaagggcagtctctggccaaaagcccacaagtaactgaattctgccaataaccatgagtttggaagtggatccttccccattcgagtctcagatgagtccc

SEQ ID NO: 929769 - DNA, 120 bp, Artificial Sequence
  ENSG00000240708_2 (sequence is synthesized)
cagccctggccaacatcttcatgtgctgtgagagaccattaagcagaggacccagctaagctctgcccagatgctcaatccacagaaaaagatactaagtgtgtgttgttttaagctgct

SEQ ID NO: 929770 - DNA, 120 bp, Artificial Sequence
  ENSG00000240708_3 (sequence is synthesized)
acatttgcagtggtttgatatgcagcaatagataactgatactgctgttaattgctttctattacaatcagctggaataactgcccttgtgcctacaatcagagatgtattttgggatca

SEQ ID NO: 929771 - DNA, 120 bp, Artificial Sequence
  ENSG00000240708_4 (sequence is synthesized)
attcccagacctgagattgttcagtctaagggtaaggatatttaatgtggaaaaataacactaaattgtcctccaaaaatattatcaagtgacaatcatgcaaacagtatgaaagttcct

SEQ ID NO: 929772 - DNA, 120 bp, Artificial Sequence
  ENSG00000240708_5 (sequence is synthesized)
acttctctccatgttcttgccaaatgaagtgtcattgatcattgaaaaaatatcagtttgagaaaaatcagtactgcattgctttgattgcattttcctgatcacttatcagggtgagca

SEQ ID NO: 929773 - DNA, 120 bp, Artificial Sequence
  ENSG00000240708_6 (sequence is synthesized)
ttgagacttctctcttgatatttttagcttttatcctattttaattggatttcaattggattgaacaactagaatgatagaatgatatctggggggcacacaatggccattggtgatgct

SEQ ID NO: 929774 - DNA, 120 bp, Artificial Sequence
  ENSG00000240708_7 (sequence is synthesized)
gctgttgattacccaaagtgctatcccatttcttcctgtgtatttactactatttctcttgcagttaataagcaatttatgggaagattctttgagaccattcaaatatcctgcacctca

SEQ ID NO: 929775 - DNA, 120 bp, Artificial Sequence
  ENSG00000240708_8 (sequence is synthesized)
ttaaaatatccccctggatttagcagcctttgatgattcttgcctgaacaaaactttattatggtagatgtaaaatgaagattttcatttctagcacttcttccacatttaccagctaca

SEQ ID NO: 929776 - DNA, 120 bp, Artificial Sequence
  ENSG00000240708_9 (sequence is synthesized)
ttcagccttcttgtggataagactctcccctttctcccaaatgtttattgtttttattagtatggactcacgatttcctgttcttctcaatggcctataatttattactatctttaatta

SEQ ID NO: 929777 - DNA, 120 bp, Artificial Sequence
  ENSG00000240708_10 (sequence is synthesized)
tattagtgctcaaattttcccagtttggccagtgggatcccctccaagttggctattatttccttgtgacatacccactttttctttctttctctttctttttctttccttttaaaactc

SEQ ID NO: 929778 - DNA, 120 bp, Artificial Sequence
  ENSG00000240708_11 (sequence is synthesized)
acttctttacttcctgctccagccctggaatcagccatttctctgaaaaactgtggttctttcaagtggacaaaggtattagagaccaaaatttgggcacaagatatgcactttaacaag

SEQ ID NO: 929779 - DNA, 120 bp, Artificial Sequence
  ENSG00000240708_12 (sequence is synthesized)
gacccactttaagtgcagtttagtgaatttgaatgaatgcatgaacttctgtaactactaccacaatcaagatatagagtttctgtcacctctcaaagcctccttttcttgcttgctcat

SEQ ID NO: 929780 - DNA, 120 bp, Artificial Sequence
  ENSG00000240708_13 (sequence is synthesized)
atgcctgtaatcccagcagtttgggaggtcaacatgggtgaatcacttgaggtcagaagtttgggaccagcccagccaatgtggccctgatcaggaagtgaagacaacatgactgtggag

SEQ ID NO: 929781 - DNA, 120 bp, Artificial Sequence
  ENSG00000240708_14 (sequence is synthesized)
agtgaagacaacatgactgtggagaagagagccgggaagggaagaagctcaataatgagtgcattctaggccagcttccccagagcatcaaggttgatggaagaacatgaggggaagtgg

SEQ ID NO: 929782 - DNA, 120 bp, Artificial Sequence
  ENSG00000240708_15 (sequence is synthesized)
catgagagcaagcccgtgctctcctctacagagacagaagccagacatgccttttccatgtgctgatctccaagtcccagctagtaggtcacatgacatcacagtcctgctcttcctcaa

SEQ ID NO: 929783 - DNA, 120 bp, Artificial Sequence
  ENSG00000240708_16 (sequence is synthesized)
tgatgcaaaggatccagtggaggtctctgaggccctgggagatggtagagccacaccatgaaggtgcctgggtccctgaatgactgcatggagctcactctacattggactgtgacacaa

SEQ ID NO: 929784 - DNA, 120 bp, Artificial Sequence
  ENSG00000240708_17 (sequence is synthesized)
gcagccacagcagtggtttcattatcaaaactccagcaagcattccagccagactaattccccgctggattcacttaatgtagatcctcacaaacgattacatgtaaacgtgagaggcac

SEQ ID NO: 929785 - DNA, 120 bp, Artificial Sequence
  ENSG00000249825_0 (sequence is synthesized)
accaactcagagccttcataaaatcgtaccctgcggacaacacggccggaggggcctccatgaaatccaacccggggagacagcactccctaagtagagttggaggaatctgtggggaca

SEQ ID NO: 929786 - DNA, 120 bp, Artificial Sequence
  ENSG00000249825_1 (sequence is synthesized)
ctttgggttgtcacagtggcactgagtgatggcagccagggatgctggatggcgagcaatgccctggcgagaacaatcaaaacctgtcctgcattccatacacttctggagtgttcctca

SEQ ID NO: 929787 - DNA, 120 bp, Artificial Sequence
  ENSG00000249825_2 (sequence is synthesized)
gacaccagggttccccatcctgcggtcacaaaagtcctggcatgtccttggggactatcctaggtcagaattgctcagggaaatgaaggctctgggatgcagaacggagaatgctttgct

SEQ ID NO: 929788 - DNA, 120 bp, Artificial Sequence
  ENSG00000249825_3 (sequence is synthesized)
tctagagcaagattaactaagtaccacatgggaaaacacaatatctgaaaaaagatgagaggtccagaagaaagggagatgaatgacttcaaaccaccaataccttgagctgaatgccag

SEQ ID NO: 929789 - DNA, 120 bp, Artificial Sequence
  ENSG00000249825_4 (sequence is synthesized)
gttctgcaactgctcggaatggggtggcttgccaatatgtctgctccgtctgcttccacatgaccacgtagaagctggagctatcttggtagccaaagataaagcctgcatagtcatcat

SEQ ID NO: 929790 - DNA, 120 bp, Artificial Sequence
  ENSG00000249825_5 (sequence is synthesized)
ctagtagctggaagaattctatgtgagtggcaactgaggccctggacatacccactgccaggccaggatcactgttcatggtctgtacaatctccatgccctgcagagagagttgaggga

SEQ ID NO: 929791 - DNA, 120 bp, Artificial Sequence
  ENSG00000249825_6 (sequence is synthesized)
gttcagaacagtcttgaaggggccaagtaaccttaaggaagctcaaaacctcaggcaccatatgagtgagtggccagtgatgtctgacctccatataaagatttcattatctgaaatagt

SEQ ID NO: 929792 - DNA, 120 bp, Artificial Sequence
  ENSG00000249825_7 (sequence is synthesized)
tgctctattgtgttatgtgctcaaagaaagcatgtgcttgtaaaggttaaaaaaaagctcaaagctgaatagaaataagtttgctgagactgtcacttaagctgattggacaggccctta

SEQ ID NO: 929793 - DNA, 120 bp, Artificial Sequence
  ENSG00000249825_8 (sequence is synthesized)
actggggagcatacaacatatacttctaatcaatgtgacttgctctgtgactctggaaaatctactaagcctctctgtgcctgcacttcttagttacacaatgaggaggatatgcagaag

SEQ ID NO: 929794 - DNA, 120 bp, Artificial Sequence
  ENSG00000249825_9 (sequence is synthesized)
gcagtctgctgcagagatcagaagtgtgggttctagggtcagactgcctgggtcccaattccagtcatctcagctacttaccacagtgctaccatcattaaagctgctacaatcatgaaa

SEQ ID NO: 929795 - DNA, 120 bp, Artificial Sequence
  ENSG00000249825_10 (sequence is synthesized)
ctggagaatgcacaggaagcgtgaccattcatggagctgtccctgattggagtggaggtagacatacagcatggcgccgtctggccctgccagtcacctgccaaagacggaaggtttctc

SEQ ID NO: 929796 - DNA, 120 bp, Artificial Sequence
  ENSG00000249825_11 (sequence is synthesized)
ccggagggactatgacagtccccacctctacacgatggcccacccccaacaggagcgtcaaggcagacagactctggaagttgtaaggatgaggacagttagagatgacagcaggtactc

SEQ ID NO: 929797 - DNA, 120 bp, Artificial Sequence
  ENSG00000249825_12 (sequence is synthesized)
attgctggcaggaatcaggcatcagatccatgccttcttctttgcttacatgtaagatcatgtgaatgttgatgaaaacaccatcagactggaggctgcgtccggccactcagacaaaga

SEQ ID NO: 929798 - DNA, 120 bp, Artificial Sequence
  ENSG00000249825_13 (sequence is synthesized)
aggaatagaagtgaaggaagaaggctggactgtgaaccaatgacactgagttgcccgcgccaccgtggagggcataggggacaggtcaaaagttccagtgaagtcctgggaggtggtgtg

SEQ ID NO: 929799 - DNA, 120 bp, Artificial Sequence
  ENSG00000249825_14 (sequence is synthesized)
agaagtttactctggggacagggagatgatctgcttaaaaagcaagttaatttttcttattgctgttcctttggctcttttacaatggaatgacaaaggaatgggtgcacagagaaatgc

SEQ ID NO: 929800 - DNA, 120 bp, Artificial Sequence
  ENSG00000249825_15 (sequence is synthesized)
tggtggcctgcattgagaatttctgatgaggtaggctgagaaactgacaaatgagctgtcagctccgctgcaatgacacttcaggggccaggtttttttagcttttatatatataatata

SEQ ID NO: 929801 - DNA, 120 bp, Artificial Sequence
  ENSG00000249825_16 (sequence is synthesized)
cactgcacactatatatgtaataaatattatacaatatgtttaaaaaatgaaaattaaaattttcatctttattgaggtataattgacaaaactgaatatatttaaagtgtgcagtgtga

SEQ ID NO: 929802 - DNA, 120 bp, Artificial Sequence
  ENSG00000249825_17 (sequence is synthesized)
cagtgtgatgatgtgatatacgtatacattgtgaaatgattaccacagtcagttaagtaacacatccatcaactgacatagttaccttcctttttttctttttcagtgagaacacttaag

SEQ ID NO: 929803 - DNA, 120 bp, Artificial Sequence
  ENSG00000249825_18 (sequence is synthesized)
atctgctctcttagcagatttcatatatataatatagtattattaactacagtcaccatgctgtacattagatctttttcatcttatgcagttttattggcataacatttacaggtcgta

SEQ ID NO: 929804 - DNA, 120 bp, Artificial Sequence
  ENSG00000249825_19 (sequence is synthesized)
aaagacatccatttgaagtatatatattgtttaatgatttaagtcactcacaacctcttagttgccaaatccaatgcatgctttccaatgacttgtctcgatctttcagcctccctggct

SEQ ID NO: 929805 - DNA, 120 bp, Artificial Sequence
  ENSG00000249825_20 (sequence is synthesized)
gtgctatcagttcgctcctttttctggcttctgctctttttccttggcctagtccttcgtttttggggtttcctggagttctatttactgtctactttccttctctctaggtggctcagt

SEQ ID NO: 929806 - DNA, 120 bp, Artificial Sequence
  ENSG00000249825_21 (sequence is synthesized)
ccaagatctcgcaaatctatttgcagactactttgtcctggtaaaagctgagaagcaataaatccccatctattcctaagcaatatagcattgcggagaagaactcaggctctgtagcca

SEQ ID NO: 929807 - DNA, 120 bp, Artificial Sequence
  ENSG00000249825_22 (sequence is synthesized)
acctggaagatgtgtgaccttagtctaaatacgtaacatttcttttttttctttttggagacagggtctccctctgtcacccaggttagagtgcagtggcgatcacagctcactgtagcc

SEQ ID NO: 929808 - DNA, 120 bp, Artificial Sequence
  ENSG00000249825_23 (sequence is synthesized)
tcaaactactcttgtacccaaatgatccttcggcctcagcctcctgaggagctgggactataggcatgctccaccatgcctggacttaatgatgtaatatttctgtccctcagtttcttc

SEQ ID NO: 929809 - DNA, 120 bp, Artificial Sequence
  ENSG00000249825_24 (sequence is synthesized)
aattgtaaaatggggataataataatccctgtttatgaggttgttgtgaggattaaaataagtgacttgataaatgtaaagtgtttttacttacaaggaaacaaggaacctagaggctgg

SEQ ID NO: 929810 - DNA, 120 bp, Artificial Sequence
  ENSG00000249825_25 (sequence is synthesized)
ataactttcaaatagtcatacacgtaatcagtagttcttttcttgatagtcaactctggtacatctctcatcttggacacagtttgacaggaactttcagaaataaaacccatatctgaa

SEQ ID NO: 929811 - DNA, 120 bp, Artificial Sequence
  ENSG00000249825_26 (sequence is synthesized)
actttcagaaataaaacccatatctgaatacttaagttataggcatccctaagtgctaagcactttaatttaatacaatgaaaagttttgaaaagtttttttttttttttttttttgaga

SEQ ID NO: 929812 - DNA, 87 bp, Artificial Sequence
  ENSG00000249825_27 (sequence is synthesized)
tgaaagttttatgaaaataaataatgccatttggggattgtgtagtcaccagtaaaatactgaactattaatataaactaccaagct

SEQ ID NO: 929813 - DNA, 120 bp, Artificial Sequence
  ENSG00000249825_28 (sequence is synthesized)
accagtaaaatactgaactattaatataaactaccaagctcttcacaattttaaaatacaggagtaataattatttactcaataaatagttatctaatagcctaatattgcaactttgat

SEQ ID NO: 929814 - DNA, 120 bp, Artificial Sequence
  ENSG00000249825_29 (sequence is synthesized)
agaaaataaagaacttggcacttataaaattattcttacataaaaattacttttaaaattactcatattaaacactttttcagcacaaacttttgcctttattctgccaatcaaatatat

SEQ ID NO: 929815 - DNA, 120 bp, Artificial Sequence
  ENSG00000249825_30 (sequence is synthesized)
tatgcccacatgttctaggtgtgtttggaagctatgatctataaacatacacttgttttaataaccggttctgctttgataacaacagctgtgagaaatacttaccaaagtattaacgca

SEQ ID NO: 929816 - DNA, 120 bp, Artificial Sequence
  ENSG00000249825_31 (sequence is synthesized)
gatcgagttgggaacgcacgctccatttcgacactcatcaatgtcagtgcagacctagtgcagaaaagttcaaagaaagtttagcgagacatgctgcttaaatagaaatgcaaataaatc

SEQ ID NO: 929817 - DNA, 120 bp, Artificial Sequence
  ENSG00000249825_32 (sequence is synthesized)
aactagccaagaatacctatttatgttgcagtatcgccaaagataataatcactattgtggaacatgaaggatatattttaaggctttctccacattagactttctaggttcattttccc

SEQ ID NO: 929818 - DNA, 120 bp, Artificial Sequence
  ENSG00000249825_33 (sequence is synthesized)
acccttctgaaatctgactcgattttccagttgaccacagtctgaagagagccagttggcgtgaggttctgtgacctacacagatggtgggaggagtcagacgggaaatctcttatgtcg

SEQ ID NO: 929819 - DNA, 120 bp, Artificial Sequence
  ENSG00000249825_34 (sequence is synthesized)
acgtggtcaccaccacttgcttcttgagggagaagaatcggaaagacctggcaagacagactagctagaagggctttctgattccagaacaatactaagtttcctgaagtaaagtattaa

SEQ ID NO: 929820 - DNA, 120 bp, Artificial Sequence
  ENSG00000249825_35 (sequence is synthesized)
ataaatataaataaatggtaagacgtatataaatgtggtatgaagaggaagaaaataatggaatggagggaaatagacacaaatagaaattctaaggtatttctaatctgggatagaaca

SEQ ID NO: 929821 - DNA, 120 bp, Artificial Sequence
  ENSG00000249825_36 (sequence is synthesized)
agaagtctgtggaaggtgtgggatgggatgacagcatcagaaagaattgggcaaatctgtcccaggactaggtcagaaaaacgcctccctagggaaggtgccaccccaaacacgtgtttc

SEQ ID NO: 929822 - DNA, 120 bp, Artificial Sequence
  ENSG00000249825_37 (sequence is synthesized)
tgagaccccttacccgaaataaggaggctgccaagcgatacttgaggttggaccagatgatgttttcttgagagaagcagaaaacgccaagtcggcctccacgcattgtggtgtctatgg

SEQ ID NO: 929823 - DNA, 120 bp, Artificial Sequence
  ENSG00000249825_38 (sequence is synthesized)
gaagttcgtgttactaacctcacaggcaatcgacagcctgggagatagtccctagggcttcagatcttgtgtggtgttcatcccaccatcttcaggcccacagtgtgtcatttttccacc

SEQ ID NO: 929824 - DNA, 120 bp, Artificial Sequence
  ENSG00000249825_39 (sequence is synthesized)
tctgctttgttaggtgctggagagatcaggcgcatggtgagtcacttctgcctgggccagtgtcacacagagactacccttttctgcagttatccagaggtagcttcaaaggacggattc

SEQ ID NO: 929825 - DNA, 120 bp, Artificial Sequence
  ENSG00000249825_40 (sequence is synthesized)
tgggagacttaaaaatgaacagctctcagagttttgtgtttgatgatgtcacattggtagcttgaaatcagcaatgaggacaatgcggagttacatcatggaaactggaaaatgctacca

SEQ ID NO: 929826 - DNA, 120 bp, Artificial Sequence
  ENSG00000286523_0 (sequence is synthesized)
agtgcatttactgtggcatgctgttggccccatgcacttccccctttcccccatagatctcggcagtgccttctgctttggtcctgacagggttctgcaggatatacacgaagtatggca

SEQ ID NO: 929827 - DNA, 120 bp, Artificial Sequence
  ENSG00000286523_1 (sequence is synthesized)
ccaacatctgcttctggtgaaggcttcatgaagcttccacccatgacagaaggcgaagaactgttgccagcatcatgctacaagcctgaagggaaggtctactgacagagaaggacagag

SEQ ID NO: 929828 - DNA, 120 bp, Artificial Sequence
  ENSG00000286523_2 (sequence is synthesized)
accagggaaacacagaaaaggagagacaaagccttgacataccaaaccagtgcctggcctacctatggacttctcaggacaaggatggagctggaggccattttccatagcaaacaacac

SEQ ID NO: 929829 - DNA, 77 bp, Artificial Sequence
  ENSG00000286523_3 (sequence is synthesized)
aaggatggagctggaggccattttccatagcaaacaacacaggaacagaagaccaaataccggagggttccaagatg

SEQ ID NO: 929830 - DNA, 75 bp, Artificial Sequence
  ENSG00000286523_4 (sequence is synthesized)
tgaagcttccagaggaatgatcaatgctgctgatacccaagcaaacaaggtctggaatggacctccagcaaactc

SEQ ID NO: 929831 - DNA, 120 bp, Artificial Sequence
  ENSG00000286523_5 (sequence is synthesized)
aaaagattagacgaatggctaactagaatgaccagcatagagaagtccttaaatgacttgatggagctgaaaaccatggcaggagaactacacgacgaatgcacaagcttcagtagctga

SEQ ID NO: 929832 - DNA, 70 bp, Artificial Sequence
  ENSG00000286523_6 (sequence is synthesized)
actggaagaaagggtatcagtgattgaaggtcaaattaatgaaatgaatccaagaaatatgagactgtat

SEQ ID NO: 929833 - DNA, 70 bp, Artificial Sequence
  ENSG00000286523_7 (sequence is synthesized)
caggagcacctagattcataaagcaagtcttttaacaccccccgtcaacattagacagatcaatgagaca

SEQ ID NO: 929834 - DNA, 120 bp, Artificial Sequence
  ENSG00000286523_8 (sequence is synthesized)
gatatacaccacggcattccttggtagccaagcatagggctaagatgagaactatttggctacttcttaatatttaagtggatgagcagcaaacatctttctccgtcttcctgagctcca

SEQ ID NO: 929835 - DNA, 120 bp, Artificial Sequence
  ENSG00000286523_9 (sequence is synthesized)
ttctgcaattgcagtgcagcaggacgacagtgcatttactgtggcatgctgttggccccatgcacttccccctttcccccatagatctcggcagtgccttctgctttggtcctgacaggt

SEQ ID NO: 929836 - DNA, 85 bp, Artificial Sequence
  ENSG00000286523_10 (sequence is synthesized)
atagatctcggcagtgccttctgctttggtcctgacaggtatattctgctttgtcagaatctcttatgtgatcttggacaaggta

SEQ ID NO: 929837 - DNA, 84 bp, Artificial Sequence
  ENSG00000286523_11 (sequence is synthesized)
gaagaaagacccactacagctggaatacaaagcaggcagaaaaatgtgaaaaggtgagactggcctagcctcccagcctatatc

SEQ ID NO: 929838 - DNA, 81 bp, Artificial Sequence
  ENSG00000286523_12 (sequence is synthesized)
cagctgccagcacagctggaatacaaagcaggcagaaaaatgtgaaaaggtgagactggcctagcctcccagcctatatct

SEQ ID NO: 929839 - DNA, 120 bp, Artificial Sequence
  ENSG00000286523_13 (sequence is synthesized)
ttgcagacagcctattgtgggacctcgtgatcatattccttcaattagagtgcctctgaaagacagggtgtattccagctggcattgggacaacctaaagtttaaacctttgggtgaaaa

SEQ ID NO: 929840 - DNA, 120 bp, Artificial Sequence
  ENSG00000286523_14 (sequence is synthesized)
tttgggtgaaaaagtgccaacttgggagacatattatcaagactgaatcagagagttgacagcataccaggaagtgtcactgtatagtttggaagatggaaatcatactacttttttccc

SEQ ID NO: 929841 - DNA, 120 bp, Artificial Sequence
  ENSG00000286523_15 (sequence is synthesized)
atgtaagcactccaggaaattaacctccaaatacaactgaggaataggcaccgttatggcttttttacagatcaataaactgatgaaatacggtgaagctatgtaagtagaccaaagatg

SEQ ID NO: 929842 - DNA, 120 bp, Artificial Sequence
  ENSG00000286523_16 (sequence is synthesized)
tacaagaagacacacattgagcagaaaataaatttaagcctggcttctcaactctttatttaaccagagacggttctatctcaaacatgaggttctatatgaaagcaggagggaattagg

SEQ ID NO: 929843 - DNA, 120 bp, Artificial Sequence
  ENSG00000286523_17 (sequence is synthesized)
aagtaaaatctggtgagcatttttcctgaaatattacagctgtcattctcagggccctcgtcctgagatagtggcaggttaagatattaaatttttatttctctgggaactcttcatgga

SEQ ID NO: 929844 - DNA, 120 bp, Artificial Sequence
  ENSG00000286523_18 (sequence is synthesized)
ctattgccatatcaatgacaatgcagacagaagtgcaggtgattttaaagaacagactgcttgacgtaccctgtgtctagtacagctacaccctagagcagttagcagtgcttatctgaa

SEQ ID NO: 929845 - DNA, 120 bp, Artificial Sequence
  ENSG00000286523_19 (sequence is synthesized)
ttctttgttatttgtcaaaaagattattgttttctgacacaatctttcttttctaagaaaaaaaaaaaagcagtggtacatattctaactatgctttagaatcccagcttctgtcctaaa

SEQ ID NO: 929846 - DNA, 120 bp, Artificial Sequence
  ENSG00000286523_20 (sequence is synthesized)
gctttaaaaccatgatatcctatttctctttctctattttttcttttaatgcattaagcataatctcatacaaccaggaatgtaaaccgtgaccagtttaccaagaaaggctaaactcaa

SEQ ID NO: 929847 - DNA, 120 bp, Artificial Sequence
  ENSG00000286523_21 (sequence is synthesized)
aagaacatataatgatatgtttgtctttcctttattgtctttgcatttaattttcatatatatccatatttgtgcagtgactttgaatttgtctcctggaggcagatgctcatgcaggtt

SEQ ID NO: 929848 - DNA, 120 bp, Artificial Sequence
  ENSG00000286523_22 (sequence is synthesized)
taactactgaaaactatagatggaaatgttgatgactaggagagaatacactgggcaatgtggacagggccagaatattttgcatgagcgggaagcaggattctgtcatcaaaggaaacc

SEQ ID NO: 929849 - DNA, 120 bp, Artificial Sequence
  ENSG00000286523_23 (sequence is synthesized)
agtgtgcactgttgtttggtgaggaaactagcacatagataagaaactcttttgattacctccgctatatatctaaaggatgttattcccaatggattgctctaagggcttttcactgta

SEQ ID NO: 929850 - DNA, 120 bp, Artificial Sequence
  ENSG00000286523_24 (sequence is synthesized)
gttttaataatggccatgccaacattgtatcttttaagaatattgaaagagaccaatttgggagactgtgaccagtatgagtgttcacttcaccaaactatctctgctaaactctgagga

SEQ ID NO: 929851 - DNA, 120 bp, Artificial Sequence
  ENSG00000286523_25 (sequence is synthesized)
tctggaggttgggggatgaaatgctctgaagatgatactggaggcaaatattttccttgttactcttcttttctctcagcaaagtgactataaggtgttttagtccattaaattaactga

SEQ ID NO: 929852 - DNA, 66 bp, Artificial Sequence
  ENSG00000286523_26 (sequence is synthesized)
agtgagccaagatcgtgccattgcactctggcctgggcaacaagagtgaaactccacaagatgtgt

SEQ ID NO: 929853 - DNA, 120 bp, Artificial Sequence
  ENSG00000286523_27 (sequence is synthesized)
taattagaaaaaataagtaaaaagaatagatacaatgagtttttaaaatttacttggcaatgataatagcaatgaaaatactaactcatagagtaagtcctatgtgccaggcactcttag

SEQ ID NO: 929854 - DNA, 120 bp, Artificial Sequence
  ENSG00000286523_28 (sequence is synthesized)
aagtactttgcatttatcatcttatctcacagtcacaaaaccccatatgatgggtactaatattattcttgttttataatagaggcagatttgagattcaatcctaggtagtgtggtttc

SEQ ID NO: 929855 - DNA, 120 bp, Artificial Sequence
  ENSG00000286523_29 (sequence is synthesized)
agagtctacactctttattactgaggtactgcctctcataaaacaaagctatgtgtttttttgacttggtttgatgacaggaccacagcttgggcttgtctaagtttatgcctttctcag

SEQ ID NO: 929856 - DNA, 120 bp, Artificial Sequence
  ENSG00000286523_30 (sequence is synthesized)
ttttatcttatcttgctctaccatttcttacctttcctagatgttctcaccccacttgcccagcccagtatcccatgctttactgcttccctgtacttttagtctaataaaaaagcacct

SEQ ID NO: 929857 - DNA, 120 bp, Artificial Sequence
  ENSG00000286523_31 (sequence is synthesized)
agaaacaacaggaaccaccaccaaacgaaacataaaccctttgtaggaaatatatatagtttaaatttttaccttttttaaggtttatagctgggcccaaagtttctaaaaggtctattc

SEQ ID NO: 929858 - DNA, 76 bp, Artificial Sequence
  ENSG00000248779_0 (sequence is synthesized)
aatgacattctggactctatgcctgagcctaatgccataaaggaatgaagctttagcagtcttctgggagaggcaa

SEQ ID NO: 929859 - DNA, 120 bp, Artificial Sequence
  ENSG00000248779_1 (sequence is synthesized)
ataaaggaatgaagctttagcagtcttctgggagaggcaatggaatattagcagacgggacatgaacagaagtttataaagctacttttgaacctatggtagcacaagaaggatatgctt

SEQ ID NO: 929860 - DNA, 120 bp, Artificial Sequence
  ENSG00000248779_2 (sequence is synthesized)
tgcaagactgacttggacaaatgtcagccaatctgaagatctgttggataactgattcagcgttttaagccactaagttttgggatactttttaatgcagcgttattttggtcagagtta

SEQ ID NO: 929861 - DNA, 120 bp, Artificial Sequence
  ENSG00000248779_3 (sequence is synthesized)
agtggttaaagagtcaatattcttatacatattacacacagtcagatagacagaccgatacacacatgtgcacacacacagagaataatataggtctaatggcttagaatttacacttta

SEQ ID NO: 929862 - DNA, 120 bp, Artificial Sequence
  ENSG00000203645_0 (sequence is synthesized)
aagtccagtgctaacctgtgggtgaatgaacaatgaccggggaacagggccctaaggtcctggctaatgctgggaaaacaccaagctgaagaagacatgtttcctgccctccagcaaaga

SEQ ID NO: 929863 - DNA, 120 bp, Artificial Sequence
  ENSG00000203645_1 (sequence is synthesized)
gatagagtccaagcaaataactacaacagatgtgaacgcggaagcacaaaggaagaagctaatgcttcctgggagaggtgacatttcttctgggtttcgatacttcttctagtcctctca

SEQ ID NO: 929864 - DNA, 120 bp, Artificial Sequence
  ENSG00000203645_2 (sequence is synthesized)
catcttaaatctccattctcagtattctcagtggagcattttattctgcttctatgatttggggcaaaaagaagagaatctatttgataaagtacttctagaaagactggcagaaaagac

SEQ ID NO: 929865 - DNA, 120 bp, Artificial Sequence
  ENSG00000203645_3 (sequence is synthesized)
tctgaaagactttctcaggagtaagaaacaacacaactttcttaatattcctgtgctgttttcacatgcaaaaaatactttccccctcctacctcatcggtagggcaatggacaaaatgg

SEQ ID NO: 929866 - DNA, 120 bp, Artificial Sequence
  ENSG00000203645_4 (sequence is synthesized)
cttttcttatagtaaatagcatgttccatgtaagacgaggccatgatctcccttttttgcacttcaaaatattttaaaattgctggattattttttcctctccattcttccttctgtggc

SEQ ID NO: 929867 - DNA, 120 bp, Artificial Sequence
  ENSG00000203645_5 (sequence is synthesized)
ttttcctctccattcttccttctgtggcttgacaattactaaagctggtatgattgataacacgactcaagttagaggaagtcttttttttcttgagatggagtctggctctgtctccca

SEQ ID NO: 929868 - DNA, 120 bp, Artificial Sequence
  ENSG00000203645_6 (sequence is synthesized)
ctcactgcaaactagaggaggcctttttttttttaaatcaaagagcctcttttaaaattataacccattgggaatatgctgtggggaggtctctcacagcagtgtgaaagagcacattat

SEQ ID NO: 929869 - DNA, 120 bp, Artificial Sequence
  ENSG00000203645_7 (sequence is synthesized)
attacaggcgtgagccactgcacccggcaagagcacattatcttgtatgtgcctgtagcccatctgcagacatgaaacccaagtccctgttctcccaagtgcaatggaaacatctcctct

SEQ ID NO: 929870 - DNA, 120 bp, Artificial Sequence
  ENSG00000203645_8 (sequence is synthesized)
aagtgcaatggaaacatctcctctcctgcggatgaactgaataagggatagtgaagcatatttttaaatgtttgctattgctcgttagccacagtaggaatttcaataccagtggcagtg

SEQ ID NO: 929871 - DNA, 120 bp, Artificial Sequence
  ENSG00000203645_9 (sequence is synthesized)
ggatccctcattttattgtagatgccttttttcatttcagcttacaaagcttccctccgttggagggtgggggccgcagaaataaaatggaaggcaaaggggggatgcgctgcgattttt

SEQ ID NO: 929872 - DNA, 120 bp, Artificial Sequence
  ENSG00000203645_10 (sequence is synthesized)
ctgctcattgtctcattttgaaactgccccaactgtatagaacttctaggaagcccgtacatgtcggcacattcccggggaagaatgcttctcttaggagccagtgccttaagaagtttc

SEQ ID NO: 929873 - DNA, 120 bp, Artificial Sequence
  ENSG00000203645_11 (sequence is synthesized)
ttccgtgttgcactggcatgcatgtctgcttaaatcgccactctcctcatgacatttggcaggactaggaagttcacgtgtcagtcccgctattggcccacgtgaccccatccccaaaga

SEQ ID NO: 929874 - DNA, 120 bp, Artificial Sequence
  ENSG00000203645_12 (sequence is synthesized)
caggcagtgaacccctgtgtttttatgccatatgaactgagaagtagacgcattctgtgtaatggatacacactgaggctgcaatttttgaaaagtcattgttttgacttccctatattc

SEQ ID NO: 929875 - DNA, 120 bp, Artificial Sequence
  ENSG00000203645_13 (sequence is synthesized)
acatcgaataacgcttttagtctttgccctcagtactctagaaggggctatatagcctgtttttgtatttgtgggaaaaagactagaagctgggcaaaatgccaccaggaagactaacat

SEQ ID NO: 929876 - DNA, 120 bp, Artificial Sequence
  ENSG00000203645_14 (sequence is synthesized)
ggcgacgtgatcccaagggaaactgaggtctcacactgtccagcaacagaaggaggttgaattctggaggaggtttaattttttaaaaactcaaactaataaaagatgttcacaaatatt

SEQ ID NO: 929877 - DNA, 120 bp, Artificial Sequence
  ENSG00000203643_0 (sequence is synthesized)
aggagtgagccaggtttcaggagggggcacgcaggagaccagccctggattcagacttgagcctggtccacaccagaggccgatagaaggcttggattacagcaggggcaggttctttca

SEQ ID NO: 929878 - DNA, 120 bp, Artificial Sequence
  ENSG00000203643_1 (sequence is synthesized)
cgaaatcaaatttctccactgatttctgaattcatagcaagctaactagaagagatttttaattcagaatgctgcactccaaaaaactgagaaagacattgagggagggaatatggaaat

SEQ ID NO: 929879 - DNA, 120 bp, Artificial Sequence
  ENSG00000203643_2 (sequence is synthesized)
ttgatggtatctcggctaagtttgatattgagatttttgtaataaatgttgttgaataaaaaaggcatcaagatgcctaaatcagagagataaaatgaagaataattacagtatacaatt

SEQ ID NO: 929880 - DNA, 120 bp, Artificial Sequence
  ENSG00000203643_3 (sequence is synthesized)
tttgaattattgtccaatcaactaaaattagaagtttttaacatgctaaaatggaaagttattcaacagaatggaatcctttaaaatatgatggaactgccacttaagcatcagaagtct

SEQ ID NO: 929881 - DNA, 120 bp, Artificial Sequence
  ENSG00000203643_4 (sequence is synthesized)
agaagtctgctcaggtgtgaccctgggagcccaaacttttcacggaacagcaaggaacatccctgtgctcctccttcccagtctctttttttttcagagggagtctcgctctgttgccca

SEQ ID NO: 929882 - DNA, 74 bp, Artificial Sequence
  ENSG00000203643_5 (sequence is synthesized)
aacaggcgccagccaccatgcccaggtcataccacccttgacaaactgcagtccctactggccattacactgca

SEQ ID NO: 929883 - DNA, 120 bp, Artificial Sequence
  ENSG00000203643_6 (sequence is synthesized)
gtgacaatgatggatctcctgtttggaagagaatgacccaggacaaaaggggtgaccaaaccatggtctaagtgtgatatctgaagctgcttaatctgcaaaaggaaacccagtgtgagg

SEQ ID NO: 929884 - DNA, 120 bp, Artificial Sequence
  ENSG00000203643_7 (sequence is synthesized)
aatgggagatggagatgtggaggcctagtgtctaagggctggcattcaggggaagaattacatttgtctgtaatctcaaaggctaggaaggatggagctgggtggatttgggatcaccat

SEQ ID NO: 929885 - DNA, 120 bp, Artificial Sequence
  ENSG00000203643_8 (sequence is synthesized)
gaaaaggacctatgagtaagtcaggcctgcgtagaggtgatctggaagcccccagctgcaccctcaattggaaaggggctgtggaggggtcttgaacatgacttagcaaatggagctaga

SEQ ID NO: 929886 - DNA, 120 bp, Artificial Sequence
  ENSG00000203643_9 (sequence is synthesized)
ttccttcaatgctccatccagccataaatcaatgaaatagctccctccttctttttctctgccttccaaactgaactactgtatctcttgcaaaaccaattggataattctgtgttaagc

SEQ ID NO: 929887 - DNA, 120 bp, Artificial Sequence
  ENSG00000203643_10 (sequence is synthesized)
ttcctgtctcccaccctgagcaaccacagatgaatgatggttgttgcagagatgggcaagtctggcttctgagagctgccattgaacttctctgtgctgagctggcattagctcctctcc

SEQ ID NO: 929888 - DNA, 120 bp, Artificial Sequence
  ENSG00000203643_11 (sequence is synthesized)
tctcccctccccaccctgcttagagaatcctctccacatttggaggtttgtgtcacccttctacgtgaccagggcttctgtcccatgagaagagaagggacaggaggactctgtctgaaa

SEQ ID NO: 929889 - DNA, 120 bp, Artificial Sequence
  ENSG00000203643_12 (sequence is synthesized)
gttctgagttgtagatttgcccatgggccagacatcaggctctgtccatgaggtgacccaagtcaccagaggaaaagtgtctgtccccaatctccacattaaatttgccttgggcctcaa

SEQ ID NO: 929890 - DNA, 120 bp, Artificial Sequence
  ENSG00000272588_0 (sequence is synthesized)
gcattaggaaaaaactgacgaaaagagcaaaataaaaaaataaagcaggaaccaactcacatcctccatggaaaatcgtggaatgtgtaaggtaacgtgccagctaaaaaagtttgattt

SEQ ID NO: 929891 - DNA, 120 bp, Artificial Sequence
  ENSG00000272588_1 (sequence is synthesized)
ttttaaaaaacctagctctacgttgtaaacagtgtcacatttaagacattttaagaacagaaatatcacacaagtattcaccaacagaaagctggcatagctagattagtatgtcatggg

SEQ ID NO: 929892 - DNA, 120 bp, Artificial Sequence
  ENSG00000272588_2 (sequence is synthesized)
tctataagcagcggacgcaccctgccctcaacaggcagccgccgtctccgactcagggaacaggtgtgccagccacgcaggcacaggtctgaggcagcggggtctgcagtgcatggggcc

SEQ ID NO: 929893 - DNA, 120 bp, Artificial Sequence
  ENSG00000272588_3 (sequence is synthesized)
cgcagggcagcaggaagggctgcacagatgaacgcgggcctgcatgcacctgcgggaaaacgcagacacacatgggcgggggtgggagtgggggggattgtggaaggaaaacaagaagaa

SEQ ID NO: 929894 - DNA, 120 bp, Artificial Sequence
  ENSG00000272588_4 (sequence is synthesized)
aatatgtttacgtttgctcagatttgcatacatacaggaggtgatcacagtggttctctataggtcactacagacagcggcagagatgagaacaaaattaaaccttttcaataatactaa

SEQ ID NO: 929895 - DNA, 120 bp, Artificial Sequence
  ENSG00000272589_0 (sequence is synthesized)
gaaggcgctgcgggcactccggatcgcattcacaaagtcgtcgtagtccgcaggagtcagtaaacaaatgaagagctagaggaagggtcctctgaagagccactggcacaactgcagtca

SEQ ID NO: 929896 - DNA, 120 bp, Artificial Sequence
  ENSG00000272589_1 (sequence is synthesized)
ggtcaaatgatttacctgtaatccaggaaacgtgggaagaataagtacgtgagagccagttgggagaaacaaagttgtgcaggccaagggcataaagcccaatctcgaaggcgcaaaggt

SEQ ID NO: 929897 - DNA, 120 bp, Artificial Sequence
  ENSG00000272589_2 (sequence is synthesized)
gcaggttgcggtgaggaccctggtggccccctgaggaagatggatgtgtgaaaatggaagtgctgctgttgccccctgccttgatcagcactgtcttcgccagctcgaagtagaagtgtg

SEQ ID NO: 929898 - DNA, 120 bp, Artificial Sequence
  ENSG00000272589_3 (sequence is synthesized)
cagctgcctctgatggctgattggtcttcgcccgggctcctccactggcactggcccggcgacttccactggaggatgaggagcccagggagtccgaagaagagctgctaatgctgtcac

SEQ ID NO: 929899 - DNA, 120 bp, Artificial Sequence
  ENSG00000272589_4 (sequence is synthesized)
tgtcctgacctcgaccccaggaggtgggggcccagccccctcgaagtggtctccggcttaaggtgggggaactatccgatgttgtttcaggggcactgctgtcaatgctggccatgccta

SEQ ID NO: 929900 - DNA, 120 bp, Artificial Sequence
  ENSG00000272589_5 (sequence is synthesized)
acccccaagagaagtcagtctcagaagtcaggagtcccagatgttaagactccaaccttcaggattatccttccctctatgctagcccacaggctatcctacctgtgtgcttcttcttag

SEQ ID NO: 929901 - DNA, 120 bp, Artificial Sequence
  ENSG00000272589_6 (sequence is synthesized)
ccccgtccattatagcctccacgactgccaagtgccaagcggctaggaaccttcccttctggccttggggtcaaagctgcctcagatggaagaccctcacagggggaatgtggggaactc

SEQ ID NO: 929902 - DNA, 120 bp, Artificial Sequence
  ENSG00000272589_7 (sequence is synthesized)
tctaggtgaggaaaacaggacgctgggatgagcccaggaaaggggacctcaacataggtccacaccattcatcccccctgcccagtgcccccacctcaccaggcacattcttctctgtga

SEQ ID NO: 929903 - DNA, 120 bp, Artificial Sequence
  ENSG00000272589_8 (sequence is synthesized)
agccctcagtggggcctggcccagcccctgccacactccctggttgagcaggccctgcagagcctgaggtcagtggttgcagggcccctggggcagatgggcccccgtgctttgaaggag

SEQ ID NO: 929904 - DNA, 120 bp, Artificial Sequence
  ENSG00000272589_9 (sequence is synthesized)
acctctggctggctgtggttgggcggctagatgagtagaaagaactcagcgtctgtggcttatgtgtctggctctctcggtccaagagtttgtctaagatctggaagacagaagcagtga

SEQ ID NO: 929905 - DNA, 120 bp, Artificial Sequence
  ENSG00000272589_10 (sequence is synthesized)
cctccagagaagcagtgacaggatgccctttagctcctgacttctattaccttcctttctccttgaaacagccaattgctacatcctcagggagccttccccacttacaaccacaggatg

SEQ ID NO: 929906 - DNA, 120 bp, Artificial Sequence
  ENSG00000272589_11 (sequence is synthesized)
acctcctggtttacatgtctttttgtaacttatttaaccccaacatatcttggtatcctccattaacaccacagggcagaatatactgatagtcaataaatactgaaataagtgaatgaa

SEQ ID NO: 929907 - DNA, 120 bp, Artificial Sequence
  ENSG00000286529_0 (sequence is synthesized)
tgctctgtgagaaagatccacctacaacctcgggtcctcagaccaaccagctccaggaacatctcaccaattttaaattggattcccagccttatgaagacaccctatctggacgatcag

SEQ ID NO: 929908 - DNA, 78 bp, Artificial Sequence
  ENSG00000286529_1 (sequence is synthesized)
ggaccggaccctacttagtcatctataataccctaactgccgtcctcctgcaggaccctccccattgggttcaccgtt

SEQ ID NO: 929909 - DNA, 120 bp, Artificial Sequence
  ENSG00000286529_2 (sequence is synthesized)
gccgtcctcctgcaggaccctccccattgggttcaccgttccagaataaagccgtgtccattggacagccagcctgatctctcctcttccttctggaagtcgcgagtactcacccctact

SEQ ID NO: 929910 - DNA, 120 bp, Artificial Sequence
  ENSG00000286529_3 (sequence is synthesized)
ccttatgagcctaatacatcccttcattttgttaggtctatccttccttaccagagtctttgcaacagggccttatgcagtcacccccactacttagactgcatcccaaaaacttttcat

SEQ ID NO: 929911 - DNA, 120 bp, Artificial Sequence
  ENSG00000286529_4 (sequence is synthesized)
tcacccccactacttagactgcatcccaaaaacttttcatccctgctctcttctgtctagtcatactcctattcttcgttttcacctctccatacatgccctgcccttgtctacactgcc

SEQ ID NO: 929912 - DNA, 120 bp, Artificial Sequence
  ENSG00000286529_5 (sequence is synthesized)
agcttatacttttcctccaaaccatcatagctggtcctggtcttatcccctaactgccactcttaactccctcttggaatggataaatggcctttgctggaaaagcacactccacttctt

SEQ ID NO: 929913 - DNA, 120 bp, Artificial Sequence
  ENSG00000286529_6 (sequence is synthesized)
cttacgcaaggtctcttcttcctctgtggctcctccacctgcatgtgtccacctgttaatgagacaggaacatgtacactagttttccttaccccaaaaatcaatttgcaaataagaccg

SEQ ID NO: 929914 - DNA, 120 bp, Artificial Sequence
  ENSG00000286529_7 (sequence is synthesized)
agcagcttcctgttcccctcatgacaccaacacttcactattattttattttttcttattattaatataagaagacaggaataggccttgacttactcactgctgaaaaaggaagactct

SEQ ID NO: 929915 - DNA, 120 bp, Artificial Sequence
  ENSG00000286529_8 (sequence is synthesized)
gtatatttttaaatgaagactgttgtttttacctaaatcagtctggcctggtatatgacaacataaaaaaattcaaggatagaggccaaaaactcaccagccaagcaaataatcatgctg

SEQ ID NO: 929916 - DNA, 120 bp, Artificial Sequence
  ENSG00000286529_9 (sequence is synthesized)
aacccccttaggcactctctaatttgaagtcctgggtcctcccaattcttagtcctttaatacttgtttttctccttttcttattcggaccttatgtcttctgtttagtttctcagttca

SEQ ID NO: 929917 - DNA, 120 bp, Artificial Sequence
  ENSG00000286529_10 (sequence is synthesized)
tatgtcttctgtttagtttctcagttcatacaaaaccatatccaggccatcaccaatcatcctatatgacaaatgctccttctaacaaccccagaatatcaccccttaccacaaaatctt

SEQ ID NO: 929918 - DNA, 89 bp, Artificial Sequence
  ENSG00000272582_0 (sequence is synthesized)
gtgagactctgtctcaaaaaaaaaaaaggttttgtggagatgaggtcttgtggcttgtggcgttgcccgggctggtcttgaactcctgg

SEQ ID NO: 929919 - DNA, 120 bp, Artificial Sequence
  ENSG00000272582_1 (sequence is synthesized)
agatccctctgtccaggaagcctctgtggactgccccttacttttcatgatgtccatgatgtggcgctgctggatgttcgtcagtttggattccttcatcatcactgcacgacaaagcat

SEQ ID NO: 929920 - DNA, 120 bp, Artificial Sequence
  ENSG00000272582_2 (sequence is synthesized)
tctatgaggcctcttgggctgcaggcggatgccttcacctgacaccctactgaaatttaaaaccctacatcctagccccattctgcactgagcatgccttctctatctttcctgcttcgt

SEQ ID NO: 929921 - DNA, 120 bp, Artificial Sequence
  ENSG00000272582_3 (sequence is synthesized)
tttttctatagcacttacgaccacctaaaattctatatattttattttattgttatccttctatattagctgtatgataagaatttttgctggtttaataaaatttctgccctctgttaa

SEQ ID NO: 929922 - DNA, 120 bp, Artificial Sequence
  ENSG00000275120_0 (sequence is synthesized)
agaaggagctgcggctgcagcgcagcaggttctccatcttcccgcacagctcgcagtactgccggtctcgctcgctcgagctcggctcgccgggcccgcagctgtcattggccatggcga

SEQ ID NO: 929923 - DNA, 120 bp, Artificial Sequence
  ENSG00000275120_1 (sequence is synthesized)
ccgcagctgagcaggaggggtgcggccggacggcctcgcccgaggctggggagcggagagagagataggggccgtcactgcgccatgcacccgctacccttgactcaaggaggctggcac

SEQ ID NO: 929924 - DNA, 120 bp, Artificial Sequence
  ENSG00000275120_2 (sequence is synthesized)
ccagggccctcggccgggtcgcttccgagtcctaggctccggcgcagcgcaggcggccgcctcagcgcctaatcgccgccgtgggctgagagaacgcggcctgtgcggcgaacggcaacc

SEQ ID NO: 929925 - DNA, 120 bp, Artificial Sequence
  ENSG00000275120_3 (sequence is synthesized)
ctcgggcgcgcgagcctgcggagcgcaagaccggccccctcggctgccgccaccgcctcagcgtcccgggcggcccggcccaggctgcggaggagcgcagggttctttctgcaagtcttc

SEQ ID NO: 929926 - DNA, 120 bp, Artificial Sequence
  ENSG00000275120_4 (sequence is synthesized)
cttccaccagggccactgcctcctctccactctccggatgctgctgtctgacccagatctggatctcctggagaaggacagtcgggaactgttctaggaccagcaactccaggatctgct

SEQ ID NO: 929927 - DNA, 120 bp, Artificial Sequence
  ENSG00000275120_5 (sequence is synthesized)
cttttgtacacttctctggccttagccactgacaacagagcttctggagctggaggagggcctctcggggtcgtgatgcttcttggtaacggaaatgccaaaagctctggcaggatgtct

SEQ ID NO: 929928 - DNA, 120 bp, Artificial Sequence
  ENSG00000275120_6 (sequence is synthesized)
ctggtccagggtaattcccttgaagggaaatttcctgctcccagtgggaatcttcttccagtttaactatttggagatcttgtactgaaggagtctggatttgttggtccacagctacag

SEQ ID NO: 929929 - DNA, 120 bp, Artificial Sequence
  ENSG00000275120_7 (sequence is synthesized)
ccattgttcaggtcagagaagagctttgcaaccgcactctaaagctcaaacctcttcatcacctcactgggaagccatcttagaacttccacttaggagtcactaagtggaacttctctt

SEQ ID NO: 929930 - DNA, 120 bp, Artificial Sequence
  ENSG00000275120_8 (sequence is synthesized)
gaaattctagagtcagagacatacattacaaagttaactctagtaaaaatcgcaagtgttagcccagcaggcttgaggtgaagaagagagccttcctgtcccagccctgttgcatgccct

SEQ ID NO: 929931 - DNA, 120 bp, Artificial Sequence
  ENSG00000275120_9 (sequence is synthesized)
ggtgcctgtggagtcactggtggggtggcagttccggaagtttgataagaggagtcaagggctagtgacctggttgaaaagtagaggagcttgaagctgagagaatacggacgattcggc

SEQ ID NO: 929932 - DNA, 120 bp, Artificial Sequence
  ENSG00000275120_10 (sequence is synthesized)
cccgtgacatgttcttagcggggacgcaagaagcccgagcccaggtcccaaacacggctattcggctagccactgagcaccggaagcggaaaacctagccccagaaggactccgtgttct

SEQ ID NO: 929933 - DNA, 120 bp, Artificial Sequence
  ENSG00000275120_11 (sequence is synthesized)
ccggaactacatttcccagaggccgccgcccgaagacagacagcagcgttagcccataaaatgggagaatatctcaggcgcctattcgtttcagacgaatcattgatgacttttctacca

SEQ ID NO: 929934 - DNA, 120 bp, Artificial Sequence
  ENSG00000275120_12 (sequence is synthesized)
gctgggcacctggaccaaggagctcagcggagtggtcactctcgggatgtctgcagccatcatccacagtcctggggcaatcacttaggcttcaagccttggacctcagtcttctccagc

SEQ ID NO: 929935 - DNA, 90 bp, Artificial Sequence
  ENSG00000275120_13 (sequence is synthesized)
gcctcccaagtagctgggattaccggcgtgcgccaccacacctggctaattttgcgtgtttttagtagagacagagattcctgacctcag

SEQ ID NO: 929936 - DNA, 120 bp, Artificial Sequence
  ENSG00000275120_14 (sequence is synthesized)
tgctgagattacaggcatgagccacgtgcccggtccttttcccatttttaaattggatttatttgtaagagctctttgtatattaagaaaattatccctttgtcacagcagttgctactc

SEQ ID NO: 929937 - DNA, 120 bp, Artificial Sequence
  ENSG00000275120_15 (sequence is synthesized)
actctttctcagtttgctgtttgttttctgctggtttattaaatatagaaatttgaaatttttttgcagtcaaatttgttaatcttatctttttatagcctgtgagttttgtgttagaaa

SEQ ID NO: 929938 - DNA, 120 bp, Artificial Sequence
  ENSG00000275120_16 (sequence is synthesized)
gtcctctgcaccactccaaagattatgtgaaattcacctgtttttcactaattaacctcttgaatccaattacagagatgcaaagtgaagttcagctagtgattcttatccaataccctg

SEQ ID NO: 929939 - DNA, 120 bp, Artificial Sequence
  ENSG00000275120_17 (sequence is synthesized)
gtagcatctttattatcccagactgaccacatgcaaatagcaccacctccaggccagcctgagaagtctgcactaagcccctggatgcagaattctgggccaccacccctccaagtgatt

SEQ ID NO: 929940 - DNA, 120 bp, Artificial Sequence
  ENSG00000275120_18 (sequence is synthesized)
ttttttgggatgacattgtattaaaaaagatgggtttctccatgtgtccatccttaccaggaatggaaatttacacaaaaaggaaaagatgcaggggaggctggggatgcacagatggaa

SEQ ID NO: 929941 - DNA, 120 bp, Artificial Sequence
  ENSG00000275120_19 (sequence is synthesized)
ctttccagcagctcaagcgtttatttacctctgttcctaacccatgtcaacccttgaccacagaactggcactagcttgtcactggagagtcctaaagaagctgtctcctctgtgtctga

SEQ ID NO: 929942 - DNA, 120 bp, Artificial Sequence
  ENSG00000275120_20 (sequence is synthesized)
ttctgggaagctggtccttgccagtgtcaactatcctacatgagacagagagaaagtcacatttaagaccaattcatggcataatgatcctactgagaagggccctggtagccaagccag

SEQ ID NO: 929943 - DNA, 120 bp, Artificial Sequence
  ENSG00000275120_21 (sequence is synthesized)
taccctaagaccagcctgctacatcgaagcaagcctggaaacacagccaagttcaaggttgctcccccaagagagtcctttctccattggccaaaccacaagggtgagagaggctctgtt

SEQ ID NO: 929944 - DNA, 120 bp, Artificial Sequence
  ENSG00000275120_22 (sequence is synthesized)
ccaccagaaagcattcttggttaaaagcttaagaactaatctggctaacttaagtaaaagggacttactgaaagactgtcagggaactgacagagtagaagggagctgacgaatcaggct

SEQ ID NO: 929945 - DNA, 120 bp, Artificial Sequence
  ENSG00000275120_23 (sequence is synthesized)
tgagaacagttaggagccaagagacaaagaggaagtccccaaaaaccacaataacagtctctgagcagaaaaagttcagcttgcctatcccatgacctctggtggtactacagccatctc

SEQ ID NO: 929946 - DNA, 120 bp, Artificial Sequence
  ENSG00000275120_24 (sequence is synthesized)
tgtttctccgcctttctcacacaaattctcccatgcaaggaaagagcatttggttggttgagtctaagtcacatgcacattccctggatgcagcagggtgagagaggattggatgtggct

SEQ ID NO: 929947 - DNA, 120 bp, Artificial Sequence
  ENSG00000275120_25 (sequence is synthesized)
cctagattttcttactaataccccacacaaaggcagattctccactctggagactgaaggcctgttaggaaacactggacaggcagaaacaatatcactacttgtctttaggctctgagc

SEQ ID NO: 929948 - DNA, 120 bp, Artificial Sequence
  ENSG00000275120_26 (sequence is synthesized)
aagaagggacctcaccccaaggaatgctcagcctaaggcatttgggggcccttagctcatctagagttgatgaaaaatgatgtgggtgggaatggggagaactgctccataacagttctt

SEQ ID NO: 929949 - DNA, 120 bp, Artificial Sequence
  ENSG00000275120_27 (sequence is synthesized)
ataacagttttgattggagagtttagtccattaacattcaatgttagtattgacttattcttgccattttgttttctggttgctgtggtcttctctttcttcttttctttctgtcttcct

SEQ ID NO: 929950 - DNA, 120 bp, Artificial Sequence
  ENSG00000275120_28 (sequence is synthesized)
tattgtgaaggtgattttctctggtagtatgatttaatttcttgctttttgtgttttgtgtatttattgcatatttttaaatttgagattaccatgaggcttggaaataccatcttataa

SEQ ID NO: 929951 - DNA, 120 bp, Artificial Sequence
  ENSG00000273987_0 (sequence is synthesized)
gaatttcaaccatccaaactgctttctgtggatccaatctgtaatctgcagagcgcgtctggattgtaatacagattgcaatatgcaagccacacaagttaggtaaagaacaagtgcggg

SEQ ID NO: 929952 - DNA, 120 bp, Artificial Sequence
  ENSG00000273987_1 (sequence is synthesized)
atgctgacaatgggccagtcgagtgcaaagcactatatattcgtttcttagacgcagcttccgtgtatagatttttattgttctaaataatctagaatcatattgccacttccctcagag

SEQ ID NO: 929953 - DNA, 120 bp, Artificial Sequence
  ENSG00000273987_2 (sequence is synthesized)
tctgttttttcgtctgaagagaccgaatgcttagatagataacaatagatgcttggaaaatgtagccaagtagttcctcttgacaaaatcttccctttttgatagtttggaacagagcca

SEQ ID NO: 929954 - DNA, 120 bp, Artificial Sequence
  ENSG00000273987_3 (sequence is synthesized)
ctgtatggtgactggtagactccaagagttgctttaattgatacactgagactgggatggacagagtacatttgattgtctattttacctgcaatgcaatataaatcaacgtcatttggc

SEQ ID NO: 929955 - DNA, 120 bp, Artificial Sequence
  ENSG00000273987_4 (sequence is synthesized)
ttaatgttttaaattcattacatcagttatattgatattctgtaataaaccagcatttttccccatgacattaattttttttagtatttctatgtttcaaataaatacctttacttagta

SEQ ID NO: 929956 - DNA, 120 bp, Artificial Sequence
  ENSG00000273982_0 (sequence is synthesized)
cttttactctcctctgaggatctgcgtttcctcagagtgcgaactctctgcctccccagctggcggaggtgtctggaggcccagctttgcaggcctgggccccctgctggccttgggaat

SEQ ID NO: 929957 - DNA, 120 bp, Artificial Sequence
  ENSG00000273982_1 (sequence is synthesized)
ggctctgatctggagccaggggctatttgttcctctaaggccctgggacagtagctgcggggaaaggaaaggaggagtccacctgccctgaaggggagggtcccggatgtgcctgccggt

SEQ ID NO: 929958 - DNA, 120 bp, Artificial Sequence
  ENSG00000273982_2 (sequence is synthesized)
actggagttgacccgtttgatacctgacccatttttagctttgttattttggtagtctcctaactatgtgggctttaaaaatggtgttcccagcttgggcaataaacatgtgtatttgga

SEQ ID NO: 929959 - DNA, 120 bp, Artificial Sequence
  ENSG00000273980_0 (sequence is synthesized)
cgtgagaggcccggagggagcaggggaggtggagaggagctttccccagtggagctggcaggaagagtcccaggtgcaaggagcgcattttagaattccaggactcgggaggaaacctgc

SEQ ID NO: 929960 - DNA, 120 bp, Artificial Sequence
  ENSG00000273980_1 (sequence is synthesized)
tgggtgtgggtgcccctcacatcacctggcgtttatttttgcatgtgtgaaatataacaacaatttcctaggggaaaacaccctagggtgcacaaaagttgtaaaaatgggaacatatgg

SEQ ID NO: 929961 - DNA, 120 bp, Artificial Sequence
  ENSG00000273980_2 (sequence is synthesized)
tccgaaactcactgctgaataatgtgctgtcatgaaatttacttcaaaaaccccctcacggagtacaatcttgggtagatgaaggagaaaaaaagtaaaaatgaatttaaaaatctctta

SEQ ID NO: 929962 - DNA, 120 bp, Artificial Sequence
  ENSG00000273989_0 (sequence is synthesized)
tctttgtgattgtttggtactagtcattaactttgttcccattttgtataaatattatgtattagaagttagaggcagttttctgtgaagagtatttctacttgattttatgttatttga

SEQ ID NO: 929963 - DNA, 120 bp, Artificial Sequence
  ENSG00000273989_1 (sequence is synthesized)
taaatagatgttttgaatagcagcataaaattaaatgtataaatttaatattattgctgtattgtaatctttttctgtttaattttttggcttgcattattttagtcgagtaaagtattt

SEQ ID NO: 929964 - DNA, 120 bp, Artificial Sequence
  ENSG00000273989_2 (sequence is synthesized)
atcttttcttcatataaaataaaatttgagacctctgcatccaaaatactaaatataaaagtttataaattatattaaaatatgtctcagattatatagagtgatgcgtagtcattgtta

SEQ ID NO: 929965 - DNA, 120 bp, Artificial Sequence
  ENSG00000273989_3 (sequence is synthesized)
tagagtgatgcgtagtcattgttaccttcaaattagccacttggtgaaatatgtcactttttagtcgctagactatgtttgaaagctgtaaaatactggcgagccacaatttaggaccac

SEQ ID NO: 929966 - DNA, 120 bp, Artificial Sequence
  ENSG00000273989_4 (sequence is synthesized)
gtaaaatgtgaaaatcgggtttatggaaacagattagaatttattttcattatggaatgttttgtttcaaagtttgttgaaaaaatatattttgatgtataataaaggtatatagtatga

SEQ ID NO: 929967 - DNA, 120 bp, Artificial Sequence
  ENSG00000272632_0 (sequence is synthesized)
aaatatctgacactagctctcccagcctcccttgctattgtggtagagcatacacattccactagtcagatacacatgccccagagtgggaatcagaagcttgtgatatgaaagaggaga

SEQ ID NO: 929968 - DNA, 120 bp, Artificial Sequence
  ENSG00000272632_1 (sequence is synthesized)
cttaagcaaattaatagcggtaattacatcagaaggggcagggttcaactatgttgaagagaaagctattttcaaaagtttagtagaatatatttgcatcaaataacttgtctaatgata

SEQ ID NO: 929969 - DNA, 120 bp, Artificial Sequence
  ENSG00000272632_2 (sequence is synthesized)
aaaatagcttagtttaataaactttccagcaatagggaaatactgggtatcagttctaaatgtttccatactttcaaaatcaacacaattttatttcttaataaaattctcaaaatctga

SEQ ID NO: 929970 - DNA, 120 bp, Artificial Sequence
  ENSG00000272630_0 (sequence is synthesized)
cttgtgccttagcctcccgagtagctggaactacagacatgcgccatgatgtccatctaattttcatatatatatatatgtattttttttttaacagacatgggggtttcaccatgttgg

SEQ ID NO: 929971 - DNA, 88 bp, Artificial Sequence
  ENSG00000272630_1 (sequence is synthesized)
agctcggccaacctggtttccttattattttcacttgtcaaatgtgtatgtacgtatatttgtgtgtgtatgttttttaatgttgtac

SEQ ID NO: 929972 - DNA, 120 bp, Artificial Sequence
  ENSG00000272630_2 (sequence is synthesized)
cttattattttcacttgtcaaatgtgtatgtacgtatatttgtgtgtgtatgttttttaatgttgtacatacatactttttttttttctttttcactctgttgtccaggctggagtgcag

SEQ ID NO: 929973 - DNA, 65 bp, Artificial Sequence
  ENSG00000272630_3 (sequence is synthesized)
gaaacatacatttttatgttgtaggttttcttcaaaggactccaaattctacaacagcaggaatc

SEQ ID NO: 929974 - DNA, 120 bp, Artificial Sequence
  ENSG00000272630_4 (sequence is synthesized)
ttttcttcaaaggactccaaattctacaacagcaggaatcatatacccagcacttaccatagtctggcttatatgggcaggcaattatttatggatgaatgaatttctattgccacagtg

SEQ ID NO: 929975 - DNA, 120 bp, Artificial Sequence
  ENSG00000272630_5 (sequence is synthesized)
caggttttaattcttttcaacaaagattataagctccttaaaagcagagattgtctaattaaagtttgatcttccacagctcagtaggcagtgtcttggacacagaaggtaggtgttcta

SEQ ID NO: 929976 - DNA, 120 bp, Artificial Sequence
  ENSG00000272630_6 (sequence is synthesized)
taaatatttattctatgaatcttgaattactaacctagactctctttctcttctaattcacatagcatatgtgattgattaaagttcacaactcattgttggtaatgtcatataaattat

SEQ ID NO: 929977 - DNA, 120 bp, Artificial Sequence
  ENSG00000272630_7 (sequence is synthesized)
tcattgttggtaatgtcatataaattattaggcttgttgtccagttttgaaaaatctccaataagctatttatttatttagacacaggatctctttctgttgcccaggctggagtgcagt

SEQ ID NO: 929978 - DNA, 120 bp, Artificial Sequence
  ENSG00000272630_8 (sequence is synthesized)
ctcagcctcctgaatagctgggactacagacacatatcaccacacccagctaattaaaaaaactttttttgtagaggtaaggtctcaccatcttgccctggctggtctcaaacttctggc

SEQ ID NO: 929979 - DNA, 120 bp, Artificial Sequence
  ENSG00000272630_9 (sequence is synthesized)
aacccaggagttcaagaccagcctggacacatggtgagacctgtctctgcaaacaaaacaaaatcctacagaaaacccggacatggtcgtgcaggcctgtagtcccagctacttgggagg

SEQ ID NO: 929980 - DNA, 120 bp, Artificial Sequence
  ENSG00000272630_10 (sequence is synthesized)
ggtcgtgcaggcctgtagtcccagctacttgggaggtgggaggatcgctggagcgcagtagttggaggttacggtgagctatgatcatgcaactccactccagcctgggtgacagagtga

SEQ ID NO: 929981 - DNA, 120 bp, Artificial Sequence
  ENSG00000272630_11 (sequence is synthesized)
tgtctctaagaaaaaaacaacacttttttggctaggtattgatgaatgctaaatctttacaattttacacatccaataattggaataatttcccacagattagcttcaggttcccaaaat

SEQ ID NO: 929982 - DNA, 120 bp, Artificial Sequence
  ENSG00000272630_12 (sequence is synthesized)
ttcaaccctgcttctcttctactattcacatagtttttgatgctagaacattggacacattaaaataacttcaagagttctggccctgcacctttgttttgcaatgctgggtggatcagc

SEQ ID NO: 929983 - DNA, 120 bp, Artificial Sequence
  ENSG00000272630_13 (sequence is synthesized)
acaacgggcaattggagtattcttggaagccactgggacagctggcaatatcttaactacacatggaagtgactgtgggttataaaaatatatcccagtaaattcaaaccaaatgtattc

SEQ ID NO: 929984 - DNA, 120 bp, Artificial Sequence
  ENSG00000272630_14 (sequence is synthesized)
ctaactcaacttccctttagctaaatttcaaaaatgtttgcttgccactccaacactagacaaagggaaacatggtggagggaagtcactaaggactaaagattgcagtttaaaatacat

SEQ ID NO: 929985 - DNA, 120 bp, Artificial Sequence
  ENSG00000272630_15 (sequence is synthesized)
tacttttataaattttacagaagcataggacagtgtgaacatattactagggacccttccagggacttggaaagggctagtgtaaatgagggcacctgaagctgaagcctccttagcttc

SEQ ID NO: 929986 - DNA, 120 bp, Artificial Sequence
  ENSG00000272630_16 (sequence is synthesized)
acagtaaatctgcttcagagtctacggccattttaattactgagtaaactgtcaactttcagagtcagctctatgtagggctagtgaatatgttgattacagctccatttgaggaagttt

SEQ ID NO: 929987 - DNA, 120 bp, Artificial Sequence
  ENSG00000272630_17 (sequence is synthesized)
gtgcagggattacaggtgtgagccaccgcacgccctgcctctttggtcttataattactttatactcctaaaaagtattgaggactccaaaaagcttttatgtggatcatatttatcaac

SEQ ID NO: 929988 - DNA, 120 bp, Artificial Sequence
  ENSG00000272630_18 (sequence is synthesized)
atttactatattaggaattaaaacaaacatataaaatatttattcatttaaaacaacaataataaacctgttacatgttaacataacataaataactttttttttgagagagggtctggc

SEQ ID NO: 929989 - DNA, 88 bp, Artificial Sequence
  ENSG00000272630_19 (sequence is synthesized)
aacctgttacatgttaacataacataaataactttttttttgagagagggtctggccatgttgcccaggctgatttcgaactcctggg

SEQ ID NO: 929990 - DNA, 120 bp, Artificial Sequence
  ENSG00000272630_20 (sequence is synthesized)
taacatatttttaatgaaaaataactattttccaaagcaaaataatttagtgagaagagtggcattattttacatttctgcaaatctcttcagtgtctgggctaatagaagattctcata

SEQ ID NO: 929991 - DNA, 120 bp, Artificial Sequence
  ENSG00000272630_21 (sequence is synthesized)
tctgtgtctgcgttccatctgtatcacaggcatgtagtctctggaagacctcactgtattgttattagagtgaaaaaggcagtaagtcttagtatgaaaataaagtcttagtatgaaaat

SEQ ID NO: 929992 - DNA, 120 bp, Artificial Sequence
  ENSG00000272631_0 (sequence is synthesized)
cacagctgccgcccgggtagcttcccgcagacgccgtaggtagcacgcgatggaacgcggcggaggggagcgtggacacggctgccgggcgctgcggccatcggcgccctggacgcccgc

SEQ ID NO: 929993 - DNA, 120 bp, Artificial Sequence
  ENSG00000272631_1 (sequence is synthesized)
tccggccttcggggccggatatccccactctcgcgggctctttcgcgtggacccctcctccggccgacactcacactgcggtgaacgccagtcagctggcgtgaaataaggtcgctggga

SEQ ID NO: 929994 - DNA, 120 bp, Artificial Sequence
  ENSG00000272631_2 (sequence is synthesized)
aggcaccaagtcaccaaggtgggggatggccaggtcgtggtagttgcgacaaagaaaaatataagtcacattgcatttgtttctcgcccacccaccgctcccggcgtctcttcccgggct

SEQ ID NO: 929995 - DNA, 120 bp, Artificial Sequence
  ENSG00000272631_3 (sequence is synthesized)
ccttgccagcgtgccgaggcgcaggcagggtgatggaggctccccggccgggaggatctgccggggagagcggcttccctcatcgattcgggagcgccaggcccggcgcgcccgggctcc

SEQ ID NO: 929996 - DNA, 120 bp, Artificial Sequence
  ENSG00000272631_4 (sequence is synthesized)
tgtgacctgcgagcccgcgaattccagcggcataagataaggagcggcgagggcccaacaggactgaggtcagccagctataaatacgcctccagctccaccgcgggctcacgctggtga

SEQ ID NO: 929997 - DNA, 120 bp, Artificial Sequence
  ENSG00000272631_5 (sequence is synthesized)
cctcgtgtaccctccggaggctcattccgtccatttggaaaatgcaaataattgtcaccacctcttttcttccatttcccctcattcatggtggaaaatgcttttaaaagtattcgatga

SEQ ID NO: 929998 - DNA, 120 bp, Artificial Sequence
  ENSG00000272631_6 (sequence is synthesized)
cccgtatgtgaggaaagaggagataggcccctttttcaccaaatgtgactttaacctccttagtaatccaagaaatgtatcaagtttaagtcacttaacaaaagatgttcttttaaaggt

SEQ ID NO: 929999 - DNA, 120 bp, Artificial Sequence
  ENSG00000272631_7 (sequence is synthesized)
gcattttaaaaaatcacttttaaaactgggtaaactgggtaaaaagaaagggggaaggaaaacaatgtgccaggcatttgtattgacacacattcttgcctgaagaggtgtttagattcc

SEQ ID NO: 930000 - DNA, 120 bp, Artificial Sequence
  ENSG00000272631_8 (sequence is synthesized)
agggtattcccttatattctggtataaatgtttgaattcccgtgtattttgtttcaattttttggtttatcttttattctgtctcccttttcttcttttacccgcctttgcccttaatgc

SEQ ID NO: 930001 - DNA, 120 bp, Artificial Sequence
  ENSG00000272631_9 (sequence is synthesized)
tgcagatagcctctgtcattctgaattatttttcaattctgttttcttccctaatctttttttctgggctcttcagctgtctcaggtttgacagtcatgggttgtagtatcttgctatgc

SEQ ID NO: 930002 - DNA, 120 bp, Artificial Sequence
  ENSG00000272631_10 (sequence is synthesized)
aggaagaagaggatacgtgagattacttgcatcaactaaaattggtcacttttctttctcaagtttccttcataatacccagttttagtttttttgttttttggggtttttttgttcttt

SEQ ID NO: 930003 - DNA, 120 bp, Artificial Sequence
  ENSG00000272631_11 (sequence is synthesized)
acaagcgtgagccactgcgcccagccccagctttagttctaaaggaaaagatgggccttttgcttaaggagattcacattgattggtcaaagctctcattgacgtatgctgagcaatgtg

SEQ ID NO: 930004 - DNA, 120 bp, Artificial Sequence
  ENSG00000272631_12 (sequence is synthesized)
gacgtatgctgagcaatgtgtcggcagagaaaaccatggcaagcgtgttattatgctctttatagtctagttggatttttagacatatgaattggtctataaaatagacaacaatctcag

SEQ ID NO: 930005 - DNA, 120 bp, Artificial Sequence
  ENSG00000272631_13 (sequence is synthesized)
gtgggaaccttagtacatcaagtttctgaaatgtacaaatgagtattccctggcttgtgttatctgccactgtagaaatgagagcaaaattgaagcatcaaattttaagtcgtgatatgt

SEQ ID NO: 930006 - DNA, 120 bp, Artificial Sequence
  ENSG00000272631_14 (sequence is synthesized)
ttgcttctctgcaaaagactctccttttcaaatcttcaggaatttttcgctctcctttgataaggcccagctagtacccaggcttcaatcctcagcgccctggctaccagcagctagtgg

SEQ ID NO: 930007 - DNA, 120 bp, Artificial Sequence
  ENSG00000272631_15 (sequence is synthesized)
ggcatgctgttctccctggctactggcatgtttatgcatgccagcccgtttctccggtctgtctgcccagggagacatctggacacgtgtgttctggcccccaaactcaaaagcaacatc

SEQ ID NO: 930008 - DNA, 120 bp, Artificial Sequence
  ENSG00000272631_16 (sequence is synthesized)
tcgggatccacagttaacattccgtaatgtgttggtattcctttaagtgggttactagaataggctggaaatggtcttttcttctgtccaggtaggtcacaagagaggtagttgttacat

SEQ ID NO: 930009 - DNA, 120 bp, Artificial Sequence
  ENSG00000272631_17 (sequence is synthesized)
gcccaaagcagcattcattaattacatcgtgcatttagttatttgtttgtggtctgagcccctctgctccactagaatataaactccatgagcaaaagactttgtcagtctctctttttt

SEQ ID NO: 930010 - DNA, 88 bp, Artificial Sequence
  ENSG00000272631_18 (sequence is synthesized)
ctcactttgtcacccaggctggagtgcagcggcatagtcatagttcactgtaacctggaactcctgggctcacgtgatcctcccccag

SEQ ID NO: 930011 - DNA, 120 bp, Artificial Sequence
  ENSG00000272631_19 (sequence is synthesized)
actacaggccagcttgactttgtcaatctattctcaactctctcctcagagcctagtgcctggcaagtgaatatttgttaaatgagagaagagaaataagcatacatatcctctaggcat

SEQ ID NO: 930012 - DNA, 120 bp, Artificial Sequence
  ENSG00000272631_20 (sequence is synthesized)
ttctaaaccttgtcaccaagacccttttagtgttagagggtggcatggctatcttggaaagagtgaaggttggctgggaaagctgtggatcacatcctcttcagtgaaatgggacttctg

SEQ ID NO: 930013 - DNA, 120 bp, Artificial Sequence
  ENSG00000272631_21 (sequence is synthesized)
ccttcagggatccaaggtgaatagattaatccaagctaatccattcaaagtcattttcatgttgtaaagatcttataaggcaaaaggcagcacgaagtctctgggtctgatgataagtta

SEQ ID NO: 930014 - DNA, 120 bp, Artificial Sequence
  ENSG00000272631_22 (sequence is synthesized)
gaggccagtaaggaggcacgagtgaaggaatgccattggtagggtgaccctttaggttggcttcaaacccaatattaaatgggtaggtgttagggagaataaacagcttcatttttcagc

SEQ ID NO: 930015 - DNA, 120 bp, Artificial Sequence
  ENSG00000272631_23 (sequence is synthesized)
tttttttttttttttttttttggttagtagtaccccatcatggcttagaaggactaaactgaaacagaaactgtggttaagaataagatggatgtatataattcagtgcacaaaatagag

SEQ ID NO: 930016 - DNA, 120 bp, Artificial Sequence
  ENSG00000272631_24 (sequence is synthesized)
attcagtgcacaaaatagaggaagtttaaaaacctgaattcattttcattgtggtggtacagtgttttacttcttttgtttacttctaaacaacttgctccttctcccttagctccattt

SEQ ID NO: 930017 - DNA, 120 bp, Artificial Sequence
  ENSG00000272631_25 (sequence is synthesized)
gctctcacttggtcctacctagtccgtggcctctgtattcctcctttccctactatccgtacaccctttaccatagaacctgatctttcctaggccttgaggcaggaagaattatcagag

SEQ ID NO: 930018 - DNA, 120 bp, Artificial Sequence
  ENSG00000272631_26 (sequence is synthesized)
ctttggtcccaagctcaagactcagcctcccactgcctcgcccctttctaagaactgacagcccttctcttgtgtctgaaaccctgacctgttagcttgccaggacctggaatttctctg

SEQ ID NO: 930019 - DNA, 120 bp, Artificial Sequence
  ENSG00000272631_27 (sequence is synthesized)
cttgttgtttggacttagctgcatccctgcacccagactgctgggcagttgtaggtattgttggtggcatcacttaattgcctccagctctttgtttctaggctccctgtatctgtattc

SEQ ID NO: 930020 - DNA, 120 bp, Artificial Sequence
  ENSG00000272631_28 (sequence is synthesized)
tatctatctgttgggcctcccttcccccattacctcaggctggatgtccccatccccactgcgctcctggactaccacctgttgtttgctcactactctctggctatcaggcactgccta

SEQ ID NO: 930021 - DNA, 120 bp, Artificial Sequence
  ENSG00000272631_29 (sequence is synthesized)
gaggactatggttcctcccaccgagcaccgggagctggggcctccctaccccaactcccacgcagcccacagtagatcttggccttccctgtcctgctgcagctcactgccctgcttttc

SEQ ID NO: 930022 - DNA, 120 bp, Artificial Sequence
  ENSG00000272631_30 (sequence is synthesized)
cctatcctcacagcacctggtttattgcacttggattattttttaaccagatgaaaactatatataatatatatgctctggacatacactaagtacatattaaaggtgtattatatgtaa

SEQ ID NO: 930023 - DNA, 76 bp, Artificial Sequence
  ENSG00000272631_31 (sequence is synthesized)
gacatacactaagtacatattaaaggtgtattatatgtaattttggctgggcgtggtggcttatgctagtaatccc

SEQ ID NO: 930024 - DNA, 72 bp, Artificial Sequence
  ENSG00000272631_32 (sequence is synthesized)
cgcagtgagcccagatctcgccattgcactccagcccgggcaacagagcgacactctgtttcaaaaaaaaaa

SEQ ID NO: 930025 - DNA, 120 bp, Artificial Sequence
  ENSG00000272631_33 (sequence is synthesized)
agcccgggcaacagagcgacactctgtttcaaaaaaaaaaaagctatatatatatttttttctggctaaaaattaatccaagtgtaataggggtgtgtgtgtatataatctattgaatat

SEQ ID NO: 930026 - DNA, 120 bp, Artificial Sequence
  ENSG00000272631_34 (sequence is synthesized)
aattcaaatagatttctagtctgaactttgtgtgtgtgtgtaggtgtttgtgtacatatgtaagtatatgcatatatgtatatatgtacacacaaatatgcatatgtgtgcacacatatg

SEQ ID NO: 930027 - DNA, 120 bp, Artificial Sequence
  ENSG00000272631_35 (sequence is synthesized)
tgcgcatatgcgtatgtgtgcacacatatgtgcgcatatgcgtatgtgtgcacacatatgtgcgcatatgcgtatgtgcgcacacgtgcgcatatgcgtatgtgcacacgtgcatatatg

SEQ ID NO: 930028 - DNA, 120 bp, Artificial Sequence
  ENSG00000272631_36 (sequence is synthesized)
cgtatgtgcgcacatgtgcatgtgcgcacgcatatgtgcacatgtgtatgcgtgcatatgtgtgcatatgtaagtatgcatgtacacatatgtacatatatgtacgtatgcatgtacata

SEQ ID NO: 930029 - DNA, 120 bp, Artificial Sequence
  ENSG00000272631_37 (sequence is synthesized)
tgtttgtgtgtatacacacaaaaaacccatacatacattcaaaaatgaaaagacccatgtctgattcttcttagtatccctaaacactgattctactcaagaattcctttggagctagta

SEQ ID NO: 930030 - DNA, 120 bp, Artificial Sequence
  ENSG00000272631_38 (sequence is synthesized)
gtccagaaatccagcatgtggagctgaatatgattaccttgggaatgactagtaaaaggaaggcaaggtgcgatgataaaagattcaagctgagataactggggagataaaatctggatc

SEQ ID NO: 930031 - DNA, 120 bp, Artificial Sequence
  ENSG00000272631_39 (sequence is synthesized)
aggagtgcagattcatgaacaccatactgtgcctactgtccatggcttacatggtaattgggatgtattcctagatgtggtgtggtgtcaccagtgtgaccaggcatactagtttaccca

SEQ ID NO: 930032 - DNA, 120 bp, Artificial Sequence
  ENSG00000272631_40 (sequence is synthesized)
tcggatatgttgaaagtacctgaccctgtgctggactcaaaagttcagagaatgggaactgtctcattctcactccattgtatccagtgtgctgcttggcacaccagtaggtagtcagta

SEQ ID NO: 930033 - DNA, 120 bp, Artificial Sequence
  ENSG00000272631_41 (sequence is synthesized)
agtatttattaaatgaatgacatacttaattttgttctctactggtagtttgccctggcgcatttctttttatttctattagccaaggcagggttaggtgttttgttttgttttgttttt

SEQ ID NO: 930034 - DNA, 120 bp, Artificial Sequence
  ENSG00000272631_42 (sequence is synthesized)
ccatatttttgaggattaatgataaagcacttatcttgttggaatgagagtctactaacaaatcctgtacatcataataacagaactatcatctaacaacttgttctcaataaataaact

SEQ ID NO: 930035 - DNA, 120 bp, Artificial Sequence
  ENSG00000272631_43 (sequence is synthesized)
ttaaaacaacttcctttattatttcaaaggcatacatagtcatatatataaccagtaaccaatacttgtcagtgtttattttaaaatgcagattagtttccatttagtttgctacctacc

SEQ ID NO: 930036 - DNA, 120 bp, Artificial Sequence
  ENSG00000272631_44 (sequence is synthesized)
ttaaagcccctcttcctccgatcctgaatgctgctagctctcctcctaattggtcattccctctttcaactaatgttgcccagttgtttagatttctattgtgaaacaccagtcccatta

SEQ ID NO: 930037 - DNA, 120 bp, Artificial Sequence
  ENSG00000272631_45 (sequence is synthesized)
aatctgaaaacactgctatagagtaacatttcgttagactggtctcactactttctgaagaatggaccatattcattctccatttaatgccattctcctccctatactgcctgagtacca

SEQ ID NO: 930038 - DNA, 120 bp, Artificial Sequence
  ENSG00000272631_46 (sequence is synthesized)
cctcttccaagaagtcatctttgactactccatcctcatctccttaggcttttctctcaatggtctacatcactgactttccacatagcttagctgttcttatgtctttctcacaaataa

SEQ ID NO: 930039 - DNA, 120 bp, Artificial Sequence
  ENSG00000272631_47 (sequence is synthesized)
gttttcatacctttgttcttcaacataaataggggcctctcagcctgagggagacagtttagggagtaccaaaatacacgtagtatcaaaaaagcagtcccaggccactggagcttacca

SEQ ID NO: 930040 - DNA, 120 bp, Artificial Sequence
  ENSG00000272631_48 (sequence is synthesized)
gttattgaatccttgcttctgcgaatccattgttttgaaggttggtgggtagttgcaaactccttgatgcatctgctgtgctgttgcatcctccctcctgtctatctcccctgcgtatgt

SEQ ID NO: 930041 - DNA, 120 bp, Artificial Sequence
  ENSG00000272631_49 (sequence is synthesized)
accactgtcgctatggtcacggtactgagcaccagggttgctaggttgcacaactttaagggggtgccattcgcaacctgcctgacacgaatggtgctccctggaattatgcattgcaac

SEQ ID NO: 930042 - DNA, 120 bp, Artificial Sequence
  ENSG00000272631_50 (sequence is synthesized)
atctgcacgtgatcctgtcgaacaccagaaaattctactccagtggcaatggggaggctggtccctggcttgcttaaagaacccgcttttttattgtgtaacattatatacctttcagga

SEQ ID NO: 930043 - DNA, 120 bp, Artificial Sequence
  ENSG00000272631_51 (sequence is synthesized)
catttgacaagatatatttaagcatttgttaattttgtattattaaatatgtgtgtttataaagaaatagattatcctgaaataaagagaaaacgttggcagtgttctgtggtggcctaa

SEQ ID NO: 930044 - DNA, 120 bp, Artificial Sequence
  ENSG00000272638_0 (sequence is synthesized)
ccgatcccctgagtcttggcgcccgtttagtcacccttcagctgcttgggaggcaggaagagacttcccctcttcacgaggtaagggagacaaaagcagccatttggatgccagggccac

SEQ ID NO: 930045 - DNA, 120 bp, Artificial Sequence
  ENSG00000272638_1 (sequence is synthesized)
aggggcaagccatgccctatttctttggagggacagaatcacttcttcccaaggccagacactgtagcccatggtactcagccttctagaggagggtagcctagcagaggagaagccctg

SEQ ID NO: 930046 - DNA, 120 bp, Artificial Sequence
  ENSG00000272638_2 (sequence is synthesized)
agtggaagcagcattttgaaggcatcgtcattcttagaccagctaagagctgagggcattctctatctttgccagcagacagtgagactccaggattaaaattaaaagcccgtggtgcat

SEQ ID NO: 930047 - DNA, 120 bp, Artificial Sequence
  ENSG00000272638_3 (sequence is synthesized)
ccacaaaaccttggaggagtcaaatcccacactgcacatactccggtgtctccagctgtgaagtgggaccagtatcaatacatgggaaagtgctgagaaggaagaaaatatttcaggtat

SEQ ID NO: 930048 - DNA, 120 bp, Artificial Sequence
  ENSG00000272638_4 (sequence is synthesized)
aatactaatccatcaaacacgttttattcaagaagcttggcaccaactttgtgccacatcctcaactcttcaatgaaaagagcggtgaccaactcgctcccgttggtccctatggcaggt

SEQ ID NO: 930049 - DNA, 120 bp, Artificial Sequence
  ENSG00000272638_5 (sequence is synthesized)
gttggaatgaggtgaggctggcctcctctgtttgctcacagctttattcctctagcttcagataaaaataattataataggcaataaagtctcttcacagtgtatttactgtaactacaa

SEQ ID NO: 930050 - DNA, 120 bp, Artificial Sequence
  ENSG00000271584_0 (sequence is synthesized)
ggtttttcttagcctaaagctaaatttagatgaagaattctgaaatgtggtaatttttgcatagctatttataatgcacttttaaatagataattaaaagataactttaaaatatgaatc

SEQ ID NO: 930051 - DNA, 120 bp, Artificial Sequence
  ENSG00000271584_1 (sequence is synthesized)
taatggaagaatttggtagataatttggtccaatgatgtagttacatcaaagaaaactcagaaccctttcagcctgaatgagagaatattattatttttacctacttccccctgaggcaa

SEQ ID NO: 930052 - DNA, 120 bp, Artificial Sequence
  ENSG00000271584_2 (sequence is synthesized)
tcaggaactccataccttctgctatgcagaaattggcatgatctggcttctggtcttgtctgtggcagccacatttgtacaaggatgacacttaggtacctaacctatctaaactccttt

SEQ ID NO: 930053 - DNA, 120 bp, Artificial Sequence
  ENSG00000271584_3 (sequence is synthesized)
ggataacacttgtgttagaattgtttggtgccaagtacctgaaagccactccagcaaacttaagatctgagaggaggtggatatagaagtccctcatggaaccaagggaacataactctt

SEQ ID NO: 930054 - DNA, 120 bp, Artificial Sequence
  ENSG00000271584_4 (sequence is synthesized)
agacagaagctctgccctgtgaagttgccagcacgtgagatgagaaggcagcgctgagcctggcacagcaggctgctagacagcccctctacagctgtcccaggccctgtggtcagtgcg

SEQ ID NO: 930055 - DNA, 120 bp, Artificial Sequence
  ENSG00000271584_5 (sequence is synthesized)
aagaccatcaattgtgccactctgctctgctgttgcactgcagctcctaagttgacagagacctggccactggcttctgtgatgctggccccttctttcattgctctatgttgaaatcgg

SEQ ID NO: 930056 - DNA, 120 bp, Artificial Sequence
  ENSG00000271584_6 (sequence is synthesized)
gggctgctcctgcttgaggcctcctttgttacaaatctacttgtttcccaggtataatctcatctcctcaagaagacgatcaactcctcagggtggtctcctgtgagaagaacatacccc

SEQ ID NO: 930057 - DNA, 120 bp, Artificial Sequence
  ENSG00000271584_7 (sequence is synthesized)
aggtagcctcttctttgagaagcacaaggaaacacgtggtggtggaactgaacacaacccacagcctggagctaaacccaacctaagccagccaagctcttccaagatcacccaaactca

SEQ ID NO: 930058 - DNA, 120 bp, Artificial Sequence
  ENSG00000271584_8 (sequence is synthesized)
agttgacctgtagatccatgggcaaggaaagaaatgcctgctgttttaagatctcaagttttaggttgatttgttatgcagcattattgcagtaaaaatgaactaatacactacctaatc

SEQ ID NO: 930059 - DNA, 120 bp, Artificial Sequence
  ENSG00000271584_9 (sequence is synthesized)
gcactgggagaacggggtggggcctccagaagttcacgccatttgcagcggggaggagcctgttcctgtgtggcgacctgggcttcaatctgtgaggcgggaaacctgctagcaggactc

SEQ ID NO: 930060 - DNA, 120 bp, Artificial Sequence
  ENSG00000233303_0 (sequence is synthesized)
tcagcggggattcccagacgcacgcttctcctgagagagtccagcccctcctggcggccgtggtccctggatgcgggtgctcgaggcctgttcttctccctgtggcggtggtgagtgtaa

SEQ ID NO: 930061 - DNA, 120 bp, Artificial Sequence
  ENSG00000233303_1 (sequence is synthesized)
tgtcacctgtgtgcttatgcgtgagcaacagcgcctgatgactcttgggaagagccacaacaaagcgagggcctgcaggcggcagtggccagggaaccctagcccacaggaactcaagca

SEQ ID NO: 930062 - DNA, 120 bp, Artificial Sequence
  ENSG00000233303_2 (sequence is synthesized)
gcttcagagaaggtcttacttgtttccggggagaggccagaggctccgggaacccaattcaatatgtaatatatagcagtgtccacgctatggtctaagcaaaggcaagaggagaaataa

SEQ ID NO: 930063 - DNA, 120 bp, Artificial Sequence
  ENSG00000233304_0 (sequence is synthesized)
ggacacgtgaacccctgggcagcgaatgcaggaggcgggggctgtgcctctggacgctgcagctgggctggagccctctccctgccaccatggaaacagcaatatcagaaagcacagtcc

SEQ ID NO: 930064 - DNA, 120 bp, Artificial Sequence
  ENSG00000233304_1 (sequence is synthesized)
tggttagcggcgtgctcgtgccatgtgcctgtcagttctgcaagcatttgttggatgtgaaggttggtgtgatgaccacgctgcccacaacaggcaaaagggtgcggacagctgaggctc

SEQ ID NO: 930065 - DNA, 120 bp, Artificial Sequence
  ENSG00000233304_2 (sequence is synthesized)
ctcacttcccgctccaaagctcagaacctcccttccctcctggatccaacagaagcagcggccgctgctgcctgtgcctctcaaacttgtcacccacggatgctgggaaaaatgcacata

SEQ ID NO: 930066 - DNA, 120 bp, Artificial Sequence
  ENSG00000233304_3 (sequence is synthesized)
aaagggtcctgtctttgtgatgtcagcgtgaagtggaattcgcagaatggctaaagtggagggaagacttaaaatgcattggatgatgatagcagcgtcatttacaatcaccacgacttg

SEQ ID NO: 930067 - DNA, 120 bp, Artificial Sequence
  ENSG00000233304_4 (sequence is synthesized)
gaagcagccgagatgtcctttggcagatgattggagaaatgaactgtggcacgtccatgcagaccatgaaatactattcagtgctaaaaatgagtgagctttccatccatgaaaagacat

SEQ ID NO: 930068 - DNA, 120 bp, Artificial Sequence
  ENSG00000233304_5 (sequence is synthesized)
gaaacctgaaatgcagatcacaaagtgaaaggccaatctggaaaggctacacaccctatgactccaacctgtgacattcccaaagagggatttttccaaagaggaaaaattatggggaca

SEQ ID NO: 930069 - DNA, 120 bp, Artificial Sequence
  ENSG00000233304_6 (sequence is synthesized)
gtaaaaagaggagctgccatcattagggaagcaggagttgaggagagtcagagtgacaccactgaaaaatcttctctgtcttgagactaacaaggtaccttccttgccagtcacaaccca

SEQ ID NO: 930070 - DNA, 120 bp, Artificial Sequence
  ENSG00000233304_7 (sequence is synthesized)
tggtcctaagatggtcacagctaaggaggcagcttggtactgcctgcaaggacaaactcctaaaacaacagaaagcccagatgtcccaatacccatagcaatatgtgctttcaagataat

SEQ ID NO: 930071 - DNA, 120 bp, Artificial Sequence
  ENSG00000233304_8 (sequence is synthesized)
tatagatgtgctttgatgtactcatgtactagactgttaaggatagttttctttaaatcagtagcataatcaattttgtcatgctgtctgctccccctcacagagtcgcagcttggttta

SEQ ID NO: 930072 - DNA, 120 bp, Artificial Sequence
  ENSG00000233304_9 (sequence is synthesized)
gtcattacgtagacaagacccctatataagaaaaacttaaaacaaagacggtgcattctctcggaaggtcccgtgctctgtaatggagtaggttttaataaacgtgcttccttcgctgca

SEQ ID NO: 930073 - DNA, 120 bp, Artificial Sequence
  ENSG00000233304_10 (sequence is synthesized)
tggagatgacccaggaaggggccctgttgcccaggaaatgggcttgtcctgaaccacagcttgaaggagagccaccgactgatcaggaatacccaactggactttattccagcaacatac

SEQ ID NO: 930074 - DNA, 120 bp, Artificial Sequence
  ENSG00000233304_11 (sequence is synthesized)
aaagcattactgtgctgggccatggtatattattgggtttcttttattagaacacttggcattaccttcactaatatacactcatcatagtagacattttcactagttatagatgatatg

SEQ ID NO: 930075 - DNA, 120 bp, Artificial Sequence
  ENSG00000233304_12 (sequence is synthesized)
cactattttcccttctgaaacagaaatttgcagcagcactgccaaaggacaatagatttttaaaaatcatagaatgactggagttcatgtctctgcaaagaacatctaagccctaagcca

SEQ ID NO: 930076 - DNA, 120 bp, Artificial Sequence
  ENSG00000233304_13 (sequence is synthesized)
tccagagtggatgaggcatctctgcatgagttaaattacacactccagctgctgtaaccaagaaggagtttcacagtggtcaaaacgtcgtagaagtttagttctcatgcatgtaacagt

SEQ ID NO: 930077 - DNA, 120 bp, Artificial Sequence
  ENSG00000233304_14 (sequence is synthesized)
ccaaacgcagctccacagtggcaaggagccagcgtcctttctcttgctgtcctgctgtgctcaagaggtggcttctgtctttgagtccaacgtggctgctctggccccagccatcatttc

SEQ ID NO: 930078 - DNA, 120 bp, Artificial Sequence
  ENSG00000233304_15 (sequence is synthesized)
tatactccagcaggtggcaagtgggaagaagaaagggagagcttatgcctttcattttagggacacatggcctagtgctgctcacatcaccctgctcaccttgtgttgggaccagagtct

SEQ ID NO: 930079 - DNA, 120 bp, Artificial Sequence
  ENSG00000233304_16 (sequence is synthesized)
agtcacatggcagcaaatagctgtgaggaatattgggaaaggttgtctttggctacttggcctcatgaccatcggaaactgctgtactacaaaaggtgggttctgatcatcttagttggg

SEQ ID NO: 930080 - DNA, 120 bp, Artificial Sequence
  ENSG00000233304_17 (sequence is synthesized)
aatgctgtgacaaatgaccatagcctgggggcttaaacaacaaacatttatttcacacagtcctggaggctggagatccaagatcaaaatgctggctggcttggtgtctggtgagggctt

SEQ ID NO: 930081 - DNA, 120 bp, Artificial Sequence
  ENSG00000233304_18 (sequence is synthesized)
gcagacagccacttgttgtatcctcaaatggtagagagagagagagaaagacagagagagacagagagaggcagagagagagagagggagcaagctctcttgagcctcttatcagggcac

SEQ ID NO: 930082 - DNA, 120 bp, Artificial Sequence
  ENSG00000233304_19 (sequence is synthesized)
taatcccatcttgaggggtccctcctcatggcctaatcaatcatctcccaaacgcctcaactcccaacaccatcatgttgtgggtgagggtttcagcacatgaatttggaggggacacag

SEQ ID NO: 930083 - DNA, 120 bp, Artificial Sequence
  ENSG00000233304_20 (sequence is synthesized)
acattcagtgtgcagaggctgccactgtgcctctctgtccccatccctttcctgacaccttagagtgtgtgtccccacaggaaagcaatgtccttcaacatctcttcccaggagcccctg

SEQ ID NO: 930084 - DNA, 120 bp, Artificial Sequence
  ENSG00000233304_21 (sequence is synthesized)
cacccgcttccctctcactttattactgctcctatccatacaggtttgggcaggagaacaggagccacactcagtatttagaggaaagagagacagagagcacaagtgagagagattgac

SEQ ID NO: 930085 - DNA, 120 bp, Artificial Sequence
  ENSG00000233304_22 (sequence is synthesized)
ttaatccaggaaatcagaggctcacacagacattggaagggagcggtgaaggtcagttttaggaaacccagaagtgcagagatgacgaggaagccccgaaatgcccctggaagcccgcag

SEQ ID NO: 930086 - DNA, 120 bp, Artificial Sequence
  ENSG00000233304_23 (sequence is synthesized)
tgcccagtgagccattcccagggaacgcctgggaaccaccagaggctgacaagcctggaaccactgggggaggggacctgggaaactggggagaacatggaggtgacgggatgacgctga

SEQ ID NO: 930087 - DNA, 120 bp, Artificial Sequence
  ENSG00000233304_24 (sequence is synthesized)
gttggaacggacaacccaatgcaggcttcctctcctcgcttctcagcccagcagggtggctggctcatttgtgggatttatcaccaactaagggttttcagggggttgaaaatggctcat

SEQ ID NO: 930088 - DNA, 120 bp, Artificial Sequence
  ENSG00000233304_25 (sequence is synthesized)
tatccctcctagataatgttgcctcttagtagaggatttgatgctttgacccagacatgattcctcctgtgggcatgaaaatatatattttttcttttcaacttttagtctaagttccag

SEQ ID NO: 930089 - DNA, 120 bp, Artificial Sequence
  ENSG00000233304_26 (sequence is synthesized)
tgcaggatgtgcaggtttgttacataggcagatgtgtgccatggtggtttgctttgaagcagagactggtgggtgcggagcaaggccagttccgccctgctccagcctctcctggctctg

SEQ ID NO: 930090 - DNA, 120 bp, Artificial Sequence
  ENSG00000233304_27 (sequence is synthesized)
tggctctgccccctgccctccactcagcacttggtttctgcagtcacctcccctctccggtctctccgggtatggcccctctctgggtcactcccatcagcattcatcctcgtctccagg

SEQ ID NO: 930091 - DNA, 120 bp, Artificial Sequence
  ENSG00000233304_28 (sequence is synthesized)
catgggaggtctccgtgaccccatgcccctgagcaccgctgccctatttctctggtccctttctctggaccctatttctctggtcccttttgcggccagagtcctcagaagagctggctg

SEQ ID NO: 930092 - DNA, 120 bp, Artificial Sequence
  ENSG00000233304_29 (sequence is synthesized)
cccaccgcctctcctcccgcccctctgctgaggctgtatcgtgaccaccccacccccctgccacatcacatcagggggcctgccctctgtcctcctcttctgtttcctcttcgttgcttt

SEQ ID NO: 930093 - DNA, 120 bp, Artificial Sequence
  ENSG00000233304_30 (sequence is synthesized)
tctcacgcttggcccttcatcccttctctcctgggctccccggacctcctgcgcatgggtttctttctgcccctgtctctttccctgcattcttgtcctcttctcggcattctgttttca

SEQ ID NO: 930094 - DNA, 120 bp, Artificial Sequence
  ENSG00000233304_31 (sequence is synthesized)
gtctgtccctctgccatgtgactgtccagtacacgtgagtacatgggatatgttccccaaaccatggaggctgggcttagccatgtgacctgctttggccaaggatgttttgacagcact

SEQ ID NO: 930095 - DNA, 120 bp, Artificial Sequence
  ENSG00000233304_32 (sequence is synthesized)
gcacaagcagaggtctcagctgtgcttctgcggcggcggggctcccccccggggctcctgtcacctgtctggggagaacgtgctccaggcgcggcccttccagagagtgtggaatccccg

SEQ ID NO: 930096 - DNA, 120 bp, Artificial Sequence
  ENSG00000233304_33 (sequence is synthesized)
gggaagcccagatgatccacagccagacgctggctgaggttgagaaactggcacttgttgatgtcagccaccgagtttggagttttggagtggcttgtcagacagcagcattgtagcaat

SEQ ID NO: 930097 - DNA, 120 bp, Artificial Sequence
  ENSG00000233304_34 (sequence is synthesized)
ggccgaatcatccatgaagacgctgaatttcatttttgttttttgttacggcagcataactttgctgatctggtctgtgacaaaataactttttcctctgtcagtctttctcttttcatt

SEQ ID NO: 930098 - DNA, 120 bp, Artificial Sequence
  ENSG00000233304_35 (sequence is synthesized)
acaccagctcccacctgctcccagcctccccctcccatctgcgccggctgggttttggctttaatttcagcaaacacaggcaattcttcttcccactggggatgagaacttgcagaaata

SEQ ID NO: 930099 - DNA, 120 bp, Artificial Sequence
  ENSG00000233304_36 (sequence is synthesized)
ccacagcgaaggcagcctcctcggctcctaccagccaaggaaaagcaaaaatccataggcgctgcgcagggtgtgatttacctcccgagaagtgcacattccctccacccggcatcgtca

SEQ ID NO: 930100 - DNA, 120 bp, Artificial Sequence
  ENSG00000233304_37 (sequence is synthesized)
tcatcgtgttgatctccttctggagcgtccacagcgctcccgacaatgcgagtcttccccaaatggcatctctttcataaagcgagacacaggtcctgcagtccagggaggaggcagagg

SEQ ID NO: 930101 - DNA, 120 bp, Artificial Sequence
  ENSG00000233304_38 (sequence is synthesized)
ggagtgctcggctccacacctgggccgtgggaccggtgtgagttcaggtaaagccacacggatggagaaaccacttcatacactcagtgaaagcagtgttcctgatgagtttgagtcagc

SEQ ID NO: 930102 - DNA, 120 bp, Artificial Sequence
  ENSG00000233304_39 (sequence is synthesized)
ctcctccagagaatcgagagcccatcctgatgagctcatgtgtgcaatgaggtaagagcggatggcaccggtggcacctgacctctcgcctctgttcctttcccgtgaaagcctttacac

SEQ ID NO: 930103 - DNA, 120 bp, Artificial Sequence
  ENSG00000233304_40 (sequence is synthesized)
cacagggcaagggccagagggcttccttgctacacagccgggccctgtcacttcccccacatggcacccttcactctcctcaccctgctgggccctgcataaggcatgctgcccaccacc

SEQ ID NO: 930104 - DNA, 120 bp, Artificial Sequence
  ENSG00000233308_0 (sequence is synthesized)
cctgacctcaagcgatccacccgccttgacctctcgaagttctgggattacaactgtgaaccactgcacccggcccataagttatttaaatgatggaaaaattctataaagagaaaattc

SEQ ID NO: 930105 - DNA, 120 bp, Artificial Sequence
  ENSG00000233308_1 (sequence is synthesized)
cacctcctctactgttagtggtgaagctcacataagaaaggtcaaaagaactcaagagccaatttgaggacattctgattagctaaagtatgacaatctgagcatcagtaagatcatcaa

SEQ ID NO: 930106 - DNA, 120 bp, Artificial Sequence
  ENSG00000233308_2 (sequence is synthesized)
agtgataatcttggtattgctattctgagatagttgagtttgcattgtgaaataaagcaaatatgtatttatttgataatctgattctgtcattcttggtgtaaataagaaaggggattc

SEQ ID NO: 930107 - DNA, 120 bp, Artificial Sequence
  ENSG00000233308_3 (sequence is synthesized)
gtggcatggaaaaaatgaaataaagttataagttgaacgtgttaaataaaattataacacctgatatggcatgatttcaaaatgtccacaaaaattcatattagcatatatttatgttcc

SEQ ID NO: 930108 - DNA, 120 bp, Artificial Sequence
  ENSG00000233308_4 (sequence is synthesized)
aaactccttttcttctttgtctcaatcacatcattttctagggacaccaattcatcaagaagcaagagttttgctgtcagttcctcctgcattcattcttcctgctgccttgtgaagaag

SEQ ID NO: 930109 - DNA, 78 bp, Artificial Sequence
  ENSG00000233308_5 (sequence is synthesized)
aacgaggactccccagccatgcagaactgttcacaaccttgaatggcatgttggcaataaaaagaagacaataaaaaa

SEQ ID NO: 930110 - DNA, 120 bp, Artificial Sequence
  ENSG00000258931_0 (sequence is synthesized)
cccaagctccttgatgtaaacagtattttattgcagtgagtgtgcatacctgaaattcattgagggaaaggatgtggcacgtagcacaggtaccatcagagaaggcaagagagaatcctg

SEQ ID NO: 930111 - DNA, 120 bp, Artificial Sequence
  ENSG00000258931_1 (sequence is synthesized)
tcagcaaagagccggaggggaggagaagggaagggggtgcccctgcatccaccatgtgctctggcctgtgccaacagatagggcacctcaggcaggtcatttgatccttctgcagctcat

SEQ ID NO: 930112 - DNA, 120 bp, Artificial Sequence
  ENSG00000258931_2 (sequence is synthesized)
tttcctcctctgcaaagggataaacacagcatgaactttatagggtaattacgggattaagtaagttactatacgtgaagtctttaaaacagggagccacttcgcaggcattacataagc

SEQ ID NO: 930113 - DNA, 120 bp, Artificial Sequence
  ENSG00000258931_3 (sequence is synthesized)
gctaggaacttcatattaacgctgcaaatctctgcagaggagacgcttcctgcacttattaggaaggactgtaactggtcacatgtctgcacccacctgagactgtgaactccataagaa

SEQ ID NO: 930114 - DNA, 120 bp, Artificial Sequence
  ENSG00000258931_4 (sequence is synthesized)
acagagaccatgatgctcttataaatgactgcatccccggaacatagcactggccctggaacatcacagccaatgaaaatgtgtgttgaatgtacactagtgggatatgaacaaaaaatt

SEQ ID NO: 930115 - DNA, 120 bp, Artificial Sequence
  ENSG00000258931_5 (sequence is synthesized)
gcaaggagttgagtgggcctgggagcatgcagataagaatgctggacatgaccttggaagttctccaacctccccaagttgagtctttgtttctacatgtgaaaaatatgcacagtgaac

SEQ ID NO: 930116 - DNA, 120 bp, Artificial Sequence
  ENSG00000258931_6 (sequence is synthesized)
cccaagccaccagggtgcccggaagattggactgaatcttgcatttagagaaagcactcaggaagcagtgggactcaataaatggacatttaatctggatctgagttgcactacctgctt

SEQ ID NO: 930117 - DNA, 120 bp, Artificial Sequence
  ENSG00000258933_0 (sequence is synthesized)
gaaaacggaatattgaagagatggggaaatggtgtgacctgcagttgccaattcatgatttgatggcttcgaggctcagcctcagtgctatagtactgacaaggaagctgaggtttggag

SEQ ID NO: 930118 - DNA, 120 bp, Artificial Sequence
  ENSG00000258933_1 (sequence is synthesized)
gttaagcgacttgtcgcctgctgatgagtgatgacaatcaggctgtctgcctcgggccacaccctgaggctgctaggcagtgtctgctgagacaaggccaaggcgggctgctcgctctgg

SEQ ID NO: 930119 - DNA, 120 bp, Artificial Sequence
  ENSG00000258933_2 (sequence is synthesized)
gcagacccactgggggcctgtggagctgtctgcagtcagcagagctggtagtgagctctctctccccagcggggaagtcatcaagaaatctcccattttcatcttcctgcaggcacgtct

SEQ ID NO: 930120 - DNA, 120 bp, Artificial Sequence
  ENSG00000258933_3 (sequence is synthesized)
cctgggaggatgctaggtcccctgtggaccctgggagttcctggaggatgtccctgctccgtgactactggcgaagttcctccggggttatccggtcctcgccaagcccacctcttgcct

SEQ ID NO: 930121 - DNA, 120 bp, Artificial Sequence
  ENSG00000258933_4 (sequence is synthesized)
ttcatttcaactctgaaatatgcaccaggcaaattccacaaacattgacggaacccttgccaaggtccagaaccatgttgaggaattggtccacatttcctcatttaaccctactgtaat

SEQ ID NO: 930122 - DNA, 120 bp, Artificial Sequence
  ENSG00000258933_5 (sequence is synthesized)
cctcagaggccactttatcatttccattttatagaaatccagaggagtgaagaggactgttccaggcaacttggctaataaataaaattattacgcctgcaatttattgggcatctacga

SEQ ID NO: 930123 - DNA, 120 bp, Artificial Sequence
  ENSG00000258935_0 (sequence is synthesized)
agaaactccccccgtccatcagagtggagacaaagttctctagggcagcgttagccctggaggagttcagagagctgatctcttttacctccatccccacccccatctcaagaaggcagg

SEQ ID NO: 930124 - DNA, 120 bp, Artificial Sequence
  ENSG00000258935_1 (sequence is synthesized)
tgctagtctcccattttacagataggaagagtggacatgaaaccttcaaaagcgatggagtcaggattcctggtgggttggccactcactgctctggacccttgagggggatcttgtctg

SEQ ID NO: 930125 - DNA, 120 bp, Artificial Sequence
  ENSG00000258935_2 (sequence is synthesized)
ctggacacgcctgcgcctggacatgcctacacagggacataacagccctcaggcaggtgcctgccccctgagcctctctcagctgtgattgcccatgtggacagagagcaagcagccagg

SEQ ID NO: 930126 - DNA, 120 bp, Artificial Sequence
  ENSG00000258935_3 (sequence is synthesized)
gacacacatgtggccaggggagactctgcaggctccagcagggcactgttccacagtagtctctgtcgaaggatagtgacgcccatgccttccaaatgggatacagagtctgacaaggaa

SEQ ID NO: 930127 - DNA, 120 bp, Artificial Sequence
  ENSG00000268729_0 (sequence is synthesized)
cacgcgaaaccagaattccttccggagagcaaatccgtacagaaggtcgtggggggaggaccaggggaggagggattgatcaataaataaaataataaattaatcaataaataaaataga

SEQ ID NO: 930128 - DNA, 120 bp, Artificial Sequence
  ENSG00000268729_1 (sequence is synthesized)
gggccttatttacagattcacagttggggggcacggaaggggggtggaggggggtcccctccctccccggccccgtggggtcagggcagaggggtcccgttggtggccaggagcttcttg

SEQ ID NO: 930129 - DNA, 120 bp, Artificial Sequence
  ENSG00000258938_0 (sequence is synthesized)
ctgtccccgccccgctttcccagcaggacgcagccgcctggcgtgcggagagcggcctgtcgcgcgctgggcgcggggactcagggtcccagcagtgggtcgcgcacctgagctatctcc

SEQ ID NO: 930130 - DNA, 120 bp, Artificial Sequence
  ENSG00000258938_1 (sequence is synthesized)
atcctcggagaccgacgagctctcagtgtcctcgtcctcggagctgctcccctcattttcggcgtagtccacctccatctcatcgtgatggttggtctccttcttatcccctcgggaatg

SEQ ID NO: 930131 - DNA, 120 bp, Artificial Sequence
  ENSG00000258938_2 (sequence is synthesized)
gactggcattttccagccgcgccgtcgctttccactaccggcgcccagcccggccaccgccgcttcaatgaagggcgcgcggaacgccccaacccacccagccaccgagcttgctcgccc

SEQ ID NO: 930132 - DNA, 120 bp, Artificial Sequence
  ENSG00000258938_3 (sequence is synthesized)
ccttggctcctccccgcccccggcccgggcctcacaacctaacccgcaggctctgcgatgggagctctgccattggcggaggccttccaccgagccagagggcgggggcttgccctgctc

SEQ ID NO: 930133 - DNA, 120 bp, Artificial Sequence
  ENSG00000258938_4 (sequence is synthesized)
tggtacgattggttgcccgcaattacgacgcggccttccgatgcttgccgggagttgtagttcgtaggtctcagacctgcaggggctgcacgcttccatccctcggcagccctgatcact

SEQ ID NO: 930134 - DNA, 120 bp, Artificial Sequence
  ENSG00000258938_5 (sequence is synthesized)
tcttccttctggacttcaagtcccacaaggcacgaaagctgacactctggatcgcagtttataaactaaacagaaacagattgtgcgaatttagtctgtatttatctatttcccgccaag

SEQ ID NO: 930135 - DNA, 120 bp, Artificial Sequence
  ENSG00000258938_6 (sequence is synthesized)
tgattgtttgacctgcctgaccatcagagatgttactgttagatgtgaaaatgtcttttgcctaaaaggatctttgcctgctcattgagcctggggaactggagaaccatctgttttact

SEQ ID NO: 930136 - DNA, 120 bp, Artificial Sequence
  ENSG00000258938_7 (sequence is synthesized)
aagcacctttattacctaccattaataaactgttttatttaattattaactatagacgataacttgcactttctgtgttgtgcaaaaatctttaaattattcttgaaacttttacaatac

SEQ ID NO: 930137 - DNA, 120 bp, Artificial Sequence
  ENSG00000258938_8 (sequence is synthesized)
agaaggtaaggaagttttatcttggcattttcaatctaatatttttggcatttattttttaccaaatgcagtcggaaaatgccatcagtcctgatttaactttagttttcaatgaaaaat

SEQ ID NO: 930138 - DNA, 120 bp, Artificial Sequence
  ENSG00000258938_9 (sequence is synthesized)
tcaatgaaaaatacatacttaaccagatgtactttctcaaaaaaagggtacatagctccctctccctctccctcgccctcgccctcgccctcgccctctccacggtctccctctccctct

SEQ ID NO: 930139 - DNA, 120 bp, Artificial Sequence
  ENSG00000258938_10 (sequence is synthesized)
tccgcccggcagccgccccgtctgagaagaacatctggtggaaccccatgatggcggtcttcatccgccttaagctggcccacaaccatgctgatgatgcagctatgcggcgtgagctga

SEQ ID NO: 930140 - DNA, 120 bp, Artificial Sequence
  ENSG00000258938_11 (sequence is synthesized)
tgagctgatggtcctgcgcggtgatgctgtgctggattttctggaaccgaaggctagacaacttctccacaatggcagctttcccctggaactgttgtccttcccacgtaaggcatgatg

SEQ ID NO: 930141 - DNA, 120 bp, Artificial Sequence
  ENSG00000258938_12 (sequence is synthesized)
cgtcaatgtaaattgcgcctagttggggtctatcgttatcaaataactggtagtaatgtggaatgaagctggatcctatctgctcccaaattggcttgtctcccactctggaccgtcagc

SEQ ID NO: 930142 - DNA, 120 bp, Artificial Sequence
  ENSG00000258938_13 (sequence is synthesized)
cggcctcgcggagacccgaggggctggcacgatggctgcagcggcggcggcaacccagcacggtctcaaaatgctcatatttttaagtggtctcatgcattacgtatgctacaacttgac

SEQ ID NO: 930143 - DNA, 120 bp, Artificial Sequence
  ENSG00000258938_14 (sequence is synthesized)
tttctccttagtgacgtttttgagatttacccattgtgattcaggtagctctcatccagttatttttacctgccataacatgttccatttagtaaatatattctattgaatgaatattac

SEQ ID NO: 930144 - DNA, 120 bp, Artificial Sequence
  ENSG00000258938_15 (sequence is synthesized)
agtttacccatttacctattaatggacagggaggctgctcccaattttttcactattaaaaacatttgtctcagacccagcacagtggcttacgcctgtagtgccagcactttggcaggc

SEQ ID NO: 930145 - DNA, 63 bp, Artificial Sequence
  ENSG00000258938_16 (sequence is synthesized)
gcctgggcaacatggcgaaaccccgtctcatgggaggttgaggtaggaggatggcttgagcct

SEQ ID NO: 930146 - DNA, 90 bp, Artificial Sequence
  ENSG00000258938_17 (sequence is synthesized)
gggcgtgggaggttgaggtaggaggatggcttgagcctgggaggtccaggcttcagtgagctgtgattgtgccacttcactccagcctgg

SEQ ID NO: 930147 - DNA, 120 bp, Artificial Sequence
  ENSG00000265533_0 (sequence is synthesized)
ccgcgacccgcacggcccggacacgcccgccctcaggaaacgccggacgcttgtgggggcaaccacggaccgcaggacagagacccgcgggcggcgggttctctcggtggcgccgtatcc

SEQ ID NO: 930148 - DNA, 120 bp, Artificial Sequence
  ENSG00000265533_1 (sequence is synthesized)
agagcagcgcccgcgtgcccaggcggtgatgtcgccgcggccgaggatcctctgtgccagctccggccgcgcagcccggggaggtgcaaagagaaatccttggaactccttgagctctga

SEQ ID NO: 930149 - DNA, 120 bp, Artificial Sequence
  ENSG00000265533_2 (sequence is synthesized)
gaattgggagcaacctcagggaaccaggtgctccagctgctgatagacacaggttgattccaaattggttattgtgaacagtgctgcaatgaacataggagtgcagctaagccttcaacg

SEQ ID NO: 930150 - DNA, 120 bp, Artificial Sequence
  ENSG00000265533_3 (sequence is synthesized)
tattgatttcctttattttggaatccaccctgaaacagcaaactgtaactagatggaaggataaaaataaacatggcaaagcatccacccatcttgaaaacttctgctcagaggtggcat

SEQ ID NO: 930151 - DNA, 120 bp, Artificial Sequence
  ENSG00000265533_4 (sequence is synthesized)
ccatcactatgcctgacgtcagtggaacggaaaagtgggaccctcatgtcttggaaatgcagcacttattgactaactctcctgctggaaaagaaacaaaaaatgagcaagctgaacaaa

SEQ ID NO: 930152 - DNA, 120 bp, Artificial Sequence
  ENSG00000265533_5 (sequence is synthesized)
tattataagaaaatattttgaaccgacactgaaccaggcaagcggtgatgatatgagaggtcatgacccagagacgaaggaaggagcagagatatgcctgcaaactcaaaagctgctttt

SEQ ID NO: 930153 - DNA, 120 bp, Artificial Sequence
  ENSG00000265533_6 (sequence is synthesized)
cccaaggaaggattttgtttacccaaaagccgtgcaaggaagactagaaaggctgagtagagtgcttgctaatctcctgggtctgtgatgacaaaagatgaaattcagagcccattaaag

SEQ ID NO: 930154 - DNA, 120 bp, Artificial Sequence
  ENSG00000265533_7 (sequence is synthesized)
aagaaacctgtgaaatatgccagaattaaagttaggattcttgaaggactgcacattagcagtatgtgtaaatcaaaaaatagaacagctcccacaaagaattcagcccagaataaaagt

SEQ ID NO: 930155 - DNA, 120 bp, Artificial Sequence
  ENSG00000265533_8 (sequence is synthesized)
atattttatgtgtggaacaaaattaaatatattaaagtgaaatttgacagaatacaaaagagatattctgaaaaccctaatagctattgaaacatttcacacatgtatctcatgcgttaa

SEQ ID NO: 930156 - DNA, 120 bp, Artificial Sequence
  ENSG00000265533_9 (sequence is synthesized)
tagaagcagccaaaaatatcattatggggactggaaatgtaaacaatatgattcaaaaaattgaccaaattgacatatattgaatgctagttgcagtgaatacagaatagaaggtctttc

SEQ ID NO: 930157 - DNA, 120 bp, Artificial Sequence
  ENSG00000265533_10 (sequence is synthesized)
agatgtgttagaatagtcaccaaacttaatcagacgtaggagcatgaagttattctccataaatgtcagcgaatcaaatgtacacatgttgtggtacctgctaacatattaaaatgtgtg

SEQ ID NO: 930158 - DNA, 120 bp, Artificial Sequence
  ENSG00000265533_11 (sequence is synthesized)
gatgctgttttagtcatggtaagaaggaaatacactcaaatacataaggcagatgggaagaaagactagaaataaatgaacaaaacaacatcttgagaagagagcaaaaaaagcctggtt

SEQ ID NO: 930159 - DNA, 120 bp, Artificial Sequence
  ENSG00000265533_12 (sequence is synthesized)
ctgagaagtacatggagagaaggtagaaattataagcatcaaggatgaaaaaatggccattagtagtagttctagagatagtataaagattaaaataagatgatcagacaagttgatact

SEQ ID NO: 930160 - DNA, 120 bp, Artificial Sequence
  ENSG00000265533_13 (sequence is synthesized)
aataacttggaatatttgattaagttgaaaaattccttgaaaaatacaatccctagtttgactcaagaagacaaaaattatgatatctcttaaataaattttatcctaatgtgatcatct

SEQ ID NO: 930161 - DNA, 120 bp, Artificial Sequence
  ENSG00000265533_14 (sequence is synthesized)
tcctacagtgaaaattcaaactcaaaaaattcacaaatgaattttccaaacgctgaaagaaaaaatatgtaacttaaaaattctttgagatatttttaaaaaagaagaaacaatgtccaa

SEQ ID NO: 930162 - DNA, 120 bp, Artificial Sequence
  ENSG00000265533_15 (sequence is synthesized)
ccaactattttatgagaccagaataacatttacaacaaaacatataaagacatgactcaaaagttaaattgaaaggtaatatttactataaatatatattcaaaagtcatgaaaaaaaca

SEQ ID NO: 930163 - DNA, 120 bp, Artificial Sequence
  ENSG00000265533_16 (sequence is synthesized)
caaacttgtttcagtaatataagtcagcttgtgaaaattagagttattcattattctgtcagactgaaagaaagccacatgatcctttcaattgctttaccatggcatttgataaagtcc

SEQ ID NO: 930164 - DNA, 120 bp, Artificial Sequence
  ENSG00000265533_17 (sequence is synthesized)
aagtatataagcattcaaaaaatgtttaacaaactatgaatgacaggaacttacatcatcagataatgcctgtagtaaaaaaaaatagctgcagacaaacctcatgttcattcatgaaac

SEQ ID NO: 930165 - DNA, 120 bp, Artificial Sequence
  ENSG00000265533_18 (sequence is synthesized)
tttccccctaagaaattaagaataagaaaacattgctttctgttaaaatttaaaggtgttagctagttaaataaggaaaataatgtaagatccagaaagtaagtaattaaaatatcattt

SEQ ID NO: 930166 - DNA, 120 bp, Artificial Sequence
  ENSG00000265533_19 (sequence is synthesized)
ttccagaatgtataattgtataagttcaaaattcagaatcatctacagataaattagaattaatgacttgctgccttatgaaataaaagaaccatatataacaagtgagtatatctttac

SEQ ID NO: 930167 - DNA, 120 bp, Artificial Sequence
  ENSG00000265533_20 (sequence is synthesized)
aacaaccttagaatttcccacactcaacaattcaattacagaatattataaattccacttatatcaaatcctgtattaccttatgacgtcaagtattaactttgccactctatttgacat

SEQ ID NO: 930168 - DNA, 120 bp, Artificial Sequence
  ENSG00000265533_21 (sequence is synthesized)
tgcaagccaccaatccatgtctagcaattttaaccttctgactttattctatttttattttcatagcacacctctctttgtaactaaatacattatttatttatttattgtatatataat

SEQ ID NO: 930169 - DNA, 120 bp, Artificial Sequence
  ENSG00000265533_22 (sequence is synthesized)
ttattatctgtttttccctaagttccctgtggatgtgacttatgcttgttttattcattgttgtatctcatatgtgtagatctgtgtttggtacataatagggactcatttctgtaaggg

SEQ ID NO: 930170 - DNA, 120 bp, Artificial Sequence
  ENSG00000265533_23 (sequence is synthesized)
ttgtttgacctcatgggataccaccaattcactccattatcattgccactctttaggttctgaaaaggtgaattgaattacgtgaattgaattgcgtgttattaaaaacgtttttacaga

SEQ ID NO: 930171 - DNA, 120 bp, Artificial Sequence
  ENSG00000274297_0 (sequence is synthesized)
tctctgacctgagaggttctgtagtgattatttttgctgccctttctctaggctgctcttaaaatggggcagtgaattttataaatcagaactaaatatgttttaaagcatcttgctata

SEQ ID NO: 930172 - DNA, 120 bp, Artificial Sequence
  ENSG00000274297_1 (sequence is synthesized)
atgcctcagcactgcgaaaaaatactggtatttctaaaagaatttagagttacaaatatagcaactgaaaaaaatcttcaaaaacattttctgtttccactaataacattagtttgagat

SEQ ID NO: 930173 - DNA, 120 bp, Artificial Sequence
  ENSG00000274297_2 (sequence is synthesized)
aatgttattctcataacagcgacttttgggtaatgtaaataagataacaaattgttatgtttagtttaaactcatgatacttaagcactgtttactcattgtcattaactattccaacct

SEQ ID NO: 930174 - DNA, 120 bp, Artificial Sequence
  ENSG00000274297_3 (sequence is synthesized)
taaattaaaaatgcttaccttaattaaagctgtattcagacaacttcctatggttatccctgcgttgaatttcttgtgcttcttgaaggaggattacaataaagaaacccttcttttata

SEQ ID NO: 930175 - DNA, 120 bp, Artificial Sequence
  ENSG00000274294_0 (sequence is synthesized)
gacgaggcccagcaaagtctgtggagctggaggatgccacgcccattcaggacgaaatgcagaaggacgctgcagagcctgcttctctgttccttcgcctcactggggcagaccagctgc

SEQ ID NO: 930176 - DNA, 120 bp, Artificial Sequence
  ENSG00000274294_1 (sequence is synthesized)
ggccagcctgtgcccactcctcgcggacctgggtactgcttccagagatccttcagtcctgggagtttaatcattctgtcccggcctctttgctcccagccctcccctggcagttgctgc

SEQ ID NO: 930177 - DNA, 120 bp, Artificial Sequence
  ENSG00000274294_2 (sequence is synthesized)
tcactttttgcccttgcaatgcacaagggttagcaattcttgatggtacagtctctctgttcgaagagctggggtggtttctacttctagctggaccctgagtgatccttcaggcagggg

SEQ ID NO: 930178 - DNA, 120 bp, Artificial Sequence
  ENSG00000274294_3 (sequence is synthesized)
tctctgcgactggagacatgctgtgtgcatgaggtcccatgtacactcagattgcatcccccatccctgcccagccctgagaggcaggcgagacagtccccctctcaccatctctggggt

SEQ ID NO: 930179 - DNA, 120 bp, Artificial Sequence
  ENSG00000274294_4 (sequence is synthesized)
gggcctggatttattggctgaagaattacaccctctttgatggtatgcagtttaattccgtagatcaaagctatgtctagattttaaataaatgatagggatttaaaattgtatataaaa

SEQ ID NO: 930180 - DNA, 120 bp, Artificial Sequence
  ENSG00000274292_0 (sequence is synthesized)
gacacccggtcgccagcgctgcgccccgcgggctctcggggcccgacctggccgcgggcccgcctcctgctccgggctccccacgaccggggggacggaggaaaggaggaaggaaggaaa

SEQ ID NO: 930181 - DNA, 120 bp, Artificial Sequence
  ENSG00000274292_1 (sequence is synthesized)
gaaagagagccgccgccattagcaaagcagccctgcccggctgggcccgcctgccagaccagcccggcccagccgcgacgggctcgaagcctgtaaagaaaactggtgtttgggaggagg

SEQ ID NO: 930182 - DNA, 120 bp, Artificial Sequence
  ENSG00000274292_2 (sequence is synthesized)
agcgagcgcggccgggaggacagcagctccgggctgcgggcggagatgctgcgtcatggtgccaacatggacgccggccttttgtcctccttcgcgttgccagcgcaggcgcgccccgga

SEQ ID NO: 930183 - DNA, 120 bp, Artificial Sequence
  ENSG00000274292_3 (sequence is synthesized)
gccccgagaagccggcttcggggtgcggaatcctcacgatcgaaaggaaagtgggcccaaggctgggcgatgaggctccctagtgttttaagcccccccgtctccaaagcacttcaattt

SEQ ID NO: 930184 - DNA, 120 bp, Artificial Sequence
  ENSG00000274292_4 (sequence is synthesized)
cttctccccatccaggttcagacctgggaagagcgagggggcgaaggcaggcggctccatggacccccgagggtcgctgcgaagcccgtcttctcgcccttggggcagaagaggcacagg

SEQ ID NO: 930185 - DNA, 120 bp, Artificial Sequence
  ENSG00000274292_5 (sequence is synthesized)
ggtccgaagagcccttcgtgtcccaaccccccgcccactgcccgctccggctgccaaatacaatgctccagaatcctccttctcctctcagctcccaaacacttgcagcccttgcttggc

SEQ ID NO: 930186 - DNA, 120 bp, Artificial Sequence
  ENSG00000274292_6 (sequence is synthesized)
ctgcaaaagggtttcctcgaaggggcaaaaggcactttttatctttcttacttacccgctcagcccggtgccatggagtctagaagatcaagctgggcggtggttttggagacgttattg

SEQ ID NO: 930187 - DNA, 120 bp, Artificial Sequence
  ENSG00000274292_7 (sequence is synthesized)
taaaaacatatatattttttgatttagttgggaaatttgggggttatggtggtgtctttgttcttattacctttttgtaagttacaccctcacgttctgctccttccacttctgcaaact

SEQ ID NO: 930188 - DNA, 120 bp, Artificial Sequence
  ENSG00000274292_8 (sequence is synthesized)
ttccagggttgggtaggcaaaaaggcggcttcgctgaggactgtttactgctctggatatagcaatggtgtgatcgtcattaagagacaaaaggcgaaaatacagtcaaatcaaacaaaa

SEQ ID NO: 930189 - DNA, 120 bp, Artificial Sequence
  ENSG00000274292_9 (sequence is synthesized)
ggcacaagacgcaccagccgcccaaccaccatagaaaataccccccacttaacgttggtgtttgctggaaccagctaggacttgttttccagttttaatctagtttcctgtgacggcttt

SEQ ID NO: 930190 - DNA, 120 bp, Artificial Sequence
  ENSG00000274292_10 (sequence is synthesized)
tgtttttcttcaaatagatcgattttcaaagaaagtgtacaagctacggggaagaaagctgactagcatttagtgctgtaaacattttcaaaagcataaagctagaaccttagctttata

SEQ ID NO: 930191 - DNA, 120 bp, Artificial Sequence
  ENSG00000274292_11 (sequence is synthesized)
aagcaagatcgtctcaagcatcttaactggcttatattagacaagagagacaaagacatacatgcagatgaaggttcggaaaattaaggacatctcagcaacattaacatcaaaactgta

SEQ ID NO: 930192 - DNA, 120 bp, Artificial Sequence
  ENSG00000274292_12 (sequence is synthesized)
ctgcgtcaggacagaatggattgggtacttacaatgtaaaaggttttttaaaaactaaaagagtaacaactgctcacaattttttgttgctgccatttcgctagtcctaaagctatatac

SEQ ID NO: 930193 - DNA, 120 bp, Artificial Sequence
  ENSG00000274292_13 (sequence is synthesized)
atttaaaacattaccttgttaaaaagagagaaggagttaataagatggccaggtttaagtgtttaatagaggaaactagatatatttaaaaatttattgttcagtcaagagaatacagat

SEQ ID NO: 930194 - DNA, 120 bp, Artificial Sequence
  ENSG00000274292_14 (sequence is synthesized)
taagacagctccaagctccccccacccacccatagaacaaaaagaggaaaaaaaatatgtcatttacttaggtttttttggaattcaaaactgttaactgctgacatgaatggtgtgcta

SEQ ID NO: 930195 - DNA, 120 bp, Artificial Sequence
  ENSG00000274292_15 (sequence is synthesized)
tgacctagttatacaagacaaagatggattccaagtcataaggaaaaatccagatctttttaaaaagtcttctccagtcttccaactgtgagtccttgggcctgttgacaaatgttaaac

SEQ ID NO: 930196 - DNA, 120 bp, Artificial Sequence
  ENSG00000274292_16 (sequence is synthesized)
acactgagacgtcctgaactggatggtagagtcaaaggaaaaacattccccatttgcaacaaaggaaaaacccacttggccatttaattccattgcagaaaaatggcttccctcatctgt

SEQ ID NO: 930197 - DNA, 120 bp, Artificial Sequence
  ENSG00000274292_17 (sequence is synthesized)
tggcctctccttcgtgtctgatgaaggatgttttgagatcagcgtctaataactcaagccctatagaagccgcgcgctgattggctgccgcgccctgccgccctgctccagccaattacc

SEQ ID NO: 930198 - DNA, 120 bp, Artificial Sequence
  ENSG00000274292_18 (sequence is synthesized)
tacccacggccaaattacaaaccccgaaaagagccccaatatgagctacaccagctccgagccccggcgaggcggctcctgcgcctcggccgccagagaggagcggcagagggggctgca

SEQ ID NO: 930199 - DNA, 120 bp, Artificial Sequence
  ENSG00000274292_19 (sequence is synthesized)
aacgcgtcctcgcgaagcccgggagcctcggagttgaactcacaaaatggaagccgcgcgctgattggccgccgccactcccggacctttaataaagaaaggggaaggaaaagataaatg

SEQ ID NO: 930200 - DNA, 120 bp, Artificial Sequence
  ENSG00000274292_20 (sequence is synthesized)
caaaaaagggggactctctcctccgcgggtggctggaggaagggggggaagcatgtgttcaggacaattacagggcgctcccctccaaaaataaaaacagaagaaggcgtctatcgccca

SEQ ID NO: 930201 - DNA, 120 bp, Artificial Sequence
  ENSG00000270988_0 (sequence is synthesized)
tccagtgtctattctaaggaaaagaaaaggaacaaatcagtgcagcgagctttattctactcagcccacgaaaggcgccgccgtcagattttaaagttccagccatcccctcaggccctg

SEQ ID NO: 930202 - DNA, 120 bp, Artificial Sequence
  ENSG00000270988_1 (sequence is synthesized)
agtgagaagttcgcccgattccccgcggttcccgcctccatttcccactaaggagcagttactcaggctccaattaggaccccttaatggatgtcaatggaacccttcagccttttatcc

SEQ ID NO: 930203 - DNA, 120 bp, Artificial Sequence
  ENSG00000270988_2 (sequence is synthesized)
attattagaataatcctccccattcctgacatcacggaagggagcgttccattgccttcagatttgctccagcaacaacctcgtgtgtgcagatttatggtaactggcattgcaatgctc

SEQ ID NO: 930204 - DNA, 120 bp, Artificial Sequence
  ENSG00000270988_3 (sequence is synthesized)
ccatcagggcataactaagtaaaaattgtaatgaggtaaagcctttgaactttccatgtcagttgcacaggcattgctggccatagcattggacagcacataataaaatcagttaaaaga

SEQ ID NO: 930205 - DNA, 120 bp, Artificial Sequence
  ENSG00000287172_0 (sequence is synthesized)
agagtcaaacttggaggcccatgacgttggtccacagcatttgtgagctgaccagagaaaggagacgggattctgtatctttgacattttggttatttctacatcagaacacgagaaggc

SEQ ID NO: 930206 - DNA, 120 bp, Artificial Sequence
  ENSG00000287172_1 (sequence is synthesized)
agatatttttctaaaatggtaatttcatttcctttgggattgaccagaagaggaattgctgagtcataagcttcattgtctattctgcccagggcattggcttccacccgagtagcaagc

SEQ ID NO: 930207 - DNA, 120 bp, Artificial Sequence
  ENSG00000287172_2 (sequence is synthesized)
cgatgtagagagaagaaatgagaaaaaatccgaggaaaatgaaggaaagcctgctctacttctgaactttcagttcctaggcagatccacttgcagagattggagtgatggccacagtgg

SEQ ID NO: 930208 - DNA, 120 bp, Artificial Sequence
  ENSG00000287172_3 (sequence is synthesized)
aagcaaggcagcttgcaggcacctaaaactcagaaaacagatccccaccaagtggatctgccagcacagcaggtaggcttcagacaaggaggaactgcagactgacctctgaccaccact

SEQ ID NO: 930209 - DNA, 120 bp, Artificial Sequence
  ENSG00000287172_4 (sequence is synthesized)
ccttgttataaatttcttcctcccaggcctggagaaactcacccccacaagccagagctaacattcttctttgcagaccccaaatttttaaatcaagcttttcttccttaaccttttgta

SEQ ID NO: 930210 - DNA, 120 bp, Artificial Sequence
  ENSG00000287172_5 (sequence is synthesized)
tatcagaaaatcttttaatctacctgtgacctataagacccctcttcaagacatcccacacttttaggccagcaccactgtgtaacctccatgtattgattttaagtttttcctgtaact

SEQ ID NO: 930211 - DNA, 120 bp, Artificial Sequence
  ENSG00000287172_6 (sequence is synthesized)
tctgctttcctgaaatctacccatgactttaccccttatctgcaagccactggggaggttgggacataagtgtaagctgcctgattctccttgcttggtgccctgcaaatatatgctttc

SEQ ID NO: 930212 - DNA, 120 bp, Artificial Sequence
  ENSG00000287172_7 (sequence is synthesized)
ctttttcctgctgcaaaggtcagcgtggatatctggtcttactgcaccaagtaagtggacccctgttcacttccataacacattctcaccaccagccaggggcaaggagagttaatcaag

SEQ ID NO: 930213 - DNA, 120 bp, Artificial Sequence
  ENSG00000287172_8 (sequence is synthesized)
tgcagcccacttagttttcagaagagaagactgaagcccaacaggtttttaccccatcagctttctctgccacctagattgtgaatactatttactatcacttgttttctgggcttagaa

SEQ ID NO: 930214 - DNA, 120 bp, Artificial Sequence
  ENSG00000287172_9 (sequence is synthesized)
gcgtgacaacccaactttaaatctaattcctatgtcccacatcaactttctatcttcttctatttctcagaaacttctcttatatttgtgtgtaaaccagaaataaaattctaagacccc

SEQ ID NO: 930215 - DNA, 120 bp, Artificial Sequence
  ENSG00000287172_10 (sequence is synthesized)
cccccttttggccaagggcattccaaagtaaacctgaaaaacaagtgcagttcatgatgggaagggggaatcggacatgtctcattatgccttcctccctttggaattcaggcacaactg

SEQ ID NO: 930216 - DNA, 120 bp, Artificial Sequence
  ENSG00000287172_11 (sequence is synthesized)
agatatcttaagactgacaaaacactttgtaacaataagatatcaagttccaacctgactatagtatagcatcacatgacagatagcaggccttgaaagaaatgaaaatattttacccta

SEQ ID NO: 930217 - DNA, 120 bp, Artificial Sequence
  ENSG00000287172_12 (sequence is synthesized)
agatatatttctttgacatattttgaaataccctgctaagatacctcttgtggggaaaatgtgcattctaaagagaatcattttccctttacaagtttttccttgatccaggagagatta

SEQ ID NO: 930218 - DNA, 120 bp, Artificial Sequence
  ENSG00000287172_13 (sequence is synthesized)
aataagagactgacacatttttggatctgattagagacatttactatctgtcctttctgaaggctactacctggagggttcctctgcaagccattggggatgcataataagaactttgat

SEQ ID NO: 930219 - DNA, 120 bp, Artificial Sequence
  ENSG00000287172_14 (sequence is synthesized)
ctccacaactccttaactcaacccagatactcctttctattgattacagttcttcaataataatttaactctttcaaccaattgcccgtcagaaaatctttgaatccacttgtgatctgg

SEQ ID NO: 930220 - DNA, 120 bp, Artificial Sequence
  ENSG00000287172_15 (sequence is synthesized)
aaacccccattttgagttgtcctgctttgccagactgaacaaatgtataccttatgtgtattgattgatggctgcttatagcctctgaccccctaaaatgtataaaatctagctgtaacc

SEQ ID NO: 930221 - DNA, 120 bp, Artificial Sequence
  ENSG00000287172_16 (sequence is synthesized)
caaccatctttggaacatgttctcaggacttcctggggctgtgtcacaggcattggtcactcatatttggcttctgaaaatacgtaaacctctttaaatattttacagagtttagctctt

SEQ ID NO: 930222 - DNA, 120 bp, Artificial Sequence
  ENSG00000287172_17 (sequence is synthesized)
tttatgacatgtatatttatttctcagaaagatccccaaccttatttttcaccttgattagagggctgaggtggaataggtggaaagcttgtctggggtgtggaatttgggagcatattg

SEQ ID NO: 930223 - DNA, 120 bp, Artificial Sequence
  ENSG00000287172_18 (sequence is synthesized)
caatgttcagtgattaatactatttagaagaacaatttttgaaataaaaattaattgcaaaacatgacggtaaaatagaaaacagttaaacaaaagtaaaaaccaattaacagtgctttg

SEQ ID NO: 930224 - DNA, 120 bp, Artificial Sequence
  ENSG00000287172_19 (sequence is synthesized)
tgaagcaatattaaaaactgaggcaaaataataataatcaattatatttgccttatttttatttggaatttggatggtttgttcctcatggatttttctcttttttggcatcaatttagt

SEQ ID NO: 930225 - DNA, 120 bp, Artificial Sequence
  ENSG00000223617_0 (sequence is synthesized)
actgcttcatgacaagaggttccatgctgacagcatctggggaaacctcgctgggcctcggaggtccttcctatgggtgatatgccacccaccctgggtcgagagtcagagaagcgcggc

SEQ ID NO: 930226 - DNA, 120 bp, Artificial Sequence
  ENSG00000223617_1 (sequence is synthesized)
cggtcccactgctggcttcgcctgcctgtttcccacagcttccctctagtcatccacctacacctgctgcccagttccctagaaacctgcctagtgtaaaaggaagcaactctggagaac

SEQ ID NO: 930227 - DNA, 120 bp, Artificial Sequence
  ENSG00000223617_2 (sequence is synthesized)
aggcccctaagccttgcctggttcaacagtattatttcactcacgctggtcaccccattgttagaaagagcaaggaaaggaggatgagaaaggaagagagggagggagaaaattgtcccc

SEQ ID NO: 930228 - DNA, 120 bp, Artificial Sequence
  ENSG00000223617_3 (sequence is synthesized)
aagaaaaggaaactattgtctggtaagattcagcccacttttcttgttaaatgatgtgaattcaaattgttgatatatatcaccaacttgacatgtgaaactattgtctcaaagcatatt

SEQ ID NO: 930229 - DNA, 120 bp, Artificial Sequence
  ENSG00000223617_4 (sequence is synthesized)
ataaaatactatatatgaaaacattgacaaatatactgtagttgatgagtaccagatatgattattgttcttttcatgtgtgattacaggtgatggacagatggtttcctcaatttatat

SEQ ID NO: 930230 - DNA, 120 bp, Artificial Sequence
  ENSG00000223617_5 (sequence is synthesized)
aggaagcaactctggagaacagaatgagaaatcagaaagcaaggccctgtcctctgagttctgtcctggatggggactgaggaagacatctttttttgtggtgagaacacctaaaatcta

SEQ ID NO: 930231 - DNA, 120 bp, Artificial Sequence
  ENSG00000223617_6 (sequence is synthesized)
aagaacgttggagcttaccatcataagtgacaggaatgaacattggagcttaccatcataagtgacgggaatagcattatctccaaacctgagatccttccaatgggaattctacaactc

SEQ ID NO: 930232 - DNA, 120 bp, Artificial Sequence
  ENSG00000223617_7 (sequence is synthesized)
ctgggagtttatgattcacacatgtagacaatgtctgtacctatactcagagatgtagactggcctcaatagagttcattgagctaaaacaatactaggtaaacaatggaatttattttc

SEQ ID NO: 930233 - DNA, 120 bp, Artificial Sequence
  ENSG00000223617_8 (sequence is synthesized)
aagactgaactcagttctcatcagttcaaggttaacctcaacaaaatgaatccagtaatggaaagaaaatgaaaaaaagaacaaacaaaacgaaatgactgcactacgtatttaggccca

SEQ ID NO: 930234 - DNA, 120 bp, Artificial Sequence
  ENSG00000223617_9 (sequence is synthesized)
gctgacagaatctcaacactgaatgatactgataaataggtttccttgtgtatccagtgtgaagtcttggttgttattcgttttccaacgaacattaaagtcatctttggattctctgca

SEQ ID NO: 930235 - DNA, 120 bp, Artificial Sequence
  ENSG00000224965_0 (sequence is synthesized)
ccggctcttcttgcttcgtccctcgccccctccccgccaagctggtcgcactgttgccgtttcactgcggctgacggaaggccaaggaagaaagagggtagagacgctgtcgcgaggatc

SEQ ID NO: 930236 - DNA, 120 bp, Artificial Sequence
  ENSG00000224965_1 (sequence is synthesized)
aggctgccctctcctttcccagggaccgtgttggggccttctgaccaccccgccccgcatcctgcgcctcggaggcccaacgtagcccaagacacccatggtcttgatgctctccgcctc

SEQ ID NO: 930237 - DNA, 120 bp, Artificial Sequence
  ENSG00000224965_2 (sequence is synthesized)
tgtcccagccaccaaagtccccgcgatggaatggaggacggggtggccttgggcagagaagcgcttcttgtgccggatggaaggaaaccgtagctctggctgtgttcatcgcgaaatgtt

SEQ ID NO: 930238 - DNA, 120 bp, Artificial Sequence
  ENSG00000224965_3 (sequence is synthesized)
ctccatgcctgtctggatgatgtaaagagatcttgaggcagaaatgaaaggtgaatgacacacctgccctggacacctgtgcaccttcccagttccagatcaggcagtacctagctcaac

SEQ ID NO: 930239 - DNA, 120 bp, Artificial Sequence
  ENSG00000224965_4 (sequence is synthesized)
tgagaaaaacaagacaagggcctatgtgtgtctcaggaaaggttaaaagctcagtgccaatgcaagggatttttacaagcaaaagtctcattattaatgaggccagaaaaccaaaatgac

SEQ ID NO: 930240 - DNA, 120 bp, Artificial Sequence
  ENSG00000224965_5 (sequence is synthesized)
aatgatctttgatgatctgtactgacacgcaggggaggtgagttaatcagaaacacacatttactggcaccccctttgtgcccagtccctgctcctcgaaactgatgtttgtatttcaga

SEQ ID NO: 930241 - DNA, 120 bp, Artificial Sequence
  ENSG00000270673_0 (sequence is synthesized)
ggggcgtcagcgagcgccaactttcagcgtcttttctgcggcttccttctatcccgctccgaggctgcagggccctggcagagtggcgtcagctggaaggctggccagagccggattttg

SEQ ID NO: 930242 - DNA, 120 bp, Artificial Sequence
  ENSG00000270673_1 (sequence is synthesized)
ttgcactccgggcaggaagatggccgaggcggcggctgacggagatagtagtgccttgctgaagtcacggcggccggcggcgccctcctggaggctgacgggacggaggcagggaacttc

SEQ ID NO: 930243 - DNA, 120 bp, Artificial Sequence
  ENSG00000270673_2 (sequence is synthesized)
cagctgaagtggcaggttagagttgtggtactcaaacttaagtccaagcaaacaggaggagcaccggcgcgggttcagtctttccaaacccagttcagccgtaatctctggagtcagact

SEQ ID NO: 930244 - DNA, 120 bp, Artificial Sequence
  ENSG00000270673_3 (sequence is synthesized)
tcgccgcccaattcatggatttgtgcttttgactccgctctgatgtttttgaatgaataaagttgcctaggatacttaagtatagttgcagagcgtcttttcggccctgaaaagagggaa

SEQ ID NO: 930245 - DNA, 120 bp, Artificial Sequence
  ENSG00000270673_4 (sequence is synthesized)
agtttccattgaaaaagttctttatcacatattggcaaacccaaagtatgccaatttgcaacgtgttgacattttcattgaaatatctacaataaaggcaaagattccttgtctcagtga

SEQ ID NO: 930246 - DNA, 120 bp, Artificial Sequence
  ENSG00000224961_0 (sequence is synthesized)
gtctctcacaagcttgaatgtgtgttctggagctgaaggatgcacggttgttaagcccctgttcttttccgttgtttaatctaatgttctttggaataaaaacctccctgccaagtagta

SEQ ID NO: 930247 - DNA, 120 bp, Artificial Sequence
  ENSG00000224961_1 (sequence is synthesized)
cttggttttatgctcaacatgctttgactgttgaaaagagacctttggcacacattgaagggatggtgatggagatgccaatccatggaatcaggtggcacagctatgttggtagctata

SEQ ID NO: 930248 - DNA, 120 bp, Artificial Sequence
  ENSG00000224961_2 (sequence is synthesized)
aggaaggtaccattggagaaccatgcatgaagacagggaagaaatgattggaatcatgaaacattaaactggaaggaagccctaggcaaacctaactcatgggaaaacagacacccacat

SEQ ID NO: 930249 - DNA, 120 bp, Artificial Sequence
  ENSG00000224961_3 (sequence is synthesized)
gttacccagtttagtaccaaaaccaaggctggtatttgcataaatatacttttcttctctatctaatatcaaggccttcttagtattgttaataggccttaagcttggtttgtctacata

SEQ ID NO: 930250 - DNA, 120 bp, Artificial Sequence
  ENSG00000224961_4 (sequence is synthesized)
gaaatcaaaataacaatgtcaacccatgaaagaattaaaagaagtcccaaacagttctgatttcctccaatgtgactatttctgatatattataaaataacagaaatcaaactcaaagaa

SEQ ID NO: 930251 - DNA, 120 bp, Artificial Sequence
  ENSG00000224961_5 (sequence is synthesized)
aagcattatcacattcccttagagacaccagaccagcatcagctgcccgtgtccttccaagatgcctgggtccagcttgtgggagggactgtgaatcctgaggacagcaccagctgagct

SEQ ID NO: 930252 - DNA, 120 bp, Artificial Sequence
  ENSG00000224961_6 (sequence is synthesized)
gctgagcttcggatccttctcaatggtgccttttcagttctgcagggccctcctctcctctgagaatatgggttctctgacatccagactgaagtgcagtggcatgaactcagctcactg

SEQ ID NO: 930253 - DNA, 120 bp, Artificial Sequence
  ENSG00000235464_0 (sequence is synthesized)
ataatgggaaactaagggcaagttctcatgttcctggtcctggcttctttgaggctctctgcttcgtcctccctccattctcatgagcagaagagacactgaaagcaggagagaacagaa

SEQ ID NO: 930254 - DNA, 120 bp, Artificial Sequence
  ENSG00000235464_1 (sequence is synthesized)
agcaccaggctgcagtgcgtcaggtggatggatggggagggccagcctacccaagacctccaaccacccaggagccatgtgggatatgcagtgagagcagcttgggaagatgctcagtta

SEQ ID NO: 930255 - DNA, 120 bp, Artificial Sequence
  ENSG00000235464_2 (sequence is synthesized)
aaaaattgtctttggtgacttgggaaaaggtttagtccagcatcgaacaagatttttcttttctcctaattaatttatttcctgccaaagaaattgactgtgtccctttaaacagcacca

SEQ ID NO: 930256 - DNA, 120 bp, Artificial Sequence
  ENSG00000235464_3 (sequence is synthesized)
accccaaagcaaagtgtccctggagggaatcatgggatcaattttccagccggagactatgcagcctgactatacaggcttcaggcttttaatttgcttatacatagagtggcttgagct

SEQ ID NO: 930257 - DNA, 120 bp, Artificial Sequence
  ENSG00000224969_0 (sequence is synthesized)
ggtttcattttccatttaccaacttgcaaaattagtaaacttggaaaacatccccatggttaattgagaaacaagaactccaaactacccagagataacaacactcggtttagggcagta

SEQ ID NO: 930258 - DNA, 120 bp, Artificial Sequence
  ENSG00000224969_1 (sequence is synthesized)
ggagtgcagaggcacgatctcatctcattgcaacctccgcctgccaggctaaagcgatcctctcacctcagcctcccacgtagctgaggcgggagaatcccttgaacccaggaggcagag

SEQ ID NO: 930259 - DNA, 120 bp, Artificial Sequence
  ENSG00000224969_2 (sequence is synthesized)
cctgggcagcagagcaagacagtctcaaaaaataatataaaataaacataaaggcagtaacaagcactggggaatacatagaggaactggaatcctggtacatgcattgctgttgagaat

SEQ ID NO: 930260 - DNA, 120 bp, Artificial Sequence
  ENSG00000224968_0 (sequence is synthesized)
ggggagaaacggcgcagctgggactctgtgctgtggcagcctaagcgaacctcttcacgggctaatgacaattgcaggcattgttgggctgtgtcctaaggtgaatcaacataaagaaaa

SEQ ID NO: 930261 - DNA, 120 bp, Artificial Sequence
  ENSG00000224968_1 (sequence is synthesized)
gccctggctgctcgtgcactgataacttcatcttttcggacatctgggaactaccgccacaatgtctggaaaaaaaatgacttcaaactaatgcagcagaggcaaaccatggtttggcca

SEQ ID NO: 930262 - DNA, 120 bp, Artificial Sequence
  ENSG00000224968_2 (sequence is synthesized)
aaaatggaacagaatttacaagggaaaagggaagttcctggagtaatatggtcagatgaggatggaactggtgaatgagcagaagagaaggttggaagagtgcagtggtgatgacagccc

SEQ ID NO: 930263 - DNA, 120 bp, Artificial Sequence
  ENSG00000224968_3 (sequence is synthesized)
tccgctgctccttccccagaggaaggagctccaagtttattcacccctcttttaccatgaggcagagggaaaacaatgacaaatacacagtaaacttcgttatcaacaaacagaagttgt

SEQ ID NO: 930264 - DNA, 120 bp, Artificial Sequence
  ENSG00000224968_4 (sequence is synthesized)
taccaaggcaacagaacaagagcatccctgcatccagccatcacagtgtgaagtgagtttcagatgaggagatgccttgaggggcaaggagacccttcaggaaaaagctgacctgataaa

SEQ ID NO: 930265 - DNA, 120 bp, Artificial Sequence
  ENSG00000224968_5 (sequence is synthesized)
ggaatcaaggagctgccatcccaactgatgtcttttttccctttctcaataaagagaagagcttgcaagagccctgaaagacagacaggctgcgtaaactacttgggatttcaaagagtc

SEQ ID NO: 930266 - DNA, 120 bp, Artificial Sequence
  ENSG00000224968_6 (sequence is synthesized)
agaggtgagactttggggtgaacagatacaaggaaaggggacagggcattaaacacctctgaactgctgtgtacactataaatagaaatgagatcctgtatttatacaatgccttttgtc

SEQ ID NO: 930267 - DNA, 120 bp, Artificial Sequence
  ENSG00000224968_7 (sequence is synthesized)
cagaaacctgcactcacagcacagacatcacctgcctaggcttccaaacacccctgtgagttgaggatcaaggacagggattattttacagatgggaaaactggcacttagaagcagtat

SEQ ID NO: 930268 - DNA, 120 bp, Artificial Sequence
  ENSG00000224968_8 (sequence is synthesized)
atgtgccaaggcccttcagaagacagcagaacagccagaaacaggatgcaggtaaaaataccaacaataaattctttttatttgttcttaacatcttccctgctggatcaagatcttttt

SEQ ID NO: 930269 - DNA, 120 bp, Artificial Sequence
  ENSG00000224968_9 (sequence is synthesized)
cacaaaatgacattaaagagtcaaagtcttcctttctcctcaacaacagggagcttgcataatctgaatgtgcttgttgcagcccctgacactatggatggagggggatcaagggtgggc

SEQ ID NO: 930270 - DNA, 120 bp, Artificial Sequence
  ENSG00000224968_10 (sequence is synthesized)
ttgtggattacacttatcaaattgaaacactctagggaagcattgtagctgctcttgaattcaccttcttggtttaatggaagtacttttaggagatttattttgatacctctcaaccat

SEQ ID NO: 930271 - DNA, 120 bp, Artificial Sequence
  ENSG00000224968_11 (sequence is synthesized)
gtggattcttaatctggggacctcaatcaatcaaacgaatgtttattgattgactaccatgttcagatctagtgctatgaaagaataataaatattacctatggtactcacctgataaaa

SEQ ID NO: 930272 - DNA, 120 bp, Artificial Sequence
  ENSG00000224968_12 (sequence is synthesized)
cttccactgtaccacacatctcccttccacagactacagtttttcttcttgtaaagtcttcattttgttttaggtagcttggatgaggtaaaactgcaagctcccaatgaagcacttcat

SEQ ID NO: 930273 - DNA, 120 bp, Artificial Sequence
  ENSG00000224968_13 (sequence is synthesized)
tattttgagctccacaaagcacatctgcatgtagccgccttttcaaatttctgctaaatcaccagtaagcttatagtggcttatatggtctcgagttccaaaggactatggaactgcatg

SEQ ID NO: 930274 - DNA, 120 bp, Artificial Sequence
  ENSG00000224968_14 (sequence is synthesized)
tgaagatcttgagccatgaagacagatgggacagtgaaattaacctaaccagtgacatgcagtttccttagacttctattttctccgtgagtgaagcaccaactcaggtgccatggtgtg

SEQ ID NO: 930275 - DNA, 120 bp, Artificial Sequence
  ENSG00000224968_15 (sequence is synthesized)
acagggcttggcagaacaactcaaggagagaaaagaatccaaaggcaacttccttctcaaacaaaaatttccttggatcctctctttcataaaataataatagttaccagtgtttccttc

SEQ ID NO: 930276 - DNA, 120 bp, Artificial Sequence
  ENSG00000235461_0 (sequence is synthesized)
gcccactatgacaacaggaagcaaaggtcagagggactggccgtaggcacatgtgaagctttcttgccaatcttcattgaactcacacttcaaaagtcatggttttctctttgttttatt

SEQ ID NO: 930277 - DNA, 120 bp, Artificial Sequence
  ENSG00000235461_1 (sequence is synthesized)
gtaattttctgttttattataaagaagattgcagaaaagaggcagaataggagagctgaaagacaaaaaaagagtatctaaacaacagaggacacatactggaatctctggagctcatcc

SEQ ID NO: 930278 - DNA, 120 bp, Artificial Sequence
  ENSG00000235461_2 (sequence is synthesized)
cttcagagggcccttcccagaagaactgtatctccacttcctcggttctctggaataaattacaaccttatgactcatgagtccaaacaggacagtctttacgtctacccatcttatgac

SEQ ID NO: 930279 - DNA, 120 bp, Artificial Sequence
  ENSG00000235461_3 (sequence is synthesized)
tgatgtggctctcaaggaacaataaaacctaagcaaattatgggaacaagcatttatcaaccacgcaaatgaagccattctttagtttttctacaccaggagttccaaaatcaagctaca

SEQ ID NO: 930280 - DNA, 120 bp, Artificial Sequence
  ENSG00000235461_4 (sequence is synthesized)
aacacattggatactcaagttatgaaccgtgagaagagtcagaaattccttataggatagaacatgtgcaattgaaatctaatattaagttttctgtggaaaaacacatatatgtgtact

SEQ ID NO: 930281 - DNA, 120 bp, Artificial Sequence
  ENSG00000235461_5 (sequence is synthesized)
atatggctatctgatcattttaaaaacatactcagaatactttaataaaacactgtgagtatgaattatctatgctttaaacactttacttctctttctgcatttatgccatcacttctt

SEQ ID NO: 930282 - DNA, 120 bp, Artificial Sequence
  ENSG00000235461_6 (sequence is synthesized)
atctcttcataccttgaactttttcttttccccctctctcactctatgactcctgaacaaaactgtcatttccaatatctaacttcattaactaagtagggatggcagatgtttattatc

SEQ ID NO: 930283 - DNA, 120 bp, Artificial Sequence
  ENSG00000235461_7 (sequence is synthesized)
accaaaatgcagcataacatttgcaaactggtttatgacatgcatctttataaagtgctcagtgaaatgcataaacgattgattgaaaattggtcaaagagaatattgagtactttatta

SEQ ID NO: 930284 - DNA, 120 bp, Artificial Sequence
  ENSG00000235461_8 (sequence is synthesized)
gttactggctaaagctaaggagttacagaaaagcatcatatctaaataaggagttttatttgaaatatgtaatttcattatgaataaattccataaaataaactaagaattgctaaatga

SEQ ID NO: 930285 - DNA, 120 bp, Artificial Sequence
  ENSG00000235461_9 (sequence is synthesized)
taaaaacatactcagaatactttaataaaacactggtactcagagtggagcaagatggtggaatagaaggctccaccaatcgctgcacattacccccagcaaggacaccaatttaacaac

SEQ ID NO: 930286 - DNA, 120 bp, Artificial Sequence
  ENSG00000235461_10 (sequence is synthesized)
tatctacacagaaaaaaacacccatataagaaccgaaattcaggtgagccctcatagtacctggtttttaactccatgttactgaaagaaatactgaagagatagaaaaaaaaaaaaaaa

SEQ ID NO: 930287 - DNA, 120 bp, Artificial Sequence
  ENSG00000236849_0 (sequence is synthesized)
gtcaggacctgggagagaaaaaagctaccagcaacattcagactgagagaggccaaaatactaattcataattagcctggtacatatgaaggatcaaaaagaacaggactgtatgtctga

SEQ ID NO: 930288 - DNA, 120 bp, Artificial Sequence
  ENSG00000236849_1 (sequence is synthesized)
cctctgacaggccctaccaccatagtagagactcagtatgtatacttaatgaaggaataatgaatacatcagcaagagaaataagagtgaccatatgttccttaagagaagcaaagagca

SEQ ID NO: 930289 - DNA, 120 bp, Artificial Sequence
  ENSG00000236849_2 (sequence is synthesized)
cctaagttatagccagaggacgggggcacattgacaaaacataaagcggatatgataataacaaggtaccattccagcaagaacatctgaagaaagaagcagtgttgtttatctttcctt

SEQ ID NO: 930290 - DNA, 120 bp, Artificial Sequence
  ENSG00000236849_3 (sequence is synthesized)
catctattctgaaactaaaatccttaaccaaatttatttccgaagtttaaccctttaataaactggcctctgactccacctggtggagatacataaatctatgaaaataaaccaatccaa

SEQ ID NO: 930291 - DNA, 120 bp, Artificial Sequence
  ENSG00000236849_4 (sequence is synthesized)
aagtcatcagctctctttcatgtctcaaagaaaaaacacatatcccgaaattcaaatagatgaccttctcggatgtgttataggcactcagaagccccaaagaaaaaatagtttgagttg

SEQ ID NO: 930292 - DNA, 120 bp, Artificial Sequence
  ENSG00000236849_5 (sequence is synthesized)
atcatttgactgttgctctcagccttcatttctgcctttctaggttgtgtcaggcattttgactgtccaggggccctgcatattctattttcctagttacttgctaaggtttgaatattt

SEQ ID NO: 930293 - DNA, 120 bp, Artificial Sequence
  ENSG00000236849_6 (sequence is synthesized)
gtccccctccaaaactcatgttgaaatttaatcccaaatgtggcagtattgagaggtggggcttttcagaggtgattgggtcatgagagctctgttctcatgagtggattaatccattca

SEQ ID NO: 930294 - DNA, 120 bp, Artificial Sequence
  ENSG00000236849_7 (sequence is synthesized)
tggattaatggaataatggactaatggattaatgagttatcataggagtgggactggtgcctttataataagaggaagagagacctgagctagcacactcaccctcttcaccatgtgagg

SEQ ID NO: 930295 - DNA, 120 bp, Artificial Sequence
  ENSG00000236849_8 (sequence is synthesized)
tcctgtgccaccatgggactctgcagagtctcatcagcaagaagccacttaccagatgtggccccttgaccttgggcttctcagcttccataactgtaagaaataaatttctttgtaact

SEQ ID NO: 930296 - DNA, 120 bp, Artificial Sequence
  ENSG00000236846_0 (sequence is synthesized)
tggggtgtaatcacagagcagctgacactccccactcactgcctggaggagcttggcggtgggatcgggcaaggcgggaaagataggtgtaaaacaaagcctggcacttaattacagtgc

SEQ ID NO: 930297 - DNA, 120 bp, Artificial Sequence
  ENSG00000236846_1 (sequence is synthesized)
aaagatctcattatagagtcttctcagctcccctcctcggctggcagcttgaagcctgagtgacaaattgcctaggtggatgctgcaagaccagcaggggcctggcttatcatgcaactt

SEQ ID NO: 930298 - DNA, 120 bp, Artificial Sequence
  ENSG00000236846_2 (sequence is synthesized)
gagagaggagccttccagacggtgttatggcctcccaggaactcccaaagccccctccccagggtggcatctggttttggacactggtttctgtcactgagctccagggactcatgtcac

SEQ ID NO: 930299 - DNA, 120 bp, Artificial Sequence
  ENSG00000236846_3 (sequence is synthesized)
acctggaagaacttttagattctgtctgcctggccatgtcttccaacagccgagatcattgaggaagatgacaacttctacctgaacagccaggacagcttagggtcttctcacatgtgg

SEQ ID NO: 930300 - DNA, 120 bp, Artificial Sequence
  ENSG00000236846_4 (sequence is synthesized)
accttgaaatgcacttctgttatttttctccagtatattcaggggaagggggctggtgatcaaagcttttgctgagcaggaacagaagggttgtcacttgcttttttctccactgaaacc

SEQ ID NO: 930301 - DNA, 120 bp, Artificial Sequence
  ENSG00000236841_0 (sequence is synthesized)
agtggagattctgttttttaagaatcagatccacgaattttggatatgtcacacgattgactttttcttccttttcaacagctacagatttcaatgaggacaataaaggagcataagatc

SEQ ID NO: 930302 - DNA, 120 bp, Artificial Sequence
  ENSG00000236841_1 (sequence is synthesized)
gagaggtttcactgagcacggcttcttcatcaaagaagattatgtcaacaatattttatgactcctgatactgtaacttgaaaaagtaaatagtgaaagtactccggatatgttggaagt

SEQ ID NO: 930303 - DNA, 120 bp, Artificial Sequence
  ENSG00000236841_2 (sequence is synthesized)
tcttttgcaacctggagaatacctgagaagagtcactgccactgtggtacagaaactgtatgccaattcagttggcatgcagggagtaattgaattgacctggatatatggaatcttggg

SEQ ID NO: 930304 - DNA, 120 bp, Artificial Sequence
  ENSG00000236841_3 (sequence is synthesized)
tggagagagtgaatgatgagaaaactatgagaaaatctcttgggcttgcttcagaggctgctgtgtgcagaacagagagagaaggtggtagcttactctggtcctcagggcaacagccat

SEQ ID NO: 930305 - DNA, 120 bp, Artificial Sequence
  ENSG00000236841_4 (sequence is synthesized)
tgcatggaggaagaaaagaggggctgtggccagtcctgaatctgggaaggtgttgtccagaattcctgaccaccacagaacatcccttcctgatgtgtgaggtggagctatgtggcctga

SEQ ID NO: 930306 - DNA, 120 bp, Artificial Sequence
  ENSG00000236841_5 (sequence is synthesized)
gttaggggcaatggtttcagaaagctgaagtggaaacaatgctggattggaaaaagtcagaaaactctagagaagactgcatttgtgctctctgtggtcttcctgctgtaatgttccagg

SEQ ID NO: 930307 - DNA, 120 bp, Artificial Sequence
  ENSG00000236841_6 (sequence is synthesized)
ccaggattggttcttctgggtataagtcatgaggggattcaacctgcacctggaaagaaggtatcaagctagggatggggagaaattacccagggcaatccagtgctggggattacacaa

SEQ ID NO: 930308 - DNA, 120 bp, Artificial Sequence
  ENSG00000236841_7 (sequence is synthesized)
tgaaaagtcccttagacagcagtgtggtggatacttccaccaacattcattcagtaaatatcttctggtgacctggtatggatcttttaattctgaggcaatcacagagatggcaggtca

SEQ ID NO: 930309 - DNA, 120 bp, Artificial Sequence
  ENSG00000236841_8 (sequence is synthesized)
ccagtagtttctaactgaaggtggtagtaactggcaatgcattgctttaggactgtaggcattacagctatttttttcaatatgaactttataatgtagaactaagaccccagaaaaacc

SEQ ID NO: 930310 - DNA, 120 bp, Artificial Sequence
  ENSG00000236841_9 (sequence is synthesized)
tcatagatataaaattttcctctctagctattgatgtcattttatttacttatttatttttgtttggtttgatttggttatgggttagcaatctgaaagcagttaccattactaattcta

SEQ ID NO: 930311 - DNA, 120 bp, Artificial Sequence
  ENSG00000236841_10 (sequence is synthesized)
aaaatggattcaaaataggaacacttccaaattagaagcatttttttaaaaggagtctgaattcaaaagtctgactttatctttatcaaatgcttttggcaatgttgaagaaatcttctg

SEQ ID NO: 930312 - DNA, 120 bp, Artificial Sequence
  ENSG00000236841_11 (sequence is synthesized)
ggagaaatgtaataaacatttcttggagggacagcatagagtgcaaacatctcaaacgtgattcacttgcattttctgaacaatgcttttgcctactctgagctgttggttccagtattt

SEQ ID NO: 930313 - DNA, 120 bp, Artificial Sequence
  ENSG00000236841_12 (sequence is synthesized)
ggagttctcatgacagaaatccaaaaccacttctagattcttctcctccatgaccaccctaatgttattcatgcacttgctttgcacaaacacctctttctgtgataaaacctggaacct

SEQ ID NO: 930314 - DNA, 120 bp, Artificial Sequence
  ENSG00000236841_13 (sequence is synthesized)
gaaatcaatgaatacagacaacacaatagcacttgaacttctgactttattatttttcttcaaatgaacaggtgataaaacactgtgtccaaagcaaaatgcatgactcccttttctctt

SEQ ID NO: 930315 - DNA, 120 bp, Artificial Sequence
  ENSG00000236841_14 (sequence is synthesized)
ctttcacagagtaccagaaaatgtaaacaatatttagcttgaacttctgagtcctcatcttttttttaacagcctttagaacaacattaatttgtttgtttatactagcattttacaaca

SEQ ID NO: 930316 - DNA, 120 bp, Artificial Sequence
  ENSG00000236841_15 (sequence is synthesized)
taaaaaataaaataagcaaactgtctgaggggtttatataaggttttcagattctgatacaggcttgcatctgcatcgtttttagtctgacaaagagaaacactgctttaggaagtgggt

SEQ ID NO: 930317 - DNA, 120 bp, Artificial Sequence
  ENSG00000236841_16 (sequence is synthesized)
catgtgggtgtataagtggttcgtggacaggccggataagccgtggttctggtcagagtaccactgaaacacaaagaaaaaagcttgttttattcctgcagtcatcaaatgcatttagct

SEQ ID NO: 930318 - DNA, 120 bp, Artificial Sequence
  ENSG00000236841_17 (sequence is synthesized)
gaaactgtacctaagaacactcaaataagtaaaatagcttacatgtaaatatttacagcaggaagagctttcgttaacctccactactgtttcacatgctttaaacatattttagatctc

SEQ ID NO: 930319 - DNA, 120 bp, Artificial Sequence
  ENSG00000236841_18 (sequence is synthesized)
agtggctgagatctcgcatcatccagcatcctggaagatcaggatcaggcatcagagttgccagaagtgatgcactgggtctgttaattttgcttctttggagtctggtttcttcatttg

SEQ ID NO: 930320 - DNA, 120 bp, Artificial Sequence
  ENSG00000236841_19 (sequence is synthesized)
aaaaacaaaggggttggagttgattttccctaagattccttgtagctcaaaaattccatgaggctttcagcctgtgaatctaattcctctctgttgcagaaaatccacaatataatgtat

SEQ ID NO: 930321 - DNA, 120 bp, Artificial Sequence
  ENSG00000236841_20 (sequence is synthesized)
tcatatatagccataaacaccctttataggagttaaaaatagcatttttaaaaagtgaaagatagtattttaactttaaacttcactcttggagagataccactaagattattgctttca

SEQ ID NO: 930322 - DNA, 120 bp, Artificial Sequence
  ENSG00000236841_21 (sequence is synthesized)
ctgaataaaggtatcagtggtcacgatgtaataatatatatttactaagttgaatttactttggggatcacaataaaaaaggtcagaaaaagctcacctccctctttgtatatttttaaa

SEQ ID NO: 930323 - DNA, 120 bp, Artificial Sequence
  ENSG00000236841_22 (sequence is synthesized)
aatttgatatataatagttgtgtatctttttgggggtacagtgatattttgatagctgaatacaatgtgtaatgatcaaatcaagataactgaaatacccatcacctcaaacaaatttcc

SEQ ID NO: 930324 - DNA, 120 bp, Artificial Sequence
  ENSG00000236841_23 (sequence is synthesized)
ttttatgttgggaaaattataattattctcttccagctattttgaattatacaatcaattatcattgaccataatttccctactgtactttcaaatactagaacttatttttttctgtct

SEQ ID NO: 930325 - DNA, 120 bp, Artificial Sequence
  ENSG00000236841_24 (sequence is synthesized)
tttgtaccccttaaccaacttcttcttataccccctcccccatttctttcccagtcagtacattttttaaaaacaaatgttgaaaagatgggggtctccttttcggggttcttgttcaac

SEQ ID NO: 930326 - DNA, 120 bp, Artificial Sequence
  ENSG00000236841_25 (sequence is synthesized)
ttaagcaattgagggagcatttgtgagaggaaaaggtagctaccaagaatgctgccccgcccccaactttggctttcactttattttcttttctggttcaatttctcattcctcaagcaa

SEQ ID NO: 930327 - DNA, 120 bp, Artificial Sequence
  ENSG00000236841_26 (sequence is synthesized)
cctggattttacatttagctaattcattcattcactcagtaagaagctgagcatctgtgataagccaggtgtatgccaggggatgagaatacataggtgaaaagttctctaaccacaaat

SEQ ID NO: 930328 - DNA, 120 bp, Artificial Sequence
  ENSG00000236841_27 (sequence is synthesized)
ggagccatatgatttcagggagccttggaggtttgtgatgacattctgcaactgcttcttactgaacaaacagaatcttctagctgtttaaggatgctcaggttttgcagggactctaag

SEQ ID NO: 930329 - DNA, 120 bp, Artificial Sequence
  ENSG00000236841_28 (sequence is synthesized)
catataattgcacttattcacataggatttcagaactactggatgtttgaactagaagatcatttaatcttgtgaactcctttattttacatgactcaactgggaacacgagaggtgatc

SEQ ID NO: 930330 - DNA, 120 bp, Artificial Sequence
  ENSG00000236841_29 (sequence is synthesized)
tggtttgcctcgggtccttcagtagttaaagaaagatccaagattcatttgctaatgttctgcctactctatcctgcagcctctttgtcagattttactttaaaagttaaaaaaaataaa

SEQ ID NO: 930331 - DNA, 120 bp, Artificial Sequence
  ENSG00000236841_30 (sequence is synthesized)
aatatgaacccctccttttagcttgagggtctaaggccatgaacatgagtaaaacaaaattatgtaccattgcctggaaatccacttgtgcattaaccagagctttagcaatctgtgctg

SEQ ID NO: 930332 - DNA, 120 bp, Artificial Sequence
  ENSG00000236841_31 (sequence is synthesized)
agttttgaaagtgcacattatctgcaacaaagagagagagagttaaagtgctgctaaataccagaaagcatagagtgacaatgtactgcctggaaatgaacaccaacaattatctagtca

SEQ ID NO: 930333 - DNA, 120 bp, Artificial Sequence
  ENSG00000236841_32 (sequence is synthesized)
tgcatttgacattgtcagcagtgagtaatcacactcagatatggaaatgtccctgactcttaggtactgaccctgagcataggcataggaggatgcttaatgtttcttaaacaaagtgat

SEQ ID NO: 930334 - DNA, 120 bp, Artificial Sequence
  ENSG00000236841_33 (sequence is synthesized)
gctggctcagtatttttatgtgtaagagtcttgcttaaacctcaccatctgctgttccgtggatgagaagatagtctacatttctgaaatattctgctcttgccatcacagttgaattct

SEQ ID NO: 930335 - DNA, 120 bp, Artificial Sequence
  ENSG00000236842_0 (sequence is synthesized)
gggctagcctcggggacctcagctccgccgctcgccgccgccgcccctcggcccggtctccgcgcaggatgcacagagctaccagatatcaactggttgtcatcttccactcttgctgca

SEQ ID NO: 930336 - DNA, 120 bp, Artificial Sequence
  ENSG00000236842_1 (sequence is synthesized)
taactggcatcgtctctcagacagccccggtcctaacacattgttaggtgggcccttgtcagcattttgatgagcagtgttgatctcggagggttgaccttcctgcccctctctcagctg

SEQ ID NO: 930337 - DNA, 120 bp, Artificial Sequence
  ENSG00000254167_0 (sequence is synthesized)
gtatccagggtgaggcccagcttacagagtctgggggagacttggtacacttagaggggcccctgaggctctcctgtgcagcctcttggttcaccttcagtatctatgagattcactggg

SEQ ID NO: 930338 - DNA, 120 bp, Artificial Sequence
  ENSG00000254167_1 (sequence is synthesized)
caatacaatgcagactatgttaggggcagactcaccacttccagagacaacaccaagtacatgctgtacatgcaaatgatcagcctgagaacccagaacatggcagcatttaactgtgca

SEQ ID NO: 930339 - DNA, 120 bp, Artificial Sequence
  ENSG00000270574_0 (sequence is synthesized)
aatttaagacacttaccaaatggatgtctcgcaacaattggctccgatttcaggccttcccctacaccatatttattttcggcactgaccctgaaggtatattccatgccctcatgaagt

SEQ ID NO: 930340 - DNA, 120 bp, Artificial Sequence
  ENSG00000270574_1 (sequence is synthesized)
ctggttactctaaaggtggttttctggacagctgaggcgcacgtcacccacttgttgttcacagaatccctcttctctaggatatagttggtgatttcagaacctccatcatcctttgga

SEQ ID NO: 930341 - DNA, 120 bp, Artificial Sequence
  ENSG00000270574_2 (sequence is synthesized)
ggagcccactttaaggtcatggcttctgctgtgacttcatcaaatttgattggtccagtggggatgccaggcttgccaacaacctttatggagatagttccttccttggtgccagcaaca

SEQ ID NO: 930342 - DNA, 120 bp, Artificial Sequence
  ENSG00000270574_3 (sequence is synthesized)
ttcttaagtgtgattgtgtattttccagcatcagatttttggcaatcgtacactataagagttgtgttaaccgcagatgactcaacactgactctagtgtcagttgctagaggatcttcc

SEQ ID NO: 930343 - DNA, 120 bp, Artificial Sequence
  ENSG00000270574_4 (sequence is synthesized)
cctttcttccaggagactgatggagctggcttgccttttatggggatcttaagccggaagttgctgttttctttagccaagtagcacaaatcaggtagaccctttaagtcaagatcagga

SEQ ID NO: 930344 - DNA, 120 bp, Artificial Sequence
  ENSG00000270574_5 (sequence is synthesized)
gccactgtaaaatagcagagataaattactgttatttttaaggccaggcgattaactttttcaaatagttctagcttttaacggatttttagataagctagtgagtgggacacaagagtg

SEQ ID NO: 930345 - DNA, 120 bp, Artificial Sequence
  ENSG00000270574_6 (sequence is synthesized)
cactttcgatgacaataaaggaaaaatgaagatgtgtgcatagagccttaccaacatcatcccttgccacaacagtgatttcgcttggggttccttctccattttcattctcagcactca

SEQ ID NO: 930346 - DNA, 120 bp, Artificial Sequence
  ENSG00000270574_7 (sequence is synthesized)
ctctgaaggtatattccttcccttcagtcaaatcttttgcagagtactgtaggcttaaggatttcataactcgttgccacttattttcttcagtcaggaaatcaactacatatccaataa

SEQ ID NO: 930347 - DNA, 120 bp, Artificial Sequence
  ENSG00000270574_8 (sequence is synthesized)
tccacaactggtccaggagtttctaaagcaaaggagaaatgataagtgtaagccccatataacaaaggaaggatataactcaaaatgatgggatgatggttcatttgcttacgggaagct

SEQ ID NO: 930348 - DNA, 120 bp, Artificial Sequence
  ENSG00000270574_9 (sequence is synthesized)
ttgacagcatcacgagtttcaccgggatcaccaatgccatactcattttcagcaaacactcggaagaagtaggattttccctcctccaaattagctactctgaagcttgttttggagcac

SEQ ID NO: 930349 - DNA, 120 bp, Artificial Sequence
  ENSG00000270574_10 (sequence is synthesized)
tcagttgtcactgtagaccaggatttcctctctgcatcacgtttttgtaccacatagtttatgatggggcttccgccatcaataatgggaggctcccaggtaacataagcagagtctttg

SEQ ID NO: 930350 - DNA, 120 bp, Artificial Sequence
  ENSG00000270574_11 (sequence is synthesized)
gatatttccttaacagtcacattgacaggtggcccaggagtatctggataaatagtaggtaaataagaaatgaatgtgtaaaaaatacataagctattttaaaatatatatgattctttt

SEQ ID NO: 930351 - DNA, 120 bp, Artificial Sequence
  ENSG00000270574_12 (sequence is synthesized)
ttgaaatagacttaccaagcactttcacaacaatggtatattcctttttaccacagctgttctccagggttaagatatattttcctgcatcatatttgttcacattttcacagcgcaaga

SEQ ID NO: 930352 - DNA, 120 bp, Artificial Sequence
  ENSG00000270574_13 (sequence is synthesized)
aagtgtcaaagtcagttgactttatgtccagtccaatcctgtctcttagattgacatttggtttagaccaagtaatctttggaggtgggcgtccttttactggtacatatagtctcatag

SEQ ID NO: 930353 - DNA, 120 bp, Artificial Sequence
  ENSG00000270574_14 (sequence is synthesized)
taactccagcacgtaatatgagtgtcttccttaagtccgcatcaagttctccctcaggtggaactgtttaattttgggtgaagaagttaaataaaaatttaatagtcaaatgtatttcca

SEQ ID NO: 930354 - DNA, 120 bp, Artificial Sequence
  ENSG00000270574_15 (sequence is synthesized)
gggactggccttgtcactcctaaaatacatttattttctagagctgatttcttgttctttaaaacttccttaatacaatcctcaaaatcatttttctgttctgtactaattgttgatctt

SEQ ID NO: 930355 - DNA, 120 bp, Artificial Sequence
  ENSG00000270574_16 (sequence is synthesized)
tccattttccactatgctttaggcttaaccaggttttccccccggaggatctgtacctcctctttcatgagccttatgtactctgaaatgctacatatattaaaaggaaagtagacgatt

SEQ ID NO: 930356 - DNA, 120 bp, Artificial Sequence
  ENSG00000232162_0 (sequence is synthesized)
ctcagagtttgaatggtaacgtttaaatgtctgctgctacggaagcaagaaaattcactccctgtgtggctgctgattctgagaagtgttctgtttaagtccagcccatcttctctccac

SEQ ID NO: 930357 - DNA, 120 bp, Artificial Sequence
  ENSG00000232162_1 (sequence is synthesized)
cctgcttcacccggcataccaggaggaggcaggaaggactttggaaaacttttatactgaatgcagaacttggtactccagatcaaactgcagaagtaaatgataatccttccccttcaa

SEQ ID NO: 930358 - DNA, 120 bp, Artificial Sequence
  ENSG00000232160_0 (sequence is synthesized)
acttccggtggggaaagtcccacctcttcggggcgagccgggtggcgctggagccgcgccctgctgagcgagcgagccggccggggacggtttcgggtcgggactccggcttcgggaacg

SEQ ID NO: 930359 - DNA, 120 bp, Artificial Sequence
  ENSG00000232160_1 (sequence is synthesized)
ggcctctggaaacctgcgacgtcagtccttacccgcccgcggctgccgcggaccgtcccacccccaaacccgtagaagcccctccgacctgcaacctccagccgcccggccctaggactt

SEQ ID NO: 930360 - DNA, 120 bp, Artificial Sequence
  ENSG00000232160_2 (sequence is synthesized)
gagcggctccctggccggtgcggaacctgcgggctaataatctagcgaccgggagaacgccaaacatccctggactagaagttgcaggggaaatcaaacagcccagaaagtttattctcc

SEQ ID NO: 930361 - DNA, 120 bp, Artificial Sequence
  ENSG00000232160_3 (sequence is synthesized)
ttgctggtatttcttccacttgctattttgctgagagatgcatgcaaactacccttagactttcagatgcagtgcgttttacttagccgtgcctgacaaacacacagaacttttaccgtc

SEQ ID NO: 930362 - DNA, 120 bp, Artificial Sequence
  ENSG00000232160_4 (sequence is synthesized)
tggtagatccgccttgactttaccagcgaatactaaagtcacttaaaaaaaaatcacaaggctcgaaaacagcagcattagaagtagactttatggtactctgctcagctatgttctcat

SEQ ID NO: 930363 - DNA, 120 bp, Artificial Sequence
  ENSG00000232160_5 (sequence is synthesized)
ttgattccaaccactacacggcagaaaagactgatgagcttctctgtgcaagggtgcctttttggagcaatgtccccattcggtccattgatatgaaccacttcattgaatgtcttagac

SEQ ID NO: 930364 - DNA, 120 bp, Artificial Sequence
  ENSG00000232160_6 (sequence is synthesized)
ggaaagaagactgaataatgattggaagaacgccggagtcatcaagctcttttgataactgcatatgtgaactaggtcaagtcactctccctcaacggatcaccagtttacccaactgta

SEQ ID NO: 930365 - DNA, 120 bp, Artificial Sequence
  ENSG00000232160_7 (sequence is synthesized)
aatggcaacaattttgaactgaacgttcttccttctacagccaaaattcttcgtttgctaggtttgtgaagtgcttttatatgtatgagcgctttcttaactatgaagatatctgagtca

SEQ ID NO: 930366 - DNA, 120 bp, Artificial Sequence
  ENSG00000232160_8 (sequence is synthesized)
tcgaacttttggtgggggcaatctcatgatcagtcatgactagattttagagttttctcatccccatactcaaagttttttttttaagaataaaaatgaaaagaaacaataccccacaat

SEQ ID NO: 930367 - DNA, 120 bp, Artificial Sequence
  ENSG00000232160_9 (sequence is synthesized)
atttctgagcctcaaaggacagactaaaaaagctaacttttaaaatacttcattttgaaataattttgaacttacaaaaaaatcgcaaaaataatacctggagtccctgtatacccttca

SEQ ID NO: 930368 - DNA, 120 bp, Artificial Sequence
  ENSG00000232160_10 (sequence is synthesized)
cccagattcccctactgttaaatacttacataaccataacacaattaccaaaaccaggaaattaacactggtacgagactcttaacaagagatcttatttgaatgtcaccaattttcttc

SEQ ID NO: 930369 - DNA, 120 bp, Artificial Sequence
  ENSG00000232160_11 (sequence is synthesized)
ctaatgttcttctgttctaggatccaatccaggttcccacatggcatttattcctcacttctccttagtctcctccaatctgtgacactttctaagtctttccttgtctttcatgaccat

SEQ ID NO: 930370 - DNA, 120 bp, Artificial Sequence
  ENSG00000232160_12 (sequence is synthesized)
gacactttggatgagtactggtcatttattctgtaaaatgcctctcactttgtgtttgttgaatgttttctcatgattagaccgagaccatgtctttttggcaggaacatcacagaaatg

SEQ ID NO: 930371 - DNA, 120 bp, Artificial Sequence
  ENSG00000232160_13 (sequence is synthesized)
gtgtgtatcctatctgagggtatgtgatattgatatatcttatcactcattatgttaaccttaaacacctggttaaagtggcatctgctgggtttctccactgtaaagtgactattttcc

SEQ ID NO: 930372 - DNA, 60 bp, Artificial Sequence
  ENSG00000232160_14 (sequence is synthesized)
gcatctgctgggtttctccactgtaaagtgactattttccctttatttatttattttaga

SEQ ID NO: 930373 - DNA, 79 bp, Artificial Sequence
  ENSG00000232160_15 (sequence is synthesized)
tacaggcatgcaccattatgcccagttaatttttttaaaaatgttttgtatagacagggtctagatcctcccacctcgg

SEQ ID NO: 930374 - DNA, 120 bp, Artificial Sequence
  ENSG00000232160_16 (sequence is synthesized)
atgcctggtctattttttattgataaatgaaatagaccatgcctgttctatttttaattgataaatatcctgggagaaatactttgggacaatgcaaatatcctgtttctcctccaactt

SEQ ID NO: 930375 - DNA, 120 bp, Artificial Sequence
  ENSG00000232160_17 (sequence is synthesized)
ttacccactgatttcagcatatatcagtggatcttgcctgcaaccattattaccatggcatttgcctactagtgattttgtgtttccttcatttgttctccatttattaattggaattct

SEQ ID NO: 930376 - DNA, 120 bp, Artificial Sequence
  ENSG00000232160_18 (sequence is synthesized)
tctgtaaggaggagttgtcccttctccccaacttatccatttattcaattttttttgtaaactatggactcatgggcatctattttattctatgagctataattcaatactgtcatcatt

SEQ ID NO: 930377 - DNA, 120 bp, Artificial Sequence
  ENSG00000232160_19 (sequence is synthesized)
tagtttcttgctcaagttattctaacttcagccattgggagctccttcagactggctactatgctgtcttgtcatgcccccaccctttctctagcactttcttacattcttacaccaaaa

SEQ ID NO: 930378 - DNA, 120 bp, Artificial Sequence
  ENSG00000232160_20 (sequence is synthesized)
gacattacagcctcatcttgtattttccctgcttctgtccagaattagccattattccaaagatcccgagttcctttattggagaatgatattagacacaaagatgtgggtactaagtat

SEQ ID NO: 930379 - DNA, 120 bp, Artificial Sequence
  ENSG00000232160_21 (sequence is synthesized)
actcgttgctgttggggtgttaattgcttctagggcttcccaagacagagctaggaaatgaaagcatacataataacccatgcatacacacagatcaatatctattcctgtatctatctg

SEQ ID NO: 930380 - DNA, 120 bp, Artificial Sequence
  ENSG00000232160_22 (sequence is synthesized)
tatacatactcatgtgtcctttctaatccacaccacggtattcatcctaaccttccctttttatttttaacttttttcctctgatagtgagaaaataggctctcattatctactctatat

SEQ ID NO: 930381 - DNA, 120 bp, Artificial Sequence
  ENSG00000232160_23 (sequence is synthesized)
acatttatttgttcaacctcagtatctacatacttacatatgcctgtgaggaacagatttactaactagaatcctgtatttgtgtgcaattctttttatctttattataaatatagcacc

SEQ ID NO: 930382 - DNA, 120 bp, Artificial Sequence
  ENSG00000232160_24 (sequence is synthesized)
tccaggcttctttttattagtgtcagcatgacatagcttttcccatctttttactgttaatattttaaactcaaaaaaagcaaggaggaaaacagtatgctactatctgtgtgaaaatgg

SEQ ID NO: 930383 - DNA, 120 bp, Artificial Sequence
  ENSG00000232160_25 (sequence is synthesized)
aaaataagtatggatatatttgctcatatgtatatatataatatctatgggagagggaaaaccaaaatatcagtttggaggtcaactgattaactggggaaaagagatgaggggaaaact

SEQ ID NO: 930384 - DNA, 120 bp, Artificial Sequence
  ENSG00000232160_26 (sequence is synthesized)
tcgctgcatactctactatcgttgaaatttcttaaactttttcattgagtataattcacaaatcataaaactcacccttttaaagtctacacatcagtagtttttaacacatttatatac

SEQ ID NO: 930385 - DNA, 120 bp, Artificial Sequence
  ENSG00000232160_27 (sequence is synthesized)
aaagttgtgtaactatcatcactaattccaggacattttcatcacccttaaaaaaaaagccatgtacccattagtagttaattcccatacccctcacccctcactcacccatctactgcc

SEQ ID NO: 930386 - DNA, 120 bp, Artificial Sequence
  ENSG00000232160_28 (sequence is synthesized)
cttcacaagaccctggcaaccactaatctgctttctgtctctatggatttgccaactcttgatgtttcatataaatggaatcacacaatatgtgaccttttatgtctggcttctttcact

SEQ ID NO: 930387 - DNA, 120 bp, Artificial Sequence
  ENSG00000232160_29 (sequence is synthesized)
taacatcatgtttttaaggttcatccatgttgtagcatggatcagtactttgttcctttttgtagctgagtaatattacattgtatgtatataccatattttgttgatgtactcattagt

SEQ ID NO: 930388 - DNA, 120 bp, Artificial Sequence
  ENSG00000232160_30 (sequence is synthesized)
tgactgtttttctaaatttttgaattatgaaaatatccattcaaaaattaaactttaaaaaatagaaacaaaatgaaaaagcccttctcataaaaaacagaaaaatgtaaaaaaaaaaaa

SEQ ID NO: 930389 - DNA, 120 bp, Artificial Sequence
  ENSG00000232160_31 (sequence is synthesized)
gatgtagagatctctcatggaggcaaactgctcagttcctgcggtgtccagaatttccagcacggagggggaagagtccacttcgatctctttgcggtagaaatcttcaatggtggggtc

SEQ ID NO: 930390 - DNA, 120 bp, Artificial Sequence
  ENSG00000232160_32 (sequence is synthesized)
ctttctctggagccatcccagaatgtagatcaaattacatcagaatacatagacattgacttactggttagtcaatcacataatcaatgtgaaaaaaatgatactgtgcatttttgtacc

SEQ ID NO: 930391 - DNA, 120 bp, Artificial Sequence
  ENSG00000232160_33 (sequence is synthesized)
acacattttacttcttctgtgttcattcaaatatggtattgcattcagaccatctaccaattatctgaagggcagtaaggtagacatttctatccccatgtgaaagacaagaacacaggt

SEQ ID NO: 930392 - DNA, 120 bp, Artificial Sequence
  ENSG00000232160_34 (sequence is synthesized)
tcggaatgattacataaattacctagggttagatagttattattttattattatatagatattagatagttattcttttcttggttgtaaaaaagatttagaagcctagagactagttaa

SEQ ID NO: 930393 - DNA, 120 bp, Artificial Sequence
  ENSG00000232160_35 (sequence is synthesized)
aatatttttttttcaggagctaagacgaatatacaatataggtaaaacacacttgaagctcaataaaacaaaccaaccacataacaaaagaggggaaccctttgtagataactgacaaat

SEQ ID NO: 930394 - DNA, 120 bp, Artificial Sequence
  ENSG00000232160_36 (sequence is synthesized)
gtgaaagtgttattgttcatctatttattaaatcaatgaaaatttatttttataaaatgaatcaggctttcagccctgattcttgcccagagtttgaaggtgagccaggctctgtcacat

SEQ ID NO: 930395 - DNA, 120 bp, Artificial Sequence
  ENSG00000232160_37 (sequence is synthesized)
tatgataatcagtttctttgactaaaacatgacgagggacagagagaatgatacttgctttacttactcccttggggtactgtgaagagctttgccagttgtagagatctacacacaggt

SEQ ID NO: 930396 - DNA, 120 bp, Artificial Sequence
  ENSG00000232160_38 (sequence is synthesized)
aaatgtttattgagtgcctaccgtgtataatgcacaaagggaaatattcatctgccttcaagaaactagtagcctgctacagcaagaataaaatgtataaaaatgagaaatgtgaggtag

SEQ ID NO: 930397 - DNA, 120 bp, Artificial Sequence
  ENSG00000232160_39 (sequence is synthesized)
aaaatcctaagtgccaaaatagaggtaacatctctgaaaatattacagttactacatttctgaaaataagtaggtggttactggaattgatcaataaaatgattacaactataaaaatga

SEQ ID NO: 930398 - DNA, 120 bp, Artificial Sequence
  ENSG00000232160_40 (sequence is synthesized)
tctttttaggcatgcagctttagcatcccatttgctttattcccagtacttaattaaatcattttcacttgacaaacatttattgagcaactactatgagctggtccctgtcctaggagc

SEQ ID NO: 930399 - DNA, 120 bp, Artificial Sequence
  ENSG00000232160_41 (sequence is synthesized)
tggagataaagttaaaaatgcatgtccttgctctcaatgaacttatggtttagtaaggagaaacaaacatgcacaataatgataaaaatttacaggtgcagtgggggatagcataagata

SEQ ID NO: 930400 - DNA, 120 bp, Artificial Sequence
  ENSG00000232160_42 (sequence is synthesized)
agcagtggttagttctagctgatggtggagtgagcaaggatctgggaaacttcatggagaaggttgtgttcagtcttgaaggagagggaggactccctgaagcaggcaagaggcaaggag

SEQ ID NO: 930401 - DNA, 120 bp, Artificial Sequence
  ENSG00000232160_43 (sequence is synthesized)
ccatggatatctctggcagagcgaagggcatgaatacaaacacaaaggtgcaaagagcctgggagtgagggcaactgtaagtggtttccgttggcactattgaagtaggctgagggaaga

SEQ ID NO: 930402 - DNA, 120 bp, Artificial Sequence
  ENSG00000232160_44 (sequence is synthesized)
gaagtgcaacggaaaatatgaggcacttgttgatttctttacaactttgcccagattcaggcctataaccatccttcaatctgaattccttttgttttatgtaatagcttcaagtctgaa

SEQ ID NO: 930403 - DNA, 120 bp, Artificial Sequence
  ENSG00000232160_45 (sequence is synthesized)
tgatatggtttggttctgtgtcccaacccaaatctcatattgaattgttatccccacgtgttgagggagggaagtgattggattatggggcaatttcccccctgctgttctcgtgctagt

SEQ ID NO: 930404 - DNA, 120 bp, Artificial Sequence
  ENSG00000232160_46 (sequence is synthesized)
gagtgagttctcatgaggtctgatggttttataaatggtagttttcctgtactcactcacgctctctctctgccaacatgtaagatgtgcctgcttccccttccgctatgattgtaagtt

SEQ ID NO: 930405 - DNA, 120 bp, Artificial Sequence
  ENSG00000235795_0 (sequence is synthesized)
gctagtaactgcacagacccatctgaaagccctttgatagatgtaatggatttgagcatggactgtgtgtcagacgctgcgtcagagactgggataccacagggacctgaccagatataa

SEQ ID NO: 930406 - DNA, 120 bp, Artificial Sequence
  ENSG00000235795_1 (sequence is synthesized)
actctgctctctagaagcttgacagtccaagcatcacaaatatttgattcggtatactttttaatcactcatgctcaactgaactatttggtaaaaggtaaaaaagcagaatcactctac

SEQ ID NO: 930407 - DNA, 120 bp, Artificial Sequence
  ENSG00000235795_2 (sequence is synthesized)
ggttcagccaaagtttgtttttgcaaaaataaacatagtgcaactgaggagtctttaatagacttatgcagatttcctaagtgattatagaagtgtttcttataaaggatatcaaagagt

SEQ ID NO: 930408 - DNA, 120 bp, Artificial Sequence
  ENSG00000235795_3 (sequence is synthesized)
ttgcttggaaattatagcagagttaatattaaatacatatttttaaatgttcttggaaccagcattgaaagcctttttcaggtttgaaatatcattatttatttaatatttctacttgtc

SEQ ID NO: 930409 - DNA, 120 bp, Artificial Sequence
  ENSG00000235795_4 (sequence is synthesized)
tgtcacattatggagaaaaaaacgaatgcctgttattaagaatgtggcctccctataatcaatggtgttagtcaactttcagatttcctttaaattacgtttctaagattttaaaaattt

SEQ ID NO: 930410 - DNA, 120 bp, Artificial Sequence
  ENSG00000232164_0 (sequence is synthesized)
ataaagtacacttcagcttcgacatcagtagaccaaacactgggtgtttcaagaagcaaggacatttaaatgaaaaaagaagaggaagaaagccctctgttaatttgaagctgagcatct

SEQ ID NO: 930411 - DNA, 120 bp, Artificial Sequence
  ENSG00000232164_1 (sequence is synthesized)
gatccactaaaattgacaaaataaatagcataatcgtatacctggggattcatgccgaaacttctgaatcagacaccctggggctgggaactagtcagccagggtgtcttctggatcaca

SEQ ID NO: 930412 - DNA, 120 bp, Artificial Sequence
  ENSG00000232164_2 (sequence is synthesized)
caccctggagaatgtggactttaacatttcttctgagtaattttggcctccagcctgagtaaggatagttctagacctatagttcttaaacctagatgagtaattataagaattacctag

SEQ ID NO: 930413 - DNA, 84 bp, Artificial Sequence
  ENSG00000232164_3 (sequence is synthesized)
cccacttgcaccacaagattatatcccacacctggctcggaggatcctacgcccgcggagtctcgctgattgctagcacagcag

SEQ ID NO: 930414 - DNA, 120 bp, Artificial Sequence
  ENSG00000250838_0 (sequence is synthesized)
ttcttcccttcggtccgaaacccctccgagagggctgagtcggggacagacaggtggagtttccagagcctgcaccacccgggacactgctggcagctctctaggccctagagtctgagc

SEQ ID NO: 930415 - DNA, 120 bp, Artificial Sequence
  ENSG00000250838_1 (sequence is synthesized)
aagacagcacgcagcacctttgtccccctccccgttttcccggcgcgctgaaaagaaatggggctgggacttaggggcgggggagggcttccaactcggtttctctatatcctccaccac

SEQ ID NO: 930416 - DNA, 120 bp, Artificial Sequence
  ENSG00000250838_2 (sequence is synthesized)
cttagagcccaccctccccaatgagcgttttgttctacccagccacgtgtttgtcggatttttgtttttgtgatttttttttcccatggaacaacaagaattaaagtactaggagctatt

SEQ ID NO: 930417 - DNA, 120 bp, Artificial Sequence
  ENSG00000254160_0 (sequence is synthesized)
gaacctcaccgtccacttccacctatggggcatccgccactccctctctcctatgcccagtcctcttcccaggcgccctgaactcagccattacccaggctggcaccgcctcccacactg

SEQ ID NO: 930418 - DNA, 90 bp, Artificial Sequence
  ENSG00000254160_1 (sequence is synthesized)
ctgatctcaaaggtcttccgagccaccgacgtggactatcagactcaagacatggaccatcactcccacactgatctcaaaggtcttgcc

SEQ ID NO: 930419 - DNA, 81 bp, Artificial Sequence
  ENSG00000254160_2 (sequence is synthesized)
aggtcttcccggccaccgatgtggaccatcactgccatcactcccacactgatctcaaaggtcttgccagccaccaatgtg

SEQ ID NO: 930420 - DNA, 60 bp, Artificial Sequence
  ENSG00000250831_0 (sequence is synthesized)
tctcctctgggactacaggcacttagcacttgctagaggcgagcctgaataagtccctat

SEQ ID NO: 930421 - DNA, 120 bp, Artificial Sequence
  ENSG00000250831_1 (sequence is synthesized)
tagaggcgagcctgaataagtccctatcctcaaggtgttgacaacaagagatcatctcaccaataacatccatgaaggtataagagatgtacacgtttgtgatgactcaagaataaattc

SEQ ID NO: 930422 - DNA, 120 bp, Artificial Sequence
  ENSG00000253503_0 (sequence is synthesized)
atcacgtcagagtcaccttctattataaagacacagagtgaatatttctacattgttctttgcatcaccagccactactatggaggatgtattttgtaggctgagaccaggttatgtgct

SEQ ID NO: 930423 - DNA, 120 bp, Artificial Sequence
  ENSG00000253503_1 (sequence is synthesized)
gtgctccatgtacaagaaacgataggaaatgaatcagagttcctgttgctccagattctcaagaacatatgatgtcatcagtgttttaggttttggtcattacaacaggcattattggca

SEQ ID NO: 930424 - DNA, 120 bp, Artificial Sequence
  ENSG00000253503_2 (sequence is synthesized)
gaatttatatagaatattttcaatctgtggttggttgaatccacagatgcaaaacccacagacgtgagggctgattctacgtgcaaactggccacaaaagtcctggctgtcttcaaagct

SEQ ID NO: 930425 - DNA, 120 bp, Artificial Sequence
  ENSG00000253503_3 (sequence is synthesized)
gcatcctaacgagggcagagtacctgaagttcaaattctcagttgctgaaatacaagtggaaaccctattctaagagtttgccaatgcaatctaagatattggtatgatttggttgccca

SEQ ID NO: 930426 - DNA, 120 bp, Artificial Sequence
  ENSG00000253503_4 (sequence is synthesized)
atctcagcccagttcggaagaaagaaggcactctgggtttttgagttgttaggcttcttatgctgaatctttctcatttttgtgggattattttcattcaatatttgaggtgctgatctt

SEQ ID NO: 930427 - DNA, 120 bp, Artificial Sequence
  ENSG00000253503_5 (sequence is synthesized)
cttagattcttagaccataaagtatttcctgaaggaatagagggctccaagtgggatgatttgagtagttcattttggtggcttttgttatggaaatatgtgaggatggttgaactttag

SEQ ID NO: 930428 - DNA, 120 bp, Artificial Sequence
  ENSG00000253503_6 (sequence is synthesized)
tactgatttttcattcacatgacaagaatgcctacataaatcatgttgctctcccatttaagtaattactaggtttgaagccagttaaaacaaatgatagaagatattttaggttaaaca

SEQ ID NO: 930429 - DNA, 120 bp, Artificial Sequence
  ENSG00000253503_7 (sequence is synthesized)
acatggttttgctttcattgacatcaaccataataggcctaaaaatataagtgcagaaaagcatgttagtatcttttatttctttcaagtatattcatttagttgactttttcaaatata

SEQ ID NO: 930430 - DNA, 120 bp, Artificial Sequence
  ENSG00000253503_8 (sequence is synthesized)
ttttagcttattttgccttctgataagaataggacaattgaagaaaaggttttctcacttccttaacattatgaaagaattttattttggaattgcctgagaggtaaatggaaaatatgc

SEQ ID NO: 930431 - DNA, 120 bp, Artificial Sequence
  ENSG00000253503_9 (sequence is synthesized)
tcagttggcccaaattctttattaaacaacattataagtgaaaatctgttttccctgctattatctgagtgctatgcttaaagaaacaaataaacatcctgacagttgacagacaggaaa

SEQ ID NO: 930432 - DNA, 120 bp, Artificial Sequence
  ENSG00000253503_10 (sequence is synthesized)
aaagggggctgaaaccagggagccgagtggtattgctcagcggatctcactcccatgaagcccaacaagctaagatccactggcttgaaactctcactgccagcacagcagtctgaagtc

SEQ ID NO: 930433 - DNA, 120 bp, Artificial Sequence
  ENSG00000224349_0 (sequence is synthesized)
gggcaccgggagagcagcgcgccgcggcccctcgcctccctcagagcgctccgcaccgccgtccccaccgaccttcaacggggccggggccaggctccgaccgccagcagtcggctcctc

SEQ ID NO: 930434 - DNA, 120 bp, Artificial Sequence
  ENSG00000224349_1 (sequence is synthesized)
agtgtttgcatcttgggagatgtgggtgctgatctggttgtttcttggtttatgacgccaaaaagggcgggagggggctgatgaagtgaagcctttcgctaatacattccgttaacagaa

SEQ ID NO: 930435 - DNA, 120 bp, Artificial Sequence
  ENSG00000273219_0 (sequence is synthesized)
gaagacagaaagaagctcaactccctcccccgacttactttcaccttctttcttctgcaggcctagggtgaggggtgggtgggtatgggagaagctttggctgagaagttgaagttttga

SEQ ID NO: 930436 - DNA, 120 bp, Artificial Sequence
  ENSG00000273219_1 (sequence is synthesized)
ggagagctacgggatttgcctgggatatcatcaagggtgatgtcatcaagaaatccaatatgctatgattgaagatagtggtggagaaaaataaagcgatttcctgatggcacccttcca

SEQ ID NO: 930437 - DNA, 81 bp, Artificial Sequence
  ENSG00000273218_0 (sequence is synthesized)
atggtctcgatctcttgaccctgtgatccacccgcttcagcctcccaaagtcctggaattacaggcgtgagccaccgtgcc

SEQ ID NO: 930438 - DNA, 120 bp, Artificial Sequence
  ENSG00000273218_1 (sequence is synthesized)
attacaggcgtgagccaccgtgcccaggcttggacctcttttgttcctaagtattttttatatgtttgatgctattgtaaaatgaagttttaacatttctttcgtttgttttttttttga

SEQ ID NO: 930439 - DNA, 71 bp, Artificial Sequence
  ENSG00000273218_2 (sequence is synthesized)
atgctattgtaaaatgaagttttaacatttctttcgtttgttttttttttgagacagaatcttgccctgtc

SEQ ID NO: 930440 - DNA, 70 bp, Artificial Sequence
  ENSG00000273218_3 (sequence is synthesized)
cacctcatgatctgccctcagcctcccaaagtgctgggatttcgggggtgagccaccgtgcccggactaa

SEQ ID NO: 930441 - DNA, 87 bp, Artificial Sequence
  ENSG00000273218_4 (sequence is synthesized)
tcgatctcttcacctcatgatctgccctcagcctcccaaagtgctgggatttcgggggtgagccaccgtgcccggactaaaaagccc

SEQ ID NO: 930442 - DNA, 62 bp, Artificial Sequence
  ENSG00000273218_5 (sequence is synthesized)
caaagtggtaggattacaggtgtgagctaccataaatttttttttttttttgagacgcagag

SEQ ID NO: 930443 - DNA, 82 bp, Artificial Sequence
  ENSG00000273218_6 (sequence is synthesized)
ccaagtgatcaaaagccactgaacccagcctatttaaaacatttttaattaaaaattttgggccgggtgcggtggctcacgc

SEQ ID NO: 930444 - DNA, 120 bp, Artificial Sequence
  ENSG00000273218_7 (sequence is synthesized)
aatcccagcactttgggaggctgagaatgtttttaatttcatttttgggttgttcgttgccagtgtacagaaatacaagtaagaggtttttgtgtgttgatcatggatgctaattttgtg

SEQ ID NO: 930445 - DNA, 120 bp, Artificial Sequence
  ENSG00000273218_8 (sequence is synthesized)
gtgtatgtgtgtgtgtgtgtgtgtgttcttcaggatttcgtatctataaaatcacatcatctgtgaatagatacagttttacttctttgattactgtcttccagtacagtgctggcattg

SEQ ID NO: 930446 - DNA, 89 bp, Artificial Sequence
  ENSG00000273218_9 (sequence is synthesized)
cacatcatctgtgaatagatacagttttacttctttgattactgtcttccagtacagtgctggcattgttgtaacaagacagggtcttg

SEQ ID NO: 930447 - DNA, 62 bp, Artificial Sequence
  ENSG00000273218_10 (sequence is synthesized)
gttgcccagactggagtgcagtggcacaaccatagcccactgcagcctcaatctcctaggct

SEQ ID NO: 930448 - DNA, 120 bp, Artificial Sequence
  ENSG00000273216_0 (sequence is synthesized)
cgtgaaagaggacatcaagtgaagggaaaaatcatggtaggaaagaaagatgaagccagcagtccccactcactgagctagaagacctggaacactagacagaggtggttctgagcttcc

SEQ ID NO: 930449 - DNA, 120 bp, Artificial Sequence
  ENSG00000273216_1 (sequence is synthesized)
ggatgtgcctcctcccccttcaggatttagctcctctacttcccctgggctggtgtgggcacattgtctgtgctttgacagtccctagatcccatgtgttctagaaccttctctcccaaa

SEQ ID NO: 930450 - DNA, 90 bp, Artificial Sequence
  ENSG00000273216_2 (sequence is synthesized)
gcagaacaaatctatctcagcctcctgacaagcaataagatttggaatatttgttgaggggataaataaatgaactccttagtcagtgca

SEQ ID NO: 930451 - DNA, 120 bp, Artificial Sequence
  ENSG00000273214_0 (sequence is synthesized)
atactgaggagaactgagagaggctaggtagctcccggtgcttccccaggcccccagccccatccctcagctgaggactgcaccttcctctcccacccaggctgtacctgtcactgccct

SEQ ID NO: 930452 - DNA, 120 bp, Artificial Sequence
  ENSG00000273214_1 (sequence is synthesized)
ccactccaccaggctcagcacacagtagggccttagtcagtttgcccttatgcctgtatgctctgggcagattcaaagcactttcccctaattacccacagggcgccatctctccaccac

SEQ ID NO: 930453 - DNA, 120 bp, Artificial Sequence
  ENSG00000273214_2 (sequence is synthesized)
ctgtgcctcattgacccactcgaagtccatttattcttccttttgacacagtcctgatgccttgggtgcttccatttcctaggctggaggtgaattagaaagatgcatgggaggagagag

SEQ ID NO: 930454 - DNA, 120 bp, Artificial Sequence
  ENSG00000273214_3 (sequence is synthesized)
ggcccaggaagagagaagacaggtggtaagttggttttgtcgataacatttgcagccaaatttcaagggaggccctagagccactgtataacacagacgtgacacctatggggcgcttgt

SEQ ID NO: 930455 - DNA, 120 bp, Artificial Sequence
  ENSG00000273214_4 (sequence is synthesized)
tgaaggacacgcggatgctctgctggtttggtggctgtgatgacttcatgcaaatggaagctacatttgtatgacactttgttaaagcaaattaggtataaataaagattcatgcccaaa

SEQ ID NO: 930456 - DNA, 120 bp, Artificial Sequence; identical to SEQ ID NO: 654995
  ENSG00000273213_0 (sequence is synthesized)

SEQ ID NO: 930457 - DNA, 120 bp, Artificial Sequence
  ENSG00000273213_1 (sequence is synthesized)
gcgagatcgcgcaggagtttaagacggacctgcgcttccagagctcggccgtgatggcgctgcaggaggccagagaggcctacctggtggggctgttcgaagacacgaacctgtgcgcca

SEQ ID NO: 930458 - DNA, 120 bp, Artificial Sequence
  ENSG00000273213_2 (sequence is synthesized)
tccatgccaagcgcgtgaccatcatgcccaaggacatccagttggtcagccgcatccgcggggagcgggcctaaggtatatttttaagtggtcgatctaaaggctcttttcagagccact

SEQ ID NO: 930459 - DNA, 120 bp, Artificial Sequence
  ENSG00000273213_3 (sequence is synthesized)
gagaagcgcaagcgcagccgcaaggagagctactccgtttacgtgtaggaggtgctgaagcaggtccaccccgacaccggcatctcgtccaagaccatgggcatcatgaactccttcgtc

SEQ ID NO: 930460 - DNA, 120 bp, Artificial Sequence
  ENSG00000273213_4 (sequence is synthesized)
aacgacatcttcgagcgcatcgcgggagaggcgtcccgcctggcgcactacaacaagcgctccaccatcacgtcccgcgagatccagacggccgtgcgcctgctgctgcccggcgagctg

SEQ ID NO: 930461 - DNA, 120 bp, Artificial Sequence
  ENSG00000273213_5 (sequence is synthesized)
gccaagcacgccgtgtccgagggcaccaaggcggtcaccaagtacaccagctcgaagtaagagtgtgcaagggacgcaatagatcaaccacctaaccccaaaggctcttttcagagccac

SEQ ID NO: 930462 - DNA, 120 bp, Artificial Sequence
  ENSG00000273213_6 (sequence is synthesized)
ttcagtaatcgagaaagcagctgtaaacacttgtcagagcgtttgatagcttttggtcaggtagggagtgttaccatggtcacggatgcattcgggtttaggactaaggagtttcctgta

SEQ ID NO: 930463 - DNA, 120 bp, Artificial Sequence
  ENSG00000273213_7 (sequence is synthesized)
gtcctgtaatgagttggccctcagtcatccccgtctagtcttactgagttgcttgttatctgtgctacgagattagaaaggtttgactcgttctgggatatttgggagggatggagggaa

SEQ ID NO: 930464 - DNA, 120 bp, Artificial Sequence
  ENSG00000273213_8 (sequence is synthesized)
ggaggcggggggtggttctacaccccttcagcctttaacctgtatctttaaagtcgttttcctttttgtttctgaaagtaatgaacgagatgagatttcccatacagatgagaaaccctc

SEQ ID NO: 930465 - DNA, 120 bp, Artificial Sequence
  ENSG00000273213_9 (sequence is synthesized)
ctttcgtcccttagcctttttgcaagtcctgacttagccatcctcccctaacttccattccagtgacttcaaacagggagatatattgccaccaccccaccccctgtggagtatttggca

SEQ ID NO: 930466 - DNA, 120 bp, Artificial Sequence
  ENSG00000273213_10 (sequence is synthesized)
atatctgtagatgttttgggttgtcaggtgtgtgtgtgttgggggggaggtgctagaagtatccaatgggcagaggccaggagtgctaagcataaggcacaggacagtcctctgggggga

SEQ ID NO: 930467 - DNA, 120 bp, Artificial Sequence
  ENSG00000273213_11 (sequence is synthesized)
caaagagctacctggcctgtaatgtctatctttggtgattgagagaccccagcgcccaaagacatccctaaccttcaggatttaatcctcttcagtcaaacttttccttaaccctatcag

SEQ ID NO: 930468 - DNA, 120 bp, Artificial Sequence
  ENSG00000273213_12 (sequence is synthesized)
cccatgtttttcttggtgaaagctgagcacttcataggctgtttacaggtccttctccacaggaaaatacttcctccaggacaagaaccctgtcttggttccaaactttcccaattataa

SEQ ID NO: 930469 - DNA, 61 bp, Artificial Sequence
  ENSG00000273213_13 (sequence is synthesized)
acaagaaccctgtcttggttccaaactttcccaattataagagtcacctttgcgctggcgg

SEQ ID NO: 930470 - DNA, 80 bp, Artificial Sequence
  ENSG00000273213_14 (sequence is synthesized)
gcttgttaaacctgcttccaggtgcttctcttgaggtttcctgattcagcgagactggaggtgggacctgacgaggtggt

SEQ ID NO: 930471 - DNA, 120 bp, Artificial Sequence
  ENSG00000273213_15 (sequence is synthesized)
ctgattcagcgagactggaggtgggacctgacgaggtggttggtttttagtgttctcaggagtgtggatgttttaataggtgttgggtcctcatgttaatcgacctgtgggtgtgtcaca

SEQ ID NO: 930472 - DNA, 120 bp, Artificial Sequence
  ENSG00000273213_16 (sequence is synthesized)
gtctttgtgtcacagatgttctgagaaaggaaacaatttgaggatgagtggaggggaatttgtggtgtagagaaggccacagttaatatgtggggtgaatttctgaagacctctcagttc

SEQ ID NO: 930473 - DNA, 120 bp, Artificial Sequence
  ENSG00000273213_17 (sequence is synthesized)
aaaacttgaataactcaagactcatcctgacaaaagccagtggatgtttcttttgccaaataaaatatacccttggtgcaactggaaaatcttagcttataattaacttgacagcctttg

SEQ ID NO: 930474 - DNA, 120 bp, Artificial Sequence
  ENSG00000273213_18 (sequence is synthesized)
aaattaagccattcttgataaatcttgggggaattaacaactttgtgcttaaaatgaattttactaatttttatgatgttgaagttcaaatttacacccaattaaaagatataaaatgtg

SEQ ID NO: 930475 - DNA, 120 bp, Artificial Sequence
  ENSG00000273213_19 (sequence is synthesized)
gaatccaaagagtggcaaacaagaaagatgacagagtcggaagaccttaagatttcttttctttggtcaagaactcattacacaatggatgatacatcttaggtggccctactaaaaaga

SEQ ID NO: 930476 - DNA, 120 bp, Artificial Sequence
  ENSG00000273213_20 (sequence is synthesized)
gacacaagaatctagagactatctcactgtcaaccaatccaaggaactttgctttagatggccaaagccagaaacagcaaagtagaagaactactagagctttaagcagttccttagtat

SEQ ID NO: 930477 - DNA, 120 bp, Artificial Sequence
  ENSG00000273213_21 (sequence is synthesized)
gggggagagagagatatctaggtactggagcagcactaggcactcagaagaaggaacacttggagcaaaaaatgaaggatatagattagtgaagtgaagtcaggagcaaatgatctcagt

SEQ ID NO: 930478 - DNA, 120 bp, Artificial Sequence
  ENSG00000273213_22 (sequence is synthesized)
tgctttacatgatcaaaggacaataactgcaaattgccagagggtaggtgaagctccatatcactttttaatattagtgttttaaacacctaggaatagaatatacctaaagataatagc

SEQ ID NO: 930479 - DNA, 120 bp, Artificial Sequence
  ENSG00000273213_23 (sequence is synthesized)
ttgatttccccacacccacctttgcaatgttttgattttgcacaagtcttggtttctagtttgtgggattatcatttttcattgcattgaaggaaaattctttaggccaggagggagtct

SEQ ID NO: 930480 - DNA, 120 bp, Artificial Sequence
  ENSG00000273213_24 (sequence is synthesized)
aagacttcagacacagcacagatacgatcctgggcaagggtcattcagtgttcttaagaaaattctaaatcctaaggtgtgatggttaatattaggtgtcaacttgataggattaaagga

SEQ ID NO: 930481 - DNA, 79 bp, Artificial Sequence
  ENSG00000273213_25 (sequence is synthesized)
ggagaggaagactcaccctcaatgggggttgacaccatccagtcggctgccagggtagctacaacaaaacaggagagag

SEQ ID NO: 930482 - DNA, 120 bp, Artificial Sequence
  ENSG00000273213_26 (sequence is synthesized)
cagtcggctgccagggtagctacaacaaaacaggagagagaaggtgggcgggctaagctggcttgcagagttctggctttcatccctctcctgtgctggatgcctccatccattcctcct

SEQ ID NO: 930483 - DNA, 120 bp, Artificial Sequence
  ENSG00000273213_27 (sequence is synthesized)
tctttggcctttggactcttggacttaacaccagtggcttgcctggggcttttgggccttaggccacagactgaaggctgcactatgggctttcctactcttgaggcttttggactcaga

SEQ ID NO: 930484 - DNA, 120 bp, Artificial Sequence
  ENSG00000273213_28 (sequence is synthesized)
actcttgaggcttttggactcagactgaaccactactggcttctttcttcctcagcttgcagacggcccactgtaggactttgccttgtaatcatgtgagccaattctccttaataaact

SEQ ID NO: 930485 - DNA, 120 bp, Artificial Sequence
  ENSG00000273212_0 (sequence is synthesized)
catcatggagaacaccttgagtgagtgctctaatttcaaggagcagagggcacagcaatataagtcaagtggtctggtactcacgcggaagcccagctctccagcatagccactgtggtc

SEQ ID NO: 930486 - DNA, 120 bp, Artificial Sequence
  ENSG00000273212_1 (sequence is synthesized)
gaagcatggctggaagggacgcagaggatatgactacaccaacactagcagaggccacccacgagccactgccaggaactcaaaagcagcatgcagcaggacagcaaaggacactgagga

SEQ ID NO: 930487 - DNA, 120 bp, Artificial Sequence
  ENSG00000273212_2 (sequence is synthesized)
taacacttactgtcgactcctcatgctggacttgtctttcgggttctttgtagcccaggggagcatcaaagtccacctgtgtttccaggattttaaaagtaaaatattgagacatgacca

SEQ ID NO: 930488 - DNA, 120 bp, Artificial Sequence
  ENSG00000224347_0 (sequence is synthesized)
aggccagtgactgagaaaaataaaattcccaggatgctatttccagacttgtgtattcaaaaaaataacaaaacggtctgatgggtcaaagcagtacaagagttcactgccacaaaggaa

SEQ ID NO: 930489 - DNA, 120 bp, Artificial Sequence
  ENSG00000224347_1 (sequence is synthesized)
taggtcatatccttcattttatggaatgaggaaacagagctctccagaaattacacaacttgcccagggtcacccagattgatgttggtggcaaaaccagcaccaagatacacactatcc

SEQ ID NO: 930490 - DNA, 120 bp, Artificial Sequence
  ENSG00000224347_2 (sequence is synthesized)
ctggaccccagtctaaggcttattccaccagcctgcctgacccttgtactaagcaggaggtctcctccagaaaatagtacaccatctgggactcaatcaaaatggtctgtcttaataaaa

SEQ ID NO: 930491 - DNA, 120 bp, Artificial Sequence
  ENSG00000224347_3 (sequence is synthesized)
gctatttccagacttgtgtattcaaaaaaataacaaaacggatccactttaataagcccatcaaggtctttttttctttgaaaaaggaaattaattttaatgaatgatgttaaagtatag

SEQ ID NO: 930492 - DNA, 120 bp, Artificial Sequence
  ENSG00000273210_0 (sequence is synthesized)
gaccagcgttgggaaattaggctggagccatcatgaaaactttttcaggcagtgcacgctcgcctgtgcctgcccatctgcttccaacctctccccacctttcggggcgcagcctgcctg

SEQ ID NO: 930493 - DNA, 120 bp, Artificial Sequence
  ENSG00000273210_1 (sequence is synthesized)
tccagagtcttaattcgcctgcttgtccttaaccatcaaaactctttattaatatcctggctttcgctgatttttattctccctaccccttctccctagctatgtattgctgggtgagct

SEQ ID NO: 930494 - DNA, 120 bp, Artificial Sequence
  ENSG00000273210_2 (sequence is synthesized)
cccgaggcttgaaaacccaagtatgctgtgctggctgcgttgtaatcggtagagagccaccagctaaaaattgtattttgtaccaactctaatggcatttaataaatgtatacctaaaaa

SEQ ID NO: 930495 - DNA, 120 bp, Artificial Sequence
  ENSG00000264727_0 (sequence is synthesized)
aatacccagctagttgcaaaaccttcttttattgctgcaataggaccttttcatgtgtctaaagcataatttattcagtgagtaccctgctgttggccatggaagatagtagtctttttc

SEQ ID NO: 930496 - DNA, 120 bp, Artificial Sequence
  ENSG00000264727_1 (sequence is synthesized)
actattgcaaacaatgtttcaataaataacaaaatttttttcacacctaaaacagcaggtattttatatagcatttataattgtaaataagatcactattttcttctctctttctctctt

SEQ ID NO: 930497 - DNA, 120 bp, Artificial Sequence
  ENSG00000264727_2 (sequence is synthesized)
ttgtaaataagatcactattttcttctctctttctctctttttcctccttctctcactaattattgctgatattaaaagattaattcttgtagtctgcctgtgaatagccactgcactcc

SEQ ID NO: 930498 - DNA, 120 bp, Artificial Sequence
  ENSG00000264727_3 (sequence is synthesized)
aaaactaaaaactactcataatcttactcaaaatgactagtttacattttggtctttatttgcatatatacctacatttttagaataagattctactttacacagtattcctgttgtgaa

SEQ ID NO: 930499 - DNA, 120 bp, Artificial Sequence
  ENSG00000264727_4 (sequence is synthesized)
ttctgtcattgccaaccttcttgaagattcttactagtttccattttcttccactgattctcttgagttttctagatctatattcttatcatctgataacgaggatgatcttgcctcttt

SEQ ID NO: 930500 - DNA, 120 bp, Artificial Sequence
  ENSG00000264727_5 (sequence is synthesized)
cttttaagtagtcttactttttatttctttttcttgtttaactgcactggctgacccgaaatgaggctaaatgatactgaggacagttggtatcagtgtctcacttctttctagagtgga

SEQ ID NO: 930501 - DNA, 120 bp, Artificial Sequence
  ENSG00000264727_6 (sequence is synthesized)
aatggttctttgtgtggtttatttttgcctgatggtgactgttggtttgtaattgatcttaactgaggagtaacaaacatggtaaaacatttaacacagaatctttcaaataataaatac

SEQ ID NO: 930502 - DNA, 120 bp, Artificial Sequence
  ENSG00000264727_7 (sequence is synthesized)
acaacaaatgtttttgttattattatatttttgtcatggtaaagaggtatactttaatttcctgtcattaagatttatttttaaattgagaatggatgttgaattttgactcctgccttt

SEQ ID NO: 930503 - DNA, 120 bp, Artificial Sequence
  ENSG00000264727_8 (sequence is synthesized)
cttaaggggatatctatttaaataattacttatatttttctttaaactgttaatagaatgatatattagcattgatatagttgtctttcttggactgcaaaaccaattttgtcaaaagtt

SEQ ID NO: 930504 - DNA, 120 bp, Artificial Sequence
  ENSG00000264727_9 (sequence is synthesized)
tgttacccttttgaaataatgctaggttttattttctagtattttattagagtatgtgcatctattttcatgagttaaactgtcctctatcatgatttttcagagatagctttgttaaga

SEQ ID NO: 930505 - DNA, 120 bp, Artificial Sequence
  ENSG00000264727_10 (sequence is synthesized)
ttccccagtatgttctgttccaagaaattttgaaggagcttacatgtgaaattgccctggaaaagaatcttttaaaatataaatatacatacaaatatatatatatgtatatatatatac

SEQ ID NO: 930506 - DNA, 120 bp, Artificial Sequence
  ENSG00000264727_11 (sequence is synthesized)
acaatattttccatttattctataattagtacaacttttagactttcttctcagtttgaattaattttggcaattgtactttcaaagaaaatcattctgattccattgagtttattggca

SEQ ID NO: 930507 - DNA, 120 bp, Artificial Sequence
  ENSG00000264727_12 (sequence is synthesized)
tagagctgcaaacagcctctgattctgaaatagctcttctggatcagtgattatataccttttttgttttgtatcactgagtgcttgtgctctctctcttatttctgactgaagttgcta

SEQ ID NO: 930508 - DNA, 120 bp, Artificial Sequence
  ENSG00000264727_13 (sequence is synthesized)
aaaatttaattagttgatagaaccagttagtgtacaaattagtgttggattactaattattttaatttattatttccttttaaatataaaagaacttgcagctgtaagttcttctctaac

SEQ ID NO: 930509 - DNA, 120 bp, Artificial Sequence
  ENSG00000264727_14 (sequence is synthesized)
agtaggtataactgaatcctagatgtgttcatatgtaatatttttgttactggtgtgttctaaatatctgtggtggttgttttgaattatgcttttgcccaaaggttactcggtgaagac

SEQ ID NO: 930510 - DNA, 120 bp, Artificial Sequence
  ENSG00000264727_15 (sequence is synthesized)
tgtttcttaaatttcaattggattggctctttgttcatattttgttattaaagtctaattttattgcattttaggtagattttgtgacctaaattatacccaattttggaaatttgtagt

SEQ ID NO: 930511 - DNA, 120 bp, Artificial Sequence
  ENSG00000264727_16 (sequence is synthesized)
ttttgtgtgtgtatgcatggcatatgtacaactaatttttgtaactattatatgggcacttaagagtatcttcacaatgtataattaatatatcatgattaggagaaagtgtgtttatga

SEQ ID NO: 930512 - DNA, 87 bp, Artificial Sequence
  ENSG00000264727_17 (sequence is synthesized)
gggcctcaaatattttctctctctatatatttatttttgttctcttgattaaagttgttaggaatgtgttaatttcttccactgtga

SEQ ID NO: 930513 - DNA, 120 bp, Artificial Sequence
  ENSG00000264727_18 (sequence is synthesized)
attaaagttgttaggaatgtgttaatttcttccactgtgattgtgttttgtattttcttgcattatgccatggaaattgctggtttcctaggtcaaaacaattaaatattgtcagttaca

SEQ ID NO: 930514 - DNA, 120 bp, Artificial Sequence
  ENSG00000261534_0 (sequence is synthesized)
acatccaagtatgacaagttagtgggaccaatctggggagggaagcatcaggagaacaggacagacccacagaactgggcccacctaccctttctttgggtgtgccccggggcagcctcc

SEQ ID NO: 930515 - DNA, 120 bp, Artificial Sequence
  ENSG00000261534_1 (sequence is synthesized)
ttgctcctgccttgctgacactgcctgctcccttccttccaacctcctagggggacgggctcagcatttctgttgttaggggcgggagctttgtcctcacggcctggccaaaatggagcc

SEQ ID NO: 930516 - DNA, 120 bp, Artificial Sequence
  ENSG00000261534_2 (sequence is synthesized)
tgcaataggtgcttatacttataaagacccgctagattcagtgcagctgttagcaagtgctggtcccaacagacccctcccagtgggcagaggcagggcctccaggagagagcagcatcc

SEQ ID NO: 930517 - DNA, 120 bp, Artificial Sequence
  ENSG00000261534_3 (sequence is synthesized)
atccctaaaacaaaccacctggcttcctcttacttctcctcccagcctctgtccagtcccccaaactcggacacggtctctcgcctgggcttccgctgcctccctgcctctcacccctcc

SEQ ID NO: 930518 - DNA, 120 bp, Artificial Sequence
  ENSG00000261534_4 (sequence is synthesized)
accctaccctccatctccataggtctggaaggaacttggagagccacagagctgacgtccagtcacctattgaaagcagcccttatcggcacccttcccttctttccatcctaaggcccg

SEQ ID NO: 930519 - DNA, 120 bp, Artificial Sequence
  ENSG00000261534_5 (sequence is synthesized)
cacctgacccctgcacctcaggaccaggctctgcagcctccctgagcccctgtccgacccctgctcccaggactgtttgtatctgttgtcatgagacaggaggaggatgtgctatttccc

SEQ ID NO: 930520 - DNA, 120 bp, Artificial Sequence
  ENSG00000261534_6 (sequence is synthesized)
accacccttgtcttgctggcccctctgcctggaatggccttcctctgcccagtggcaaacagactttcaaggttcagttccagtgtccccgctgcaatcccccaaacagagtgagcggtt

SEQ ID NO: 930521 - DNA, 120 bp, Artificial Sequence
  ENSG00000261534_7 (sequence is synthesized)
ccttccatctacttccaagaactggaaagttcctgtcttgtcgcgcgcactgtgggaccacagcattggttcccacccagctgtgcgttcctgcagggtcaggcatgtgctgggtccacg

SEQ ID NO: 930522 - DNA, 120 bp, Artificial Sequence
  ENSG00000261534_8 (sequence is synthesized)
ttggcacagagcaggggccagcaggtgcttgctgtgaataggaacgtttagcagaacccgggagaggagacagtgttaccacacttgctctccactttgcctgcgggtgcctttaagaag

SEQ ID NO: 930523 - DNA, 120 bp, Artificial Sequence
  ENSG00000261534_9 (sequence is synthesized)
cacagatttctaaaccttgccaagccgatccgctgaacacctctacattcccggctgccttgttggctccctgggacacggcagctgtcctgtgtccgtaaacagataatagctcctccg

SEQ ID NO: 930524 - DNA, 120 bp, Artificial Sequence
  ENSG00000261534_10 (sequence is synthesized)
actctaggtgtctctccatggccctttgtggccaggcctgggctgcgtacccatgggcaccccctcccattcaatctcacagacaggacaccaggctgggcagtcctcaccaacacccct

SEQ ID NO: 930525 - DNA, 120 bp, Artificial Sequence
  ENSG00000261534_11 (sequence is synthesized)
ccagccggctagccagcctcctttcaactctgcattgccctgagtttgtgtggggttgttgagttcccagcaggtcctccggatgtgcatgtaggtagtcaggggaatggagtgggagga

SEQ ID NO: 930526 - DNA, 120 bp, Artificial Sequence
  ENSG00000261534_12 (sequence is synthesized)
taggagcccagacacttgaaatggtgttccatgcctttctagaccccaggccctttcctgcatgattttatcagcacatgctcaatccttcacagtttacaaagcacttctagatccatc

SEQ ID NO: 930527 - DNA, 120 bp, Artificial Sequence
  ENSG00000261534_13 (sequence is synthesized)
caacccaccaaggatgaggatcactggcactctgttttcccaggcagggaagtggcttccaggaggcttagtgactgaccaaggtctcgaggtctcgtgctggtgaagtgcagagccagg

SEQ ID NO: 930528 - DNA, 120 bp, Artificial Sequence
  ENSG00000261534_14 (sequence is synthesized)
atccacctgagccccccggctggctccagatcccacactccttcctcggcacttcctcggttctgcacggtgcctcagcactccccaaaacatcccattttgcaggtgtggaaacccacg

SEQ ID NO: 930529 - DNA, 120 bp, Artificial Sequence
  ENSG00000261534_15 (sequence is synthesized)
gatctgttctcctgctgagcaccccaggaagggctccaggtctcccagccacttagtgagagtggcaagtcctgtctcacttgatctttgggagcataagacgagatcacagaaaatgtc

SEQ ID NO: 930530 - DNA, 120 bp, Artificial Sequence
  ENSG00000261534_16 (sequence is synthesized)
atcaatgtgaaagtgttttgtaaacgaaggcgctgctcaaacgtagtgttatcttcagcctggctactggcttcctacaaagtgtgaagggatgaaggtaaaagctctttcttgaataat

SEQ ID NO: 930531 - DNA, 120 bp, Artificial Sequence
  ENSG00000261534_17 (sequence is synthesized)
gttatccatcaagacagatgaaaccacactggtcagctcctcctgccctccccccaacgccccacctccccttcattcccacatgtttaaagacattcgtaggctgagaaatgattcctg

SEQ ID NO: 930532 - DNA, 120 bp, Artificial Sequence
  ENSG00000261534_18 (sequence is synthesized)
ctgctcctctgacacccggaatgtgccttgtgattggcagagtgtccctccagaatagcttaattttttccccatttcttgactaatgtcctctactccttggccctgtaattgagaatt

SEQ ID NO: 930533 - DNA, 120 bp, Artificial Sequence
  ENSG00000261534_19 (sequence is synthesized)
gggcttgcaatggccagcacacgagcatcttccctgaaagctcagaaatgatggctctcccggcagggagctggcattccccatggctgagagcgctgtcctcctcgcacggagggatca

SEQ ID NO: 930534 - DNA, 120 bp, Artificial Sequence
  ENSG00000261534_20 (sequence is synthesized)
ttcaccaccgtgtgtattaacctgaaatccacctcaccttgatggatatttttgccaatctcccatttggtttgatgaatgtgagagaaattttcccctatggcatatgaatttctccct

SEQ ID NO: 930535 - DNA, 120 bp, Artificial Sequence
  ENSG00000261534_21 (sequence is synthesized)
cacaaaataagtctaaatttttttctgttcctggagatgaaggagctctgcagaataggccacgtcttcatttacctttatctctagtagccaaaagtcttgatttttatataactggaa

SEQ ID NO: 930536 - DNA, 120 bp, Artificial Sequence
  ENSG00000261534_22 (sequence is synthesized)
aaaccacgcagcataatgcttatacacacacgcgcgcatgcatgcacacacacgcacgcacacacgatgcacacgcatgcacacacgcacacatgcacacacacgcatgtgcgcgcacac

SEQ ID NO: 930537 - DNA, 120 bp, Artificial Sequence
  ENSG00000261534_23 (sequence is synthesized)
accacacatgcacacacgtacacaatgcacacatgcacacacgcacacacatgcacacacgcacacgcatgcacacacgtgcgcacgcacacacacacactgagcaccgttgagctttgg

SEQ ID NO: 930538 - DNA, 120 bp, Artificial Sequence
  ENSG00000261534_24 (sequence is synthesized)
tagaaaatggcaaaattacgatgtttttctcatttctggtgattggcttccgagtgttatttagagagcggagtggagagggctctttgcagccctgcggtagtgtcttgtgctcaccaa

SEQ ID NO: 930539 - DNA, 120 bp, Artificial Sequence
  ENSG00000261534_25 (sequence is synthesized)
gaggctcacgggaaacatgtcctccaacatgaaggtgtttgctaagattccaaccaggacccagtcttgggccacagaacactgactgctcccccaagcccctcgcagaccgcagggata

SEQ ID NO: 930540 - DNA, 120 bp, Artificial Sequence
  ENSG00000261534_26 (sequence is synthesized)
ttttcccttcagaacctgttgcatcagaatggggaaagcgagggctgagaatcccagaggaggccgtgaactgttctggaaaagcgagggctttgcagtcagaccttcatatgcactttg

SEQ ID NO: 930541 - DNA, 120 bp, Artificial Sequence
  ENSG00000261534_27 (sequence is synthesized)
ttctatctgttgcgctctgcctaaatgaccacgggccagtgactttacctctctgatccctgctccttgcctagatagtggggatcacgtcgtaatgtatgtaaagaaccgggtgcggga

SEQ ID NO: 930542 - DNA, 120 bp, Artificial Sequence
  ENSG00000261534_28 (sequence is synthesized)
cttggcacctgggaagtgtcttaatacatgtctgtcgagaaaaggaagggtctcgacgtgcggaaacaagacggatgccaggaaatacgtctgcccacctccacgcccctgacagcggag

SEQ ID NO: 930543 - DNA, 120 bp, Artificial Sequence
  ENSG00000261534_29 (sequence is synthesized)
gctcctggaggtctggtgagaggccccacgtgctccagccccctccgctctgtgctgagctctgcctttaagagactgcagctcctgcctctaaaaagcctttcaaaattctttattaaa

SEQ ID NO: 930544 - DNA, 120 bp, Artificial Sequence
  ENSG00000261534_30 (sequence is synthesized)
ttttcatggcgcataaagtcaaggttctgttacttggcctcagttgtcttggcaacttcataaaacgcaataataaaacgaagctgagtgttgctaaacacaggctcattgtataaacga

SEQ ID NO: 930545 - DNA, 120 bp, Artificial Sequence
  ENSG00000261537_0 (sequence is synthesized)
acgtaatgtgctttaaagaaagaagaaggagataggacgacacttttgatacaaagaaatttttgaagacttgtggatagaagaagtaaccttgaaaagggcagagctgagccagacccc

SEQ ID NO: 930546 - DNA, 120 bp, Artificial Sequence
  ENSG00000261537_1 (sequence is synthesized)
ttttcagctgggtgctccctggaagatggatcttgccttgtggatgtttttctaccgtgacagaagatagaaaggatgaaatagaaagagtgcaattccaagagagaagaccactggttt

SEQ ID NO: 930547 - DNA, 120 bp, Artificial Sequence
  ENSG00000261537_2 (sequence is synthesized)
tgtttgatctagtccctgttgagtccctgtgcaccttcagaaccacatctagcaatagaaggcgctgcacggggaattctggaatgaataaaaacgcttggcagtaccgcatggcgagcc

SEQ ID NO: 930548 - DNA, 120 bp, Artificial Sequence
  ENSG00000261537_3 (sequence is synthesized)
gacttggatatttctcattttccattggccctggagtggaggaacagagccgaaaagtacgtggggggcaggcaaagctgcggtcagaggcagaccctgttggtgttggccgtgtcaacc

SEQ ID NO: 930549 - DNA, 120 bp, Artificial Sequence
  ENSG00000261537_4 (sequence is synthesized)
agctttgctggtttctattatagccctggtgtggcaaaggacactgtgtgactgtgagctcaggtcagcattgcgatcccttcaggcctctggcttgcaggttcctgttcaaccctctta

SEQ ID NO: 930550 - DNA, 120 bp, Artificial Sequence
  ENSG00000261537_5 (sequence is synthesized)
aatatgcttttgaagcccgtacgttcggtccacgccaactcctgtttatactggtgcgaagtgatgcctgctcagattctgggcgtttcacgggaaggtattaaatgtgttttgaaaata

SEQ ID NO: 930551 - DNA, 120 bp, Artificial Sequence
  ENSG00000261538_0 (sequence is synthesized)
gctcagaggttcacacaggtgcagcttcgaggcccacagtctgcgaccttcttgtttggagatgagaacttctcctggaagcagggattatgatgtctgattttcaaaaaatgccataaa

SEQ ID NO: 930552 - DNA, 120 bp, Artificial Sequence
  ENSG00000261538_1 (sequence is synthesized)
tccctgccctcagggaatttggaatctcgtgaggaactgctgtgggacactgccctcatcacgggtgagggagctctctacacactggccctccccaggccagatgcagctgccgtcttt

SEQ ID NO: 930553 - DNA, 120 bp, Artificial Sequence
  ENSG00000261538_2 (sequence is synthesized)
tccttgagcgaccagcagatggcagcctcgtcccaaaaatgcggtgatggccccactgggcttctgagctggccggatccccggagataattcgccacaaaagtgttgacccctggagtc

SEQ ID NO: 930554 - DNA, 120 bp, Artificial Sequence
  ENSG00000264729_0 (sequence is synthesized)
tacagaccagcaccgtccatggcctgttaggaaccgggctgcacagcagcaggattatgctaaagtcgccaggcaagagaccgagatgagcccacctcacaaacccagaaacctcagatc

SEQ ID NO: 930555 - DNA, 120 bp, Artificial Sequence
  ENSG00000264729_1 (sequence is synthesized)
atcaggagagaaatgccattatccactgaactatttcttgactatctcctgtatgctggtcagtttcactcacattgtctcatttaatctttgacaaactaaataaaagtgtgaagtaaa

SEQ ID NO: 930556 - DNA, 120 bp, Artificial Sequence
  ENSG00000267269_0 (sequence is synthesized)
aggaccgtgcttctcaacacttgatgtgcataggaagcacctagtgaccttgtcagaatgcaaattgtgattgggtaggtctgggatgaagcctgggcacctgcatttttaacagtgatg

SEQ ID NO: 930557 - DNA, 120 bp, Artificial Sequence
  ENSG00000267269_1 (sequence is synthesized)
tcttgctgtgaacagaatagtttctaatctccccaaatttggcaccatcctggagagaggctctgcagaaatgaaagttacatgtaacatcatagtaaagcttaatccctgttattttag

SEQ ID NO: 930558 - DNA, 120 bp, Artificial Sequence
  ENSG00000267269_2 (sequence is synthesized)
gtggctcatgcctataatcccaacactttaggaggctgaggagttcaagaccagcctggacaacgtagcaagaatccatctctacaaaaaattaaattagtcaggcatggtggtgggctc

SEQ ID NO: 930559 - DNA, 120 bp, Artificial Sequence
  ENSG00000267269_3 (sequence is synthesized)
tctacaaaaaattaaattagtcaggcatggtggtgggctcatgtagtcccagctactcaggaggatgaagcaggaggatagcttcagcctgggagattgaggctgcagtgagatatgatt

SEQ ID NO: 930560 - DNA, 120 bp, Artificial Sequence
  ENSG00000259265_0 (sequence is synthesized)
caggatctcacctggatttcaactctggattttaaattccccaatggcaagggacaagaagaggaggctcagagaggttaaataacttcccaaggccactgggtaagaaaccgtgggatc

SEQ ID NO: 930561 - DNA, 120 bp, Artificial Sequence
  ENSG00000259265_1 (sequence is synthesized)
tgaatgcagctgaggctgttggatgccagagcctagacacagagcacagcctcattcttcagcctcccaggtcctctaacgcagtgtgtccagagctgagcccgcctagaactgccttcc

SEQ ID NO: 930562 - DNA, 120 bp, Artificial Sequence
  ENSG00000259265_2 (sequence is synthesized)
ttttctcagacacctgggagacgtcctagactccatcctctctgttgccgcaaaacataaccagttgcttcttgagtctttctgtgatgtgcacctgcctccatcccatggccactgcct

SEQ ID NO: 930563 - DNA, 120 bp, Artificial Sequence
  ENSG00000259265_3 (sequence is synthesized)
gtatttgcaagaacctccccacaagccccctccaagctaccttccacagagcaactaaagaaatctaactagaatattaatggtcacagcttaataccaccatctcctcccagcgtgctc

SEQ ID NO: 930564 - DNA, 120 bp, Artificial Sequence
  ENSG00000259265_4 (sequence is synthesized)
aggggttccccatggcctgcggggttggtctcccagctcaggaggcccttcataatcaggccttcctcacctctctggcttcctcctggcaacttggctccagctatgccaaattacctg

SEQ ID NO: 930565 - DNA, 120 bp, Artificial Sequence
  ENSG00000259265_5 (sequence is synthesized)
tggtcccccaagcacagtataccctttcacaattctgtgtctttactgtgctgttcctcctgccagcaatacccttccttgtcttctctatccaacaaactcttattcatccctcaaaac

SEQ ID NO: 930566 - DNA, 120 bp, Artificial Sequence
  ENSG00000259265_6 (sequence is synthesized)
cctgatatggcatcttctcccttattctgaagctttttctgacctcccaaagacaaagggtttaatacctccagcaacacagccctgcactgtaatgaaagggctggctcccctagaaag

SEQ ID NO: 930567 - DNA, 120 bp, Artificial Sequence
  ENSG00000267263_0 (sequence is synthesized)
gctgcagatacccaggacccagcagagggcctggcacagcggggcccagggacacgtctgtgagtcaggctggcactcaagtgtgaatctggacaaagaaggtggcattgttggcattga

SEQ ID NO: 930568 - DNA, 120 bp, Artificial Sequence
  ENSG00000267263_1 (sequence is synthesized)
atgctcaggggctgggtgaagtcagctagggagaggggctctcaaggcaccaggactgactccgtgggtgagggcggaggaggagacggcagaggctgagagaatagccagagacaggag

SEQ ID NO: 930569 - DNA, 120 bp, Artificial Sequence
  ENSG00000267263_2 (sequence is synthesized)
gaaggtcagcagagccatgcacagaagcctggagaagatttgaggaaaggaagggctgggtggtcgtcattccctgcagctaggaggcaagggtgacccctgtgtgtttcattcttcaga

SEQ ID NO: 930570 - DNA, 120 bp, Artificial Sequence
  ENSG00000267263_3 (sequence is synthesized)
gagcttcatgccatggtgcaggcagcaggagccatggagcaggcctgcggggtcacggcctgcctgctgcttcctggtgtctctaccctgagctcaggggttgcttggatgccctgtgct

SEQ ID NO: 930571 - DNA, 120 bp, Artificial Sequence
  ENSG00000267263_4 (sequence is synthesized)
gcatccccccaggcggtgttccagagaggatgaaagtggctatctcaaggtgtgaccaggattctgagcagctcttctgggaggtgggtgcagtccaggtaggctgcctgcaaagctagg

SEQ ID NO: 930572 - DNA, 120 bp, Artificial Sequence
  ENSG00000267263_5 (sequence is synthesized)
accgagggagccacatccaaggcactgtgggttcccaaggcgatggcactgtgggcccactgcttccagacctcctcaactcccaggctcctgagcaggaggactcctggggcagggcct

SEQ ID NO: 930573 - DNA, 120 bp, Artificial Sequence
  ENSG00000267262_0 (sequence is synthesized)
gaataggaatggaatagacatgcctccctgagaagaaaggaagacagattctatactgttagaatttgaatctgtgttgcagggagatgaggaatttgaagccagactcttgggctgtta

SEQ ID NO: 930574 - DNA, 120 bp, Artificial Sequence
  ENSG00000267262_1 (sequence is synthesized)
atgtatggctaagtggtgatgtggtgacaaccttgaatgctagtcctggaggtcaaatcaccagcagctggtgccatgggaggctttgcttaggggacacggctgggttctgcctggatg

SEQ ID NO: 930575 - DNA, 120 bp, Artificial Sequence
  ENSG00000267262_2 (sequence is synthesized)
tcattgatttcaataaaatatttattggatccatagcatgggcctggcattgaccagtcatcaaaacacaattccctgccctcatggagtttctattctagaccatgcgggaggatagga

SEQ ID NO: 930576 - DNA, 120 bp, Artificial Sequence
  ENSG00000267262_3 (sequence is synthesized)
gcatatggacagtaaacaagaaatccagtccttccatgagacctcggtacacacagaactcctcctaccacgtgcaaccttattctcggctgagcaactcataaatcgcataacaaaaac

SEQ ID NO: 930577 - DNA, 120 bp, Artificial Sequence
  ENSG00000267265_0 (sequence is synthesized)
tatgggtccctgctggagaagctgtagcatcggtaggttccgctggccgctcaccatggcagccggctccatcaccaccagccagcgagagggcaagacaagagggctgacgagggacgc

SEQ ID NO: 930578 - DNA, 120 bp, Artificial Sequence
  ENSG00000267265_1 (sequence is synthesized)
ttgccctggtgataaactgatgccttgtttcctaaaaggaataaagccatgagttgcctttgttcagctcatgggcattcacccatgcacagaggaaaaataaaatctacgactcgggta

SEQ ID NO: 930579 - DNA, 120 bp, Artificial Sequence
  ENSG00000267265_2 (sequence is synthesized)
gaggcaggcaagaagtgaaatcagaagacgggaagtggctgaggggaacgtcttttctctctcctgctcagcccgaagtgaacagagatgagatcctggattgaatgactactatggaaa

SEQ ID NO: 930580 - DNA, 120 bp, Artificial Sequence
  ENSG00000267265_3 (sequence is synthesized)
gtgattgaccaagggccgctcaccatggcagccggctccatcaccaccagccagcgagagggcaagacaagagggctgacgagggacgctaccatcacagaggtcagttttgtaacctaa

SEQ ID NO: 930581 - DNA, 120 bp, Artificial Sequence
  ENSG00000267265_4 (sequence is synthesized)
caaagggaggtggtcgcaccgtggggtccactggaagttgcctaccagactcaggtcatcccaaacacaccctctagccatttggtgtggcatcggaaagaaaactaaggccaggtacgg

SEQ ID NO: 930582 - DNA, 120 bp, Artificial Sequence
  ENSG00000267265_5 (sequence is synthesized)
gatttgcagtcggaggcaggcaagaagtgaaatcagaagacgggaagtggctgaggggaacgtcttttctctctcctgctcagcccgaagtgaacaggtagcatcagagatgagatcctg

SEQ ID NO: 930583 - DNA, 120 bp, Artificial Sequence
  ENSG00000267265_6 (sequence is synthesized)
gattgaatgactactatggaaagtgattgaccaagattgtctccattcctccctggcttctccacagggccgctcaccatggcagccggctccatcaccaccagccagcgagagggcaag

SEQ ID NO: 930584 - DNA, 120 bp, Artificial Sequence
  ENSG00000267265_7 (sequence is synthesized)
accaccagccagcgagagggcaagacaagagggctgacgagggacgctaccatcacagaggctggtctcgaactcctgacctgaggtaatccgcccaccacagcctcccaaagtgctggg

SEQ ID NO: 930585 - DNA, 72 bp, Artificial Sequence
  ENSG00000267265_8 (sequence is synthesized)
caatcacccactccatgtttttcaggattataaacactagtcataaagcatgaactgttggatcacctgagg

SEQ ID NO: 930586 - DNA, 87 bp, Artificial Sequence
  ENSG00000267265_9 (sequence is synthesized)
aagcattgacaactgcgggtcaaaactgcccctggttgagactcactggctggagccaaaaggctgagctgcctgcccaacagcagc

SEQ ID NO: 930587 - DNA, 120 bp, Artificial Sequence
  ENSG00000275910_0 (sequence is synthesized)
gtagttatgtgagccagtaagatctctttgggcttaagccaatttgggttattttgtgatctgtgacccaaagagcccttcgtgataaatgtcaccaaagtgagagcctggatgtccagt

SEQ ID NO: 930588 - DNA, 120 bp, Artificial Sequence
  ENSG00000275910_1 (sequence is synthesized)
cctcataaggactctgtgcaggcccgaatggagccaccagcctcaccgccggcttacccctccacatgaagccatatgccatactgctcacagagttctttcaatctcccaatcttgtct

SEQ ID NO: 930589 - DNA, 120 bp, Artificial Sequence
  ENSG00000275910_2 (sequence is synthesized)
aacacttttatacacattatcgccctaggagggaagtgacttattatatccctattttattgagattttctttgtggaaggacttaaaatcagtgtttgtgagttgacttattacaagct

SEQ ID NO: 930590 - DNA, 120 bp, Artificial Sequence
  ENSG00000275910_3 (sequence is synthesized)
ttgaagagtatgtaatctctattacatgtatctaattgtgtcattgaattcttttatatacttattttctatctacttgatctgctgactcatgagaaatatattcaaatctcccaccaa

SEQ ID NO: 930591 - DNA, 120 bp, Artificial Sequence
  ENSG00000225768_0 (sequence is synthesized)
gttgccaaatggtgttttgggctcttcttttcccaagaagagactagcccattgtcaccaatgcagagctggaagctgaaattgttaaggcagaatgaaagggagaaaagcacgtcctga

SEQ ID NO: 930592 - DNA, 120 bp, Artificial Sequence
  ENSG00000225768_1 (sequence is synthesized)
gcaccaagaagaagataactcgaagttaagaagacgtgatggtactttggagaagaaagcaacacctgagtcaaattgcactgagcaacgttctttgttgttgtgagatattgataaatc

SEQ ID NO: 930593 - DNA, 120 bp, Artificial Sequence
  ENSG00000225768_2 (sequence is synthesized)
tccaggtcttcaacaaggggagtcgagaataggaaactcatttcaaatcatatctcaggtgacaagaaggttaccatatttgaggcagcctgttgggttgcctgacggcgaaaatctaca

SEQ ID NO: 930594 - DNA, 120 bp, Artificial Sequence
  ENSG00000225768_3 (sequence is synthesized)
gaacattctgccttacattgctggagactgtctcctacaacttgagtctttgatactggtgtcactttcaggagctctaagaatacgtcaactctcgcttctgagttggtgacccctcaa

SEQ ID NO: 930595 - DNA, 120 bp, Artificial Sequence
  ENSG00000225768_4 (sequence is synthesized)
actatgaaaaccaaaaatcatcccaggtaggttataagggattgaagagaaccagagagtggctcattcataggaagaagctgtgatttggcaccatgtgagcgtcgtcagagataaatg

SEQ ID NO: 930596 - DNA, 120 bp, Artificial Sequence
  ENSG00000225768_5 (sequence is synthesized)
aagatccaacactgccagagctttcaaatctccaagagaagcattcaacctgaattggtatgtgaaatgtctcagtttttaaaagttgacaaccaaatcagaaaataattttaaacacca

SEQ ID NO: 930597 - DNA, 120 bp, Artificial Sequence
  ENSG00000225768_6 (sequence is synthesized)
tgtaggcccaatgaaacacatctccaagccagatccaaatcacagaattccaatcacaggttgaaatccacttctctaaaatcttttcgtctctgaccgggcatggtggcacacgtctgt

SEQ ID NO: 930598 - DNA, 120 bp, Artificial Sequence
  ENSG00000225768_7 (sequence is synthesized)
agtcccagctactcaggaggccaaggtaggagaattgcttgagccctggagttcgacgctagcctgggcaacacagcacgactcagtctctaaaagtaaaaataaaatattttctccaaa

SEQ ID NO: 930599 - DNA, 120 bp, Artificial Sequence
  ENSG00000225761_0 (sequence is synthesized)
aaataactttgtagattacttggggaatcatgaagtttcatttgtaaagctgttgctacatcaaaagagatgtaagaacgagacagatatctatatctatagatagatatatgtattttt

SEQ ID NO: 930600 - DNA, 120 bp, Artificial Sequence
  ENSG00000225761_1 (sequence is synthesized)
tatggatgtgttgaagaaagaatgaagataaaaagaatgttttcctgagtgaattgtataagaatttgaaggaattgaggagctaaagagcatgtgcgcacagatatgaaaatgataaaa

SEQ ID NO: 930601 - DNA, 120 bp, Artificial Sequence
  ENSG00000225761_2 (sequence is synthesized)
ttaaattttcatttcatcttaaatcttcatcattttacttcagttggcatttaatttctgagcatatgctatgtgccagtcaccatgtgtcatggctatgagggaaaaaaacagtcacag

SEQ ID NO: 930602 - DNA, 120 bp, Artificial Sequence
  ENSG00000225762_0 (sequence is synthesized)
agctcctgagggcaaagcctgggcctcatcctcttgtggatccaggagagcagtcgctgaagagaaagaggaagaaaaggagtggctagaaaagaaagtttatttccactgcaggaagca

SEQ ID NO: 930603 - DNA, 120 bp, Artificial Sequence
  ENSG00000225762_1 (sequence is synthesized)
ctgcctcccatctgagaaatgtcccaagcaggaatcagtgctgcgatgaacttatgagtgaatgcatcaaaaagaccaagttgaacttatgagcgaatgcatcaaaaagaccaagacttg

SEQ ID NO: 930604 - DNA, 120 bp, Artificial Sequence
  ENSG00000225762_2 (sequence is synthesized)
ccttgcccacaaagatacaaggctgaggacaaagccatgaaggaaaagcctcactgaagaagaggaacctaagagaagcaggttctgctctgatgaactcccataaaggcattcccataa

SEQ ID NO: 930605 - DNA, 120 bp, Artificial Sequence
  ENSG00000225762_3 (sequence is synthesized)
aggtgtgggcctgagtgataatctagatatggtacagttgacatcaggtatatggcggcagccagaaattcaactttgtccatcagctctctgcacaacaggaaagatggtgaccttcca

SEQ ID NO: 930606 - DNA, 120 bp, Artificial Sequence
  ENSG00000225764_0 (sequence is synthesized)
gagactccgagagccgctctcccaggctccccgctgcagcggcggggctgccaggggcggcacactccagcgccagccagagagctagcgccgcttgaggccggccggggacgaggcgct

SEQ ID NO: 930607 - DNA, 120 bp, Artificial Sequence
  ENSG00000225764_1 (sequence is synthesized)
ttacactgcctgatgggtactagcagcccaccccagccagatggaggacaaggcctctccaagtctcaaggaaatgcacaatccttccttacctctggcctcagaactctcagcatctca

SEQ ID NO: 930608 - DNA, 120 bp, Artificial Sequence
  ENSG00000225764_2 (sequence is synthesized)
ctctggcctcagaactctcagcatctcattgattagcaacctcatctgtggcaaatctaaggaacaccttctacttaaaattgaagtcttctgggctgggtgtggtggctcattcctgta

SEQ ID NO: 930609 - DNA, 69 bp, Artificial Sequence
  ENSG00000225764_3 (sequence is synthesized)
tccccactcctgcccaccagaaaacaaccccctttgaggacatgcatgaaatttggtgccgtgactcag

SEQ ID NO: 930610 - DNA, 89 bp, Artificial Sequence
  ENSG00000225764_4 (sequence is synthesized)
ccctttgaggacatgacctcccttgggaggtcctcctgttctttgctccttgagaaagatccacctatggtcctcagaccgaccagccc

SEQ ID NO: 930611 - DNA, 120 bp, Artificial Sequence
  ENSG00000225765_0 (sequence is synthesized)
ctgtggaaggcaagcatacggaactccgtctggtatttcttcctggaaacaaacctactctcagaaaacccattgaagtccctgttttacaactaacataatgggcgtgtggaaatgcct

SEQ ID NO: 930612 - DNA, 120 bp, Artificial Sequence
  ENSG00000225765_1 (sequence is synthesized)
ctccatccaccagggggcagaaacgaaccctttgattggccagagatctttggacttcaactttgatttggaatagttgtaatttgcatagccttttcactctcagacatcactctttct

SEQ ID NO: 930613 - DNA, 120 bp, Artificial Sequence
  ENSG00000225765_2 (sequence is synthesized)
taaccatatagacttttcaaagaaacctcttaattctgtgtgaaactctaaacttcactctaccaataaacttccccacattcacactagagagatgtgatgggaatgctgggtcttaca

SEQ ID NO: 930614 - DNA, 120 bp, Artificial Sequence
  ENSG00000225765_3 (sequence is synthesized)
tatggtggtcttcatattttcgtggatttgtcttttgaggcatggagtgcctgacctttgcgtatgcaagattcgctagcatgtaaactctgtcactgtctcccaagaacacagaaacag

SEQ ID NO: 930615 - DNA, 120 bp, Artificial Sequence
  ENSG00000225765_4 (sequence is synthesized)
agttgggaaagggtctagttctgggtcaacgaggcttctgtgtcatctttgtatttttcacatctcttactcctcctgtccacatgtcaatgttagtattgtcatcgatatttagtcaat

SEQ ID NO: 930616 - DNA, 120 bp, Artificial Sequence
  ENSG00000225765_5 (sequence is synthesized)
ggacattttgaagtgtgagctctctgtggaaggcaagcatacggaactccgtctggtatttcttcctggaaacaaatagatgaatgcggtagcaatccaaagtctgtgctcctgtgccct

SEQ ID NO: 930617 - DNA, 120 bp, Artificial Sequence
  ENSG00000225767_0 (sequence is synthesized)
gcgagcctctactttgtgctagacctgtgaactcatagccctgagcataattatatgctgagtcctacgaatcttcctaggaaatcacatatatatgaatgaaacattttatatcgattt

SEQ ID NO: 930618 - DNA, 120 bp, Artificial Sequence
  ENSG00000225767_1 (sequence is synthesized)
ttaaatgctcactacatgcctctgaagcagtcaagcagtttattgtggtttaatgatgagatgcatgtgctgaggaggtaatcagaagaagtgagaaaaggagacggtgtgaaattttga

SEQ ID NO: 930619 - DNA, 120 bp, Artificial Sequence
  ENSG00000225767_2 (sequence is synthesized)
aaataaaagttcagcagggtcaagtaagttgtccaatgttcagtatgatggagtgggattcacatgcaagactaactaccactgaaccatttacttctgactttgctattctgcttccac

SEQ ID NO: 930620 - DNA, 120 bp, Artificial Sequence
  ENSG00000225767_3 (sequence is synthesized)
tcactgaacatctctctgagcaaggctcagcacctggtatgaaggctgaaacaagagcggttgcacagcaaatgttttgctataatgagagaatacatgaattaaatgcgaattaaactg

SEQ ID NO: 930621 - DNA, 120 bp, Artificial Sequence
  ENSG00000229618_0 (sequence is synthesized)
agatgctaagcctggaaacccacaggaaacatgttattcttcagtatttgcaaagcactgataaaaacatctctcttctctcaatcttgcttccttcttttcatttactaaataggcttt

SEQ ID NO: 930622 - DNA, 120 bp, Artificial Sequence
  ENSG00000229618_1 (sequence is synthesized)
tcatttactaaataggcttttgagcctcacaagactttgagattttatggatatgaaacctgctatcatttagcatcctgcctctgggaatagaagctggactgtactgctgccatctcg

SEQ ID NO: 930623 - DNA, 66 bp, Artificial Sequence
  ENSG00000229618_2 (sequence is synthesized)
cgcctgactggttttcatattttttgggtggagacggggtttcccgcctcccgaggtgcccggatt

SEQ ID NO: 930624 - DNA, 120 bp, Artificial Sequence
  ENSG00000229618_3 (sequence is synthesized)
tttgagcctcacaagactttgagattttatggatatgaaacctgctatcatttagcatcctgcctctgggaatagacatggattctcactatgacacccaggctggagtgcagtggcaca

SEQ ID NO: 930625 - DNA, 120 bp, Artificial Sequence
  ENSG00000229618_4 (sequence is synthesized)
ctcaagcaaggctttcatctcaacctccccaggagctgggattacagatggtgtcagaagcggggttcaaagtagagctttaatgacccccagaagtgctgagtgaacaagcaaggtacc

SEQ ID NO: 930626 - DNA, 120 bp, Artificial Sequence
  ENSG00000229618_5 (sequence is synthesized)
tgcaaggacccacttgtgtcctttgatctctcagagcagtggtatttacacacagatgctccatgatgggtcacatccaaacttatcataaagtcaaaaaattttctagaggctgataag

SEQ ID NO: 930627 - DNA, 120 bp, Artificial Sequence
  ENSG00000229618_6 (sequence is synthesized)
tccaagcatatggtgccagcatctggtgaggccttcttgctgtgtaatctcatggcagaagagtggaaggacaagtgagcacatgcaaaagggattgtacaaggtgctgagctggcttta

SEQ ID NO: 930628 - DNA, 120 bp, Artificial Sequence
  ENSG00000229618_7 (sequence is synthesized)
ttgagataactaccaactctgatgataggaccttaatctattcataagggtgctgcctatgatttgattacctcttaaaggccccacatcttaatacttttacaatggcaattaaatgtc

SEQ ID NO: 930629 - DNA, 120 bp, Artificial Sequence
  ENSG00000229618_8 (sequence is synthesized)
aacatgagtttcagtggagacaaacattcaaaccatagcaaaggcttagaatagaatcctaggaattccaaaattgccagacagagaaaaagatgacagctacagaatctgtgaaatatg

SEQ ID NO: 930630 - DNA, 120 bp, Artificial Sequence
  ENSG00000229618_9 (sequence is synthesized)
ttcatcaaagtaaaaagaaatccagacagtcagtgacctgtgagccaatggaagagagagaccacacagacttatcttttagtctccagaggcagaaaaaaagcagaaaaggttgttgaa

SEQ ID NO: 930631 - DNA, 120 bp, Artificial Sequence
  ENSG00000229618_10 (sequence is synthesized)
attcttcacattgatttcagggcaatgatctcaaacggcgcagtgggaacccgcaaatttaagagccaccatcccgcagccaacgataatatctgacacttcctgacatcatgaaagcca

SEQ ID NO: 930632 - DNA, 120 bp, Artificial Sequence
  ENSG00000229618_11 (sequence is synthesized)
ccatctgtctatcaccaaaaccctgtactttttaaagactacttggcttgatccttaatgaagcttcaagttgaatgcacagatcgctttagaaggaatacaaggaataattgacacaag

SEQ ID NO: 930633 - DNA, 120 bp, Artificial Sequence
  ENSG00000229618_12 (sequence is synthesized)
gaatgtggtggaagtgatgatataccagttacagacacactttttaagaggattgcagcatccaggtccccctctaaggtttctcattcttggaacaattcttggaactcacccatcata

SEQ ID NO: 930634 - DNA, 120 bp, Artificial Sequence
  ENSG00000229618_13 (sequence is synthesized)
ctgtgagaaacccaagccacatgtataggacacatgttgatgatccaattgacagtctcaagcgaactctttgccaataaccagcatcaaatgctgccaggtaaatgggaaatcttggct

SEQ ID NO: 930635 - DNA, 120 bp, Artificial Sequence
  ENSG00000229618_14 (sequence is synthesized)
gtcccagcacaattgagcccatagatgatgcagccaaatccaatttataagaaacaagcaaccccatttagtccagtcaacactaaaaatagcgtgaaataatgaaatagttaagccagt

SEQ ID NO: 930636 - DNA, 120 bp, Artificial Sequence
  ENSG00000229618_15 (sequence is synthesized)
aacttttggagtggtttgttataaaataatagataattaaaataggagtcagctgtgtatagaggttaatgaagccatgagatggttaagacaatcaatatgtgacatgaaagaaaaaag

SEQ ID NO: 930637 - DNA, 120 bp, Artificial Sequence
  ENSG00000229618_16 (sequence is synthesized)
aaaggttgttgaaattcttcacattgatttcagggcaatgatctcaaacggcgcagtgggaacccgcaaatttaagagggtagtttccctgcacaagccctttttttgcctgctgccatc

SEQ ID NO: 930638 - DNA, 120 bp, Artificial Sequence
  ENSG00000229618_17 (sequence is synthesized)
cgtgtaagatgtgacttgctcctccttgtcttctaccatgattgtgaggcctccccagttatgtggaactcaaagctagaggaaaccaaagtcatagaacatctgaactctgtccaaaca

SEQ ID NO: 930639 - DNA, 120 bp, Artificial Sequence
  ENSG00000229618_18 (sequence is synthesized)
tggaggaagaaactgggaaaaacatctgtcatctcctcaccagaccgagtctcgttctgtagtccaggctggagtgcagtggcgggatctccactcactgcaagctccacctcccaggtt

SEQ ID NO: 930640 - DNA, 80 bp, Artificial Sequence
  ENSG00000229618_19 (sequence is synthesized)
caatctttcatttttataataaatcattcatgtgtaattggttttattctgatcatgatgctgaaactaaatgttttggt

SEQ ID NO: 930641 - DNA, 120 bp, Artificial Sequence
  ENSG00000229618_20 (sequence is synthesized)
gttttattctgatcatgatgctgaaactaaatgttttggtcttgggtgataatggaagcttaaaggtaatatcaactacaaagagagtttttaaatgtttggcctgaatattatcagctt

SEQ ID NO: 930642 - DNA, 120 bp, Artificial Sequence
  ENSG00000229618_21 (sequence is synthesized)
aaaatttgcactattctatacctgtttcccttacatatcaattactactatatcacatttcattgggtaggaataataaatattttcattaaattactttaagagatcatcaattaatat

SEQ ID NO: 930643 - DNA, 120 bp, Artificial Sequence
  ENSG00000229618_22 (sequence is synthesized)
acattttctaataattattaacataaacactttaagatgtattttaatgcaaactaaagagatttagatacattctgagtcacagaataatatcaagaagcataattttatgtcaatccc

SEQ ID NO: 930644 - DNA, 120 bp, Artificial Sequence
  ENSG00000229618_23 (sequence is synthesized)
cacaaatcatatagccttaaagatgactttttaaatttgtgatttttttttcttttagttctgcaggattttttttttgttcttattgttgttaacaaggaataacatctcttttcataa

SEQ ID NO: 930645 - DNA, 120 bp, Artificial Sequence
  ENSG00000229618_24 (sequence is synthesized)
ttatagcaacaaagtttagttaaacaaattcatcagattttagtaaatgatagcattctaactctcaaaacagttatacctaaatatatttggtacatgttgtaaaactatatttattgt

SEQ ID NO: 930646 - DNA, 120 bp, Artificial Sequence
  ENSG00000229618_25 (sequence is synthesized)
ctcaagagaaaatgaaatctggttattaagatatatcaagactctccactttttaaattaagaataaatcaattattgctggtggaatttccaaaactaatacttcacccatcagcctaa

SEQ ID NO: 930647 - DNA, 120 bp, Artificial Sequence
  ENSG00000229618_26 (sequence is synthesized)
ttagtaattaaatatatcaatagcattgaaaagaagagtggcatattagttaagatgcatgaactatataaaggtacaattctctttttaaatgcacatatcccaacaaaatttctttca

SEQ ID NO: 930648 - DNA, 120 bp, Artificial Sequence
  ENSG00000229618_27 (sequence is synthesized)
caatatggctataaaatcatatggtgattaacaactgtaaaactagacaaaattttttcactgttttcagaatatattactccttttggtaaactgctgtggaaaaaaaagtgcagctgt

SEQ ID NO: 930649 - DNA, 120 bp, Artificial Sequence
  ENSG00000229618_28 (sequence is synthesized)
tacatacacaaagttatctcccattggctatgagaattatctaaatgttgctagctttcatttgctcttgtcatttgcaaatgtgccaagtcgactagcctttctattaaaataaagact

SEQ ID NO: 930650 - DNA, 120 bp, Artificial Sequence
  ENSG00000229618_29 (sequence is synthesized)
accactgcgaaagatctagatgtttttatttcccttgatagcttatgggaagtttgcctaaggtggcactgctgcttgaggcaatcaaggttcccatgtcctcctgcttcctggtgtgct

SEQ ID NO: 930651 - DNA, 120 bp, Artificial Sequence
  ENSG00000229618_30 (sequence is synthesized)
ggaaaacagaggaaggaaagagactctgccagatcccctagggctgctgtgctctccttggaaggtcgcttaccctttcaaggtgaacttctccacatggctctctcccagtttcaataa

SEQ ID NO: 930652 - DNA, 120 bp, Artificial Sequence
  ENSG00000229618_31 (sequence is synthesized)
cttcttccctgtgtccttttggacttaggggtgttaactccttaccaacttagcattcttacactacccattgtgattctcctacacccacacctctgtaaatagtctttttgtaaatac

SEQ ID NO: 930653 - DNA, 120 bp, Artificial Sequence
  ENSG00000229618_32 (sequence is synthesized)
atcctactcaagttatcctgatttgagtgtgctatctgttctgtattggaatcctgatttatacacaacataaacagagtggaatcaaagaagaggactcattcctgtaatgcaagttaa

SEQ ID NO: 930654 - DNA, 120 bp, Artificial Sequence
  ENSG00000229618_33 (sequence is synthesized)
gattgtaagtttcctgaggcctcctacatcatgcctcctgtatagcctgcagaacttatttacacacagatgctccatgatgggtcacatccaaacttatcataaagtcaaaaaattcaa

SEQ ID NO: 930655 - DNA, 120 bp, Artificial Sequence
  ENSG00000229618_34 (sequence is synthesized)
tcaagaattaaatttgaaagaccatatgaagaagcacagtatttatccaaccaacattaaaatgtcactctgggagattatttcaaattacttttatagttttgaatgatttttaatatt

SEQ ID NO: 930656 - DNA, 120 bp, Artificial Sequence
  ENSG00000229618_35 (sequence is synthesized)
aaattacttttatagttttgaatgatttttaatattatcattgataaaccatctaagttataagtaaaatatttcaagtttagaaaaaagactgttgggccaggtgtggtggctcacacc

SEQ ID NO: 930657 - DNA, 78 bp, Artificial Sequence
  ENSG00000229618_36 (sequence is synthesized)
aggtcaggagttcaagaccaccctggccagcatagtgaaacctcatctctacaaagatacagaacttagccgggcata

SEQ ID NO: 930658 - DNA, 120 bp, Artificial Sequence
  ENSG00000229618_37 (sequence is synthesized)
tgtatctggtgtagatagtttaaattccagatttcccctcaagaggaaattttggtcttcaaattataattctgtggttttcctgttgtctgctgacaagtttttaactaatgtagaatc

SEQ ID NO: 930659 - DNA, 120 bp, Artificial Sequence
  ENSG00000229618_38 (sequence is synthesized)
aagggattttacgctacagaaagtttattcctaagatgagtgtctcgatctaatcttatttcatagttgttacatctgtgtatgaaatgtatcattatttatgtatgttttcaactcata

SEQ ID NO: 930660 - DNA, 120 bp, Artificial Sequence
  ENSG00000229618_39 (sequence is synthesized)
tttggtattacatatgtatgtgtgagatacacacacacacacacacacacagagattccattaaacaataaaattaatatatagtcataaatatgtgttacttaagccagggatcaacaa

SEQ ID NO: 930661 - DNA, 120 bp, Artificial Sequence
  ENSG00000229618_40 (sequence is synthesized)
acttttcctgtaaagagcctggcaacaaatgatttagggtttttttagacccagagtagtttatgtcacagctactcaactctgctgttctagtacaacagccatagacaaataaatgga

SEQ ID NO: 930662 - DNA, 120 bp, Artificial Sequence
  ENSG00000229618_41 (sequence is synthesized)
tgggcatggttgtgttccagtaaaactttatttataaaaacaggctagatgtggcccatgggctatatattttagttccatgatctagatatatcccacatcaccaatgataggcatacc

SEQ ID NO: 930663 - DNA, 120 bp, Artificial Sequence
  ENSG00000229618_42 (sequence is synthesized)
attctttgcgaaataatgctttaacataatttttgagttatgatgctagtgtatatccagcccttttgtacttcttagatagcattcctggccccaaaagtgtggtgggtttctgtcaag

SEQ ID NO: 930664 - DNA, 120 bp, Artificial Sequence
  ENSG00000229618_43 (sequence is synthesized)
atctgcacaacaatggagagattgaaagaacctatgctggtattcctgcttagaaaagaataaaacacgctcctatgctggtattcctgcttagaaaagaataaaacacgctgtgccgat

SEQ ID NO: 930665 - DNA, 120 bp, Artificial Sequence
  ENSG00000229618_44 (sequence is synthesized)
tagtattttaagttttctaagtgttctcggtggtaggttgaaaaaaagtaatatgagttagcaggcttaaaaatcttaaagtacaaaaatttttataacacactcacatttattacttca

SEQ ID NO: 930666 - DNA, 120 bp, Artificial Sequence
  ENSG00000229618_45 (sequence is synthesized)
gtaataagatgtgtatgtcaactacatatcatatctttactattaaaatgtaaattcattgagggagaggaccttgaatatttattcttgtttcccatacatttctgcatgcaataatat

SEQ ID NO: 930667 - DNA, 120 bp, Artificial Sequence
  ENSG00000229618_46 (sequence is synthesized)
atgcaataatatcctaataattatttactgaatgaagagtgatagatgaataatgaataaataagaaaatagagcaagtataaaattagaggaaaagaaatagttaagtaaatagcatgt

SEQ ID NO: 930668 - DNA, 120 bp, Artificial Sequence
  ENSG00000229618_47 (sequence is synthesized)
actaaataggcttttgagcctcacaagactttgagattttatggatatgaaacctgctatcatttagcatcctgcctctgggaataggacatacctcttccccttctgccatgattataa

SEQ ID NO: 930669 - DNA, 120 bp, Artificial Sequence
  ENSG00000229618_48 (sequence is synthesized)
gcaaggctttcatctcaacctccccaggagctgggattacaggtatgagccactgtgtctggcttgattttttatttaaaaaattatttgttaatagaaatatgtcctaagaagggtaga

SEQ ID NO: 930670 - DNA, 120 bp, Artificial Sequence
  ENSG00000229618_49 (sequence is synthesized)
tcgtggctgtttattttccagtgaagagcttcagttaagaacatgcaaatatgtgagtgttcattaatgcttttattcattcatacatctatttataaatattatctaaatctgctatgt

SEQ ID NO: 930671 - DNA, 120 bp, Artificial Sequence
  ENSG00000229618_50 (sequence is synthesized)
gccaggcattatgctacctgccaaggattccacaaggaatgcttcaactggaaggcaggagtcagagatgacattgatgtgtttggaatgaaggcttttccttttgttttgctctttttt

SEQ ID NO: 930672 - DNA, 120 bp, Artificial Sequence
  ENSG00000229618_51 (sequence is synthesized)
ttcccaataggcacaaatcagggccaaggcatgaggggcaaataaagttcaaatattttctttggaatttattatttgcaaaggaaaccatttgtactcaccgagggacttgatgtggaa

SEQ ID NO: 930673 - DNA, 120 bp, Artificial Sequence
  ENSG00000229618_52 (sequence is synthesized)
tactttatttttcacctcctagtgtgacagcaaaactaataacagacccataaaatacttccaaaagagaagtatttttgttctggcttcatgatggtcttattgcctccacagtataaa

SEQ ID NO: 930674 - DNA, 120 bp, Artificial Sequence
  ENSG00000229618_53 (sequence is synthesized)
aagaaaagtgggaaacttttataagatactcattaaattaccttagtaacaaaacagagttctcaaagtggaccatccataaaatgtttatttaaaaaaaaaaaacagggttgcttcagt

SEQ ID NO: 930675 - DNA, 120 bp, Artificial Sequence
  ENSG00000229618_54 (sequence is synthesized)
taggatagaaaaaatataattaatctagaacacattgtgttctcaatgatttgggtagtttaaaactataatttgaaaggctgtaaagggtagctgtaccatttagaagttaagaaacaa

SEQ ID NO: 930676 - DNA, 120 bp, Artificial Sequence
  ENSG00000229618_55 (sequence is synthesized)
aatagaatcaaaacagaatcaaatttaaccattggactctatttagagtccaagatttctaataaacagtgatttaatctgaaaacatatttttttactccttcagttaaaacagaaact

SEQ ID NO: 930677 - DNA, 120 bp, Artificial Sequence
  ENSG00000229618_56 (sequence is synthesized)
aaaagtaccacttttgcatctgaagccagccttcatgtattagctttgttctgctgcatttcataggaggccttgtgagttaataactataaagttcttagaactttgtcttcagaaatt

SEQ ID NO: 930678 - DNA, 120 bp, Artificial Sequence
  ENSG00000229618_57 (sequence is synthesized)
gctctttgtcttatgaaaaggtagatgagtctgtaatgcaatggtaagtcagtcacatgcattacctaacttattcctcacacatttcctatgaagtatgtgcaggaggaacagtggaaa

SEQ ID NO: 930679 - DNA, 120 bp, Artificial Sequence
  ENSG00000229618_58 (sequence is synthesized)
cagagaggtgacttactcaaggttacaaggctggtaagtagcaggagctgggatgagatcccaggcttgtctgattttaaagcctggaattattcctccatccacagcagttgtctctca

SEQ ID NO: 930680 - DNA, 120 bp, Artificial Sequence
  ENSG00000229618_59 (sequence is synthesized)
ctgtgaagaggggtcggccttatagacagaaataacacagtaaagagtcacagaggtgtggtgtccatgatggcttgggaggtaatttgtaccttttaacaaagcagctgtctcagatta

SEQ ID NO: 930681 - DNA, 120 bp, Artificial Sequence
  ENSG00000229618_60 (sequence is synthesized)
ccagtagcctgaaaatttccaaattcctcccagttttacatggctagtgccttctagttctctcaactttttgacatttttgtcttttcctgatagaaactgtagagttatccttgattt

SEQ ID NO: 930682 - DNA, 120 bp, Artificial Sequence
  ENSG00000229618_61 (sequence is synthesized)
gttccccttactacctcttacctagtcagttataaagccttatttaatagtatttcaaaaaatctttccattctctacactcttcatcattactgttgtcacttagagcctgaaccatca

SEQ ID NO: 930683 - DNA, 120 bp, Artificial Sequence
  ENSG00000229618_62 (sequence is synthesized)
tcaagtctcatactgactgtattaagtctccaaacttctctgaacttaccttgctgtccgttatctttctaaatcacagctctggttacaccagtcactttaaaagccactatctgaaaa

SEQ ID NO: 930684 - DNA, 120 bp, Artificial Sequence
  ENSG00000229618_63 (sequence is synthesized)
taaagaccaagtgtaaagtggcagatgacacccttcgggtatagacaatgcataattcttgcttcttatgtagtgactcatgataattctcacagctatttaattcatgtttttgttatt

SEQ ID NO: 930685 - DNA, 120 bp, Artificial Sequence
  ENSG00000229618_64 (sequence is synthesized)
ctttaatttttctggactctttttttctttgagttgattgaacttgactgatgtgtaaatgttttccaggggcacaaaactgggaggagacaaagttggggagagcgatgtttatacatt

SEQ ID NO: 930686 - DNA, 120 bp, Artificial Sequence
  ENSG00000229618_65 (sequence is synthesized)
gctcaagttcaagcacaaatacctgtgtatcttaacctggccctctcagctgccaatagccaattaagataatagctttcaaatttgtttttaaattattcctttatttttaaaactgac

SEQ ID NO: 930687 - DNA, 120 bp, Artificial Sequence
  ENSG00000229618_66 (sequence is synthesized)
atatacaattgtatgtatttatcatatgcaccatatatagcaagaggttttgaactacatagactttgtggaatgattacatctatataatttgcgctaacatattgttgaatggccatc

SEQ ID NO: 930688 - DNA, 120 bp, Artificial Sequence
  ENSG00000229618_67 (sequence is synthesized)
actcttacagcatcttccacaggtcacatcattttgttcttacttgactaagactttcttataagcagtgactaaatctaaataattttattagcttatcatttcagttcataatataat

SEQ ID NO: 930689 - DNA, 120 bp, Artificial Sequence
  ENSG00000229618_68 (sequence is synthesized)
gccttacacatcatagacaataaatagttattcttcaaatgaacaacaagaggtaaattatttttattttctttaaggcaaaacataaacttatcccaggaaaattagcagtaattattc

SEQ ID NO: 930690 - DNA, 120 bp, Artificial Sequence
  ENSG00000229618_69 (sequence is synthesized)
caatgcttggcctttactgttataaaataaatcaagctagacttattttgtattactctcagtgtgctgtattttgcttttcaaaaataacttcctttaaagaaatctgaatgaaaggtt

SEQ ID NO: 930691 - DNA, 120 bp, Artificial Sequence
  ENSG00000229618_70 (sequence is synthesized)
gacaatgaggcttctataactctctgttcaaagtagggaaaggccttttataaagaaactttggtgtcgcttttgtccaggaaaatggcttatatttttatactcaggaaaaccacaaag

SEQ ID NO: 930692 - DNA, 120 bp, Artificial Sequence
  ENSG00000229618_71 (sequence is synthesized)
tatctataggaagtgtaccaatttgtactaaacaaacaaagaaaaacagtgacagttcaaaaattaagagatctttgagacactcaattttcaacaaaaagaacacagcctgagaaagtc

SEQ ID NO: 930693 - DNA, 120 bp, Artificial Sequence
  ENSG00000229618_72 (sequence is synthesized)
actcagctacacatgtgggctgtttcttagggaaaagagagacatatggaagagccagaagcccagaggaaaaagctaagaggcagagagaatcaacccaagaaagctggaggaaaccct

SEQ ID NO: 930694 - DNA, 120 bp, Artificial Sequence
  ENSG00000229618_73 (sequence is synthesized)
aaccaaggaacccacatctgctcacctaaatttcaggatgtttatgaaccagtggctgctatttgccactgtacttttggaatgcgtgtctatcaaattctattgtccttgtctcactat

SEQ ID NO: 930695 - DNA, 120 bp, Artificial Sequence
  ENSG00000229618_74 (sequence is synthesized)
tacatactgagtttgtgggggccagataacttgttttctagttcatagctcttcatctcaagagtagcctgaggtgccttattcacacctggatctgatttagataatggaatgctgaac

SEQ ID NO: 930696 - DNA, 120 bp, Artificial Sequence
  ENSG00000229618_75 (sequence is synthesized)
attgaacctaattcagtcacaaattgagactttgagggtcatggggaatggtcagggtattttgcatgtagaatgaatttaaataatttatgactgagggatcactgttgtgggctaaaa

SEQ ID NO: 930697 - DNA, 120 bp, Artificial Sequence
  ENSG00000229618_76 (sequence is synthesized)
gacctgtgagccaatggaagagagagaccacacaggtgagtgccaatgagagatcaaatgagatataggtcatagttacttgttctattaaatgacatagaagataaaggtggccttagc

SEQ ID NO: 930698 - DNA, 120 bp, Artificial Sequence
  ENSG00000229618_77 (sequence is synthesized)
aaaaatagaatttcaaactgttagggaggaagccagactggaattagagaggtagctgaagaatgacagggaatgagtagagaggaacagagagtataggttcttttgaagagccaggaa

SEQ ID NO: 930699 - DNA, 90 bp, Artificial Sequence
  ENSG00000229618_78 (sequence is synthesized)
gtggggagaaggaataagagacagaaatcttgaaacattaaaattatcattaaatgatggtgagaaggaaagaaatataaaagttatggt

SEQ ID NO: 930700 - DNA, 120 bp, Artificial Sequence
  ENSG00000229618_79 (sequence is synthesized)
taaatgatggtgagaaggaaagaaatataaaagttatggtaagagaaaaatatgagtaatatttaactctttccagaaaggatcctcaaaccaaagaacatccatttaggcactatggct

SEQ ID NO: 930701 - DNA, 120 bp, Artificial Sequence
  ENSG00000229618_80 (sequence is synthesized)
agtgttcaaacacacaataacctcaaaataacacttgctgtcaagcagaatttgtaaaactgagctgaataatcatggattcaaaggaatttatttcctgacatatcaaaatggccttgt

SEQ ID NO: 930702 - DNA, 120 bp, Artificial Sequence
  ENSG00000229618_81 (sequence is synthesized)
ttaaatcatgtaatcgagtctataataaaaatttaatcttaaggttttatagctcaaaaaaatctgtattttaaatttttaggcagtttcttctaaggtgaacaatggtatttacctttt

SEQ ID NO: 930703 - DNA, 120 bp, Artificial Sequence
  ENSG00000229618_82 (sequence is synthesized)
gggtagaacatgacttatttttggaagtattgcttgagtaatattaagaattaggaaatatctacttgctgatatgagagtatacaaaaatgtttgcttgacaagcttccgagggctctg

SEQ ID NO: 930704 - DNA, 120 bp, Artificial Sequence
  ENSG00000229618_83 (sequence is synthesized)
taagattgtggtgatatcagataatgcccttcccaaatgtgtctgctcatcaatgaatttacacacatgcataacagcttcctgggagcagaatggcttgtacctggttctgtctctgag

SEQ ID NO: 930705 - DNA, 120 bp, Artificial Sequence
  ENSG00000229618_84 (sequence is synthesized)
tgtttcaaagatatggaagcatgtttgatgaaagatcatggaatagcaaagaaaaatagcaccaaaaaggcaaacaaggcagggaaagattctagactagtgatttgggatcaacacagg

SEQ ID NO: 930706 - DNA, 120 bp, Artificial Sequence
  ENSG00000229618_85 (sequence is synthesized)
acaggatgattagagagaatagcttcctgtgcacactatgtagtttgatgcagaagccatcctgatccagatgccctggtactgtggggcgggaccttggaaaaattacccagaggatgt

SEQ ID NO: 930707 - DNA, 120 bp, Artificial Sequence
  ENSG00000229618_86 (sequence is synthesized)
gaagtgaaagttttgttacaccattcttcagagtgaaggcagttttcctacagaaaccttcaaaaaaggagatgcatccttccttgttcctggcagtcttgcatttgaggaaatcagtat

SEQ ID NO: 930708 - DNA, 120 bp, Artificial Sequence
  ENSG00000229618_87 (sequence is synthesized)
gctccaacttaggtgagttaggccactggccaatttttttttttttctgtagccctcctctactctgagttcctaattccacttgttctgaattttttttggtgacgcattgtctccatt

SEQ ID NO: 930709 - DNA, 120 bp, Artificial Sequence
  ENSG00000229618_88 (sequence is synthesized)
attgaacttagtcctttcaaaaattagcaaagctgggaattttcatcctattcttttcctactttcagaactttgaactttgaattttcaggaagccatgaagaatggagtaagattcta

SEQ ID NO: 930710 - DNA, 120 bp, Artificial Sequence
  ENSG00000229618_89 (sequence is synthesized)
ggaccagttaacaagaacatgtaaaataatttgtttgtaaaataatcttatgaggctaaagcacaagccagagcagatttttttcaaaatgcataagcaacacttgttcaattccacctg

SEQ ID NO: 930711 - DNA, 120 bp, Artificial Sequence
  ENSG00000229618_90 (sequence is synthesized)
gtgtatggaagtgttcaagaacctttcctgaaacaacttctattacagacactgcttcttcatggttattccatcagattgcaatcacttatatgtttttttccactcttccttatatta

SEQ ID NO: 930712 - DNA, 120 bp, Artificial Sequence
  ENSG00000229618_91 (sequence is synthesized)
tgagcacttttcacgtaggggttcatctctttaataatcatagctcccaacacaattgtaggcttatattagatgctcgataaagatgagttgagttaacatgtaaagtaatgaatgagt

SEQ ID NO: 930713 - DNA, 120 bp, Artificial Sequence
  ENSG00000229618_92 (sequence is synthesized)
aaggaaaaatagaatagtttcgaattaatgcatgttactgctactgtaaatttaatgttttcatttctattactatttatatataaatttaattaattgttaactttctttgccatccat

SEQ ID NO: 930714 - DNA, 120 bp, Artificial Sequence
  ENSG00000229618_93 (sequence is synthesized)
tacatcatgcctcctgtatagcctgcagaactcaagaattaaatttgaaagaccatatgaagaagcacagtatttatccaaccaacattaaaatgtcactctgggagattatttcaaatt

SEQ ID NO: 930715 - DNA, 120 bp, Artificial Sequence
  ENSG00000229618_94 (sequence is synthesized)
atctacacttaagttttgaaagaaggaaagaaagaaagagagacagaaaaagaaagaaagaaaagaaagagagaaagaaaggttgctgtagttagagtcagaagaagagtttgttgaaga

SEQ ID NO: 930716 - DNA, 120 bp, Artificial Sequence
  ENSG00000229618_95 (sequence is synthesized)
agtagaatttgttgaagttgttaattctggtaataactgctaaccagctgctagatagaaaatatgaagagagaaaaatcgagccctaggtcaccattacttcactgtgcctctgacatt

SEQ ID NO: 930717 - DNA, 120 bp, Artificial Sequence
  ENSG00000229618_96 (sequence is synthesized)
agctcttcccccaggatatacatagtacgtattattatacagaagttattgaagtgtctaacaggctctttatgaaaacatactcagaatattcacatgtggtcttcacacatttggaga

SEQ ID NO: 930718 - DNA, 120 bp, Artificial Sequence
  ENSG00000229618_97 (sequence is synthesized)
tatgcttcctgagagaaaggaccacgcttctcctgtttaccatgctgtctcccactctagcacatccttcagcgatgctgaccggtggaaaccagagcagtacctcgtgtatactacgct

SEQ ID NO: 930719 - DNA, 120 bp, Artificial Sequence
  ENSG00000229618_98 (sequence is synthesized)
tgagtcaattaaacctcttttctttacaaactatctggtcttagatagttctttatatcaatgcagaactgactaatatagtgcctaagtaaattctgatacattaatacatttggatac

SEQ ID NO: 930720 - DNA, 120 bp, Artificial Sequence
  ENSG00000229618_99 (sequence is synthesized)
aagtattaaaagggaacaaattatatgtacatacatgtattcttgtcaaaaatactataccaggtaaaagaaacaagacatgaaacaattaatactataagatgtcattcctatgaaatt

SEQ ID NO: 930721 - DNA, 120 bp, Artificial Sequence
  ENSG00000229618_100 (sequence is synthesized)
ataggaaagccaagtctaatctacagtaccagaaagcagatccatgcatgttttaaactagggtttggaaggagcataaaggggacattttggagtaatggaaatgtggtatgtattgtg

SEQ ID NO: 930722 - DNA, 120 bp, Artificial Sequence
  ENSG00000229618_101 (sequence is synthesized)
atttggcaatgatcacttgtgtaaatatgtcgaaacttatcaaacagtacagttaaaatgggttcattttattgtatgtaaatataaaatatcactcatctttaataaaattgatttaaa

SEQ ID NO: 930723 - DNA, 120 bp, Artificial Sequence
  ENSG00000229618_102 (sequence is synthesized)
gaagtcaaggatagcaagctttcaataaggcacttattccttgatgacaatgttgtgggtttttaaaatataattgacagctcacaccccatcaactactgctattaaactgtataatac

SEQ ID NO: 930724 - DNA, 120 bp, Artificial Sequence
  ENSG00000229618_103 (sequence is synthesized)
agctcagctatccacaagaaacaaataaaaacaaaaaaaactcacaccccatcaactactgctattaaactgtataatacagctcagctatccacaagaaacaaataaaaacaaaaaaaa

SEQ ID NO: 930725 - DNA, 120 bp, Artificial Sequence
  ENSG00000229619_0 (sequence is synthesized)
atttggcccagatgaaaaccgggcgggatggcagccccggggccagggatgcgggagccgccgggaagacccgcgcgccgctcgactcagagggactcacaccttcccccgacaaaggtc

SEQ ID NO: 930726 - DNA, 120 bp, Artificial Sequence
  ENSG00000229619_1 (sequence is synthesized)
attaagttaggcggccccactgtcgaccaagtgcccaaggcattgtgggagtcatgattccaagatgcccgcgacggaaaatggaacttgtcagctccttgtcatgggagcattgtgggc

SEQ ID NO: 930727 - DNA, 120 bp, Artificial Sequence
  ENSG00000229619_2 (sequence is synthesized)
gccacaactcattcagctgcagtgaaaagactgttgcatgtcgctgtgcagcctcttatcgccgaggtctggcttccgctgctgctgcgcggcccctcccccgcccgcccagccccacca

SEQ ID NO: 930728 - DNA, 120 bp, Artificial Sequence
  ENSG00000229619_3 (sequence is synthesized)
ggaagcccagggcggactcgtcgagctcctaatgcacgcggcggcgagaaaaacgctcttcaactttccgccggcgccctcccgcgcttccccgggccacagggtcgcctgtcaaccgga

SEQ ID NO: 930729 - DNA, 120 bp, Artificial Sequence
  ENSG00000229619_4 (sequence is synthesized)
cagagcccgcaagagcgggtcatgggcggtcgcccagcggcgccgagagcaggaggaagccggagcccgcgcgggcgccgtggatcccctcggcctcccgttggtatcttccatctcatg

SEQ ID NO: 930730 - DNA, 120 bp, Artificial Sequence
  ENSG00000229619_5 (sequence is synthesized)
cgttcagcattgtaacctcgcggcgggcgtgcagaccggacgccctcccgcttcttctaccgactgctaggcacaccagtgggttcattttgaaagaggcccttgcaccgggctttgcaa

SEQ ID NO: 930731 - DNA, 120 bp, Artificial Sequence
  ENSG00000229619_6 (sequence is synthesized)
ggaagccggcaaggttagattgaaggttagaagccaattagactagaatcctgcgatctggtgagactgccgccttaaaatgcaccaaacagtttttgaacctggagggctaacaggcgg

SEQ ID NO: 930732 - DNA, 120 bp, Artificial Sequence
  ENSG00000229619_7 (sequence is synthesized)
gaaaaacatctgcaagactgccaccgtgtatttttctcaagtaacaggctatccacagttttggaattccttagtgaaactgtcacacaggcacaaacacatgtcagctttccttctagt

SEQ ID NO: 930733 - DNA, 120 bp, Artificial Sequence
  ENSG00000229619_8 (sequence is synthesized)
ttgtaaataatatttgtaatttacaggccactgtattcccaactttgcaccatgtgatttagagaaagcaaagctccctctttaaaaataatatgttacttctgaaataccgggatattc

SEQ ID NO: 930734 - DNA, 120 bp, Artificial Sequence
  ENSG00000229619_9 (sequence is synthesized)
cacggcaagtaagccatattgtcgccagagcaaataaaccgcagccccatatcataattcactgggtgctataagatgtaacttggctttgctttgaatggaaagaatcctgaacgtctg

SEQ ID NO: 930735 - DNA, 120 bp, Artificial Sequence
  ENSG00000229619_10 (sequence is synthesized)
tgatgtgatgaagttttggagactgggggcaggatttcctttgaatgtaaggaattcggataacttgttcaaggatgattctagtgaaaaacgtttgtcccatgtttgttgggacaaaaa

SEQ ID NO: 930736 - DNA, 120 bp, Artificial Sequence
  ENSG00000229619_11 (sequence is synthesized)
tgctggatatggtacaacattcttcctgcaggttcggttttgttgaagagagtgaggccagctcgaggtgaaggaaaaacatcagaaaggtgctaaagtgcagaaatatcttccagaggc

SEQ ID NO: 930737 - DNA, 120 bp, Artificial Sequence
  ENSG00000229619_12 (sequence is synthesized)
actaatagccgactttagttcttgacctttagctagatccacaaagcactgagttaaaattgtacactgatcccttccagaacaaattaattaattaaatggtgcctcttcccagcgtta

SEQ ID NO: 930738 - DNA, 120 bp, Artificial Sequence
  ENSG00000229619_13 (sequence is synthesized)
atcgtttaaaaggactcaagtacccacacagtttaagcaaactaaaagaacactgacactttctcagagaacagggatgggaactttctatctgcccattagtatctaccccaagctacg

SEQ ID NO: 930739 - DNA, 120 bp, Artificial Sequence
  ENSG00000229619_14 (sequence is synthesized)
aagacttccattcctcttattaagcattcagcaactacatttagtgcctactatgccagtgatgcaagaatggataagacagtccctacactcaaggataacgcctctagtaggtgagag

SEQ ID NO: 930740 - DNA, 120 bp, Artificial Sequence
  ENSG00000229619_15 (sequence is synthesized)
acaaaccgattaattctgcataagggataagtgctgtatgtgggaagcaatccaatgagggctctgaggatggcaaaggaagggttcctggaggatttacatttaactggtgccttgaaa

SEQ ID NO: 930741 - DNA, 120 bp, Artificial Sequence
  ENSG00000229619_16 (sequence is synthesized)
aactggtgccttgaaaggtgtgtagaagttggcaagatcaaaagggagtagagtccaggtggagaagagaaaagagcagggcaggctggatggcatggctcacacctgtaatcccagcac

SEQ ID NO: 930742 - DNA, 120 bp, Artificial Sequence
  ENSG00000229619_17 (sequence is synthesized)
gccaggagtttgagaccagcctgggtgacattaaaagaccctgtctcaaagaaaacgaaaggagcagggtatatacaaggggtctgccagccttctcagcctttctgtgagaagcgaggg

SEQ ID NO: 930743 - DNA, 120 bp, Artificial Sequence
  ENSG00000229619_18 (sequence is synthesized)
gagaagcgagggtagggtagtacaggagagtggcaggagatgacactaaaagtaggtctgtgttgatctaacgagtctcaactttactgccaaaactaatgaactaggaaagtttaggca

SEQ ID NO: 930744 - DNA, 120 bp, Artificial Sequence
  ENSG00000229619_19 (sequence is synthesized)
gcaagggccagagatggagtctggacttgtattgcagaaagttcctgtgacggcagcttggagggtgaatgagagtgtgggatggaggggtgaatgggtgtggacagactggaaaaatga

SEQ ID NO: 930745 - DNA, 120 bp, Artificial Sequence
  ENSG00000229619_20 (sequence is synthesized)
ctcatgcagggaatgaggaagggaggagccttgggagactctcaaatccctggcttagcctactgaattgcttgctacttgcctttttatgtcttcattttgcctcccattgtctgtgat

SEQ ID NO: 930746 - DNA, 120 bp, Artificial Sequence
  ENSG00000229619_21 (sequence is synthesized)
attaaaggcctaacttcttagtagagcaaactttgcatctgctagcaggttggtgccctagctagcttccatgcccctctgcttagaatgcctgcgaaccactaaggactaatcctagtg

SEQ ID NO: 930747 - DNA, 120 bp, Artificial Sequence
  ENSG00000229619_22 (sequence is synthesized)
gtagaaatttattttcaattgttctcaaacccttgtagaattccaagttagaactgtagtgttcttttttcatgtgggttagaaaatttgctgtttggagcaacatggtgaaacacagga

SEQ ID NO: 930748 - DNA, 120 bp, Artificial Sequence
  ENSG00000229619_23 (sequence is synthesized)
cttttgaacctgcttatggtgcaaaaggggaaattatatttctacttcaacactggaggaggggggacttctgggagcaaaagagaaatggaaactgagatgagacatgttttttactcc

SEQ ID NO: 930749 - DNA, 120 bp, Artificial Sequence
  ENSG00000229619_24 (sequence is synthesized)
atgacagaatacaaagaaatacaaggatgatcctttaatgttagaaacagtagaataaccatcctggtaaataaaaaaggagaaaaaatgttattttacattagatacagaaaaacagaa

SEQ ID NO: 930750 - DNA, 120 bp, Artificial Sequence
  ENSG00000229619_25 (sequence is synthesized)
tggctaagaaaactcacaaagcaatggtcaatctataactcgagtccaaataaattgtgatataacactaaattaccactgatttggcctaattgactatcactggataacattataaca

SEQ ID NO: 930751 - DNA, 120 bp, Artificial Sequence
  ENSG00000229619_26 (sequence is synthesized)
tgaatgataatatttaaaattttaaagcactgtaacaaacaccagatcatgttaaaactattcaatcatgttgtcagctttcaactgccagtagcatcctaaccacatttcaaactatgg

SEQ ID NO: 930752 - DNA, 120 bp, Artificial Sequence
  ENSG00000229619_27 (sequence is synthesized)
ctgtgaagtgtatagtctacaggttcataagtgagtatatccatgagtataaaaagaaggtcatttatgggtggagagggaaattatagaaaacaatttcagatgaaataaactacattt

SEQ ID NO: 930753 - DNA, 120 bp, Artificial Sequence
  ENSG00000229619_28 (sequence is synthesized)
tcagataaaggaaagagtgttcactgcaggttcctgaaatatttcagtccattcaagttttaattataccaatgaatctcaataaaaatacagttaaggaatatggtttttatagataat

SEQ ID NO: 930754 - DNA, 120 bp, Artificial Sequence
  ENSG00000229619_29 (sequence is synthesized)
gtcagctccttgtttaccaataataaagataaagataatggcagcatttatctttttcagtccaatggggatatttaaggtacctatgtaagtgtgtgagtgcctgtgtgaattgtgact

SEQ ID NO: 930755 - DNA, 120 bp, Artificial Sequence
  ENSG00000229619_30 (sequence is synthesized)
tgagtgcctgtgtgaattgtgacttacttcttctgcataccacattcatagctcaataagctctcactgcctctgcaatataacttgtctttcctgacacacacacacacacacacacac

SEQ ID NO: 930756 - DNA, 120 bp, Artificial Sequence
  ENSG00000229619_31 (sequence is synthesized)
aaatcacctaaataaaaatatctcaaggaggtatactcttttaaaatgctatttttattataccaggataaaaataattgattgaaagatggtgtcaaaaccagaacctagtctcatgtc

SEQ ID NO: 930757 - DNA, 120 bp, Artificial Sequence
  ENSG00000229619_32 (sequence is synthesized)
ctgtgcttcctaatcaatatttaaatatagatggtcaagagaagatgactctaaaaggcaatcaaaagttgcaaacattcttgtatggagaatcaagtttaagtagatgcattaaattta

SEQ ID NO: 930758 - DNA, 120 bp, Artificial Sequence
  ENSG00000229619_33 (sequence is synthesized)
tcacattaaacttcacaacagggttgaggagagaggtgagaccttcttttgtagaattcaaacttgttcagatatttgaatacatatacttgagagaaagaattacatgaatttagttta

SEQ ID NO: 930759 - DNA, 120 bp, Artificial Sequence
  ENSG00000229619_34 (sequence is synthesized)
agagaaagaattacatgaatttagtttatcttcaaggacctttatatatttcatacacaacacaatttctttgtgctcattatttaaaaataaaaatatgtattctaatagatactatgt

SEQ ID NO: 930760 - DNA, 120 bp, Artificial Sequence
  ENSG00000229619_35 (sequence is synthesized)
aacacgtatattgcacatgaatgtgaaaatatataaaatcaatatatttgctactaaatgtttatgaaatttaaagcagttaaatattatgcatttctcaattaagttattttacctaaa

SEQ ID NO: 930761 - DNA, 120 bp, Artificial Sequence
  ENSG00000229619_36 (sequence is synthesized)
tacctaaaagttgaatctgtatcttcaatatcattattttaggatctggcaatagagagacagtaagcaaatacattttgaaattaaaagttcaaaatcatagaattttagcattgaatg

SEQ ID NO: 930762 - DNA, 120 bp, Artificial Sequence
  ENSG00000229619_37 (sequence is synthesized)
gaatgttagagagcatctggccttgttcccttgttaaaccagaggagtgcattatttaaggaacttggcaccatggcagagcagaactgacatcagtgtcttctgactctctcaggccat

SEQ ID NO: 930763 - DNA, 120 bp, Artificial Sequence
  ENSG00000229619_38 (sequence is synthesized)
tcattttcattgtctttttttttttcttaaagacaataaggacaagaagaagctctaaaataggcctaacagtttccccagtttaatgtaaggaggtgctacatgagatttccaagagta

SEQ ID NO: 930764 - DNA, 120 bp, Artificial Sequence
  ENSG00000229619_39 (sequence is synthesized)
tagttcttccttcctctgtttcttccttctttcattttttccttcttttattctttctattttttcatcctttctttcttctttccatacagaaaacacttttcacacaatgactctatt

SEQ ID NO: 930765 - DNA, 120 bp, Artificial Sequence
  ENSG00000229619_40 (sequence is synthesized)
catttcacaaacatttattgagcatcagccatggctaactcctattctaggtactgtggttacagaaatgaacagcacagataaatcacttccctcaaaggggttgcattctactagggg

SEQ ID NO: 930766 - DNA, 120 bp, Artificial Sequence
  ENSG00000229619_41 (sequence is synthesized)
gagacaagcaacaaaaaataagtcaaaaataaaaaataaaagataaacatatgaggtaatttcagatggagataagcgctatgaaataaagcaggttggggggatttgggagagaaggtt

SEQ ID NO: 930767 - DNA, 120 bp, Artificial Sequence
  ENSG00000229619_42 (sequence is synthesized)
gtgtgaaacaggatggaggactgagctggtcatatgcaggcaaggttctcggtgaagtgagaaataactggggaaagagcattcaaagcagtggggactgcatggcaagagccctaaggc

SEQ ID NO: 930768 - DNA, 120 bp, Artificial Sequence
  ENSG00000229619_43 (sequence is synthesized)
cagggttcatggtagggctagagagccaatggtgaacaaaaactacctaacctcaaggagcttacagtcaaggaagagggaaaaaatgaatctccatcaaattaatcacactcaaaatgc

SEQ ID NO: 930769 - DNA, 120 bp, Artificial Sequence
  ENSG00000229619_44 (sequence is synthesized)
aaagctacaaccatgatacttttcctcactgggaaccattgaagtgtttgattatgttagaggcaggggtggggtggggtgatggaacattatctaaattttgttttcacaaagataact

SEQ ID NO: 930770 - DNA, 120 bp, Artificial Sequence
  ENSG00000229619_45 (sequence is synthesized)
agataactcttgactgctgtgtaaaggctgatagtctaatctcagaagagactgcatgaagtccaccactgctgagaatgacagcaaaccaaaagtgggctctgtctaggaggcaacaga

SEQ ID NO: 930771 - DNA, 120 bp, Artificial Sequence
  ENSG00000229619_46 (sequence is synthesized)
cagcaaatggctggggacccagcagcggaatgtgatttggttgaagaccctcggcaatggggtacaacaaaccttagaaccttacatctcagagttgaagagaagccataagactcatga

SEQ ID NO: 930772 - DNA, 120 bp, Artificial Sequence
  ENSG00000229619_47 (sequence is synthesized)
tcctcgagataacataacttgagggaagggagatgtggtatgcctgtttgtgtgtgacttatttattatttggagtcaacacaatgtagaaaattcgaaattagtgaaggtagaatattt

SEQ ID NO: 930773 - DNA, 120 bp, Artificial Sequence
  ENSG00000229619_48 (sequence is synthesized)
tgatatcagcagtgtttccagttcccagagatagggaactgtttgtattacagtttatttccttctaggcttttccaatgcatttttaaaagcatagttaatattgtactatatatgcaa

SEQ ID NO: 930774 - DNA, 120 bp, Artificial Sequence
  ENSG00000229619_49 (sequence is synthesized)
tttcttttccaaatttaatcttttaagacaatcttataaaacaaaggccacctcccccatgtcatttatatataatcttcatttttcatgaggtaatggaagctggagagttggcccttg

SEQ ID NO: 930775 - DNA, 120 bp, Artificial Sequence
  ENSG00000229619_50 (sequence is synthesized)
accaaagccttgcagctaacaagaggacaagcctcctgccccacagtgtttcacagccagtaccccaagctcctgaattcatctgtctaatgtgtaatatatttataaacactctacctg

SEQ ID NO: 930776 - DNA, 120 bp, Artificial Sequence
  ENSG00000229619_51 (sequence is synthesized)
ggatgtatgcgtaccttctactatggactgttgttaaagacaagtaaatatgcaatcgtggtctttcaataaactaaacggatataaaaataaatatagaatacagccagaagatcaaaa

SEQ ID NO: 930777 - DNA, 120 bp, Artificial Sequence
  ENSG00000229619_52 (sequence is synthesized)
ttgacatattatctatttatgcttataatatgtaattacatgtaatattgtaaaacactttctaccatttcataaaattctgtgttgttatttagcccagaattcccttgcaatctttta

SEQ ID NO: 930778 - DNA, 120 bp, Artificial Sequence
  ENSG00000229619_53 (sequence is synthesized)
aaaatagtatctaatagggcttttaatataaatgtcgtagtgaaactgttttatgtactgtaacccaaacatttctacgtagtaacactgttccatatagaaaacaaatatgaaaaaata

SEQ ID NO: 930779 - DNA, 120 bp, Artificial Sequence
  ENSG00000229619_54 (sequence is synthesized)
catcaaccctggacccaatagtttaatagacccccaagaagatcatccacttcacacaatcaaactatgccttattaagacagagaccaaattttacaatactatacacagcagtcatcc

SEQ ID NO: 930780 - DNA, 120 bp, Artificial Sequence
  ENSG00000229619_55 (sequence is synthesized)
agtctcaatttttattagattcaatgaaaacttcttagacaatcatgtcacataaacataatctactaaaacacagtaaaatatatactacagctcagaagccaaaattaaattttccag

SEQ ID NO: 930781 - DNA, 80 bp, Artificial Sequence
  ENSG00000229619_56 (sequence is synthesized)
atttaccattaatattatcatggaaactcagatgagcactcatttttttcttatgtaaagacaattttatcaaagagaga

SEQ ID NO: 930782 - DNA, 120 bp, Artificial Sequence
  ENSG00000229619_57 (sequence is synthesized)
tttttcttatgtaaagacaattttatcaaagagagaacaacttaaaaacttattttccataatctagaactaggatgttcattcagactttactaattattgacaacaacaacaacaaca

SEQ ID NO: 930783 - DNA, 120 bp, Artificial Sequence
  ENSG00000229619_58 (sequence is synthesized)
acaaatctgtcttgccagaaagatagtatcttctctgctgctttagccttcatttgctgttctgaattacacttatgaccaatttatattgtaatctccttgggctatgtttccttgtga

SEQ ID NO: 930784 - DNA, 120 bp, Artificial Sequence
  ENSG00000229619_59 (sequence is synthesized)
ttagtatattaccatactacatataacacttaatagctcatgatatcaaaatatctcatagttaaaattgtggacatttgaacttctgatggaagtagttgtgtttatttttaaggtttc

SEQ ID NO: 930785 - DNA, 82 bp, Artificial Sequence
  ENSG00000229619_60 (sequence is synthesized)
aacttctgatggaagtagttgtgtttatttttaaggtttctttatttttatatttttagagacagaatctggctctgtcact

SEQ ID NO: 930786 - DNA, 120 bp, Artificial Sequence
  ENSG00000229619_61 (sequence is synthesized)
tccaaagtagctgggactacaggcttgagcccctagacctgacaagcagttgtgtttaattagtgtgtgataaagatgaagaagcacaattgtaacggatttctaacaaccatcaactta

SEQ ID NO: 930787 - DNA, 120 bp, Artificial Sequence
  ENSG00000229619_62 (sequence is synthesized)
attttaaaattttcatcgagttaagtatgtcaaatttgattcaacaattcacatctgagtttgtaacagtaacactctgctttccttctccctataataagaagacagcaactattggtg

SEQ ID NO: 930788 - DNA, 120 bp, Artificial Sequence
  ENSG00000229619_63 (sequence is synthesized)
caacttattggtgtagtgcatgaaaatacgtaaaacaaaccaacaaaaaaccaactaggtactaggtaacatactagaaccagtaataacagcaccatttaccaaaatttatcaaaaatt

SEQ ID NO: 930789 - DNA, 120 bp, Artificial Sequence
  ENSG00000229619_64 (sequence is synthesized)
aaatctattaattgatgggatagtgtggactttcttttttggaagccatgagattagtctaattttttcaaaccaaattaagaaagcttcaaatacatcttgggatatttatacttacca

SEQ ID NO: 930790 - DNA, 120 bp, Artificial Sequence
  ENSG00000229619_65 (sequence is synthesized)
aatctcacacggtaaatgtgtgatgtatgaaactttctcaaaaggattcaattatgaaaatgctcagaggcaaactcttcaaacctccatatgtatatatagccagagtagttcacttaa

SEQ ID NO: 930791 - DNA, 120 bp, Artificial Sequence
  ENSG00000229619_66 (sequence is synthesized)
acagatttttcttctcaaagctgtattaaacactccttaatgtttttaccaaagtataaagaaaccaacagcttttaaaaggaagatttaaaaattgctatattatgaatacaattgtat

SEQ ID NO: 930792 - DNA, 120 bp, Artificial Sequence
  ENSG00000229619_67 (sequence is synthesized)
atatttggcccagatgaaaaccgggcgggatggcagccccggggccagggatgcgggagccgccgggaagacccgcgcgccgctcgactcagagggactcacaccttcccccgacaaaga

SEQ ID NO: 930793 - DNA, 120 bp, Artificial Sequence
  ENSG00000229611_0 (sequence is synthesized)
gaggtcctcgggcgccgcagggagggcggcatccaagtctttccgcgcgtgcgcgagcgtccgctgtcactcagggccgggaccaggcagccaagaaacgcggagacagactactgggac

SEQ ID NO: 930794 - DNA, 120 bp, Artificial Sequence
  ENSG00000229611_1 (sequence is synthesized)
tgcgacgtctcctctcctgttcgctgcgatatgccggcgtcgtgttgagcgggctgcggacacagacagcctgcccggccccactgagtgtttgatccccatcctcgcagctctctagag

SEQ ID NO: 930795 - DNA, 120 bp, Artificial Sequence
  ENSG00000229611_2 (sequence is synthesized)
ttcgaagcgacatgtcctccaacattttagcccagcaagtcttgtggcccctgaggatataacccagagagggctgctttctgggatttctcggctgtggttcaagtggagtacacacag

SEQ ID NO: 930796 - DNA, 120 bp, Artificial Sequence
  ENSG00000229611_3 (sequence is synthesized)
ttgagaccctgtctgccctgggcagctttcttgacccttgggggaccagctcacaataaatcctaggcttctgttgctccttgctgcctatccataagcaataaacctgcttcagctcat

SEQ ID NO: 930797 - DNA, 120 bp, Artificial Sequence
  ENSG00000286532_0 (sequence is synthesized)
ggtggccatcttggccggccagcgagggctcctcacggccttccttcggcgtccctgcccggctcgttgccggccccgggatatctgaggggcgcaggcccaccttctagtcgtttcctg

SEQ ID NO: 930798 - DNA, 120 bp, Artificial Sequence
  ENSG00000286532_1 (sequence is synthesized)
gtgaatggctctgctgaagatggccggaaagcagattaatgaaggtgctgccatcgatttaaacaatcgccctcctgcccgctcccctgcgctaaagtttctgagggatcctcacccttc

SEQ ID NO: 930799 - DNA, 120 bp, Artificial Sequence
  ENSG00000286532_2 (sequence is synthesized)
gtggttcgtggacttaaaagtggaggcagcgctccagcctttccctccagagagaaaggaggccgctcccaagtccgtccttgccccgtggccttcctgttcctttgaagggggggggaa

SEQ ID NO: 930800 - DNA, 120 bp, Artificial Sequence
  ENSG00000286532_3 (sequence is synthesized)
tcgatgtttcaatcctctgttcaggagaatatggaacgaacatttcttttttggtgggtgggggctattcgttcccttgaatgtgcttaagcagatctcttgacggcgtggaatgggctg

SEQ ID NO: 930801 - DNA, 120 bp, Artificial Sequence
  ENSG00000286532_4 (sequence is synthesized)
tttcatgaagctttcactttaaaatgtccacctgcgtttgtcccagttttgcccaataaaggaattacagggaaaaagagcgaaacaaaacttgagccagcaaggagtatggagtcccgt

SEQ ID NO: 930802 - DNA, 120 bp, Artificial Sequence
  ENSG00000286532_5 (sequence is synthesized)
gggagcccgccttgggggcgggggtctctgcagcctgttctggggctgggcctcggtgcaggtctggtcgggctggtggcctggtggccctgagcggagcgcgtgacaagaacgccgggt

SEQ ID NO: 930803 - DNA, 120 bp, Artificial Sequence
  ENSG00000286532_6 (sequence is synthesized)
ttaatgaggttctcagggaacggcctgctcctagcatgggatgtactttacgctggggaggtgaaggagacccctagtaacagtctccagctgcctactgctggcggcagtagaacaagg

SEQ ID NO: 930804 - DNA, 120 bp, Artificial Sequence
  ENSG00000286532_7 (sequence is synthesized)
tgcattcccaagaacaatcctctccgtcggtgcaggaggaaaggtgggatttgctaaaggctcagtgggaaacaaaggaagcacttgggctgtgctgggggcatccacaaagaagataaa

SEQ ID NO: 930805 - DNA, 120 bp, Artificial Sequence
  ENSG00000286532_8 (sequence is synthesized)
gggctcctccccagactcagtgaccacatccacggtcgctcaaagcaggcagcaagaaaaggttcgaccacaaaagagacaataggtgatgatatttttattcgttgctttttacttttc

SEQ ID NO: 930806 - DNA, 120 bp, Artificial Sequence
  ENSG00000286532_9 (sequence is synthesized)
aagctaacccttcatgggaaagtaactgtataagactattaaatttttttgttattttttaaaggagaatgccaatttattaacttacaatgtgtaataaaattgtcaactggaacaaaa

SEQ ID NO: 930807 - DNA, 120 bp, Artificial Sequence
  ENSG00000286533_0 (sequence is synthesized)
caagaatgaagccgcggaccctcgcactgacgaggaagaatattcctgagcaagacacagggttttcaccctgatagatggaatctgagctaccttcaaacttttaaggggggactatgg

SEQ ID NO: 930808 - DNA, 120 bp, Artificial Sequence
  ENSG00000286533_1 (sequence is synthesized)
taaggggggactatggtgaccgccaggagaggagtcccagttgagccatatggaccagggatggcggacaggaaagtttgtcagtggggctgatgcacagatggggtgcacgagctcctc

SEQ ID NO: 930809 - DNA, 120 bp, Artificial Sequence
  ENSG00000286533_2 (sequence is synthesized)
actggggaaattttgtgggggaaggatgccctcatagctcaaacgttcagctcactcaagagtgggccagagctaacagctatcactgtactcacagctcccaggccttactgatccaat

SEQ ID NO: 930810 - DNA, 120 bp, Artificial Sequence
  ENSG00000286533_3 (sequence is synthesized)
ctcccttcctttcttctttccttccttcactcctttttgcctgcctgcctgcctttctctttttttctttctttagaaagagggatttataattcttttccaagtaatgtggggaccata

SEQ ID NO: 930811 - DNA, 120 bp, Artificial Sequence
  ENSG00000286533_4 (sequence is synthesized)
ccatgaagaagacattcttccttttggtcctctgactccgaatgcaacctcattcattcattcattcattcatttggtcagtatttggagtgctgttgataggggtggggtcatatagcc

SEQ ID NO: 930812 - DNA, 120 bp, Artificial Sequence
  ENSG00000286533_5 (sequence is synthesized)
ctcacatctaggtaagtagccccaacacagcaataggtgaaatttaaaaaaacacaacctgattaaattccaaagtggaaagtctataccagtgttttttaaactaattccccatgaaaa

SEQ ID NO: 930813 - DNA, 120 bp, Artificial Sequence
  ENSG00000286533_6 (sequence is synthesized)
tcactcgggaaacttttaaaaaatacacattcccaaggttcaggccagaatcagaatctctaatttttagctttaaaaaaatgttacaaacttcgcaggaaatttttatgtagcttgccc

SEQ ID NO: 930814 - DNA, 120 bp, Artificial Sequence
  ENSG00000286530_0 (sequence is synthesized)
agaagacatatgagttttgactaataggaatggcgatactcgaactcctggggtattcaatggaagcttcaaaaagatattacctcatttgatctttgtatacacctcattagatactga

SEQ ID NO: 930815 - DNA, 120 bp, Artificial Sequence
  ENSG00000286530_1 (sequence is synthesized)
cagctattcaacaaataaagaaaaagaggcatagaaaatttggataacttactaaagtcattgagacaacagacagccaaggcattggcacagtctttggacatgaaaatcatggagaag

SEQ ID NO: 930816 - DNA, 120 bp, Artificial Sequence
  ENSG00000286530_2 (sequence is synthesized)
gaagaggctgattgttatccatgattaggcagtgcagatatagctcaatattccaaatgggatgttttggccttggagttaagttccaagagcattataaaataatcacctgtataggaa

SEQ ID NO: 930817 - DNA, 120 bp, Artificial Sequence
  ENSG00000286530_3 (sequence is synthesized)
gtcctgacttaactctattaacaacttcgaaagtcacatacctgaagatgatcctgcatgtccatagagcctaggtccctcaaaagatggtgttgcaatgacagaaattgagacatcaag

SEQ ID NO: 930818 - DNA, 120 bp, Artificial Sequence
  ENSG00000286530_4 (sequence is synthesized)
caaaagaaaatgtagcagtagctagaaatttccaggctgaagatgaaggttaaagctaaagatagactatttttgtcatctacatggaagatgatggctaaagctataagagtgaatgac

SEQ ID NO: 930819 - DNA, 120 bp, Artificial Sequence
  ENSG00000286530_5 (sequence is synthesized)
atcagcaaggaagaaaatacaggaataaggaagaagagatggtgaaatggctactcgtaaggagtgggagaaagaataaatgagaagaaaatgaagaatgtgtggccaagaacataggag

SEQ ID NO: 930820 - DNA, 120 bp, Artificial Sequence
  ENSG00000286530_6 (sequence is synthesized)
aaaagccaggaagatcaatgtcttatcaacagacagatttgagcagcaggctgggagaagggtccacacaaaaattctgagatggagatgatggctaaagttagagttcacattggatga

SEQ ID NO: 930821 - DNA, 120 bp, Artificial Sequence
  ENSG00000286530_7 (sequence is synthesized)
ctttgaactcagtaaactaggtgaatttgccagaagatatgaagctgtgggaacttggaagcccaggacactatgatattgattacagggaaatagttcaaaaatatcacaagattacaa

SEQ ID NO: 930822 - DNA, 120 bp, Artificial Sequence
  ENSG00000286531_0 (sequence is synthesized)
tctcacgagattggatggttttataagggacattccccgccccccccaacttcactctgcacttctccttgctgccgccacgtggaggacgtgtttgcttcaccttctgccatgattgta

SEQ ID NO: 930823 - DNA, 120 bp, Artificial Sequence
  ENSG00000286536_0 (sequence is synthesized)
gatggaatcctgttcatgtcaatcgttgtgtgtgtgtgatgtaaactgtgtgtgcacaagcacgtgtgtgcatgtttgtgtagatgaggttgtgaggaatatgtaccaatctgttaacag

SEQ ID NO: 930824 - DNA, 120 bp, Artificial Sequence
  ENSG00000286536_1 (sequence is synthesized)
cagtaacctttggagaagaggtggggataaatcgtggtgaaatagaaccagacagaagagagacatgttctgaattataacttttgaattttttgtagttttgacaaaagcatgtactta

SEQ ID NO: 930825 - DNA, 120 bp, Artificial Sequence
  ENSG00000286536_2 (sequence is synthesized)
aaaaaactatatttaaatattttaatattataaaacattttattttattaaggacagggagggggttctcctgaatgacctgttaatcatgaagaacatatacagtgtccagagtacagg

SEQ ID NO: 930826 - DNA, 120 bp, Artificial Sequence
  ENSG00000286536_3 (sequence is synthesized)
gaaagaacaggtcacaaatgcaatgattaggaaaggcttcataaattgtgtttcagctggtccttaacacgtagctttggataagtgaagatgatgggagaaaaagagaactctcaggta

SEQ ID NO: 930827 - DNA, 120 bp, Artificial Sequence
  ENSG00000286536_4 (sequence is synthesized)
taaaatgacttaagcaaaggtgcaggcttagaaatcaataagatctattgcatgttccagttatctgttgttgtatcccaaaccaaactaaaacttgatgacttaaaacaacagcagtca

SEQ ID NO: 930828 - DNA, 120 bp, Artificial Sequence
  ENSG00000286536_5 (sequence is synthesized)
tcaactctcaccattgggggaacagagtaggctcagctaagcggttctcgcttgagggttgtcaggtgattgcagttagctatgaggcaggagttatcttgaagtttactcatgcccgga

SEQ ID NO: 930829 - DNA, 120 bp, Artificial Sequence
  ENSG00000286536_6 (sequence is synthesized)
ggttgatactaactgtttgccatcagccagaatacctacttggagccttgccacatgacctgggtttcctcacagcttggtagctgagttctaaggactataatttcatgtgtgtgaaat

SEQ ID NO: 930830 - DNA, 120 bp, Artificial Sequence
  ENSG00000286536_7 (sequence is synthesized)
tcaaggggaaaaaggaaacaatacataatccagtctgtagcttctcatggatcgtgcaaagcaccaccaggacagacatctcaagcacatttgaagagctcctgtttcctaagtaagaca

SEQ ID NO: 930831 - DNA, 120 bp, Artificial Sequence
  ENSG00000286536_8 (sequence is synthesized)
gcagcagcaagactgcaatcatttctgggaaggcagtatcatcataatgcaatattagctactgtgatcttctatcatttccttcctggagagttatgactgtggcattgaagatttaag

SEQ ID NO: 930832 - DNA, 120 bp, Artificial Sequence
  ENSG00000286536_9 (sequence is synthesized)
acctacagcctcaacactacttactacaaatctctcacaaagctgctgcaataaatctcgtggaggaaagtcattgcataaaaaaatcctcaactccagggagttggccatttattttcc

SEQ ID NO: 930833 - DNA, 120 bp, Artificial Sequence
  ENSG00000286536_10 (sequence is synthesized)
tagaaaaggggctgtgatgagagacactccatgctcctttaactccatggaacagaacccaacaaaacattcatcatggaaagttgactgatgggcccagtgagactagctggggaagga

SEQ ID NO: 930834 - DNA, 120 bp, Artificial Sequence
  ENSG00000286536_11 (sequence is synthesized)
ccggagggatttcctcttagcttgaggattgactttccatagaatcagcaccactgagggttaatgtcaaaacaccagccacaacaagcaaaagccaaatcaattttctccgatggtttg

SEQ ID NO: 930835 - DNA, 120 bp, Artificial Sequence
  ENSG00000286536_12 (sequence is synthesized)
acttgatccaaagataacattttgatggctcagaggaatggttgaactacacatcctttagaaaaaaagttgagaagacccattactcagctgtatgcacaaggaaaaagggcattccta

SEQ ID NO: 930836 - DNA, 120 bp, Artificial Sequence
  ENSG00000286536_13 (sequence is synthesized)
gaatatgggtgtggatctctataaaacaggcatttgatcttatccaggatactgtattacatttagtcagagtgtctccctgcgttcctctggagaggactttccttacttttgatgacc

SEQ ID NO: 930837 - DNA, 82 bp, Artificial Sequence
  ENSG00000286536_14 (sequence is synthesized)
tgcgttcctctggagaggactttccttacttttgatgaccttgaatatctcgaggagtattggtcacttgcttccccttcca

SEQ ID NO: 930838 - DNA, 120 bp, Artificial Sequence
  ENSG00000286536_15 (sequence is synthesized)
aactaaactgcacctcactggctgggaatgaggatatcttatggaagattcttatttttggaactttttgaactctctctgttggcttctgaaagctgaatgctctttcaaaggacctga

SEQ ID NO: 930839 - DNA, 120 bp, Artificial Sequence
  ENSG00000286536_16 (sequence is synthesized)
agatttcttttgtcctcagttacattgagcccacatttatgaggcactggtaaaacatttctgcaggagggagttatgtgcattgttcctcttagagaaacattgctcatactaactcct

SEQ ID NO: 930840 - DNA, 120 bp, Artificial Sequence
  ENSG00000286536_17 (sequence is synthesized)
gactgcatgcattttgcaaatgcacagctcagtgagtgtgtcttcccgttgtttgtggtttacaatcctgcaagaaatggctttctatgaggcaaaatggataatggccttttattttaa

SEQ ID NO: 930841 - DNA, 120 bp, Artificial Sequence
  ENSG00000286536_18 (sequence is synthesized)
gttacaaagagttgggtggcaagggggtagggaaggcaaccctaaatgctttgaatgaattattgaattgacatggtccaaagtgacatttctttttaaaatgtttcttttattagtttt

SEQ ID NO: 930842 - DNA, 120 bp, Artificial Sequence
  ENSG00000286536_19 (sequence is synthesized)
ttcctttttctcaaaaataatgaatatttatcactggaaaacatgaaactacaaagaacaacagactccacaattccacttacccagggatattcactataatgtcttaatgtatatgaa

SEQ ID NO: 930843 - DNA, 120 bp, Artificial Sequence
  ENSG00000286536_20 (sequence is synthesized)
ggtaactcttaaacaatttgttttatttttactaaaattaaaaatcagtcattcttaatatagacagtttacagaatatagaaaagcagaaagaagaaagtaactcaccatccaaggata

SEQ ID NO: 930844 - DNA, 120 bp, Artificial Sequence
  ENSG00000286536_21 (sequence is synthesized)
gctgttgataacattttaatatgttttaaagtcctttttaatgcatattttatataactgatattatatcatccatttgtttttccacttaatattgccacctaataatttttctgttac

SEQ ID NO: 930845 - DNA, 120 bp, Artificial Sequence
  ENSG00000286537_0 (sequence is synthesized)
ggggccagggccactgccaggagatggggaaaaggtggcattggcaattttaggctgcctttactaatgtcttcaatgcctctttctgtgatatgaagataaaaccaggatattacacct

SEQ ID NO: 930846 - DNA, 120 bp, Artificial Sequence
  ENSG00000286537_1 (sequence is synthesized)
tcatacttcacaaaatcttctaagactaaatgaaatggagattgtatttcatctcttcatcttatttcaacatcctctacaagcctatttcccagcctgtggaataagcaagataagatg

SEQ ID NO: 930847 - DNA, 120 bp, Artificial Sequence
  ENSG00000286537_2 (sequence is synthesized)
ggagaatggccttgagcctggcctcactatctctctttctctagtcagtgtacatggtgtttcacaaacactatgaaactaagaaatctttttttcagaattgagttctagggatgattt

SEQ ID NO: 930848 - DNA, 120 bp, Artificial Sequence
  ENSG00000286537_3 (sequence is synthesized)
aaatcttttaacccaatggcaaattcctccaacctgcagggttaatcaaccattcagtcaatcaacttttgaagacctgaaggaaaatgttacagaggtctacctaagacacatgggggg

SEQ ID NO: 930849 - DNA, 120 bp, Artificial Sequence
  ENSG00000286537_4 (sequence is synthesized)
tcacattaaagggataaaaatgtgttgttacttaaaagatgttacaactgaattatggaaataaatgatacatgtaattggaatagatatgaccaaattaaaaataaactgactgttgac

SEQ ID NO: 930850 - DNA, 120 bp, Artificial Sequence
  ENSG00000286534_0 (sequence is synthesized)
catcttggctcaaagaagacacggccccagtatccacctgcagcctctgcacctcctgcccagctgccaacaacacctgtgagcctgacggcgtgccccaccccctccccaggtgggcgg

SEQ ID NO: 930851 - DNA, 120 bp, Artificial Sequence
  ENSG00000286534_1 (sequence is synthesized)
tctacggcaggccccgcccaccagctctggcgcatgcggcatggcctcagcgtctcccttcctgagcggacggcccaccccggaattagcctcttctctcccaggtctgtgcaatgccca

SEQ ID NO: 930852 - DNA, 120 bp, Artificial Sequence
  ENSG00000286534_2 (sequence is synthesized)
gctcctcctctcctggccggcctggtctctcttctggtccctttcctcaccgggctttggggttctagggtccttgaagagatggagaccagtcagccaacttcaaggtggaggagtttg

SEQ ID NO: 930853 - DNA, 120 bp, Artificial Sequence
  ENSG00000286534_3 (sequence is synthesized)
gctggaacgagcaggtgtgtctagttggctggtgctagggaaaggggagggccctgcaggggcgttgcacctgtggagtaagcctttgcagaatcatacagtgggtgggtaggggggctg

SEQ ID NO: 930854 - DNA, 120 bp, Artificial Sequence
  ENSG00000286534_4 (sequence is synthesized)
gatcttaagcttgctcactggtgacctgttggggctggactgcctgaggctccccctttggctaagaatcaggtgtgggagctacgcctgctccctgggagggcagttccatagggatgg

SEQ ID NO: 930855 - DNA, 120 bp, Artificial Sequence
  ENSG00000286534_5 (sequence is synthesized)
agcctgagcatctgaatttccaaagctctgcggttgactctgatggacagcctgggccgagacccccaggcaaggcttctggaaagagttggccccgctcacagacggggaaccttctct

SEQ ID NO: 930856 - DNA, 120 bp, Artificial Sequence
  ENSG00000286534_6 (sequence is synthesized)
ggaacctgccctggcaggagtgctgttttgggaacgtgggtttcagactcacacctctctgggtttgagccttggctcttcccttaatgaccctgtgactttagaccaagacttcccctt

SEQ ID NO: 930857 - DNA, 120 bp, Artificial Sequence
  ENSG00000286534_7 (sequence is synthesized)
tctgagcctcagagtccttaccagcgaaatggaaggagttcctccatagcagagcctgcctgaggttgcttaattaattaagcagaaaaaatgttgattgtaaaaatggggggttcccta

SEQ ID NO: 930858 - DNA, 120 bp, Artificial Sequence
  ENSG00000286534_8 (sequence is synthesized)
gggccacaggacccttgagttcaactggatgctggactctaggtgtctccttcctctgccttctaggcctatcaattcatagaccgggcacccagggaaagaccaacctccatgtgtgtc

SEQ ID NO: 930859 - DNA, 120 bp, Artificial Sequence
  ENSG00000286534_9 (sequence is synthesized)
caagttcccaagttaggacctctgctggctcctggtccttcacctgtgcacaggggcctcctgtacagtgcagggactgtggtttccctgcaagcgcctgttgtactgaggagttgctag

SEQ ID NO: 930860 - DNA, 120 bp, Artificial Sequence
  ENSG00000286534_10 (sequence is synthesized)
ctctgtgcagaatactgccacgcggagctggagggcagaggcacgtcctcccaggtgatggggcatcctcttaatatttggagcacagacaggacagtggcaaggagggtatgggccccg

SEQ ID NO: 930861 - DNA, 120 bp, Artificial Sequence
  ENSG00000286534_11 (sequence is synthesized)
cacacggacaggagtagtctgggcattgccctcggcctgtcccccgggccaggcaccaagggcgcagagggagagtcaatttctctaagtggaaggaagaagcactcttccaagggctct

SEQ ID NO: 930862 - DNA, 120 bp, Artificial Sequence
  ENSG00000286534_12 (sequence is synthesized)
gggctttgaaggcctttccttaaacgaacaggagagtttatttatcttcggtcaagctgtataaatgtcaaagggctggcgaccccttttaacttgcagtgcagggatggctaggttatt

SEQ ID NO: 930863 - DNA, 120 bp, Artificial Sequence
  ENSG00000286534_13 (sequence is synthesized)
tgctcatgagtctggaagagccccagaggggagggcttgagccctttgcctgtctgttcacataatccagacagagtagatggcccatgatggctgccactaagtgacacctggcacgac

SEQ ID NO: 930864 - DNA, 120 bp, Artificial Sequence
  ENSG00000286534_14 (sequence is synthesized)
ttaggtggcttcaacactgtcctccactcagcacaccactccgcctactgtttctctgtttctccccctttttcccttggcttgtctctttttttcttccccccgcctttccactgtagc

SEQ ID NO: 930865 - DNA, 120 bp, Artificial Sequence
  ENSG00000286534_15 (sequence is synthesized)
tgttatcaatcacgatccccgcccaccccaccatgcgcatttatcagccctcatgaatgaccagaggctgtgggcatgtggagatggcgtctctttccaacctcagttcctgccatctca

SEQ ID NO: 930866 - DNA, 120 bp, Artificial Sequence
  ENSG00000286534_16 (sequence is synthesized)
gtgatggccccaaacctctaggcaggaaagaacagggaccatgggaggcattggatgggcacatgggaccccagcctccaaatgcagagcttcaacttgccagcaacatttttttttttg

SEQ ID NO: 930867 - DNA, 120 bp, Artificial Sequence
  ENSG00000286535_0 (sequence is synthesized)
ggctccgaagctgccgctcccgaccccggctgcgcggcacgggggctccggaagcccgagtccctggttcgcccccggagcggttacttcagcgagctcgttgcgcgagcgttttgcaag

SEQ ID NO: 930868 - DNA, 120 bp, Artificial Sequence
  ENSG00000286535_1 (sequence is synthesized)
aagggggcccaaaaaagttgaaagccgagggtcagggaatgtaaaaggcattgcccgagctgcaaatggtgttcgatgctaagcagatgccaaatttcggtggaaaaagtaccacctcac

SEQ ID NO: 930869 - DNA, 120 bp, Artificial Sequence
  ENSG00000286535_2 (sequence is synthesized)
tcctcggccttgacagatggctaattttaaaactagctcaatctacttagtccgaagaatccatttaatttctcaccattcgctgagtatgaatttggtttaaaagaagaagaagaagaa

SEQ ID NO: 930870 - DNA, 120 bp, Artificial Sequence
  ENSG00000286535_3 (sequence is synthesized)
aaaaaaagctaggcctttgggaagggccacaggattggtacctgtaattcaagccaggagagcctttgatagccttaggatggaaggctgagcctgtcctctgcgacacacacccaccgc

SEQ ID NO: 930871 - DNA, 83 bp, Artificial Sequence
  ENSG00000286535_4 (sequence is synthesized)
tggaaggctgagcctgtcctctgcgacacacacccaccgcgccctacccctcacccccgggattgggcttctgccatcttgca

SEQ ID NO: 930872 - DNA, 120 bp, Artificial Sequence
  ENSG00000286535_5 (sequence is synthesized)
tgttaagcctcacatccgttctctggttcttacccctgactacaagggagtgccccaaagcagggatcttgtcttagccttgggcctgctacacagaagtagcagagtggctgtcaaaat

SEQ ID NO: 930873 - DNA, 120 bp, Artificial Sequence
  ENSG00000286535_6 (sequence is synthesized)
acagcacctcattaactctcaaatatttactaagcactatgtgccctggagattgagtaatgccaaggcccctgctctcatgaagcttaccttctaggacagaactagacaactcacaaa

SEQ ID NO: 930874 - DNA, 120 bp, Artificial Sequence
  ENSG00000286535_7 (sequence is synthesized)
tacataaagtggagtaaatataaagtaagaaagtgaaggagtcgctatagtataaagaatctgcagagaaggctttgctgacaaggtgacatcttgagaaaagaatgacaagagtaagtc

SEQ ID NO: 930875 - DNA, 120 bp, Artificial Sequence
  ENSG00000286535_8 (sequence is synthesized)
acccagataatcctgttgtctatggcatcttgggccctcagctgcctcacatgaaagcaaaagataaggacaccaaccccaggacctggctgttatgttgagttcactgatgatggaaga

SEQ ID NO: 930876 - DNA, 120 bp, Artificial Sequence
  ENSG00000286535_9 (sequence is synthesized)
gaaagtgctttgtgcacaggaaagccattagaaaagtgtgagatgttcacctccctctattggctgtactgaacctgcactgtgcctccagcgagatgctcatcaatgtcctctaagagg

SEQ ID NO: 930877 - DNA, 120 bp, Artificial Sequence
  ENSG00000286535_10 (sequence is synthesized)
ccatgcttcagctaacaagggttccagctaattaaagggaaattttgtaaggggaatgtccataaataaatattcttccctggcaaagggaagttgagaagtcaacttcaaaacacattc

SEQ ID NO: 930878 - DNA, 120 bp, Artificial Sequence
  ENSG00000286535_11 (sequence is synthesized)
tttaaaaaattagtaaataaataaacaggcacccactttgtcctcattagcactttaaaagcttggtttgggacacaccaagtttgaagttcagaggagacagccagatgatgatagcag

SEQ ID NO: 930879 - DNA, 120 bp, Artificial Sequence
  ENSG00000286535_12 (sequence is synthesized)
gatccatacctggaggtcacttgctcatgtgccatagttgacagaacatggtcttttgaagtatgagctacccaggagaaaatcctaccatccttccccacatactaaccaagtcactct

SEQ ID NO: 930880 - DNA, 120 bp, Artificial Sequence
  ENSG00000286535_13 (sequence is synthesized)
gcatctggaaaattctgtgacttggaacaaatatggcccatgctagttgagctaattaagctctctgagactcagttaccccatggagcactgacaacacacggcacttaggcttcactc

SEQ ID NO: 930881 - DNA, 120 bp, Artificial Sequence
  ENSG00000286535_14 (sequence is synthesized)
caagaaggccttccttcctctaggctggaaacaatttcagacttggattcttgcatttattttgttctcccatctattccaggtagtcgtctagcacctgtcacctccactgaggtggtg

SEQ ID NO: 930882 - DNA, 120 bp, Artificial Sequence
  ENSG00000286535_15 (sequence is synthesized)
gttccttccatcttcttcatctggcattatagtaaagactcaataaatatgagctgttattaaaagccaaaagtcagtgtttaattgcctcaattccaagaggccctgggttccagagtt

SEQ ID NO: 930883 - DNA, 120 bp, Artificial Sequence
  ENSG00000286535_16 (sequence is synthesized)
ttccctcctagtaactgatgctgtcatcttgggccttagtgctatcctttgtaaaataaaggagtgagtgtgtcaaaatgaccacagattcctcccagcaggagccgacttgtgtataca

SEQ ID NO: 930884 - DNA, 120 bp, Artificial Sequence
  ENSG00000286535_17 (sequence is synthesized)
gtcagctctggagatgcaaagaagaaagattattacaacaagctaagctaactgcaatggtagacagctggggatttctttcttgactgaattcaccaaagactccaaactgctgccatc

SEQ ID NO: 930885 - DNA, 120 bp, Artificial Sequence
  ENSG00000286535_18 (sequence is synthesized)
aattgctgtttcagtttcatttgaagattatgttatgtatctgctcctcccccatctcctttggccaagaaaggaatatgctcacaatgagatattgtgctttggtaagtatatacctcc

SEQ ID NO: 930886 - DNA, 120 bp, Artificial Sequence
  ENSG00000286535_19 (sequence is synthesized)
tcagactggtctgcaattacaatttcaaaggttcacacctctactcaccatttctgggccataatcctctttaaatttgaaaccatgcctcagtgaaaaccatctgcacctctcattttc

SEQ ID NO: 930887 - DNA, 120 bp, Artificial Sequence
  ENSG00000286535_20 (sequence is synthesized)
tcaaatactctgaaaatcattcctggatatctgaaagcaaatagagactgacatgggcaaaacgtaaatgctggatttctttgtgtggagctgccccgaaatatacaccatcctccccaa

SEQ ID NO: 930888 - DNA, 120 bp, Artificial Sequence
  ENSG00000286535_21 (sequence is synthesized)
agccaggaaaaatgtgcgcacacacatatttgtgtgcacctggctttatataaagcaagcatcatctctgttgtcgccattataataagactgttcagcactcttgtcctcctcatgcct

SEQ ID NO: 930889 - DNA, 120 bp, Artificial Sequence
  ENSG00000286535_22 (sequence is synthesized)
gcctcttactctgagcactgctgactgaggtttctaacaccatgattatggcaggatgcactttgtcgccttgaaaaaaaggcagcaggaacagtggtggcttattcttctgaacagcaa

SEQ ID NO: 930890 - DNA, 120 bp, Artificial Sequence
  ENSG00000286535_23 (sequence is synthesized)
tggcgctaacgacccacttgccatcagggaattggctctcagttacatttccagttgcagacctcactctcatccatctgtcttataaccaaggggggatgcatttgcaagatgactgac

SEQ ID NO: 930891 - DNA, 120 bp, Artificial Sequence
  ENSG00000286535_24 (sequence is synthesized)
cagaaaccagaggtgggggagtgtgggtggggagtcagaggtgctctgtgggcccaagaaaccacaaggagctttgatccacagtgttagccagcgacagcattcatcacaggctcccga

SEQ ID NO: 930892 - DNA, 120 bp, Artificial Sequence
  ENSG00000286535_25 (sequence is synthesized)
tgccctcatggaatgacgacaatggctaaagtgggaagggaacacactttttattacatggacctgagcttaaaactctactttcttgtttattcaccttcttttctaaactatgtttca

SEQ ID NO: 930893 - DNA, 120 bp, Artificial Sequence
  ENSG00000286538_0 (sequence is synthesized)
tgggtaggaggtacttgctgggaggaatatctgcctggagacactgttctctactggcaaatgccacgtggagaacaaagtcggcacagtcagctttcagagctgaggcaaggattcctg

SEQ ID NO: 930894 - DNA, 120 bp, Artificial Sequence
  ENSG00000286538_1 (sequence is synthesized)
aggacagcaatgtaaacaccctgatccagccatgcctgaggctagataggcccctgggccattcgtttgaatccatacattcatacgaatccatgaattccttgttttctcctggcactt

SEQ ID NO: 930895 - DNA, 120 bp, Artificial Sequence
  ENSG00000286538_2 (sequence is synthesized)
tgagttgtcttttccttgcagctgaacatcttatctcatctgaccctctagtagagcaaagactttagccaccatttctggatgagccttggtggctccaggtcagatggctcatcaaag

SEQ ID NO: 930896 - DNA, 120 bp, Artificial Sequence
  ENSG00000286538_3 (sequence is synthesized)
gtgaaacctacctgcgggctgtcacaccgagactttctccaggagctgaggtggcagtgctgataatttctacagcagcagagtgtgccagtttccagcagctgttcggggtgaatgtgc

SEQ ID NO: 930897 - DNA, 120 bp, Artificial Sequence
  ENSG00000286538_4 (sequence is synthesized)
atgtggagccttccaccagagcatcgctactcgcctcggcaactttactcagtgttggatccaccaaggatgccaggaggggcctcgaccaccagctgtgcaaatcagcccctagtgtct

SEQ ID NO: 930898 - DNA, 120 bp, Artificial Sequence
  ENSG00000286538_5 (sequence is synthesized)
gggaggaggtggtctggagggcagaaagcccagtgggggttgaggagaagaaggaagagaagaaggttggcagtgcgggagatgggggtaggggggactctgacaccctctgttgtcgcc

SEQ ID NO: 930899 - DNA, 120 bp, Artificial Sequence
  ENSG00000286538_6 (sequence is synthesized)
attggttcgctccaaattatctcagtcaacacacagttgcagactcatcctgggtatctgcctgtgacccccatttttaattgcaggtcaccctcgagccccctgcatggaaattccaga

SEQ ID NO: 930900 - DNA, 89 bp, Artificial Sequence
  ENSG00000286538_7 (sequence is synthesized)
ttgcaggtcaccctcgagccccctgcatggaaattccagaactgcctgagttgcaggtggaggtggctgagttgggaccccattaggac

SEQ ID NO: 930901 - DNA, 120 bp, Artificial Sequence
  ENSG00000286538_8 (sequence is synthesized)
aggcgtgagccactgcgcccagccttatctaggtcattttcacaaaccagggctacctggtgaagtgggtccaggaaaggtcatcccaaccccattctgaaagcgccttttggtgaaatc

SEQ ID NO: 930902 - DNA, 120 bp, Artificial Sequence
  ENSG00000286538_9 (sequence is synthesized)
tttggtgaaatctaggtgcggaggctgcacagagcccagactttagcggctgtttgaagctcacatgctaatgacgtttgtatccaaataataacaaatgtcaggtgtatgcacctgtct

SEQ ID NO: 930903 - DNA, 120 bp, Artificial Sequence
  ENSG00000286538_10 (sequence is synthesized)
ctctcatttgtatattgcctgaatgcttttctcagtgcctctttcctgggccagatgtgcagccaccgcctgttctggggtggcacggaggaggaggaggaaaggatactgaggtttagc

SEQ ID NO: 930904 - DNA, 120 bp, Artificial Sequence
  ENSG00000286538_11 (sequence is synthesized)
acatttaagtttggaaactgttcgatgccatccctgacagttcaccctaggatctgggggtggagagtgatgacagaagcgggcaaataatctgtgagtctttcagccgttgctgtgtgc

SEQ ID NO: 930905 - DNA, 120 bp, Artificial Sequence
  ENSG00000286538_12 (sequence is synthesized)
cccaccgtacacatacccttttctaatgtgtgccaaacagtgaaatctaatgataatagataaggattgtaggaagaaagcaatctagaaccgattatttcttttctttcttcagaaata

SEQ ID NO: 930906 - DNA, 120 bp, Artificial Sequence
  ENSG00000286538_13 (sequence is synthesized)
accgttaggtgaggaatgtgatttgaggtgcaccaagaggggtcctcagtttctaaacactgccccccagacccccaatacacacataccctgcctctacctccacccaaagagaggact

SEQ ID NO: 930907 - DNA, 120 bp, Artificial Sequence
  ENSG00000286538_14 (sequence is synthesized)
caatactgaggtcagaactcctctacgtgggactatagcaaagaagaacgcaggagaggggacggtggctggggacacagcagatgggcactgccaggcaggactgctgtgggcattgcc

SEQ ID NO: 930908 - DNA, 120 bp, Artificial Sequence
  ENSG00000286538_15 (sequence is synthesized)
agggagagccaggatgcaaaaatggcagtgagggggccctggtaagggcttctagggctttgctgatctccaggctcatgcgagggctgactagcttgggcagacagaccttttttcttt

SEQ ID NO: 930909 - DNA, 84 bp, Artificial Sequence
  ENSG00000286538_16 (sequence is synthesized)
cgagggctgactagcttgggcagacagaccttttttcttttttccctccaacagaaacaaaaggataaaatcattggcatcact

SEQ ID NO: 930910 - DNA, 120 bp, Artificial Sequence
  ENSG00000286539_0 (sequence is synthesized)
taaatgatttatgctctaggatcatgaggttaaaaaggcaaaagctttaatgttcacttatgcgagaatgtcaagtcactggtctagataaagagtttgacaataataagattttaaaag

SEQ ID NO: 930911 - DNA, 120 bp, Artificial Sequence
  ENSG00000286539_1 (sequence is synthesized)
tggatattttctgttagcattgtctgccataataaatagaggtcataaagctttgatctaaacatattcagtggggattaatactgcaagcagatcattcatctgaactttgagaatgta

SEQ ID NO: 930912 - DNA, 120 bp, Artificial Sequence
  ENSG00000286539_2 (sequence is synthesized)
cttacaagccaatttagtaaatgaataatggcataaagactatttgtgagtctcagagaaatgtatacctcttccaagatctctgatttttttttttaatttcactctaattctttttcc

SEQ ID NO: 930913 - DNA, 120 bp, Artificial Sequence
  ENSG00000286539_3 (sequence is synthesized)
agtacataatgttttatttcaaattttgataaaaccatgtcttctttagggtcaaattttataatcacttatattaactacaatgacaaatagttccaccacaaccagtaataataattg

SEQ ID NO: 930914 - DNA, 120 bp, Artificial Sequence
  ENSG00000286539_4 (sequence is synthesized)
caagataataattgtccttcagaacctctaactcctgtatcctcagaatgttgctgagaaaagtgaaatataaattgtaaataaatttgcttttaagatagataactttgaatttgagtg

SEQ ID NO: 930915 - DNA, 120 bp, Artificial Sequence
  ENSG00000286539_5 (sequence is synthesized)
aattgcttatttaaagttcgtttatcttctaggaatccacctgtatagagattgtttgactacaatatatgataaataatccaactcattgaaacatgtcaattcaaaggacaagtcgag

SEQ ID NO: 930916 - DNA, 120 bp, Artificial Sequence
  ENSG00000286539_6 (sequence is synthesized)
tttgtttcactggctactgacattgctgattcctgtgaatcaagtaatgatctcctgcagctcagaagaaacaaactgggatagaatctggtggaggcaaaccagtattacaacccatca

SEQ ID NO: 930917 - DNA, 120 bp, Artificial Sequence
  ENSG00000286539_7 (sequence is synthesized)
gaatggctgacagcaatcaaactccaaatggtactgcagacagaaccatgcatggacatgcctttcttctgaggacccttagatctaccccaggaggacgcctagctgctgttccacata

SEQ ID NO: 930918 - DNA, 120 bp, Artificial Sequence
  ENSG00000286539_8 (sequence is synthesized)
tgactccccttttcagcaggaagtggccagaaagagtcatagtccaacatcccctaacagcagttaggattaccactcctgagggagaagttatatagaatttaaaaagaaattatttag

SEQ ID NO: 930919 - DNA, 120 bp, Artificial Sequence
  ENSG00000286539_9 (sequence is synthesized)
aggccccaaaccatttcttttctaacagaaagcagcctggaaagtcaagctgcaagcataggtaaggaagctggaagcttgcatagatgaatgccgacagctatacgaaaagctccaggt

SEQ ID NO: 930920 - DNA, 120 bp, Artificial Sequence
  ENSG00000286539_10 (sequence is synthesized)
acacccaacatggtgacttcccctcctttctctttgctagccacatgtacagtaaggagcagacaagatggtgctggccaagtggaaagcctctttgcataataagattaggatggggca

SEQ ID NO: 930921 - DNA, 120 bp, Artificial Sequence
  ENSG00000286539_11 (sequence is synthesized)
acccgccttacctgcgtactatgtaaatatcacacctcgtcaaaccaatctgtgggccttatgtaaatcagacaccacctcctaaagcctggctataaaatacgccatggtccaccacag

SEQ ID NO: 930922 - DNA, 120 bp, Artificial Sequence
  ENSG00000286539_12 (sequence is synthesized)
gccaactttttcctttcagatggctctctcttgccagagagagagagctgctcacctctctcctttcttctgcctattaatctttttggtccttaacccacccacatgtgtccgtgtcct

SEQ ID NO: 930923 - DNA, 120 bp, Artificial Sequence
  ENSG00000286539_13 (sequence is synthesized)
taatcatcatggcatgagacaataaaccctgggtatttgccccagacaaaaatgccacttcactgtcacacaaaaaaatctcccatatgcaatatttctctttattcttttttatggaga

SEQ ID NO: 930924 - DNA, 120 bp, Artificial Sequence
  ENSG00000286539_14 (sequence is synthesized)
cattgttggtcttcaacaaagatagttgagttataatggaaggtgccagtatctctgagtcacttcttgtagcaatcctgcctacaaggaacattggattttcattaattcgtactaaac

SEQ ID NO: 930925 - DNA, 120 bp, Artificial Sequence
  ENSG00000286539_15 (sequence is synthesized)
tgtttatgtgtcattaaactgtggttttggcactatttgttgatacagatagcaagagtggcaggaggcagacaaatgcctaggcagataggggtgggtccctggtgaaaccccacctcc

SEQ ID NO: 930926 - DNA, 120 bp, Artificial Sequence
  ENSG00000286539_16 (sequence is synthesized)
agatcaaagaaatttaaacatgacagccaaactataagttaaatccttggcagactgtgaacttgtcttcccatttggtgggctttcctctgcttaatccccacccttcaccaactttat

SEQ ID NO: 930927 - DNA, 120 bp, Artificial Sequence
  ENSG00000286539_17 (sequence is synthesized)
atccccacccttcaccaactttatatatacctaccctttcctaaatggttttctacactgttgtgcccaccttttagtggtgtcttcactttaaacttttttgcatactcacaaaccaat

SEQ ID NO: 930928 - DNA, 120 bp, Artificial Sequence
  ENSG00000286539_18 (sequence is synthesized)
ccataaaagacctggacccagccacatgggggacttttcagccttctggtagggggacaacccccacatcccctctctgctgaaagctgtttcatcactcaataaagttcttctctgccc

SEQ ID NO: 930929 - DNA, 120 bp, Artificial Sequence
  ENSG00000263393_0 (sequence is synthesized)
aaacctagctgactccatatattatgtagttaggtccaaacttaattgtagttgttttctgatgccaatagctgtcactgtatgtcccttgaaaatttttaatattctgtagtattccac

SEQ ID NO: 930930 - DNA, 120 bp, Artificial Sequence
  ENSG00000263393_1 (sequence is synthesized)
attttgcaaaccttttatctaggaacttaaaacttctaaaagacttccatcaatatcgtatctctaataaataccaggccctaggaatccaacatccaaaattcaaaggaaaagaaaaaa

SEQ ID NO: 930931 - DNA, 120 bp, Artificial Sequence
  ENSG00000263393_2 (sequence is synthesized)
ctgaatttcaggaagggacagttcaacacagacaactttacctgaatcgtgtgtggaagaaacctgaccacagtgaaagagaataactaaactcttctaacctaatgtgattcttaaaag

SEQ ID NO: 930932 - DNA, 120 bp, Artificial Sequence
  ENSG00000263393_3 (sequence is synthesized)
cagtaactgcattttctatttctaaactgctaacttcaaacactatgcctaatgatgtaactgattttttttttttttttaagtttaatttatggccagagtttaaaaagttgaacttaa

SEQ ID NO: 930933 - DNA, 73 bp, Artificial Sequence
  ENSG00000251048_0 (sequence is synthesized)
atcattatggttcttaggtttctgggatgtgtgggagtgggacccactaagcgagaccacttggctccctggc

SEQ ID NO: 930934 - DNA, 88 bp, Artificial Sequence
  ENSG00000251048_1 (sequence is synthesized)
catctcactggggttccaggtgccactgggaggaagaaacttaaggcccaacaaatttatgcattgagccaaggacaagaaagaaata

SEQ ID NO: 930935 - DNA, 120 bp, Artificial Sequence
  ENSG00000251048_2 (sequence is synthesized)
aaaagacaaattccttcgacttcagaattcatgacttttctactagcccaggttacattttgtttaactgccaaatcacagtgcatttgatgtcacagatgttgtgctctcattttgcag

SEQ ID NO: 930936 - DNA, 120 bp, Artificial Sequence
  ENSG00000251048_3 (sequence is synthesized)
ccttctgtcctcaggaagactcaggcagcatgttcctctgttattgaacgtacacaatattgtaattaattgtttacctatctggcactcccaataaactgtacttcttatgcataagaa

SEQ ID NO: 930937 - DNA, 120 bp, Artificial Sequence
  ENSG00000251049_0 (sequence is synthesized)
ggggcttgaatggcaaagatgaaaccaagaatgcaaatatcttatccagaaaaaatatatggcatgaggcctacttgtctgcactaagtgtctcaaggggcatggcttagtcaaaccaca

SEQ ID NO: 930938 - DNA, 120 bp, Artificial Sequence
  ENSG00000251049_1 (sequence is synthesized)
actccatggaacttaatgaagcagagcactttagtgaaaagagaaaagaagaaagaaaataaagaaggaaggaaaaggggaacaaaggaactgttccagtcaagcctccaaggacctcca

SEQ ID NO: 930939 - DNA, 120 bp, Artificial Sequence
  ENSG00000251049_2 (sequence is synthesized)
tggatgtcaaatccatgttgctaaattcaaggagaatgttctttccttatctcagtttgtgaaagtagaatcctcacgaatggaattagtgcccttataagaagaaatacaagagaaatg

SEQ ID NO: 930940 - DNA, 120 bp, Artificial Sequence
  ENSG00000251049_3 (sequence is synthesized)
ataagaggatacagtgtaaagacagacctctgcaagagagccgtcactgagaaatgaacctgctgccctcctgatcttggatgggccagcttcagaaatgtgaaaaataaaggtttcttg

SEQ ID NO: 930941 - DNA, 120 bp, Artificial Sequence
  ENSG00000251049_4 (sequence is synthesized)
tttaagccacccaggcaatgatatgtgttatggcaccctaagctgactaaggacagctttcttcctcaatctcattcatgggtcctcaggactatgagttggatatttttcatcagcatg

SEQ ID NO: 930942 - DNA, 120 bp, Artificial Sequence
  ENSG00000251049_5 (sequence is synthesized)
ctgatataatgcctttgtttaattttctgtgtctcgaatttttagctctaggtccagaacttgcctttggcttctatttgtgtgtgtattgcatctgtctcaccatatatcaacaggtat

SEQ ID NO: 930943 - DNA, 87 bp, Artificial Sequence
  ENSG00000215244_0 (sequence is synthesized)
gattgtaagtttcctgaggcctccctagaagctgagcagatgccagcaccacgctttctgtacagcctaaggaactatgagccaatg

SEQ ID NO: 930944 - DNA, 120 bp, Artificial Sequence
  ENSG00000215244_1 (sequence is synthesized)
gatatggagttaccagtaaggagctccaccgtgactctcctccctgctccgttgccccgacgaggaagtgtgaaaacgtttctggctccatccaagagttacttccctgaagaagagagg

SEQ ID NO: 930945 - DNA, 120 bp, Artificial Sequence
  ENSG00000215244_2 (sequence is synthesized)
gctttgttgaagtcttcccatgctttctgcacagggctctggccttggagaagggatttccagttaccgcagtgtcacttggccctgggtctcctcccgggagagagaagtgtacggctc

SEQ ID NO: 930946 - DNA, 120 bp, Artificial Sequence
  ENSG00000215244_3 (sequence is synthesized)
ccaaggttcctggcagttttgaaagagctctcagccacagccagctttactttggcaagtgaggccatcccctttctttcctcctttcctttcccatggaacctactccttccatctgtc

SEQ ID NO: 930947 - DNA, 120 bp, Artificial Sequence
  ENSG00000215244_4 (sequence is synthesized)
tttcaagctctgcctcagaaatggcaattcaaggctgattttctccttgaatgcactctctctgtgaaagaggcttttcaccaagaatgtggtgctggtgtttctcttgccaatgggcta

SEQ ID NO: 930948 - DNA, 120 bp, Artificial Sequence
  ENSG00000215244_5 (sequence is synthesized)
aacaaaggcctccgcaccgggtaacatttgggcaggcctcttcacacatgcctgtccttctccgtcgcacttggctaaagccaacaacctatgtgtgaaaagtataaagagatggaaaaa

SEQ ID NO: 930949 - DNA, 120 bp, Artificial Sequence
  ENSG00000215244_6 (sequence is synthesized)
ttcccatgaaaaatccttccgcaaagcaattgcgagacaactatggcgtcatctgataacatgatttctattttgcatctgttccattgttggagggcactcatagttgcaagccttgca

SEQ ID NO: 930950 - DNA, 120 bp, Artificial Sequence
  ENSG00000215244_7 (sequence is synthesized)
tgtacatatgtaaaaattataagtgaatgcatctgctcaggttattagccactgattgtgaaataatctgaagtttgagagtctcagttaataacctataggtgctgagagcattcaaag

SEQ ID NO: 930951 - DNA, 120 bp, Artificial Sequence
  ENSG00000215244_8 (sequence is synthesized)
acccaatagcataagtattaatcacctcttttctccagagtagcaaataagaaaccaggaagagctcagtttcacttccaacttgttctttaagggcctcagagttgatagttgtcctca

SEQ ID NO: 930952 - DNA, 120 bp, Artificial Sequence
  ENSG00000215244_9 (sequence is synthesized)
tctgggctccctaatgccacgacaaatcaactagaaaagaaatatgccccaaatcagcacccaaacacgctggtgccagcctgtgtccatgttcctgcaacagctgctgcccacggggta

SEQ ID NO: 930953 - DNA, 120 bp, Artificial Sequence
  ENSG00000215244_10 (sequence is synthesized)
ggactgagccaggtctaagattagcagtgtcccagctcctcaggttcctgcacattgactcacaacggaatcaaaactcgggagctcaactctctggtttcttctgctttctcttctgca

SEQ ID NO: 930954 - DNA, 120 bp, Artificial Sequence
  ENSG00000215244_11 (sequence is synthesized)
attttctttcttttttttttttttaactttattttactggcaaccatgaaagagatatttacagcaagactcagagcaaggtcagagacccctaaacaggtggttttcccttaacttatc

SEQ ID NO: 930955 - DNA, 120 bp, Artificial Sequence
  ENSG00000215244_12 (sequence is synthesized)
tggctggaagctggttggcttcatccaagggcctacttcgaggggattcatgcctctgcaagtttgagcatccctcactcctggcgctggcggtgccactcagccacggactggagcatc

SEQ ID NO: 930956 - DNA, 120 bp, Artificial Sequence
  ENSG00000215244_13 (sequence is synthesized)
cacttggtctggagcttgtacaaatagtagccataaaccacgactttggtgaggtctgaagactccagaggcttcagctcgagcatggccttgctcaccagctcaatgtaagggattcct

SEQ ID NO: 930957 - DNA, 120 bp, Artificial Sequence
  ENSG00000215244_14 (sequence is synthesized)
ccctcgccaacctccagagagttaaagacatctctaccacccggtggagaagaaagctgaccactggtgtgcttccagaatgcgagaagctcttgaagcccaacattccctttcagtgat

SEQ ID NO: 930958 - DNA, 120 bp, Artificial Sequence
  ENSG00000215244_15 (sequence is synthesized)
attactgacattttcccaaagctgtgttcttcagagctgcacatggcattgttaacaactatttcttaaaaacatttcttttagagacgggattttgccatgttggcaggttggtctcaa

SEQ ID NO: 930959 - DNA, 120 bp, Artificial Sequence
  ENSG00000215244_16 (sequence is synthesized)
acttttgggctcaagagatccaccctcctcagcttcccaaagtgctgggattaacaggcctgagcactgcgcaacaactattgaaacccttgtcaggcgcctgttggacccctggagcct

SEQ ID NO: 930960 - DNA, 120 bp, Artificial Sequence
  ENSG00000215244_17 (sequence is synthesized)
ggttaatgggaacgaccacagtgggcatcaaatgggtaacttcagtacgccagcacggttgagaactattgttcaacgcgaacttcacatatgaagcccctctcatgtgtcaggcacggc

SEQ ID NO: 930961 - DNA, 120 bp, Artificial Sequence
  ENSG00000215244_18 (sequence is synthesized)
gtcagatgctggacggcaagaaggtggccttctgcaaatggggatgagtcctcaccaggtgtgggatctgccagcacctcgatcttgggcttcccagcctcagtactgtaagaaagtttc

SEQ ID NO: 930962 - DNA, 65 bp, Artificial Sequence
  ENSG00000215244_19 (sequence is synthesized)
cccagcctcagtactgtaagaaagttctgccttccagtttcaagtgattctactgcctcagcctc

SEQ ID NO: 930963 - DNA, 62 bp, Artificial Sequence
  ENSG00000215244_20 (sequence is synthesized)
ctgggattacaggcacccaccactatgctcggctaatttttttgtattttcaatagtgacag

SEQ ID NO: 930964 - DNA, 120 bp, Artificial Sequence
  ENSG00000215244_21 (sequence is synthesized)
attacaggcgtgagccatcgcgcccagcccataagttttagtgcctttttttcatagatgctgaaactgaaaaagggtgtggttaaataatttgcccaagccagtctctggcaaagatgg

SEQ ID NO: 930965 - DNA, 120 bp, Artificial Sequence
  ENSG00000215244_22 (sequence is synthesized)
gattcatatccagctactgatgaccaaacatggtgagcaggtatcctatgtcccgaggaagcccattccacctgagcactggatggaagggatatcgcaatcacccccatgcatgatgga

SEQ ID NO: 930966 - DNA, 120 bp, Artificial Sequence
  ENSG00000215244_23 (sequence is synthesized)
caggtctaggagcattggacactcaatggaaactcatgcccctgtcagaaattggcaactgccacttccacggcacttgcaaactttgcacacggtccagatgtggcctggcttgttgct

SEQ ID NO: 930967 - DNA, 120 bp, Artificial Sequence
  ENSG00000215244_24 (sequence is synthesized)
gtcatggtagcaatagtaattacttaggggatttctgcagatcttgctcatattgtgcataatagggtataaaatatggaaaatttgcctctaaaataaagtgttgctggcaaactcaaa

SEQ ID NO: 930968 - DNA, 120 bp, Artificial Sequence
  ENSG00000215244_25 (sequence is synthesized)
aagagctctcagccacagccagctttactttggcaagaaggtgaacacgtgcccagctaaaagcctatatttcagtgtcccttgctggaattgtggccaaggagatgtaagtggaagtca

SEQ ID NO: 930969 - DNA, 120 bp, Artificial Sequence
  ENSG00000215244_26 (sequence is synthesized)
ctggatgggattctgggaaggctttgtgaaggtggctgacccagctggaaaaagtgaccttttgtacttctgtcttctccttttttgtatctgcaaagaagtggaatgactggagctcca

SEQ ID NO: 930970 - DNA, 120 bp, Artificial Sequence
  ENSG00000215244_27 (sequence is synthesized)
gcagccatcttgtgcctatgagtttctacaaagaattatggatgatttttatatttagaaaacctttttttatttgtggacatctattacctgtgggccccacagcagcatggaaaagat

SEQ ID NO: 930971 - DNA, 120 bp, Artificial Sequence
  ENSG00000215244_28 (sequence is synthesized)
ctaagctgtgattttctgtgtaattaagaaccaaactaaagtttaaaaaatatgcctttgttttatggaagagtccagagacaccatcattatactgtgtgtctttataaaacccatata

SEQ ID NO: 930972 - DNA, 120 bp, Artificial Sequence
  ENSG00000215244_29 (sequence is synthesized)
gtgtgtctttataaaacccatataccttattcttttgttttatctagctattatattgtctataacttacttttaaatattctagtatagacaggtgtgtgtgtgtgtgtgcgtgtgtgt

SEQ ID NO: 930973 - DNA, 120 bp, Artificial Sequence
  ENSG00000215244_30 (sequence is synthesized)
ggttgtagctaaaatttaaaatactttaactggacacacatcttttaggagtggttggtagtgtttgaaggactactataaggccttaatgatctttatctctagagagttctagaaggt

SEQ ID NO: 930974 - DNA, 120 bp, Artificial Sequence
  ENSG00000215244_31 (sequence is synthesized)
tccctaattagcctaataaataaaagaagttattttgcactggaaaattaaggagtgttggagatatgtgatttggctagtgctatttaaagacacccctgtccttgcataaatagggtt

SEQ ID NO: 930975 - DNA, 120 bp, Artificial Sequence
  ENSG00000215244_32 (sequence is synthesized)
taggaatctagtaatcctggattacaaactttgtttggagtgatgcctaaaccaggtatgccaatctgtcttgtgtccacatactaacagagggttctagcaacttaatcccattagcat

SEQ ID NO: 930976 - DNA, 120 bp, Artificial Sequence
  ENSG00000215244_33 (sequence is synthesized)
gttagctgaagactactgctagaatgctgttatgtttgtttagagttaatatttcatggaaatgtctgaaccctggtactgtattaaactcatagaaatggctttgtgcctgtttgctaa

SEQ ID NO: 930977 - DNA, 120 bp, Artificial Sequence
  ENSG00000215244_34 (sequence is synthesized)
caggcgtgagccaccgcgcccggccgaggtgttctttctatgtcagtggttctcaaccttgaccgcatgttagagtcgttagaggagcttaaaatgtccagactgtgccccagagcagaa

SEQ ID NO: 930978 - DNA, 120 bp, Artificial Sequence
  ENSG00000215244_35 (sequence is synthesized)
tccctcgggatagggtcgatggattaggactttttttaagctgataattttatatctatgtaagatcttctgtttcctgaacttcgtgtgaacaggtcaggcgcctgttggacccctgga

SEQ ID NO: 930979 - DNA, 120 bp, Artificial Sequence
  ENSG00000215244_36 (sequence is synthesized)
atggagcctcatgacagggtgagagagagcccttacaagaagagacacaggagagatgatctctttctgtctcctctccgccatgtgaggacggcaagaaggtggccttctgcaaatggg

SEQ ID NO: 930980 - DNA, 120 bp, Artificial Sequence
  ENSG00000215244_37 (sequence is synthesized)
gatgagtcctcaccaggtgtgggatctgccagcacctcgatcttgggcttcccagcctcagtactgtaagaagtaagtgtctgttgtttaagccaccccatgtaatataattttgttata

SEQ ID NO: 930981 - DNA, 120 bp, Artificial Sequence
  ENSG00000215244_38 (sequence is synthesized)
atgggaacacatcccagtggcttacagaatcaaagatgaaagagagagggatacacgtggttgctggctcttccctgctgctcagatgcctggatcacttgactgccttctctatcaaag

SEQ ID NO: 930982 - DNA, 120 bp, Artificial Sequence
  ENSG00000215244_39 (sequence is synthesized)
aactattgaaacccttgtgagttaattggataattttgcctttttctaaacctttgagttgagactcctttatcactctcatttccagcacctcagtcttcctttttccttcccatcacc

SEQ ID NO: 930983 - DNA, 120 bp, Artificial Sequence
  ENSG00000215246_0 (sequence is synthesized)
gtgctgaccgtggtggctgagaggctacaggaggcactgaggggtgctgggggcttgatgccaccaaggaccccagaccaagtcatcttttttttctcgctcagctttgaagggaagtta

SEQ ID NO: 930984 - DNA, 120 bp, Artificial Sequence
  ENSG00000215246_1 (sequence is synthesized)
aagacaaagaggaagaggctgtatttcattctcccagatggctcctgccagcctccagagaaaaggcagctttcttctttagaaaattggcaggacaaaagaaggaagtcgacttggaaa

SEQ ID NO: 930985 - DNA, 120 bp, Artificial Sequence
  ENSG00000215246_2 (sequence is synthesized)
gtccagcgacagacctcgtgcccctgctctgggaggccgcaggtcaatggctccccctggcttcaggggacacagctcaagcctggaaggagcccatggccagcctgaaagccttgctca

SEQ ID NO: 930986 - DNA, 120 bp, Artificial Sequence
  ENSG00000215246_3 (sequence is synthesized)
cacccagcatccgcagctggggcaagagcggctactcccaagacaggaaaagacacacagcctaactttgccactgtgaagggagacttctctctaatgcctaactagacacttatcttc

SEQ ID NO: 930987 - DNA, 120 bp, Artificial Sequence
  ENSG00000215246_4 (sequence is synthesized)
caacctcctcaaaatgccttcaatagaagtcccaggaagacacggagccccagccgcccactgactcctacaggatgcagctgcgccaggcagcccatcccagggggcccaggccaaaga

SEQ ID NO: 930988 - DNA, 120 bp, Artificial Sequence
  ENSG00000215246_5 (sequence is synthesized)
ggggccagggtgcttcccctgagaatgaaaagggatgtcgggtagagggggagggtgatgtgggactcgctggtggctgttaaaggagctcgcgtctcggttcctgcaggaaaagtgctt

SEQ ID NO: 930989 - DNA, 120 bp, Artificial Sequence
  ENSG00000215246_6 (sequence is synthesized)
tgagcactcgcctggcctggtgaagaaggaaggcagttggcgggcatttttggaagctctcaccccccatgctggtcctggtaccccttctccagggatgcggggcccacattcatcaca

SEQ ID NO: 930990 - DNA, 120 bp, Artificial Sequence
  ENSG00000215246_7 (sequence is synthesized)
gtggggttccatagatgatggtcctgtcatatcagggttcccattgaagggggccctttttggcactttcttttattccattagtctgtttgcctggtcacacattttattgctttttcc

SEQ ID NO: 930991 - DNA, 60 bp, Artificial Sequence
  ENSG00000215246_8 (sequence is synthesized)
ttagtctgtttgcctggtcacacattttattgctttttcccgcaaaagaatcaatgtggg

SEQ ID NO: 930992 - DNA, 120 bp, Artificial Sequence
  ENSG00000215246_9 (sequence is synthesized)
caggtgtgagccactgcgcccagccaggaatttatttttaaattaaatttgatttatttagtttcctaacccttttattgtttttaggcaattttttgaagtataatatgaataagaaaa

SEQ ID NO: 930993 - DNA, 120 bp, Artificial Sequence
  ENSG00000215246_10 (sequence is synthesized)
aataagaaaattatggtgaattgttacagcatcgagacctccaagaccaggacatagaacaatcccagcccccagaaacctccaccccataaggctccacaacccctcttctaacacaca

SEQ ID NO: 930994 - DNA, 120 bp, Artificial Sequence
  ENSG00000215246_11 (sequence is synthesized)
gattaccttcagctcttcttgaacttcatataagtgtgaaactcacccatgctgttgaacacagcactgtttcattcatgtaagcggccttatagtattccattatgtgaacgcagttta

SEQ ID NO: 930995 - DNA, 120 bp, Artificial Sequence
  ENSG00000215246_12 (sequence is synthesized)
ttatccgttctgttaatcacagtagtttttacctgttgtgagtaagggtgtcacaaacagcctcatgtgtactttgtggcagatggaattcttgtacagatgtggaacatacactggatt

SEQ ID NO: 930996 - DNA, 120 bp, Artificial Sequence
  ENSG00000215246_13 (sequence is synthesized)
tgaagtgctgggttatagagtatgcacatgctcagctttatcaaacagggcttaacagcttttcagagtggctgtgccaactcacactctccaacagtctatgggagttccagttgcccc

SEQ ID NO: 930997 - DNA, 120 bp, Artificial Sequence
  ENSG00000215246_14 (sequence is synthesized)
acacccttgccaccacttgcaattgtcagctgtaaattttagccattttgtcgggtgtatattggtattttattgtgtttttgatactcgttgctcccgcaatcgttgaagttgagcacg

SEQ ID NO: 930998 - DNA, 120 bp, Artificial Sequence
  ENSG00000215246_15 (sequence is synthesized)
gttgtatatgcttattggcaatttggatactgtctttgcgttttcaaaaattgggtttttgtcttttattgatttgtagaatttctttattctgaatttgagttcttagttgtgcttgtg

SEQ ID NO: 930999 - DNA, 120 bp, Artificial Sequence
  ENSG00000215246_16 (sequence is synthesized)
tgtgtgcacatagtaaacacacacacaggttaaaataattgggagatcattagaatgagatgaccccagcgccttgggtttcaactcaagcaaaccaaagtccatctcagtgtacatggt

SEQ ID NO: 931000 - DNA, 120 bp, Artificial Sequence
  ENSG00000215246_17 (sequence is synthesized)
agtgtacatggttatagttcaggtaagcagaaaccaccggctgatctctaacacggggcttttgactggaatgatttctttccctttctttctctttctttctttctctctttctctctt

SEQ ID NO: 931001 - DNA, 120 bp, Artificial Sequence
  ENSG00000215246_18 (sequence is synthesized)
tctctcttcctttctttttttctttcctatctttctgcctttctttccttccttccttccatccttccatctctttctttttcttttctctttcttttctttctctccctctctctttct

SEQ ID NO: 931002 - DNA, 120 bp, Artificial Sequence
  ENSG00000215246_19 (sequence is synthesized)
ttcctccctccctttcttccttccttccttctttccttccttcccttcctccttccctccttcccctccctccctaaaattcatagaataaaaaaatgcctgaatagccaaagtaatcct

SEQ ID NO: 931003 - DNA, 120 bp, Artificial Sequence
  ENSG00000215246_20 (sequence is synthesized)
agaacaaagctggaggaatcacattacctgacttcaaattatcttacaaggctatggtaaccaaaacagcatggtatttaggattgttttcccaattctttgaaaagcgatgttggtatc

SEQ ID NO: 931004 - DNA, 120 bp, Artificial Sequence
  ENSG00000215246_21 (sequence is synthesized)
tgaatctgtagattgctttgggtagtgtggtcactttcacaatattgattcttccaatccatgatcatgggatgtatttccgttggtttgtgtcatatacaatttctttcagcagtgttt

SEQ ID NO: 931005 - DNA, 120 bp, Artificial Sequence
  ENSG00000215246_22 (sequence is synthesized)
atacaatttctttcagcagtgtttgctaggtctccttgtagagatatttcacctcttggtcaagttatttctagttattttattttactttttgcagctattgtaaaagagctcgggttc

SEQ ID NO: 931006 - DNA, 78 bp, Artificial Sequence
  ENSG00000215246_23 (sequence is synthesized)
cactgaattcatttatcagcaattcattcatttttagaggatacttggtccatgcacatgtcagagattgttgtaatg

SEQ ID NO: 931007 - DNA, 120 bp, Artificial Sequence
  ENSG00000215246_24 (sequence is synthesized)
ggatacttggtccatgcacatgtcagagattgttgtaatgtttctttcttgcaatgatctcatcacattttaatcacaaagtcaggctagtcttttaaataaagttgcaaagcattaatc

SEQ ID NO: 931008 - DNA, 120 bp, Artificial Sequence
  ENSG00000251045_0 (sequence is synthesized)
agagagaacaacattccctatgagaaccctgagtatatgcttgccctgtggctgtgtctggctatacaattcctggaacaactcagtcctggagtgggttcttggatcagaagcaacgct

SEQ ID NO: 931009 - DNA, 120 bp, Artificial Sequence
  ENSG00000251045_1 (sequence is synthesized)
atggagaatgtcataatggtggataggcattttgtgaatccatggatggtggtgctggcagaagcactatgtgcaaagaagggtcatcccttgtcctggagtcatccttctccaaggcag

SEQ ID NO: 931010 - DNA, 120 bp, Artificial Sequence
  ENSG00000251045_2 (sequence is synthesized)
caccctcctgatgaacccggctggttcctgggaactcactgtgtctggaggctctctcccaccccatgtgaaggaagcatcatcctcaatcaatgttgccacacttctgacctcttgaat

SEQ ID NO: 931011 - DNA, 120 bp, Artificial Sequence
  ENSG00000251045_3 (sequence is synthesized)
gctggcaatgtccgtccattctcatgactaagtgagcttggagtgtaccagtcaaggaaaagggaggagaaaggagaaaccaaactttgagtagcaattgtctacagtgtgtggcttaga

SEQ ID NO: 931012 - DNA, 120 bp, Artificial Sequence
  ENSG00000251045_4 (sequence is synthesized)
gaatcaagctgacacaggccagagaatacaggcctcagcaaggactatgaggttggacaaggcttcacagaatttctggcactggagctgggcctcctgacagctttctctccaagcaat

SEQ ID NO: 931013 - DNA, 120 bp, Artificial Sequence
  ENSG00000251045_5 (sequence is synthesized)
tatgggccacctaaagaaatgagactgcaggaaatataagaatatttttgaagaatatgaatgatcataagaaaagggcgaactatgagaatggcctctgacgatggctggcaggagaag

SEQ ID NO: 931014 - DNA, 120 bp, Artificial Sequence
  ENSG00000251045_6 (sequence is synthesized)
cgggtggatgtaggaaaggctgcattaattcactgtctttctacaagtgcttagggagccatggttttcagcttcttagccaagagcttggcattttgctgcatgggtgctgtgcttaat

SEQ ID NO: 931015 - DNA, 120 bp, Artificial Sequence
  ENSG00000251045_7 (sequence is synthesized)
ctagggcatgtccattccaaggtctctgatgggtacacacatagtcctctttgcatcctgtatacccatgatcatcctaaccccaaagccaccccctactacccaggacacatagtcaaa

SEQ ID NO: 931016 - DNA, 120 bp, Artificial Sequence
  ENSG00000251045_8 (sequence is synthesized)
gtgctgttgtgttgcctgggattcctttccctccaccctttgtacactggctcctcctaacccttctggtctaagtataaaggcactaccccagagaagtcttccctgactaccccatct

SEQ ID NO: 931017 - DNA, 120 bp, Artificial Sequence
  ENSG00000251045_9 (sequence is synthesized)
gagtcactggccactctcaccaaagcaccctgtctgctatttgttaccccttcttcaactgtggttcacctgttcgtattccttctccccagccggcatacagtcaccaccaagtcaggt

SEQ ID NO: 931018 - DNA, 120 bp, Artificial Sequence
  ENSG00000251045_10 (sequence is synthesized)
acccaacatagtacctgggatggattagacactcagtcaacacttgatgaagaaaacaataaagccttatagactcatgtccccctcatgaggggtgccctagccaactgacaccaagtc

SEQ ID NO: 931019 - DNA, 120 bp, Artificial Sequence
  ENSG00000251045_11 (sequence is synthesized)
aatcatttacaccattttttttcaatttgtgttattaaccacagaactcttttccaccctaaaataatcttatcccacaagaccccatacctagtgatttctgtggatgctgttgccaaa

SEQ ID NO: 931020 - DNA, 120 bp, Artificial Sequence
  ENSG00000251045_12 (sequence is synthesized)
cacctcagggcaagggccaggcacaggacagggttcccgctattgtctctactccatcttcccataaattggttagctgggacctcctcactgagtcgcatggctccaacaagaatccaa

SEQ ID NO: 931021 - DNA, 120 bp, Artificial Sequence
  ENSG00000251045_13 (sequence is synthesized)
agctggcaacaggaactctgcagggctctcccagagggaagctgggaagttaaggctgcaggctccaagcccttgttcctggaagagaactaaggaactggtaccataaccggtgtccag

SEQ ID NO: 931022 - DNA, 120 bp, Artificial Sequence
  ENSG00000251045_14 (sequence is synthesized)
gctgctggtttgccccagttctgggcagccacaggcccccaggggcataatgaccagctagtgccttgtcttctcctgcctcttccatgcttttactgtgattctcatccacaggcacca

SEQ ID NO: 931023 - DNA, 120 bp, Artificial Sequence
  ENSG00000251045_15 (sequence is synthesized)
gaagaaggggactttctaagcactgtttacattcttgtcattttgcctgtgtttagacttacaaaaaaatgcatcttaatcatttacaagcaatcataggccctcatggatttcaagtaa

SEQ ID NO: 931024 - DNA, 120 bp, Artificial Sequence
  ENSG00000251045_16 (sequence is synthesized)
actttcctataaaccagtcaacttcagagtctctgttccctctaggatcataaaccctcagagctggtaggcccttaagctagagaaattgaggccttggggttagggacctgcccaggc

SEQ ID NO: 931025 - DNA, 120 bp, Artificial Sequence
  ENSG00000215241_0 (sequence is synthesized)
aacagctttcacgggcctcaagattgtcacgtggcatgaaagacactcatctcaggccacacaggattccattcatcgaacattcctgagacaacggaattctggcgatggagcacagca

SEQ ID NO: 931026 - DNA, 120 bp, Artificial Sequence
  ENSG00000215241_1 (sequence is synthesized)
tggagcacagcaggtctgctactgcctactaaggaacggcttctcgacatcctcctgtcaaaccctgcatgttcaggcccatctttaaaatccatcctaggccaggtgcagtggctcatg

SEQ ID NO: 931027 - DNA, 90 bp, Artificial Sequence
  ENSG00000215241_2 (sequence is synthesized)
tcagggagccgagattgtgccacggtaatccagcctgggcaccacagtgagactgtctcaaaaaagtaaataaacaagtaaaaaataaaa

SEQ ID NO: 931028 - DNA, 120 bp, Artificial Sequence
  ENSG00000215241_3 (sequence is synthesized)
atctcaggccacacaggattccattcatcgaacattcctgagacaacggaattctggcgatggagcacaggatgcttcacagtctacggcaaaggacagaacgttggttgctcgagagcc

SEQ ID NO: 931029 - DNA, 120 bp, Artificial Sequence
  ENSG00000215241_4 (sequence is synthesized)
cgttctggccccacgcatctgaagttcgtcttaagatgtgtgaaagcctcagcgcatgagccaattctgtgcagtgctcgacatacagatgagaacactgaggcacgaggcacagcctgt

SEQ ID NO: 931030 - DNA, 120 bp, Artificial Sequence
  ENSG00000215241_5 (sequence is synthesized)
gatctggccaccgcgctcaggaggaggtggttacccgcgggcctgagggcgctgactttttagaatgggcgagtgcagctgtgtcccagtgtcccagtgaccagaacgattactgccttt

SEQ ID NO: 931031 - DNA, 120 bp, Artificial Sequence
  ENSG00000215241_6 (sequence is synthesized)
ggacccggctgtgagggtcgctgaagatgtatgcccgggggcggcacatcttgcagatggcaaggcctgtgaggccggcaccactgccaagttctaggacagtcctggcgggaggaaagg

SEQ ID NO: 931032 - DNA, 120 bp, Artificial Sequence
  ENSG00000215241_7 (sequence is synthesized)
ggaccgtgtcttcgactgcaccagggtaagcctgccttggtgccctgccctgtgccccgaggtcacctgttagtgaaggctgctgggttctcgatggcccattctgcaaggcagagggtg

SEQ ID NO: 931033 - DNA, 120 bp, Artificial Sequence
  ENSG00000215241_8 (sequence is synthesized)
gcgtcccatgtgaccaggcctgtggtaccgtgagagatgatggctgtgctctcggagattgtgaccgagcctcccgagggctgcaccaagagagggcgagagagtcagtccagcgatcag

SEQ ID NO: 931034 - DNA, 120 bp, Artificial Sequence
  ENSG00000215241_9 (sequence is synthesized)
ccctgtcaagtattctttgaggactgagcaccaggtccttgtgaagcaggtagtgtgtgtcacctattggacaaatgcccaacaaccccacgagacatgctgttgttgttgaagtgcttg

SEQ ID NO: 931035 - DNA, 76 bp, Artificial Sequence
  ENSG00000215241_10 (sequence is synthesized)
acagggaaactgaggctaaagaaggttaatggacctcatgtctaagactgcagatctgtgcaggaagggtatctgg

SEQ ID NO: 931036 - DNA, 120 bp, Artificial Sequence
  ENSG00000215241_11 (sequence is synthesized)
ctgggctgtgagggggaggagggtgcccttctcataccagcaaatagctccggtggccctgggtggactccttgaccatcagagtctctgccagcccctcgtacagctcgtccaaaggct

SEQ ID NO: 931037 - DNA, 120 bp, Artificial Sequence
  ENSG00000215241_12 (sequence is synthesized)
ggctccgtgtggacagcctcgtgctgggggcatacagagtgagagcttgtttgctttcgtactaatctgtaaaaatggccagatgattttcaccaagtttggaggggagatttgggatgg

SEQ ID NO: 931038 - DNA, 120 bp, Artificial Sequence
  ENSG00000215241_13 (sequence is synthesized)
aatggtgtaataccggccagctggtatataaaatattcacttcgttgggcgtggtggtgtgtgtcgaatagttccagctgctctagaggctgacatgggaggactgcttgagcccaggag

SEQ ID NO: 931039 - DNA, 120 bp, Artificial Sequence
  ENSG00000215241_14 (sequence is synthesized)
ttcgaggacagcctgggcaacagagatcttgtctctaaaaaaaaataattccacttcgtagggaaacctggacgggagggccttcaacaagaggtgttgagaggggagggttaggtgtag

SEQ ID NO: 931040 - DNA, 120 bp, Artificial Sequence
  ENSG00000215241_15 (sequence is synthesized)
gaggggagggttaggtgtagtctagggcaggagacaaggattccgtgagagctgccacatgaccatgacagagagctctgtgtttggatcaaacacagagaggaggaaaacaaaaggtgc

SEQ ID NO: 931041 - DNA, 120 bp, Artificial Sequence
  ENSG00000215241_16 (sequence is synthesized)
aggcagcagcagggtacactgggtgactgctgccctctcgtggtggcacagggcagaccggctggcaaccacagatgcacccttttggggaggactagggagaaagcaggtattggagaa

SEQ ID NO: 931042 - DNA, 120 bp, Artificial Sequence
  ENSG00000251040_0 (sequence is synthesized)
tcctctcttcctcctcctggctcccaacttgtttcttctttcttatgtgccagttgctgtgctgaggatatgaagctaaataagcctctctccttttcctcatgaagctcaaaagcttag

SEQ ID NO: 931043 - DNA, 120 bp, Artificial Sequence
  ENSG00000251040_1 (sequence is synthesized)
ataggaagcaaataaatataatatagcatgataattgcaagaatattaacatgtccaaaagttaaagagagaaagcataaagaagaaagtgatgagctctgaggggttgaggcttttgct

SEQ ID NO: 931044 - DNA, 120 bp, Artificial Sequence
  ENSG00000251040_2 (sequence is synthesized)
gattgctatttagcacccatcaaaagctctgcagaggggaccatcattaacggcatttacgaagacatccacttattccaacagcaggaggaagaccaacgcttcttatcataaacacaa

SEQ ID NO: 931045 - DNA, 120 bp, Artificial Sequence
  ENSG00000251040_3 (sequence is synthesized)
gttcctgctatacacaacacatccttgaattctagggaagccaagatgtacatgaaatgactgcaggtcttaaaggtcttgaatctaattgtggcactggggcatatgtagagataaata

SEQ ID NO: 931046 - DNA, 120 bp, Artificial Sequence
  ENSG00000251040_4 (sequence is synthesized)
tcacgtagcatatgctaaggtgatttcgaagatctattctatcttaagacactgtaagtctaattattaaatgagcaatacagacatttagtcaaagtgtgttctgttttgagggagctg

SEQ ID NO: 931047 - DNA, 120 bp, Artificial Sequence
  ENSG00000259219_0 (sequence is synthesized)
acttgcaatcattcagggcaaaaacagcagctgcctgatagaagactgtttcaagatgttatggaatacatgtttgtgtctctgcaaaatgcagatgttggagccgtggaggtgggtggc

SEQ ID NO: 931048 - DNA, 120 bp, Artificial Sequence
  ENSG00000259219_1 (sequence is synthesized)
tttgggagataaacccttcggaggcagctcatggcctttcaaattcatgcattacacatgcagatttcagggctccatcccagacctcaggagtcggcatcaggcgcatggaagtttgag

SEQ ID NO: 931049 - DNA, 120 bp, Artificial Sequence
  ENSG00000259219_2 (sequence is synthesized)
gagtgctgaggttgagggatgaagtcacacaaggaagttcccgccttgaacacaagacaggtgctacagcaacgcgactcccgccctgctggtgttgggggcaccttggaggaagctggc

SEQ ID NO: 931050 - DNA, 120 bp, Artificial Sequence
  ENSG00000259219_3 (sequence is synthesized)
tgcacactgggatctactgcatgcagctacctggtgagctttgaaaaatcccacaccaatacaatccgatggtggagggggtcccaagacccagagctcagtgtttataaagctctccaa

SEQ ID NO: 931051 - DNA, 120 bp, Artificial Sequence
  ENSG00000259219_4 (sequence is synthesized)
gtgcttgcagtgggcattcagaaccgagggcctccgacttaacctgaacctcctctcaggtccctgtggagaatgcaaagagctctcttttcttcctgttaaggagtagttgtgtctctg

SEQ ID NO: 931052 - DNA, 120 bp, Artificial Sequence
  ENSG00000259219_5 (sequence is synthesized)
cacacacaaatatgtataattaagcaagaacaacatccaggcgcagccctgactgcagtctatagccagatgacaggtgtgcctaaaggtaagggagcaaaggctttcagtcaaaattct

SEQ ID NO: 931053 - DNA, 120 bp, Artificial Sequence
  ENSG00000259219_6 (sequence is synthesized)
gactccatctcaaaaaaaaaaaaaatcacttacaaaagcaatctggtaagtagttgtacccagaaactgagagtccacacaaatgtggtagatgaagggaaaagccaacgttcccaatgc

SEQ ID NO: 931054 - DNA, 120 bp, Artificial Sequence
  ENSG00000259219_7 (sequence is synthesized)
actgggagcgggacagactgaaaaaagggcagcatttgagtgaagtcagatacaaccacgtgccctctggcaaaccgacaggcgactcaaagtggagctggtgacgatgagaccaacact

SEQ ID NO: 931055 - DNA, 120 bp, Artificial Sequence
  ENSG00000259219_8 (sequence is synthesized)
acaatcaccaggttgcaccacacaaaactgcttctattcaactgttttgacctcaaagcatccatttcataaggctccattttataacataccaaggaaaatagcaacatttctaaattt

SEQ ID NO: 931056 - DNA, 120 bp, Artificial Sequence
  ENSG00000259219_9 (sequence is synthesized)
gaatgtttataatgcataactttaaatatgaatgtataactacatcaataagttacttaatggcaggcatttgatgagtccacttacatcactagagacttttatatctaaatgtgttat

SEQ ID NO: 931057 - DNA, 120 bp, Artificial Sequence
  ENSG00000259219_10 (sequence is synthesized)
gtaattcaaaagaaaccctgcttcctgggaaaacgggattaccatataatcagggttaatttctgtgactatttggcacgtatgaggcccacttaagaacagagggctgggtgcggtggc

SEQ ID NO: 931058 - DNA, 90 bp, Artificial Sequence
  ENSG00000259219_11 (sequence is synthesized)
ggctgggtgcggtggctcacacctgtaaccccagcattttgggaggctgcagtgggcaggtcacccacatggcaaaacgctgtctctact

SEQ ID NO: 931059 - DNA, 120 bp, Artificial Sequence
  ENSG00000259219_12 (sequence is synthesized)
tgggtgatagagcaagactctgtttcaaaaaagtaaaaactaaaaacagagagatacacctgctgcctgccgacctgcaggcaacaccaacatcccttttctcttcagatcttttctcgg

SEQ ID NO: 931060 - DNA, 120 bp, Artificial Sequence
  ENSG00000259219_13 (sequence is synthesized)
gccattggccacagtgccgcctctactgcaaaacatgtacccaggagggaaaggcaggcagcctcctattcctttctggagagaggagcatggggcagggggctgttggatttctgggga

SEQ ID NO: 931061 - DNA, 120 bp, Artificial Sequence
  ENSG00000259219_14 (sequence is synthesized)
ggaaactgcacagatggatggaggaacccgcctcactcccctgcatctcctgaagaggtgtccgtgccctgccagctggggagtcagtcccactgaatcactgctgttaaggggctcagc

SEQ ID NO: 931062 - DNA, 120 bp, Artificial Sequence
  ENSG00000259219_15 (sequence is synthesized)
cctgcaggagtgccaggaagggcttccgtttcttctgcgagtgttgctgatatgtatgtgaaaatcacacaagggcaagggcttcaccctgtgcgtctattaaaaccaagtgcagcattg

SEQ ID NO: 931063 - DNA, 120 bp, Artificial Sequence
  ENSG00000259218_0 (sequence is synthesized)
gggtgattcttttggactaattcatgtggctgcaattggagctggatgatctaaatggtctcactcctaggtctggctgttgatgttggctgttggctgagccaggggccgccagcaggc

SEQ ID NO: 931064 - DNA, 120 bp, Artificial Sequence
  ENSG00000259218_1 (sequence is synthesized)
tagcatgggctcttcactcagcagcagggttccccaagaggacaagcccaacacacatgtgcttttcaagcctgtgattatcaggcttgaaatactgcaacatctgctgcaatcagtaac

SEQ ID NO: 931065 - DNA, 120 bp, Artificial Sequence
  ENSG00000259218_2 (sequence is synthesized)
aaccacataagaaagcaatgacaagttatgattactgctctggagggagtgagcaggatgctgtgagagagggttactattccaagtggcacctgggccagcagcattggcatcacctgg

SEQ ID NO: 931066 - DNA, 120 bp, Artificial Sequence
  ENSG00000259218_3 (sequence is synthesized)
gacttgtgagaaatccagcatctcaggctccactgcaggtctcctaaatcagaatctacagtttaacaagatccccagcagatgtgtgtgtaaggtttatagagagaagattcaagcctc

SEQ ID NO: 931067 - DNA, 120 bp, Artificial Sequence
  ENSG00000259218_4 (sequence is synthesized)
agacctggcttgtgacagctgctcgtggcatgcccttctccactaagccaacttgttaaacctcttcacggctgagatcatgctgctttcttcttcagatctgccaccctctagctgggt

SEQ ID NO: 931068 - DNA, 120 bp, Artificial Sequence
  ENSG00000259218_5 (sequence is synthesized)
gacttttagacaagtgatcgacctctctgagccagagtttctaccttgtaaaaaaaaaaaaatcccttcctgcatggtcagctgtcatgaaaaggacacatggtgatgggcagacaaaga

SEQ ID NO: 931069 - DNA, 120 bp, Artificial Sequence
  ENSG00000259218_6 (sequence is synthesized)
caaggcttagcttcgtgtttgactcctaggagcgcccagttcatggaggctgctgctgtcactaatctgtttccatcttcccctgggaatcctgaggtttatctgtgagcctttggactg

SEQ ID NO: 931070 - DNA, 120 bp, Artificial Sequence
  ENSG00000259218_7 (sequence is synthesized)
ctgtatggacaacatactctgcagtagcatgaagaagtgagtgaagaccctcccttgaaccgtttgccctgaaagaacagaagtcacatcttgatatctcagtgcctttacagtgccagg

SEQ ID NO: 931071 - DNA, 120 bp, Artificial Sequence
  ENSG00000259218_8 (sequence is synthesized)
gatggggtaggtgctgagcgcctggtatgtgctcaccctatgctgtacaacacacagaaagccccacagggtttgaactgtaattaggtagagggtgtgtgggactcgccttgggtctct

SEQ ID NO: 931072 - DNA, 120 bp, Artificial Sequence
  ENSG00000259218_9 (sequence is synthesized)
gttggacaaggtgacttttaagccctcttctagcttcatgaaaacagatctgaaacttgcctgatctcagaaatggtagtaaaaacaccatgtacctgaatggtctggtggcaggtttta

SEQ ID NO: 931073 - DNA, 120 bp, Artificial Sequence
  ENSG00000259218_10 (sequence is synthesized)
aaaaatgaagaaaaactggtctccttgttctgtaggagaacagctgttcatctagaaagccgtccctccttcattgttaagcccttgggctttaagcaaagatgtgaggtgtgctttaag

SEQ ID NO: 931074 - DNA, 120 bp, Artificial Sequence
  ENSG00000259218_11 (sequence is synthesized)
caagaaagtatttgggatctttctcattactctcgcttcgaccatggaccaccctgggcactcagatccatttgccatttgggggctataattgaattaaagaccaattcagagattatt

SEQ ID NO: 931075 - DNA, 120 bp, Artificial Sequence
  ENSG00000259218_12 (sequence is synthesized)
tatcaagccaacagagaagttgcaagaatagcacaatgaacatgcatatacccttcacctggattcaccacttttgtttcatttctctcagtatatatgtttgtgtgtgttggagacata

SEQ ID NO: 931076 - DNA, 120 bp, Artificial Sequence
  ENSG00000259218_13 (sequence is synthesized)
tgacattttacctcgaaaccaggcatctcctaggaaaaagagcagcctcccatataacaacaatacaatgataacccttaaaaaactttgcattaataaatcccattagttaatatacca

SEQ ID NO: 931077 - DNA, 120 bp, Artificial Sequence
  ENSG00000259218_14 (sequence is synthesized)
ctcattcaccagacaggcagcccttgtgcctctccactaaggctaactgccaggaggataaggtgtgggtgggttttattcactgctccatcctcagaggctagcaaaatgcctggaaga

SEQ ID NO: 931078 - DNA, 120 bp, Artificial Sequence
  ENSG00000259218_15 (sequence is synthesized)
gggagaaatctctagtgtttatagacagaccaacactcgtaccctgaaaggacacaataccacaggggattggtagaggtaatgattacaggcaacagattgttcaaaacaactatattt

SEQ ID NO: 931079 - DNA, 120 bp, Artificial Sequence
  ENSG00000259218_16 (sequence is synthesized)
agacaagtatatttttgcaaaacagcgaaagctcagtgttcctttcaaaatgaaaactttccttttccatacctcactatcaattatttcagtctcagatatgccccgttctgtttctcc

SEQ ID NO: 931080 - DNA, 120 bp, Artificial Sequence
  ENSG00000259218_17 (sequence is synthesized)
cacaatatttgacttaattaacaatacagtcgattatttacaaggaagttatttctaaaactgtagttcaaaatcacatctgattttttcacctgacttttgtggtatagttgtttttgt

SEQ ID NO: 931081 - DNA, 120 bp, Artificial Sequence
  ENSG00000259218_18 (sequence is synthesized)
ttttaatgatgttgccggggttcacttttcccaaaagtagtttttaagagtaaaaaactggggggaaatcataaatggccaaagaggttaaataaattatgttaccttcattaagtaaaa

SEQ ID NO: 931082 - DNA, 120 bp, Artificial Sequence
  ENSG00000259213_0 (sequence is synthesized)
cagggagctgggatctcagaagccaaaaggacgccgcccccatccagagcgcacgaacctgcagactaaatgcaaaggctaacaaagccaagcaccaggcaacagctgccaacctcccga

SEQ ID NO: 931083 - DNA, 120 bp, Artificial Sequence
  ENSG00000259213_1 (sequence is synthesized)
gacgtggagctgtccaggggcagagacaggagaggcagcctcgtgccaccgcatagaaccccggagccacacagacccctggagccccaccaactgtgagaaggctcctgcctctccccg

SEQ ID NO: 931084 - DNA, 120 bp, Artificial Sequence
  ENSG00000259213_2 (sequence is synthesized)
tgggcatgcctgctccatacccctccttaccaccccaacccacagcgagacacctggagtggaggacggcaggtagctcaaagatgaaggcgatgatagccccgccctgccctgcctggg

SEQ ID NO: 931085 - DNA, 120 bp, Artificial Sequence
  ENSG00000259213_3 (sequence is synthesized)
agagcctaaattcaatgattcagtgattgccccctataaccccctctgcggccctctatcatactcccctggatgggccactcatatttatcaggcatttactatgtgccagacacggct

SEQ ID NO: 931086 - DNA, 120 bp, Artificial Sequence
  ENSG00000259213_4 (sequence is synthesized)
ctaagccctttacatgcctcaacctactttatccacgcaaggtagacgttctcattattcccagttggctgacgaagagactgagacccaaaggccttagggaaattgtctaaattcaca

SEQ ID NO: 931087 - DNA, 120 bp, Artificial Sequence
  ENSG00000259213_5 (sequence is synthesized)
ccactgatgcgtggcagagctgcgactgagtcccgggagtctggctccagagtggtcataacttcaactaccacctacacctgctgccccacccatggcctcggcactccttgagggcca

SEQ ID NO: 931088 - DNA, 120 bp, Artificial Sequence
  ENSG00000259212_0 (sequence is synthesized)
ttaggagttgactagctttgcttatgctctcaagttgatccatacagtgccagattataccctatcataagagatagggtcccctgaacacaagaagtcatctccccttctgggactgtg

SEQ ID NO: 931089 - DNA, 120 bp, Artificial Sequence
  ENSG00000259212_1 (sequence is synthesized)
tcctcttacttcttatccttcaagcctcagatgttcccccaggatgccttcttcgtttccccagactagttcaagctgcacctccgacgtgctcccacagcccctgagctgcctccctgc

SEQ ID NO: 931090 - DNA, 120 bp, Artificial Sequence
  ENSG00000259212_2 (sequence is synthesized)
agacgccatacctgccgtggctgcttgtttgctgagtagcctctcccactgaaccctgggcaacttgaggtcagggaccatgctgtttactgttacagtgaattaaaatgtctaaaacgg

SEQ ID NO: 931091 - DNA, 120 bp, Artificial Sequence
  ENSG00000259211_0 (sequence is synthesized)
gcagggcaaaggaggaaagccagagaaaaggcctcaagtctaggaagaggaagtcaatgctctggaagccagactctggctctctatgcctcaaaggaacaagctcagagctgtgctggg

SEQ ID NO: 931092 - DNA, 120 bp, Artificial Sequence
  ENSG00000259211_1 (sequence is synthesized)
atctaggaaagcctggtcccaggctgaaggggaagcggcgggtcacagtgggtgaggccacactgttctggtcctgatgtcgcgatgcaaacacttcattctgcaagggctcaaagggag

SEQ ID NO: 931093 - DNA, 120 bp, Artificial Sequence
  ENSG00000259211_2 (sequence is synthesized)
acaggtggaggttgttaccagggctggaaagcacctcattcccagagcaaggcagacattaacccctctgctgggcctgctgacctgagatgactccagcaagcttccctggaaattcag

SEQ ID NO: 931094 - DNA, 120 bp, Artificial Sequence
  ENSG00000259211_3 (sequence is synthesized)
ctcacctcgtgcatgctgggactgcggcctccctgtaagtgctcaggtctgtaataccacaggaggctcatcatcagctctcctggaaggacaacacagtggttatggcttgaactggca

SEQ ID NO: 931095 - DNA, 120 bp, Artificial Sequence
  ENSG00000259211_4 (sequence is synthesized)
acctgagttacttagacaggcagagaggctggctggctgccctggaggttcatccaacctcaatcctgcaggctccggcaacccatgtcccctgccccaggccaagcattcagaggcctg

SEQ ID NO: 931096 - DNA, 120 bp, Artificial Sequence
  ENSG00000259211_5 (sequence is synthesized)
gaatgctgttaggcatggagggagaagggggagaaggcactgacaggtgaggtggggggacaggtgcccaggctctgctggctggaaaggttaatgagctgatccaacccaagccacaag

SEQ ID NO: 931097 - DNA, 120 bp, Artificial Sequence
  ENSG00000259215_0 (sequence is synthesized)
aaacaaaacaaaaaacaaacagaaaaaatggggggtagggggtttgaggagcacaaggcttggacctactagacctggagatttggggaacgagggatgccagccatgttccttgtactg

SEQ ID NO: 931098 - DNA, 120 bp, Artificial Sequence
  ENSG00000259215_1 (sequence is synthesized)
atttggggaacgagggatgccagccatgttccttgtactgtatgcaaaagggaagtaacaagtattgaatgttcacttacctctttcattccccaatatgaaatagatattcccatttgc

SEQ ID NO: 931099 - DNA, 120 bp, Artificial Sequence
  ENSG00000262372_0 (sequence is synthesized)
tggaggagtaagaagtcccctataactaacccctctatcctctgttcctggacgatgactgccattgacctcagaaatttaggatatctggttaaccaaaatggttaaacagacttttgg

SEQ ID NO: 931100 - DNA, 120 bp, Artificial Sequence
  ENSG00000262372_1 (sequence is synthesized)
cagatctgtgctgaaattatacatcccactacaagaaatgcatcttaagaaagcctcaagagagacagccttcccagtatcttggtcaagaataaatgtgaaactgctggcagaaacagg

SEQ ID NO: 931101 - DNA, 120 bp, Artificial Sequence
  ENSG00000262370_0 (sequence is synthesized)
ttcctccttcctgctcagcccaaaggcaggagtcatggaaccccaggaaaggacggaacagaacaggacagggcccccagccccatctttatctcaccggctgctgctggctgccaagcc

SEQ ID NO: 931102 - DNA, 120 bp, Artificial Sequence
  ENSG00000262370_1 (sequence is synthesized)
tcccctgaatgggggagggtggtctgtgtgagtcagcggaggcacgaagtggaggaagacgggagcctctgccaggcccgttgagcgtggcctcagaaatgcgccgctgggttagggtct

SEQ ID NO: 931103 - DNA, 120 bp, Artificial Sequence
  ENSG00000262370_2 (sequence is synthesized)
ccccgaccgaggctcgaatccaggtcgaagggtcgccggagcgatggttggagaatgtggaaggagctggaggacacccgagtattcttaaagcaatccccatggccagatgtcatcagc

SEQ ID NO: 931104 - DNA, 72 bp, Artificial Sequence
  ENSG00000262370_3 (sequence is synthesized)
cagatgctgaggaagagactccgggaggatcccgaggacggcccagttgcagccatgttgagactgacgctg

SEQ ID NO: 931105 - DNA, 85 bp, Artificial Sequence
  ENSG00000262370_4 (sequence is synthesized)
ttgggaaacagatgctgaggaagagactccgggaggatcccgaggacggcccagttgcagccatgttgagactgacgtcgaacac

SEQ ID NO: 931106 - DNA, 90 bp, Artificial Sequence
  ENSG00000262370_5 (sequence is synthesized)
aggaaagcgggacaaccagtcacaatgagtaatttcatggtagctatgatagcagttatcaccactgctcagaacaattatacttattgg

SEQ ID NO: 931107 - DNA, 62 bp, Artificial Sequence
  ENSG00000262370_6 (sequence is synthesized)
gctcctataattgaggcataccgcccttaaaaacctatttgtaaacaaaattgaacctggcc

SEQ ID NO: 931108 - DNA, 90 bp, Artificial Sequence
  ENSG00000262370_7 (sequence is synthesized)
atgtttagcttaaattgcacctctcagcctgcgtgccacggccacactatgtgcagctggtctgaacaaaacggtcagatggtagaaaca

SEQ ID NO: 931109 - DNA, 120 bp, Artificial Sequence
  ENSG00000262370_8 (sequence is synthesized)
aaaagttcctattatctggaaccatgctggtatagtggcacctcaacctcaaacgataaggcccgctgtaggagctaaacattaaggatttgtagaaactattaatagctcttaataaga

SEQ ID NO: 931110 - DNA, 120 bp, Artificial Sequence
  ENSG00000262370_9 (sequence is synthesized)
atagctcttaataagatcaaaattggggaaagaataaagcatctagaaggacactctacaagctttttggatacagtaaaattaaaagaaaaaatatttaaagcatcccaggcacacctg

SEQ ID NO: 931111 - DNA, 89 bp, Artificial Sequence
  ENSG00000262370_10 (sequence is synthesized)
aagcatcccaggcacacctgaccttaataccagcaactggagtgcttaaaggaactgcagacagattttacttggaagctctgtaattt

SEQ ID NO: 931112 - DNA, 120 bp, Artificial Sequence
  ENSG00000262370_11 (sequence is synthesized)
tgtatagtctgcagatgtggatcctaactcctgcgagaagtaactcacagtgacaaagctgcctttgcttttatcgagttgcaaatcaaagaaggggggacatgttgggaacaggccccc

SEQ ID NO: 931113 - DNA, 90 bp, Artificial Sequence
  ENSG00000262370_12 (sequence is synthesized)
ttgggaacaggccccccaagtataaacaaaatctgcagcactgtgacacgttcatgatggccgtgacgcccacgctggaaggttgtgggt

SEQ ID NO: 931114 - DNA, 89 bp, Artificial Sequence
  ENSG00000262370_13 (sequence is synthesized)
tgagtgatctgtgccttaaagacacactcctgctgcagataactaaccagacccaccactttacttcggcccatcccttcatttcccat

SEQ ID NO: 931115 - DNA, 72 bp, Artificial Sequence
  ENSG00000262370_14 (sequence is synthesized)
gacccaccactttaattatctatagaaacaatgctaatgactgacttactattaataaatatgtgggtaaac

SEQ ID NO: 931116 - DNA, 90 bp, Artificial Sequence
  ENSG00000262370_15 (sequence is synthesized)
gtttctccaggccaaaatcaacagctgatctggataccatcaagacacctgaaatctccgggaggatcccgaggacggcccagttgcagc

SEQ ID NO: 931117 - DNA, 120 bp, Artificial Sequence
  ENSG00000274956_0 (sequence is synthesized)
ggtctttggcattggtgacctttggaaggagtgtttacatggtcatgctctttgttgatgttgatgctattgctttctgtttgttaattttctttctaacagtcaggcccttcttctgct

SEQ ID NO: 931118 - DNA, 84 bp, Artificial Sequence
  ENSG00000274956_1 (sequence is synthesized)
ttgttaattttctttctaacagtcaggcccttcttctgctggtctgctggagttttctgggggtccactccataccctgtttgc

SEQ ID NO: 931119 - DNA, 120 bp, Artificial Sequence
  ENSG00000274956_2 (sequence is synthesized)
aagctgtgtcccagaggggcacctgccagatgctagccagagctctcctgtatgaagtgtctgtcgacccctgttgggagatgtctccccatcaggaggcatgggggtcagggacccact

SEQ ID NO: 931120 - DNA, 90 bp, Artificial Sequence
  ENSG00000274956_3 (sequence is synthesized)
aggcatgggggtcagggacccacttgtggaagcagtctgtcccttagcggagctccagtgctgtgctaggtgggaatgtttaagtctgct

SEQ ID NO: 931121 - DNA, 64 bp, Artificial Sequence
  ENSG00000274956_4 (sequence is synthesized)
gggctactggtcagtggctttgcagcgctgcagtgggctccactcagactgaacttcctggcag

SEQ ID NO: 931122 - DNA, 66 bp, Artificial Sequence
  ENSG00000274956_5 (sequence is synthesized)
tacctctcccccaaccaagcttgagcatcccaggtctacttcagactgctgtgctggaagtaagaa

SEQ ID NO: 931123 - DNA, 120 bp, Artificial Sequence
  ENSG00000274956_6 (sequence is synthesized)
atcccaggtctacttcagactgctgtgctggaagtaagaatttcaatccagtggatcttagctttctgggctccatgggggtgggatctactgatcaagaccacttggctccctggtttc

SEQ ID NO: 931124 - DNA, 120 bp, Artificial Sequence
  ENSG00000274956_7 (sequence is synthesized)
ttccaggggagtgaatggttctgtctctctggcattccagacaactctggggtacgaaaaaaactcctacagctagctcagtgtctgcccaaatggccactcagttttgtgcttgaaatc

SEQ ID NO: 931125 - DNA, 120 bp, Artificial Sequence
  ENSG00000274956_8 (sequence is synthesized)
ttgaaatccagggcccttgtggtgtaggcacccaagggatctccttgtctgtggattgcgaagaccatgggaaaagcgtagtatctggaccggagtgcacccccactcacggcatggtcc

SEQ ID NO: 931126 - DNA, 120 bp, Artificial Sequence
  ENSG00000274956_9 (sequence is synthesized)
cctcagttggaaatgcagaaatcacccactttctgtgttggtcttgctgggagctgcagacagctgttcctattcggccatcttgcctgggaatctgtaattatattttattgcatattc

SEQ ID NO: 931127 - DNA, 120 bp, Artificial Sequence
  ENSG00000274956_10 (sequence is synthesized)
ttatattttattgcatattcttcctaggctgggtgtgtgtgtgtgaaagagagagagaaacagaaacagagacaaggagacagagacagtgaaacagaaacagagtcatcttccaggttc

SEQ ID NO: 931128 - DNA, 120 bp, Artificial Sequence
  ENSG00000274956_11 (sequence is synthesized)
tacttattaagcaatatcccatgaagtagctgaaaagtgttatattctcctaatacctagtgtttgcaaatctggcagctgtcactgatgatttaaacaagattgggtgacttatttatg

SEQ ID NO: 931129 - DNA, 120 bp, Artificial Sequence
  ENSG00000274956_12 (sequence is synthesized)
tacacacacatccacaatcaaacttcaacagtcgagtgtacccttttctaaataatcacgttgctaaaatgtgccacatggcccatttctttaaacaataaatggtaaattattattttg

SEQ ID NO: 931130 - DNA, 120 bp, Artificial Sequence
  ENSG00000274956_13 (sequence is synthesized)
gggagtgaaagctaaaagaaataatatgtctaatacgatgtggcattttctctatacagtacagttttagcattgaaaaggacctcagcaattccatttgccccgttttcagatgaggag

SEQ ID NO: 931131 - DNA, 120 bp, Artificial Sequence
  ENSG00000274956_14 (sequence is synthesized)
attgaggctggtagttacagtggttttgcttcatgtcccatcccactggggctgctatgcaagctctcagtctagtcttctttcctctgcacttggtggccatcagctgtaacaagtcct

SEQ ID NO: 931132 - DNA, 120 bp, Artificial Sequence
  ENSG00000274956_15 (sequence is synthesized)
gcgtttgtttggaccctgctaatcaaggctacagggcagctgcagaaagacacctgctattggcttacctgctcctcgccttccctctgcttgggtctgagcatcagaaagccaccttcc

SEQ ID NO: 931133 - DNA, 120 bp, Artificial Sequence
  ENSG00000274956_16 (sequence is synthesized)
agtgggtctttgcctagcttttgtcttgtctttgctttttattcatctttgcttttgtcttctcagggcaaataggaaatcctagacctcagatcactgttctttgcttcccaaaagaca

SEQ ID NO: 931134 - DNA, 120 bp, Artificial Sequence
  ENSG00000274956_17 (sequence is synthesized)
gaacagctcagtcctggctgccaccttctttctttactcttggtttaaatgtaatcccacatgccctagacaagcctcctgatgatttttcatcaaacatgaaaatagcttacttttaac

SEQ ID NO: 931135 - DNA, 120 bp, Artificial Sequence
  ENSG00000274956_18 (sequence is synthesized)
tgctgggtgtcagtctcttctaaaaattttgttcctaaggaattgattttgcaaatcagtgctaaagtcactttttaactgcctcacatactatcatttctttgacaattctttttaaag

SEQ ID NO: 931136 - DNA, 120 bp, Artificial Sequence
  ENSG00000274956_19 (sequence is synthesized)
gggattgctcttttctccttctggtttctcaaatctacttttaacttcaaatagcaggcatgcaatgtagttttataagataatatactaggaccatctatcagatatgaaaccaagcat

SEQ ID NO: 931137 - DNA, 120 bp, Artificial Sequence
  ENSG00000274956_20 (sequence is synthesized)
aatcattgcaattatttctactgtattcagataatgataatacaaataagagtacgacatacgtaaatgttgattagctttctggttccttcatcaaaacttgcgttgtgttgtgcagcc

SEQ ID NO: 931138 - DNA, 120 bp, Artificial Sequence
  ENSG00000274956_21 (sequence is synthesized)
ttttctttgcattgtccaggggttttgttattacaaaccataatatttaacccatttcttctactaatatcttttaatatttatgctattatatagctttttatttttgacatgtatcta

SEQ ID NO: 931139 - DNA, 120 bp, Artificial Sequence
  ENSG00000274956_22 (sequence is synthesized)
aaccagaaaaaaatattccttgtacatgatatttttaggcaaaacataatgtctggagcaccaagtgaaataactgtggagaatggaatgttggacaatttgtgtggcatgcttagctta

SEQ ID NO: 931140 - DNA, 120 bp, Artificial Sequence
  ENSG00000274956_23 (sequence is synthesized)
atttgtttctatggcacaagcaaagctcattaattccatttattattttaagccacttgtttggtgttatggattttaagaatcagttggtgttagaatttttaataacacagagaaagc

SEQ ID NO: 931141 - DNA, 120 bp, Artificial Sequence
  ENSG00000274956_24 (sequence is synthesized)
cattgaatatggaactcaaattatctaaggtttacccagaagtcaaaatcacctggccctctgtaaatttctctttgtgttcctaggcccacaaagtctttggtctgaagactcagagct

SEQ ID NO: 931142 - DNA, 120 bp, Artificial Sequence
  ENSG00000274956_25 (sequence is synthesized)
taaattgcattggtcctgttaatctttgtcaaaaaggaagtttgggcggcagtttcagggtagtgttgagaagataactcctggtcccattttattctttcctcatttgttcagtgctca

SEQ ID NO: 931143 - DNA, 120 bp, Artificial Sequence
  ENSG00000274956_26 (sequence is synthesized)
tggccatctacaaccttccttgattctattctgcctaagcctcttatttccacatctataagtatagtgctacataataattacaacctttaagaaaatggagagttttcattaaagggc

SEQ ID NO: 931144 - DNA, 120 bp, Artificial Sequence
  ENSG00000274956_27 (sequence is synthesized)
ccctgcaaatctatgatgctagatgacagattctaccagaaggccagagtattaatagcacccgtgataactgtaataagaatatgtctcgttttcttttaaagacatagatattccatt

SEQ ID NO: 931145 - DNA, 120 bp, Artificial Sequence
  ENSG00000274956_28 (sequence is synthesized)
ttaatcctgtataactcaaagaaaatttgggtgttaacactttgaaatacctttacctcctttgggggaaatccaaactgaaaggaattaatatccacatcagttcctaaagcaaaatgc

SEQ ID NO: 931146 - DNA, 120 bp, Artificial Sequence
  ENSG00000274956_29 (sequence is synthesized)
ctgacacagactaacaaagctctttctcatcctgtggtaggaacttaggagtgataactcacattgagaacttgtgatctgaaagcactaaggaatttctgccattgcaggtaggaaaaa

SEQ ID NO: 931147 - DNA, 120 bp, Artificial Sequence
  ENSG00000274956_30 (sequence is synthesized)
aaaagacaaaaatggtattctcaggtgagcttacctttcaaatttttctgagacttcctaaatgtgacaagaactctgctgtgtggcaaccttatgtatccacaacagaactaaggaccg

SEQ ID NO: 931148 - DNA, 120 bp, Artificial Sequence
  ENSG00000274956_31 (sequence is synthesized)
tagattttataaaatccatactctaaaactcctgagttttacatgtaccctaaaacttaaagtatagtaaaaaaaagaaaagaaagaaaaactctttaaccctttgtttaaatcctatta

SEQ ID NO: 931149 - DNA, 120 bp, Artificial Sequence
  ENSG00000274956_32 (sequence is synthesized)
actcttaacgatacacagttcgaattatctaaatgaaataattttcaagcacataacagattagaaacagagaatgagaaaggtatagtagatattatgtaaataagcagaaataatggc

SEQ ID NO: 931150 - DNA, 120 bp, Artificial Sequence
  ENSG00000274956_33 (sequence is synthesized)
aataattaaacacactatctctacctaaaagaacagagatagaaaactcatataaaaatctaaactacagttttatggggatagttaaggtaagagcctgcaggcagcactgtattgctt

SEQ ID NO: 931151 - DNA, 120 bp, Artificial Sequence
  ENSG00000274956_34 (sequence is synthesized)
tacaaaacagcatttcatttgtattatgatgatttcagactatcaatttaaaaattcattagtataaattaagaacaggtaccattttctccagatacttccccttcatctgtcctgaaa

SEQ ID NO: 931152 - DNA, 120 bp, Artificial Sequence
  ENSG00000274956_35 (sequence is synthesized)
ttattaattattgacttctacttaaataagatcttattttcatctgctggaaaactttttctgataaccatacatatcttcaatgtctacaatttgaatggagagccctttcaatgtggc

SEQ ID NO: 931153 - DNA, 120 bp, Artificial Sequence
  ENSG00000274956_36 (sequence is synthesized)
gtttctgtttcttccataacctcacaacgatatgtggtggccccgcagtcattatggtcttgttaaataattagatttgtgtaaactatattttagagtcttccaaaacgcctctccttc

SEQ ID NO: 931154 - DNA, 120 bp, Artificial Sequence
  ENSG00000274956_37 (sequence is synthesized)
caaaatggctaaaagggcaaagcgtcagtaattctgtagacatgcttcatgcatgttctgaataggagctatggtataatgagatgctatctctggaaaaaaatgaatagattttcaaga

SEQ ID NO: 931155 - DNA, 120 bp, Artificial Sequence
  ENSG00000274956_38 (sequence is synthesized)
ttgtgagtcctgacatgagttctctagaattttcccctttgataaattttcctttacctagctgttgccaaattgtctcttctagaagaatgcccagattttttttcagttccaaagtta

SEQ ID NO: 931156 - DNA, 120 bp, Artificial Sequence
  ENSG00000274956_39 (sequence is synthesized)
tcaaaatcccaggaatatttcacagaaaagagaagcatttatagcaagcatgggtgtggcatgctttctctgtgggaagttgtcatcctccacaagatcttgcccacactcaaaacaaac

SEQ ID NO: 931157 - DNA, 120 bp, Artificial Sequence
  ENSG00000274956_40 (sequence is synthesized)
ttgcttcccatcacattcttggtttgtcagcactctgtaaaaggaaatctcatctcctgtctgttgatagtagagcttatatcaaactgggacatgtttcttcttcattcatgaataagt

SEQ ID NO: 931158 - DNA, 120 bp, Artificial Sequence
  ENSG00000274956_41 (sequence is synthesized)
ctaattttctctccggtgtgtaaaactgacaatacccacaagatactactgacttggaagtttcactgcaggtagctaccataccagcatttggtaaactagctccctaggtgagacagc

SEQ ID NO: 931159 - DNA, 120 bp, Artificial Sequence
  ENSG00000274956_42 (sequence is synthesized)
attagatgacctccttcgtgccacactacttgccagtatccactgggagacaaattatgattgttgcgtccttctttgaaaacacccctgctgagtacctactgtatgtgagtcactgtg

SEQ ID NO: 931160 - DNA, 120 bp, Artificial Sequence
  ENSG00000274956_43 (sequence is synthesized)
caggcactagaaatataaagcaaaaaaaacagattctacccaccgggagctcctagtccagtggtgaagaggtgtattaaccctcaaggccctaagaaaatccccaatagggctctgcac

SEQ ID NO: 931161 - DNA, 120 bp, Artificial Sequence
  ENSG00000274956_44 (sequence is synthesized)
aagccgggctctgataggaggtgccagtgcttttcttcttccagtttcagagccccagcgatcccaggatgaaggagagcccatttgcaaccctcttctgtctccctaagcattcaacaa

SEQ ID NO: 931162 - DNA, 120 bp, Artificial Sequence
  ENSG00000274956_45 (sequence is synthesized)
acacttagtgaccatctgtcttgtgcaaaaagcttggggagtgataaaaacaaatcaaattcacattttaatttagggagtttaggagatacatcctagtgtggatttcacatggtcaat

SEQ ID NO: 931163 - DNA, 120 bp, Artificial Sequence
  ENSG00000274956_46 (sequence is synthesized)
gatttgctttccttgaatttgccctctgcaaccaacacctgttcgtgctatgagactgaagtcctcctagaccgccccattcatctgagtagttagggctctggatgaaggagcaaatgg

SEQ ID NO: 931164 - DNA, 120 bp, Artificial Sequence
  ENSG00000274956_47 (sequence is synthesized)
acaaaataagccccctcttgctcaggacctgactaacatttcagaactgcggtcacccattttatacaaaccaaagcacttctgacagacctctgaatttgcattaaaaagagcacgtct

SEQ ID NO: 931165 - DNA, 120 bp, Artificial Sequence
  ENSG00000274956_48 (sequence is synthesized)
acagctcctaacaatcaaaaacaactatgaacactgcttgcttcagtgatacaaacagacattttcttgttacatgtgtggtgatctgagaatggtgactttggacccagtttgactggt

SEQ ID NO: 931166 - DNA, 120 bp, Artificial Sequence
  ENSG00000274956_49 (sequence is synthesized)
tagcgtttaaataaaacttaacagactaggcaactaaaggaactcagtaaaagatcaaaagcaatgctcaaagggagtgcctgggtaaccatgatgtaattgcagattgacacatctttg

SEQ ID NO: 931167 - DNA, 120 bp, Artificial Sequence
  ENSG00000274956_50 (sequence is synthesized)
ggtttttcattattgtttctaaaaactagatattattgctttattattatgttgatgatgattattgaaagcacgatagcaatgtttaagtggtgagaatgactctaagcctctttttgt

SEQ ID NO: 931168 - DNA, 120 bp, Artificial Sequence
  ENSG00000274956_51 (sequence is synthesized)
tgctgtgactgacagaactaaagggagtttgctctcacattcacaataccaactctgccatcttatggaaaatattggaagtacctagggcatttcattatatttcaaaggcacaggttg

SEQ ID NO: 931169 - DNA, 120 bp, Artificial Sequence
  ENSG00000274956_52 (sequence is synthesized)
ctggtaagagggacagaaagacaagaacatagtaccttctatttctactacatgtttttaatctttaacatttttaccagcagaaatcattttttttttaaatctctcaatcttcaaata

SEQ ID NO: 931170 - DNA, 120 bp, Artificial Sequence
  ENSG00000274956_53 (sequence is synthesized)
attcttagattgcttgccagcaaagatgtctcttgatcttgacactggaattcaatgtaaaaatcttgaatgatattttgtactgatatgaatttctactgtcccataacactgtgtagt

SEQ ID NO: 931171 - DNA, 120 bp, Artificial Sequence
  ENSG00000274956_54 (sequence is synthesized)
gacttcactgtatattaacttcttttctacagatgtttgacttatgagatgaattaattgaaaaagtcaaagcctatcaggagctatcttatatgatgttggtagcctgtgaaaaaataa

SEQ ID NO: 931172 - DNA, 120 bp, Artificial Sequence
  ENSG00000274956_55 (sequence is synthesized)
atgtcttttttcttatacaaactgataacaagacttgctttcacaattactatttacatttttgtgcatataatgcctgtatattatactcatatttgaaagtgatcagaaagtgttatt

SEQ ID NO: 931173 - DNA, 120 bp, Artificial Sequence
  ENSG00000274956_56 (sequence is synthesized)
taacagaaactacatacattttttatgtctctctggaccctttgattctaagtaaatttacagtaagttagcagtaatagactattcttttcaactatgaataaaaatgtacactgaagt

SEQ ID NO: 931174 - DNA, 120 bp, Artificial Sequence
  ENSG00000226237_0 (sequence is synthesized)
ggcgcttttttcctcccctttccgtggagagactatcaactccatctgtcacaaaaattaaggctaaatctcctctccagaagcagagggagccggggctccgacgcgctcagcgtcggg

SEQ ID NO: 931175 - DNA, 120 bp, Artificial Sequence
  ENSG00000226237_1 (sequence is synthesized)
ctgtctgcctctccctagaggccaagtgaatttgaaatggcaaaagtcacagccggaggcccagcactaggagattcctccggctgcgggaaatcttcctgtacctgctgaagctgctgc

SEQ ID NO: 931176 - DNA, 120 bp, Artificial Sequence
  ENSG00000226237_2 (sequence is synthesized)
gttcctcagaggcgcttggtctgccgtgggaagctgcacctctgcagtccccaaaaccaaaatcaaaccttaaaagagccagactgagaagccagtcaccacgtaagacatctggaccac

SEQ ID NO: 931177 - DNA, 120 bp, Artificial Sequence
  ENSG00000226237_3 (sequence is synthesized)
cttcagactcgcatgctgtgaggaagcccatgcttactatgtgtagaggatacatggagaaggaaagagatgcctggccagctccctgctgtttcagccatgtgagtgaagaaggcacca

SEQ ID NO: 931178 - DNA, 120 bp, Artificial Sequence
  ENSG00000226237_4 (sequence is synthesized)
ccttcaggtgactccagctctagctgccatcctactgaagacacatgagagagaccccaagccagggtcaagatcagcgtgaagcaagtgaggcattttggtgcaaaatgtaaggaggca

SEQ ID NO: 931179 - DNA, 120 bp, Artificial Sequence
  ENSG00000226237_5 (sequence is synthesized)
ttgaccttcataattgggctccaagactccaagagtgagtgcctccttaaattttgtactttagacactacactcacctttctctagttctggtcttgcctcaagcaagaagagcagagc

SEQ ID NO: 931180 - DNA, 120 bp, Artificial Sequence
  ENSG00000226237_6 (sequence is synthesized)
ttagctcagtcaacccaaagaatcctgagaaataacaaaaaaatattcttttaagccactcagttttgagatggtttgttatgcaacaatagagcattagaacttttcttcctgtccaat

SEQ ID NO: 931181 - DNA, 120 bp, Artificial Sequence
  ENSG00000226237_7 (sequence is synthesized)
tgcttaggtgaaagatgctagtatctgcctgaattctttccttttcttcacattctacattcaattaatggctcatcataggtgtcaataaaatatttgataagttgaatgaatgaagaa

SEQ ID NO: 931182 - DNA, 120 bp, Artificial Sequence
  ENSG00000226237_8 (sequence is synthesized)
agggaagaaaattgcagttgaagaaaacttgctttggttcaatgcaaaaataatgggatgaatggcatgctgaaatatcatatgacttacgaaaatgatgaatggtttattgaatctaca

SEQ ID NO: 931183 - DNA, 120 bp, Artificial Sequence
  ENSG00000226237_9 (sequence is synthesized)
tatgtggaacccatgaatgggagtcggagaagggggcaactgtatacgcaaaaagctatcataattgccaaaatagtgataacaatgttgaaacactactgggattactactgttaatga

SEQ ID NO: 931184 - DNA, 120 bp, Artificial Sequence
  ENSG00000226237_10 (sequence is synthesized)
ctaccagtgatcaagcacctcccctgccccagtgtttgcctgccttgtttgaagacacgaaaaaatgtacacaaaatgatttagaactgttgaacttttcagaaaataatttaaaatcat

SEQ ID NO: 931185 - DNA, 120 bp, Artificial Sequence
  ENSG00000226237_11 (sequence is synthesized)
ctacctcataactaaaggacactgaattggagccagctgatgtaaggagcttaccttggttgccaccttctggtctctgtttgaggaacaactgcatgtgattaaggatgaagaaactga

SEQ ID NO: 931186 - DNA, 120 bp, Artificial Sequence
  ENSG00000226237_12 (sequence is synthesized)
gaccccaagaatttaagtaatttgttcaaggcaacacactgctatgtggtagaactacaaattgagcccaaataatccagcttcagatactatgcaaaggtatcctaggtgtgggggtga

SEQ ID NO: 931187 - DNA, 120 bp, Artificial Sequence
  ENSG00000226237_13 (sequence is synthesized)
taacctggtgacaatcccttctcagaaggaaaacaggtcccatctacagaggtgaagcagagtgtggaactgaaaaactcaatggaagaatggctattaagatttaggacggctgggaaa

SEQ ID NO: 931188 - DNA, 120 bp, Artificial Sequence
  ENSG00000226237_14 (sequence is synthesized)
taataaagtaataataataatactaggtattgacgtgtgctacatgccaggccttgggtgacatttggattgattcccattttctttacttttcagcagtggggtctttcacctttcaag

SEQ ID NO: 931189 - DNA, 120 bp, Artificial Sequence
  ENSG00000226237_15 (sequence is synthesized)
ctctgcctgagaagtcaacatggtggcatttggctaggttcttttaggcaaccaattgttttaacatgatttgttgaaaagcctattctctctttcattgaactataatgctagctctgt

SEQ ID NO: 931190 - DNA, 120 bp, Artificial Sequence
  ENSG00000226237_16 (sequence is synthesized)
cataaatcaaattttcatttgatttatgatatgaaaattatatgcatttgattgatatgcattttttctccaatgatactcaactgtcttaattatataattttgtagtaattcttggta

SEQ ID NO: 931191 - DNA, 120 bp, Artificial Sequence
  ENSG00000226237_17 (sequence is synthesized)
tctaattaggcaaatacccactcccaaccctgtttcttttgtttttaaatccaggggtgttttggatattctcgttcatttgtgcttccacctacatttttcagttaacttgtcaggtac

SEQ ID NO: 931192 - DNA, 120 bp, Artificial Sequence
  ENSG00000226237_18 (sequence is synthesized)
gaaaaaataaaaggcaaaattttttatccttaaatcaatttgggcaagtttgcagttttttcttgtattgtaacttccaatctatgaatatgatctattttttcaccaatttatggcttc

SEQ ID NO: 931193 - DNA, 120 bp, Artificial Sequence
  ENSG00000226237_19 (sequence is synthesized)
atggcttcttccaataacattttataattgtctttttagaggccttatcttttgtttagattcatatctaggtatttaatatttttgatgctgttataaatggtatttttaaaaatatat

SEQ ID NO: 931194 - DNA, 120 bp, Artificial Sequence
  ENSG00000226237_20 (sequence is synthesized)
aactatttcacatagaaaactttaatggatttttaaaatgtagatttgtattcagtaaacctgttaaaatctcttagaatgtctaagagtttatttattcaatttgattttctttttttt

SEQ ID NO: 931195 - DNA, 88 bp, Artificial Sequence
  ENSG00000226237_21 (sequence is synthesized)
tcaggtgatccgactgctttggcttcccaaactggcctattctactggattttctatgcaattgtgttataactcatcataaagataa

SEQ ID NO: 931196 - DNA, 120 bp, Artificial Sequence
  ENSG00000226237_22 (sequence is synthesized)
attttctatgcaattgtgttataactcatcataaagataattttatttcttttccacaatctttacaggtttaatttttttctatgccttgctgcactctctatgatttccagtattggc

SEQ ID NO: 931197 - DNA, 120 bp, Artificial Sequence
  ENSG00000226237_23 (sequence is synthesized)
actactctggcctttggtctttgctcttgcatcagcctttcataattgggtatgtttgttgtaagttttctgtagagagtctttatgaggttaagagatttgtttcatttctagtttatt

SEQ ID NO: 931198 - DNA, 120 bp, Artificial Sequence
  ENSG00000226237_24 (sequence is synthesized)
ggttaagagatttgtttcatttctagtttattaagagattttattatagatcaatgttaaattttatcaaaatttctccattgcatttctattgagatgatcacatgattattaaaaatt

SEQ ID NO: 931199 - DNA, 120 bp, Artificial Sequence
  ENSG00000226237_25 (sequence is synthesized)
atcaggtttattgaggcataatttatatataataaaatttaccctattagagtatccagtccagtaagttttggtaaatgtatgcgaataacacaataaacaggtttagaacttttccat

SEQ ID NO: 931200 - DNA, 120 bp, Artificial Sequence
  ENSG00000226237_26 (sequence is synthesized)
caccacaaaaagtttatcaggcccctttgcagttaatactcaccttctctccagccccagtaaaccatggatctgctttttgttactgtagtttttcctttactttgatttttttgagtg

SEQ ID NO: 931201 - DNA, 120 bp, Artificial Sequence
  ENSG00000226237_27 (sequence is synthesized)
ttaagccagccttacatttctgagttaacttggtcatgatatcttctacaaacattaatgaatttagtatgattggctgatgcctttgctttcctatactgtccttgcctggttggtaca

SEQ ID NO: 931202 - DNA, 120 bp, Artificial Sequence
  ENSG00000226237_28 (sequence is synthesized)
aggattatataatacttataaagtgagttgaagacagtttcctcttttcaccagctggaataatttatgtattattgaaattaattgctccttaaatacttggcagaattcactacaaag

SEQ ID NO: 931203 - DNA, 120 bp, Artificial Sequence
  ENSG00000226237_29 (sequence is synthesized)
gcacttaattctagaccttttggaggaagataaaatactgattttttaaatcattattttatttttgtaatacagcttatttttccagaaacttctacttttcgtttacatcttcaagtc

SEQ ID NO: 931204 - DNA, 120 bp, Artificial Sequence
  ENSG00000226237_30 (sequence is synthesized)
agattaaagttgtattaataaccccttattatttaaatctcagcagaatgtgaagttatgttccccctttgtatccatttttttctctagatatttttctgttacctgttttaaatttaa

SEQ ID NO: 931205 - DNA, 120 bp, Artificial Sequence
  ENSG00000226237_31 (sequence is synthesized)
ttccattgtggtcagagataatactttgtatgacttgcattcttttatgtatattgagacttgttataaggcacagagtatggtttatcttggtaatcattcgtggcacacttaaaaatc

SEQ ID NO: 931206 - DNA, 120 bp, Artificial Sequence
  ENSG00000226237_32 (sequence is synthesized)
atgtgttttctgctattgttgagtgggatgttctgtaactgtgaattaggtcaagttagttgacagtgttgttcaagtcttttatattattactgactttctttctactcactctatcaa

SEQ ID NO: 931207 - DNA, 120 bp, Artificial Sequence
  ENSG00000226237_33 (sequence is synthesized)
ttagtgaaaggtgtcaatatttccagttataatcatggatttgtctattattactttcagttagaaatttctagctgaaattatctatttctactttcagttagtgttagcttgctatat

SEQ ID NO: 931208 - DNA, 120 bp, Artificial Sequence
  ENSG00000226237_34 (sequence is synthesized)
cttttttccatccttcttcttttaacccaatgtatctttatattgacattacatatatgatttatattatattatgttactatatcttgtatgcagcatatatttggatcttttttatcc

SEQ ID NO: 931209 - DNA, 120 bp, Artificial Sequence
  ENSG00000226237_35 (sequence is synthesized)
aatctgatgatctttgctttttaattaatgtatttagatcatttacatttactgtgattattaatatgtattaagttcaaatctaccactttggtattgaatatctaattgtcccatttg

SEQ ID NO: 931210 - DNA, 120 bp, Artificial Sequence
  ENSG00000226237_36 (sequence is synthesized)
ttctttgtttcaaaaaaactctttttttgcctttttttatatcaagtattttaaaattctatttcatcttctttgtttgcttattagctataactttattttgctaatttagtggttgct

SEQ ID NO: 931211 - DNA, 120 bp, Artificial Sequence
  ENSG00000226237_37 (sequence is synthesized)
ttagggtttatagtaaacatcttcaacttatcacattctatgttctagtcatattatattatttaacacatagtataaaaactttattgtagtatactttcattttcctccagtaattgt

SEQ ID NO: 931212 - DNA, 120 bp, Artificial Sequence
  ENSG00000226237_38 (sequence is synthesized)
ttcctccagtaattgtgcgattcttgtcatctattttgcttctacatgttataaactctacatgattttgtaatatttttgtttaaacaatatttatttagacttaataataaataataa

SEQ ID NO: 931213 - DNA, 120 bp, Artificial Sequence
  ENSG00000260285_0 (sequence is synthesized)
gggcgacttcttccctcatgtgagctgctctgtttacatttgctggtcgctggaagatcgaaagactggacaaaatccatatggcggccggccggcgcggtggctctcgcctgtgatccc

SEQ ID NO: 931214 - DNA, 120 bp, Artificial Sequence
  ENSG00000260285_1 (sequence is synthesized)
gcgctttgggaggccgaggcgggaggttcttctgagctgaagagttcgagaccagcccgggaaacgtagtgagacccccaccatctctacaaataataacaaacaaacaaaaggtccccc

SEQ ID NO: 931215 - DNA, 120 bp, Artificial Sequence
  ENSG00000260285_2 (sequence is synthesized)
cgccccgccggccgcgggttgccgtcgcacccaggcacatttgaagggcggcaggagccaaggcctggctgtcactgctgtcccggacccctttgacggcccctgggggttcaccagagg

SEQ ID NO: 931216 - DNA, 120 bp, Artificial Sequence
  ENSG00000260285_3 (sequence is synthesized)
gctggcccgtggctcactgcccagtcctctatgaggacacttcgccatagacattttgttattgcagactgctctgggaacacccctgactgggccctaaaatgaattccagaaaaggaa

SEQ ID NO: 931217 - DNA, 120 bp, Artificial Sequence
  ENSG00000260285_4 (sequence is synthesized)
tcgcaggtcaaggggcggttctaaaaggcttgggctagggtcagccagagctctgtgcagcagatgggggcctggaaaagtctgcagaagtggccttccgcccaggccctgcctcccccg

SEQ ID NO: 931218 - DNA, 120 bp, Artificial Sequence
  ENSG00000260285_5 (sequence is synthesized)
acgggggcacgttgtcctgagtgcagagctgcttctaggagggagtaggggtcctgtgtcccctcctgcgaaccaaggcataatgagaactggatgacttgggcccacttttgggtctgg

SEQ ID NO: 931219 - DNA, 120 bp, Artificial Sequence
  ENSG00000260285_6 (sequence is synthesized)
tgagcagcctgggcaggagactggaggaggtgctgctggaggatgggcagaacagggaagcgggagtggcgttctgtctcagcaacaccattcccagctggctcctctgtggagtgtgtg

SEQ ID NO: 931220 - DNA, 120 bp, Artificial Sequence
  ENSG00000260285_7 (sequence is synthesized)
tgcaggggagcgggggcaggggacacggattttcttcctccagctcttagctctcaggaccagagcttggagaggaacagagacccccctacccagcctagggtttagcctgcgcccgaa

SEQ ID NO: 931221 - DNA, 120 bp, Artificial Sequence
  ENSG00000260285_8 (sequence is synthesized)
cccaagccagttagcaatgaccctagggcaccctccccagtcactcagccactccagcctggtaagatgaggtggccaggctcctgcagagcgagctcccctctggagccctggcagcct

SEQ ID NO: 931222 - DNA, 120 bp, Artificial Sequence
  ENSG00000260285_9 (sequence is synthesized)
gtagagcactctcaactctctcgcctctggggcaggccaggccaggctgtttgtggcccttgcattggcttctcagggtccatcatggaaacctaggggtccaacctcagcccctctgtg

SEQ ID NO: 931223 - DNA, 120 bp, Artificial Sequence
  ENSG00000260285_10 (sequence is synthesized)
tccctgccctagctgcggctgagagcccccaggagtaagctggtgagaggccttccatggcctcccactctctgtgggctcctgtccctgtggggccaccacgctggccaccagctgcct

SEQ ID NO: 931224 - DNA, 120 bp, Artificial Sequence
  ENSG00000260285_11 (sequence is synthesized)
ctacttctgccttacagcctccctgccttctgctctcaacgttgaaacagccccctccacagctcccgaacctgtgttccagcggatgcttctctcccttgatgatgcacccgcctgagt

SEQ ID NO: 931225 - DNA, 120 bp, Artificial Sequence
  ENSG00000260285_12 (sequence is synthesized)
caccccctaatttctcccctgggggattctgactttccacttctcttgggtttctcttccccagcctctcagctgtggttggtgtggagtcagggccgggtgcctataagggcctaaggt

SEQ ID NO: 931226 - DNA, 120 bp, Artificial Sequence
  ENSG00000260285_13 (sequence is synthesized)
aggacttggtgactcggcggtggtttcccttggttccgacttccctcttgcctctctgtctattactggctggtcaactcctccagtgccccttcctccaggcagcctcctcagccctgc

SEQ ID NO: 931227 - DNA, 120 bp, Artificial Sequence
  ENSG00000260285_14 (sequence is synthesized)
ccacctgctccatctgagcctgccccagtccccagcctgagtcctcaagcagaaccaatcccccctacctcagctgatgattccctgtgcagagtttgtattggggctcccctaacaaga

SEQ ID NO: 931228 - DNA, 120 bp, Artificial Sequence
  ENSG00000260285_15 (sequence is synthesized)
gctgatgctgtatatgcccagctgtgccatctcattgacttctccccaggatcctaggagggagggaacactttacagatggggaaactgaaactcagagatgttaaataacttgcctga

SEQ ID NO: 931229 - DNA, 120 bp, Artificial Sequence
  ENSG00000260285_16 (sequence is synthesized)
agttggagttctgcctggacaacatagcaagaccctatctcttaattaagaattaaagccagtaaaccggcttcagagaaccaatggctgatttgaagaaaggtgggaacaggcaggaag

SEQ ID NO: 931230 - DNA, 120 bp, Artificial Sequence
  ENSG00000260285_17 (sequence is synthesized)
gatgcccactggggaggctgctgtgcccaaatccctggcagggaccacgtgactgcagtccctcccctctaagcagcacagcctcctaccccactgtgctctgtgatccccagtcagccc

SEQ ID NO: 931231 - DNA, 120 bp, Artificial Sequence
  ENSG00000260285_18 (sequence is synthesized)
ctgtccctctcctgacctcagcccgcttcctcttcgggctctgcagaactcaggggcagggcactgggaggaagcaatgctgcctctggctgcactctgcagaggagcagactacaagga

SEQ ID NO: 931232 - DNA, 120 bp, Artificial Sequence
  ENSG00000260285_19 (sequence is synthesized)
tagagtccagtgccctgcctggagtctgccctgtgcctgacctgctgagccgggtcatgttctgtggataaaagacctgggcctcctttgaagccccctccaggcccagtggttcacgtg

SEQ ID NO: 931233 - DNA, 120 bp, Artificial Sequence
  ENSG00000260285_20 (sequence is synthesized)
taaccaggtgtgatttctgaggaacctggaccaaacactggcctggtaacgtcatgcagcctcctgcctggatgctgccaaagcagcccctgtgggccccagggagagcaggggctgtgg

SEQ ID NO: 931234 - DNA, 120 bp, Artificial Sequence
  ENSG00000260285_21 (sequence is synthesized)
acaggggaggtcagctggaggggaggctggcaccttccaagcccctctccttgtgcacctgctctgggggacactaaggctcccaatcagcccctgcctggggggtctcaccctgacatt

SEQ ID NO: 931235 - DNA, 120 bp, Artificial Sequence
  ENSG00000260285_22 (sequence is synthesized)
taggtctgaaggccttgagggccacctccccactgttatctgctgctgctgtccccgtcacagctgcctggcccccgtacactgtcattttgccccaggcaggctcgcacagggccggcg

SEQ ID NO: 931236 - DNA, 120 bp, Artificial Sequence
  ENSG00000260285_23 (sequence is synthesized)
ctctgggagggtggaaggattgctgggcccatgactggacacctctgtcacccaacttctgatctatctgcacgttgagaccagcctggccaacacagcaagatccctgtctcaacagaa

SEQ ID NO: 931237 - DNA, 120 bp, Artificial Sequence
  ENSG00000260285_24 (sequence is synthesized)
taaaaacaaaaataaaatgatcttctgtctgcacactggggacaaaaacacccacctcagaaagctgagggttaccagcggcgccaggccggagccgccccagtgccaggctcactgctt

SEQ ID NO: 931238 - DNA, 120 bp, Artificial Sequence
  ENSG00000260285_25 (sequence is synthesized)
gccataggcagccctgccctctggatctcatatctgcagttctgaccttgcctgtggagggaaagtgtaggggaaagaaagagatcagactgctactgtgtctatgtagaaagaagtgga

SEQ ID NO: 931239 - DNA, 120 bp, Artificial Sequence
  ENSG00000260285_26 (sequence is synthesized)
ttaatgggtttagggctgtgcaggacgtgctgtgttaaaatgtgtttgcaggcagtgtgcttggtgaaagccatcgccattctccagtcttgagtacccagggacacgatgcactgcgga

SEQ ID NO: 931240 - DNA, 72 bp, Artificial Sequence
  ENSG00000260285_27 (sequence is synthesized)
tctccagtcttgagtacccagggacacgttgtccaaggtttcccccgactgagacagcctgagatatggcct

SEQ ID NO: 931241 - DNA, 120 bp, Artificial Sequence
  ENSG00000260285_28 (sequence is synthesized)
aggaaggcctctttgcagttgagataggaggaaagcatctatctcctgctcctccctgggaatggaatgtctcggtgtaaaacccgattgtacattctatttactgagatacgagaaaac

SEQ ID NO: 931242 - DNA, 120 bp, Artificial Sequence
  ENSG00000260285_29 (sequence is synthesized)
cggtgtaaaacccgattgtacattctatttactgagatacgagaaaactgccttatggctggaggtgagacatgctggcggcaataccgctctttactgcactgagatgtttgtgtaaag

SEQ ID NO: 931243 - DNA, 120 bp, Artificial Sequence
  ENSG00000260285_30 (sequence is synthesized)
atccccctcactgaaatagtagaaatagtgatcaataaatactgaaggaactcagagaccagtgccggcgcgggtcctccatatgctggcaccagttccctgggcccactgttctttcgc

SEQ ID NO: 931244 - DNA, 120 bp, Artificial Sequence
  ENSG00000226235_0 (sequence is synthesized)
agtgaatgcggtcctgtaaatgctggcgatcttgtagcagtgctgattagcgagttgctccaacacctcctcataattttttcctgctcatcactcacctgctttgtcaaaatgaacaag

SEQ ID NO: 931245 - DNA, 120 bp, Artificial Sequence
  ENSG00000226235_1 (sequence is synthesized)
aaggaagcatgattgagctgtgcaccgaggcggcaaggaagccctggatgaccctcttaacagaggctgccaaggctccagcgcccactttctcagcctcccttgctgctcaggatgaaa

SEQ ID NO: 931246 - DNA, 120 bp, Artificial Sequence
  ENSG00000226235_2 (sequence is synthesized)
tatgtagagctggagaagagacatggttagtccttacgtcctgccttaaatgatgatgtgatggccattatctggatccttcatggaatttcggcagttccaacgtgtcaggccagtgtc

SEQ ID NO: 931247 - DNA, 120 bp, Artificial Sequence
  ENSG00000226235_3 (sequence is synthesized)
tgggattctctcagcctttcgctttttcccctgggagtcggacagctgctgcagctcagtcagaccaaacctctctgaataccaccaagaatcgggatcttgttctgttgtccaggctgg

SEQ ID NO: 931248 - DNA, 83 bp, Artificial Sequence
  ENSG00000226235_4 (sequence is synthesized)
actgcagccttaacctcctgggctcaagacatcctcccacgtctgcctctcgagtagctcggaccacagaaactgtaacctct

SEQ ID NO: 931249 - DNA, 120 bp, Artificial Sequence
  ENSG00000226235_5 (sequence is synthesized)
caagtaattctcctgcctcagccttctaagtagctgagattacaggcactcttcgccgcgcctggctaatttttgtataatatttttagcagagacggggttttgtcatgttggctaggc

SEQ ID NO: 931250 - DNA, 88 bp, Artificial Sequence
  ENSG00000226235_6 (sequence is synthesized)
ggcactcttcgccgcgcctggctaatttttgtataatatttttagcagagacggggttttgtcatgttggctaggctggtctcaaaca

SEQ ID NO: 931251 - DNA, 120 bp, Artificial Sequence
  ENSG00000226235_7 (sequence is synthesized)
gcccttatgttttatttattcatttaacaattatttgttgcgtgctgctgagtgccaggcctgacgccggctgtgaagatttcagaagggcctgccaaaccgtccctgtccaaaacagct

SEQ ID NO: 931252 - DNA, 120 bp, Artificial Sequence
  ENSG00000226235_8 (sequence is synthesized)
cactatcaagcatggttattttgtaagtgttctgcactggcttccttcttccctaatcagaccatctgttggatctcatggagctgtctcctatttctctgtaatcaagccacagtatct

SEQ ID NO: 931253 - DNA, 120 bp, Artificial Sequence
  ENSG00000226235_9 (sequence is synthesized)
aacatttggggccactggtaacttgccgtctactcccatgctggaagcccaggacccttgaacataagaggcgccttctgacacctgcggtgctgtcagagcctgcaggctgcagacagt

SEQ ID NO: 931254 - DNA, 120 bp, Artificial Sequence
  ENSG00000226235_10 (sequence is synthesized)
gagtcaggaactggagaattcccaggagtggtataaggagctgggactcgcgtcagacagggaaaggactgacagagaccaggacagaacaagaagcacaaggaaagtcaagaggagagt

SEQ ID NO: 931255 - DNA, 120 bp, Artificial Sequence
  ENSG00000226235_11 (sequence is synthesized)
gactggactggagtgtctggagggtccgacaggagaagggcatttgtgttcatcacggagctactaggagaaagaagagcctgggtcttagcaaggatgtggtcaggacacaacaataga

SEQ ID NO: 931256 - DNA, 120 bp, Artificial Sequence
  ENSG00000226235_12 (sequence is synthesized)
gtggacccctccagtgagtgtggactatgacttatggcaggcccaagggtcccagcgcagggtggggtggggagggcatggcttgctgtagcatcacgcactgctagtcaccatctaccc

SEQ ID NO: 931257 - DNA, 120 bp, Artificial Sequence
  ENSG00000226235_13 (sequence is synthesized)
cgcactgctagtcaccatctacccagtacaggtcaccaatgatggaacagctacagcctcctccccttcccctgtactccctgtgcccccttcttttttttttttgagatggagtctcgt

SEQ ID NO: 931258 - DNA, 120 bp, Artificial Sequence
  ENSG00000226235_14 (sequence is synthesized)
gcccctgtgccccccttcttaaacatgttctcaacagtggtttagcgatacccaagcaaggcctttgcatatgtgggaagttgtgcaccatgcaagagtgccacatgcaaacagcacctt

SEQ ID NO: 931259 - DNA, 120 bp, Artificial Sequence
  ENSG00000226235_15 (sequence is synthesized)
tccccgtgtagacactgtagatttacatacccttaccacatacccttccaggaacagggaagcaaaggctcttgaggaagagatttcccacaaaggtgctatgtgggttagtgttggcat

SEQ ID NO: 931260 - DNA, 120 bp, Artificial Sequence
  ENSG00000226235_16 (sequence is synthesized)
gctcaccaagagatatttcaagctatttccaagggtattggaaaaatcatttataagcaaattctttttttacttatggaaaattttaagcatatacaaaaatagacaacagtatcatga

SEQ ID NO: 931261 - DNA, 120 bp, Artificial Sequence
  ENSG00000226235_17 (sequence is synthesized)
acctctacatatccatcacatgcaacttctttttaattcgcttaaatttaaaaatagatacgtgaaataaagcatttggggcagaagttcattgcaaaatcaaatgatagaatttcacag

SEQ ID NO: 931262 - DNA, 120 bp, Artificial Sequence
  ENSG00000226235_18 (sequence is synthesized)
ctcctaggcaatcaaatactccccttgtgccataaggagatttaggccttttatttccttttcttttacaatttgttttctttgctatcattcatatgtagagttctcctgcagtatgta

SEQ ID NO: 931263 - DNA, 120 bp, Artificial Sequence
  ENSG00000226235_19 (sequence is synthesized)
gaaggtggacattgtcattttcaaaaatggagtaattatggcctatctacctgactgtgcagctatcaataataattattattataaaggccatataacagggaaaagcattattgatta

SEQ ID NO: 931264 - DNA, 120 bp, Artificial Sequence
  ENSG00000226235_20 (sequence is synthesized)
gtgttaataaacggtataaattgtacataaacagtgatgtctactgtgtgaacatatactagatatgcatgtaaacaaaaactagaggtaaattgaaaaaataaaatcagtttttgcatc

SEQ ID NO: 931265 - DNA, 120 bp, Artificial Sequence
  ENSG00000260281_0 (sequence is synthesized)
agcgcggacatcggcagagggagcccgaggctctccgtgcccttcgcgccgctccccaaggatggataacactaacatatagtcagtgggaaagaaatctcagaaaataactgttagttt

SEQ ID NO: 931266 - DNA, 120 bp, Artificial Sequence
  ENSG00000260281_1 (sequence is synthesized)
gtcactgtcatgggaaatgggaaggaagaaaaacagcacttatcaagcatcttctgtgtacaaactgccatttcagactcagagcagtccttgaaggtcaagaactgtggaatctttcag

SEQ ID NO: 931267 - DNA, 120 bp, Artificial Sequence
  ENSG00000260281_2 (sequence is synthesized)
cttctggaccaagattgaatttgttcttcatgaaaaatgtctgggaccttttatatggacggggaataccaacgtagagatggtcaagaaaatttgcgctccgacctaaaccaagcacgt

SEQ ID NO: 931268 - DNA, 120 bp, Artificial Sequence
  ENSG00000260281_3 (sequence is synthesized)
tgtatggtagttggagagctaaatgtgcggattggctgagttggccagctagagttattcaattaaaaaaaaattaaaaacatctctggaaacattgctcccatcaaatattaaaatgat

SEQ ID NO: 931269 - DNA, 120 bp, Artificial Sequence
  ENSG00000260281_4 (sequence is synthesized)
cggcctgccgggtctccgccagccctagcagacagagaggggcgccggtccctagtcccccagacctccattcaaggtcaaaactttgcccagctcagccttgctcgaccctgggcaggg

SEQ ID NO: 931270 - DNA, 120 bp, Artificial Sequence
  ENSG00000260288_0 (sequence is synthesized)
gaatctgttgacctggcgccaccggaaaaagaaattcccgggccctggcttcttggcctgatgctgaccctcgtcctcagatctctgcagaactttgaccagtggtggtggaggaattcc

SEQ ID NO: 931271 - DNA, 120 bp, Artificial Sequence
  ENSG00000260288_1 (sequence is synthesized)
ggcactgctagccttgaagcctccagcctgctggatgcctccatccccggctatgctgtggctctcctcattctaggcctcctgctcgtcacattcacccttgtcctggtgctaaagtgg

SEQ ID NO: 931272 - DNA, 120 bp, Artificial Sequence
  ENSG00000260288_2 (sequence is synthesized)
agggcctcccatggggtgttcagcctgggtgtgtagaagcacacagtgtggtacagaggaccctctccagacagaaatgatgctgggagctgacagaaactgaacttaggagcacaggag

SEQ ID NO: 931273 - DNA, 120 bp, Artificial Sequence
  ENSG00000260288_3 (sequence is synthesized)
aggagacctgggacagagaacaggaggtgacccctcatgctgctgctccctctgctgaaacccaaactgcaaacctctcctctccctgccttcaccttgccccacggcttccacagacag

SEQ ID NO: 931274 - DNA, 120 bp, Artificial Sequence
  ENSG00000260288_4 (sequence is synthesized)
tgcctcaaccccgaggaatgaatccgaagttccaacaccactgactttcccaggaactcagagccagagagggccaaggaccagctcgaggacacacagccagggcttcttccctccgaa

SEQ ID NO: 931275 - DNA, 120 bp, Artificial Sequence
  ENSG00000260288_5 (sequence is synthesized)
acccccaaggactggacttgcagggctgggacagaggtggggtgggggaaagcaatgccttgtcaacccacgtggggagccccactcccatccccaaggtgcataaagttgaggaacacc

SEQ ID NO: 931276 - DNA, 120 bp, Artificial Sequence
  ENSG00000260288_6 (sequence is synthesized)
acgtgatcgtcgaatctgttgacctggcgccaccggaaaaagaaattcccgggccctggcttcttggcctgatggtgaggcaccagaggtgaagcgaggcatgggctgctggagcgggaa

SEQ ID NO: 931277 - DNA, 120 bp, Artificial Sequence
  ENSG00000260288_7 (sequence is synthesized)
tgagggggcgacagtggctccggaaacggggggagggtgtcttcactggcctctccgcaaacacagtgtgtgcgggtgtgagggctgcaggtctggtagagaagagtccaccgccatccc

SEQ ID NO: 931278 - DNA, 120 bp, Artificial Sequence
  ENSG00000260288_8 (sequence is synthesized)
gctcctgagacgggggcaggagtggggggcaggagtgggggggcgggtaagacagagcaggccggccggcttgtggagggcgaggcaggcagatcccttgagctcaggagtttgagacca

SEQ ID NO: 931279 - DNA, 77 bp, Artificial Sequence
  ENSG00000260288_9 (sequence is synthesized)
gtagttaggaggctagggtgggagcactgcttgagcccaggaagtagaggctgcagtgagccgagatcatgatgtca

SEQ ID NO: 931280 - DNA, 75 bp, Artificial Sequence
  ENSG00000260288_10 (sequence is synthesized)
taaaaataaagtggaagcatcagtatgcatgattgaagtcatgctttccatctatttttttccaccttccctttt

SEQ ID NO: 931281 - DNA, 120 bp, Artificial Sequence
  ENSG00000260288_11 (sequence is synthesized)
aagtcatgctttccatctatttttttccaccttcccttttttctgtctaaaacattgtatcttaagcttttgcctatgttatcaagtactcataagcattatttgaatggttgtatcata

SEQ ID NO: 931282 - DNA, 120 bp, Artificial Sequence
  ENSG00000260288_12 (sequence is synthesized)
agttgctggagatactgccctttctgccacactcagtcacccttctgaccttgcactgtgtccagttatctactaatacccatactggtcatttaggacttaagaatagttatcatagtt

SEQ ID NO: 931283 - DNA, 120 bp, Artificial Sequence
  ENSG00000260288_13 (sequence is synthesized)
tttaacattccaaaaagaatgtgtcttcctaaaaatagaatggcttggtggttatacttttaaagcaaaatagacaaagccatgttgaaattaatgttttattttcttcttgtatctatt

SEQ ID NO: 931284 - DNA, 120 bp, Artificial Sequence
  ENSG00000260288_14 (sequence is synthesized)
ttcacttctcttgtcattttgatggataaagtttcatttggaaggatttttatttcaaaacagaaatagcatatgacatgagaaggggaactctgaaaggttcaacttcctagtttacta

SEQ ID NO: 931285 - DNA, 120 bp, Artificial Sequence
  ENSG00000260288_15 (sequence is synthesized)
agtttgtcacaaaagctactgatagtcaatcatgattggcctgtattgaaagtgagttaacattatgtacaacttaagcactatactttctatccgatacagaaaaataggtggtgtgtt

SEQ ID NO: 931286 - DNA, 120 bp, Artificial Sequence
  ENSG00000260288_16 (sequence is synthesized)
tggaaaagtattgggctaggagtcaggaagcttgattgttagtctcaaccctgcttcttgagctgagcacccctaggcaataattcagcagctatttcttaaatacctaaatgaatttca

SEQ ID NO: 931287 - DNA, 120 bp, Artificial Sequence
  ENSG00000260288_17 (sequence is synthesized)
ggctttgtggttgggctgggaatatagacatagatactgcattcatgattctccaagcctcccttcttcaccccggctcacagtgagctttcttatgcattgtgtaaatttgtctcctaa

SEQ ID NO: 931288 - DNA, 120 bp, Artificial Sequence
  ENSG00000260288_18 (sequence is synthesized)
caggccccaactctgtctccaacctccttcccagggcagttgtgaggatcagatgagggagaatatgtgtgaaagcaaattgtaaattattttaaaatgcaataaaaatatgatccatgg

SEQ ID NO: 931289 - DNA, 120 bp, Artificial Sequence
  ENSG00000260288_19 (sequence is synthesized)
ccagaggccgtttgtccaagtcacgtgatcgtcgaatctgttgacctggcgccaccggaaaaagaaattcccgggccctggcttcttggcctgatggtgctaaagtggagggcctcccat

SEQ ID NO: 931290 - DNA, 120 bp, Artificial Sequence
  ENSG00000260288_20 (sequence is synthesized)
gatcgtcgaatctgttgacctggcgccaccggaaaaagaaattcccgggccctggcttcttggcctgatggtgaggcaccagaggtgctaaagtggagggcctcccatggggtgttcagc

SEQ ID NO: 931291 - DNA, 120 bp, Artificial Sequence
  ENSG00000260288_21 (sequence is synthesized)
agacaccccctgggatggctcaaaggagtcaggacttggaagtggggacatcagggtagctgaaggaaatccacacacccagaacatctcggggttcagactctctgacctgagaagtac

SEQ ID NO: 931292 - DNA, 60 bp, Artificial Sequence
  ENSG00000260288_22 (sequence is synthesized)
tttcattggaagtgtgaaaatggactaatacaataaattggtaccagtagagtggggcat

SEQ ID NO: 931293 - DNA, 90 bp, Artificial Sequence
  ENSG00000260288_23 (sequence is synthesized)
agctttggaactaggtaacaggcaaaggttggaacaatttggagggctcagaagaaggcagaaaaacgtgggaaagtttggaacttccta

SEQ ID NO: 931294 - DNA, 120 bp, Artificial Sequence
  ENSG00000260288_24 (sequence is synthesized)
acttcctagagacttgttgaatgactttaccccgaatgctgatagtgatacggacaataagatccaggctaaggtggtctcagatggtgacaaggaacttgttgggaagtggagcaaaga

SEQ ID NO: 931295 - DNA, 64 bp, Artificial Sequence
  ENSG00000260288_25 (sequence is synthesized)
ataagatccaggctaaggtggtctcagatggtgacaaggaacttgttgggaagtggagcaaaga

SEQ ID NO: 931296 - DNA, 120 bp, Artificial Sequence
  ENSG00000260288_26 (sequence is synthesized)
atctggctgaagaaatttctaagtagcaaagcatttaagaggtgacttgggtactgttggcattcagttttataagggaagcagggcataagtttggaaaatttgcagcccgactatgcg

SEQ ID NO: 931297 - DNA, 88 bp, Artificial Sequence
  ENSG00000260288_27 (sequence is synthesized)
ggggccagggaccctgtgctgtgtgcagcctagggttttggtgccgtatgtcccagccacttagccgtggctgaaaggggccaacgta

SEQ ID NO: 931298 - DNA, 76 bp, Artificial Sequence
  ENSG00000260288_28 (sequence is synthesized)
ggaccctgtgctgtgtgcagcctagggttttggtgccgtatgtcccagccacttagccgtggctgaaaggggccaa

SEQ ID NO: 931299 - DNA, 86 bp, Artificial Sequence
  ENSG00000260288_29 (sequence is synthesized)
gcaccatgtgcctggaaaagccacagcactcaatgccagcctttgaaaacagctgggagggaggctgtaccctgcaaagcccattc

SEQ ID NO: 931300 - DNA, 120 bp, Artificial Sequence
  ENSG00000260288_30 (sequence is synthesized)
ttgcatcaatgtgacctggatgtgagacaaaggagataattttggtgctttaaaatttgactgtcccactggattttggacttgcatgggccttgtaatccctttgttttggtcagtttc

SEQ ID NO: 931301 - DNA, 88 bp, Artificial Sequence
  ENSG00000260288_31 (sequence is synthesized)
tggacttgcatgggccttgtaatccctttgttttggtcagtttctcccatttggaacaactgtatttacccaatattttgtttttgat

SEQ ID NO: 931302 - DNA, 80 bp, Artificial Sequence
  ENSG00000260288_32 (sequence is synthesized)
acatgttgtgggaaggacccaggaggtggtaactgaatcatgggagctggtctttcccgtgctattctcatgatagtgaa

SEQ ID NO: 931303 - DNA, 120 bp, Artificial Sequence
  ENSG00000260288_33 (sequence is synthesized)
tgggagctggtctttcccgtgctattctcatgatagtgaacaagtctcatgagatctgatgagtttattgaggtttctgcttttgcttctatctcattttctcctgccaccaccatgtta

SEQ ID NO: 931304 - DNA, 120 bp, Artificial Sequence
  ENSG00000260288_34 (sequence is synthesized)
gccatgattctgaggcctccccagccatatggagctataagtccaattaaacctctttttctccccagtctcaggtatgtttttatgagcagtgtgaaaacggactaatacatgcctcct

SEQ ID NO: 931305 - DNA, 120 bp, Artificial Sequence
  ENSG00000260288_35 (sequence is synthesized)
cggactaatacatgcctcctcaggtcactgtgaggatttagtgaaacattatcctaaaaaaaataagttaaaagtcttgcttaaatatgacaagcttataaaaattaacagaagcattat

SEQ ID NO: 931306 - DNA, 120 bp, Artificial Sequence
  ENSG00000260288_36 (sequence is synthesized)
attagaatttctaaagtcatttccattgaaatcaagaataagaaaaacatgctgctttccccaatgttagtcaacattatttaaaatgtttagctaatcaaactgaaaaaaataaaacaa

SEQ ID NO: 931307 - DNA, 120 bp, Artificial Sequence
  ENSG00000260288_37 (sequence is synthesized)
ctcaaatcaagatatatggtacataaaaatcattagcctttctcaatatgaagaataactagtcatggatataaatttattttttaaataacacataaaagcattatatattgcttagga

SEQ ID NO: 931308 - DNA, 120 bp, Artificial Sequence
  ENSG00000260288_38 (sequence is synthesized)
ccattatctattatttagaaatgcaaaaatacatttaagaaatgtttaaatgtctgggaattatacacactggcttctagacactagtcatatatctagaaagggggaagatgaaagaat

SEQ ID NO: 931309 - DNA, 120 bp, Artificial Sequence
  ENSG00000260288_39 (sequence is synthesized)
gaaagaatgtcatcatattctataaatatgtcaaaatgttaaaatctagtaagtatgagaagagggtacatgttgcctgtaatattttttttatatttctctgtatatttgaaatattta

SEQ ID NO: 931310 - DNA, 78 bp, Artificial Sequence
  ENSG00000260288_40 (sequence is synthesized)
ccgaggtgggtggatcaccttaggtcagaagttcgagaccagcttgaccaatatggtaaaacctgtctctactgaaac

SEQ ID NO: 931311 - DNA, 120 bp, Artificial Sequence
  ENSG00000260288_41 (sequence is synthesized)
ggggctgttgtgggcagcacctgggtggtgcagttggtgtgccagaaaagctccccagtactgggcagtggcccaggcagtcaagcagactccctcaagcaggccccacctacccctcgc

SEQ ID NO: 931312 - DNA, 120 bp, Artificial Sequence
  ENSG00000260288_42 (sequence is synthesized)
gatcgtcgaatctgttgacctggcgccaccggaaaaagaaattcccgggccctggcttcttggcctgatgggcttccaggagaggggatgcaggccgatgccacctccacccctgtcgct

SEQ ID NO: 931313 - DNA, 120 bp, Artificial Sequence
  ENSG00000260288_43 (sequence is synthesized)
ctaggggagaaggcagagctggtgctgtatgaagtttggctgcagatcctgggccagccctacaccaaggccttggaggacaaaaccagccttgagttctgggcacttcaggggcaaccg

SEQ ID NO: 931314 - DNA, 87 bp, Artificial Sequence
  ENSG00000260289_0 (sequence is synthesized)
cggccagggcaaatctctttaactattataattttctcagttataatcttgccatggtggtttcaaaaggtgactggaagaaagcgg

SEQ ID NO: 931315 - DNA, 120 bp, Artificial Sequence
  ENSG00000260289_1 (sequence is synthesized)
cttgccatggtggtttcaaaaggtgactggaagaaagcggaaggaatgcttgcctcatcttgcagacatcaggtgcattcctgagaagctacaggtgcacaaccttagtcaggctctggg

SEQ ID NO: 931316 - DNA, 120 bp, Artificial Sequence
  ENSG00000260289_2 (sequence is synthesized)
tacagaagtaacaagaagaccagacccttgttccaatggaggagacatcctgttggaagtaccccaaaggaatatctatctacccatctgtcctgccacaaaacagatcattctcaacag

SEQ ID NO: 931317 - DNA, 120 bp, Artificial Sequence
  ENSG00000260289_3 (sequence is synthesized)
cagtggaaatagaatcagctccattgcctgggaatcattcttgtcaggagtgctttcgttctaacctaggtaaaggatccaaacaagcagactacacacagaaagatgacttcatttctt

SEQ ID NO: 931318 - DNA, 120 bp, Artificial Sequence
  ENSG00000260289_4 (sequence is synthesized)
caccgagtgtttcgtgagtgtctgctgcatgctggacactagcaaaggcagaaggaattcaaccacaactgaaatgaacaccgggtatccaagggcaggaggaaaatgctggagaaagga

SEQ ID NO: 931319 - DNA, 120 bp, Artificial Sequence
  ENSG00000260289_5 (sequence is synthesized)
cctcaagtcaagtgatggatggcttcaaggaaggcacaacagagagctgttggggtccaggagaagaagtatgtaattctgtctgggtggagtgggcagaagcaaacaaacaaacaaaaa

SEQ ID NO: 931320 - DNA, 120 bp, Artificial Sequence
  ENSG00000260289_6 (sequence is synthesized)
gatacagaagtaacaagaagaccagacccttgttccaatggaggagacatcctgggacattgtctaaaaaccaacctgctccaaatcttatctcaggctctgctttcaaaagaactcaaa

SEQ ID NO: 931321 - DNA, 90 bp, Artificial Sequence
  ENSG00000260289_7 (sequence is synthesized)
atgtacctgtagtcccagttattctggagactgaagtcaaggctgcagagagctataattgtgcagctgtactccaacctaggcaacaga

SEQ ID NO: 931322 - DNA, 120 bp, Artificial Sequence
  ENSG00000260289_8 (sequence is synthesized)
agctataattgtgcagctgtactccaacctaggcaacagatcaaggccctgtctcgcaactacaacaacaaaaacaaaaaaatggttccatagtagaagtaatgcccaagctgagctttg

SEQ ID NO: 931323 - DNA, 120 bp, Artificial Sequence
  ENSG00000260289_9 (sequence is synthesized)
caatgcgagtcaagaatacctgggatgatgttgggaaaaggaaattcaaattctatatcagacttcttcataattcctgtcattaaagaactctcagcccacttccctcaaagcctacca

SEQ ID NO: 931324 - DNA, 120 bp, Artificial Sequence
  ENSG00000260289_10 (sequence is synthesized)
tcagcccaaactttcagtggaattcataattattgttcagctccacttgtaattttctttttggaaacacttgattggaagatgattatgagagggttaatgaaaaaaagagcccccaaa

SEQ ID NO: 931325 - DNA, 120 bp, Artificial Sequence
  ENSG00000260289_11 (sequence is synthesized)
aatgctaaacgccaggacgtcagatgatggagagagaggatcccttgaatctaatttaaactaaaaagatgtttttgaaaccaaaaataaatcttgctccagagtgattaccagataaaa

SEQ ID NO: 931326 - DNA, 120 bp, Artificial Sequence
  ENSG00000260289_12 (sequence is synthesized)
gaatcattcttgtcaggagtgctttcgttctaacctaggtaaagcacaacatttacccacaattgacactagaaagtgtttgttgaattgaattgctgtgcaaagaagtacttcctttaa

SEQ ID NO: 931327 - DNA, 120 bp, Artificial Sequence
  ENSG00000260289_13 (sequence is synthesized)
aagacgtaaaagaaaaagaacagtgacagctttgctgaagagaacacaatgaactgaaaagccaccagctttgatcaaaaccctgccccaggaactctccagctgctcagacatggtttt

SEQ ID NO: 931328 - DNA, 120 bp, Artificial Sequence
  ENSG00000260289_14 (sequence is synthesized)
gtgatcaggtctgagggaggaagaaaaacacaagcagaccagaggcagtgattctgcacactgtagtttattcatgtttggcagagttcactgagcagaactcacagttgagggaagctg

SEQ ID NO: 931329 - DNA, 120 bp, Artificial Sequence
  ENSG00000260289_15 (sequence is synthesized)
aaacccttggcaaatggaatgcttagaggctccaggttttatatctgtgtttagttctcataccaataaagagagaagatttttgtagataatatttaaaacgattgtgagaggtgaaaa

SEQ ID NO: 931330 - DNA, 120 bp, Artificial Sequence
  ENSG00000260289_16 (sequence is synthesized)
ataattatctagtctcaaacatcaaggaaaatattcaagtgtttagaataatggaaatttccatccagcagggattataaatatcatcttctccaggaatagcaaacaaaagagatgggc

SEQ ID NO: 931331 - DNA, 120 bp, Artificial Sequence
  ENSG00000260289_17 (sequence is synthesized)
tactgatcgccctttccaatggctatgacaagtgattgtaaaacagctgcataattatttcttgaagagtgaggatacgacctcggattatttctcaacacaatgccaacaccacaagag

SEQ ID NO: 931332 - DNA, 120 bp, Artificial Sequence
  ENSG00000260289_18 (sequence is synthesized)
ttcatctgtgagatgacgttatttgctaacccatctcacttgtgagatgaagaaagtaaagcctgaggggaaggcaatcctccccggtgactcagtgaattggtgtaaattctatctaca

SEQ ID NO: 931333 - DNA, 120 bp, Artificial Sequence
  ENSG00000260289_19 (sequence is synthesized)
tcccagttcgattacctttccatacaccatgctgctgacctatttgttcctttcctggtcatagctcttataatgatgtgtgcattccaaacaaagcatgcctgcctaaagctcggacca

SEQ ID NO: 931334 - DNA, 120 bp, Artificial Sequence
  ENSG00000260289_20 (sequence is synthesized)
ctttatggtggcatatataacttctcatccaccaagaagtcttacgataatgcatgttctcccaagtcaaatgttttctgacaagccaatcctaaaataaaccacaatctttttcttgga

SEQ ID NO: 931335 - DNA, 120 bp, Artificial Sequence
  ENSG00000226239_0 (sequence is synthesized)
tgggacaaagcaggatcgctgctcagccccagcccggcagagcggcccaggagccccgggtgactgccccggacttcagggcccggcttcgctttccccctgcaggacactccaggtact

SEQ ID NO: 931336 - DNA, 120 bp, Artificial Sequence
  ENSG00000226239_1 (sequence is synthesized)
gcatggccccgggccccaagggcagggagcgagaccctggagtgaagaccccccggccccgccaggtgtgatgggggggccctggggatagggtccccgaagcaaagctgagactcagag

SEQ ID NO: 931337 - DNA, 120 bp, Artificial Sequence
  ENSG00000226239_2 (sequence is synthesized)
gtgggctgctgagccacgccgtccgcaggggcggtggctacaggtagttgtcttctgcggcgtcgctcccgcccctggagccccggggctcatcctcgtcgtcgtcgtcgtcatcggggg

SEQ ID NO: 931338 - DNA, 120 bp, Artificial Sequence
  ENSG00000226239_3 (sequence is synthesized)
ccagcgcctcgatgtcgtgcgtgatgtcagccagcagccggtggaaggcctgtgcctcgggccgctgcgccgcgccatcgtagctgcgcactgcggaggccgacgtggagctcatgctgc

SEQ ID NO: 931339 - DNA, 120 bp, Artificial Sequence
  ENSG00000226239_4 (sequence is synthesized)
gcttgatgcggccgaagctgtcagtgaggatgccgccctcgcggatgcccacgccctccaggaagccctcgaagtagccgatgtcctggtccgggatgaagggccgcatccctgcgagcc

SEQ ID NO: 931340 - DNA, 120 bp, Artificial Sequence
  ENSG00000226239_5 (sequence is synthesized)
gaggggcatgcctccaggcttttgcttgtgccattcccaccaccggccccagctcaccgtgaccatgtaatcctgtaactgctccaagcccagactgctgtggtcgctgccgctgcagtg

SEQ ID NO: 931341 - DNA, 120 bp, Artificial Sequence
  ENSG00000226239_6 (sequence is synthesized)
ggagccatggaaagaaggtgtggacgtgccgctgtaacatgcttcaaaggtgtcctgggagccattactgcaggcacgggaagaagggccttcactcgcctccctccagctcctggccct

SEQ ID NO: 931342 - DNA, 120 bp, Artificial Sequence
  ENSG00000226239_7 (sequence is synthesized)
caggcaggctgaaggtaggaggcctcatcctagactgcatgctggcctccaaggcctcgcataccctggcccctggcacctctcaagtctcatctgtcactgtgcttgcctttgcctttg

SEQ ID NO: 931343 - DNA, 120 bp, Artificial Sequence
  ENSG00000226239_8 (sequence is synthesized)
ctctttgtgcttcgcgccccccaccccccttctccttcttcctctactatctcctcacctctgggtgtttgcacctgctggtccctctgcctggattgcctcctttcccctcccttttgc

SEQ ID NO: 931344 - DNA, 120 bp, Artificial Sequence
  ENSG00000226239_9 (sequence is synthesized)
acagctaactcttactcatcccgtgatcttaaatgtcatctcctcaggagagtgttccctaattcccctaggttgggttagaacctctgtcgaacatgctccctcagtccatggcctacc

SEQ ID NO: 931345 - DNA, 120 bp, Artificial Sequence
  ENSG00000226239_10 (sequence is synthesized)
tgtgacatgcatggcctttccaggtacccccaagcatcctctctgaccactctctccctcacaccatttgccacagccacagtggccacctgctgcccctcaaacccactaagctctatc

SEQ ID NO: 931346 - DNA, 78 bp, Artificial Sequence
  ENSG00000226239_11 (sequence is synthesized)
agtggccacctgctgcccctcaaacccactaagctctatcctgttcaaatgaggctggagtgcagtggtgcggtcttg

SEQ ID NO: 931347 - DNA, 66 bp, Artificial Sequence
  ENSG00000226239_12 (sequence is synthesized)
ggactacaagcatgtgcaggctgctctcaaatgcctcacctcaagcaatctgcccacctcagcctc

SEQ ID NO: 931348 - DNA, 120 bp, Artificial Sequence
  ENSG00000226239_13 (sequence is synthesized)
gattacaggcgtgagccaccacgcctggttagttcaggattcttacatttgctgttccctctacctggaacactcttccccctttcatcctccaagcctcagttcatgtgccatcacctc

SEQ ID NO: 931349 - DNA, 120 bp, Artificial Sequence
  ENSG00000226239_14 (sequence is synthesized)
tcatcctccaagcctcagttcatgtgccatcacctctgagaggccctcctgactctccagctgagttgcggtccccctctgcctctcttatagcaccctgagcctccctttagtacttat

SEQ ID NO: 931350 - DNA, 120 bp, Artificial Sequence
  ENSG00000226239_15 (sequence is synthesized)
taccattaatgattgttactgttaaattgcgatttcattgcctcctatcctagactgtaaacttgacaagagcagggactttggttttcttcatttgttgaacacctactatgtgccagg

SEQ ID NO: 931351 - DNA, 120 bp, Artificial Sequence
  ENSG00000226239_16 (sequence is synthesized)
ctccttgtctctaaattgttccagaaccatcctccattattacctacaaagaagccgtgtagctttgtggttaaaggactggattctggagccagccttcttctgttcaaatcccatact

SEQ ID NO: 931352 - DNA, 120 bp, Artificial Sequence
  ENSG00000226239_17 (sequence is synthesized)
tacaacttactaggtgcttgaccttgggaaaactaaacttaatttctctatttctcaatttttccatctgtataatgggataataataattagtgtcatcatgagaattagaggagttaa

SEQ ID NO: 931353 - DNA, 120 bp, Artificial Sequence
  ENSG00000226239_18 (sequence is synthesized)
tatttgtagaacacttagaattatgggctataagcaataaacagtagctgctgtaatgttactatgttgatgaaaaaataaagtgctttatagaacagcacttagtacatagcaagttca

SEQ ID NO: 931354 - DNA, 120 bp, Artificial Sequence
  ENSG00000226239_19 (sequence is synthesized)
atgttcaaacgctattatcactattttatctcttcagtagatatctggttgtttaaagactagcctaagggcatacagtatgaggaaggcaaatctattgccactaaaaaggaaagaaac

SEQ ID NO: 931355 - DNA, 120 bp, Artificial Sequence
  ENSG00000226239_20 (sequence is synthesized)
aataagacatatatcactggcagagactgctacatgccaaactgaagcccttagtaatataactaggtgatcaaccagtaacccaggactttcttggttttagcactgaaaatcccatat

SEQ ID NO: 931356 - DNA, 120 bp, Artificial Sequence
  ENSG00000226239_21 (sequence is synthesized)
ccgggggaacccctcattcctgagcaaactgggatggctggtcaccctaaacagaaccctgggtaatgttcccaactgaattgtttaaaattttatttatttatttgtttatttatttat

SEQ ID NO: 931357 - DNA, 89 bp, Artificial Sequence
  ENSG00000226239_22 (sequence is synthesized)
ttgtttatttatttatttcaatagagacagggttgtgggctcaagtgatcctcctgcgttgccctcccaaagtgttgggattacaggcg

SEQ ID NO: 931358 - DNA, 89 bp, Artificial Sequence
  ENSG00000226239_23 (sequence is synthesized)
cacaggtgtgcggtggagatggggtttcgccatgttgcccaggatggtttggaactcccaggctcaagcgatccacctgcctcagcctc

SEQ ID NO: 931359 - DNA, 120 bp, Artificial Sequence
  ENSG00000226239_24 (sequence is synthesized)
tcagcctcccaaactgttgggattacaggtgcgagccaccgcatctagcctgaaatatatttttttaatcctaaattttccagctttgcttgcagctagtgatggctatgtgaccaagtt

SEQ ID NO: 931360 - DNA, 120 bp, Artificial Sequence
  ENSG00000226239_25 (sequence is synthesized)
gatggctatgtgaccaagttctggcctatgagatataagcagaagtcatcaggtgggaatctggcaaaactctttaaagaggccccttagcatgctactgtgatggctggagctacaacc

SEQ ID NO: 931361 - DNA, 120 bp, Artificial Sequence
  ENSG00000226239_26 (sequence is synthesized)
accatctcggtccatgaggtgaccttgaggatggctgcaagtcctgaagagggtagggaaggaaaagagaagcctgagctcctaacaaccatgaaatgttgaattgctgctctattttat

SEQ ID NO: 931362 - DNA, 120 bp, Artificial Sequence
  ENSG00000226239_27 (sequence is synthesized)
gtcaaatataagaaaaaaaagttctatcttgcttaagatactctttttggggattttctattacatggaaccaaaattaagccaagataatttttttggcatgtagctatgattttggtt

SEQ ID NO: 931363 - DNA, 120 bp, Artificial Sequence
  ENSG00000226239_28 (sequence is synthesized)
tctgcagaccactgtgcctggatgactgggagagaaccacaggactgtgtggacccacatctgagttctggtgtctcctgggtctctcaagggtctggatcctgtgggtttccagagtca

SEQ ID NO: 931364 - DNA, 120 bp, Artificial Sequence
  ENSG00000226239_29 (sequence is synthesized)
gggagctcagtttacctccccctcttagtgcccagtgtctcagcacacatcaaggttgggtcaccttctcctaccctctctagtcaccctgtttgtgcaggggtaggggagcagggtgga

SEQ ID NO: 931365 - DNA, 120 bp, Artificial Sequence
  ENSG00000226239_30 (sequence is synthesized)
gtccctgacaggggctgtactcacaaggagctgcagcagctgaagtcggcatcataggcatacgtcccatctgtgtggcagctctcacctgggaccagcagacagagggactgtcagagg

SEQ ID NO: 931366 - DNA, 120 bp, Artificial Sequence
  ENSG00000226239_31 (sequence is synthesized)
cagcaaagcagggatcagcatcccctgctccctgaggccccaccctcagtctcagcctgaagtctagtcctgcctctgacaccaacacacaacagaccctggggaactcccctcccctct

SEQ ID NO: 931367 - DNA, 120 bp, Artificial Sequence
  ENSG00000226239_32 (sequence is synthesized)
ataacagatgaagtgcttagtaaatgtcagcggaagtggttggagatggtggatataggctcaaatgtatatgaccttgaacacattacctcatctcttagcgcctcagagccctcacgt

SEQ ID NO: 931368 - DNA, 120 bp, Artificial Sequence
  ENSG00000226239_33 (sequence is synthesized)
gtcaaaagcaggataatggcagtacctgccttggaaggctgctgcagggattgaatgggaacagaagtgcacaatgataacatattattaaaattagcttgtgaatcaaagaagagatga

SEQ ID NO: 931369 - DNA, 120 bp, Artificial Sequence
  ENSG00000226239_34 (sequence is synthesized)
gcaaaacaaagtccctgctctcaaagacttaacaattgtggcagataggattcatctcttttgaaccacctccagttgattggcaggggctgcctggagggctgcgtagaggattataaa

SEQ ID NO: 931370 - DNA, 120 bp, Artificial Sequence
  ENSG00000226239_35 (sequence is synthesized)
aaccggatctactcccagcaggaagaagggattgattatcaatgcctgccatgggcaggagtggggatattagcagcaggtggtcagtgcacatgctgaccatgatctggttagagacaa

SEQ ID NO: 931371 - DNA, 120 bp, Artificial Sequence
  ENSG00000226239_36 (sequence is synthesized)
agacacacaagccaagaactctggtatcaggccagcgacttgtttgggaaaggcagaatcaggagccattccccaggccggtggcattcaagccaaaccttgaagggtgaatggaaggaa

SEQ ID NO: 931372 - DNA, 120 bp, Artificial Sequence
  ENSG00000226239_37 (sequence is synthesized)
agagttctgcctgcaaggaacagacaaccccgccaaaggtggcttagacaagaaggaacatttattctctcttaaaacaagtccaataatgagggttttcaggttatttgagcagctcaa

SEQ ID NO: 931373 - DNA, 120 bp, Artificial Sequence
  ENSG00000226239_38 (sequence is synthesized)
cactggcatcaaattcctttatattttttactttgctggtgttattgtgtcgctccaatttatttgttgaagccctaacccccagtacctcagaatgtaatagtatatgaagatagggtc

SEQ ID NO: 931374 - DNA, 120 bp, Artificial Sequence
  ENSG00000226239_39 (sequence is synthesized)
ggtctttaaagaggtgatgaagttaaaatgaggcagttagggtgggccttaatccaatctccctggtgtccttatatgaagaggaaatttgcacctgtaatctcagcactttgggagacc

SEQ ID NO: 931375 - DNA, 80 bp, Artificial Sequence
  ENSG00000226239_40 (sequence is synthesized)
actgagtgacagagtgagactccaactccaataaaaataaaaaaaggaaagaaaagaggaaatttggacacaccgagaca

SEQ ID NO: 931376 - DNA, 120 bp, Artificial Sequence
  ENSG00000226239_41 (sequence is synthesized)
aaaaaggaaagaaaagaggaaatttggacacaccgagacagcagggtcacttgtgtacagggaaaggccatgtgagaacacagtgggaagacggccatctgcaagccatggagagaggcc

SEQ ID NO: 931377 - DNA, 120 bp, Artificial Sequence
  ENSG00000226239_42 (sequence is synthesized)
tgaaccagagcaactccatcttgaatagaagctaggtagaatgaggctgagacctactgggctgcatttccagacagttaaggcattctaagtcgcaggatgagacagaggtcagcacaa

SEQ ID NO: 931378 - DNA, 77 bp, Artificial Sequence
  ENSG00000226239_43 (sequence is synthesized)
tcataaagaccttgctgataaaacagttgcagtaaagaagccggctaaatcccaccaaaaccaagatggccatgaga

SEQ ID NO: 931379 - DNA, 87 bp, Artificial Sequence
  ENSG00000226239_44 (sequence is synthesized)
caagaaataaccataaaaatgggcaactagcagcctttgggctgctctgcatatggagtagccgttcttcctgtactgtacggaccc

SEQ ID NO: 931380 - DNA, 120 bp, Artificial Sequence
  ENSG00000226239_45 (sequence is synthesized)
acggacccgccctgaattccttctcgcgtgagatacaagaaccgtctctcggggtctggatggggagccctttcctgtaacaaaaccaactctgccaatgccttgatcttggacttccag

SEQ ID NO: 931381 - DNA, 120 bp, Artificial Sequence
  ENSG00000226238_0 (sequence is synthesized)
tcatggaaccccagtggagagctcattctcatgttcaggaggaagatactgcttacagccaaagaacagatttgtaaaagaaggcagaggagtcctttttggaggtagcagagcctagtg

SEQ ID NO: 931382 - DNA, 120 bp, Artificial Sequence
  ENSG00000226238_1 (sequence is synthesized)
tcagacagctatgggtggtcatgggagcttcccatcccatgtggaagacaatgcctggagcagagaaggcatcttgctctttgctttctccttatctcttttcttcctgcttgatcatat

SEQ ID NO: 931383 - DNA, 120 bp, Artificial Sequence
  ENSG00000226238_2 (sequence is synthesized)
gtcatgcttggagatgcagcagtcatcttaccatcagtaagaagaaagctgcatgttaagaattgtggagctgtaagatggaagaagcttgaatcctagggccttccttgatttgctgca

SEQ ID NO: 931384 - DNA, 120 bp, Artificial Sequence
  ENSG00000266614_0 (sequence is synthesized)
tctgctgtcctctggggagaatgcatttgaactcatctcaaaaagctggttttctaccctggaggtctccgatggctactgcgagaagaaagccatgtcccgaaagcagtgatacagatt

SEQ ID NO: 931385 - DNA, 120 bp, Artificial Sequence
  ENSG00000266614_1 (sequence is synthesized)
tgggcaaggcaggcggaggtcatggaggggccggcgtgatggaatcctcggtgcagctgactgcgcagcccgacactggcgtggacactgggacgcgtcatgcaacatccaaccagagca

SEQ ID NO: 931386 - DNA, 120 bp, Artificial Sequence
  ENSG00000266614_2 (sequence is synthesized)
cactcacgaggacaaacatgggcccacctatttaccatcagaaaaacaaaatcatgctctttcactttgaaagaagggggaaactggaaagttattatttgaaataaaatggaattttag

SEQ ID NO: 931387 - DNA, 120 bp, Artificial Sequence
  ENSG00000260976_0 (sequence is synthesized)
gagttaatttaaatatttctgtaacctgttgatatgaatacaacactgcacaatttttctttctcattttccccttgctggttaatggcaagcccttagctctgtcttcccagtttctct

SEQ ID NO: 931388 - DNA, 120 bp, Artificial Sequence
  ENSG00000260976_1 (sequence is synthesized)
ttttttttaatttaacttttattttaagttcagggagacatgtgcaggtttgttaaataggctgctgaggcgctgatctgagatgtgcttccataaggaacaaggcagtagaggaggagc

SEQ ID NO: 931389 - DNA, 120 bp, Artificial Sequence
  ENSG00000260976_2 (sequence is synthesized)
atggccaaataggaacagctccggtctacggctcccagcgtgagagatgcaaaagacgggtgatttctgcatttccatcagagtttcaagtaaaaatgaaaatctcaaccgtgtcattat

SEQ ID NO: 931390 - DNA, 120 bp, Artificial Sequence
  ENSG00000260976_3 (sequence is synthesized)
ttattcatgccaagccttaaacctggatcaagcttttctatctaatgtcactcatcaaagacaattgtaaatccttcatctaccttatcttatctaatactcacaaaaacaaagggtgat

SEQ ID NO: 931391 - DNA, 120 bp, Artificial Sequence
  ENSG00000260976_4 (sequence is synthesized)
atggcagagacagttacagtgctcaccaatgactgcaaaatgtccgcatctcccagcctcacttgcagatagatggggaccatggaactagttcccaccaaagaactatgagtagaaata

SEQ ID NO: 931392 - DNA, 120 bp, Artificial Sequence
  ENSG00000260976_5 (sequence is synthesized)
ctgacagatccacactggaatctacaagagtgaaaaatataatttcattgtgttaaaccactaagatttcagaatttgtctgttataacagcatagcctatcctgtcctgacaaacatag

SEQ ID NO: 931393 - DNA, 120 bp, Artificial Sequence
  ENSG00000260976_6 (sequence is synthesized)
ataatatttggaatatgtaataactagtacagaacaggcactaacatattagaatgaatgcaatgaccaatgaatgaacgtcatcggctgtacatgactgacatggccatatgagtccat

SEQ ID NO: 931394 - DNA, 120 bp, Artificial Sequence
  ENSG00000260976_7 (sequence is synthesized)
accagttaaatagcgatgaaaacaactctacaaatttatcccagttttataattgatgaaacagaagcattgagagcttgcctaagacaatgacttgtaaatggcagagtaggaattcaa

SEQ ID NO: 931395 - DNA, 120 bp, Artificial Sequence
  ENSG00000260976_8 (sequence is synthesized)
atcagctgtttgatacatagaccattctctttctatctcaacattctgcttcctacttgttgaatgatgcctaaattacccgaacaattaattcatcatgactgcagtagaagtgtccga

SEQ ID NO: 931396 - DNA, 120 bp, Artificial Sequence
  ENSG00000260976_9 (sequence is synthesized)
atacttcattgtttatttaaaccatagggcatggtccaatcgtatatgtttattcttgttgaattttctgtaacttgaactcattcttgcctctgtataggatgtcagtattatattttg

SEQ ID NO: 931397 - DNA, 120 bp, Artificial Sequence
  ENSG00000260976_10 (sequence is synthesized)
cttttcctttcaaatttgccttttgtcattattaatcattaaccctgaaactgtattatttaaggggatacatccaactttatgacataacatatattaaaaatgcaagagaaaattaaa

SEQ ID NO: 931398 - DNA, 120 bp, Artificial Sequence
  ENSG00000227723_0 (sequence is synthesized)
aaagagccagggtagtcaaaggactgctcgttaattttaagatgtgcaggatgaagaggagaacaatgcaaggacatcagcagatcggcattggtgacatctgctaattatttggtttga

SEQ ID NO: 931399 - DNA, 120 bp, Artificial Sequence
  ENSG00000227723_1 (sequence is synthesized)
gcatgagacttccatctgcatcaatcaatggaggcaataagcacagacagatctggaacccttgcctactgtgacatacagccgcagtagcaggcaagcctgggtcagctccagagcggc

SEQ ID NO: 931400 - DNA, 120 bp, Artificial Sequence
  ENSG00000227723_2 (sequence is synthesized)
aatggagggaaattcccaggactctgggtgtcttggaagtttccaaggcctgcaactgatcacagatcctggttttcctcccattggctaaaaagataataaatacaagttacagcttga

SEQ ID NO: 931401 - DNA, 120 bp, Artificial Sequence
  ENSG00000227726_0 (sequence is synthesized)
gaaagtgatgccatattgatgtttcagctctgggcaggctgtggcaggccgaagggaccaccacggatgggctttcagccagggtctgccccactgccttcatttcatctgtcgaaaagc

SEQ ID NO: 931402 - DNA, 120 bp, Artificial Sequence
  ENSG00000231305_0 (sequence is synthesized)
accgcgcctggcctcttctccttctgaagaaaggaacaactgtatcttatatttgccacacagtatttgtttcttcagctccacaaaggtctgacaaatggtgggacctcacctgttctg

SEQ ID NO: 931403 - DNA, 120 bp, Artificial Sequence
  ENSG00000231305_1 (sequence is synthesized)
atgggggctcccatttctgccccttctggaggaccaggagcactgtattgcctgccagagcttggaagggaggactcttcttctgtctctacagttgtgccatcttcctccagcaccagg

SEQ ID NO: 931404 - DNA, 120 bp, Artificial Sequence
  ENSG00000231305_2 (sequence is synthesized)
aagaagggcttgtctgccagcatcagagtgccctggtcctggggaataagggtcttgactgttgcccaagctggaatgcagtggcacagtcactgctcactgtagccttgactctggagc

SEQ ID NO: 931405 - DNA, 120 bp, Artificial Sequence
  ENSG00000231305_3 (sequence is synthesized)
tccactgatgcccccacctctctgtgcagctgtgtgacctcagatcctgaagatcttcgtggacaatctctttgctatcgtcctgctgaagcaggccacagctgtgcgctgcttggacat

SEQ ID NO: 931406 - DNA, 120 bp, Artificial Sequence
  ENSG00000231305_4 (sequence is synthesized)
gagtgcctcccgtaagaagctggccgtggtagatgaaaatgacacttgcctggtgtatgacatcgacaccaaggagctgctttttcaggaaccaaacgccaacagtgtggcctggaacac

SEQ ID NO: 931407 - DNA, 120 bp, Artificial Sequence
  ENSG00000231305_5 (sequence is synthesized)
ccagtgtgaggacatgctctgcttctcgggaggaggcaacctcaacatcaaagccagcatcttccctgtgcactggcagaagctgcagggctttgtggtcggctacaatggctccaagat

SEQ ID NO: 931408 - DNA, 120 bp, Artificial Sequence
  ENSG00000231305_6 (sequence is synthesized)
cttctgcctccacgtcttcatttctgccgtggaggtgccacaggtaactgggagcacctgtccactctcagcactggcaaggccagtaagaccagggaagccgggcccctggctggtgct

SEQ ID NO: 931409 - DNA, 120 bp, Artificial Sequence
  ENSG00000231305_7 (sequence is synthesized)
tgcagccctatctccactccttgcaacctgtgtgactgggggcaaggagctcaacctccctgtgcctcaatttcttcctggtcccccttctggtaaggattcagaggggtatacagtgtt

SEQ ID NO: 931410 - DNA, 120 bp, Artificial Sequence
  ENSG00000231305_8 (sequence is synthesized)
gtcagcagagtgtattttacagagagcccagtgtgggccaagtggagagagcagcaaagccgggagtccagcagggtgtgtgtgtgtgagcacatgtgtgatggtggtgatgtgtgtgtg

SEQ ID NO: 931411 - DNA, 120 bp, Artificial Sequence
  ENSG00000231305_9 (sequence is synthesized)
agagagggggaagagagagagaatgagtgggtggggggggtgaggcctgaggtctgtgagccaataagggagcatgggactctgcacaagccccctgaactaggaggtggccacagcaga

SEQ ID NO: 931412 - DNA, 120 bp, Artificial Sequence
  ENSG00000231305_10 (sequence is synthesized)
aatggggcactgaagtgtggagccacagaatgcgggagggcagaaccacagacaggaggctgagattgacctcctgagtgcaagctggtctccccttcacctcctgcaccccacgcagat

SEQ ID NO: 931413 - DNA, 120 bp, Artificial Sequence
  ENSG00000231305_11 (sequence is synthesized)
ggtgcttaccataggattgccgtaaaacagagacacgcaccagcgagaaactttagcccttagtatcccatcctcaggacagaatcactcttaaacatgttgaaatacatctgcttagag

SEQ ID NO: 931414 - DNA, 120 bp, Artificial Sequence
  ENSG00000231305_12 (sequence is synthesized)
cttttctatgtgtctatataatgtatgcataatatacaattagaagcatgtgattttataacatttttaaacaaaagtggaatcacactgcaaatactgtttcatgacttttatgtgtgt

SEQ ID NO: 931415 - DNA, 120 bp, Artificial Sequence
  ENSG00000231305_13 (sequence is synthesized)
aagtattgctacctatagatggaacctcagatttactgtattccccaagcctggactgtaaacaagacttctcatcccttcctctatggccatcttctcatttcacctcacatttggtta

SEQ ID NO: 931416 - DNA, 120 bp, Artificial Sequence
  ENSG00000231305_14 (sequence is synthesized)
tgacagccccatcactgtctatgaagtgctggctgtaaactcgtcatctggccttttcactcagcaatctcctgaagcatggttctgtgtcagtaaatgttcttatccagcatggcaaaa

SEQ ID NO: 931417 - DNA, 120 bp, Artificial Sequence
  ENSG00000231305_15 (sequence is synthesized)
cccctctttcttttgatgagtccttttccctgcacggagcttctggtgaaggtggtgggagttgttcttgcagagcacatgggagtccaacggcctggcagtgggccaggatcttgttgc

SEQ ID NO: 931418 - DNA, 120 bp, Artificial Sequence
  ENSG00000234707_0 (sequence is synthesized)
tcccgggttaccccaccagcccgacctcaacccactcacgtccacagcacgagccccagcggccttgcgcggtgcttgctctctagtagcggctgactaggtcagtcaggatctttgatt

SEQ ID NO: 931419 - DNA, 120 bp, Artificial Sequence
  ENSG00000234707_1 (sequence is synthesized)
ttggagcacaagccttctgcgtgctactgactgggtcctggcctccctccttccatggcatcgtcgtgaatgggaatttccaccactgcctccattagtcagaagattgaacatgttgta

SEQ ID NO: 931420 - DNA, 120 bp, Artificial Sequence
  ENSG00000234707_2 (sequence is synthesized)
ctgtagaaagcccgtcatccttgtgtatgcacttgctgaaagatccactgaagagcaaccttcatgaacattaccaggggacttgtgctcctataaaacgcactgttttcctcactgcga

SEQ ID NO: 931421 - DNA, 120 bp, Artificial Sequence
  ENSG00000234707_3 (sequence is synthesized)
ggtgggtctctcaccgcgatggactatctgtgatcacagagcacttcttccctgggccttccctgtcacactgatggtgtgagtatgtagggcaggggtgggagtgaacatgttaatctc

SEQ ID NO: 931422 - DNA, 120 bp, Artificial Sequence
  ENSG00000234707_4 (sequence is synthesized)
gagacttgtgccacatctgcttccagtcagtccctctgctgagggccacagggccgctgctgctcgtgagaattccggctctcatggcctcccactgccaaagagaagaaagggccaaac

SEQ ID NO: 931423 - DNA, 120 bp, Artificial Sequence
  ENSG00000234707_5 (sequence is synthesized)
gagtatgtatgcattcctcagactggggttttaaaccttggctctcgctcaaatgtgaagtaatcagaagtgatatgttgataaattgtctacttgtttgatgtaagcagggaaaagcca

SEQ ID NO: 931424 - DNA, 120 bp, Artificial Sequence
  ENSG00000234707_6 (sequence is synthesized)
ttttccatgtagagtttgaaaatcatacttagtttacttacactaagtacaaagaaagttccaccctcctactgaataggagacttattgaacctgctgcttgacagttgcttaaaaata

SEQ ID NO: 931425 - DNA, 120 bp, Artificial Sequence
  ENSG00000234707_7 (sequence is synthesized)
ttattgaacctgctgcttgacagttgcttaaaaatattttaatattagctgtaggctcctagaaacaaaaagtgtatttataaaaaaattacattttaggccaggcacggtggctcacac

SEQ ID NO: 931426 - DNA, 120 bp, Artificial Sequence
  ENSG00000261889_0 (sequence is synthesized)
atagccgcccggctagctcagtcggtagagcatgagacccttaatctcagggtcgtgggttcgagccccacgttgggcgtgagattttgtcggatggattagacttgcaacttggaagaa

SEQ ID NO: 931427 - DNA, 120 bp, Artificial Sequence
  ENSG00000261889_1 (sequence is synthesized)
agtaaactaaataagaaaacgtggaagtgactccgtataccttgcaaatcgggaattgttggtcaggcaaacgcaaaacgctccaccaaccaactggcttcaggatcccctttgtcttgt

SEQ ID NO: 931428 - DNA, 120 bp, Artificial Sequence
  ENSG00000261889_2 (sequence is synthesized)
accaaccaactggcttcaggatcccctttgtcttgtttcataaaaaaaagaggccgagcgtcgtggttcatgcctataatcctctcactttgaccctaggagtttgagaccagcctaggc

SEQ ID NO: 931429 - DNA, 120 bp, Artificial Sequence
  ENSG00000261889_3 (sequence is synthesized)
aatcacttgaacccgggaggtagaggttacagtaagccgagactgtgccagtgcactccagcctggacaacacagtaagactccgtctcaaaataataataaaaagaaattggccgggcg

SEQ ID NO: 931430 - DNA, 61 bp, Artificial Sequence
  ENSG00000261889_4 (sequence is synthesized)
gtgccagtgcactccagcctggacaacacagtaagactccgtctcaaaataataataaaaa

SEQ ID NO: 931431 - DNA, 120 bp, Artificial Sequence
  ENSG00000261888_0 (sequence is synthesized)
cccagtccagcctccctactcagggccgagggcaccaggaggatggtcgttgcaaaagaatatgggaggccgggtgcggcggctcacgcctgtaatcccagtacttctgggaggccaagg

SEQ ID NO: 931432 - DNA, 120 bp, Artificial Sequence
  ENSG00000261888_1 (sequence is synthesized)
ggggcggatgacttgaggccgtgcaacacctgccagcaccagcatttgacacggaatcgaagaaaacaggcaggacataccctgactacactagtacaagtcatcggcgtctcggggtcc

SEQ ID NO: 931433 - DNA, 120 bp, Artificial Sequence
  ENSG00000261888_2 (sequence is synthesized)
tgggttttagaaatcacactgtcagggagggctgatggggtcctgggttggaggctggaagtggaggaatcgaggcataggcagaaacttgaaggaagggtcagccgagctggccagaag

SEQ ID NO: 931434 - DNA, 120 bp, Artificial Sequence
  ENSG00000261888_3 (sequence is synthesized)
ggggctcctcgccacggtccccagggaagcactttgctcatgggccccggccctgagagaggagctcctgcctcttcccactcggagagggctgacaggagaggcttggcctggtgtttc

SEQ ID NO: 931435 - DNA, 120 bp, Artificial Sequence
  ENSG00000261888_4 (sequence is synthesized)
ctgatgagatagcgggcacgttccgggaagcggtgagcaggcccagcagacatcagatgtggtgcttcctgtctcctgtgaatgcgcctggcccttgaggggggtctgggatggagagtc

SEQ ID NO: 931436 - DNA, 120 bp, Artificial Sequence
  ENSG00000261888_5 (sequence is synthesized)
gggggaggggaaccccactcgcccttctccttgttgttcttggcagctggacttgggcaattgtgcctccaccctctggaggggcctccccctgtgctggctgcagatcagaggggcgat

SEQ ID NO: 931437 - DNA, 120 bp, Artificial Sequence
  ENSG00000261888_6 (sequence is synthesized)
ggggagggatccaccggtccaggcgggggctcaccttccagacccgggcgtgggcgagaggggtgcatgggaggacgcccgatgcctcagggcccccggtcagcagcgaggcacagactc

SEQ ID NO: 931438 - DNA, 120 bp, Artificial Sequence
  ENSG00000261888_7 (sequence is synthesized)
tcctctgggcggtgatggccctgcacgaggtccgtgtgccgtctgcctgcacagggagaggaaaggatcacgcgaccatgggtacgttggccacctgaaggttgagtcccgcagcctaga

SEQ ID NO: 931439 - DNA, 120 bp, Artificial Sequence
  ENSG00000261888_8 (sequence is synthesized)
gactggagcgtggggaccaggaggagcttcttagcggaactgggctggggctcatgcagccctccaggagcccccgacgcgacgccctggctcatcccgggtgaagaggctgctgagtct

SEQ ID NO: 931440 - DNA, 120 bp, Artificial Sequence
  ENSG00000261888_9 (sequence is synthesized)
gaactgatgacagtggacgggtggccgccggttcccaacgcatggttgggcctggaacccaggtgactctgggagatgtggtcacagtcacagccgtctgtgggcctttgggttcaaaac

SEQ ID NO: 931441 - DNA, 120 bp, Artificial Sequence
  ENSG00000261888_10 (sequence is synthesized)
agcgcgagtcacaggagacagaagggaatctgagcttgcgattgctcattcttgtcaccctcctggctctgggacacctctgccatctcctaccaagggtaccccattcctggcgagttg

SEQ ID NO: 931442 - DNA, 120 bp, Artificial Sequence
  ENSG00000261888_11 (sequence is synthesized)
gcagaaaacgagggcaaagggagctgcgtgctgtgagagacgtccccgcacccaccctccccaccagctcccttgggcctttcctccctcccagccccacccacagccgggtggctccct

SEQ ID NO: 931443 - DNA, 120 bp, Artificial Sequence
  ENSG00000261888_12 (sequence is synthesized)
tcactgtctctcctgggtttaactcagaggctggcgagcaggggctgaccagtgtgtgtcggagactctccgagtggccagcacgggcagggagctcataggcttggccctgagaccagg

SEQ ID NO: 931444 - DNA, 120 bp, Artificial Sequence
  ENSG00000261888_13 (sequence is synthesized)
tcctgtctgagaaggaggcaggtcctgtctgagaagaaggacccccacccctcctgcctgggaccctgccttaggctcactctaatgacctaatttcaatttgattgaatgcaaatctga

SEQ ID NO: 931445 - DNA, 120 bp, Artificial Sequence
  ENSG00000261888_14 (sequence is synthesized)
atttgctagaagacctgatttcatctttccgggttcagtaaacatgacattctccgtgggggtttatttgtggaactcccagtcagagctgctgccccagcccagcagggctcagcgacg

SEQ ID NO: 931446 - DNA, 120 bp, Artificial Sequence
  ENSG00000261888_15 (sequence is synthesized)
tgcactggttttaggagtaaatccgaagcaacagaagcgttcgcactggctctgggtgcagcctgcatcttcagccctggggcactgatgctgggcagcttctcggcttcactcgggaag

SEQ ID NO: 931447 - DNA, 120 bp, Artificial Sequence
  ENSG00000261888_16 (sequence is synthesized)
ggactcaggagcgaggtggtggggaagccagcagcttggctgaggcggcagtggaggtggtccagctccgcgactgctcccacagagcagggctgccgctcgggcagtgtgcagagtgca

SEQ ID NO: 931448 - DNA, 120 bp, Artificial Sequence
  ENSG00000261888_17 (sequence is synthesized)
gccgcttggggccaacttgccatcatatgtataaccacttttaatgacatgctaattagggggcgggttattcagatatagctggaggatgggcagttgcttccaggtgttgccaaggca

SEQ ID NO: 931449 - DNA, 120 bp, Artificial Sequence
  ENSG00000261888_18 (sequence is synthesized)
gtgagagcaacgggaactgcccttggcgcctcttccagctttggcctgtctttggtcgggtccggggaccaggcttgcctaccacgttttctgtgtcaaaacagtcacgcagaaataaac

SEQ ID NO: 931450 - DNA, 120 bp, Artificial Sequence
  ENSG00000261888_19 (sequence is synthesized)
agtgacagcactgtgatgagaaaagcgaagaaacaacttatttcaactttctgacttttgttgtggcctcagcacttttgtttgtgcttaacattgaaaacagtgaggcagtgtaaactg

SEQ ID NO: 931451 - DNA, 120 bp, Artificial Sequence
  ENSG00000261888_20 (sequence is synthesized)
tgagatgtgatttttcatttggtaagtgcaaattttagttcattcatgaaaccagttttgaagatctttaaaatagaatttagtcgaccttaagaattgttaattgtttacaactaaaga

SEQ ID NO: 931452 - DNA, 120 bp, Artificial Sequence
  ENSG00000261888_21 (sequence is synthesized)
ccaaaaatccaagagaataaagcgttgcaccagtggtaggggtttgtagttgcctaaattgtaccttttacagatgtttcattttattaaaactcactagtcactggatcttctattcaa

SEQ ID NO: 931453 - DNA, 120 bp, Artificial Sequence
  ENSG00000250791_0 (sequence is synthesized)
tccccagaattggtgaaatcagcaacagaactattcatttcattgagcctggaaaatccagtttgtatgaccagggagaagaatggattagagcagccactagtcagtctcttccaagca

SEQ ID NO: 931454 - DNA, 120 bp, Artificial Sequence
  ENSG00000250791_1 (sequence is synthesized)
gaggggggataacttctacagtgtacagataacctccttatctgctcctcattcacaggactcacatggcaacaaaccctaactttctaacagaaggaaaatgacgtatttaatcaaaag

SEQ ID NO: 931455 - DNA, 120 bp, Artificial Sequence
  ENSG00000250791_2 (sequence is synthesized)
catagatgcttgttgtcctgttttgatcctcttcaaaaggtggtttataatcaactgtaagactttgacagttgctctcaacattcttctaaataaggaaggaaggaaaagaaagaaagg

SEQ ID NO: 931456 - DNA, 120 bp, Artificial Sequence
  ENSG00000250791_3 (sequence is synthesized)
aaaggaaggaagaaagaaagaaagaaagaggagcctggaaaatccagtttgtatgaccagggagaagaatggattagagcagccactagtcagtctcttccaagcaagaaggaccacccc

SEQ ID NO: 931457 - DNA, 120 bp, Artificial Sequence
  ENSG00000250791_4 (sequence is synthesized)
cttccaagcaagaaggaccacccctgagctgttttccagctggacatgcctggacctgtattccactcctctctaaaatgcaccttatttttcttcattaaattctgttacttaaccctt

SEQ ID NO: 931458 - DNA, 120 bp, Artificial Sequence
  ENSG00000250791_5 (sequence is synthesized)
ttctgtctagtgtcctaggcttcacacctagcctatgcttgttgtcctgttttgatcctcttcaaaaggtggtttataatcaactgtaagactttgacagttgctctcaacattcttcta

SEQ ID NO: 931459 - DNA, 120 bp, Artificial Sequence
  ENSG00000250790_0 (sequence is synthesized)
tttccagtaagtgccactttagattatatcccattttgtgtggtgtcctatatcagttaaacccaccgtattcattgtataaatcaaatttttcatatacttactgtattagtccatttt

SEQ ID NO: 931460 - DNA, 62 bp, Artificial Sequence
  ENSG00000250790_1 (sequence is synthesized)
taaagtgggtgaaaggcacttctgacatgctggtggcaagagagaatcagagcaccaagcaa

SEQ ID NO: 931461 - DNA, 120 bp, Artificial Sequence
  ENSG00000250790_2 (sequence is synthesized)
cataatcatggtgggtgaaaggcacttctgacatgctggtggcaagagagaatcagagcaccaagcaaaaaggaaaccccttgtcaaatcaccagatctcatgagacttattcactacca

SEQ ID NO: 931462 - DNA, 81 bp, Artificial Sequence
  ENSG00000250790_3 (sequence is synthesized)
tgggaattgtgggagcacaagttatctcccaccaggtccctcccacatgtgggaattaagggagctgcaattcaagaagag

SEQ ID NO: 931463 - DNA, 120 bp, Artificial Sequence
  ENSG00000250790_4 (sequence is synthesized)
atttgggtggggacacagccaaaccagatcacttaccaattatgtgctgtcctgctctatcaattcctaagaaaagtgtgcaaaaatttccaaatggtaatgtggatttgtagtttattc

SEQ ID NO: 931464 - DNA, 120 bp, Artificial Sequence
  ENSG00000250790_5 (sequence is synthesized)
caaaaatttccaaatggtaatgtggatttgtagtttattcctctaattgtcctattttgtataatacattctttggtctatgttaatttgaaattttgaacatagaatcattatatcttc

SEQ ID NO: 931465 - DNA, 120 bp, Artificial Sequence
  ENSG00000250790_6 (sequence is synthesized)
atagaaaattgtacttttatccttatataatgaccctttttattcctaacgatggtttccctaaagcttatgttacccaattaatgtttgccaggtatatatttttccactcatactcac

SEQ ID NO: 931466 - DNA, 120 bp, Artificial Sequence
  ENSG00000250790_7 (sequence is synthesized)
tttttataacatttttatgcatttattttataaacatatacatggaatattttaaagcataatgcgacattctgcttttaaaccgatgagtttatatgatttgtgattattgatacagtt

SEQ ID NO: 931467 - DNA, 60 bp, Artificial Sequence
  ENSG00000250790_8 (sequence is synthesized)
aaccgatgagtttatatgatttgtgattattgataccagattactaggtcaggagatcga

SEQ ID NO: 931468 - DNA, 88 bp, Artificial Sequence
  ENSG00000250790_9 (sequence is synthesized)
gatacagttatgtttatttctatcattttactttttgctttccattggccttgtgttttttgtcccttattattttctatcttctttt

SEQ ID NO: 931469 - DNA, 120 bp, Artificial Sequence
  ENSG00000250790_10 (sequence is synthesized)
ccttgtgttttttgtcccttattattttctatcttcttttggatttaatcaagctttctcacttccattttcaatatctattctttaagtgttaatgttaaggtgtttgctatgtataca

SEQ ID NO: 931470 - DNA, 120 bp, Artificial Sequence
  ENSG00000250790_11 (sequence is synthesized)
gttaaggtgtttgctatgtatacaagacttaacaaagtctaaaggtaatcacttaatctgctctctccataaccaacagagaggcatcccaattttttttttttttttgaggcagagttt

SEQ ID NO: 931471 - DNA, 90 bp, Artificial Sequence
  ENSG00000250790_12 (sequence is synthesized)
cagcctcccaagtagctggaattacacacacccaccaccacagctggctaattttttgtatctggctggtctggaattcctgacctcagg

SEQ ID NO: 931472 - DNA, 120 bp, Artificial Sequence
  ENSG00000250790_13 (sequence is synthesized)
tacaggcgtgagccactgcacccagcgtcccaacatttttatctctgatcatcctgaacacataccatgttactcactgttttagttctgcgttatttttgttgcataaccagtaacata

SEQ ID NO: 931473 - DNA, 120 bp, Artificial Sequence
  ENSG00000250790_14 (sequence is synthesized)
ttttgttgcataaccagtaacataacattattattgttagtttacatagccaatactagtttaggttcacatgtattacctcttggcttcacccactacttttctctgatggcaatcttt

SEQ ID NO: 931474 - DNA, 120 bp, Artificial Sequence
  ENSG00000250790_15 (sequence is synthesized)
ggaagttccttcattgagggtttattagtggtaaactctttatctttgctgtggtgcagtgtctagaatttttgttaagtgaaggttttacatttaaatcttcatctattaagtttgaat

SEQ ID NO: 931475 - DNA, 120 bp, Artificial Sequence
  ENSG00000250790_16 (sequence is synthesized)
atgggatgagttatggattgaggttcatttgttttgtatattgactttcaattgttgcagcaccatttttttaaaccactattttcattgatttgcccttgcaactttgtcaaaaatcaa

SEQ ID NO: 931476 - DNA, 120 bp, Artificial Sequence
  ENSG00000250790_17 (sequence is synthesized)
ttgaccatatacacgaaggtctatttatgtattctcaattatggtccatgatctatgtgtttatcctttctctgacacaatgtttagattgctgtatctttacagtaagtttcgaagtca

SEQ ID NO: 931477 - DNA, 120 bp, Artificial Sequence
  ENSG00000250790_18 (sequence is synthesized)
gggagtgcgagtcttccagctctgttcctctttgacaaaagatgttttggctattctagtttcttctgcttttccaaataaatttgattaacttgttaatgtctacaaaaactcctgctg

SEQ ID NO: 931478 - DNA, 120 bp, Artificial Sequence
  ENSG00000250790_19 (sequence is synthesized)
gaatttccattgggatcgcaataaatttataggtaaatctagagagaactgacattctactatttattgttccaaaccacaaatatgatacatatttccatttatttaggatttggattt

SEQ ID NO: 931479 - DNA, 120 bp, Artificial Sequence
  ENSG00000250790_20 (sequence is synthesized)
cccttatttctctcataagcgttttgacgttttcaacatacagatcttttataacaacacttacccacttcccaccattctacccccattcctaaaccttggcaacacaagaatctgtcc

SEQ ID NO: 931480 - DNA, 120 bp, Artificial Sequence
  ENSG00000250790_21 (sequence is synthesized)
tccattaaaaatgttatgatttcagaaatgttatataaatggaataatacaatatgcaaccttatgggactgatttcttgcatttggtgtacttctctagagattaatccaagtttttgt

SEQ ID NO: 931481 - DNA, 120 bp, Artificial Sequence
  ENSG00000250790_22 (sequence is synthesized)
gtgtatcagtagtccatttattttcctgaatagcattccatatgtgtgtgccacaatttgtttaaccatttaccttattctcagtttttggctgttcaaataaactgatattaatctgtg

SEQ ID NO: 931482 - DNA, 120 bp, Artificial Sequence
  ENSG00000261886_0 (sequence is synthesized)
gagaaggggaaggagaaatgaggccggcgacggaaggataagtgtagtcacaggctcggcttcacgtgaagggcaaggcggtgtacatgttcgctgaaggctagcctcaggattcagtca

SEQ ID NO: 931483 - DNA, 120 bp, Artificial Sequence
  ENSG00000261886_1 (sequence is synthesized)
aggtcctcagagcaaagttgaaggcgagccgctatcatctgctgttctctgccgcagagaggactggaggctcacagctggaggaatttgccttgggatgaatcatgccttgagtctcac

SEQ ID NO: 931484 - DNA, 120 bp, Artificial Sequence
  ENSG00000261886_2 (sequence is synthesized)
ctatatctgatttagatgagactttggacttcaggcttttgagttgatgctggattgaatgacggtgccatgctcttggacttaccaacctccagaactgtgagctgaataaacgtcttt

SEQ ID NO: 931485 - DNA, 120 bp, Artificial Sequence
  ENSG00000231428_0 (sequence is synthesized)
ccaaatagtcactctctgaagtcccagtctctgaaatatcagctgctttaagtcctcgtctgctcattcccacattcccactacatccaggatgccatcctgctgaaatgctgcactctg

SEQ ID NO: 931486 - DNA, 120 bp, Artificial Sequence
  ENSG00000231428_1 (sequence is synthesized)
gttttgcttggtcagcagtgaatttatcggtgggactggctgactttcgcaggcttccctgctttcaggaagctcctcagaggtgaatcagataatgaagcagaacaagatctgcccttg

SEQ ID NO: 931487 - DNA, 120 bp, Artificial Sequence
  ENSG00000231428_2 (sequence is synthesized)
tgaattgcttatttgattgccatcatcttaattttaattttattataaagtgtgtaggcaacacagttgaagaaaactgtgaagccacaggagcctaagcaatagattcgattccttcca

SEQ ID NO: 931488 - DNA, 120 bp, Artificial Sequence
  ENSG00000283010_0 (sequence is synthesized)
gggcagaaccgccttctcccggcttcggccctgcgtcccctgtgctaggcgcgtgactttccctgggccttggggagcgcacagacagcccgccagccgcatcttctcctgacatgtcgt

SEQ ID NO: 931489 - DNA, 120 bp, Artificial Sequence
  ENSG00000283010_1 (sequence is synthesized)
gcctttcttttcgcggacctggagctcagagctcccacggacagaagaatccagccctggggaagggccgcgtccaagtgctaagcagctcatacttctcccccacctttctggggcagc

SEQ ID NO: 931490 - DNA, 120 bp, Artificial Sequence
  ENSG00000283010_2 (sequence is synthesized)
tgttcaaatacacaggctgcttacgttgacgtggagaggatttcaaacaacgctaaaatgctttgaactgacaaggtgtcttgatatctccctcactccatccagcacagctcctcgaga

SEQ ID NO: 931491 - DNA, 120 bp, Artificial Sequence
  ENSG00000283010_3 (sequence is synthesized)
tcactcgctaggacaatggctgagcaggcgattcgtgcgggcctcgccacctcggggcgcggactgcggggtgtcctaagccccttccgcaaggacaggatggaggcacctgtaaggaga

SEQ ID NO: 931492 - DNA, 120 bp, Artificial Sequence
  ENSG00000283010_4 (sequence is synthesized)
aggaacctctactcagtcaataccctgagctggacttaccccagcagctgtttgatttggtgaggcccccctccaacctctgagtggaacttcttttctaagggcctgcagaatgtcaaa

SEQ ID NO: 931493 - DNA, 120 bp, Artificial Sequence
  ENSG00000283010_5 (sequence is synthesized)
actgaggctctggcttcggagctagagctttgaacagccaatccacacaaaaaggcagctggctgctttaatgaaaactgctataaagcttcaagaactttagccttgggggatgcattt

SEQ ID NO: 931494 - DNA, 120 bp, Artificial Sequence
  ENSG00000283010_6 (sequence is synthesized)
aagaactttagccttgggggatgcatttataaggaacatggaaaatgcatttccaagttgctggttcttgggagagacataataaacatttaccaaaaaaaaaaaaaaaaaaaaaaggat

SEQ ID NO: 931495 - DNA, 120 bp, Artificial Sequence
  ENSG00000283010_7 (sequence is synthesized)
gcatattttttcctgaagaaataaagcttccaataaatttgtatgttactgtctatacctatattttgcaaattcctaaatgtgcatctgtccttgtgtaataaaaggtcttgaagaatg

SEQ ID NO: 931496 - DNA, 120 bp, Artificial Sequence
  ENSG00000183535_0 (sequence is synthesized)
actgactggcccccgagcccggggcatctgagaaacctcctgcgaatggctacagaggaaattttcaggtgcgagagatctgaagaaagttctggaacccgcgcctggaccggtttggac

SEQ ID NO: 931497 - DNA, 120 bp, Artificial Sequence
  ENSG00000183535_1 (sequence is synthesized)
cctcagtggaaacacatcaaagagaaggaaaaccagctggggaaggatcctggcagcggtggctcagggtgctgggcggaggccccgtttttcaccaaccgacggctgggagagcccgtg

SEQ ID NO: 931498 - DNA, 120 bp, Artificial Sequence
  ENSG00000183535_2 (sequence is synthesized)
ccacccactgtgccctgagacccgcacaggacggcgactcacagatgccttttgctgccctgcccgggtcctggcacggcgcgaggtgcgtcaggccaggcagccacgcaaaggccccgg

SEQ ID NO: 931499 - DNA, 120 bp, Artificial Sequence
  ENSG00000183535_3 (sequence is synthesized)
ctcctggcttctgccatctattctgtcctgcaactctatcctggagcctcccatcccttcaaaagctgcaggaagaggcctgcaggcaagagaagaggactgcaggagtgagcaatttaa

SEQ ID NO: 931500 - DNA, 120 bp, Artificial Sequence
  ENSG00000183535_4 (sequence is synthesized)
gaaatggaaggccgaggttttccaatctaattaacagcatgacaagccaggatgggctgctgacccgcgtggagccttgcacagccagaaacgcggtgtcctgctccgctcctgagacgc

SEQ ID NO: 931501 - DNA, 120 bp, Artificial Sequence
  ENSG00000183535_5 (sequence is synthesized)
cagggctgtcactgcaacacagcccccaacacttccacacgggcggactctggctctccaggcaccgcagtgccctctccttcccttcccagctctcctgaggcctgtggttctgggagt

SEQ ID NO: 931502 - DNA, 120 bp, Artificial Sequence
  ENSG00000183535_6 (sequence is synthesized)
ctctgccccgtgcaagcgtgaccgtggccctcctcccatgtccagccgcaccaggccctgggatcccagatctggcttcacctttgcaaggggctcaaagcaagcacctatgggggtggg

SEQ ID NO: 931503 - DNA, 120 bp, Artificial Sequence
  ENSG00000183535_7 (sequence is synthesized)
ggcggcaaagccgtctggccaaggtcccttctctagagtgcctgtctgtccgtctgtccttgaggagcctgaggagtgcagggcaggacaggcaggcaccagctgacccggtaccgggca

SEQ ID NO: 931504 - DNA, 120 bp, Artificial Sequence
  ENSG00000183535_8 (sequence is synthesized)
gggaccagtgcaggacctcgaggcagggctgggtggggtgggggtggccagagtctcctggctcggagcagacacgggtgagtggcacagactgtcctcacaccctcctgggacagaggt

SEQ ID NO: 931505 - DNA, 120 bp, Artificial Sequence
  ENSG00000183535_9 (sequence is synthesized)
ttggccacgcacagcttccaatgaggttgggccatccacagctccccaaggttccccgccactgttcaccccaccccagcacagccgagagctgtggtttctcctcccatggagtcctgc

SEQ ID NO: 931506 - DNA, 120 bp, Artificial Sequence
  ENSG00000183535_10 (sequence is synthesized)
atggctgcccactgcaggcccagcccaagggcaccgccttctccaggctgccttccctgcacatgccacacctccagccccagaaggttctgaggaggggaggagctggggcccccactc

SEQ ID NO: 931507 - DNA, 120 bp, Artificial Sequence
  ENSG00000183535_11 (sequence is synthesized)
gccctcctgttgccaggatacaggcccaggaaaaaatgccacagtgctggattaatgtctagacaacgtgacctttcccctggttctctagatataattgggacccaaattgtccggtgt

SEQ ID NO: 931508 - DNA, 120 bp, Artificial Sequence
  ENSG00000183535_12 (sequence is synthesized)
catgagctgacagcagggatgaaggaggggtctgttctcggtgccccgaggggactccgggagagggagagggcagcccactacctgcgtgggggctgcagggggacgagccagggtcgc

SEQ ID NO: 931509 - DNA, 120 bp, Artificial Sequence
  ENSG00000183535_13 (sequence is synthesized)
ccacaaaggcgctttctgtggaggggacgtcacctcttccatcagcgatgacgcagctctgagatcacagtgtcctcgcagtggctcccgttaactccctgctgcccgtcctgccaggct

SEQ ID NO: 931510 - DNA, 120 bp, Artificial Sequence
  ENSG00000183535_14 (sequence is synthesized)
ggtgccacgagaccctcggggctgggccgtgggacaggtgcctgcccagccctgcaaacacatccagcaggtgtcgagggctgccaagcacagacttctgctgccagccatgcacagtgc

SEQ ID NO: 931511 - DNA, 120 bp, Artificial Sequence
  ENSG00000183535_15 (sequence is synthesized)
cagctgcgacagcaacgcctctgccaggagactcggaggagaccggccctgacgctcctgtcggggggagctgctgcacactcaggcaggatgcaggggtcctgagggggaccctcggct

SEQ ID NO: 931512 - DNA, 120 bp, Artificial Sequence
  ENSG00000183535_16 (sequence is synthesized)
cacccacggctcccgtggccggtctggtcctggtatttatctcaacttcattgttgtccagaagctgctttttattatttgtgaccatgaaaggatggaaacaaattcctgttttgagtc

SEQ ID NO: 931513 - DNA, 120 bp, Artificial Sequence
  ENSG00000183535_17 (sequence is synthesized)
aaagctacctgcgtccaccgggccacagagcggggacacggccgtaatgtggagtcagtaagccaaggttgtgagaagattctcaggaggggggtccagggagggagaactgagggctgg

SEQ ID NO: 931514 - DNA, 120 bp, Artificial Sequence
  ENSG00000183535_18 (sequence is synthesized)
ggttccgggggacattttactttttattccaggcagcgctgtactggctggggcctcaaatgctgaataatgctcctgttggacttcagtaattttaaaaaataaaactgtttaaaaatc

SEQ ID NO: 931515 - DNA, 120 bp, Artificial Sequence
  ENSG00000183535_19 (sequence is synthesized)
aaccagctggggaaggatcctggcagcggtggctcaggtctgggagaaagaggcgcgggcgaggcagtgcctgagcaatggaaaccgacgggcaggaggcgggaaggggctgcgccacgg

SEQ ID NO: 931516 - DNA, 120 bp, Artificial Sequence
  ENSG00000183535_20 (sequence is synthesized)
gcctcccagggtccccacgccactgcacacctaggactgagggagggtcagtgggggccaagggctgccccggaagggagccggttttcaggagcttccaagctgaagggcagaagccac

SEQ ID NO: 931517 - DNA, 120 bp, Artificial Sequence
  ENSG00000183535_21 (sequence is synthesized)
caggacctggcccagcgctctggtccagggtcaggtcacacctctgaccagggattggaggctgcaaattggaggcaccactggccgagtgctcgcgagttctccactggtcaggtgggc

SEQ ID NO: 931518 - DNA, 120 bp, Artificial Sequence
  ENSG00000183535_22 (sequence is synthesized)
cgcaggggccttgggggagcgccttggcactgtgggaggtgaccacgcaggctcaggcacggctgccctgggggtcatcctctgtggggcaccttggggcaggtgtctgtatcccgggaa

SEQ ID NO: 931519 - DNA, 120 bp, Artificial Sequence
  ENSG00000183535_23 (sequence is synthesized)
ccctcgcccagagacccacggctaacccacagcagagctgcgctccaggcgtgtttacctgcgccacacacctcctcacctggctctccgccctgcagagagggcctcccactgctcccc

SEQ ID NO: 931520 - DNA, 120 bp, Artificial Sequence
  ENSG00000183535_24 (sequence is synthesized)
agcagagccctgagcctgcctgtgccctgggcctgccaacaccaccagggcccaccacagaggcacaggaagcctgggtttgctcctgaattgccgtgactgccacctcctccacctgag

SEQ ID NO: 931521 - DNA, 120 bp, Artificial Sequence
  ENSG00000183535_25 (sequence is synthesized)
aaggtgtccctgtgtcactgtggatggcggaccgggcactgcgggaggtggggtggcctgccagggtcccgacatgaggcctccttaagccctaccctccccccagcaccagtgcccggg

SEQ ID NO: 931522 - DNA, 120 bp, Artificial Sequence
  ENSG00000183535_26 (sequence is synthesized)
accctctgcagggactgtttccaccagggccccgcagcactgcccagcaccctggcccggctccgtctgcaggacctgctggcaggacaggcccctgtctgtgcatcagaattcactggg

SEQ ID NO: 931523 - DNA, 120 bp, Artificial Sequence
  ENSG00000183535_27 (sequence is synthesized)
aggcagctgctcctacagcctcagattccaaatccaaatgcccaacaggagggccctgggcgagcagctgagtgcgtcaggcctctgcccccaggacactgcagaaccctgctccaagag

SEQ ID NO: 931524 - DNA, 120 bp, Artificial Sequence
  ENSG00000183535_28 (sequence is synthesized)
ggtcttaaactggccagtaagggctccaactcagaaccacggagtctgcaggacggaactgcctccacccgggtgctgggcggaggccccgtttttcaccaaccgacggctgggagagcc

SEQ ID NO: 931525 - DNA, 71 bp, Artificial Sequence
  ENSG00000227186_0 (sequence is synthesized)
gccatgttgcctaggctggtctcgaacccctgagctcaagtggtccatccggcctccaagaattcttgtgt

SEQ ID NO: 931526 - DNA, 120 bp, Artificial Sequence
  ENSG00000227186_1 (sequence is synthesized)
tcttgtgtcttacttttgttaacgctctgaatgctcactgaagcacacacgtagccagttaatcatattctgtaattaaacatttacggttattattccccccagtctgcctgccctctt

SEQ ID NO: 931527 - DNA, 120 bp, Artificial Sequence
  ENSG00000227186_2 (sequence is synthesized)
taatccatgagaattttccctaatatgagggaagccaaggtagagaactggttttcttcaggttgagtccagttcagatcatgccttggatgattctggtttttgatagttttagaacaa

SEQ ID NO: 931528 - DNA, 120 bp, Artificial Sequence
  ENSG00000227181_0 (sequence is synthesized)
cctcaaaggactcatggtgacgaccaggctgtaagatccacaagagtagagacaattgctggccgtgcttatcactgtggacccaaagcctgaagtagcatctggttcattaaacacatg

SEQ ID NO: 931529 - DNA, 120 bp, Artificial Sequence
  ENSG00000227181_1 (sequence is synthesized)
ctaaatgaatgaaaacaccgttcttcaagctcccactaacaccttaccactctctaccatgtcaacttattttattataacaattgctcatcattaaaccgtatggtcctggaagaaaaa

SEQ ID NO: 931530 - DNA, 120 bp, Artificial Sequence
  ENSG00000227188_0 (sequence is synthesized)
gctactggtggtcatcggggacgcagatatgtgtgtctccattttgcagatgaggacatggaggcctcaagaggttaagtgacttgctcagccacacacagctgatgggaatgaaacaga

SEQ ID NO: 931531 - DNA, 120 bp, Artificial Sequence
  ENSG00000227188_1 (sequence is synthesized)
cggaaacggagactccccaagctgacaggcggactacagatctgggggttctgctccaggctcaacacaagtggcctgggcgagggagggcctggtagaccatgacacccagcatcgagg

SEQ ID NO: 931532 - DNA, 120 bp, Artificial Sequence
  ENSG00000227188_2 (sequence is synthesized)
ggctcagaaggaagaagtctgcttcaggggccaggcctggtcaaagactccatcttccctggatggccagagtcaaatccttgcaaatcccgttcaccatggagcagagacgagacctat

SEQ ID NO: 931533 - DNA, 120 bp, Artificial Sequence
  ENSG00000227188_3 (sequence is synthesized)
gttacccaggctgtatgtgaattcctggactcaagcaatcctcccatctcagcctcgtgagtagttgggacaagtctcacaccaccatacccagcttaatttaatttgaattttaatagc

SEQ ID NO: 931534 - DNA, 120 bp, Artificial Sequence
  ENSG00000211978_0 (sequence is synthesized)
gtgtctttgccgaggtgcagctgttgcagtctgcagcagaggtgaaaagacccggggagtctctgaggatctcctgtaagacttctggatacagctttaccagctactggatccactggg

SEQ ID NO: 931535 - DNA, 120 bp, Artificial Sequence
  ENSG00000211978_1 (sequence is synthesized)
ctctgataccagatacagcccatccttccaaggccacgtcaccatctcagccgacagctccagcagcaccgcctacctgcagtggagcagcctgaaggcctcggacgccgccatgtatta

SEQ ID NO: 931536 - DNA, 120 bp, Artificial Sequence
  ENSG00000231427_0 (sequence is synthesized)
aactctatctcaggataaagacctgagggtcacaagatgtacattgctggcctcagctggattttcccagggtcaggtgcccattcctacctaatcaaaggacacttctgctgacctgca

SEQ ID NO: 931537 - DNA, 120 bp, Artificial Sequence
  ENSG00000231427_1 (sequence is synthesized)
cctagaataccctgttctgtgctgatgactcagatgtaagaatgatgaagtgcatcggctggcatgcagagaacaataagaaaaagaactgagttgtgggaagacatgaggaaaggacat

SEQ ID NO: 931538 - DNA, 120 bp, Artificial Sequence
  ENSG00000231427_2 (sequence is synthesized)
gaggctcttaataacagctgccaagtactgcagtcgggaatctggagcaaagtgattcaattctgaccactgcctcgctgctgggttagggtctccccagttgagctggtctcggcaagt

SEQ ID NO: 931539 - DNA, 120 bp, Artificial Sequence
  ENSG00000231427_3 (sequence is synthesized)
aagtggcgtccatttcattcgtgggggctgaaatccaggtcaaagtgtcaccagagtgatggttggaatggaaaactagctggaggacacccaagtactcttaaagcaatccccatggtg

SEQ ID NO: 931540 - DNA, 120 bp, Artificial Sequence
  ENSG00000231427_4 (sequence is synthesized)
tcagggtaacaatgggacaagtgtgggatctggttcattctgccttggaactttttcacactgatgacaaggaagaacaagagtatagcaaagtaatagaagaggttacatagcatgttt

SEQ ID NO: 931541 - DNA, 120 bp, Artificial Sequence
  ENSG00000231427_5 (sequence is synthesized)
aagaacaagagtatagcaaagtaatagaagaggttacatagcatgtttctttgccagctcaagctaaagcagcaaaggaaggagaggttcattcctacccttctgcaccccctccttatt

SEQ ID NO: 931542 - DNA, 120 bp, Artificial Sequence
  ENSG00000231427_6 (sequence is synthesized)
ttcttttccagaggacactgggcgaaaagtaattgccccagtgactgtttgagcagcacctcgagcaatggttcttagttctattcaggcaggaattcagcaagctagatgagatggtga

SEQ ID NO: 931543 - DNA, 84 bp, Artificial Sequence
  ENSG00000231427_7 (sequence is synthesized)
ttactcaaatcaaaaaatcagtgagtcaggctgccagatagaggaaaaaagaaaattgctgagcctgaaatatgtccaaaatgt

SEQ ID NO: 931544 - DNA, 77 bp, Artificial Sequence
  ENSG00000231427_8 (sequence is synthesized)
aaaaaaggaaaatattgattttggaaaatgccatgaggggcccgtcctgggccccattctaaactggggcatttcca

SEQ ID NO: 931545 - DNA, 120 bp, Artificial Sequence
  ENSG00000231427_9 (sequence is synthesized)
ctgtcccctgccacaactggtagtgccacagtagatttatgctacacaaaagctgtgagccttctgcctggggaaccctcacaaaaggtcccagaaggagtctgtggacccttgccagca

SEQ ID NO: 931546 - DNA, 90 bp, Artificial Sequence
  ENSG00000231427_10 (sequence is synthesized)
acaaaaggtcccagaaggagtctgtggacccttgccagcagggactataggattacttttaggaaggtctagtttaagtctaaaaggggt

SEQ ID NO: 931547 - DNA, 89 bp, Artificial Sequence
  ENSG00000231427_11 (sequence is synthesized)
tgaaattaaacaaacaggaggatttggaagcataaataaataaggcaaagcagattactgggtaaatcaaattactgataaacatccta

SEQ ID NO: 931548 - DNA, 120 bp, Artificial Sequence
  ENSG00000231427_12 (sequence is synthesized)
aaggcaaagcagattactgggtaaatcaaattactgataaacatcctacctatgaaataactattcaaggaaagaaatttaaaggattggtggatacaggagtggacatttcaatcattt

SEQ ID NO: 931549 - DNA, 89 bp, Artificial Sequence
  ENSG00000231427_13 (sequence is synthesized)
acatagttggagttggtaaagttgttatgaaaggcctgatggacaacctgggactattcaaccgattataacttctgtaactatacatt

SEQ ID NO: 931550 - DNA, 120 bp, Artificial Sequence
  ENSG00000231427_14 (sequence is synthesized)
tatgaaaggcctgatggacaacctgggactattcaaccgattataacttctgtaactatacatttatggggaagagatttattataacaatggagagcacaagttctaattccagaacaa

SEQ ID NO: 931551 - DNA, 80 bp, Artificial Sequence
  ENSG00000231427_15 (sequence is synthesized)
aaaaaaatttgcaaggtttgaaagaaccacttcaagtggaaaaacaaagttcccaccaaagattaggaaataatttttga

SEQ ID NO: 931552 - DNA, 120 bp, Artificial Sequence
  ENSG00000231427_16 (sequence is synthesized)
atggttaacagataagccaatttggataaaacaaaggccactaagtaaagaaaaactggaagctttagagaaattagttgcagaacaattagaaaatgggcacatagctccaacattttc

SEQ ID NO: 931553 - DNA, 86 bp, Artificial Sequence
  ENSG00000231427_17 (sequence is synthesized)
ctaagtaaagaaaaactggaagctttagagaaattagttgcagaacaattagaaaatgggcacatagctccaacattttctccttg

SEQ ID NO: 931554 - DNA, 120 bp, Artificial Sequence
  ENSG00000231427_18 (sequence is synthesized)
tacagccaggattgccttctcctgctatgattccaaaaagttggcctttaatagccatggatttgaaggactgtttccttactatccccttggctgagcaagactgtgaatggtttgcat

SEQ ID NO: 931555 - DNA, 120 bp, Artificial Sequence
  ENSG00000231427_19 (sequence is synthesized)
aaacaacctgcagcctgctaagcgttatcattggaaagtgttgccacagggcatgtcaaacagcccaacaatttgccagacgtatgtggggcaagcaattgaacgtactcataaaaaaat

SEQ ID NO: 931556 - DNA, 120 bp, Artificial Sequence
  ENSG00000231427_20 (sequence is synthesized)
cgtatgtggggcaagcaattgaacgtactcataaaaaaatttcacagtgttacattattcaccatatggatgatatactttgtgctgcccccacttgagaaatattactccaatgttatg

SEQ ID NO: 931557 - DNA, 81 bp, Artificial Sequence
  ENSG00000231427_21 (sequence is synthesized)
cactaccattgtgccacagaaagtaaccgtacgtagggatcaactaaaaacattaaatgactttcgaaaattactaggggt

SEQ ID NO: 931558 - DNA, 120 bp, Artificial Sequence
  ENSG00000231427_22 (sequence is synthesized)
agaggaaatcctagtctcactagccctcggcaattaaaaaaggaggcggaggcagagttacaactgattgagaagcaagtccataaagctcagataaatagaatagatccagagaagact

SEQ ID NO: 931559 - DNA, 72 bp, Artificial Sequence
  ENSG00000231427_23 (sequence is synthesized)
ctaattcatggactctaactccttatttagatcaaatcgctactctgatagggattggaagaacttggatga

SEQ ID NO: 931560 - DNA, 78 bp, Artificial Sequence
  ENSG00000231427_24 (sequence is synthesized)
cttacttggcaaacccatttagctgactctgggggtattctcaataatcattttcctaaaactaaaataactaaattt

SEQ ID NO: 931561 - DNA, 120 bp, Artificial Sequence
  ENSG00000231427_25 (sequence is synthesized)
ttcttattctggctcaaaattaaagttttccagacatcctgtacctcagctcaaaaagtggagcttatagcggtaattgaggtattgactgcctttgatatgcctattaatgtgatttct

SEQ ID NO: 931562 - DNA, 89 bp, Artificial Sequence
  ENSG00000231427_26 (sequence is synthesized)
cagttagaagtagaatgcaccctttttacgtgactcacattagagctcatacactcttccaggacctttgactgaaggaaatcaaatgg

SEQ ID NO: 931563 - DNA, 120 bp, Artificial Sequence
  ENSG00000231427_27 (sequence is synthesized)
gtgactcacattagagctcatacactcttccaggacctttgactgaaggaaatcaaatggctgatcacccagttgctactgcaatatctaatggtagacactttcacaatttaacccatg

SEQ ID NO: 931564 - DNA, 120 bp, Artificial Sequence
  ENSG00000231427_28 (sequence is synthesized)
attatccagtgatgcccaacttgccaagtggtacgttcctcatcttttacagaaggagttaatcctcgaagactagaacctaactctggcaaatggaggtcacacatgttccctcatttg

SEQ ID NO: 931565 - DNA, 89 bp, Artificial Sequence
  ENSG00000231427_29 (sequence is synthesized)
tttgggagactagcttatgtacatgtagtgtggacaccttttctcactttgggctacatgccaaatcttttacagtgctttgcggtgat

SEQ ID NO: 931566 - DNA, 67 bp, Artificial Sequence
  ENSG00000231427_30 (sequence is synthesized)
gagagtcttctgcctgtgttaaacatcatcttttacagtgctactagccaagctctagctacatttt

SEQ ID NO: 931567 - DNA, 61 bp, Artificial Sequence
  ENSG00000231427_31 (sequence is synthesized)
aaggacaaaccatagtaatatggaacaccacagatacaactgaacctaatattattaactt

SEQ ID NO: 931568 - DNA, 90 bp, Artificial Sequence
  ENSG00000231427_32 (sequence is synthesized)
aaagcagaaagggggagacagagaatatggaacaccacagatacaactgaacctaatattattaactttaaattttttgaggctgcccag

SEQ ID NO: 931569 - DNA, 120 bp, Artificial Sequence
  ENSG00000231427_33 (sequence is synthesized)
tgaaaccttatcatgagccagatgccaaagaagagactctgagaggaccccgaggacccctcaataacagccatgtcaagactgacgctgaggagaaccccaactgtcatgagcaacacc

SEQ ID NO: 931570 - DNA, 120 bp, Artificial Sequence
  ENSG00000231427_34 (sequence is synthesized)
cacccgtttaacacagccacccacctggggacaaatcaagaagctgtcaaagatggtggaagaaaacctgaggaaagtgggacagccagtcacagtgaataatttaaggatagctatgat

SEQ ID NO: 931571 - DNA, 120 bp, Artificial Sequence
  ENSG00000231427_35 (sequence is synthesized)
aatttaaggatagctatgatagcagttatcaccactgccatgagtattccttcaataagggctgacatagagaacaattatacttattaggtatatttatcaatcttggctggcaataat

SEQ ID NO: 931572 - DNA, 120 bp, Artificial Sequence
  ENSG00000231427_36 (sequence is synthesized)
acggccacactatgttcagatgatctgaacaaaacggtcagatggtagaaatgataagaagtacagcaaaagttcctattatctggaaccatggtgttacagtggcacctcagcctcaaa

SEQ ID NO: 931573 - DNA, 120 bp, Artificial Sequence
  ENSG00000231427_37 (sequence is synthesized)
atctggaaccatggtgttacagtggcacctcagcctcaaatgatatggcctgctctaggagctaaacatagggatttgtggaaactattaaatgctcttaataagatcaaaatttgggaa

SEQ ID NO: 931574 - DNA, 120 bp, Artificial Sequence
  ENSG00000231427_38 (sequence is synthesized)
ggaagctctgtgatttcaatgatgactgtgcttttaatctatgttgtttgtctttttatagtctgcagatgcggattctgactcctgcgagaagtagctcaccatgacaaagctgccctt

SEQ ID NO: 931575 - DNA, 120 bp, Artificial Sequence
  ENSG00000231427_39 (sequence is synthesized)
actcctgcgagaagtagctcaccatgacaaagctgcccttgcttttatctctttgcaaatcaaagaagggagacgtgttggaagcaagcccccctaaaatctggccataaactggccccc

SEQ ID NO: 931576 - DNA, 80 bp, Artificial Sequence
  ENSG00000231427_40 (sequence is synthesized)
ggcattcttaagccacaaacaatagcataagcgatctgtcttaagggcgtgttcctgctgcagttaactcacacaaccta

SEQ ID NO: 931577 - DNA, 77 bp, Artificial Sequence
  ENSG00000231427_41 (sequence is synthesized)
tttagttaatttaatatctatataaatctctgttcacgggtctcagctctggaggctgtgagacccctgatttccca

SEQ ID NO: 931578 - DNA, 120 bp, Artificial Sequence
  ENSG00000231427_42 (sequence is synthesized)
atcatcctttttcctggtgtctccatttttatcttatgtcatctctgatgctctctgaagccacgcccttttcagtagttgaaaaccttttatttgctgctttctcataatgccaattgg

SEQ ID NO: 931579 - DNA, 120 bp, Artificial Sequence
  ENSG00000231427_43 (sequence is synthesized)
tacgtaaatttgattgtcttggccctggcttaaagctacacatgcttctgccttttgccttcctggttgcttaccagcttttgtatttcccaactgaaaattactgcaaaaaatactttg

SEQ ID NO: 931580 - DNA, 120 bp, Artificial Sequence
  ENSG00000231427_44 (sequence is synthesized)
ttcaagagtttggaaaatgatctcccttgccagactgccaatcttcaaagggagttctatatgtggaagaaaaagaaaaaatttatgtgcatttaccctgtttaatacactcatcatata

SEQ ID NO: 931581 - DNA, 120 bp, Artificial Sequence
  ENSG00000231427_45 (sequence is synthesized)
tagtatttttgcaacagcaaaaataacactcttaatttagtatgtaattatatatgtcatatacttaatatacaaaatattttccttgctaacctatacgatttcaaatgcctggaacaa

SEQ ID NO: 931582 - DNA, 120 bp, Artificial Sequence
  ENSG00000231427_46 (sequence is synthesized)
caaattatgtacatattagtttgtctgaagacttgagccaaaaggaaactaatacacttctgagctacaatatggacataatgtcatgaagcaggaacattatgctccatttcaggacac

SEQ ID NO: 931583 - DNA, 120 bp, Artificial Sequence
  ENSG00000231427_47 (sequence is synthesized)
ttttgtttaatagtacctccttcattacatgtgaacagcactccaggacagtaaatcatgaaatgggaataaagcctgtaattttaattaacatattttaaaatgtttctaatttgtatg

SEQ ID NO: 931584 - DNA, 120 bp, Artificial Sequence
  ENSG00000231427_48 (sequence is synthesized)
catttgatcaaattttcatttgcattgagctattttttttctttctcatgtaatgtttgacattaccatttctttctttaatgaaatactaatatttaataaaatatattacatccttaa

SEQ ID NO: 931585 - DNA, 120 bp, Artificial Sequence
  ENSG00000231427_49 (sequence is synthesized)
agcacccctactgcaaggattttaagaactctatctcaggataaagacctgaggcatctggctgcgtgcatttccagctttgtgactcctccgctccacatccgtccagccccagccctg

SEQ ID NO: 931586 - DNA, 120 bp, Artificial Sequence
  ENSG00000231427_50 (sequence is synthesized)
gaggacacacccttactgccacgccatctttgtttcctgacctggtgacaccagcttaccctctcttagtcatctggtctcctcttcaactttgcctcaaacttacacagacaattctgg

SEQ ID NO: 931587 - DNA, 120 bp, Artificial Sequence
  ENSG00000231427_51 (sequence is synthesized)
acttccagatatttggattttagagttttgcacattagaacccacagatgccaccagcgtaccttctgtcttctgttgttgatttcacacgacttcctggagacctgatggccagactcg

SEQ ID NO: 931588 - DNA, 120 bp, Artificial Sequence
  ENSG00000231427_52 (sequence is synthesized)
cctctgatggaaagcaactgacctcaattgactgagcaggaatgcctgcaactggcaggatagaacatgtggcccaacgctgagcacatcttccgcatatgtcctctgcatgtggcttgt

SEQ ID NO: 931589 - DNA, 120 bp, Artificial Sequence
  ENSG00000231427_53 (sequence is synthesized)
gaataatgctgtttgggatctgatctatttactggttgttccacatgagtatatgcagttttccttctctgaacctgatgtcattacttcactgtcatagctttacctggctggctgcct

SEQ ID NO: 931590 - DNA, 120 bp, Artificial Sequence
  ENSG00000231427_54 (sequence is synthesized)
agcagggaggcaggcttggtctcccagttgctgaaacacaaaatattgaggttacagcttatggtgaaaattggatgcagatagcagaagagaactcaaagaatatcaccaatacagaaa

SEQ ID NO: 931591 - DNA, 120 bp, Artificial Sequence
  ENSG00000231427_55 (sequence is synthesized)
ttgtcccccacccattgaatgggctccctcttgaccaaagggatcccatagaaaccttaaaatgagttcccagccatgatgggaagggaggttggatacagctcattataacaccccctt

SEQ ID NO: 931592 - DNA, 120 bp, Artificial Sequence
  ENSG00000231427_56 (sequence is synthesized)
atggagtttagacaaaactgcccagaattaatgttaaaatagatattataagaccaattgaatggatttcatgtgacaataagataccagattataaccaagatgtaaggtgatgccaga

SEQ ID NO: 931593 - DNA, 120 bp, Artificial Sequence
  ENSG00000231427_57 (sequence is synthesized)
ccagggtaagtcctgcctgcaggccatcagtctggctaaacaaggcattttgacccagcatcttgtggctgactctgacttaagatcctaatcttagatattcctttctgctgacagcaa

SEQ ID NO: 931594 - DNA, 120 bp, Artificial Sequence
  ENSG00000231427_58 (sequence is synthesized)
gttttagagagagtcttactcctttaaccagctgaaaattaaagaatttttgaatccaattataacctgtaagcttccactttaaggtatcctacctttttaggccgagccaatgtatac

SEQ ID NO: 931595 - DNA, 120 bp, Artificial Sequence
  ENSG00000231427_59 (sequence is synthesized)
attctacatactgacttacgtcactcctgcttccctgaaatgtataaaaccaaactgtaatctgaccaccatattttaaatagtgtatttaaaagaggtttaaaataaacttttctaaaa

SEQ ID NO: 931596 - DNA, 120 bp, Artificial Sequence
  ENSG00000231427_60 (sequence is synthesized)
agaacaaaagatgcttttgtcactcaggacattacaaaggagctctgtgtcagaagctaggattaaagaacaaatacagaacaaattattcctccagcacccctactgcaaggattttaa

SEQ ID NO: 931597 - DNA, 120 bp, Artificial Sequence
  ENSG00000231427_61 (sequence is synthesized)
gaactctatctcaggataaagacctgaggcccaaggaagacgaagagatatctgaatggcctggacatggcatgtaaaaatgactcagccaacagctggaaagaagctgctggccttcag

SEQ ID NO: 931598 - DNA, 120 bp, Artificial Sequence
  ENSG00000231427_62 (sequence is synthesized)
aggattaaagaacaaatacagaacaaattattcctccagcacccctactgcaaggattttaagaactctatctcaggataaagacctgaggaacccacatagaggcatgctacctcagca

SEQ ID NO: 931599 - DNA, 120 bp, Artificial Sequence
  ENSG00000228988_0 (sequence is synthesized)
ccccaccaccaccagtataaaatgtcccgaaattttcaatgtacatgaattttggtaacattaaatctgtaactaatttgttttgtcactaaaactttcagaaaagatatattttaatat

SEQ ID NO: 931600 - DNA, 120 bp, Artificial Sequence
  ENSG00000228988_1 (sequence is synthesized)
actgcacgtcactcataaataagtatctgtgaatacaaagaatggtaattaattttctcattttgaatcagacatatgtaactgccagttacagatacttaatagtttaacatttattgt

SEQ ID NO: 931601 - DNA, 120 bp, Artificial Sequence
  ENSG00000228988_2 (sequence is synthesized)
gagtgcctactatatgccacgcatgctaaaatatttgatgataaaaggacaaataacagaaggtcagggttcatgcctttttctttttttcctgaaatgttaacacttatttattctctg

SEQ ID NO: 931602 - DNA, 120 bp, Artificial Sequence
  ENSG00000282943_0 (sequence is synthesized)
gtgaaaagcttggtgaaggattttaaggacttcccattggctgaaggctggcaaatggagtttgccatcctctgactacagccattctgaggactggaaaggataccctgagaagtggcc

SEQ ID NO: 931603 - DNA, 74 bp, Artificial Sequence
  ENSG00000282943_1 (sequence is synthesized)
cgtgagtcagtgctccttaacaaactcccctttgtatatacatctatcctactacttctgtcactctagagaac

SEQ ID NO: 931604 - DNA, 120 bp, Artificial Sequence
  ENSG00000282943_2 (sequence is synthesized)
tatatacatctatcctactacttctgtcactctagagaaccttgacgaatacggttatgcatttttattaatgtaaattatgccttaattaacaataaataccttctcaacctccaaaaa

SEQ ID NO: 931605 - DNA, 120 bp, Artificial Sequence
  ENSG00000282943_3 (sequence is synthesized)
ctggatgcttcctgccctcgaaaatcagactccaagttcttcaactttgggactcggacctttgaacacagactgaagcctgcactgtcggcttccctagttttgaggctttgggacttg

SEQ ID NO: 931606 - DNA, 120 bp, Artificial Sequence
  ENSG00000282943_4 (sequence is synthesized)
aggccatcatacctgccagtcttcctgaaatacagaaatgacttcacggctgctatattggattaaggagaggaagacgtcctattcctgaaggagctgtcatggaaagaaaagtaaaga

SEQ ID NO: 931607 - DNA, 120 bp, Artificial Sequence
  ENSG00000282943_5 (sequence is synthesized)
aggaatgaaggtgatgttattttacatgggggagcctcaggaagaggcatgtagcatgaggtactctataattgtttcttcaagtactacattattcctcttgggaaattgatgggagat

SEQ ID NO: 931608 - DNA, 120 bp, Artificial Sequence
  ENSG00000282943_6 (sequence is synthesized)
gattatattcttgcagttttttttttccctctcaccatgtttctaggatggtgatcagtcctctgtcaaatctctactgcactcagatattttggaaggctttcagacataagaaaggct

SEQ ID NO: 931609 - DNA, 120 bp, Artificial Sequence
  ENSG00000282943_7 (sequence is synthesized)
gattgctattttctatgtcattagaacttaccaccttttcaccttttcatggttgcatctttttctcagtctctctgttgtggcagccatgaatgagactctgtcaggtctccatggcag

SEQ ID NO: 931610 - DNA, 120 bp, Artificial Sequence
  ENSG00000282943_8 (sequence is synthesized)
tttcacattcatcacctcctttgcacagaaagcttctttcccacaggctcccaggaagggcgtgaaagcaagcctagttctctgaggctctctttaactctaaagggtgactggttggag

SEQ ID NO: 931611 - DNA, 120 bp, Artificial Sequence
  ENSG00000282943_9 (sequence is synthesized)
gactccccctcagccttgcaaaaactcttagaactgcattggtacctaaaacttctttctctttctttttcacaggaatcagctctgcatagtggtctgtgggttctcccatactgcctt

SEQ ID NO: 931612 - DNA, 120 bp, Artificial Sequence
  ENSG00000282943_10 (sequence is synthesized)
catgtctgccccacattccctcacaggtgtcctccctgataaattatcttgtatgtctaatcccatcttgggtgcatctcagttggtaaaaactaacatatcaggcttgattctttgcac

SEQ ID NO: 931613 - DNA, 120 bp, Artificial Sequence
  ENSG00000282943_11 (sequence is synthesized)
ttagctttttttccttctctcccacaagtagtcagtaaccatgtcctagtgttttatgtgttacctctttttccatatatatggaaaaaggtaggtactgttgaggggcatttcctatgt

SEQ ID NO: 931614 - DNA, 120 bp, Artificial Sequence
  ENSG00000282943_12 (sequence is synthesized)
gccaggccctgtgctaaatactttacctgtatctcatttaatccacacaataaccctgtcaggtagaaattatttccactttgctgatgaaaagacagaagcttatcatggtgtaaaaac

SEQ ID NO: 931615 - DNA, 120 bp, Artificial Sequence
  ENSG00000282943_13 (sequence is synthesized)
tttcctggtgtcatatggctagtgacaggtggatctgaaatttgattctaggactatttgacctcaaggctaatgatgatggtagtaatatagcagctgacattggctcctctgtgtggc

SEQ ID NO: 931616 - DNA, 120 bp, Artificial Sequence
  ENSG00000282943_14 (sequence is synthesized)
atcttgtttcattgattgcattaaacatttaaaagaatggtatgaagaaagcactctcattgcaattttcaggtgaggaatcagaggttcagagaagttgagtcttgtgcaagaaattta

SEQ ID NO: 931617 - DNA, 120 bp, Artificial Sequence
  ENSG00000282943_15 (sequence is synthesized)
taactgtaaactcttacattaaaaaagaagaaagatctcaggtcaacaacctactttaatacttcaggatatgaaagaagaacaaactaaacccaagcacagtgaatgagggaaataata

SEQ ID NO: 931618 - DNA, 120 bp, Artificial Sequence
  ENSG00000228980_0 (sequence is synthesized)
agtccgctttgtacaagccatggtatagaggcttccttatttacctcccttatccttcagctggagctctgcgagccagaggcagcgctggcgttggagagtgatggcggcatggcggtg

SEQ ID NO: 931619 - DNA, 120 bp, Artificial Sequence
  ENSG00000228980_1 (sequence is synthesized)
cggcggcggctgcgaacaccttgaggacgggtcgcattatgttgcccaggctggacttgaacttctgggctcgagcaattctcccacctcagcctaccaagcagctgggactacaggtct

SEQ ID NO: 931620 - DNA, 120 bp, Artificial Sequence
  ENSG00000228980_2 (sequence is synthesized)
gcaccactgcaccccacccattcaagtccacatccccagaaacgaggataatgcttggcacaaggtgtttataattcccttggttttcttcacaatttcaccacataaatgttttgatga

SEQ ID NO: 931621 - DNA, 120 bp, Artificial Sequence
  ENSG00000228980_3 (sequence is synthesized)
ttcacaatttcaccacataaatgttttgatgacaagcttaaaaaattttttgctgagtggctggcaagatggcccaataggaacagctccagcctgcagctcccagtgagatcaacgcag

SEQ ID NO: 931622 - DNA, 120 bp, Artificial Sequence
  ENSG00000228980_4 (sequence is synthesized)
gtgtccttttaaggtaataacaccttattgtgagcactattttagaaagtgatgcacaaattgggagctcttccgcaggatcacctgaggtccattgtgcacccaacactcttttagatg

SEQ ID NO: 931623 - DNA, 120 bp, Artificial Sequence
  ENSG00000228980_5 (sequence is synthesized)
gaatttgccaatgaaagaaacttggaagaaaataattattctctggatatggttgcagccagatgtgtggtcagaggtgagtgcttgagaaccaccagtttagtggttttagtccgagtt

SEQ ID NO: 931624 - DNA, 120 bp, Artificial Sequence
  ENSG00000228980_6 (sequence is synthesized)
tgttcataagacctttctagagacaccagagaattgcagcaacttccagataagaccttcaaccaaccacttcagtgctttaggctgagatgacttctttgactttcagaggcaggaccc

SEQ ID NO: 931625 - DNA, 120 bp, Artificial Sequence
  ENSG00000228980_7 (sequence is synthesized)
ctaaatgttggtagaagcttctctatctctgttcttctgttttccaacagaagtataaacccctaattctttattatgtgcatccttaagatccatgatacacagggtggtctctgtttt

SEQ ID NO: 931626 - DNA, 120 bp, Artificial Sequence
  ENSG00000228980_8 (sequence is synthesized)
cctgatgaaccacaactgactcaatactaatggtgtcagtgagacagtcagaaatatttatgtagttacctattcaaatattggaataactacttataattcatgaaatttactcaattt

SEQ ID NO: 931627 - DNA, 120 bp, Artificial Sequence
  ENSG00000228980_9 (sequence is synthesized)
caggaagccaatgtttagaggattttttctatatccttttccaatttacccaaaggtgtcagcattactgaagtcacaaagaccttggccagtgtatgtaaattgaactttgaaaaaaaa

SEQ ID NO: 931628 - DNA, 120 bp, Artificial Sequence
  ENSG00000228980_10 (sequence is synthesized)
ctctcccaagctgtctttgctgtgttcctacttgtcacaaactccagaggggaaaaggttttatgctacttgaaatctaacaatgtagctgccacagtttcaaagatgttgccagaagac

SEQ ID NO: 931629 - DNA, 120 bp, Artificial Sequence
  ENSG00000228980_11 (sequence is synthesized)
acaaaacccctgggtcagagacaaagaatattactatgcatggtacaagagggagattaatgttcacatggttctcttgaccctcaagtgccatgaggatgatgcggaggaagactcggg

SEQ ID NO: 931630 - DNA, 120 bp, Artificial Sequence
  ENSG00000228980_12 (sequence is synthesized)
agtaggctgctagcaaacttgtccaaactttgccctggagaagatgttatctttattgttctgcgcagggaaacagatctgcactttgccccacagagagaaactatgtatcttctaagg

SEQ ID NO: 931631 - DNA, 120 bp, Artificial Sequence
  ENSG00000228980_13 (sequence is synthesized)
ttgtttgctatataaatattttggaaagatagtccagtaaaagagttgattcaagtcatccataatacctcttatggagaaatgtctctcaacaacactaaccatctttcagtttctgta

SEQ ID NO: 931632 - DNA, 120 bp, Artificial Sequence
  ENSG00000228980_14 (sequence is synthesized)
atggcctatgcccactctgagtgctgctgtatttgctatttttcttttggaaacattttccccggctttctctgtctcatctaattaacttctcatcattctttaaatgtattttttttt

SEQ ID NO: 931633 - DNA, 120 bp, Artificial Sequence
  ENSG00000228980_15 (sequence is synthesized)
ctttaaatgtattttttttttcagttcctcagattaagttggattcccccataggttgctatttattccattaagaggatttattggcttgatgtggtggctcatggctgtaatcccagc

SEQ ID NO: 931634 - DNA, 70 bp, Artificial Sequence
  ENSG00000228980_16 (sequence is synthesized)
cttgaaccctgggcgacagactgagattctcatccagagtcaaattttcaaaaaaaaaaaaaaaaaaaaa

SEQ ID NO: 931635 - DNA, 69 bp, Artificial Sequence
  ENSG00000228980_17 (sequence is synthesized)
gaggataatgcttggcacaagggtcttgctctgttgccctggctggagtgcggtggcatgatcttggct

SEQ ID NO: 931636 - DNA, 120 bp, Artificial Sequence
  ENSG00000228980_18 (sequence is synthesized)
gtctcaccatgttggccaggctggtgtcatgtctctttagtttccttcaatgcttagttttttcctcatttttcatgatcttgccatttttgaaaaggataggtcagttattttatagta

SEQ ID NO: 931637 - DNA, 120 bp, Artificial Sequence
  ENSG00000228980_19 (sequence is synthesized)
catttttgaaaaggataggtcagttattttatagtatttccctcaatttgggtttgtctgatgtttcttcatgtctagattcagagtatggatttttggtaagaatgctatagaagcaat

SEQ ID NO: 931638 - DNA, 120 bp, Artificial Sequence
  ENSG00000228980_20 (sequence is synthesized)
acattaggaagcacaaaataccaattttcctcattaataatgatagtaacttttttcacactgttaagatgatgtttatatttctccactgtagagttcattaataacagatattttatt

SEQ ID NO: 931639 - DNA, 120 bp, Artificial Sequence
  ENSG00000228980_21 (sequence is synthesized)
gagctttacttttaaattttatacatatgtatctttttttcatcaaaattttaatgagcttaacatctatggataattcttgtctgaataatttattacagcagtggttgctgagtgtta

SEQ ID NO: 931640 - DNA, 120 bp, Artificial Sequence
  ENSG00000228980_22 (sequence is synthesized)
tgtctgaataatttattacagcagtggttgctgagtgttattttctaattcttttttttccttttttgagatggagtctcactgtgatgccgagggtggagtgcagtggcacaatctcag

SEQ ID NO: 931641 - DNA, 88 bp, Artificial Sequence
  ENSG00000228980_23 (sequence is synthesized)
ttattttctaatttgatcatttcttgtacatttattagttggcattgtactataagatagatcttttctttgaatatcagtatgggct

SEQ ID NO: 931642 - DNA, 120 bp, Artificial Sequence
  ENSG00000228980_24 (sequence is synthesized)
actataagatagatcttttctttgaatatcagtatgggcttatggattcttattttattgaatcagttatgctctattattatccttaactattacttattacagctttattgatgtata

SEQ ID NO: 931643 - DNA, 120 bp, Artificial Sequence
  ENSG00000228980_25 (sequence is synthesized)
tttgacatacaagaaattgcatatacataaagtgaaaagtttgaagaattttgtgtacctataaagtgaataaactgttacactaatcagtgaaataaatattttcattaatccctaaaa

SEQ ID NO: 931644 - DNA, 120 bp, Artificial Sequence
  ENSG00000228980_26 (sequence is synthesized)
tcctcctcgagatcaatttgggaaactcctcccatggcaaagacagctagttgtctataatttgtttcctccttttccttagccccagacccttgatttttagctaggtaaatgtctatc

SEQ ID NO: 931645 - DNA, 120 bp, Artificial Sequence
  ENSG00000228980_27 (sequence is synthesized)
tataataaagaccccattttccagacttccttgctgcaggtgtacacatgtgactaaatcctagatgatgagatgtaagctgaaattgtgtgtgcaacttctaagaaatgtttctaaaaa

SEQ ID NO: 931646 - DNA, 120 bp, Artificial Sequence
  ENSG00000228980_28 (sequence is synthesized)
cagcagccacacttttctttgtggttgtcttcttcctattagaatacagatgaaatgtcaaggattctagcagccagcttcaacaataagatgaccttgagaaggtaaactacctataga

SEQ ID NO: 931647 - DNA, 120 bp, Artificial Sequence
  ENSG00000228980_29 (sequence is synthesized)
aagtgacaaaaaatagtacttatctcaaagatacatgtaaataataatgagaaaatgcctaagatgtatttagatagtggttgtcacataaaagttattcaataaacatttattgatttt

SEQ ID NO: 931648 - DNA, 120 bp, Artificial Sequence
  ENSG00000228980_30 (sequence is synthesized)
ataaatatactggctctttctcaaggccagagaagcctctcttcatcttcccaggacttccattacctactttttttctggagggcgggggggaataatttcaacctacagaaaagatgc

SEQ ID NO: 931649 - DNA, 120 bp, Artificial Sequence
  ENSG00000228980_31 (sequence is synthesized)
agatgcaagaataatgaaaggaactcttagataccctttaaccaaattcaccaataatgttttagtttgtaaaatctaatttgaaataatttttttaaaaatttattttctcctcaaatt

SEQ ID NO: 931650 - DNA, 74 bp, Artificial Sequence
  ENSG00000228980_32 (sequence is synthesized)
tcagatgcctgtaatcactgcacccagcctcaaattccttttttaccatgaaataatttcaaatttatagattt

SEQ ID NO: 931651 - DNA, 120 bp, Artificial Sequence
  ENSG00000228980_33 (sequence is synthesized)
ttccttttttaccatgaaataatttcaaatttatagatttgcaagaaaaacacaaataatacaaagaactaccttatacccttcacccagatttcctgattattaatcatttacatttgt

SEQ ID NO: 931652 - DNA, 120 bp, Artificial Sequence
  ENSG00000228980_34 (sequence is synthesized)
ctgtttttctttcatgtaccattattttattcctgatacatttgagattaagttgcagacatgttgacaaattacccctaaatacttcagtgtgtatttccaaaaacaaggatacttttc

SEQ ID NO: 931653 - DNA, 120 bp, Artificial Sequence
  ENSG00000228980_35 (sequence is synthesized)
tttccatagaacctcaatactctcatcaaaatcagggtattaacattgctacaatactttaatccacaaattccacttaaatttcaacaattgcagggatagcattaggagaaataccta

SEQ ID NO: 931654 - DNA, 120 bp, Artificial Sequence
  ENSG00000228980_36 (sequence is synthesized)
cttgaacattggtagagcataaagactaacttgaaattaaagggcaaaaaccaacacaagcaaaatgatattaaaaaaaaaaagcccagctggacatggtggttcatgcctgtaatccca

SEQ ID NO: 931655 - DNA, 120 bp, Artificial Sequence
  ENSG00000228980_37 (sequence is synthesized)
taatcccaacactttgggaggccaagaccagaggattgcttgagcacatgagttcgagaccagcctggacaacaaagtgggatcctgtctataaaaaaataaaaaaattagccaggcatg

SEQ ID NO: 931656 - DNA, 85 bp, Artificial Sequence
  ENSG00000228980_38 (sequence is synthesized)
gcaccccacccattcaagtccacatccccagaaacgaggataatgcttggcacaagacggaatctcgctctgtcgccagcctgga

SEQ ID NO: 931657 - DNA, 89 bp, Artificial Sequence
  ENSG00000228980_39 (sequence is synthesized)
atttttgcacccaggtgaccttgactactttaaaagggctctcagtttattatttttgttttagagatgaggtcctgctttgtcaccca

SEQ ID NO: 931658 - DNA, 120 bp, Artificial Sequence
  ENSG00000228980_40 (sequence is synthesized)
tgtcacccaggctggagtgcagtggtttgattatagatcactgcagccttgaacatcggggctcaaatggtcttcttgtctcagcctcttggtagctggggctcctcagtttaaattagg

SEQ ID NO: 931659 - DNA, 120 bp, Artificial Sequence
  ENSG00000228980_41 (sequence is synthesized)
gtttaaattaggtatgtaggagtggggaaaagatgaatggtagagcagggggagagaaaaaaggaataacatttcttctttagttctatgtaactccagttgaatataacctccttgcag

SEQ ID NO: 931660 - DNA, 120 bp, Artificial Sequence
  ENSG00000228980_42 (sequence is synthesized)
gaggaattatcctgttcccttccacaatcctccactagcctgtgtccccagcacctgagctagcgtctagtgagcattataaaacaaaaccaaacaccacataaaatctttctggatttt

SEQ ID NO: 931661 - DNA, 120 bp, Artificial Sequence
  ENSG00000228980_43 (sequence is synthesized)
ccttttagattgtttctaattttgtgaggaatttaatgatttttgaaatcgttcttctacagtcatttttgttttgttgccttttttccttcaaccgattaaatgcttcaggtgtccaaa

SEQ ID NO: 931662 - DNA, 120 bp, Artificial Sequence
  ENSG00000227733_0 (sequence is synthesized)
tggcaggactactgagcaaggccttggaaaatcggagcgattagagcggttcaaacaatacagaagtgtataaagtaagaattgaaagtctcttcgctgctctaatctcactcctcagag

SEQ ID NO: 931663 - DNA, 120 bp, Artificial Sequence
  ENSG00000227733_1 (sequence is synthesized)
gtgatcactgattatcatcccagagccctccctgaagcccacacacagcttcttcaggaaatgctgacagcatggacctgagtgagcagaaggcttttcagaattacagcctgaactatt

SEQ ID NO: 931664 - DNA, 120 bp, Artificial Sequence
  ENSG00000227733_2 (sequence is synthesized)
tcttgagcaatttgggaactcatttctaaagcagtcctcagattcacacaacgtagtttgtgacggagtatgcccagagcagtgtggaagatgatcaaagtatgacatttcttctacccc

SEQ ID NO: 931665 - DNA, 120 bp, Artificial Sequence
  ENSG00000227733_3 (sequence is synthesized)
agaggctggcatttctgcaggcacaaatgagcttggttttcaagcactgctctttgaacacaaggaattcctttaatgatcacgccggactatatagactttggaatcagactctttgaa

SEQ ID NO: 931666 - DNA, 79 bp, Artificial Sequence
  ENSG00000227733_4 (sequence is synthesized)
ctgagtaatatttttaatttttttgtagagatggcggtcttgctatgtcacccaggctggtcttgaacacctggcctca

SEQ ID NO: 931667 - DNA, 90 bp, Artificial Sequence
  ENSG00000227733_5 (sequence is synthesized)
ctctcaaagctggctctatctccccttcctatgtgtgttagctctagaacaagagaagccttgttgagattcctggctgcccacccccca

SEQ ID NO: 931668 - DNA, 120 bp, Artificial Sequence
  ENSG00000227733_6 (sequence is synthesized)
aagagaagccttgttgagattcctggctgcccaccccccatcacctctctgactttgggcaagttgcctggcctctctcagcctttattttctttttgtgaaatggggataataatagta

SEQ ID NO: 931669 - DNA, 120 bp, Artificial Sequence
  ENSG00000227733_7 (sequence is synthesized)
cttgcctcataggcaaaatgttgtgagaactaaacgagaaaatgcatgtaaagcacttggcacttagttctttttatgattataatgataatcagacacaataaattatgtctcacatca

SEQ ID NO: 931670 - DNA, 120 bp, Artificial Sequence
  ENSG00000227733_8 (sequence is synthesized)
agggatttagcagaaagatctgacccaacaagtaaaaactcttttaaaggttcagtcaaatttattctcatcacactcctctggaatgcccaacaggcacatgttttgtcaatgaaaatt

SEQ ID NO: 931671 - DNA, 120 bp, Artificial Sequence
  ENSG00000227733_9 (sequence is synthesized)
gttttcaatctcattgatgttttgtttggcaagaaccatttctttcaacaatttcttattaatcatctataatttttcacttctgacagtgttatcaccagtgctttcagtaactgcata

SEQ ID NO: 931672 - DNA, 120 bp, Artificial Sequence
  ENSG00000227733_10 (sequence is synthesized)
cttataaaacagccaaacttcaacctgtgttcagtttttatctgtttcttgggaatgtaatttggacaaaaaagttaccaatgtatttacaaccaaatttcagatcttcaacattacaga

SEQ ID NO: 931673 - DNA, 120 bp, Artificial Sequence
  ENSG00000227733_11 (sequence is synthesized)
gggtaagaaatgtgaacacaatggaattcttctatcatccttattttgtgagatctaattagtgtatactcaccttcccagtaatgtcatgttagctttctccctgtctttgtggcttgt

SEQ ID NO: 931674 - DNA, 120 bp, Artificial Sequence
  ENSG00000227733_12 (sequence is synthesized)
agatttctgtctccaggggcatggtttgcattgtggtgatccagatatggataaggcaacatccagtgtcttaatagggtcctgccttccaaacaaataattcactgtggctctaagatt

SEQ ID NO: 931675 - DNA, 120 bp, Artificial Sequence
  ENSG00000227733_13 (sequence is synthesized)
ctacataggcctagtgaaaataccttcagggctagatgaaggtgtttggcatgctttttcttccatggtgggggcaacattgggcagtgctgccttcctggctgtgagcagcttgtgggt

SEQ ID NO: 931676 - DNA, 120 bp, Artificial Sequence
  ENSG00000227733_14 (sequence is synthesized)
ccccagggaccatttcactggacttcagcttaaacattgtttatacatggccatcgatttcctttaccaagagctgccaatccaatggcattagccacacctgccatgcacttccacccc

SEQ ID NO: 931677 - DNA, 120 bp, Artificial Sequence
  ENSG00000227733_15 (sequence is synthesized)
tcctcaaccaggtggtaagcacaggagacgaactggtgttaggagaaaaagccataccgatggtccagtgcagtgggatagccaggaaacttgttagaaattcaattccctggccccacc

SEQ ID NO: 931678 - DNA, 120 bp, Artificial Sequence
  ENSG00000227733_16 (sequence is synthesized)
ctacatctctgggtgatttggatataggccataacatttgagaactgctgctctggcttaatacatcagaatcttccactttattattttatttccatatttgtatattcctctcttccc

SEQ ID NO: 931679 - DNA, 120 bp, Artificial Sequence
  ENSG00000227733_17 (sequence is synthesized)
ctttgacattttctgtcatggttttgctttctaaatgtctttaagctgtcttgttgatgggggtgcaccctgacgaatggtgtgctggcaaagatttaacaaaaggctccagaggagggc

SEQ ID NO: 931680 - DNA, 120 bp, Artificial Sequence
  ENSG00000227733_18 (sequence is synthesized)
agacttgaagtggagccttcagtgggcagtgtgaagggtgctgatttcaaacaactcatctggtatgactgaacatgaagttgggaagagatgtgcataattgaagtgggtgagagccag

SEQ ID NO: 931681 - DNA, 120 bp, Artificial Sequence
  ENSG00000227733_19 (sequence is synthesized)
tccagcaccctgcagagaggtaacaataattttgtaggtacttcctcaaatttaactcaatggaggtttagattgggtttagattgagtcattagttgcaggtcatttgttgaatcattg

SEQ ID NO: 931682 - DNA, 120 bp, Artificial Sequence
  ENSG00000227733_20 (sequence is synthesized)
aatacttttggttgttaaggtgactgaaatactcagttgatgtcctttaagatcactgaaaatatttaaaatcagcttacatatggtattttggaaatgccacatacgtaatggattaaa

SEQ ID NO: 931683 - DNA, 120 bp, Artificial Sequence
  ENSG00000227733_21 (sequence is synthesized)
acccacaactatatttgctgcctttcctatgcatgtcctgtcaaaattattttttggtggactataagccctaaaacaacatggaccttgttttcctctccattatattctcattactta

SEQ ID NO: 931684 - DNA, 120 bp, Artificial Sequence
  ENSG00000227733_22 (sequence is synthesized)
tttaccaactttgacactttgggtttcctgtttgaaggaggattggtgacttcccttccttcagacaagcaatgataacacagttgtgttcccttgtgtgagtctggggtgacgttggct

SEQ ID NO: 931685 - DNA, 120 bp, Artificial Sequence
  ENSG00000227733_23 (sequence is synthesized)
aaaacaggaaaatctctcttcatcttttctaattgttcttttaatgaaatcagtactgccctttggcattaatgatcgtatgcgaaagacaacgtctcattctgtcacccaggctggagt

SEQ ID NO: 931686 - DNA, 120 bp, Artificial Sequence
  ENSG00000227733_24 (sequence is synthesized)
ttatagctcactgcagcctcaaacacctgggctcaagcaatccttccacctctgcctcctgagtaattgggactacagggatggggaatgactatctccaattaaacttctcagtaaaat

SEQ ID NO: 931687 - DNA, 120 bp, Artificial Sequence
  ENSG00000227733_25 (sequence is synthesized)
ccttccacctctgcctcctgagtaattgggactacaggtattatgtttctattaatgcagtctaaagggttttggaaatctggattgtagcagggcattgtggatctgcctgttggtgga

SEQ ID NO: 931688 - DNA, 120 bp, Artificial Sequence
  ENSG00000227733_26 (sequence is synthesized)
gaaccctagactgcatgcagccatgcacatgatctggagacacagcaggtcatcctcagcatttatactctctctccttttgtgcccccatggaccaagttaagaaggtgtaggcttcaa

SEQ ID NO: 931689 - DNA, 120 bp, Artificial Sequence
  ENSG00000227733_27 (sequence is synthesized)
atcttaagatcggtcaccacaaaattcaaaaagacaaggtctttgtctgttgctcaggatggagtgtagtggtgccatagcacactgtaatcttgaatttctggactactggcatacacc

SEQ ID NO: 931690 - DNA, 120 bp, Artificial Sequence
  ENSG00000227733_28 (sequence is synthesized)
accatgcttaggttcgggccacaacatccgtgactttaccggttttggtctcttccttgtaactttcggctccaggatgctgcgcagctcctctctgcactatctatcagaacgttgctc

SEQ ID NO: 931691 - DNA, 120 bp, Artificial Sequence
  ENSG00000227733_29 (sequence is synthesized)
tgcgtgcttgaaagtttcgccaaacagaagtacacaaaaacaaacagaggcgaaacacaaatcccctcagccctggaggaaaaggccttgaagctcttccagtgcagaggccacgcagag

SEQ ID NO: 931692 - DNA, 120 bp, Artificial Sequence
  ENSG00000227733_30 (sequence is synthesized)
gacatgctcctacctgtgcacatcggccacgcctggggtgcctcctggagtccaggctgctggcgatggaatccatcatgttgctgatgtcactactctcaactcctgatggcatcagaa

SEQ ID NO: 931693 - DNA, 120 bp, Artificial Sequence
  ENSG00000227733_31 (sequence is synthesized)
cacaggcagcatcaagatcaggctcaagatgcaggattttatcatccaaatcaggcccacatatggatgaaacccttcaggtattctgcacatctctcaggaaacccagatgaaattgag

SEQ ID NO: 931694 - DNA, 120 bp, Artificial Sequence
  ENSG00000227733_32 (sequence is synthesized)
tgcctgctgcccacatcagcaacccagacatcccacttgattctgcttctggagcctaagatgggaaaatggcaggtgtcgcaggttgcaggggaaggtcggagaccagttgagggcccc

SEQ ID NO: 931695 - DNA, 120 bp, Artificial Sequence
  ENSG00000227733_33 (sequence is synthesized)
ggagtctgtctggaaagagttttccatccagcccgtctcggtttccgcatccgtgtgagtcctttatgacgtcgggaatgccaaggtctgagtcctttatgatgttcagggtgccccggt

SEQ ID NO: 931696 - DNA, 120 bp, Artificial Sequence
  ENSG00000227733_34 (sequence is synthesized)
ctcaccccgggagcctcctcgctccggcctgctcctggctacccggtgggcggctctggccccagcgacccgctactgtttctccatgcgctgccacttcgcaaaggcacatctctaggt

SEQ ID NO: 931697 - DNA, 120 bp, Artificial Sequence
  ENSG00000227733_35 (sequence is synthesized)
cagtggtcagctgcagccagggcgctgcaactcgctccaggactcgggaatcagggccttggtgggcctcgcagagtgctgggtgtgtcgcctgcgggctcctcttttggagaaaggagg

SEQ ID NO: 931698 - DNA, 120 bp, Artificial Sequence
  ENSG00000227733_36 (sequence is synthesized)
gagggaaaggccttgtgagacgactccaggagcgaccagcgacccccacaaggcccaagtcctcccagcgcactcagaaacagtcacttaaatggcaataaggttgagaaagactctccc

SEQ ID NO: 931699 - DNA, 120 bp, Artificial Sequence
  ENSG00000227733_37 (sequence is synthesized)
gtgcccccgtgctggtgtagtggctgtgattcagtcctttcaccaccgcatcccgggttcgattaccggtcagggagttgttttgcactgactgcccacccgcagtaatctttctttact

SEQ ID NO: 931700 - DNA, 120 bp, Artificial Sequence
  ENSG00000227733_38 (sequence is synthesized)
ccgctgtcagccggcctgctccaagagccagaggcagaagagtctccctgcaaggtgcaaaccctggcgaaggagggcaagtcctggtggacggcctctcatgacacaccctcttattta

SEQ ID NO: 931701 - DNA, 120 bp, Artificial Sequence
  ENSG00000227733_39 (sequence is synthesized)
tctccgtgtccaccattcgcagaaggggctttagagagcgactgagcgtctcgctcaggtgtacaccaccgtgcagagatggcagctctcctggaggtgtacccaagaagcccaccatct

SEQ ID NO: 931702 - DNA, 120 bp, Artificial Sequence
  ENSG00000227733_40 (sequence is synthesized)
ttgccgcctccgccatcccagaggcgccgattgggctgagctgcaaataactaagagagagagaggccaagccaagtcgtggcgtttgtgtgcggcacacgtcgtcagctgacacaggcg

SEQ ID NO: 931703 - DNA, 120 bp, Artificial Sequence
  ENSG00000227733_41 (sequence is synthesized)
tggccgcgaggttgggaggggggtgagcggcgggtgaggtcctccaggaccgcccatttattgactgggtggtacaggagggcgatgttcgcttacccaacaacgacagcaggtggagta

SEQ ID NO: 931704 - DNA, 120 bp, Artificial Sequence
  ENSG00000227733_42 (sequence is synthesized)
ggcactaatggaaaactgtggccggtgccctaagcagaaggcaggtgtaaaaatcactaggacatcaaagggatagtaccacagtcaaatcccgcaatgtctgtctacactctaccaagc

SEQ ID NO: 931705 - DNA, 120 bp, Artificial Sequence
  ENSG00000227733_43 (sequence is synthesized)
aattgtgcaccctcccccttttccattcagtactcccaagaagggttgggacgaaccctgtgtccactgtaaagctcaggggagagcgggagcgagggaggtgaagtgcacagactgggc

SEQ ID NO: 931706 - DNA, 120 bp, Artificial Sequence
  ENSG00000227733_44 (sequence is synthesized)
agaggcggcgggcagaactgcgggggtgagagggcgcggtggctgcggggcgggagcctctgctgaaaggaggcctgggttgtcctgtgggtgactgttggtggaatctttggcagcgag

SEQ ID NO: 931707 - DNA, 120 bp, Artificial Sequence
  ENSG00000227733_45 (sequence is synthesized)
tggttggaagaatggcgacgggcgagcagaggggaaggtggtgaccctgagcgtctggctaggggagaggaggctgtactgacactcgtctcctcttacctggcgagggacagaccgtgg

SEQ ID NO: 931708 - DNA, 120 bp, Artificial Sequence
  ENSG00000227733_46 (sequence is synthesized)
tcaagaagggagctctccctggttgaggctagtccaccacactccagctgctctgacccctgcgatttccctacacgcggggcgcttgtctgcggtggtgtttgcgctacccgggggctg

SEQ ID NO: 931709 - DNA, 120 bp, Artificial Sequence
  ENSG00000227733_47 (sequence is synthesized)
ggttcacgcaggctcctgacagtccttggctcaccgcccccgacgcggatatcgccgctagagacccttccgccaccctcctagggatcttgagggccttccttgttgttccgactgaag

SEQ ID NO: 931710 - DNA, 120 bp, Artificial Sequence
  ENSG00000227733_48 (sequence is synthesized)
ctcacgaacagacagatgtgagctctctgtcttttacacgttgaatttggctattggcaaaaaaagccctgacccagagcttgggactcctcccggcctgcacacgacttcccgactctt

SEQ ID NO: 931711 - DNA, 120 bp, Artificial Sequence
  ENSG00000227733_49 (sequence is synthesized)
gcctcctagcgcggctcttggctagcgggcgggcagcctccacccagcgtagaaccgcggcagccgcagcccccgcaggctggcggtcagacactagcaggaaaagggacacaaggcctg

SEQ ID NO: 931712 - DNA, 120 bp, Artificial Sequence
  ENSG00000227733_50 (sequence is synthesized)
cgtggtgggaaagcatgggagacgtcgctttcccaccaggcgagaaggtctccctacagtctttggacagaagatggagggaggcaccccttccaggagcaaggcggctgctcctgaggc

SEQ ID NO: 931713 - DNA, 120 bp, Artificial Sequence
  ENSG00000227733_51 (sequence is synthesized)
ctggctccgcacggaggctcctgggtcccgcgcgccctctccctaccggttatagccagagctgcttcacacatctcagccggcttcctcttccgcctctgccacctcttcctccccagc

SEQ ID NO: 931714 - DNA, 120 bp, Artificial Sequence
  ENSG00000227733_52 (sequence is synthesized)
tcgtgggaaagacctagcctcctctccaacacttggagagggagttggatgaacgtctcctaaccccagtaggacagagatcctgaggtaggaggggaccccttgccttgctgcttcttt

SEQ ID NO: 931715 - DNA, 120 bp, Artificial Sequence
  ENSG00000227733_53 (sequence is synthesized)
tggcaccgctgacccgggcccaggactcctcgctcctcctggaaggcctgggtcgtgtagcccacagaggtggccacgtgggcatctcccccactgctcctcatagaaccggaggcatta

SEQ ID NO: 931716 - DNA, 120 bp, Artificial Sequence
  ENSG00000227733_54 (sequence is synthesized)
tcctgccgggcccactcttacccatgaaagaaacttgggaaatgctcccggggaagccggggatctgggcgctcgaccacttcggtgtgaatcttccgtccgctcatccttccttcggag

SEQ ID NO: 931717 - DNA, 120 bp, Artificial Sequence
  ENSG00000227733_55 (sequence is synthesized)
ggtcttggggagaggagaaatgctcaaggacgatgcgctttgcagcgtctcaagggaaactagatctcaacggataccagaagtctggagcgtcttcctggaggaaggcggcccgaggcc

SEQ ID NO: 931718 - DNA, 120 bp, Artificial Sequence
  ENSG00000227733_56 (sequence is synthesized)
tgcggttgcagggaggcttgcggagcacagcgccctctctcagcctgagctatccagtggcttccagcatcccagctggccgactccacttcctctctcttcctcctactgcgggtcttc

SEQ ID NO: 931719 - DNA, 120 bp, Artificial Sequence
  ENSG00000227733_57 (sequence is synthesized)
attacaggcgtgagcctccgcgcccggcctactgcggctcttctatcctggtgttctttgaatgcctatcttccttttgtgccacagaacctctcacgcccgccacaggttgctcatttc

SEQ ID NO: 931720 - DNA, 120 bp, Artificial Sequence
  ENSG00000227733_58 (sequence is synthesized)
cgcccgccacaggttgctcatttccttggttgttctgaactttaaataagttaatgtatgtaagagtgccataaatgctcagtaattgacatctgttattttcatcagtaacatcatctg

SEQ ID NO: 931721 - DNA, 120 bp, Artificial Sequence
  ENSG00000227733_59 (sequence is synthesized)
aatcatctgtattgtctatttttaacaactgcatttttcattgtccaaataaagtcacatacatttgaacattatataatgattgaataataaaattattctgctattttacaataaaaa

SEQ ID NO: 931722 - DNA, 120 bp, Artificial Sequence
  ENSG00000227733_60 (sequence is synthesized)
ggcgtgagccaccgcgcccagcctacctcattctttaaagggctataaactattcaatcacgctgatgaactagcatttatttgcatattttctcagtgttggacctctagagttagttt

SEQ ID NO: 931723 - DNA, 120 bp, Artificial Sequence
  ENSG00000227733_61 (sequence is synthesized)
gtttccatttatatgttgtgagaaaccatgttgtattgaacttagacatttggctagaagttttatagaatgttttccttgaattagggttctaggcacttcctatatgctaggcaccag

SEQ ID NO: 931724 - DNA, 120 bp, Artificial Sequence
  ENSG00000227733_62 (sequence is synthesized)
tgtaaacactttacaaatatcaacttttaaaattcccatgacaaccccatgagttatagatactattattatctcagttttgcagatgataaacttaggctcagagaggttaagcaactt

SEQ ID NO: 931725 - DNA, 120 bp, Artificial Sequence
  ENSG00000227733_63 (sequence is synthesized)
gtttgagatctcatggttctaattggtagagccaggattggaatccaggatctctgaatccagagtctgtccttaactcatatgcattctgcttcctcataggataggtatatttggaat

SEQ ID NO: 931726 - DNA, 120 bp, Artificial Sequence
  ENSG00000227733_64 (sequence is synthesized)
cttgatagatactgccaagttgtccctgaaaaaggttctatcaatttatatttccacaaactgtatttgagtgttcacccattttcctatttcattaccaaaccctatgttctcactttt

SEQ ID NO: 931727 - DNA, 120 bp, Artificial Sequence
  ENSG00000227733_65 (sequence is synthesized)
ttttaacttacaattaatgcaccattaacatttataatacttagcttttattagacctgtactacaataaaatacataaaagaattcttcatcatttccagattatcatcccagagccct

SEQ ID NO: 931728 - DNA, 120 bp, Artificial Sequence
  ENSG00000227733_66 (sequence is synthesized)
tgaacgccgggtgagctacccggatggctcttccggttctttgtgcggccttcacccagtgagggagcctgtgccccctgcccagtcgctttcggggcgctgaggagcttccgctgccat

SEQ ID NO: 931729 - DNA, 120 bp, Artificial Sequence
  ENSG00000227733_67 (sequence is synthesized)
ttaggactatgggaagaatagggggagattctctagtgatgataatacatgaatgctttaaaagctagaacaggcgtccctgggtggtcttgaactactcaccgttcggttaatagccga

SEQ ID NO: 931730 - DNA, 120 bp, Artificial Sequence
  ENSG00000227733_68 (sequence is synthesized)
gagcaaggccttggaaaatcggagcgattagagcgaagtgcttcggtcaggcagtatctttgaaaataatttggccaatgaaagccctggcattggatgaaagtgctagctgctgggaat

SEQ ID NO: 931731 - DNA, 120 bp, Artificial Sequence
  ENSG00000227733_69 (sequence is synthesized)
gattgtagcagggcattgtaagttaaaaaatcatcttcccattctgttctttgcaaagatatttctgttccttaaatttgttgagggtaagagattgcagattgcttctgtggacttctt

SEQ ID NO: 931732 - DNA, 120 bp, Artificial Sequence
  ENSG00000227733_70 (sequence is synthesized)
ttgatatttgtatctccagtgtctggcacaatgcttgggggtgaggaagaactcaataaatgtttgttggatgaataagtaatatttgtgaaagtgttttgtagactatgaaactgcaca

SEQ ID NO: 931733 - DNA, 120 bp, Artificial Sequence
  ENSG00000227733_71 (sequence is synthesized)
aacgaaagatcacaaggatgattgcttatgaagcccagaaattgaagtggaactcctttcttaatgtaacacacacatacatattacacacatttttttccttgaatagtggctgcattt

SEQ ID NO: 931734 - DNA, 120 bp, Artificial Sequence
  ENSG00000227733_72 (sequence is synthesized)
tttttaatggaacactgggctacttttaaatattgaaatcaaaatgtacatgcccactttttattagcagttgctccatttgctcctccagctttggctggaaaacatctatttgtatac

SEQ ID NO: 931735 - DNA, 120 bp, Artificial Sequence
  ENSG00000227733_73 (sequence is synthesized)
ttagtatctctgtccttggttacccccatccctgccttctcacccatctttagtctgccttatggtcttgcatagattttcaactgttagactgtcaggcttgcaaggatgcattttaag

SEQ ID NO: 931736 - DNA, 120 bp, Artificial Sequence
  ENSG00000227733_74 (sequence is synthesized)
aaatcagtttctttgaaagcacttgaaccaaaagtcaaatggcatgatgtaaaccaatagtctttcaatgaagatatgaaaaccctcaataattacaaataaggaatctaacctattgac

SEQ ID NO: 931737 - DNA, 120 bp, Artificial Sequence
  ENSG00000227733_75 (sequence is synthesized)
accaatttgattacactgtattgatttctacaaaaatattatgagagagcaggctacttatactctactgatcagattacaagtatacttagtaaagacagaaatagtatagccataaaa

SEQ ID NO: 931738 - DNA, 120 bp, Artificial Sequence
  ENSG00000227733_76 (sequence is synthesized)
gcccagtctggtcttgaactcctgagttcaaggaatctgcctgcctcagccttccaaagtcctgggattacagatgtgaccaactgcacctggctgggcagccgttctttagatggtatg

SEQ ID NO: 931739 - DNA, 120 bp, Artificial Sequence
  ENSG00000227733_77 (sequence is synthesized)
tatgtcacatctcttgatagaagattaggtgaccattctcagggcattgaattggcacattttgaccttcttatccaacatttctttttttcccagacagcaagcaacaatagcagcacc

SEQ ID NO: 931740 - DNA, 120 bp, Artificial Sequence
  ENSG00000227733_78 (sequence is synthesized)
gtaatttgtcgttttatatttacttttaaggttttcaataaagtaaaatggagtgatacagtgatgatattctctgcctctctagtcggactttgaatttttattctgtgtgtccagggg

SEQ ID NO: 931741 - DNA, 120 bp, Artificial Sequence
  ENSG00000227733_79 (sequence is synthesized)
tatgacacatcttgaattccaggaggactttgaatttttattctgtgtgtccaggggtgtgacatatcttgagcaaataaaataaagcttacctactccaagtataatagaaacctagaa

SEQ ID NO: 931742 - DNA, 120 bp, Artificial Sequence
  ENSG00000227733_80 (sequence is synthesized)
gacagggcaaggagagttgcttctattactcagtgtagctctcggagtcagatagcaaggaccactggttatacacattgggattccctactgtcagactatcccttaaggttctcttct

SEQ ID NO: 931743 - DNA, 120 bp, Artificial Sequence
  ENSG00000227733_81 (sequence is synthesized)
gatgaaggtttttgcataggtgtgcacttctgcagaggggctggaaactccgccaggtagagtaggaatttttcaacctgctctatggttgtccagttgaggatgtgtttgtgtggtttc

SEQ ID NO: 931744 - DNA, 120 bp, Artificial Sequence
  ENSG00000227733_82 (sequence is synthesized)
taaaacacatcgaggagccatataacaggagccaatactcattttttttttgaatgaatgacttgagaaagcaagctgcttcctcttttctctttttccaatttctcctcaaatcccaaa

SEQ ID NO: 931745 - DNA, 120 bp, Artificial Sequence
  ENSG00000227733_83 (sequence is synthesized)
ggatctttgaatatcactgagttacttgacaggttagtgtccagtgaatttacaagaatttggtttggaaagagcaggctgtcttcctatgtgataaggagtccctagatagcagtgcct

SEQ ID NO: 931746 - DNA, 120 bp, Artificial Sequence
  ENSG00000227733_84 (sequence is synthesized)
tctcttgagaatgcagctaagcacactcacaattgtgcctctgtgcaggggatatcccaagtggccaaaaagagaaagcaaagcatggaaccagctattgagtctgtaattttattgtga

SEQ ID NO: 931747 - DNA, 120 bp, Artificial Sequence
  ENSG00000227733_85 (sequence is synthesized)
aaacttggtaccagtgtgatggtagatcataagtttcttgaggacaaggagtgtgtcattaattttgtgtctccaaggccaagcccaggatttgatgtataggagatctttaaaacatgg

SEQ ID NO: 931748 - DNA, 120 bp, Artificial Sequence
  ENSG00000227733_86 (sequence is synthesized)
tccctgcaatggttaattttatgtgcgacttggctaggccctggtacccagatatttggtcaaagatgtctggatattgctgcaaaggtattttttagaagagattaacatttaaatcat

SEQ ID NO: 931749 - DNA, 120 bp, Artificial Sequence
  ENSG00000227733_87 (sequence is synthesized)
agactgagtaaagcagcttagcctctgtgatggttaattttatgtgccataatgtgaatggacctcatccaatcagttgaaggtcataaggaaaaggctgatctccactgaggaagagga

SEQ ID NO: 931750 - DNA, 120 bp, Artificial Sequence
  ENSG00000227733_88 (sequence is synthesized)
aattctgccagcagactgcctttggactcaaactgcaacatcagctcttccctgagtctccagcctgcccacctaacctgcagattttggacttaccagcctccatgattgcatgagcca

SEQ ID NO: 931751 - DNA, 120 bp, Artificial Sequence
  ENSG00000227733_89 (sequence is synthesized)
attctttatgaatgaatgaatgaatgaatgtcttcaacatctttgctttactctgatgctctcccctacccccacaattccagtgaagtgaggaaaactattttgccaagccaaaacttt

SEQ ID NO: 931752 - DNA, 120 bp, Artificial Sequence
  ENSG00000227733_90 (sequence is synthesized)
ggatctttgccctaaaatcccagagtcttccctttaaatagagagtgaaagccctgatactgacaaggataagacaggggaaagataatttggtgggggggtgttgagggaggagaagaa

SEQ ID NO: 931753 - DNA, 120 bp, Artificial Sequence
  ENSG00000227733_91 (sequence is synthesized)
ttcaccaactcccctcaaaatctctgatttcatatttactgttaatatccaatgtaaaaacagttggcttgatttaaatgtctttgttggtttcccaagccccatcaccaccaccaccac

SEQ ID NO: 931754 - DNA, 120 bp, Artificial Sequence
  ENSG00000227733_92 (sequence is synthesized)
cggctcaccctgccaaggcctgagatgctgaagaccacttttcagcctgatgtaatttctaacagctgagatactaaacactgaaaaatggggtttataatggaaatgctgacagactat

SEQ ID NO: 931755 - DNA, 120 bp, Artificial Sequence
  ENSG00000227733_93 (sequence is synthesized)
taactatagcagcactgctctaataagtggaatggcctatcttaatctctagttcataaatatgcaaatacaagactggagatttgctccaaaaaatgtctctataattttaactgacct

SEQ ID NO: 931756 - DNA, 120 bp, Artificial Sequence
  ENSG00000227733_94 (sequence is synthesized)
ttactgataccaaatgagcctgttgcttcagtttttgtacgctggatataaagtacaggagatccagacgcctgtcggcctaaagtatataaagtttaaactgccagctactaaactctg

SEQ ID NO: 931757 - DNA, 120 bp, Artificial Sequence
  ENSG00000227733_95 (sequence is synthesized)
ggctcagattccatttctcttcacattcacagtctttattgacattttcatttttttttccccagggggtgtaagccgagtcggggcggggcggggggaacaaaccttgttcatccccct

SEQ ID NO: 931758 - DNA, 120 bp, Artificial Sequence
  ENSG00000227733_96 (sequence is synthesized)
tcccccacgacattacttccacattcacagcgcctgcccagccaaaattcatggatcgcctcaaggacaaacaggccatctacactgaattataaatttgagttttatccagttttctgc

SEQ ID NO: 931759 - DNA, 120 bp, Artificial Sequence
  ENSG00000227733_97 (sequence is synthesized)
ctttggaccaaatgggcagcaaatccagtgacttcatatttaataacctagatgtcatttgtactgtgtctttcagcacagagtaaagaattggatggctagcagttttgcagatttttc

SEQ ID NO: 931760 - DNA, 120 bp, Artificial Sequence
  ENSG00000227733_98 (sequence is synthesized)
gaagctgttcagcctggtattcgaactattgatgcagagccaaattgccagcaggggagagatctgtccaacccaggagctaaatgagtcactgagagtcaatctgtttttcccttgctg

SEQ ID NO: 931761 - DNA, 120 bp, Artificial Sequence
  ENSG00000227733_99 (sequence is synthesized)
ctggggtttcctctggccctggcctctctgtctctctgctccagtcagacacagagctgcgggctcagccctcattggctcctatcgcctcccattcccctcctcagccctgcttgctgc

SEQ ID NO: 931762 - DNA, 120 bp, Artificial Sequence
  ENSG00000227733_100 (sequence is synthesized)
agctgttgatggggtctgactggctggctgcggagattcagggcctcaatgacaccatagttgaggccttgctttgacagaaaatgaagacatctttgccttgttgcatttgcttctcca

SEQ ID NO: 931763 - DNA, 120 bp, Artificial Sequence
  ENSG00000227733_101 (sequence is synthesized)
gtaatacatcaggtatctggagagtaaggcccacaagcagagtgtgttgttggggtgcgatgccagttcatcaattcccgacgtccagttttcagagtgctcttctacttttcctaagtc

SEQ ID NO: 931764 - DNA, 120 bp, Artificial Sequence
  ENSG00000227733_102 (sequence is synthesized)
caaatggagtccttggtgccagaatcctgcatgtggtcataaaataacaaaaataaaggtctgtggatgtgctggaggtagtggcagggcagaatgccaccaacataagccaggcttgct

SEQ ID NO: 931765 - DNA, 120 bp, Artificial Sequence
  ENSG00000227733_103 (sequence is synthesized)
ggagtggtcactcttcaagcattggagaaaaattcacagtgcttctaataacatatttttttttccagtagaaacattttatttctaacaacatttacttaaaaacaaaattcttgtatt

SEQ ID NO: 931766 - DNA, 120 bp, Artificial Sequence
  ENSG00000227733_104 (sequence is synthesized)
cttcatgtagggtcagtattcaattgcacaaaaatatgcagccaacttaagaactatatataagattaagacacctggtatttcatggtaaatgattaaattaactaacacagttatatc

SEQ ID NO: 931767 - DNA, 120 bp, Artificial Sequence
  ENSG00000227733_105 (sequence is synthesized)
ctgaactttgccattaggaatgacaattttgttcgatatgcattgaggattgtgggtaatctaaactggtatgagctttttctctttgaaactcaaacagaattaaggaacagcattctc

SEQ ID NO: 931768 - DNA, 120 bp, Artificial Sequence
  ENSG00000227733_106 (sequence is synthesized)
tgcaaacagaatatggagtttgagaacagccacaaaaaattctcttgtagtaagctgaactgccctaggagtactcaggaattagacaactcaggaattagagaattagagaactggaga

SEQ ID NO: 931769 - DNA, 120 bp, Artificial Sequence
  ENSG00000227733_107 (sequence is synthesized)
aatgagggggcgtggatagtagggagagaaaaattgattaattgatttactatatttttcaaatagaagtatctgggaaaataagacaaaacaagcagagttgtttctttttcacagtga

SEQ ID NO: 931770 - DNA, 120 bp, Artificial Sequence
  ENSG00000227733_108 (sequence is synthesized)
agccccagaggggtgaaagctttgttctccctgggtagcaagctcttttttcacatttccgactgcatattccatatttatgatgatttttggtctctctgttcctggcttgctaggtgg

SEQ ID NO: 931771 - DNA, 120 bp, Artificial Sequence
  ENSG00000227733_109 (sequence is synthesized)
caagggcagttagagaaaaaaggcagatttatgaaacacagaaaaatttctgactgaaatcaggcttggatttgtgaatcactgttttttccccctgtggtcactcctgtgatgaggtca

SEQ ID NO: 931772 - DNA, 120 bp, Artificial Sequence
  ENSG00000227733_110 (sequence is synthesized)
actgcttcaatcctttaggttttgtagacaggtttccggattccaggagtcccagaaggtccagggagcgctccccacattttagccagaagtaattaactaaaacataaaggccccact

SEQ ID NO: 931773 - DNA, 120 bp, Artificial Sequence
  ENSG00000227733_111 (sequence is synthesized)
ttctcttttcacactttgagccacagatcatctaattcctagcttgagacatcagatttcagatcattagtgcaaagcatcttccacaggaggcaataaaatgtcactttatgtaactca

SEQ ID NO: 931774 - DNA, 120 bp, Artificial Sequence
  ENSG00000227733_112 (sequence is synthesized)
gctacagttacactgccttcagaaagcaggaatctccctgaaaacaaatttacatgaaaacagtcccattgtttgagaatttatgcaaatgttgcacaaaggggtttgatagtgatttta

SEQ ID NO: 931775 - DNA, 120 bp, Artificial Sequence
  ENSG00000227733_113 (sequence is synthesized)
aaaacttaaatctttatcactgcctcaaagatatcctgagaaacttggttacctctaaagaattccattgcacttattttttaaaatgcctataatatagagttgttttaaaaattttcc

SEQ ID NO: 931776 - DNA, 120 bp, Artificial Sequence
  ENSG00000227733_114 (sequence is synthesized)
ctaaactctaaacttctttctcagcttcaaagccttccgtaatgaatatcctaaagagagcctagtgcatattggtttaacacttactaggatcactcattactagttaagaaaattgaa

SEQ ID NO: 931777 - DNA, 120 bp, Artificial Sequence
  ENSG00000227733_115 (sequence is synthesized)
gataacaaccatagcaccaagtattttgaacaacataaaatgtttctcccgtgggtgtagctcttagggaccgcatggggatacacacccctcagtgctcaatcagcaaaagatgaagct

SEQ ID NO: 931778 - DNA, 120 bp, Artificial Sequence
  ENSG00000227733_116 (sequence is synthesized)
gtaagtgtctcaatccatgttgattgactctgaactccccagtgttaggaatctggatgtgtccattactgcatgttcaaacaatgaactgcctgcaccagaaatctgatttctgtagaa

SEQ ID NO: 931779 - DNA, 120 bp, Artificial Sequence
  ENSG00000227733_117 (sequence is synthesized)
agacattaaggggctgggtgaggaatagggtgtcaaccaaacgttgtgatattttcctttgattttcactttctttaaattcttttccatttactacctagtgactgtctggcattggta

SEQ ID NO: 931780 - DNA, 120 bp, Artificial Sequence
  ENSG00000227733_118 (sequence is synthesized)
aggttcaaacaatacagaagtgtataaagtaagaattgaaagtctcttcgctgctctaatctcactcctcagaggtgatcactggacctgagtgagcagaaggcttttcagaattacagc

SEQ ID NO: 931781 - DNA, 120 bp, Artificial Sequence
  ENSG00000227733_119 (sequence is synthesized)
agatttctccagtcagagtttggtccttcttctgactctcaactcctgatggcatcagaacacaggcagcatcaagatcaggctcaagatgcaggattttatcatccaaatcaggcccac

SEQ ID NO: 931782 - DNA, 120 bp, Artificial Sequence
  ENSG00000227733_120 (sequence is synthesized)
atatggatgaaacccttcaggtttttctattctcattaacagtgtcctcaagatctttgcagcgtttgctcattgtctggttccaaaaccatggccacatgttttagatagttatggcag

SEQ ID NO: 931783 - DNA, 120 bp, Artificial Sequence
  ENSG00000227733_121 (sequence is synthesized)
tgacagctgacaaatgacattccaagaacttagccagagcccagattgtgccctgctgtgggaatttctcctcatagatttgtccaacaactctgctctggagaaaatgctcaggtgatg

SEQ ID NO: 931784 - DNA, 120 bp, Artificial Sequence
  ENSG00000227733_122 (sequence is synthesized)
cattcccagtggtagctcagttcccatcaactcaccactggtgcctgcattaggatgtttttctttcttcaggtattctgcacatctctcaggaaacccagatgaaattgagtgcctgct

SEQ ID NO: 931785 - DNA, 120 bp, Artificial Sequence
  ENSG00000227733_123 (sequence is synthesized)
gcccacatcagcaacccagactgagtgctgggctactccaaaatggaccttaggaccggatatatgcctacagctcatgggtaaggcctttctgtagcaatacctggggggatttcatca

SEQ ID NO: 931786 - DNA, 120 bp, Artificial Sequence
  ENSG00000227733_124 (sequence is synthesized)
cagaagtgacttgtttggtctctgattcttgcactcaggcacaagacaacctgacatttcaggagatggtctgtcagaattggatctctgagtggggtggctcttgatagggatccctgt

SEQ ID NO: 931787 - DNA, 120 bp, Artificial Sequence
  ENSG00000227733_125 (sequence is synthesized)
tattcactgttctatttttcctgaagtcagttcagtgtgtagcatccagaattgaacaaaacacccccgatgtgacctgatagtgcaaagtaaactatcatctccttcattctaggtatt

SEQ ID NO: 931788 - DNA, 89 bp, Artificial Sequence
  ENSG00000227733_126 (sequence is synthesized)
tagtgcaaagtaaactatcatctccttcattctaggtattatgtttctattaatgcagtctaaaggtaggatatgagttgcagggatgg

SEQ ID NO: 931789 - DNA, 120 bp, Artificial Sequence
  ENSG00000227733_127 (sequence is synthesized)
acacagcttcttcaggaaatgctgacagcatggtatacacatggcttccatgtttgtcatggttccaaagtttgcttttgaaagagtttaatttctttctttctttctttctttctttcc

SEQ ID NO: 931790 - DNA, 120 bp, Artificial Sequence
  ENSG00000227733_128 (sequence is synthesized)
atataccctcccataagagcaggaaaggggattcataaagacgttcttctgatggggaatgctctacgaggccgccttcacatgtgtggaagatgatcaaagtatgacatttcttctacc

SEQ ID NO: 931791 - DNA, 120 bp, Artificial Sequence
  ENSG00000256306_0 (sequence is synthesized)
aacagtcatgcagctgtagaaaatgcagcagaggggaaggccacaggatcagtgggcagcctggcatcatgattaagtggagataccatcacagaacacctgagacttagagctacacac

SEQ ID NO: 931792 - DNA, 120 bp, Artificial Sequence
  ENSG00000256306_1 (sequence is synthesized)
aattctgacttaccttaggcaagtgcctgaaccaatgggttcctcagtttctcctttctgttggaattgggtaatgttgatattcaccaacctgctctgcagcataaaagtctaatggca

SEQ ID NO: 931793 - DNA, 120 bp, Artificial Sequence
  ENSG00000256306_2 (sequence is synthesized)
agaacacctgagacttagagctacacacaacaggctgtgcggtgatgtgctgggcaacagaacatcgatttcgacgtcaaaagaccttcatagtgcttccgaattctgacttaccttagc

SEQ ID NO: 931794 - DNA, 120 bp, Artificial Sequence
  ENSG00000256306_3 (sequence is synthesized)
caaccactgaagttcattttggaatcatggccacccagaagaggaaaggggtgatcatgtgtctcaaagaagagataactttgagggagaggatgaaaactgcaaagacccttgggatta

SEQ ID NO: 931795 - DNA, 120 bp, Artificial Sequence
  ENSG00000256306_4 (sequence is synthesized)
aatgaaatctgctgattctactcttttttcatgaatttctgtatgatatttagcaattagaatgtttgactggcaatggccaggtagatttcaccattatgtaacaaagagaataaaaaa

SEQ ID NO: 931796 - DNA, 120 bp, Artificial Sequence
  ENSG00000243410_0 (sequence is synthesized)
gagtggtcatcagacttcaatttcacagactagaattgagaaatggaacaaaaccttgggataccagccttccattttgtgcatataataaacgagtaaaaggccgggcgcggtggctca

SEQ ID NO: 931797 - DNA, 120 bp, Artificial Sequence
  ENSG00000254814_0 (sequence is synthesized)
ggctgtatctgggaaccacagacagaatcatggaactgaccatcttcagtctcaaagtgctgccctcaccactacacccaggggcaggtggtcttcgggggaaaggcggttccagttcct

SEQ ID NO: 931798 - DNA, 120 bp, Artificial Sequence
  ENSG00000254814_1 (sequence is synthesized)
tctcccaagccagtgaggaagtcaatcctgcgaacaactgcaggaacggccttgggagtggatccttcctcagcccggctccaagacaactgcagccctgtgagaaaccctgagtggagg

SEQ ID NO: 931799 - DNA, 120 bp, Artificial Sequence
  ENSG00000254814_2 (sequence is synthesized)
accaagccaagcctcaaatcgtgacttggaactgggagacaacagatgctgttggaagccactgagctctgaagtagtttgttacacagtgacagaatctaggatctggggaaggtaaac

SEQ ID NO: 931800 - DNA, 120 bp, Artificial Sequence
  ENSG00000254814_3 (sequence is synthesized)
agtctgtgctgcatccatgtcatcagccacccaagaaaaaccagttactccacctagctcatggtggcggcatcctccctgcaatggtgcatggggggcagtcctttcccctgcagggtg

SEQ ID NO: 931801 - DNA, 120 bp, Artificial Sequence
  ENSG00000254814_4 (sequence is synthesized)
tcattgccacccccatcctcatcctggaggccagtccaggctccgatatgagtgactaggggtgaggtaggggtggcagaagggagatcaaactggagcattccagatgcctactactgc

SEQ ID NO: 931802 - DNA, 120 bp, Artificial Sequence
  ENSG00000254814_5 (sequence is synthesized)
cctcacacaacggggcaactgtgctctccaactcctccccttggcagagaaactggtcctgcagtttcaggactagacgagcgtggggtagtggcaataaaggggcttgtatgagaagtg

SEQ ID NO: 931803 - DNA, 120 bp, Artificial Sequence
  ENSG00000254815_0 (sequence is synthesized)
aggtgagttctgggccagcccagcctggaggaggtgtgagaggctgagccactgctcagcttagcggggggaccacttagtgaccaacaccctgagggaggccccagcatcccctaccta

SEQ ID NO: 931804 - DNA, 120 bp, Artificial Sequence
  ENSG00000254815_1 (sequence is synthesized)
gcctggcagcagcagcgggataaataggggggcactgctgcctgtgagccagcccagcatagccatgggtgtgtgggggaagcagacagagacagggtcttgctccgctgtccaggctgg

SEQ ID NO: 931805 - DNA, 120 bp, Artificial Sequence
  ENSG00000254815_2 (sequence is synthesized)
tcccacttccgcctcctgacttgctgaaactacaggcacccgcctccaccgccaggcccagcccacagctcctttgacctcagtgacaggcactcacctacctgacccccaaactgaagc

SEQ ID NO: 931806 - DNA, 120 bp, Artificial Sequence
  ENSG00000254815_3 (sequence is synthesized)
ctcacttttcccagccgtgtccacaccctctgggctaccccattaccatgacaagtattccctctgctccaggagaaaagccaggtcccagacctgacccattaaaacccaatcattcca

SEQ ID NO: 931807 - DNA, 120 bp, Artificial Sequence
  ENSG00000254815_4 (sequence is synthesized)
tttcagagaggtcgcttgggtccatcagagtctctgccgtcactacctgcaagaggggaccggaagccagtgggcaggggctgggtgctcccctacagcacctctcctctttgacctcac

SEQ ID NO: 931808 - DNA, 120 bp, Artificial Sequence
  ENSG00000254815_5 (sequence is synthesized)
ctgtgctttgaggcctcctgattcctccctgctggagcccagagttccagaggcacctgagcagggcaggcttccaggcaggccagggcgccccagcagaggcacccgacgagatgggga

SEQ ID NO: 931809 - DNA, 120 bp, Artificial Sequence
  ENSG00000254815_6 (sequence is synthesized)
gggctggggagggcagcctggggcaggagggcttgggggacaggctcacctccacactgccagtctgggatcgtagcatgcggcccacccacgaggagcgggccagctgcaggaggcagg

SEQ ID NO: 931810 - DNA, 120 bp, Artificial Sequence
  ENSG00000254815_7 (sequence is synthesized)
acttctgcaagttctgcagctcggcctccatctcctggagcgtgcgggtggtctgcagcagccgctcctccaggtgctccttctcctgctccgagagggcctgtggttggtggtgggggg

SEQ ID NO: 931811 - DNA, 120 bp, Artificial Sequence
  ENSG00000254815_8 (sequence is synthesized)
gtgtcttctgcagaaggcccccaggccagccccagcctggctccccaacaccaggaccctgcccactccctgtgcccctgcctcacccactgggctcgctccttctgttccttcaactcc

SEQ ID NO: 931812 - DNA, 120 bp, Artificial Sequence
  ENSG00000254815_9 (sequence is synthesized)
tggatcagcttctggacctggttctgcaggagtttctcctgactgtgggagctcctggaggaggggtgacctcagcagcccccaccctgctcaggcaggggttcctaatgtcaggtcagt

SEQ ID NO: 931813 - DNA, 120 bp, Artificial Sequence
  ENSG00000254815_10 (sequence is synthesized)
ggcgaaggaggggagaaggaggggctccactgccaccttggccccaagggcacacagtacagccccgctggggctggccagcctccggctggtctggacaagggtctagcacccatccac

SEQ ID NO: 931814 - DNA, 120 bp, Artificial Sequence
  ENSG00000254815_11 (sequence is synthesized)
atgcgcagggttagggtggaggctatagcgtgttaacttaggatcagggtggagggtcagcgcgggcaaggatgagggtaaggatctgcctcagcggttggggttggggtcagacagaaa

SEQ ID NO: 931815 - DNA, 120 bp, Artificial Sequence
  ENSG00000254815_12 (sequence is synthesized)
ccaggagtccgggcgaggacagggcggggttgggttgggctggggactgtgctgcagacctcttgggcggaagccccgccacctcttccaggatgtggcagagccgggcgtcctcgccat

SEQ ID NO: 931816 - DNA, 120 bp, Artificial Sequence
  ENSG00000254815_13 (sequence is synthesized)
agcagccgcagtgtgcgagggtccagggactcaagagccaacctgcagcggcagcagaccctgctgcttactcaggccggcccctggccacctggcccaggaggctcaccagtcctccct

SEQ ID NO: 931817 - DNA, 120 bp, Artificial Sequence
  ENSG00000254815_14 (sequence is synthesized)
ctcctccttactgcgggtcggcagagcagaccaccggtgcggggtggggcgtggtgtctggcaggcacgtgggagtctcgggggctgcaggtgcgcctgctggaggtcccaggtgaccac

SEQ ID NO: 931818 - DNA, 120 bp, Artificial Sequence
  ENSG00000254815_15 (sequence is synthesized)
tgaccgactcttgctctgtgggggacaggagagcctcttcctcggtttcttcaacctcctggccagacttgggggccattctcaatgttcttcgggagctgggaggggtggggggcccgt

SEQ ID NO: 931819 - DNA, 120 bp, Artificial Sequence
  ENSG00000254815_16 (sequence is synthesized)
ctgccgtgtgcgcctcgtgtggccacacaggttggagcagcccaggcgtcaccacttactcacagagcgttgctctctgaagggacccacatgtgggtgtccacacccgtgtgtttctga

SEQ ID NO: 931820 - DNA, 120 bp, Artificial Sequence
  ENSG00000254815_17 (sequence is synthesized)
ccaggctggcgcagcaggtcaccacccgacatgtccctggcgtgtacccctgccacccaggtgctggccctttgcctgtgatgtggtgtccctctttctctctcttgtccccccagctca

SEQ ID NO: 931821 - DNA, 120 bp, Artificial Sequence
  ENSG00000254815_18 (sequence is synthesized)
gggccctacccccagcactcacctgaggcccgacctccaagcaggcctgggagggaagggctgtataccgttgccatggataccagcacccagaaggggtggggctgtttgttaccagga

SEQ ID NO: 931822 - DNA, 120 bp, Artificial Sequence
  ENSG00000254812_0 (sequence is synthesized)
ggctgggtgtcccagttgttcagggtgtggtaagcggccttcagccatcagctgcaactcgccagggtcacacccttccctgggacagcccacattgcaaagtcctggacatcctggtcc

SEQ ID NO: 931823 - DNA, 120 bp, Artificial Sequence
  ENSG00000254812_1 (sequence is synthesized)
aaccgaggacagccctgaggaccacttctgtggcagagctccctgtgggggaccagtagccgctgtgcttgatggcatcacagccccactcctgcctcttgtgtcttcccctccacaggt

SEQ ID NO: 931824 - DNA, 120 bp, Artificial Sequence
  ENSG00000254812_2 (sequence is synthesized)
gtggcagtagtggccatcttgagggacagacaccgggagaaaacgagtgatgcgtgcaaggaggggcatcgctgagcccacacaagactcaagatggatgagacagaggcggcctcaggt

SEQ ID NO: 931825 - DNA, 120 bp, Artificial Sequence
  ENSG00000254812_3 (sequence is synthesized)
cctcaggtgcctgcaggtggagagagaaggtaggggtggcctggaggcaggtctcttctgagtatcacaaagcacatccaaaagtaaatgatgccgggtgtggtggctctcgcctgtaat

SEQ ID NO: 931826 - DNA, 120 bp, Artificial Sequence
  ENSG00000254813_0 (sequence is synthesized)
ggacaaacccacccgagtcactctactgctgtttcctgtgtccacatggtaaactctcagcttctggccaaagaccttggtggaccctgctgacttgctcactactggcaagcaaagtgt

SEQ ID NO: 931827 - DNA, 120 bp, Artificial Sequence
  ENSG00000254813_1 (sequence is synthesized)
tcactgatgaatgaacaattacatttacccacagactgaaatatgatgttattttgttttgactgaaattccaactcactgtgagaatactgtgaaaaaaatcatgagaagtatcctcat

SEQ ID NO: 931828 - DNA, 120 bp, Artificial Sequence
  ENSG00000254813_2 (sequence is synthesized)
aggtgagtcttttcacacatctgcactagtgaatatctgaattttaaaagccactccagacctacataggtgatgaatgaagaagagtgcccttccatgaacacatgtgctggagacgtg

SEQ ID NO: 931829 - DNA, 120 bp, Artificial Sequence
  ENSG00000254813_3 (sequence is synthesized)
ttgaatttcttccccctcagcataatcagaggaggtgaccccaagcaccttagagaccatgggaagttcctaatgccggcctgatgcagattctcttctccacggagcaccatggccgct

SEQ ID NO: 931830 - DNA, 120 bp, Artificial Sequence
  ENSG00000254813_4 (sequence is synthesized)
gggctctgccttccacacagaacgatgtgtacttgaaaacagtacactcttgcacagctgtccctggagcttccccgtggagctgttaaacttgccctccgctggctgttttccacaaag

SEQ ID NO: 931831 - DNA, 120 bp, Artificial Sequence
  ENSG00000254813_5 (sequence is synthesized)
cagttcttgatggccgctccacacctttctcaccacatctcacaggctgccctgctgagccaggtctccctggaacccggggctcctgcgcaggcccccattttgctccagaacacccag

SEQ ID NO: 931832 - DNA, 120 bp, Artificial Sequence
  ENSG00000254813_6 (sequence is synthesized)
gaaggcggggcttgggctggaatggggacaccgattaccctctgttcaggcctttggtgccagctgaggtcgatactggtgccaggatcgagactgtgcgcatcccatcgagagcgggca

SEQ ID NO: 931833 - DNA, 120 bp, Artificial Sequence
  ENSG00000254813_7 (sequence is synthesized)
gatgtgggggcgcactggaccgggcctcccaggctgacacccattcacagcagcctgagcctaatccgccactgctcgccttcctccgacgtctccacctaaaccatccttctgcacatt

SEQ ID NO: 931834 - DNA, 120 bp, Artificial Sequence
  ENSG00000254813_8 (sequence is synthesized)
gtgacccatcactccgccctttgtccacacatctccttccccacacccacaacgcggtggtccctgccccacaatgcaacggaaaccttgcggagtgctaggcggaagctgcgaggcctg

SEQ ID NO: 931835 - DNA, 120 bp, Artificial Sequence
  ENSG00000254813_9 (sequence is synthesized)
tgtagacactgcctccgcagggctggcgcactcctccgagggccgactgaggggtgggttttttaagttgcaaaataaaagttatcgcctgtgggccctgaaggcctcttttccactgga

SEQ ID NO: 931836 - DNA, 120 bp, Artificial Sequence
  ENSG00000254810_0 (sequence is synthesized)
tggtgatggccagggctccatcctaagcccttttcccttgggaacactatggcctcattgctgtaaacaccccattgctctgatggcccacatctctgtctccagccccacctctcctga

SEQ ID NO: 931837 - DNA, 120 bp, Artificial Sequence
  ENSG00000254810_1 (sequence is synthesized)
aagtccaattctgctacccagaggccttcccaggtagagggctaaaggtccccagggactggagaattcagtgatcagccaggctgcagatcaaggttgaacttggaagaaaaccacacc

SEQ ID NO: 931838 - DNA, 120 bp, Artificial Sequence
  ENSG00000254810_2 (sequence is synthesized)
gaactccagctctccctggcctcctggttcccaggatccagtctcactccaccccaccctacctcacctcccaccaagctgccctggaaagagtctggcctctgggaccagaaacacggg

SEQ ID NO: 931839 - DNA, 120 bp, Artificial Sequence
  ENSG00000254810_3 (sequence is synthesized)
cctgagtctaggttctgctgcttcctcactgtgggaccaaggccaagaccgtcacttagctgcacctctatttctgcatctgtaaaatggggtcataatcatcgcccacacccccaaact

SEQ ID NO: 931840 - DNA, 120 bp, Artificial Sequence
  ENSG00000254810_4 (sequence is synthesized)
cagcactgctcattcgttcggccagagtggcttgggcatctgctctgtgctgggccctaggccctgcgggatacagggaacagttggacagagcctctgtctatggggtggagagagggg

SEQ ID NO: 931841 - DNA, 120 bp, Artificial Sequence
  ENSG00000203506_0 (sequence is synthesized)
ttttcattcatttagtgatgtcccctttatgcactgcagtgaaaataaaaatgacttttactcccaccatactgcagggagctatgactcatatttttagaaactgatcttcctgggact

SEQ ID NO: 931842 - DNA, 120 bp, Artificial Sequence
  ENSG00000203506_1 (sequence is synthesized)
tttccacctgtatatatttctcccaaccagcttggattttgaataaggaaccaggttttttggctttactattgaacattttaaatcataaacattgattcctctacataattgattcta

SEQ ID NO: 931843 - DNA, 120 bp, Artificial Sequence
  ENSG00000203506_2 (sequence is synthesized)
attattaaataaagctggacgattattgatgaaacatattctatttattttcccaggaatgtaaagaatatactgaataaaaacaaaatccctagggaataatagcaggtaaatttattg

SEQ ID NO: 931844 - DNA, 120 bp, Artificial Sequence
  ENSG00000203506_3 (sequence is synthesized)
ggctccaaggttcaaggcctaatctgtagctacagcacatcagggaggaaggaattggctacaaagaagcacaaggaatcatttgggggtgacagaaatatccactatattgactggtgg

SEQ ID NO: 931845 - DNA, 76 bp, Artificial Sequence
  ENSG00000203506_4 (sequence is synthesized)
atttgggggtgacagaaatatccactatattgactggtggtggtctcacagttgtacacaaatgcattgatttgta

SEQ ID NO: 931846 - DNA, 70 bp, Artificial Sequence
  ENSG00000203506_5 (sequence is synthesized)
gcaatttgtaaatttttaagaaacgccctttgttgtacacaaattagacttcaataaagttagccttaaa

SEQ ID NO: 931847 - DNA, 120 bp, Artificial Sequence
  ENSG00000203506_6 (sequence is synthesized)
tgttgtacacaaattagacttcaataaagttagccttaaaacagaaaactagaggaaaggagaactggctcaaattttctgtacttttctcctgtaaccacccctcatttcctccttgag

SEQ ID NO: 931848 - DNA, 120 bp, Artificial Sequence
  ENSG00000203506_7 (sequence is synthesized)
cagtcatggaatattatggtggtaattgcttccaactggaaccagttatcaaaatgtggcaggaaaatctggcctggtgaagaaagagaaggtggcgaagctgactcagttcaagttcaa

SEQ ID NO: 931849 - DNA, 120 bp, Artificial Sequence
  ENSG00000203506_8 (sequence is synthesized)
gatctgctattaatgtgctgtcactgaacacaaatcattacatttccctgagcttcagttttgtttttcaaattggaataattggataattagatctctaaagcatacatcatcagtaga

SEQ ID NO: 931850 - DNA, 120 bp, Artificial Sequence
  ENSG00000203506_9 (sequence is synthesized)
cccttatagagtaaacagttacgtaaatgcaagtcattttgatttttcacagaataggatccctttaaaatagatctatatcaagtctcatccacaattattttctcacagctctgtatt

SEQ ID NO: 931851 - DNA, 120 bp, Artificial Sequence
  ENSG00000203506_10 (sequence is synthesized)
atttgactgacacactttgaaaacatagtttccagagatctcacatatttattttatatttatctctttaacaagctagaatttatactgatatatgagataaggctattagcaaattta

SEQ ID NO: 931852 - DNA, 120 bp, Artificial Sequence
  ENSG00000203506_11 (sequence is synthesized)
atttaatttttctacagttttcaaccagttgttcccgtgctaaatagtccatccttctcccattgatttattgtatcaacttaataaatttttattttatttttgtttcataatatgtat

SEQ ID NO: 931853 - DNA, 120 bp, Artificial Sequence
  ENSG00000203506_12 (sequence is synthesized)
acattgtggaatggctaaacaaagctaattaatatatgcattgcctcacatatttatcattttgtggtgagaacatttcaaatctactcttccagcaattttcaagtatataataaattg

SEQ ID NO: 931854 - DNA, 120 bp, Artificial Sequence
  ENSG00000203506_13 (sequence is synthesized)
ggcggctcttctttcttccactctgagacaagaacacatgcgcttttcctgtaagtgttgtctccccagttattctggagaccatccagaagagaatgagaataaagaaaccaacagaag

SEQ ID NO: 931855 - DNA, 120 bp, Artificial Sequence
  ENSG00000203506_14 (sequence is synthesized)
accttctctgagcactagctggaacacggcggctcttctttcttccactctgagacaagaacacatgcgcttttcctagtttcgctcttgtggcccagtctggagtgcagtggcaccatc

SEQ ID NO: 931856 - DNA, 120 bp, Artificial Sequence
  ENSG00000280095_0 (sequence is synthesized)
ctgctgtttggcaccgggagatgaatcacttgcttttcaaattagaatcttccttgctgtcagaaatgtttcttctctacaaggaaatggagtcccaggcggagggtacctcggagcaca

SEQ ID NO: 931857 - DNA, 120 bp, Artificial Sequence
  ENSG00000280095_1 (sequence is synthesized)
ggaagtgccacccaggcagccaacacctgctcagcgggcggatggccttgccgactcggctttgctcccgggagcctcctggagaagaagccacagggagacggacagccctgggcggct

SEQ ID NO: 931858 - DNA, 120 bp, Artificial Sequence
  ENSG00000280095_2 (sequence is synthesized)
ccagcttgccagctccacatccaaggtcctccttctggggtggggttacaatctgttcaaagcatatgcccagaataacatttttgaaagtctttaaaaatggggtaaagctgacgtacc

SEQ ID NO: 931859 - DNA, 120 bp, Artificial Sequence
  ENSG00000228329_0 (sequence is synthesized)
actatggcatggaccctcatcctcgagccccactactcagaggagctgggaagaatttccacccttcctagtggcaagtctcactgtgagagcggagtgccaccaggcaaacagggcaga

SEQ ID NO: 931860 - DNA, 120 bp, Artificial Sequence
  ENSG00000228329_1 (sequence is synthesized)
aagactgctttaaggagaatccttatattgggggttatgaagtgcaatacaccctcatcctcacgctaacactggtaccatgtagcccaagcttgtctaacctgcagcccgcgggctgtg

SEQ ID NO: 931861 - DNA, 120 bp, Artificial Sequence
  ENSG00000228329_2 (sequence is synthesized)
tatggcccaggacagctctgaatgtggcccaacgcaaatttgtaaactttctaaaacattatgagatttttttttctcatcagctatcatcagtgtgagtgtatgttatttgtgactcaa

SEQ ID NO: 931862 - DNA, 120 bp, Artificial Sequence
  ENSG00000228329_3 (sequence is synthesized)
gacaatccttcttttccaatgtggcccagagaagccaaaagactggacacccctgatgtggccctttcatccatagtagcctattttgtcctaaagacggtcttgtgcagtgagtaggcc

SEQ ID NO: 931863 - DNA, 120 bp, Artificial Sequence
  ENSG00000228329_4 (sequence is synthesized)
aggcctccccactaccacagtttacaggcaaggaatgtgatatttcataggatgaccctgactggcacctacattgctagccaaagaatggcacaaagatgtggacagaagagacaacct

SEQ ID NO: 931864 - DNA, 120 bp, Artificial Sequence
  ENSG00000228329_5 (sequence is synthesized)
gcttccacagtaacacaaggacaaagggtgtatgtagatatgcacgtggtagcaggttctactaaaggaacctggaccgaccattctcactcacattctttgggagctgtattctaatac

SEQ ID NO: 931865 - DNA, 120 bp, Artificial Sequence
  ENSG00000228329_6 (sequence is synthesized)
tttcagaaaagccatgggaacacaccagagtgactgctcgagtaaataagtagcataaacagcaagccaaaccattgatgtacacatcactgggcccaatactatgaaatcccacataag

SEQ ID NO: 931866 - DNA, 120 bp, Artificial Sequence
  ENSG00000228329_7 (sequence is synthesized)
aaacttgaaagtgaaagctggaattctgaggatactggttttgcttaataaacagcatttcaacagttattgtcatgatattgctactgatgctgaacaaagacccaagaaccagggtga

SEQ ID NO: 931867 - DNA, 120 bp, Artificial Sequence
  ENSG00000228329_8 (sequence is synthesized)
tgtttagcatgggctggcctcagcaggactgaaaggacatcaataagggagaacagagagaaggaaggaggacaagtgccaactttgagcaggcctgctatagattactgtcttccccaa

SEQ ID NO: 931868 - DNA, 120 bp, Artificial Sequence
  ENSG00000228329_9 (sequence is synthesized)
attgaagctttatgatgtgacttctctggcggatgggaacaatccctcttgtctctaaagatggaagccaagtgcctctcagtgcccctctgtctgacttactttttaatctgttcctca

SEQ ID NO: 931869 - DNA, 120 bp, Artificial Sequence
  ENSG00000228329_10 (sequence is synthesized)
cgtgactgctctctccttggaaggacggcaggagccatggcgctgtgaactcaaacttcagggagcttcagaccctcctgcttgtgaccatacccatgcctgggctcttgactatttaaa

SEQ ID NO: 931870 - DNA, 120 bp, Artificial Sequence
  ENSG00000228329_11 (sequence is synthesized)
tgtgttttgaaaacaactctcattatagaaatgaaaagcctgaagctttctcagcaaaaaaggtttaactgatgatactctacaaagaataaatacatcaatctaattgaaccaaccaaa

SEQ ID NO: 931871 - DNA, 120 bp, Artificial Sequence
  ENSG00000228329_12 (sequence is synthesized)
tgaattacattgagatcttcagaggacagaaacttaatctcgagttagagacatgctgtcattaccaaaaccacgtatagagcatctctcctcagtcagacaagaaccaaaggcaactga

SEQ ID NO: 931872 - DNA, 120 bp, Artificial Sequence
  ENSG00000228329_13 (sequence is synthesized)
agggaaggaatctgagcttgtattgttggtaggcaaaggtttataaggcagagaggagtgtggtagttctattagatgtgtagtacacctggaagtagacaattaaaaacttggaacact

SEQ ID NO: 931873 - DNA, 120 bp, Artificial Sequence
  ENSG00000228323_0 (sequence is synthesized)
attcggggcttgcgggagcacctgggaggctccacccggagccagacactgcctgcccccacgcccctccaggaccctcgaaggagaaggaaatcgggactggcccagcgtcccgtgctc

SEQ ID NO: 931874 - DNA, 69 bp, Artificial Sequence
  ENSG00000228323_1 (sequence is synthesized)
ggacgagcgagggcgtcactcattctgtcccccgcggaaggttggagtgcagtagcacgatttcggctc

SEQ ID NO: 931875 - DNA, 120 bp, Artificial Sequence
  ENSG00000228323_2 (sequence is synthesized)
aaatgaaaagctttctaggaggaagtcctaagtgaacaatgatgcatgaggatgcaatcttacaggcaaggagcccagtgataacaaatggctgtagatgcttttcctccatcaagcttc

SEQ ID NO: 931876 - DNA, 120 bp, Artificial Sequence
  ENSG00000228322_0 (sequence is synthesized)
tgcgagcaaagttcctatggcatccacttaccagggcaggaaaccctacttccaccagacatgtatttgtttattcactcaggcaggtggtatgttggaagaagagtggactttggaatc

SEQ ID NO: 931877 - DNA, 120 bp, Artificial Sequence
  ENSG00000228322_1 (sequence is synthesized)
agaaaacctggaatcccaacttcaccgctaaccgagagaccttgagctggttcctaaaccacggggaacttcagttccactacatgagttattgcaaaggttgaatcggaattgtgacac

SEQ ID NO: 931878 - DNA, 120 bp, Artificial Sequence
  ENSG00000228322_2 (sequence is synthesized)
tggccagcacacgtgtgaaaccaggggcatcccctattgataaggagcccagcccaagagcttcaagggaaattgaccccagccccagctccactgatgggctcgatgattcagagagga

SEQ ID NO: 931879 - DNA, 120 bp, Artificial Sequence
  ENSG00000228322_3 (sequence is synthesized)
aaatctgggcctaagtcaatccgtgcaagacattcccctggccatagggattggttaaaaaatggacatgtaacccagtttgggctaaatgagatgtgaacaggaaagttatttgatagc

SEQ ID NO: 931880 - DNA, 120 bp, Artificial Sequence
  ENSG00000228322_4 (sequence is synthesized)
ttctgaggaaggtagcttctcttctttctagagagccactggaaaggtagccttttctcctctgtgttgtggagagaaaaaaaaagtgaaactgtctccctctcagcccacacagaaggc

SEQ ID NO: 931881 - DNA, 120 bp, Artificial Sequence
  ENSG00000228322_5 (sequence is synthesized)
tcacacttggtgaagggaagggtggagaagattacagagaatagccctgatggaaccacacctgatttctacctgacctcttaattttttcatttgtacaagtcagtaaatgccttttaa

SEQ ID NO: 931882 - DNA, 120 bp, Artificial Sequence
  ENSG00000228322_6 (sequence is synthesized)
tttttaaacaaataattacagcaacttatagaggtacctaaggtattaagttaccatcatgaatacaaagataagcaagacaaacttcaaggggctcaccacctaataaatattatactt

SEQ ID NO: 931883 - DNA, 120 bp, Artificial Sequence
  ENSG00000225129_0 (sequence is synthesized)
agaaaacacccaaagcttgccacggcatccaggctgcctactgcacccctcactcagccttcttgggccaccaggtgcccattccatgccaagctttgtctcctcaacaaagttgctctg

SEQ ID NO: 931884 - DNA, 120 bp, Artificial Sequence
  ENSG00000225129_1 (sequence is synthesized)
cttgagccagtgaattctgtctccaggaggctgtgtcatggctttgtcttctacaagctcatgccctggagggaaggacagagtgactctgacatgtcagcccattcagtcattcattcc

SEQ ID NO: 931885 - DNA, 86 bp, Artificial Sequence
  ENSG00000225129_2 (sequence is synthesized)
gttcagcactaaacataaaaaaattagccaagtgtggtggcgtgtttctttgtttctttttcactcttaaaacttagtttcacttt

SEQ ID NO: 931886 - DNA, 120 bp, Artificial Sequence
  ENSG00000225129_3 (sequence is synthesized)
tctttgtttctttttcactcttaaaacttagtttcactttctatgtcctgcactacagtttccttgggctaacaagttgggtccaactccacgatctggcacatgagactcacccaattt

SEQ ID NO: 931887 - DNA, 120 bp, Artificial Sequence
  ENSG00000237248_0 (sequence is synthesized)
ttttttgccgtctggtcatcctcgtcggtcttctgcttctgggtatcgacatcgttatcctcatcatcttcagctgcccgcttgcccgtagctgactcagctccctcatcttcatctcca

SEQ ID NO: 931888 - DNA, 120 bp, Artificial Sequence
  ENSG00000237248_1 (sequence is synthesized)
tcctcttcctcaccatcaccttcttcctccccaccttcttcctcttcttcatctacctcgttgtcagcctccggctccccattttcctcattagcattcccgtgagcaggggcgtctctt

SEQ ID NO: 931889 - DNA, 120 bp, Artificial Sequence
  ENSG00000237248_2 (sequence is synthesized)
ccattttccgcctcttccacaacttccttcttctcctttaagtcctcggtggtgatttcggagctggtgtctacggctgcgtctgacatggtggggcacgccggtgacgcgatgcagggg

SEQ ID NO: 931890 - DNA, 120 bp, Artificial Sequence
  ENSG00000237248_3 (sequence is synthesized)
ataaaaaagaaagcgacagttcagggactctggcgataaagctgccggagtccgcggcggcggaggcggctgcggcgagcaaggaggctgacgacgcacaatgcaaagacggcttttcag

SEQ ID NO: 931891 - DNA, 120 bp, Artificial Sequence
  ENSG00000237248_4 (sequence is synthesized)
agcagccagtggggcaggacaatgtttttcatcaaatgtccttagatttggaggaggtttccccagtgtatccagtggttgtcttcctcttgattaatattaaaggaggagaaaaagtgt

SEQ ID NO: 931892 - DNA, 120 bp, Artificial Sequence
  ENSG00000237248_5 (sequence is synthesized)
gtattggggtcagtgcagaaaacaaatcatccaagcacacgaagtggaatttgctaatagcattactactcacccagtgacttcggagtcacaacccaggacacggttttccgcccattt

SEQ ID NO: 931893 - DNA, 120 bp, Artificial Sequence
  ENSG00000237248_6 (sequence is synthesized)
ctacagacacagtgagattcttcattcttctctgttggaacagccaggaaagcggaagagacctccagctgcacaacgacctgtcccccacacccaaccacaagtttatgaagggatgca

SEQ ID NO: 931894 - DNA, 120 bp, Artificial Sequence
  ENSG00000237248_7 (sequence is synthesized)
gaacagcatgaatactgcaaaagatgctctgtgcatcaggtaaatggactgagggacaatgtccatgagtccagaggcgctgagaagctgtgcaaatatggtcagctctatcagacactt

SEQ ID NO: 931895 - DNA, 120 bp, Artificial Sequence
  ENSG00000237248_8 (sequence is synthesized)
tgtagtttaggtgtttgaaacaagaaaattgaaaaactgacaggaattaggataagtgtttaggatttagccttgtgccaacagaagaaagaggtgtttagtgaaaaacatgaaacaatc

SEQ ID NO: 931896 - DNA, 120 bp, Artificial Sequence
  ENSG00000237248_9 (sequence is synthesized)
aggtggacataatgtctgaatttaggaatacacagatataggagcctgaatgaatataaccttaccaccttgggcctgtcaggtaccttttctcttagtaccaggtctgctccaaaatta

SEQ ID NO: 931897 - DNA, 120 bp, Artificial Sequence
  ENSG00000237248_10 (sequence is synthesized)
ttctcattcacttccagagaagtgtccttacccgaatgcaggtggacaagcagttaaacacagtggctttgagtgtgaaggcttctcctcgcaccacagaataaggaagggtgagttcta

SEQ ID NO: 931898 - DNA, 120 bp, Artificial Sequence
  ENSG00000237248_11 (sequence is synthesized)
ggaagaaaggctggaaggcttgaagagacacgataggagagaggccaaaccctgtggttccagacaagcagaatgcgctggccttccactctgtgatggtttcagggacctggtcaccag

SEQ ID NO: 931899 - DNA, 120 bp, Artificial Sequence
  ENSG00000237248_12 (sequence is synthesized)
ctcacttatacctaatgagctagtgaaggagcagagaagaggagtataagcaaatcttttttttttttttttaacacaaagcatggctgatcctagaacatgataactcagtaacctagt

SEQ ID NO: 931900 - DNA, 120 bp, Artificial Sequence
  ENSG00000237248_13 (sequence is synthesized)
gtggtaaatgctaaacttgatctaagggttggtgctcctggtgaggtttaaagttttttttctccctacctcccttactccctccttccctccctccctttatttcttcctcttttcttt

SEQ ID NO: 931901 - DNA, 120 bp, Artificial Sequence
  ENSG00000237248_14 (sequence is synthesized)
cattctttccttccttttgttctttctttcaatctccctcccctccccttccctttcctttatttaagagggctggtagcatcctactttctattatcttagttatcaatagactaaatt

SEQ ID NO: 931902 - DNA, 120 bp, Artificial Sequence
  ENSG00000237248_15 (sequence is synthesized)
agaaaaaaaattagcattgtttaattatgagataaatgaactataaacctaaatatttaccagaaaagagcagagcagaactaaaaggatcaggaatccaggataacatcagtcatacag

SEQ ID NO: 931903 - DNA, 120 bp, Artificial Sequence
  ENSG00000237248_16 (sequence is synthesized)
caggattcaaaccctctcctaaactaaattccaggcaacacacaacttactcaactaccaccaaatcccagatccaggtctcagggaagtacttccggactatctctttcacttgcaata

SEQ ID NO: 931904 - DNA, 120 bp, Artificial Sequence
  ENSG00000237248_17 (sequence is synthesized)
tctgaggttcttcttcgatcattgggtacattatttctacggctcctgggggtacacctcgcagacctggtcctggaagacaacacacaggcctcagtgtgaacctcatttttatcatca

SEQ ID NO: 931905 - DNA, 120 bp, Artificial Sequence
  ENSG00000237248_18 (sequence is synthesized)
atttcttattgctgccttatttctcaaatggaataaggtcatacgctcagggaatgtttattattggaacaatttaacctaccagcttgttattttgttcactttcctataaaaaggcta

SEQ ID NO: 931906 - DNA, 120 bp, Artificial Sequence
  ENSG00000237248_19 (sequence is synthesized)
atcctattttttcttcaaatagaatctagagctaaatatatttttctttataaataaaaacaaatgacctgtacatgtacctcctgaatctaaaataaaagttgattaaaaaaaaacaaa

SEQ ID NO: 931907 - DNA, 120 bp, Artificial Sequence
  ENSG00000237248_20 (sequence is synthesized)
taagatgtgctgaaagccggagcataacttggccattcccaagatttaacaacaaactaactacccatcattaacagtaaagcagaaagaaaacaatcagtaagagattatatagaccta

SEQ ID NO: 931908 - DNA, 88 bp, Artificial Sequence
  ENSG00000280639_0 (sequence is synthesized)
ggggtccactgccgcagtgtgggagttactgctcaccctgggtccacactgcttttgtgagttgtaacactcactgggaaggtctgca

SEQ ID NO: 931909 - DNA, 120 bp, Artificial Sequence
  ENSG00000280639_1 (sequence is synthesized)
ggaaggtctgcagcttcactcctcaagcccgggagaccgcgagcccaccgggagaaacgaacaactctagacgcgccgccttaaaagcggtaacattcactgcgaaggtctgcagcttta

SEQ ID NO: 931910 - DNA, 120 bp, Artificial Sequence
  ENSG00000280639_2 (sequence is synthesized)
ctcctgagccagcgagaccacgagcccaccagaaggaagaaaccccgaatacgtctgaacgtcagaaggaacaaactccagaagcgccacctcaagagctgtaacactcaccgcgagggt

SEQ ID NO: 931911 - DNA, 120 bp, Artificial Sequence
  ENSG00000280639_3 (sequence is synthesized)
tcagtgagaccaagaacccaccaattcgggacacaatacctataatcccagtactttaggaggccagggcaggcggatcatctgagctcaggggttggagaggagcctgaacaacatacc

SEQ ID NO: 931912 - DNA, 120 bp, Artificial Sequence
  ENSG00000280639_4 (sequence is synthesized)
ccccgtctctacaaaaaatacaaaaattaaccggttgtggtggccggtgccggtagttccagctagtgggggactgcggaggtgggagctgaagcgggaggatcgcttgagcctggaggt

SEQ ID NO: 931913 - DNA, 120 bp, Artificial Sequence
  ENSG00000280639_5 (sequence is synthesized)
ggaggatcgcttgagcctggaggttgaggctgcagtaaacagggattgcgtcaggacactccaacctggggaacagaacgatgccctaaaaggctggctgagctgactggagtccaatct

SEQ ID NO: 931914 - DNA, 120 bp, Artificial Sequence
  ENSG00000280639_6 (sequence is synthesized)
cctgactctcaatcctccaccatgccggaatccacttgcatttctggcaagaaggttgtttacgctcaaggtctacagggatggaagtggcacccagtgagagggctctgccgatggagc

SEQ ID NO: 931915 - DNA, 120 bp, Artificial Sequence
  ENSG00000280639_7 (sequence is synthesized)
tgtgaaggcgtcgacctcattctgacgggcttgttgagactggtcagcgcctgggcaagagggcagctgggatatgtctatgccatgtttgacccatgctattgttttttcctccctttt

SEQ ID NO: 931916 - DNA, 120 bp, Artificial Sequence
  ENSG00000280639_8 (sequence is synthesized)
tactttctatctgtactcctctccttctcttccactccattcccctgcccacctccacactgaaaatcgaggccttgggaggagaggtcaagggaggaaagaattctggaaagaattctt

SEQ ID NO: 931917 - DNA, 120 bp, Artificial Sequence
  ENSG00000280639_9 (sequence is synthesized)
ccacactttataacaaggagcccaggcactagtattttcctcttgccatcggcggccagccataaaaagggttgatccatgagttgtttctccaactcttcgagcagctcagttcatggc

SEQ ID NO: 931918 - DNA, 120 bp, Artificial Sequence
  ENSG00000280639_10 (sequence is synthesized)
actgctatagtttagactaacccgctcaacattgttagaaacatttagaaatgtctccccctttgccgcaatttccctctctctgccggtgtctgctctaacagctggaagaaatttctc

SEQ ID NO: 931919 - DNA, 120 bp, Artificial Sequence
  ENSG00000280639_11 (sequence is synthesized)
cttcatctgctatattcagcctttcactaagcgccatcaattttgcctttgaaatttcttttgtactggtctccttctctcctttccaccgctaatcccggggcctgtctctagccctgt

SEQ ID NO: 931920 - DNA, 120 bp, Artificial Sequence
  ENSG00000280639_12 (sequence is synthesized)
gattctgaactgtttaagaacctcctgacagagctccctgcctctggcttctccacctttgatccattctgcacagccaagacagattcatttttctcaagctctgtttgcatcttagga

SEQ ID NO: 931921 - DNA, 120 bp, Artificial Sequence
  ENSG00000280639_13 (sequence is synthesized)
ccagatcgtggctgcttttgcctcctgtactgttgtaacaaatcaccacgaacttggtggcttaaaacaacggaaacttattctcttacagttctgtggccaaaaatccacactgagtct

SEQ ID NO: 931922 - DNA, 120 bp, Artificial Sequence
  ENSG00000280639_14 (sequence is synthesized)
tataggcctagatcaaggtggcagcagggctgtgattccttgggaggctcccagggagaattctctttcctggcctcttccagcttctcagggctgcaggcatttcttggcttgtggcca

SEQ ID NO: 931923 - DNA, 120 bp, Artificial Sequence
  ENSG00000280639_15 (sequence is synthesized)
catcactccagtctctgcctcagtggtcatattgccttttcttctccctgtagtgaaatcttcccctgcttccctcttataagatacttataattacattaggagcccatctggataatc

SEQ ID NO: 931924 - DNA, 120 bp, Artificial Sequence
  ENSG00000280639_16 (sequence is synthesized)
cagggtaatctccccatctcagaagccttaacttaatcacatctgaaaaatcccttttcccatgtaaagtagtagttataggctccatgaaagggatggggacatggatctttgggggga

SEQ ID NO: 931925 - DNA, 120 bp, Artificial Sequence
  ENSG00000280639_17 (sequence is synthesized)
ccgttattcagcctctcatcatggccagcttaatccttccacttccctactcgctactacaacaagtatcagttgagtatctactatgtgctaggcactgttttaggcaataggaatcat

SEQ ID NO: 931926 - DNA, 120 bp, Artificial Sequence
  ENSG00000280639_18 (sequence is synthesized)
aatgactaatgagccttttcggattcagtctcctgcagggtgaactatccctttcctgagctctttacctcttagagcttggtatcattacatagcatgatcatcacatactatgtatgt

SEQ ID NO: 931927 - DNA, 120 bp, Artificial Sequence
  ENSG00000280639_19 (sequence is synthesized)
ctgtgtgtttgacatgtggttcatagctggtgaacggtgctcttcgtttctataggcaggtaggatggacgtgcttcgtagggcctttctccgcaagccctgacatacacagcacagaga

SEQ ID NO: 931928 - DNA, 120 bp, Artificial Sequence
  ENSG00000280639_20 (sequence is synthesized)
tgggacagccccctactacatcctgccagatgttgctggcttattttaaaattagaaacgcctatacagtaccataaaccagtgatgccaactggtttatactccataagtttgtactct

SEQ ID NO: 931929 - DNA, 120 bp, Artificial Sequence
  ENSG00000280639_21 (sequence is synthesized)
tggaagtgctagggttggttgcagcctaatatttaggaagagttttgaaaggcactgtgacttgtagcttcacacctgtcttcttaaaagcctggccctttcccgatttcaggttgacat

SEQ ID NO: 931930 - DNA, 120 bp, Artificial Sequence
  ENSG00000280639_22 (sequence is synthesized)
gtgcctcctgcaggcactgacactgaggccttaccggtgactgtttccttattggtaagtgtgttgctttcctaggtggaaactctctgaggaaaaagatcacgttacacgcacacaagc

SEQ ID NO: 931931 - DNA, 120 bp, Artificial Sequence
  ENSG00000280639_23 (sequence is synthesized)
acacacatacacatctttgtaactctctggccccccattggatctagcaaagataacttggatgctagatatttgcataccagccagtgttgtccagcactttcgttcaactctttgaca

SEQ ID NO: 931932 - DNA, 120 bp, Artificial Sequence
  ENSG00000280639_24 (sequence is synthesized)
actatcgtcacattcctatactgcttgtgctatcatttgattaatgtttgtatttaatttgtctcaacttttagcttgtgtaaacttattttaaaaggaagcatttgcatctctaccata

SEQ ID NO: 931933 - DNA, 120 bp, Artificial Sequence
  ENSG00000280639_25 (sequence is synthesized)
aatagaagaccagagtcatttatcataaataaagcataactgtaaaaataaagatactgaaaatgaaataatgttattcccctaagaattaaacaataaaatattgagtaataaaattga

SEQ ID NO: 931934 - DNA, 120 bp, Artificial Sequence
  ENSG00000237243_0 (sequence is synthesized)
ccttatgaccaaattactgccagagccttctaacttctctgcacccactccagtctagctgaggcctgaggaatagatggataaataacagtatctgagacctgctgttggtgtatgtta

SEQ ID NO: 931935 - DNA, 120 bp, Artificial Sequence
  ENSG00000237243_1 (sequence is synthesized)
aatgttctttaaaaagcgtcaaccatccccaacacacgactctcctgaaagggaaaggtatagaaaaagcacgtgttcacagacagtttctctaaggagcaagcagcaaagccctggtgg

SEQ ID NO: 931936 - DNA, 120 bp, Artificial Sequence
  ENSG00000237243_2 (sequence is synthesized)
gttttcttcaaagaacgcacctgtaagaaagaagactggctgtacaagaagagtggtaaatgcaatgacatttatctctttcctctgctaaggtattaattcatcaataagcaaaaacac

SEQ ID NO: 931937 - DNA, 120 bp, Artificial Sequence
  ENSG00000237243_3 (sequence is synthesized)
ttcagatgcattcctactaatttttgctgtatcacagggtggaagactgtttggtcccaagggaataatggctacaatctaggacctcctcccagaaggcaggaacattgtgtctggcgt

SEQ ID NO: 931938 - DNA, 120 bp, Artificial Sequence
  ENSG00000277662_0 (sequence is synthesized)
agatgaattaaaaattaaaatgggtaaaaaattgggtaaaaggtgatcaaaactctgacaaaccagaatactttaaaacttacaagttgtaaaaccaccctatgtagccataaattgctg

SEQ ID NO: 931939 - DNA, 120 bp, Artificial Sequence
  ENSG00000277662_1 (sequence is synthesized)
actttacaaaaagtgacttacagagagtagaactgtggttattagagactaggaagggtaagggggagaggaggatagagagaggttgggtaaaggatacagaattacagctggatagga

SEQ ID NO: 931940 - DNA, 120 bp, Artificial Sequence
  ENSG00000277662_2 (sequence is synthesized)
tctgtagcactatagcatgaatatggttaatatagatttatttattgcatattttcagaaagctagaagagaagattttgaatgttcacaacacaaataaatgataaataaattttgagg

SEQ ID NO: 931941 - DNA, 120 bp, Artificial Sequence
  ENSG00000277662_3 (sequence is synthesized)
tgatggatgtgctaattaccctgatttgatcattccacattgtatcgaaataccactctatatcccataaatatgtacaattattacatgtcaactaacaataaagggaaaagaaagtga

SEQ ID NO: 931942 - DNA, 120 bp, Artificial Sequence
  ENSG00000240143_0 (sequence is synthesized)
ctgaatccccagagtagcccttcctggtgcccaactggcctggggacaaacagcgtccactacatctaggactgccggctaagtggacacacttcttgacctcctaccaggaactttggg

SEQ ID NO: 931943 - DNA, 120 bp, Artificial Sequence
  ENSG00000240143_1 (sequence is synthesized)
gcctttcctctgaagtcaccttttcctggcccccaccctgtacccactaaagcagtgccatctcctgggagaaaaggagaacatatacatagaataaagactatgaagatctgcaccaaa

SEQ ID NO: 931944 - DNA, 120 bp, Artificial Sequence
  ENSG00000277661_0 (sequence is synthesized)
aaggctgttgtctgttgtcatcaggaccaggtggctgatttaggttccaggcagaatggaattgggtgccctggaagcctgaggtagatttggtactatggagggtgcacttgctgatat

SEQ ID NO: 931945 - DNA, 120 bp, Artificial Sequence
  ENSG00000277661_1 (sequence is synthesized)
ggaggctgggaagttcaagatcaaggtaccagcaaatttcattacctggtgccccataatggcacacagctttactcagcaacccctgccagcttccaagccccaggatactgacctgca

SEQ ID NO: 931946 - DNA, 120 bp, Artificial Sequence
  ENSG00000277661_2 (sequence is synthesized)
gacctgcaccagcacatggggcagcattacctccccaacagtgtggagaagagaacatttcaccactgggtgatgagagtagacagtgactcttggcttctcaatgctagacatgattgg

SEQ ID NO: 931947 - DNA, 120 bp, Artificial Sequence
  ENSG00000277661_3 (sequence is synthesized)
tgtgtgccggcggccaccaggtcaccgaggtggggtggggaagacaggttcgccgctgcttcaggcctgggatctctgctggaactctctacattttttaatcaatttaaaatttataat

SEQ ID NO: 931948 - DNA, 120 bp, Artificial Sequence
  ENSG00000277661_4 (sequence is synthesized)
tttacttaaaacaacaaattctattttctaatgcaagatttgtggtgaaatctcatcagtttcttcagggcatccttcatgtccttatttcttaaggtgtaaatgagcgggttgagactt

SEQ ID NO: 931949 - DNA, 120 bp, Artificial Sequence
  ENSG00000277661_5 (sequence is synthesized)
ggagtgatgacggtgtaaaagagggtggctgatttaggttccaggcagaatggaattgggtgccctggaagcctgaggtagatttggtactatggagggtgcacttgctgatatgaagtt

SEQ ID NO: 931950 - DNA, 120 bp, Artificial Sequence
  ENSG00000277666_0 (sequence is synthesized)
atggcgctcctgctgcgcttcgtgctcctgtgcagagtcgcggatttcatcagaggttggagtatcactactcctgagcagatgattgaaaaagccaaaggggaaactgcctatctgcca

SEQ ID NO: 931951 - DNA, 120 bp, Artificial Sequence
  ENSG00000277666_1 (sequence is synthesized)
tgcaaatttacgcttagtcctgaagaccagggaccactggacatcgagtggctgatatcaccagctgataatcagaaggtggatcaagtgattattttatattctggagacaaaatttat

SEQ ID NO: 931952 - DNA, 120 bp, Artificial Sequence
  ENSG00000277666_2 (sequence is synthesized)
gatgactactatccagatctgaaaggccgagtacattttaagagtaatgatctcaaatctggtgatgcatcaataaatgtaacgaattttcagctgtcagatattggcacagatcagtgc

SEQ ID NO: 931953 - DNA, 120 bp, Artificial Sequence
  ENSG00000277666_3 (sequence is synthesized)
aaagtgaaaagagctcctggtgttgcaaataggaagattcagctggtagttcttgggaagatgtgccgcctccaaagagccgcacgtccactgccagaagctacagcagtaatcattcat

SEQ ID NO: 931954 - DNA, 120 bp, Artificial Sequence
  ENSG00000277666_4 (sequence is synthesized)
ccctgggatccatatctccttccaacatggaaggatattccaagactcagtataaacaagtaccaagtgaagactttgaacgcactcctcagagtccgactctcccacctgctaaggtag

SEQ ID NO: 931955 - DNA, 120 bp, Artificial Sequence
  ENSG00000286597_0 (sequence is synthesized)
agatgaatgaggacagcaaatgtgggcacctttagaaacagaacagcaaggggctgccaaaatgttgatttttcaaagagggaggttttaatcctgtcacaatattctattcaaaacaaa

SEQ ID NO: 931956 - DNA, 120 bp, Artificial Sequence
  ENSG00000286597_1 (sequence is synthesized)
cattatatgcagaagaagacagcaacatcaagaagagcaagacgcttgcaagactgagataagactaagatagaaggtaggcaactttggaaagccaccctctatgatgacaatccacag

SEQ ID NO: 931957 - DNA, 120 bp, Artificial Sequence
  ENSG00000286597_2 (sequence is synthesized)
ggcaactgcaatgggcccttacagtcccctcagctccacacagctcagaagaactgcactctgatggttgattgtaacactgaagcagctttgagttcttgaggaaggcttgagtacttg

SEQ ID NO: 931958 - DNA, 120 bp, Artificial Sequence
  ENSG00000286597_3 (sequence is synthesized)
ctggcattgaagtagccaccccaatctggctatgacattttcttggctacatggtgagaatgaatcatcccggtcttatttgcaaataatagtaaaagggcattttacggtttgtttgca

SEQ ID NO: 931959 - DNA, 120 bp, Artificial Sequence
  ENSG00000166917_0 (sequence is synthesized)
cggggcggtcgggtcctccccagcggcacctgcaccagtgcacctgcacctgctccagcagcacctgcctcctgacttgggactccacctgcttcctttctcctcggccgggagccccgg

SEQ ID NO: 931960 - DNA, 120 bp, Artificial Sequence
  ENSG00000166917_1 (sequence is synthesized)
ggctttgacccccacatccttggggcagaaaggggccaaatattctaaaacaagggaaacgtggatgtgtgcttttgtgtgggttctggaagtgtctggggaggacgtggtccaggcctc

SEQ ID NO: 931961 - DNA, 120 bp, Artificial Sequence
  ENSG00000166917_2 (sequence is synthesized)
tgccctgggttgatctctgcagcccctgagctgggacccaggatgcagagaggagggctggagctgggcggtgctctgtgaccagtctgaccggagttgggggtggacccattacaggag

SEQ ID NO: 931962 - DNA, 120 bp, Artificial Sequence
  ENSG00000166917_3 (sequence is synthesized)
gtggcgggagggacaacctgggctctggggccgcctggtggtcgggggaagtggggcggggtgcctgggatctgggctctggctgggaggatccacaactcattctttggacattttctt

SEQ ID NO: 931963 - DNA, 69 bp, Artificial Sequence
  ENSG00000166917_4 (sequence is synthesized)
ggatccaggcgcagacgggagtgaggcgtggcggagacgcgtgcacgctgggtctgtgcacttttgctg

SEQ ID NO: 931964 - DNA, 120 bp, Artificial Sequence
  ENSG00000166917_5 (sequence is synthesized)
tcggctcactacaacctctgtctcccgggtttaagcgactttcctgtctcagcctcccaagtagctgaaacgacaggcgcctgccaccatacccggctaatttttttatttttagtagag

SEQ ID NO: 931965 - DNA, 66 bp, Artificial Sequence
  ENSG00000166917_6 (sequence is synthesized)
cggctgttgcttcttaacacctttattacttttgtaatcatgggtatgagttgattttctggtcag

SEQ ID NO: 931966 - DNA, 120 bp, Artificial Sequence
  ENSG00000166917_7 (sequence is synthesized)
tacttttgtaatcatgggtatgagttgattttctggtcagaaatttcagtagagctaatttcatttaaatgtgtgagatgtggtaaagttttgacaataaatacaaattttgacaaagca

SEQ ID NO: 931967 - DNA, 120 bp, Artificial Sequence
  ENSG00000166917_8 (sequence is synthesized)
agcagcagaactcccggctcagagagttctccaccgctcctcccaggctcacgaggctcacgggctacccagcgccagcggcccaggaggctggaccacagactacgaagctgcaccgtg

SEQ ID NO: 931968 - DNA, 120 bp, Artificial Sequence
  ENSG00000166917_9 (sequence is synthesized)
agaactcccggctcagagagttctccaccgctcctcccaggctcacgaggctcacgggctacccagcgccagcggcccaggaggctggaccacaggcctcagtcccgacttctccctgct

SEQ ID NO: 931969 - DNA, 120 bp, Artificial Sequence
  ENSG00000166917_10 (sequence is synthesized)
gcccggcacgggaccctcccccaggacagccacctcccagtgctgaagagccggcccgcctcagagccgcccgccgttcctttttcctatgcatatacttctttgaggatctggcctaaa

SEQ ID NO: 931970 - DNA, 120 bp, Artificial Sequence
  ENSG00000281327_0 (sequence is synthesized)
agacggctgtcagcaagcctacactcaaaggatttacccggtgcagagagctccaagagaacaccagagcccctggtattctggttcacttgaatttgtcctcctgcctattccatattt

SEQ ID NO: 931971 - DNA, 120 bp, Artificial Sequence
  ENSG00000281327_1 (sequence is synthesized)
ttttcacacatataatcatttgtttgcagtccggaaatataaaaccattcaagaaacggaggcccaactattgggtttgcgtcctcatctgcctttccagaccagcagttcccaaaagcc

SEQ ID NO: 931972 - DNA, 120 bp, Artificial Sequence
  ENSG00000281327_2 (sequence is synthesized)
agtgtgagaaccatctgcatcagagtgaccagtctgtgaagatcaagcataggaatgccaggactccaccctacatgtcctttatctggggtggtgcccaggcttcccgattattctacc

SEQ ID NO: 931973 - DNA, 120 bp, Artificial Sequence
  ENSG00000281327_3 (sequence is synthesized)
aactctaccaaatccttgttcttcgttgcacaattagctgtgaaacagacagaggttacctacaataagtgcatgtcattttggactagccatatttcaagggctcagtatggctaatgg

SEQ ID NO: 931974 - DNA, 120 bp, Artificial Sequence
  ENSG00000281327_4 (sequence is synthesized)
ccactatattggacatcgacggtcaaacccattttacattcccctgacaactatgattggtgtgaggcctatgatggcccaactaggctgacagcaaagatctttcctgttggcaaagat

SEQ ID NO: 931975 - DNA, 120 bp, Artificial Sequence
  ENSG00000281327_5 (sequence is synthesized)
catctttctctctcctgctggcaagaacaagaaagaataaaggtctgatcaacccatgagctttcttgggatttatgaggagaaccagactttggatgaaactgacattgaaatgagcag

SEQ ID NO: 931976 - DNA, 120 bp, Artificial Sequence
  ENSG00000281327_6 (sequence is synthesized)
gatggagagaaaaatcctaggggtttggtgacaatactgggctgctgattaaacttggagtttgccctgactctgaactttctatttagtgagataataattgtctcaattgtttaagct

SEQ ID NO: 931977 - DNA, 120 bp, Artificial Sequence
  ENSG00000281327_7 (sequence is synthesized)
agcttgtgttgcttccagctaaaagagtgccagctatatacaatgtgcaagctgacatgttgtcatgctctgacactgatgaacacacccccacaaggctgtgaagtagtaggggaagaa

SEQ ID NO: 931978 - DNA, 120 bp, Artificial Sequence
  ENSG00000281327_8 (sequence is synthesized)
ctaacctgcatggagttggaagggggggaaaaacaaaatcaaaccatatggaaagcagttgaattcactgcattaaatatactttttaaaatgtacaacataatagccatatgtttaagt

SEQ ID NO: 931979 - DNA, 120 bp, Artificial Sequence
  ENSG00000281327_9 (sequence is synthesized)
cagaatcatctgcaaagcacgcatgttcactttctgttccagagtcaggcgtctgaattctgtgagcaaagcctagagaaaaaaaactaagcctatgccagatttacaggaatagttatc

SEQ ID NO: 931980 - DNA, 120 bp, Artificial Sequence
  ENSG00000281327_10 (sequence is synthesized)
agtggctctcaaagagataccttcaagagtgtggttctatgtttcccacctagtgctaagtaaaacatacatttcaattagaattagaatgtacttcaggaagtaaattattaaatgacc

SEQ ID NO: 931981 - DNA, 120 bp, Artificial Sequence
  ENSG00000281327_11 (sequence is synthesized)
tagcacattttgatgtttttaaaagcccaaactcccagctgtggagaacaatgagtctttaatgataatttattcccctcttgttcccatgattgctagatagctgggggccctagatac

SEQ ID NO: 931982 - DNA, 120 bp, Artificial Sequence
  ENSG00000281327_12 (sequence is synthesized)
ttattgggctccagggacccaatgtgggcattgtcagaggaggataccaattagcaggtttggtttcacaaagaagcaaagattgccctgaggtgaaaaactctgtctcagagaaaacac

SEQ ID NO: 931983 - DNA, 120 bp, Artificial Sequence
  ENSG00000281327_13 (sequence is synthesized)
ccttgaacttgaattgtcttttttgctcatcattagaagtcagcaaaggatttagcctctccctcaccaattcattatccacactcttcagaaaaaaaaaaataataataaaataaaata

SEQ ID NO: 931984 - DNA, 120 bp, Artificial Sequence
  ENSG00000281327_14 (sequence is synthesized)
ttttctcttattatgaaggtgacaataaagacagtaagcttaccacatgcagaaaagagagtgaccactttctactagttttaatggcactatcactgcttccaaaaattgctttaggtc

SEQ ID NO: 931985 - DNA, 120 bp, Artificial Sequence
  ENSG00000281327_15 (sequence is synthesized)
acttacggcccctggagataaacatctgaggattctgcataaggtccttaatgggtgttttcaggacagcataattacctgaggcttgtaagagtgaaaagcatcagcctcaaggttact

SEQ ID NO: 931986 - DNA, 120 bp, Artificial Sequence
  ENSG00000281327_16 (sequence is synthesized)
gaataatgtatggttgcctgtttgtctattagagagagataaagaagaacaaaaatccagtcaccatatgaatcacaattttattatctttttcattcatttagtatttcattcaacaca

SEQ ID NO: 931987 - DNA, 120 bp, Artificial Sequence
  ENSG00000281327_17 (sequence is synthesized)
tttgaaagcatttattatgcaccaggcactgtactaaacactttagattctagtatgattaagacagcagagttctacccattgagatgttcacaatctaggtggggaaggacatggaga

SEQ ID NO: 931988 - DNA, 120 bp, Artificial Sequence
  ENSG00000281327_18 (sequence is synthesized)
atgaagaataagcagaccattaattcccagaaaggagtagggttacctctgggcccctgcggaggtcaatgaagctttgtctatggcctttaagagcttttcatttttctcagcagcagg

SEQ ID NO: 931989 - DNA, 120 bp, Artificial Sequence
  ENSG00000281327_19 (sequence is synthesized)
gatctgtccattctatatcttttttttttttttttcaatcttcaaacattttattacctttctggctacatagtgaattcagtgtcttcatactgaatggtagaagatgggaaggaattt

SEQ ID NO: 931990 - DNA, 120 bp, Artificial Sequence
  ENSG00000281327_20 (sequence is synthesized)
ttcttttgcttggaagtaagtaaccatttttgggttgctaaagtcaatatttagccccttccctgagcaccccctccgctcaatccctatgccctggcacccatataaataaataaaatg

SEQ ID NO: 931991 - DNA, 120 bp, Artificial Sequence
  ENSG00000281327_21 (sequence is synthesized)
aaaattatatcctagtcttaaataagttcagacttcagagccagactgtctgggtttgaaacccaagctctactcttaccaaatgtatgatgctgacaagttgtcaaatctctgtgttcc

SEQ ID NO: 931992 - DNA, 120 bp, Artificial Sequence
  ENSG00000281327_22 (sequence is synthesized)
tcagttccttcataattaaaatgaaaagttcataggatagtatggatatataaatataagtatagacttattatgagtattgaataaatgaacatactagcacctggcatacaatattaa

SEQ ID NO: 931993 - DNA, 120 bp, Artificial Sequence
  ENSG00000281327_23 (sequence is synthesized)
tggtattatatctcaatacaagggacttacattgctacttagtgattagatttgacaatcagtaaggaaaatgaatttaaacataactggttcttgaaagtccttaggaagcaacatttt

SEQ ID NO: 931994 - DNA, 120 bp, Artificial Sequence
  ENSG00000281327_24 (sequence is synthesized)
tggagacccacagcccacctctcaatatgtctagcactgtcaatttttccttcaatgttaaaacaaattgttggtttctcggattgaacattaagtagtatagcaggtttgcctgtaggg

SEQ ID NO: 931995 - DNA, 120 bp, Artificial Sequence
  ENSG00000281327_25 (sequence is synthesized)
aacatatcacaccaaaaggccacattttgaaacaacttcatgttgagaggcaccaagaactaagcctgatctgagaagaacaaacttccttttcatctcatggtcatttagtgaaatggc

SEQ ID NO: 931996 - DNA, 120 bp, Artificial Sequence
  ENSG00000281327_26 (sequence is synthesized)
aggccagaattgtgacccaatttaagtgatttgtttcctcctctttgaccaactcctccttttgtctgtttttgccaagacacaataattgaatttagaaaaattaaatataaagcaatg

SEQ ID NO: 931997 - DNA, 120 bp, Artificial Sequence
  ENSG00000257894_0 (sequence is synthesized)
tggagacatagcagcttggcaatgaagtcaatactaaggatagcagagtttatggggaaggagaatgagagagaaaatgatgacactgtggcttttgatccagctgttcttaaaagtaat

SEQ ID NO: 931998 - DNA, 120 bp, Artificial Sequence
  ENSG00000257894_1 (sequence is synthesized)
catccgcgttgaacttcctggtttagaaggcagaagaaatcagagagaaggatggagtggggaaaagaagagggaggctgacagagaagcttaaagaaatgctttcagatggcaacaaaa

SEQ ID NO: 931999 - DNA, 120 bp, Artificial Sequence
  ENSG00000257894_2 (sequence is synthesized)
aaatagacaaatgggatttaattaaacgaaagagtttctgcacagcaaaataaactatcatcagcgtgaacaggcaacctaccgaatgggagaaaattctcacaatctacccatttgaca

SEQ ID NO: 932000 - DNA, 71 bp, Artificial Sequence
  ENSG00000257894_3 (sequence is synthesized)
acctaccgaatgggagaaaattctcacaatctacccataaagaaaaaaaacaatcccatcaaaaagtgggc

SEQ ID NO: 932001 - DNA, 78 bp, Artificial Sequence
  ENSG00000257894_4 (sequence is synthesized)
acccaaaggattataagtcacactactacatagcaaagacttggagccaacccaaacgtccatcaataatagactgga

SEQ ID NO: 932002 - DNA, 85 bp, Artificial Sequence
  ENSG00000257894_5 (sequence is synthesized)
tgcatgttctcacttataacaggggaacatcacatgtgggggcctgctcgggggtggggggcttggggagggatagcgttaggag

SEQ ID NO: 932003 - DNA, 90 bp, Artificial Sequence
  ENSG00000257894_6 (sequence is synthesized)
ttgtgcttcagaaaaaaaaaaatgctttcaggattgcctcttcagacatggttacaatacatatactcagttttctttattaactggacc

SEQ ID NO: 932004 - DNA, 120 bp, Artificial Sequence
  ENSG00000257894_7 (sequence is synthesized)
gttacaatacatatactcagttttctttattaactggaccagattaatcttcattaaactgactgaactagtaatcttttaattttatgtcatcagacataaacatttgtcttttttttc

SEQ ID NO: 932005 - DNA, 120 bp, Artificial Sequence
  ENSG00000257894_8 (sequence is synthesized)
gttttgcattagcttaaattggtttacctctcctgatagtctccctataccctttttctttgtcctttatactccaagtaaatcatataccatatgtgggatcaaatggggagtaaagta

SEQ ID NO: 932006 - DNA, 120 bp, Artificial Sequence
  ENSG00000257894_9 (sequence is synthesized)
tcctccatcctcctgtcctcatttgctgtaaaccggtgtaaattcttacttgtgcatctacaatctgtattattgggtatgttcttaatgtaatctttgttcagctgatagtttatttca

SEQ ID NO: 932007 - DNA, 120 bp, Artificial Sequence
  ENSG00000257894_10 (sequence is synthesized)
aattatgaaatctgtttatatcattacttgtttttcctatgacatgtagtttttcacaatagcaaagagttgatgtgatttttgtagatatgctagaaaataaaaactttttaaataaca

SEQ ID NO: 932008 - DNA, 120 bp, Artificial Sequence
  ENSG00000257894_11 (sequence is synthesized)
ggattcagtccctttttccaggggtacgtatgggggtctacgtacccctttgccagagttgcagctgcttttgccaagaagcctgggtgtctaagtttcttggggctctgcatgtgcctg

SEQ ID NO: 932009 - DNA, 120 bp, Artificial Sequence
  ENSG00000257894_12 (sequence is synthesized)
cagactgaagacccttgtggagtgagttcatgaagtgacctcagagtgaccttggaagctacatgctgaaatgctgaagatggcagaggttcagtgagacaggatccttgaagatttaat

SEQ ID NO: 932010 - DNA, 120 bp, Artificial Sequence
  ENSG00000257894_13 (sequence is synthesized)
aaagcagagccctacctgccaagacttctcttttgcagaacccattacgtgtttgggcctatttgttattgtagcctagcctgaaataattaatactaataataaataaatgacttctaa

SEQ ID NO: 932011 - DNA, 120 bp, Artificial Sequence
  ENSG00000257893_0 (sequence is synthesized)
gttggaacaaagaaggggaaaaacaatggcagttcttatctttcaggtagctgtatggtgagcattcctctcccagcaatctgttgttctttgtgagcagactggagtgtgacagctgtg

SEQ ID NO: 932012 - DNA, 120 bp, Artificial Sequence
  ENSG00000257893_1 (sequence is synthesized)
aaaacgatcaaaggcaggtcccagacaggagagggctgatgacaatgccagtttccctctaagaccctgtggacagcagggccatgagggatgctgtgacacagagtcttgcttgatgca

SEQ ID NO: 932013 - DNA, 120 bp, Artificial Sequence
  ENSG00000257893_2 (sequence is synthesized)
gtgtgtggtgttactcacaggagtgggttcagccactcttggtgtgaaacccaaggaaaatgtctctgccgcagctgatgtcaacatgtacagcatgtgaccagcttgcattaaaggaga

SEQ ID NO: 932014 - DNA, 120 bp, Artificial Sequence
  ENSG00000257893_3 (sequence is synthesized)
tgtgtgtatgagttctgcagaagtccaccaaatgtgggccagggttatttccctggtgatgctctgaagcttttgccaaaggacaaatggaaacaggaagtacaatcatgcactggggta

SEQ ID NO: 932015 - DNA, 120 bp, Artificial Sequence
  ENSG00000257893_4 (sequence is synthesized)
aagaagattcatctgctcttagctacctaccatgccaacactcctgagaaagctcacagaggcccatgatgcccacctggatctgaggacctagaaagccacaacaggcaaccataatct

SEQ ID NO: 932016 - DNA, 120 bp, Artificial Sequence
  ENSG00000257893_5 (sequence is synthesized)
gggtcttccctcagccaactcccctgcataaagtgaatgaatgaaaaacccatcttatattaatcagagttctctagagaaaaagaaccaatcagatgtgtatatatagaaagagagaat

SEQ ID NO: 932017 - DNA, 120 bp, Artificial Sequence
  ENSG00000257893_6 (sequence is synthesized)
tagatcagaaggtcatctactggcagaattccctcatcttccaggaaggtggatctttttctaccaaggccttcagtttattagattaggcccatgaacatgctggagggtaatctgctt

SEQ ID NO: 932018 - DNA, 120 bp, Artificial Sequence
  ENSG00000257893_7 (sequence is synthesized)
tactcaatacatactgatttgaatgttagtatcatcaaaaagaccttcacagaaacatctaaaataatgtttgaccaaatgtctgcataccatggccaagccaagtttacacataaaatt

SEQ ID NO: 932019 - DNA, 120 bp, Artificial Sequence
  ENSG00000257893_8 (sequence is synthesized)
aattatcacacatcccacgaacaccatccccaacagatgctcatgagcattgtggttatgatttcaacttcagaataaggcagaaatgtgtacaaatcctgaccctttgacttatcagct

SEQ ID NO: 932020 - DNA, 120 bp, Artificial Sequence
  ENSG00000257893_9 (sequence is synthesized)
ctctaaaaatcattatatgtcaactttctagactttacctgaaaaacagaaaccaagatacccacagcataagattgttaggattgaagaaattgttacgattgttaggtatgaagaaat

SEQ ID NO: 932021 - DNA, 120 bp, Artificial Sequence
  ENSG00000257893_10 (sequence is synthesized)
ttaaacaatgatgcagctgagatatttagaattgtacctggcatgtactttgtattaaataactaataaggcctttttctggtgaaaacaaaataagcctggataaaagaagatgagacc

SEQ ID NO: 932022 - DNA, 120 bp, Artificial Sequence
  ENSG00000257893_11 (sequence is synthesized)
agattggttgatggctcggcctgggtgggctcctggcccatctgaaattacattactcttatgtagtgccttttttgttattgctaaaataaaataaataaaacactctactttcatact

SEQ ID NO: 932023 - DNA, 120 bp, Artificial Sequence
  ENSG00000257891_0 (sequence is synthesized)
tttcaggttcttcagtggtggtgtgctgctcttcgcttagagaactaggagaggggaccgccatctgctgccagctggagccagggcactggctgtctccggttggtggtggggatggag

SEQ ID NO: 932024 - DNA, 120 bp, Artificial Sequence
  ENSG00000257891_1 (sequence is synthesized)
cggtcgaagggtggcctgcagtgggagcttttcctgccgggcaggaggaagagtagaagggagaggcacggacgcatgctggaggctggagcttgcgccaccgcagctcgcctcgctgcg

SEQ ID NO: 932025 - DNA, 120 bp, Artificial Sequence
  ENSG00000257891_2 (sequence is synthesized)
ccaggatggaggaggaggacaaggaagagtcacctgtggtaaactggagcctgcatatggctctgcagctggtctcacgagattggtggcagcgacggagactgcagctcgactggagtg

SEQ ID NO: 932026 - DNA, 120 bp, Artificial Sequence
  ENSG00000257891_3 (sequence is synthesized)
aattatcaggagccaccaggtgctgcagcagctttgggataacttgagggcgcatcctggggaagaaacacctcctgtccatggtgctaactgctgaggacagtgcttcggcgtggcttc

SEQ ID NO: 932027 - DNA, 120 bp, Artificial Sequence
  ENSG00000257891_4 (sequence is synthesized)
aattacattaattatggatgaagagtattgtgttgtgcagatatactgcagtttcttcatcccttcatctatggatggacaggttccacagtgttgccacggatgacctgatttcagtac

SEQ ID NO: 932028 - DNA, 120 bp, Artificial Sequence
  ENSG00000257890_0 (sequence is synthesized)
tcccattttagagaaacaacttataatcacattctcaggtcctttggggatctagagtggtgggatcatgttgcccatgaagctacgttggagctaataggagtgctccctgttgagaag

SEQ ID NO: 932029 - DNA, 120 bp, Artificial Sequence
  ENSG00000257890_1 (sequence is synthesized)
gagatttcaaagtgaagaaacagattgaaagagcctctaccacttcagcatagcctgctccatctcaaccttattcatgtcagtataataggttattattaaaggcttcctgaagcttat

SEQ ID NO: 932030 - DNA, 120 bp, Artificial Sequence
  ENSG00000257890_2 (sequence is synthesized)
ctgccaatcatgctcttcacaattaggaagtttatgcctcagttaatggtttttcttttcctcatgatgtaacaagagaatttatcctgatgatgtaaacctagagatactactggtagc

SEQ ID NO: 932031 - DNA, 120 bp, Artificial Sequence
  ENSG00000257890_3 (sequence is synthesized)
catttttatcaccaagtgataacagagatggcctgagaatgaagccaagaaagagcaccacagaactaagagaaagaacagcttctggatacctgaacatgtggaagttcctggagggtg

SEQ ID NO: 932032 - DNA, 120 bp, Artificial Sequence
  ENSG00000257890_4 (sequence is synthesized)
gtgcacccaggaacttgcacatgttccaagcaagagaaagcatggaaactctgcaccccttcccctcattcctcaccctagtatctcttcatctgtatcctttgcaatatcctttataat

SEQ ID NO: 932033 - DNA, 120 bp, Artificial Sequence
  ENSG00000255026_0 (sequence is synthesized)
tgagccactccaggaggaggtgtgggcccacggcgtgttggaggtggagccacaggacctgtccataggttggatgctgtgtgggtgacagagagaaaccggggctcacggcctgggcag

SEQ ID NO: 932034 - DNA, 120 bp, Artificial Sequence
  ENSG00000255026_1 (sequence is synthesized)
cgggacgggcggagtcgtcctcacctgtgctggggaccctgtgggagcagcaggcttccgagcacgtgctggaccccggcgtctccggctgcaccgagtggtcaggacattgaggccggg

SEQ ID NO: 932035 - DNA, 120 bp, Artificial Sequence
  ENSG00000255026_2 (sequence is synthesized)
tcagggagcgtgagataccgggacgagcgggcccagggctgagcccagcggcgtccgggtgggcggtggcgttgagatgggaattgggaattgcaccggtggtctcaggaggatggaaaa

SEQ ID NO: 932036 - DNA, 120 bp, Artificial Sequence
  ENSG00000255026_3 (sequence is synthesized)
cgagtgagacgtccatgagccttcccggcaaaacgcccaataagggagaaggggcaggcgcggcgggggccggggttccctgaagtccccttcgtttccagaatccctaaagatcattcc

SEQ ID NO: 932037 - DNA, 120 bp, Artificial Sequence
  ENSG00000255026_4 (sequence is synthesized)
gccccccagggaggaaacccaagctccgccgagcgcggcgggtctgtgccttcgcttcgcttccagcctctcgcttccttctgacccgaccccgagttctttctccggacggtgtcgaga

SEQ ID NO: 932038 - DNA, 120 bp, Artificial Sequence
  ENSG00000255026_5 (sequence is synthesized)
tgtcgagaacccgggcgccggctggggctggagtctcgctggcctcggagcgcccccgagccctcgggcgacagcgaggcgaggacccagggaacgccaggcccccggacgcgacccacg

SEQ ID NO: 932039 - DNA, 120 bp, Artificial Sequence
  ENSG00000255027_0 (sequence is synthesized)
agagagaagagtaagctttcatgggggttgcacctgcaggagcagctaccactccagggctggagaaccctaaggaagagttttgaaggagggttccagagcctgtgacccagacatctg

SEQ ID NO: 932040 - DNA, 120 bp, Artificial Sequence
  ENSG00000255027_1 (sequence is synthesized)
aggagggggctcaactcagcgggagctggggtctccgggtgtgaagaaaggactcctgcacccagacctctgcggaaggggcacctgccagctggtgctggggtctctcaggcttcattt

SEQ ID NO: 932041 - DNA, 120 bp, Artificial Sequence
  ENSG00000255027_2 (sequence is synthesized)
ggctgtgatcatagcctcagatgcttctcaactggagcaaactcaagcaggctgtttgaaaacattttgaaaacctcccagccagaaaccttgttccagcagtgcagagcagctcaggcc

SEQ ID NO: 932042 - DNA, 120 bp, Artificial Sequence
  ENSG00000255027_3 (sequence is synthesized)
cagattctgccctgtgggcggagaaacggtagctggactagaaaacctcaggtagattctagcaccaagctcggttctcagaactacatttcccacaaacttggactacacctcccatga

SEQ ID NO: 932043 - DNA, 120 bp, Artificial Sequence
  ENSG00000255027_4 (sequence is synthesized)
agatgcttctcaactggagcaaactcaagcaggctgtttgaaaacattttgaaaacctcccagccagaaaccttgttccagcagtgcagagcagctcaggtcctgccttgaatcaaaagg

SEQ ID NO: 932044 - DNA, 120 bp, Artificial Sequence
  ENSG00000255027_5 (sequence is synthesized)
aaggagactgagcctctcagaggaccaggaaccaagccaaggcttgacaaaaccagcctctctctctctgctgtctggaaaggcaggcactgagagagatgaccttggccaggccatgca

SEQ ID NO: 932045 - DNA, 120 bp, Artificial Sequence
  ENSG00000255027_6 (sequence is synthesized)
tcgtgttaatgcagctgtgacacaggatggctttgctgcctcctaggtggtgagacaaagggacgtgaggagggggcaaaagggaacgcagaaaaatacctggttcatgcagacctgtgg

SEQ ID NO: 932046 - DNA, 120 bp, Artificial Sequence
  ENSG00000255027_7 (sequence is synthesized)
gaacagctgccaaacaaaaattactgaggacatttgtgagggtaactggcggagatcttaccagagatttgaactgtaaaggaaagtggtaaagttttatttaggacaccccaaggcgga

SEQ ID NO: 932047 - DNA, 120 bp, Artificial Sequence
  ENSG00000255020_0 (sequence is synthesized)
ggagagtccgcgcgcatcgcccggctccgcggcgccagccatggcgtccgtgcgtggccccgccagggatggggcgacgcggtcagagccgcacgcgaccgaaatccgcactctggagcc

SEQ ID NO: 932048 - DNA, 120 bp, Artificial Sequence
  ENSG00000255020_1 (sequence is synthesized)
gcagagcgcgcggtcttgctgtttagcggctccctggcaagtgacgtggggaagaaacgcagggcgcaggagagacagctggaaagcgggctagccaggccccgttttcttcagcttctc

SEQ ID NO: 932049 - DNA, 120 bp, Artificial Sequence
  ENSG00000255020_2 (sequence is synthesized)
ccttgacttgatccctgaagatggctctgcctctggcgcccttgaaatatgtcgactaggtcatgatcaccgtgcattctgctcagcgtagtctccccgcctgaagtgttattaatgcag

SEQ ID NO: 932050 - DNA, 120 bp, Artificial Sequence
  ENSG00000255020_3 (sequence is synthesized)
tctaaaatgactacggttctgcggtctaccgaactgcccacggaggtaggggtttcagacttttggcatctcaagagacttgagattaccgagaccacgatacccccagagacgtgacga

SEQ ID NO: 932051 - DNA, 120 bp, Artificial Sequence
  ENSG00000255020_4 (sequence is synthesized)
gggaccagaatgctgacccaggcaacctgtccctgcctcgctgccctttgtaatactccttatcatatcatgaggagctattttccgttctccacaaacttggtggtggatggaagagga

SEQ ID NO: 932052 - DNA, 120 bp, Artificial Sequence
  ENSG00000255020_5 (sequence is synthesized)
tatcaagctcaccttgagtgggattgaggtaggaggcggggctcagacaccagaccagattgaggacaaactaaagcaaggtcagggccaaagcagctttccaacagataggaccaccag

SEQ ID NO: 932053 - DNA, 120 bp, Artificial Sequence
  ENSG00000255020_6 (sequence is synthesized)
ggtgccacgtcagtttaccgttgccatgtcaataccagggagttaccgcccctttccgtggcagtaacccaataattaccaccccttccctagaaatttctgcataaaccgccccttaat

SEQ ID NO: 932054 - DNA, 120 bp, Artificial Sequence
  ENSG00000255020_7 (sequence is synthesized)
atatatataaaactgcaaaactgccctgagctgctcctctctgcctatgggggagccctgctctgcaggagcagtcacggagctgtaaccctgcctcttcaataaagctgttttcttcta

SEQ ID NO: 932055 - DNA, 120 bp, Artificial Sequence
  ENSG00000255021_0 (sequence is synthesized)
tgtgctctggggaccgctgcatcctcaggctgtggactaggaagctgagggtcacccagacaagaggaggtgctggaggtcacacagtgaatatgcctcgctggccttcctgtctggcgt

SEQ ID NO: 932056 - DNA, 86 bp, Artificial Sequence
  ENSG00000255021_1 (sequence is synthesized)
cacacagtgaatatgcctcgctggccttcctgtctggcgtgtcttcctctgcccccatccacagtgagctgcgatctcactgtcag

SEQ ID NO: 932057 - DNA, 73 bp, Artificial Sequence
  ENSG00000255021_2 (sequence is synthesized)
tctcctggctcaaaaagctccttttgtaattttcctttgtaatccctttgtaattttcctttacctacccaaa

SEQ ID NO: 932058 - DNA, 120 bp, Artificial Sequence
  ENSG00000255028_0 (sequence is synthesized)
aaagttttaaagctaacaatatttgataggatgtaaaggacatagtggttgtcttgtgaacatcaattatatacctttgctgctgtgagcaacagtatggcaagggtaggtttggccctc

SEQ ID NO: 932059 - DNA, 120 bp, Artificial Sequence
  ENSG00000255028_1 (sequence is synthesized)
actctgcccctagaatgctccctgagtgctaattctcatcaaggtataaaataagttcaacactggcaaccatctgataaccacagagaaatgagactgaggataaaactaatctaaaga

SEQ ID NO: 932060 - DNA, 120 bp, Artificial Sequence
  ENSG00000255028_2 (sequence is synthesized)
gtgccctttatcacacagctaacaacgctcctggcccatggatcagagaagttgaaggaaaatacagaggaagttctaacagtggcagacctaattactgcaccatgccaagcaggtaat

SEQ ID NO: 932061 - DNA, 120 bp, Artificial Sequence
  ENSG00000255028_3 (sequence is synthesized)
ccagcaggagtggtgacagtttgagacaaggacaagagcaccagacttcagaacttgacatccacaaaatagactgatttaaagtgttggaggaatacaaactgaagaactgtagagagg

SEQ ID NO: 932062 - DNA, 120 bp, Artificial Sequence
  ENSG00000255028_4 (sequence is synthesized)
ggtcaggcccccaccacttcctccacccatcagacctctgacctacagaactatcaggtaaaatattttcccaggggttcaagctgagttttgacccaagttattgtcctagaatctgtg

SEQ ID NO: 932063 - DNA, 120 bp, Artificial Sequence
  ENSG00000255028_5 (sequence is synthesized)
ggggaagtacaagtaaaccttaaagaagacaaataacaccttatgaggtgtttgccttaggtgagtcttatttatattttccaggcaacaagaatatgacatcctgtaacaatggcgagt

SEQ ID NO: 932064 - DNA, 120 bp, Artificial Sequence
  ENSG00000255028_6 (sequence is synthesized)
gaatgatttccacatgcttagaggtttgggagaatctggaagttcacggttcccaagcacatctatctcaaatatccccatctcaggtctcaggcatactcctttcctatcaaggcataa

SEQ ID NO: 932065 - DNA, 120 bp, Artificial Sequence
  ENSG00000255029_0 (sequence is synthesized)
tcagccttctgagtatctgggatcgcagttgtgcaccaccacgcccagaaaaattgagtggtaactgaagatggcaaaacaccgcatcagaacgactcagtcacagtggcaattgttttg

SEQ ID NO: 932066 - DNA, 120 bp, Artificial Sequence
  ENSG00000255029_1 (sequence is synthesized)
aaagatgatgaaagaagggctagcctgaaagaaacttctgccttctttggaaatgagatgcaaaaagtatggctccctgctacaacaaaaatggatcccccaaggaggacataactggaa

SEQ ID NO: 932067 - DNA, 120 bp, Artificial Sequence
  ENSG00000255029_2 (sequence is synthesized)
tgaaaatctcagccagctagaggaccagagacattctcatcaagattaaagccagagcaaccaccaccaacaaatgatgacaaatccctgccaggattggagtgggtttgaatggcatag

SEQ ID NO: 932068 - DNA, 120 bp, Artificial Sequence
  ENSG00000255029_3 (sequence is synthesized)
ctggcccctggtactcctgagtggttagatcgtcagtcttacctgttcattttgttaacctcatagtagtacagcaacatattttacttgtttgaattgtttgtgttagaatcaggtatt

SEQ ID NO: 932069 - DNA, 120 bp, Artificial Sequence
  ENSG00000255029_4 (sequence is synthesized)
aaccttgtaggcaacatggataatatatttctgtagttcaacataatttccattttaaattcacaatttattagagcagcagaaaataatgtcaataaaattgaagcctctttttcttaa

SEQ ID NO: 932070 - DNA, 120 bp, Artificial Sequence
  ENSG00000255029_5 (sequence is synthesized)
aataaatcaccctatttcacctgtttggtctctccagtcctctgattcctgcagtatttttctgggggctcctgtgggattggagatgacaggtttactgtctcctttgcctgtgggact

SEQ ID NO: 932071 - DNA, 120 bp, Artificial Sequence
  ENSG00000255029_6 (sequence is synthesized)
tgaaccccaggcaaggggagacccatgacccctggtgccatcagaagaacttcaacgcagagaggagattggctgtcctgcaactcagtgcccttccctgatagtgcaacgaaatctaag

SEQ ID NO: 932072 - DNA, 120 bp, Artificial Sequence
  ENSG00000225249_0 (sequence is synthesized)
atatacagcatggaacagggctccacaaggacatgaataccaggtggcagggatcactgggccatctctctaaatcacgaatgaaacatttgcaacctgtgtctcccaaacatgatatgt

SEQ ID NO: 932073 - DNA, 120 bp, Artificial Sequence
  ENSG00000225249_1 (sequence is synthesized)
ctcaatcatcaaaggatctacagtgactacaataaccaagtgctacaaaaacgctgtgacgaggaatctgaacaacagagatttgagggaaacaaaacactttcgacgaaggtcctgctg

SEQ ID NO: 932074 - DNA, 120 bp, Artificial Sequence
  ENSG00000225249_2 (sequence is synthesized)
cttgtcttcagcttggtaccaattagagcttcactggaggtgaaaaaatcgcggcatgtcttccaaggaaaaaactgtaactaaatctatggcaagtttttggattagaaaaatctaggc

SEQ ID NO: 932075 - DNA, 120 bp, Artificial Sequence
  ENSG00000225249_3 (sequence is synthesized)
ttcatgaagataagagcagagctgtggaaaagtaagacaaagaaatcatccaacaatacaagcaacatacaagaggtttgcagtctatcaatgaaaactgattaaatttacataagtgct

SEQ ID NO: 932076 - DNA, 120 bp, Artificial Sequence
  ENSG00000225249_4 (sequence is synthesized)
caatctatagtgtgtgcaatggaacttgaaaagagtactacaagactgcctcctcaccatttcccaatgacctgtacaattaagcaaacgacatattctttgattgcttgtgtgttggcc

SEQ ID NO: 932077 - DNA, 120 bp, Artificial Sequence
  ENSG00000225249_5 (sequence is synthesized)
tggaacactaaatctcatagttcattagtatgcgttgttagatgtttcaattcccagctacggtgttgtctggaagaaacagcctcaggaggggcttatatcacttctgtcctccttccc

SEQ ID NO: 932078 - DNA, 120 bp, Artificial Sequence
  ENSG00000225249_6 (sequence is synthesized)
agccaagtaaagtaaagcaaaagagaaacaactttcaaaaggactgaaacactatggactcaatttccatgtgctgcactaaatggggtccttagagcatcccgggctgtctttgctctg

SEQ ID NO: 932079 - DNA, 120 bp, Artificial Sequence
  ENSG00000225249_7 (sequence is synthesized)
attttatcagagtaaaaaatttaaattttgcttatgataggctgaagttcttataaggaggagaattctggaagaattttaaagagacatgattaaaaataaatgctgcacattgacaaa

SEQ ID NO: 932080 - DNA, 120 bp, Artificial Sequence
  ENSG00000225249_8 (sequence is synthesized)
ttggtaccaattagagcttcactggaggtgaaaaatatttctccatccctctactttgagcctatggatgttgttacatttaaggaaaaatcagtgttcttgaggcttgctttgcaaaag

SEQ ID NO: 932081 - DNA, 120 bp, Artificial Sequence
  ENSG00000225249_9 (sequence is synthesized)
gacggtttgttgtataaagaaaatacttcatgtcttgctgtctgaagctccagaggggacattgacagaaagaacattaataagaacagagaagcagagaagccttggaaatcatgcttt

SEQ ID NO: 932082 - DNA, 120 bp, Artificial Sequence
  ENSG00000225249_10 (sequence is synthesized)
tatctgaatggaggaagaaataaaaggagaggtaaaatgaaatcttgccacactgcatgctccctcttctctttgttcctgtccatttctaatattaaaataagaacctttcttaactaa

SEQ ID NO: 932083 - DNA, 120 bp, Artificial Sequence
  ENSG00000225249_11 (sequence is synthesized)
gcttggtaccaattagagcttcactggaggtgaaaatttcagatattgcaagaaaagaagcaaaaaaaaaaaaaaaagcacagtgtgaaaaatagtgatgtgaacctgacagtcactata

SEQ ID NO: 932084 - DNA, 120 bp, Artificial Sequence
  ENSG00000225249_12 (sequence is synthesized)
ggactgttctcaaagttaatataattgaattaattctgacatgccacatttatatatactgaggctttttgtttttaaaagaaaataaaaatgtgatattattcttctcaacataataaa

SEQ ID NO: 932085 - DNA, 120 bp, Artificial Sequence
  ENSG00000225249_13 (sequence is synthesized)
tttatctgaatggaggaagaaataaaaggagaggatggaggagcagaggaaaccttggtgtcttccaactggtaagaagtagttgaagctgagctgaacatgtcatctgttcttaaattt

SEQ ID NO: 932086 - DNA, 120 bp, Artificial Sequence
  ENSG00000225249_14 (sequence is synthesized)
atcaattaggggatggagtctcactatgctgctcaaggtggtctcaaactcctcggcttaagtgatccctctgcctcagcttcctaagtgctgtcattacagttgtaagccaccacacct

SEQ ID NO: 932087 - DNA, 120 bp, Artificial Sequence
  ENSG00000225249_15 (sequence is synthesized)
agtcctcaactttgtttagtcatagcattgcctatatctattttgaatattactcttctagaatctaccatatctgtgactcttggatatggtaaaataaactattgtgaattaatctcc

SEQ ID NO: 932088 - DNA, 120 bp, Artificial Sequence
  ENSG00000225249_16 (sequence is synthesized)
cttgtcttcagcttggtaccaattagagcttcactggaggtgaaaagggcagacacggttgctgagtggctggttggagagtccctgagagattacccaagaaactcagttgcggcacgt

SEQ ID NO: 932089 - DNA, 120 bp, Artificial Sequence
  ENSG00000225249_17 (sequence is synthesized)
ctggttttttttcttggatgcaacaactactttaaatggtctccctgactctaatcttccccgaacagtctctttacctcctatatttagaaagatctttttaaaaaggaaattttctat

SEQ ID NO: 932090 - DNA, 120 bp, Artificial Sequence
  ENSG00000225249_18 (sequence is synthesized)
ctttaattatctgtttaactaaacagatttttttttttactgtctttaacattaagtccaaattcctcatcataatttacaaaactacttaagattcttgttctattactgcttcctgtt

SEQ ID NO: 932091 - DNA, 120 bp, Artificial Sequence
  ENSG00000225249_19 (sequence is synthesized)
cactccttccttttgcagtctttgctaaagcatactgaattgatatcaactccttaaacaagtcatattgttttgcaactctggggccacctttatagctctcccttgtccttgagtatt

SEQ ID NO: 932092 - DNA, 120 bp, Artificial Sequence
  ENSG00000225249_20 (sequence is synthesized)
ctaaccccatcccttcatctgtataaatcccactcttcatttagattttggcttcaggttactattttaaagagctttgcttggctcctagaaatacagcaccatgtatttcttctatca

SEQ ID NO: 932093 - DNA, 120 bp, Artificial Sequence
  ENSG00000225249_21 (sequence is synthesized)
taacatgtccctttcttttctggtatatttcctggtatattgtaagctctgtgagattggggcctgtaggtgcctccaacatgtagcacagtacctggcacactgaatgagaaaatgctt

SEQ ID NO: 932094 - DNA, 120 bp, Artificial Sequence
  ENSG00000225249_22 (sequence is synthesized)
tgtatggagtttatatctcagttatgaaatgtattagctacatgaccatgggcaaattatttgaccttttaaaatatcattatccttatctctacaaataaatctagaactaaattatct

SEQ ID NO: 932095 - DNA, 120 bp, Artificial Sequence
  ENSG00000225249_23 (sequence is synthesized)
taactataggaaatggaggctgttatcagcatctagcttaggatggcgagccaagcatggctctcaggtgcaactcacatggagacgtggctctcaggtaaaagatacaactcaggtaca

SEQ ID NO: 932096 - DNA, 120 bp, Artificial Sequence
  ENSG00000225249_24 (sequence is synthesized)
aaggacatgaataccaggtggcagggatcactgggccatctctctaaatcacgaatgaaacatttgcaacctgtgtctcccaaacatgatatgtctcaatcatcaaagcgtctcgctctt

SEQ ID NO: 932097 - DNA, 120 bp, Artificial Sequence
  ENSG00000225249_25 (sequence is synthesized)
gcctaagccttgctatatcaagcttttctagagacagattctaatctgcatgcttatggttaaaggaggcattgtaatatggcacatgaccaagaaagcaccctcagcctgtttcttcag

SEQ ID NO: 932098 - DNA, 120 bp, Artificial Sequence
  ENSG00000225243_0 (sequence is synthesized)
aggaagactgcccttgatagggactataccaagttcttctttgcagcaaaacctcagggttttgagtctcgtattcacatctttttactaagaagggctcctccagactcctggtgtata

SEQ ID NO: 932099 - DNA, 120 bp, Artificial Sequence
  ENSG00000225243_1 (sequence is synthesized)
gagcagcattcttactcagctcaacagcaatatctgagcctgagtttcccattccaatcaccaggatgcgttttccctcaaatccatctggatgcttgtattggcggctatggaaatatt

SEQ ID NO: 932100 - DNA, 120 bp, Artificial Sequence
  ENSG00000225243_2 (sequence is synthesized)
ggcctttgaacctctccataccttcagggggaagaagagagaagtctgtgagctccagagcaactatgtcaagctaatttcaataaaactgcattgccagcttttcctttctggagttaa

SEQ ID NO: 932101 - DNA, 120 bp, Artificial Sequence
  ENSG00000225243_3 (sequence is synthesized)
gagtctcgtattcacatctttttactaagaagggctcctccagactcctggtgtatatttgttggaggccttaagctgttcgtggcagtacattgcggagcatagaacgaaaccgggtgt

SEQ ID NO: 932102 - DNA, 120 bp, Artificial Sequence
  ENSG00000225243_4 (sequence is synthesized)
tttattcctaattaaatggggagacaagtctttccagaggaacttctactttactttttacaattcctcctcttatttcataattcttcttcaaacttgtttaatatgttttgacttaat

SEQ ID NO: 932103 - DNA, 120 bp, Artificial Sequence
  ENSG00000225243_5 (sequence is synthesized)
tgctttgtttgtccttttaagagaagtaatttttctgaataaggtggaggagagttaggagttaactctgtaagcatggcagagacaggtttttgtgtaaaacttcgacggtagggaata

SEQ ID NO: 932104 - DNA, 120 bp, Artificial Sequence
  ENSG00000276131_0 (sequence is synthesized)
ccccgcacccaaaggctcacctgtgggaccgcgttgtcagtctcggcgcctgcgctccgctccaggaagaaagcgccaaggcgaggcatggcggtctccgtgcgcaccggcagcttctcg

SEQ ID NO: 932105 - DNA, 120 bp, Artificial Sequence
  ENSG00000276131_1 (sequence is synthesized)
tgggacatcaggatgtcgtccaaagaaagaaagttctcctcaggccccagcgcacccgactccactcggaaataagcctctgacatggcggccacttgagcttctccgcttccactcgcg

SEQ ID NO: 932106 - DNA, 120 bp, Artificial Sequence
  ENSG00000276131_2 (sequence is synthesized)
ggcaggatggttggggtcaggaaagtggattgaaactcgtttcccgcgcccggggacgcatcagacaggagcagtcaattcgggcggtaccgcccaggcagaagcaatcgatcaagtctg

SEQ ID NO: 932107 - DNA, 120 bp, Artificial Sequence
  ENSG00000276131_3 (sequence is synthesized)
cagatttagagcagcgggacacggctggggagcggtaggtgggggcgccggaagttctcttccctccgcttgctgcacggtgtgggaacgttacgaagaagctggaacgctcgttgaagc

SEQ ID NO: 932108 - DNA, 120 bp, Artificial Sequence
  ENSG00000276131_4 (sequence is synthesized)
tcctggacccatttgtactggattgtgttcatgtgatccttaactatttatatgaaattaaaaacactttgcaacacttttaggggtttaaaataaaagcatcttgtgcccttcactcca

SEQ ID NO: 932109 - DNA, 120 bp, Artificial Sequence
  ENSG00000276136_0 (sequence is synthesized)
agactctgtctcaaaaaaataaaaatgtgtatctctgtcattgggattcctataagcttgtgcctagacaggatagttattttatctttaagaccctgttaaagcctgcctgaggtctta

SEQ ID NO: 932110 - DNA, 120 bp, Artificial Sequence
  ENSG00000276136_1 (sequence is synthesized)
accctgttaaagcctgcctgaggtcttatctgcattcccctgtgggctgactcagcacctggttgccttgtattctcctgattatgaatctttcaacctctaggacatggaccattaacg

SEQ ID NO: 932111 - DNA, 120 bp, Artificial Sequence
  ENSG00000276136_2 (sequence is synthesized)
tttagtatacttggctgtagctactttaagcttagatatctgccttcgaatattctaccttttttaaaataaaatataaatgtctagtgattctttcgttgttgtttttattttttggag

SEQ ID NO: 932112 - DNA, 76 bp, Artificial Sequence
  ENSG00000276136_3 (sequence is synthesized)
gattctttcgttgttgtttttattttttggagacacggtcttgctgtgccacccagactcgagtgcaatggtgtgg

SEQ ID NO: 932113 - DNA, 120 bp, Artificial Sequence
  ENSG00000276136_4 (sequence is synthesized)
accaccatccttggataattttttattttttagagaaatgaggtctccctgtgttgcccagtctggtcaggctcaagcaatcctcccatgtcagcttcccaaagtgctggattacaagca

SEQ ID NO: 932114 - DNA, 120 bp, Artificial Sequence
  ENSG00000276136_5 (sequence is synthesized)
taagccaccatgcctggctgtatcctgctttctgttataatagagtggattttgtcatcttgatagcccacacaacgttggtccgtttctttgatgatattatgctaattggacctgaca

SEQ ID NO: 932115 - DNA, 120 bp, Artificial Sequence
  ENSG00000276136_6 (sequence is synthesized)
agcagaaaataataaacatcctacaagacttaataaaacacatgcatgacgggatgggaaggaaatcttgaataaaaattcatgattgaccacattcgtaaggtttttagggtctgattg

SEQ ID NO: 932116 - DNA, 120 bp, Artificial Sequence
  ENSG00000282160_0 (sequence is synthesized)
gcgtccaccaactaggagcttaatcaacacaacgctgtggcctctccagctcagggacgtgcctttcccgtgtcttcttctcacacacaaacgtagcctgcaaggaagacttaagaggcc

SEQ ID NO: 932117 - DNA, 120 bp, Artificial Sequence
  ENSG00000282160_1 (sequence is synthesized)
ggctggacaagcaaccagaacaggtgcttccccaggatgtccagaaacaagcagagaccgtgaaggacatttaacctcaccaccaattccatgtgtgcccatgaaaacaagattccattg

SEQ ID NO: 932118 - DNA, 120 bp, Artificial Sequence
  ENSG00000282160_2 (sequence is synthesized)
ttggctgacagattggcaaagattaatactagccaatgttagcaaagacatgaaaaaatgggccgttacggttcctgcttacttattaaacatttctgtgggccagtttggcaatttgaa

SEQ ID NO: 932119 - DNA, 120 bp, Artificial Sequence
  ENSG00000282164_0 (sequence is synthesized)
agagccgcagcggtacatggaagacctgggcgggcaggcgtccttactacgcggatcatgttgcggctgaagtcgcgaaccgagacgtagctgggtgtcccgaccctgcatacagcagta

SEQ ID NO: 932120 - DNA, 120 bp, Artificial Sequence
  ENSG00000282164_1 (sequence is synthesized)
gaagacctgggtgaccgtcagtaccctgtgaattgaggcactcctgaagccatgcgctgagacctggctgggtgtcgctaccctgctgacggctgcggaggaccttggtgggcatcagta

SEQ ID NO: 932121 - DNA, 120 bp, Artificial Sequence
  ENSG00000282164_2 (sequence is synthesized)
ccctgcggattgtagggatgctgaagctgcgcactgagacctagctgcgtatctcccctgcggaaggctgcggaggacttgggtgggcgtcaataccctgaggattgtggcactctttcc

SEQ ID NO: 932122 - DNA, 120 bp, Artificial Sequence
  ENSG00000282164_3 (sequence is synthesized)
gcagttccctgctctaggctgcggaggacccgggtgggcgtcaataccctgaagattgcggcactccttccgcagtcccttgctcttggctgcggaggacccgggtgggcgtcaataccc

SEQ ID NO: 932123 - DNA, 120 bp, Artificial Sequence
  ENSG00000282164_4 (sequence is synthesized)
tgaagattgcggcactcgttccgcagtcccttgctctaggctgcggaggacccgggtgggcgtcaatactctgcggatcgcggggatgctgaagctgcgcgctgagacctagctgggtat

SEQ ID NO: 932124 - DNA, 120 bp, Artificial Sequence
  ENSG00000282164_5 (sequence is synthesized)
ctcccctgcggaaggctgcggaggacctgggtgagcgtcagtaccctgaggattgtggcactcctgcagctgcgcagagacctagctgggtgtcctcccctggagaaggctgcggaggac

SEQ ID NO: 932125 - DNA, 120 bp, Artificial Sequence
  ENSG00000282164_6 (sequence is synthesized)
cagcgtgggcatcagtaccctgcgcgtcacggggatgctgaagccgcgcactgagacctagctgggtgttcctaccctgtggaaggctgcagagacccgggcgggtgtcagtaccctgtg

SEQ ID NO: 932126 - DNA, 120 bp, Artificial Sequence
  ENSG00000282164_7 (sequence is synthesized)
gattgcggcactcctgcagctgtgcagagacctagctgggtgtctcccttgcagaaggctgtgggggacccgggcgggggtcagtaccctgtagactgcggcactcctgcagctgcgcac

SEQ ID NO: 932127 - DNA, 120 bp, Artificial Sequence
  ENSG00000282164_8 (sequence is synthesized)
tgagacctagctgagtgtcttccctgcggacggctgcggaggatctgggcgaacgtcattactttgtggatcccgggatactgaagcagctgagacctagctgtgcgtcgtcccctgtgg

SEQ ID NO: 932128 - DNA, 120 bp, Artificial Sequence
  ENSG00000282164_9 (sequence is synthesized)
aaggctgtggagaacccgggtgggcttcagtaccctgaggattgcggcactcctgcagctgctcgctgagacctgtctcccctgcggaaggctgcggagaactctggagggcgtcagtag

SEQ ID NO: 932129 - DNA, 120 bp, Artificial Sequence
  ENSG00000282164_10 (sequence is synthesized)
cctgcggattgcggcactactgcagttgcgcagagacctcgctgggtgtctcccttgcagaacgctgcggaagattcaggagagcgtcagtaccctgcggactgcggcactcctgcagct

SEQ ID NO: 932130 - DNA, 120 bp, Artificial Sequence
  ENSG00000282164_11 (sequence is synthesized)
gcgcagagacctagctgggtgtctcccctgcggaaggctgcgcaggatcacggagggcgtcagtaccctgcggactgcggcactcctgcagctgcgcactgagacctagctgagtgtctt

SEQ ID NO: 932131 - DNA, 120 bp, Artificial Sequence
  ENSG00000282164_12 (sequence is synthesized)
accctgcggtggcgacggagaaccccggtgggcgtgtttaccctgtgaatggcctagcgctgctaaagccccgcactgagacgtagctgggtgtcctcccctgtgcacggctgtggagga

SEQ ID NO: 932132 - DNA, 120 bp, Artificial Sequence
  ENSG00000282164_13 (sequence is synthesized)
tctgggcggacgttgttactttgtggatcgcgggaatgctgtagctgcgcactgagacctacctgggtgtcctcccctgtgcacggctgcggaggatctgggcgggcgtcattactttgt

SEQ ID NO: 932133 - DNA, 120 bp, Artificial Sequence
  ENSG00000282164_14 (sequence is synthesized)
ggatcgcgggattgctgcagctgcgcacttacatctagctggtgtcttcccctgcggacagctgcggaggacctgggtgggcgtcattactttgtgcatagcaggaatgccgcagctgcg

SEQ ID NO: 932134 - DNA, 120 bp, Artificial Sequence
  ENSG00000282164_15 (sequence is synthesized)
cactgagacctagctggtgtcgtcctctgcggacggctgcagaggatgagaggagggaggaggcgtcgttactttgtgcatcgcggggatgctgaagccatgcactgagacctaactggg

SEQ ID NO: 932135 - DNA, 120 bp, Artificial Sequence
  ENSG00000282164_16 (sequence is synthesized)
tgtccccacccagtggacggctgcggagaacccgggcgggcgtcattatactgcgggggcgggcgtcattatactgtggaaggtggtgctgcgggaactgtacagagacctagccgggtg

SEQ ID NO: 932136 - DNA, 120 bp, Artificial Sequence
  ENSG00000282164_17 (sequence is synthesized)
ttcctgccctgcggatggcagcggagaaccctggggggcgtttttagcctgcggatcgcctggtgctgctgaagccgcgcttgaagacctagctgagtgtcctcccctgcggaagcctgc

SEQ ID NO: 932137 - DNA, 120 bp, Artificial Sequence
  ENSG00000282164_18 (sequence is synthesized)
ggaggacctgggcggactctttaccctgtggattgcgccgctgctgaagccgcgcacggagacctagctgggtgtcttcccctgtggtaggctgcggaggatctgggtggctctggagat

SEQ ID NO: 932138 - DNA, 120 bp, Artificial Sequence
  ENSG00000282164_19 (sequence is synthesized)
cgcaggaatgctgaagcctcgcgctgagatctaggctgagtgttctccgctgtggatggctgcggatgacccgggcgagctctttaccccgctgatctcagcgctgctgaatcccctgca

SEQ ID NO: 932139 - DNA, 120 bp, Artificial Sequence
  ENSG00000282164_20 (sequence is synthesized)
ctgagacctagctgagcgttccctaccctgcagatagctgtggaggaccccggcaggcgtccttaccctgcggattgcctggtgctgctgaagccggcactgagagctacctgggtgaca

SEQ ID NO: 932140 - DNA, 120 bp, Artificial Sequence
  ENSG00000282164_21 (sequence is synthesized)
ctaccctgcggttggctgcggaggacctggtgagcgtctttactgtgcggactgcggcaagggtgcgactgcgtatgttggtgggcatccttatccttcagacggcggcaattctgcagc

SEQ ID NO: 932141 - DNA, 120 bp, Artificial Sequence
  ENSG00000282164_22 (sequence is synthesized)
tgctcattgaggacatgagctggcatctttcccggtaggactgcggcacgtctgtagccacgcactaaggacctgggtaggcgtcatgaccctgggagcagcggcacagctgcgactgcg

SEQ ID NO: 932142 - DNA, 120 bp, Artificial Sequence
  ENSG00000282164_23 (sequence is synthesized)
ccaggcaggctcctcactctgccgactgcagcgcgcctgtggttgtgcaccaaggacccacccagacaggcgttcttaccctgtggacagcggcacagctggggctgtgcaccccaagat

SEQ ID NO: 932143 - DNA, 120 bp, Artificial Sequence
  ENSG00000282164_24 (sequence is synthesized)
ccagctgggcattcttatcctgccgactgtggcacgtctgtggccaggagtttttatggtgtggacagcagcacagctgcggctgcacactacggacccagacgggcgttcttgccttgt

SEQ ID NO: 932144 - DNA, 120 bp, Artificial Sequence
  ENSG00000282164_25 (sequence is synthesized)
agactgtggcagggcggtggcggggcacccacgatgcaggcgagtgtattaccctgcgactggcaacacaggctgcgcagccaggactcaggcgggagtccttactctgggggagtcctt

SEQ ID NO: 932145 - DNA, 120 bp, Artificial Sequence
  ENSG00000282164_26 (sequence is synthesized)
accctacggactgtggcacaactgtggctggcacaagaacccaggtgggcgtccttaccctgcagacagtggcagggctgcgcatggcggactcgggtgagccgtctcatcctgtggacc

SEQ ID NO: 932146 - DNA, 120 bp, Artificial Sequence
  ENSG00000282164_27 (sequence is synthesized)
gtgttactgttgcggctgtgcactcaggacctggtggggatggggtgtgtgtgttcctcttctgctgactgtgactccgtgccagctgcacggaggaccagggcaggtgtctttgctttg

SEQ ID NO: 932147 - DNA, 120 bp, Artificial Sequence
  ENSG00000282164_28 (sequence is synthesized)
tcaacgacagcactgctgcagcagtgcacgagaaccagacctggagccgggtagaggaggtccctccccttctgactgcaacacagctccacctgcaacctgagacctgggtgagcatct

SEQ ID NO: 932148 - DNA, 120 bp, Artificial Sequence
  ENSG00000282164_29 (sequence is synthesized)
ttgccctgccccgtgccattgttctggctatacaccagcgacctggacaggttttcacatctctatgctggatgggctggcccagccggttgtgcactgtgaggtgctgcaggaggagct

SEQ ID NO: 932149 - DNA, 120 bp, Artificial Sequence
  ENSG00000282164_30 (sequence is synthesized)
gcgaggacacattcttcttgacttctcagcataggaatgtctcacgtccagtccacgtccctgtcctagtcctcctctctgctccttccacacttcctcacggtggtctcctgcacgctc

SEQ ID NO: 932150 - DNA, 120 bp, Artificial Sequence
  ENSG00000282164_31 (sequence is synthesized)
gtggctgtcagtatcagacgagggcagcttctgcattttctcaattccaaccactcctctccacttacctacccagtatctctactgggtgtcttccagtcatcctgcactcaacgcgac

SEQ ID NO: 932151 - DNA, 120 bp, Artificial Sequence
  ENSG00000282164_32 (sequence is synthesized)
tgacaatttacttccaaccggctttacaatttccctgactttgttgatggcaactttttccttccagttgcttaagccagatacgttggagtcattctttaccattctgttcaacttcat

SEQ ID NO: 932152 - DNA, 120 bp, Artificial Sequence
  ENSG00000282164_33 (sequence is synthesized)
acctattcctcaagaattctggtttctctatctctaaaatgtatttggaagcagctacttcttaccttcttttcacggattcaggtcaccattcacactcacttggattattgcaataat

SEQ ID NO: 932153 - DNA, 120 bp, Artificial Sequence
  ENSG00000282164_34 (sequence is synthesized)
ttcctaactgggttccatgtttccagcttttctgtctgcagtctgttttgttttcaacatgtggccagagggatcctgttaacatctaagtgaaatatatcatttctctgcagtggctcc

SEQ ID NO: 932154 - DNA, 120 bp, Artificial Sequence
  ENSG00000282164_35 (sequence is synthesized)
ctagctgctcagagtaaaatctaatgtttttacaatggcctgaaaggctctccataaccttatcccctcccacttacctccctgtctcctctcctccctccgacactcagcccctgtgta

SEQ ID NO: 932155 - DNA, 120 bp, Artificial Sequence
  ENSG00000282164_36 (sequence is synthesized)
ttttagctattgaaagaatatgtgggcacactgctaatttattgtctttgtggaggcttggtttgtgcattccttatttcaaacacttatgggtggactctggtaatgagcagtcatatt

SEQ ID NO: 932156 - DNA, 120 bp, Artificial Sequence
  ENSG00000282164_37 (sequence is synthesized)
tatgagtccccctccaagtgaggagatgtactaggtggaatgtgcgccctccctcacgtggtatactcttgatacagagccaagcaggtagtaccgttggtcctgctttgtaggtgaggg

SEQ ID NO: 932157 - DNA, 120 bp, Artificial Sequence
  ENSG00000282164_38 (sequence is synthesized)
aaagcagacccaaaatgaaggaagttgtccagggttacatgctgggaagtggtggaggtagaattcaaacccggagcgcaggcgttgtctgcacctcggagaggcaccgctcttcctgaa

SEQ ID NO: 932158 - DNA, 120 bp, Artificial Sequence
  ENSG00000282164_39 (sequence is synthesized)
atgctcctccctggttatctatgaggctgaagtcctcacctctttcaggtctttgctgaattagaaccttctccataaggcaaggctgatgctgagcaccccactgaaaattttcctctc

SEQ ID NO: 932159 - DNA, 120 bp, Artificial Sequence
  ENSG00000282164_40 (sequence is synthesized)
tcccaagaccctcttctcagtccctctacttggctcatttcaggtgtctagcacgtcacgccctttaatacattttgcaagtatttctccacgagtgtgagaaagtggttttctttggtg

SEQ ID NO: 932160 - DNA, 120 bp, Artificial Sequence
  ENSG00000282164_41 (sequence is synthesized)
ggggttgatttttcatggcacataaagggcagcagggtttctttgggtcctgtctggaggcctgaaggtcacgctgggcttctggggagcgggtccccttcctgcagcctccctctccac

SEQ ID NO: 932161 - DNA, 120 bp, Artificial Sequence
  ENSG00000282164_42 (sequence is synthesized)
ttgcgtgtttctcactcctctctctccctgggaagtgttgcttgataaagatgcagcttttaattaatgtaactgttcaagattacagccggtcatcagctttctaaccagtgcctcaca

SEQ ID NO: 932162 - DNA, 120 bp, Artificial Sequence
  ENSG00000282164_43 (sequence is synthesized)
gctctgctggaagagccttgctccggtgatggttgatttgccattctctgtcccagcccagagaagctcccctcactgtcaacgtgccatctgtcaggtgcatgttataaagctgtcatc

SEQ ID NO: 932163 - DNA, 120 bp, Artificial Sequence
  ENSG00000282164_44 (sequence is synthesized)
atgatcagctcattcacgcaccagctttagctttgaggaactgccggccatggcgttgaagacctgctgaagcctccagccagacatctgatgttcaggtctcagggggtccttgctgct

SEQ ID NO: 932164 - DNA, 120 bp, Artificial Sequence
  ENSG00000282164_45 (sequence is synthesized)
tgtgtagcctgacaggtgtggccacggcaggcacaccatggtttggagtttggaaagaagagaccctgtgttattgtagagtgaccactggattgggcttctggaaatccaattctaatc

SEQ ID NO: 932165 - DNA, 120 bp, Artificial Sequence
  ENSG00000282164_46 (sequence is synthesized)
agacttgggttatgcatttactatttcaataaaacatttatggatggactctggtaatcaacagccatatttttgagtacccactgcaggtgaggaaataaatgtactaggtgcgatata

SEQ ID NO: 932166 - DNA, 120 bp, Artificial Sequence
  ENSG00000286679_0 (sequence is synthesized)
ttgggcaaagttgttttagcgatctggttgcaactaagtattggagttgttgtgccttgaagctagaaactgccttgaatttctacatagggaaatgtaatctattgctttcttacagat

SEQ ID NO: 932167 - DNA, 120 bp, Artificial Sequence
  ENSG00000286679_1 (sequence is synthesized)
tgccatttgccagctgacctgtgacacagcagcagtgtattacattttcaatgagcagtctgtctggagctgctagtgggagaaactgcttcctggtttctaggggaggcagatgatgaa

SEQ ID NO: 932168 - DNA, 120 bp, Artificial Sequence
  ENSG00000286679_2 (sequence is synthesized)
taaatgaacaaaaaatataataatggatatgtatttataagtgctatgaagagaagaaatccaagcaagaagagagtgaaatgaggtatcctgtaagaacaaattgctgcctcctccagg

SEQ ID NO: 932169 - DNA, 120 bp, Artificial Sequence
  ENSG00000286679_3 (sequence is synthesized)
tggaaagggatcaaatataattaatctgtgtgtgccacacagtagcttgatagtttaattgaggaatgttgacatattgagagctcagcattactttctgctatcagcagtgacgcattt

SEQ ID NO: 932170 - DNA, 120 bp, Artificial Sequence
  ENSG00000286679_4 (sequence is synthesized)
actgatcacctactctgagaaatcactctctaaactctggggatgcagttctgaggaggatacagttctgtcttcagaaaatgctgatggaaataattttaatgaacagtaatggtaaaa

SEQ ID NO: 932171 - DNA, 120 bp, Artificial Sequence
  ENSG00000286679_5 (sequence is synthesized)
ggagataaacgaaaacagaatcaatgtgtgcaaagtgacagaaaagccagtgcctgggattctgagatgcagccacatcataaagtttcattactcaattgcagtagagaaaacctcaaa

SEQ ID NO: 932172 - DNA, 120 bp, Artificial Sequence
  ENSG00000286679_6 (sequence is synthesized)
ggaaccacttctaatggaaactgcctcaattcctggtcaagtctcacagtctaacctggaggtgctctgagatgtgactaagttaaggattttgagatgaagagaccatcctgaattatc

SEQ ID NO: 932173 - DNA, 120 bp, Artificial Sequence
  ENSG00000286679_7 (sequence is synthesized)
tgagtgggtcctgaatgtcatcacaagaagccttagaagagagaagcatgaaaaccagaagaggaggaagaggcaaccgggccatgaagacaagagattagagtgatgtggccacaagtc

SEQ ID NO: 932174 - DNA, 120 bp, Artificial Sequence
  ENSG00000286679_8 (sequence is synthesized)
aagaagtgccggcctccagcaaaaaactggaagtcaggagcaggatctctcctagagcctgtggagggaatgtaaccctgccaataacttgattttggcccagagaaactgacttcagac

SEQ ID NO: 932175 - DNA, 120 bp, Artificial Sequence
  ENSG00000286679_9 (sequence is synthesized)
ttctggccttcaggatggcgagagaattaaatcgctgttgtttttagcccagtatgtggtaattttgttacaacagccacagaaaactagtacagtggatttttagcagtagaattaaat

SEQ ID NO: 932176 - DNA, 120 bp, Artificial Sequence
  ENSG00000286679_10 (sequence is synthesized)
tagcagtggattaaagagcagtagaattgtgattttatcaacacttactggatggcagatttcctctgcagcagaagagaataaaatgttgcctaggtgatgctgaccaccaaaacttct

SEQ ID NO: 932177 - DNA, 120 bp, Artificial Sequence
  ENSG00000286679_11 (sequence is synthesized)
gccatggactcagcagtgtgaacagaccctgggaatctatgtacacataaaacaccatgaacattttgcattttctgatttgaactgaataggcgttctactctgtaaatatttacaaaa

SEQ ID NO: 932178 - DNA, 120 bp, Artificial Sequence
  ENSG00000286679_12 (sequence is synthesized)
aaactaaatatatatttatgttaaccctttgctagagatttttaaacaaacaaaaaaataccagatcttattcaccatttttgatgtcagtaaagtgtgttacgcaaattggcttcaaaa

SEQ ID NO: 932179 - DNA, 120 bp, Artificial Sequence
  ENSG00000286679_13 (sequence is synthesized)
attaaaacctgtaacaaactttgagtcttgaaatgcatgctatgtatgatcttaaaaacatgtaggtaggcttattagttcatagaggttcatagtatttcatatgtttttcagactata

SEQ ID NO: 932180 - DNA, 120 bp, Artificial Sequence
  ENSG00000286679_14 (sequence is synthesized)
tgtagggaattgctgacaaatcttggtatcactaaatccattatcatgttctgaaatgtcaccaaattgagcctacatattgtgaagagtgagtgtatggccatatagtgtatggcctca

SEQ ID NO: 932181 - DNA, 120 bp, Artificial Sequence
  ENSG00000286679_15 (sequence is synthesized)
agattttgtcttataatttaagtttcaatgtccacacctcatctaaattagggtaccatttggactatcatgtttaataaatttaccactaagtaattacattaaaaacaaatttatctt

SEQ ID NO: 932182 - DNA, 120 bp, Artificial Sequence
  ENSG00000286679_16 (sequence is synthesized)
aaagatgtataaattgttttcattgaagaaggtagttactttggtagcctgttaacaaagccctgggaattataagactgtattttcatggaggcatacatgtgtagtaattgtaaaatg

SEQ ID NO: 932183 - DNA, 120 bp, Artificial Sequence
  ENSG00000286679_17 (sequence is synthesized)
tgtgtagtaattgtaaaatggttctgttttcatatctggatcttttatatgtgtgtctgaattaagaaattcccataataaaataaaatcttaatttagcaaaattaatatatagaaaga

SEQ ID NO: 932184 - DNA, 120 bp, Artificial Sequence
  ENSG00000286679_18 (sequence is synthesized)
tttaagatgatcaaataaccttgctgatcatctagtctcacaccttttttgtagaaggctagactaaaattcataaatgtaaatgatctctctaaaggcatatggcaagctattggacac

SEQ ID NO: 932185 - DNA, 60 bp, Artificial Sequence
  ENSG00000286679_19 (sequence is synthesized)
aaatgatctctctaaaggcatatggcaagctattggacacaccaggaataaaacccaggt

SEQ ID NO: 932186 - DNA, 75 bp, Artificial Sequence
  ENSG00000286679_20 (sequence is synthesized)
caggtcttctgactcctagtccaggactcatcacaaacaccatgactcattactttcattgtaaaagactctggc

SEQ ID NO: 932187 - DNA, 120 bp, Artificial Sequence
  ENSG00000286679_21 (sequence is synthesized)
taaaatagtaaaacagagtgaaagtgataccaccctattgaagatcattctaaattaaacatagatgtctttgagattataaataaaaatatactttgaatatatttgactacaaagtca

SEQ ID NO: 932188 - DNA, 75 bp, Artificial Sequence
  ENSG00000286679_22 (sequence is synthesized)
atagaactacggaaatcaatatgtctaagagacatctgtacttccatgttcattgaagcattactcacaggaatc

SEQ ID NO: 932189 - DNA, 120 bp, Artificial Sequence
  ENSG00000286679_23 (sequence is synthesized)
ctgtacttccatgttcattgaagcattactcacaggaatcaagacatggaatcaacctaagtgtttatcagtggatgaacagataaagtaaatgtagtatatatacacaatggaatacta

SEQ ID NO: 932190 - DNA, 120 bp, Artificial Sequence
  ENSG00000286679_24 (sequence is synthesized)
ttcagctttgaaaatgaaggaaacgctgtcatttaagacaacgttaattcagcctggagatcattatctctaggttgtgaaataagaaagacaaatactgcatgatctcacttaaatgtg

SEQ ID NO: 932191 - DNA, 120 bp, Artificial Sequence
  ENSG00000286679_25 (sequence is synthesized)
gaagctaaaaaagttgaactcacagaaacagaaagtaaaatagtggttaccagagtcctgggggttagtagcagggatggaaggattgagaagatgttggtcaaagagcacaaaacttca

SEQ ID NO: 932192 - DNA, 120 bp, Artificial Sequence
  ENSG00000286679_26 (sequence is synthesized)
gctggaccgaaagaataagtttaagagttctattgtacatcataatgactacagttaacaacaatatattgtatagttgaaaattgctaagaaattgattttaagtgtcttcgccacaaa

SEQ ID NO: 932193 - DNA, 120 bp, Artificial Sequence
  ENSG00000286679_27 (sequence is synthesized)
aagaaaattatgtgaggtagtggacatgttaaatagcctcatttagccattccacaatgtatacatacatcaaaacatcatacggtataccatatgtatatataatttttaactgttgat

SEQ ID NO: 932194 - DNA, 120 bp, Artificial Sequence
  ENSG00000286679_28 (sequence is synthesized)
tgctgcttaacactaaagagtaggtaaaaatactagtttaatttttttatcatttccaaaagattttagtattctttaaaatagtctcacttatcttaattgttcattaaagatctataa

SEQ ID NO: 932195 - DNA, 120 bp, Artificial Sequence
  ENSG00000286679_29 (sequence is synthesized)
tccattatgtatatgtatattgaaaggaaaagacctagttttgggcctttattttggaaaatctatgactctttgactctgttttctcatctataaaatggacttttgagaacattcaac

SEQ ID NO: 932196 - DNA, 120 bp, Artificial Sequence
  ENSG00000286679_30 (sequence is synthesized)
ataaaatggacttttgagaacattcaactaacttgcaattatggtgagaattaatatgtgaaagaaagtgctcagcttctgtcaaatgcttcttgtggggtgtgtgtgtgtgtgtgtgtg

SEQ ID NO: 932197 - DNA, 120 bp, Artificial Sequence
  ENSG00000286679_31 (sequence is synthesized)
tgtgtgcctgtgtttgtgataataatttctatttatgtcatgatctagtggtgcaaagacaaagggtatgtctatttaaaaagctagagtgcaagaaagaaagacaagaaatacttcctt

SEQ ID NO: 932198 - DNA, 120 bp, Artificial Sequence
  ENSG00000286679_32 (sequence is synthesized)
cagtaaaaaatagatttaaagggagggattagttttattgaaactatgactgctgcttctcattgtcagggaaagtaatatcactaggagttacatggaacaaatgcttaaataaatgat

SEQ ID NO: 932199 - DNA, 120 bp, Artificial Sequence
  ENSG00000286679_33 (sequence is synthesized)
cgggatagatagctacttactctgactaataggaaatgagtgacctttaaaatgactcagattcccaaaaatctctgactccattctataatctgtgttttgttccatataaaattaaac

SEQ ID NO: 932200 - DNA, 120 bp, Artificial Sequence
  ENSG00000286679_34 (sequence is synthesized)
aataaatatagttaggagcaaaattacaaatctaaaagagatgaggactgggaacccggggacgaaagttctactcttttgttcttactcacttggtttgtgaccttgaacaaatcacta

SEQ ID NO: 932201 - DNA, 120 bp, Artificial Sequence
  ENSG00000286679_35 (sequence is synthesized)
taccctcccgggcttcagccccattactttcaacatgaagggggtctaaggtccctccagctttaacacttggtgacactatgattccagttcatagcttcttgctcacaatatttgaca

SEQ ID NO: 932202 - DNA, 120 bp, Artificial Sequence
  ENSG00000286679_36 (sequence is synthesized)
ctttgttgacatactgtcagaaactttacacattttccaaaagccatcacagagtattatcaggtcattaatgtagagttttaagaggaaactataaaacgtctttcactgggtatttgt

SEQ ID NO: 932203 - DNA, 89 bp, Artificial Sequence
  ENSG00000286679_37 (sequence is synthesized)
ttaagaggaaactataaaacgtctttcactgggtatttgttatagcaactacgtttatactgttggattcctccgtgatgatagataga

SEQ ID NO: 932204 - DNA, 120 bp, Artificial Sequence
  ENSG00000286679_38 (sequence is synthesized)
caaatatgttaggctaatacactatgagtaataaagttgtactacaagtatgtgtgacaaaaatatcttcatgtaaatcttctgcttattcctactcagctaatgacatagagataaaat

SEQ ID NO: 932205 - DNA, 120 bp, Artificial Sequence
  ENSG00000286679_39 (sequence is synthesized)
gtatctgagcccatttgtgcttactaatgtaaaaagtaataatttatttatttgtgtgtgtatatatacacatcagtgtatgtatacgcatatatgtaaatagaaaaattctggaaaaat

SEQ ID NO: 932206 - DNA, 120 bp, Artificial Sequence
  ENSG00000286679_40 (sequence is synthesized)
tgctaaaagatgtatacattataatgttttactatatatacttctgtaccatttcacttttccacaatgagcatgtaactacttaattataaattaaaaaagaaaacagaaaatataaac

SEQ ID NO: 932207 - DNA, 120 bp, Artificial Sequence
  ENSG00000286679_41 (sequence is synthesized)
atttctagccttatgcaaagttgtgtaaatttcttttgtagatttctgtgatttatttattttcccttcataaatggcatatacatgtaatatatatctctatctttcactagctgtgtc

SEQ ID NO: 932208 - DNA, 120 bp, Artificial Sequence
  ENSG00000286679_42 (sequence is synthesized)
tgggcaaagttgttttagcgatctggttgcaactaaggtaaacgtttatcatgcaaatattgctctctccttggcgataccttgttggtagaagtagaatttaaaatatattgggaggca

SEQ ID NO: 932209 - DNA, 120 bp, Artificial Sequence
  ENSG00000286679_43 (sequence is synthesized)
gagctgtatcctaactgcactgctgaatttgggcttcctgtgggggcacggcaagtgccctctttgagagtgaggaggctgagagtctcacaccaacaggaatgagtgctttgaaattaa

SEQ ID NO: 932210 - DNA, 120 bp, Artificial Sequence
  ENSG00000286679_44 (sequence is synthesized)
gctgcatggaactctgacacacacttcacagcaaccagtcatctatataaaccaatttcaggagcaaaattgcatggtgcctccactctgttataaacacaatgatatccactcaaagct

SEQ ID NO: 932211 - DNA, 120 bp, Artificial Sequence
  ENSG00000286679_45 (sequence is synthesized)
gataaatgcactacatttctctgcagcttaaaagaataagttccttgcatctgagatttccttcccacaaattaagtcattttttttgtcctagccattaatttaaaactttagaaagaa

SEQ ID NO: 932212 - DNA, 120 bp, Artificial Sequence
  ENSG00000286679_46 (sequence is synthesized)
caagaccatttagattttgaatacccgtaaaataaagaaatttcagtcttaacattttggttctccaactaaatacactttcaattttttttggaatatctctgccagactttcctaatt

SEQ ID NO: 932213 - DNA, 120 bp, Artificial Sequence
  ENSG00000286679_47 (sequence is synthesized)
gatgatctgaaggagaaagcaaaaggaagaagtaattaaggtttaaaatacttaccactgccatagcaattcaccagttaattacaatatcttttcataggattatacacaatacaattc

SEQ ID NO: 932214 - DNA, 120 bp, Artificial Sequence
  ENSG00000286679_48 (sequence is synthesized)
ttattattgaataaaacatctacaagcaacctggaaactattgttaaaacttaaatcttaactaccctgtgtttggtgaataataaagctttggtgaatccgttaataattccaatagag

SEQ ID NO: 932215 - DNA, 120 bp, Artificial Sequence
  ENSG00000286679_49 (sequence is synthesized)
tttttaaattaaggttgaaaagacatgggtaaaaattatgtacagtttcagataaaaaagacagacacccaattttttcatgttgataacagtgacatatattgtgtatatatatgagca

SEQ ID NO: 932216 - DNA, 120 bp, Artificial Sequence
  ENSG00000286679_50 (sequence is synthesized)
tacattatgagtacatagtcataatcatttcagatattagaaaatgtgtatacatttattttttcattttctttattctaacaattttacaggaagtcagaggaatagaatatttgagca

SEQ ID NO: 932217 - DNA, 120 bp, Artificial Sequence
  ENSG00000286679_51 (sequence is synthesized)
tttgagcagagagaacagcaaacgtacttcataggacacatattttaataaattataatttattaatatgttgaaacttaattacagagacaaactctgctgtgtctagtggagtttact

SEQ ID NO: 932218 - DNA, 120 bp, Artificial Sequence
  ENSG00000286679_52 (sequence is synthesized)
gctgaacaaatggaaggactatattattgtactacttaaactatacgatcttatggcataatattcaatgagtgtccattgtcaatatgttaatgtacactaccagtggacttataattt

SEQ ID NO: 932219 - DNA, 120 bp, Artificial Sequence
  ENSG00000286679_53 (sequence is synthesized)
ctggcattagttaagaactttacaacaataacttaaaatgataaatgttagtttcagaagtgagtctcatgtgagcttcactgctttaacaaaagtgtgaaaacaagtgatctaataaat

SEQ ID NO: 932220 - DNA, 120 bp, Artificial Sequence
  ENSG00000286679_54 (sequence is synthesized)
aatgaaaaagaagatttttccaaaagccacgacttagaaatggacttcaagttgttttccctggtcacatgccatagtttccacaaacgccacatgattaaatcctttaaataatgcagc

SEQ ID NO: 932221 - DNA, 120 bp, Artificial Sequence
  ENSG00000286679_55 (sequence is synthesized)
acttttgggtatctaaaatagatgcatgaaagtggtaactttgtccaaacaccttaaatatgtcttcttttattcttgctttcttttctgacctggatctggctgccaatgcacatgaaa

SEQ ID NO: 932222 - DNA, 120 bp, Artificial Sequence
  ENSG00000286679_56 (sequence is synthesized)
gaaattacaaaagcttctcagtcactgcgactcaggttccttttgcactacagcatttgtcattgccaaaacagcagagtttaattaagtgttgtgagcagcctagtgagaaacacactt

SEQ ID NO: 932223 - DNA, 120 bp, Artificial Sequence
  ENSG00000286679_57 (sequence is synthesized)
taaattaaacctctgtacatgcagctattggttctttacctcctgaacaatcagcggggtgttaggcataaattccgtctctcaagggaaatgtagctccacgcacctctagcgattcat

SEQ ID NO: 932224 - DNA, 120 bp, Artificial Sequence
  ENSG00000286679_58 (sequence is synthesized)
aaatgatcctgctttctcagaaccatatcttattaaagcacatttaattatttctaagttttaaacaccgatagatgaaggccataattaatgtgcctaccactaaacattttatttact

SEQ ID NO: 932225 - DNA, 120 bp, Artificial Sequence
  ENSG00000286679_59 (sequence is synthesized)
cttgatatattaatggtattatcaagaaaatatgctacagtttcaagtttaacaaaattacatggcaaattatcttttgatgcatcaagcaattgttaatataatggaataaattatttt

SEQ ID NO: 932226 - DNA, 120 bp, Artificial Sequence
  ENSG00000286679_60 (sequence is synthesized)
aacacctcagtagtaatggatgggtaaaagaaagtaagcattttaattttcagaatgtttttgcaattacacatttcagaagacagttaaatcaatgatccaagtgtttggaattttaga

SEQ ID NO: 932227 - DNA, 120 bp, Artificial Sequence
  ENSG00000286679_61 (sequence is synthesized)
aacagaaacaaaaacaatttagaaaggtgacttgtaggctttgggtttcttacatgcaagagatgtatcaatgtaactgatctcataacagcaaagttctggtaaaaggtttggatgaaa

SEQ ID NO: 932228 - DNA, 120 bp, Artificial Sequence
  ENSG00000286679_62 (sequence is synthesized)
aaaatgctgtttctgaaaattatattttgatgtgctcagtcacacaaactttcaaatttatattttttcttaaaataaaaagattagcatgtacattttatatacatttgattaaataca

SEQ ID NO: 932229 - DNA, 120 bp, Artificial Sequence
  ENSG00000286679_63 (sequence is synthesized)
gtctcataaaataatggtgatttttttctaaactggacagtctatcagtgcaagtgaacagtcaggataaatgactacattcataaaatattcttgacttgttcaacaacaccatggggc

SEQ ID NO: 932230 - DNA, 120 bp, Artificial Sequence
  ENSG00000286679_64 (sequence is synthesized)
aatttcacactctgaaggacattctcagtgcaggccttctacacaaatgcagaaaagatgaaaagatgatctattattcattagaattaggcacacatatttatctctcctccattaatc

SEQ ID NO: 932231 - DNA, 120 bp, Artificial Sequence
  ENSG00000286679_65 (sequence is synthesized)
tcctccagattaatggaggagagataacttctatgtttggtaaatttcaataaagttgatgctgctacatgctgtccattgatttggaagttcttgcctagaacttttgaaacaaaggaa

SEQ ID NO: 932232 - DNA, 120 bp, Artificial Sequence
  ENSG00000286679_66 (sequence is synthesized)
tctgtgcaacttacaagtaggtaaagtagatttcagtgattatccttaaatatgcaagagatacacacacactagtactcatttgaaactagcttgaagtctaaaatatttctgaattaa

SEQ ID NO: 932233 - DNA, 120 bp, Artificial Sequence
  ENSG00000286679_67 (sequence is synthesized)
agtaacttgcaggatattaattgacttaattttatatgatttatcttagaaacctgtagttgttaattaaaattaaagttttgtatgtgttattttacctttttgataagggcttcaaag

SEQ ID NO: 932234 - DNA, 120 bp, Artificial Sequence
  ENSG00000286679_68 (sequence is synthesized)
agaatatgtatgtttaattattttaggaatgtatcctagatactaataatttatgcagttcttataaaatagttaatgattactgacatcagtagatctgaatgaattgataacttcaca

SEQ ID NO: 932235 - DNA, 120 bp, Artificial Sequence
  ENSG00000286679_69 (sequence is synthesized)
tttttctatttatgtatcatttctccggagtcctctcaatgctgtacatgcagtccccccacatggctatttatcttttcttccactttctttacagtctccatttcctccactttgttt

SEQ ID NO: 932236 - DNA, 120 bp, Artificial Sequence
  ENSG00000286679_70 (sequence is synthesized)
attctccagtattctcactcttattgcaattgagactggcagtaaaaaacaaagccataggacaaaaatctggtttggaacatacaaaattaaagttgctatataagaacaaggggaatt

SEQ ID NO: 932237 - DNA, 120 bp, Artificial Sequence
  ENSG00000286679_71 (sequence is synthesized)
tagggaagttgtaggtcaatttgtttaatgaatggcaacctctgctcgaaaaattttcctttcatattcctaaaataacttcacttgctggttttacacaagtgaacatttcaccaatga

SEQ ID NO: 932238 - DNA, 120 bp, Artificial Sequence
  ENSG00000286679_72 (sequence is synthesized)
gagattaatttgttttaataagcactctctttaaaaatgaaaatacctttgggagtgtttagtgactaatacttcttaccttaatatgaataggttcaattaggctgtgtccctctaacc

SEQ ID NO: 932239 - DNA, 120 bp, Artificial Sequence
  ENSG00000286679_73 (sequence is synthesized)
ttctagctggtatctactgccctgagggaatgggggtttgggtggtaaaaaaatacatagtcattaatcctaaagcttatcatggtttgaagaataagttatggaggaggggagagaagg

SEQ ID NO: 932240 - DNA, 120 bp, Artificial Sequence
  ENSG00000286679_74 (sequence is synthesized)
tgtttcctgtcattgtgcccaagagctaagattcccagctagattttcttggttcaaattccagatctaccacgttaattgtgtaggagtggtcaatttaattagctgaaggcgtcttag

SEQ ID NO: 932241 - DNA, 120 bp, Artificial Sequence
  ENSG00000286679_75 (sequence is synthesized)
gtaaaatagggatgataataatattgcccatttcatagggttgttttgaacattaaatcagtataaaatgggtatacaattttcagcacacagaaaattttttaaaacggtagctaattc

SEQ ID NO: 932242 - DNA, 120 bp, Artificial Sequence
  ENSG00000286679_76 (sequence is synthesized)
tattttacctttttggtgagaaaattatcaggcaatcaaacattaacattcttaagtcagatgaaataaagattttttaaaatgcttatcatttgggtccttctccggcctagcttttaa

SEQ ID NO: 932243 - DNA, 120 bp, Artificial Sequence
  ENSG00000286679_77 (sequence is synthesized)
cgcaaaattgtaaacattccatggcaaagccttggcctagtctcattctgcgattgcttctgcattcagtatcaagtaatttgttgtttatcccttcctattactgcattagctccatat

SEQ ID NO: 932244 - DNA, 120 bp, Artificial Sequence
  ENSG00000286679_78 (sequence is synthesized)
cttgcctcaagcctggttttgcctttttatattatgtaccttaaggaatctctcagttccaatgttagacactgacagtagagttggcaaaagctgcagcaggggcatagagatcagatg

SEQ ID NO: 932245 - DNA, 120 bp, Artificial Sequence
  ENSG00000286679_79 (sequence is synthesized)
agtttcgaattgaaaggggctagaaggttagagaaattcagggctcaaaatagaaaatttcaagaaccaggacttgaaatcagtaatctgcggtatttctgtctcaaagatagtactaaa

SEQ ID NO: 932246 - DNA, 120 bp, Artificial Sequence
  ENSG00000286679_80 (sequence is synthesized)
gtatttagggtacctggactacatggataaacatgagccaagcttaagccctaatccaaactttgaaaaatacacaattgttcaaaacaaataatgtgctaataaaattttagtatacaa

SEQ ID NO: 932247 - DNA, 120 bp, Artificial Sequence
  ENSG00000286679_81 (sequence is synthesized)
tttacttctgagaagtgctataatttaaaggacaaagtcccaaatactgatgttggaaataatggtttaatgttataacatagaacagaaaggacaataaagtaaagcaatggggagatg

SEQ ID NO: 932248 - DNA, 120 bp, Artificial Sequence
  ENSG00000286679_82 (sequence is synthesized)
gatgaggaaatacatgagtaagctcctgtaaattgtcattttcaaccaagagtcagtctaacaaatcagaaactattgtttaatattctgcattggccaggcgcggtggctcatgcctgt

SEQ ID NO: 932249 - DNA, 120 bp, Artificial Sequence
  ENSG00000286679_83 (sequence is synthesized)
cataggcatattaaaaaaatttaaggtaagtaaacctggtagttgcattatagagagattaatcaggttactgtgaatgcacaaaagttgaagaagtaagagattagatgtcagagtgtc

SEQ ID NO: 932250 - DNA, 120 bp, Artificial Sequence
  ENSG00000286679_84 (sequence is synthesized)
tagttaaaggccaatacaatagtgtaaaatcaggttaagttgattgcagtaaaacaaaccaattcagaaaaaattacaaataatctaactagaaaaaatgattaagggagaggatttagg

SEQ ID NO: 932251 - DNA, 120 bp, Artificial Sequence
  ENSG00000286679_85 (sequence is synthesized)
tttagaggagcaactaaggaggagtaaaaaatgatatgagctcagagctggagaagagtggaattattcatggaaattagaaggtcaggaatggggccaatttctagaagatgttaggtt

SEQ ID NO: 932252 - DNA, 120 bp, Artificial Sequence
  ENSG00000286679_86 (sequence is synthesized)
ttagacgtgatgaatctgaaatgctcatgctgagtctgaaatgctcagactgtaaatcactggcctatactctttactttagtccatgccatcagttgcaccttgtcttttctagccacc

SEQ ID NO: 932253 - DNA, 120 bp, Artificial Sequence
  ENSG00000286679_87 (sequence is synthesized)
tcaaagttctttccaataaaggaaggctctttcacggttctaactccctgaaaaaccaagtaaagtcttctgattcttgacatgttttgtcttcatctggaaagtcagatttaatcaaac

SEQ ID NO: 932254 - DNA, 120 bp, Artificial Sequence
  ENSG00000286679_88 (sequence is synthesized)
ctacttcacttgaatcattttttattagtatatcaaaatctcaacagagttgtcaatagtcaattttttatttgtgatcttattgcaaaaaaatctaaaacaaaaaggtaataaaaatgc

SEQ ID NO: 932255 - DNA, 120 bp, Artificial Sequence
  ENSG00000286679_89 (sequence is synthesized)
atgtgaaaatatcaataccaaaacacatgaaatatgtttggagaaataatcctgacttgatcctgactataaaatatagtttcttttcaaattctgctaacctggaaatatatttactta

SEQ ID NO: 932256 - DNA, 120 bp, Artificial Sequence
  ENSG00000286679_90 (sequence is synthesized)
gttttatccagtgtagatagaatattgtactttgcttttgaaaagaaaggttaattttggatgaaatagagtaggaaaagtgagagctgagaataaccagcttttatcttcttccttccc

SEQ ID NO: 932257 - DNA, 120 bp, Artificial Sequence
  ENSG00000286679_91 (sequence is synthesized)
tgctgaagtataagataccaaaaagaagtagagagaatatggcagagaagagagatttggaatatcttatccattaagtcattaagtcaagttgtttgcttttattattattaacaatgg

SEQ ID NO: 932258 - DNA, 120 bp, Artificial Sequence
  ENSG00000286679_92 (sequence is synthesized)
agagctattgacagctttagtcagcatgggcttgattaaacaatgggaactgttaatgggttattgtgtatagaaatacttcataaaggaaatagtggagagagaaaactaactagaggg

SEQ ID NO: 932259 - DNA, 120 bp, Artificial Sequence
  ENSG00000286679_93 (sequence is synthesized)
ttaatgtcatagatcaagtgaaaggtaataagtggtttaaaaagttccagtatttggtaagaatggatattattaggtaaaattaagaagtcataacaatatatttttaaatggtaggtg

SEQ ID NO: 932260 - DNA, 120 bp, Artificial Sequence
  ENSG00000286679_94 (sequence is synthesized)
tgagagcgaaggttcaactgtaatgtttaagttactgggagaagagaactattattctgaaacaaggaagtcattatgggtacctactgaattgaggacataatatttattctgagccat

SEQ ID NO: 932261 - DNA, 120 bp, Artificial Sequence
  ENSG00000286679_95 (sequence is synthesized)
attaagttcattgtgctagtaatacatacaggtagacatgtagtctggctctcaagtggtaatcttgactattctatgactttggtagtctatccatgtgcacttgtaaattaggtttat

SEQ ID NO: 932262 - DNA, 120 bp, Artificial Sequence
  ENSG00000286679_96 (sequence is synthesized)
acacgaatctttttcctcatttccctggcacaaactgcctgccttttcctcagctttcttctctcttctttctaaagccttagaagacattggcaactagcccatgtcagtaagtgacaa

SEQ ID NO: 932263 - DNA, 120 bp, Artificial Sequence
  ENSG00000286679_97 (sequence is synthesized)
tagactttccctgctccaccaacaccaacacgattgctttttaatggaggatttctgcatacacaattgctgtgtttcaaaaggttgatctctcaggatttaatttagataatcagaaat

SEQ ID NO: 932264 - DNA, 120 bp, Artificial Sequence
  ENSG00000286679_98 (sequence is synthesized)
tttgtcatcataaagttgactcagctacacaaaaaaagatgcatattttaggactgttttgttacaagtccaatttatgtttctgtgataaatcaacttattctttatctcagaagcttg

SEQ ID NO: 932265 - DNA, 120 bp, Artificial Sequence
  ENSG00000286679_99 (sequence is synthesized)
aaataatttcattggctcctgtttatattatgaatcagcccattaattaagtcctaatcctaagtgtagaaagacagatttattttgttaaaaaaaactgtatgcacagcattaattcaa

SEQ ID NO: 932266 - DNA, 120 bp, Artificial Sequence
  ENSG00000286679_100 (sequence is synthesized)
ttttgtaaaaactgtgcatgcatatatatttggaaagatgtccaaagaaatattaaaattggtaacctctgagcagtaagattaaatgtgatttcaaatttattctttattctttgtcgt

SEQ ID NO: 932267 - DNA, 120 bp, Artificial Sequence
  ENSG00000286679_101 (sequence is synthesized)
attgttcaaattatccataatgaacatgtattacttttataatctgaaaaaaaattcagagaaagtaaaagggttattcatcacataatacatttatggagtagaattcacttggcctta

SEQ ID NO: 932268 - DNA, 120 bp, Artificial Sequence
  ENSG00000286679_102 (sequence is synthesized)
aaggcgtgcaaaattcccaccccaaagacagccgggaaggaaacatatcagtgccaacacagcaacctcagacttctgtgtagattggggccattgtacagtagcattacgctcacaacg

SEQ ID NO: 932269 - DNA, 120 bp, Artificial Sequence
  ENSG00000286679_103 (sequence is synthesized)
acctgctcagtctctcgtggcaactattgaattctgactgaggccactcctgttcattctcttgcctactagcgtaagtcacttggttgggcacagcttaattcttgactatggatttcg

SEQ ID NO: 932270 - DNA, 120 bp, Artificial Sequence
  ENSG00000286679_104 (sequence is synthesized)
tgaactcctcttataaaatggtacaattactgcaggtcacgaacatcaaatgccactaacacttccagctgtgaccacggaatagcctcccaacagaagtactgcaacatggtaataata

SEQ ID NO: 932271 - DNA, 120 bp, Artificial Sequence
  ENSG00000286679_105 (sequence is synthesized)
acatcccagctgtagccacaatcaccgaaatcactgacagtgtcaataatgtataaaaccccatggaaactcaactgtacttgccaaaaggcattcatcaatttcattgccttttatcta

SEQ ID NO: 932272 - DNA, 120 bp, Artificial Sequence
  ENSG00000286679_106 (sequence is synthesized)
ccatttaaaatggtctggttttagtgttagggtttttaaaataaatgactagggtaaataggccctggctgaattgctcactatctgctgtgaattgcttctctaaatgttgaggacgtg

SEQ ID NO: 932273 - DNA, 120 bp, Artificial Sequence
  ENSG00000286679_107 (sequence is synthesized)
aagttcagccttaaccactcaagtacattctgtatccactacatgttaggtgatgggatgtgagcaaagagagttgagtatccagagaggtgaaatttactaagccccattacagcttaa

SEQ ID NO: 932274 - DNA, 120 bp, Artificial Sequence
  ENSG00000286679_108 (sequence is synthesized)
gttcatttaaagcattgtcaaggacatggtgaaaatacaggagagggaaccgctttgatttcttagaagccagtcagcttttggaagatctaagatagtgaaaatgtgggaagactgaag

SEQ ID NO: 932275 - DNA, 120 bp, Artificial Sequence
  ENSG00000286679_109 (sequence is synthesized)
agaaaaggtctatttaactgatgctaggaataataaactgtaacaatcactacaccttacaacagtgttttcctgtatttgctcaaatactctgcagaggagataaaacaattgctcgta

SEQ ID NO: 932276 - DNA, 120 bp, Artificial Sequence
  ENSG00000286679_110 (sequence is synthesized)
aaatccagtatgtgttgagcactaaatgtaccaggcattggtctaagcactttaattatgatatacaactcagtacccatgacacccttgagtggattatttttactaccagatacagat

SEQ ID NO: 932277 - DNA, 120 bp, Artificial Sequence
  ENSG00000286679_111 (sequence is synthesized)
ggacatgcaacgaaataactagcaaagagaccttgtttcaacatcaaatatgtttccgtaaggccagattcttgggcaaagttgttttagcgatctggttgcaactaaggtatcctgtaa

SEQ ID NO: 932278 - DNA, 120 bp, Artificial Sequence
  ENSG00000286679_112 (sequence is synthesized)
taccaaaaccaggaaaaagataagaaaccaaaattgcagaccaatatttcttaagaacatacatgtaaaaatgcacaataaacaattagtaaattatatccagtaacaagtgacaaaggg

SEQ ID NO: 932279 - DNA, 120 bp, Artificial Sequence
  ENSG00000286679_113 (sequence is synthesized)
agtgacaaaggggatattactattgaccccacagaaaacacaaataatcatcagagtattatggatgcctctatgcacataaactataaaattgagaagaaatggataaattcctggaca

SEQ ID NO: 932280 - DNA, 120 bp, Artificial Sequence
  ENSG00000286679_114 (sequence is synthesized)
aaaaactgagccagaaagaaattaaacccctgaacagaccaataatgagctccaaaattgaatcagcaatagccaactaaccagaaaaaaaaagtcctggactgaacagatcacagctga

SEQ ID NO: 932281 - DNA, 120 bp, Artificial Sequence
  ENSG00000286679_115 (sequence is synthesized)
attctaccagataaacaaagaagagctggtaccattcctactgaaattattccaaacaattgaaaagaatggactcctccctaactcattctatgaggccaacctcatcctaataccaaa

SEQ ID NO: 932282 - DNA, 120 bp, Artificial Sequence
  ENSG00000286679_116 (sequence is synthesized)
agttggcagagataaaacaaaaaagaaaccttcaggccagtatccttgaagaacattggtgcaaaaatcctcaacaaaatattggcaaaccaaattctgcagcacatcaaaaagcttatc

SEQ ID NO: 932283 - DNA, 72 bp, Artificial Sequence
  ENSG00000286679_117 (sequence is synthesized)
attggcaaaccaaattctgcagcacatcaaaaagcttatccacctcaatcaggtaggctttatctgccaaat

SEQ ID NO: 932284 - DNA, 89 bp, Artificial Sequence
  ENSG00000286679_118 (sequence is synthesized)
atgaacatacttcaaaataataagagccatctatgaaaacccacagccaacataacactgaatgggaaaaacctggaagcattcccctt

SEQ ID NO: 932285 - DNA, 120 bp, Artificial Sequence
  ENSG00000286679_119 (sequence is synthesized)
gaaaaccagcacaagacaaggatgccctgtctccccactcctattcaaaatagcattggaagtcctagccagaggaattaggaaagagaaagaaataaagggcatccaaacgggaaaaga

SEQ ID NO: 932286 - DNA, 120 bp, Artificial Sequence
  ENSG00000286679_120 (sequence is synthesized)
ggaaagagaaagaaataaagggcatccaaacgggaaaagagtaagtcaaactatccctgtttgcagacaacatggtcctatatctagaaaacccaacagttttagcccaaaagcttctta

SEQ ID NO: 932287 - DNA, 120 bp, Artificial Sequence
  ENSG00000286679_121 (sequence is synthesized)
agctaataaacaacttcaacaaagtcccaggaaataaaatcaatgtgcaaaaattactagcattcctgtacacaaacaacagccaagctgagagccaaatcaggaatgcagtcccattca

SEQ ID NO: 932288 - DNA, 120 bp, Artificial Sequence
  ENSG00000286679_122 (sequence is synthesized)
aatgcagtcccattcatgattgccacaaaaagaataaaatacctaagaagacagctgaccaggaaggtgaaagatctgtacaaggaaaaccacaaaacactgctcaaagaaatcagagat

SEQ ID NO: 932289 - DNA, 120 bp, Artificial Sequence
  ENSG00000286679_123 (sequence is synthesized)
attccatgttcatagatagtaagactcaatatcataaaaatgggtatactctccaaatttatagattcaattttattcctattaaactatcaatacatttttcctataattagaaaaagt

SEQ ID NO: 932290 - DNA, 120 bp, Artificial Sequence
  ENSG00000286679_124 (sequence is synthesized)
taaaattcatatggaaccaaaaaggaacccaaatagccaaggcatttctaagcagaaagaacaaagctggaggaagcatgctaccaaacttcaaactatatgacaaggctacagtaacca

SEQ ID NO: 932291 - DNA, 120 bp, Artificial Sequence
  ENSG00000286679_125 (sequence is synthesized)
aaacagcttggtattggtacaaaaacaggaacatagacgaatgaaacacaatggagagcccagacatacctgcacctatctgatttttgacaaagttgacttaaaaataaagcaatggga

SEQ ID NO: 932292 - DNA, 79 bp, Artificial Sequence
  ENSG00000286679_126 (sequence is synthesized)
gtacatcatatacaaaaattaactcaaggtggaataaagacttagttgtgaaacccgaaactataaaaactggaagact

SEQ ID NO: 932293 - DNA, 120 bp, Artificial Sequence
  ENSG00000286679_127 (sequence is synthesized)
acttagttgtgaaacccgaaactataaaaactggaagactacctaggcaatacaattctgggcataggaacaggaatgggcaaagatttcgtgacgaagatgccaaaagcaattccaaag

SEQ ID NO: 932294 - DNA, 120 bp, Artificial Sequence
  ENSG00000286679_128 (sequence is synthesized)
acagaataggagaaaatatttgcaaactgtgcatctaatgaaagtctaatatcaagcatcagtaaggaactcaaacaaatttacaagaaataaacaaacagctccattaaaaagtgggta

SEQ ID NO: 932295 - DNA, 120 bp, Artificial Sequence
  ENSG00000286679_129 (sequence is synthesized)
aagaaataaacaaacagctccattaaaaagtgggtaaaggacacgaatggacactttttgaaagaagacatatatgaggaccacaagcacatgaaaacgagcacaacatccctgatcatt

SEQ ID NO: 932296 - DNA, 120 bp, Artificial Sequence
  ENSG00000286679_130 (sequence is synthesized)
agagacatacaaatcaaaaccacaatgagatattatctcacaccaatcagaatggctgttatttaaaagtcaaaaaataacacatgctagtgaggttgtagagaaaaaaaaggaacttat

SEQ ID NO: 932297 - DNA, 76 bp, Artificial Sequence
  ENSG00000286679_131 (sequence is synthesized)
aaaaacagtgttgaatcccatgactattaacaggtatacacccaaaggaatataaattatcctattctaaagacac

SEQ ID NO: 932298 - DNA, 120 bp, Artificial Sequence
  ENSG00000286679_132 (sequence is synthesized)
tacacccaaaggaatataaattatcctattctaaagacacatgcacacatatattcacgtatattcatacacacatattcactattcacaatggcaaagacatggaatcaacctaaatgg

SEQ ID NO: 932299 - DNA, 120 bp, Artificial Sequence
  ENSG00000286679_133 (sequence is synthesized)
tgaaatactatgcagccataaaaagaatgggatcatcttttttgccacaacatgggtggagctggaggttattatccttagcaatctaattcaggaacagaaaataaatattacatgttc

SEQ ID NO: 932300 - DNA, 120 bp, Artificial Sequence
  ENSG00000286679_134 (sequence is synthesized)
ttataagtgggagctaaatgatgagatgtcagggacacatagagaggagcaacacatactggtgtctactggagggtgaaaggtaggtggagggagagtgtcaggaaaaataactaatgg

SEQ ID NO: 932301 - DNA, 120 bp, Artificial Sequence
  ENSG00000286679_135 (sequence is synthesized)
tttacctatataacaaatgtgcacatgtactcctgaacttaaaagttaaaaaaacccaccaaaacatgaaacacttaggtataaatctaataaagtatgtacatgtgtaagcaaaaaact

SEQ ID NO: 932302 - DNA, 120 bp, Artificial Sequence
  ENSG00000286679_136 (sequence is synthesized)
atgaaacactgattaaagaaattagagaccaaataaatggagacatgttgtgtttattagaagtcttgatattaagccgttaactgttcccagattgatagcaatatgagatccactatt

SEQ ID NO: 932303 - DNA, 120 bp, Artificial Sequence
  ENSG00000286679_137 (sequence is synthesized)
agactataagctttttgagagtgggaatgttgtctggcttgatggcctcatatattttaggaattcagtaaactttttgaattgatttaaaaataaaagaacatgattttcgctaaaagc

SEQ ID NO: 932304 - DNA, 120 bp, Artificial Sequence
  ENSG00000286679_138 (sequence is synthesized)
acatttatagtattaggtcactaatgtaataaaacaatcacatgattacataaccctgttttttataaaaatttcatttttttaatatgagatcataaatgtgagagaagctatgacatg

SEQ ID NO: 932305 - DNA, 120 bp, Artificial Sequence
  ENSG00000286679_139 (sequence is synthesized)
taggcttaataagtttttcttacattttatgattaagaggtaattaatcaatggaaagcagcataatgaataaggtatggaacacaaattgtaaatgaatatagaattcaataaatattt

SEQ ID NO: 932306 - DNA, 120 bp, Artificial Sequence
  ENSG00000286679_140 (sequence is synthesized)
gtgagattttagattctttttcagcaatgtataacataatcagcatttaagagtaatagcaattttcaagtcaagctgatataaagtttattcatgtctgtttcaaaatatgatattttc

SEQ ID NO: 932307 - DNA, 120 bp, Artificial Sequence
  ENSG00000286679_141 (sequence is synthesized)
tattacgcttatatttttaaaggggaggcagatgatgaataaatgaacaaaaaatataataatggatatgtatttataagtgctatgaagagaagaaatccaagcaagaagagagtgaaa

SEQ ID NO: 932308 - DNA, 120 bp, Artificial Sequence
  ENSG00000286679_142 (sequence is synthesized)
tgaggtaggtggatttaggataaggtagggtattctgagaaaacttctctgaggacatgatgtttctgaggacatgatgtttgtaaatagatttgattcactagagagcattcacaaaga

SEQ ID NO: 932309 - DNA, 120 bp, Artificial Sequence
  ENSG00000286679_143 (sequence is synthesized)
aagtaagagaaattaggtggcagaaggagccagggaaccaaacctgtaagtttttgcagaccatggtatgacaggaagccaattcaggtttttggcataagtatggtgttgttagctctt

SEQ ID NO: 932310 - DNA, 120 bp, Artificial Sequence
  ENSG00000286679_144 (sequence is synthesized)
caaaatacatccaaaaaattccgatcacttccagtttgatattctgatctagaccattgtggaatcttggttgaactctttcaaaagtcactggtctctctaattgtacttgtgttcctc

SEQ ID NO: 932311 - DNA, 120 bp, Artificial Sequence
  ENSG00000286679_145 (sequence is synthesized)
tgtacttgtgttcctctacagtcaattcaatacacaaaaaaacagtgatacttttaaaacatcgataaggctgggcacggtggttcacgtctataatcccagcacttcaggaggccgagg

SEQ ID NO: 932312 - DNA, 120 bp, Artificial Sequence
  ENSG00000286679_146 (sequence is synthesized)
tggatcagaaggtcagcagtttgagaccagcctgggcattatggtgaaaccacgcccctactaaaaatatacagattagccaggtgtgatggcgcatgcctgcagtcccagctacttggg

SEQ ID NO: 932313 - DNA, 88 bp, Artificial Sequence
  ENSG00000286679_147 (sequence is synthesized)
caagatcgcaccattacactccagcctgcctgacagagcgagacccggtctcacagataagatcctgttactcctttgctcaaaatca

SEQ ID NO: 932314 - DNA, 120 bp, Artificial Sequence
  ENSG00000286679_148 (sequence is synthesized)
acacacagataagatcctgttactcctttgctcaaaatcattcagtgatttcccttgtctctaagtaaaacttttcaatggtgcacaaggttccacttcactaatccctctctgctcctc

SEQ ID NO: 932315 - DNA, 120 bp, Artificial Sequence
  ENSG00000286679_149 (sequence is synthesized)
actttatctctcagcacatatctttctggttttctgtcccagaattcacaaacacattcttgtctttgggactctgtgtgtgcttttctctcagtttgtgttgactttttcctagaaagg

SEQ ID NO: 932316 - DNA, 120 bp, Artificial Sequence
  ENSG00000286679_150 (sequence is synthesized)
catacttctgctcaaacatccttcattactttgccccggttatgtgaatccttccctgattatgctctataaaacaacctcacgcccttctgcagcactctttaattcatttgccatcat

SEQ ID NO: 932317 - DNA, 120 bp, Artificial Sequence
  ENSG00000286679_151 (sequence is synthesized)
ttttttcttcataacataatacgatttgacaagttattttatacttatacatactatattagctcaggctgctataacaacatgccatagactaaatgccttaaacaacagctaatttct

SEQ ID NO: 932318 - DNA, 120 bp, Artificial Sequence
  ENSG00000286679_152 (sequence is synthesized)
ctcagtcctggaggctgtgcagtccaggattaagaagctggctgattcagttcctggtgcaggctgtctttctggtttttggacagacatctcactgcatcctcacgtggtagaaaaaga

SEQ ID NO: 932319 - DNA, 120 bp, Artificial Sequence
  ENSG00000286679_153 (sequence is synthesized)
actctggtctttctccttttacctataaaggcactaatcccgtcatgagggccacacccttcaacccttatgaacttatgtaaacctaattatctcccaatagttccatctctgaatatc

SEQ ID NO: 932320 - DNA, 120 bp, Artificial Sequence
  ENSG00000286679_154 (sequence is synthesized)
atcacattgggagggttagggtttcaacatttgaattttgggaaaacacaatttagcccatagcaatcatctactcagaaattttaaaccctatgtgtgaatccctatattaagcatttt

SEQ ID NO: 932321 - DNA, 120 bp, Artificial Sequence
  ENSG00000286679_155 (sequence is synthesized)
gagggttttattatcaaaagaagagattaagagtattgtccagcttctagtacaatgcagtacactacaaagagtatgatcaaaatttagcactattatacgaatatctttttaaggaga

SEQ ID NO: 932322 - DNA, 120 bp, Artificial Sequence
  ENSG00000286679_156 (sequence is synthesized)
aaaaagatattaagtgtagttctaagttagaaattaaaatctaacatgaaggcgtcttttttctcatggcaattattatttgtcttatttttgttaagaaacttacctcaggattaattt

SEQ ID NO: 932323 - DNA, 120 bp, Artificial Sequence
  ENSG00000286679_157 (sequence is synthesized)
tgaaaaaaatatgcagttgaattttctcagaaagagatttctagtatatgagctatgtgacaagagatagtgacatataaaagaatgccattctagttcatattttattctgggagatta

SEQ ID NO: 932324 - DNA, 120 bp, Artificial Sequence
  ENSG00000286679_158 (sequence is synthesized)
atcagtacaaagacttcaatgaggagattggaagaaaatcagtagtgttgttttacctctagtcaacaaacacaaattgaacaaatccaaagttaccctttttttctcacatgtttgtct

SEQ ID NO: 932325 - DNA, 120 bp, Artificial Sequence
  ENSG00000286679_159 (sequence is synthesized)
ggccaattaccaaacgcaaaggccatattcagtatcctcatatatattttcaattttaagaaaaaaaattttaatggccctgacagggacagtaattaatttatttcatgtgtgaaatct

SEQ ID NO: 932326 - DNA, 120 bp, Artificial Sequence
  ENSG00000286679_160 (sequence is synthesized)
gttaaattctgtggtatatattaaaatgtgtcttttcataaacccatttcctacatattgacttaccttctctagtgatcagcactgatcttttattcattgtgtggtgtctcatttctc

SEQ ID NO: 932327 - DNA, 120 bp, Artificial Sequence
  ENSG00000286679_161 (sequence is synthesized)
aatcaaaccaagttttattcaaataatagttttctttctttaaatgttgcaggaagataattgcattttattttggaataggctggatgttttggtatgttatctcttcaaaatggtggt

SEQ ID NO: 932328 - DNA, 120 bp, Artificial Sequence
  ENSG00000287826_0 (sequence is synthesized)
agagaagcgtcaagcttgaatggaaagagagggaggagaaatgtctgtaaagagattatggagctaagtaaggtaagaacagctttaaaacagcaggcacggaagtgaatggatagaatg

SEQ ID NO: 932329 - DNA, 120 bp, Artificial Sequence
  ENSG00000287826_1 (sequence is synthesized)
gaagagtccactcactagacctagagagacctagactagattcgcagagattaaaatcaccccagctggtacacacaagttttctagaattctaggagtccacagaatagcattaatcac

SEQ ID NO: 932330 - DNA, 120 bp, Artificial Sequence
  ENSG00000287826_2 (sequence is synthesized)
catgggagtctggcatcactgctgtgtggagctgccttcatgaagccggcagagcaaagatccaggagcagaagcccaaaaagcattgaaggagagaagcagcaggatggggcttccaga

SEQ ID NO: 932331 - DNA, 61 bp, Artificial Sequence
  ENSG00000287826_3 (sequence is synthesized)
aagcattgaaggagagaagcagcaggatggggcttccagagccgaggctggactgtactga

SEQ ID NO: 932332 - DNA, 86 bp, Artificial Sequence
  ENSG00000287826_4 (sequence is synthesized)
atactaaaaaaattaaaataaaataaaataaaatatgtcagcctctccggtagctggcactacaggtgcacaccaccacacccagc

SEQ ID NO: 932333 - DNA, 120 bp, Artificial Sequence
  ENSG00000287826_5 (sequence is synthesized)
accacacccagctaatttttgtattttcttgtagagaagggctcccaccatgattcccaggctggtcccgaacccctgggaaggagggctaaagctatccaccctcctcttcctcccaaa

SEQ ID NO: 932334 - DNA, 120 bp, Artificial Sequence
  ENSG00000287826_6 (sequence is synthesized)
cttcctcccaaagtgttgtgattacagttgtaagctactgtgcctggccaagaaaacaatttttaaagaggctaggtaattcaaagtcacacagttaataatggtgcagtgagaaatgaa

SEQ ID NO: 932335 - DNA, 120 bp, Artificial Sequence
  ENSG00000287826_7 (sequence is synthesized)
aatgctcactctgtggcttcagagcttacactctcctacttttatggagtacactaaattaggaaccagataaaacttgtcatcttacaaatcctcctcataaaccttatctgtaatatc

SEQ ID NO: 932336 - DNA, 120 bp, Artificial Sequence
  ENSG00000287826_8 (sequence is synthesized)
aggagaagaatacctactttgtatagttattgtgatgaataagtgatttttaaaaatatttagcacagcctggtacacagtgtattttcaagatatgatagtttaaaaaaaaaaaaaaaa

SEQ ID NO: 932337 - DNA, 120 bp, Artificial Sequence
  ENSG00000286671_0 (sequence is synthesized)
tattggtgagcatatgaaacaacaggaatactgtgcttgtacactatacacacatctccaaaccagtttggagggtaactttgcagtgcagaaagttgaagatgtgcatgactcagtata

SEQ ID NO: 932338 - DNA, 120 bp, Artificial Sequence
  ENSG00000286671_1 (sequence is synthesized)
tactcccaagtacatgatctagaactgcactgttcaatgcagtagccactggccatttgtggctattaaattaaaatgtattaaaattaaattacattcagttctccatttgcatgagcc

SEQ ID NO: 932339 - DNA, 120 bp, Artificial Sequence
  ENSG00000286671_2 (sequence is synthesized)
acatttcaagagctcagtagctactctgtgactagtgactactctattgggcagcacaatgaacatttctataattgtaaaatgttctattcaacagaagtgatatagaagaattctcat

SEQ ID NO: 932340 - DNA, 120 bp, Artificial Sequence
  ENSG00000286671_3 (sequence is synthesized)
gtttatttggaatactcgaatgaaaataaataaaactacatataccaacaagaatgagtctcacaaacaatgtttagaaaaattgagaggtaacaacgtgctagcagcccttgcttgctc

SEQ ID NO: 932341 - DNA, 120 bp, Artificial Sequence
  ENSG00000286671_4 (sequence is synthesized)
tctgtgcctcttcagcctcagccatggccagagtgggtgccaaggccgaggaggcaccaagagagacctagggcttgcaagggctgccagcatgctgtcacctctcaccaccagaaggaa

SEQ ID NO: 932342 - DNA, 120 bp, Artificial Sequence
  ENSG00000286671_5 (sequence is synthesized)
caattccagacacaaaattacgatgcagaatatacatgtataacaaggaataaattttttaaacgttataattttgataatttataaaattttaaaatgggaaaaacaacctgtatgtgg

SEQ ID NO: 932343 - DNA, 120 bp, Artificial Sequence
  ENSG00000286675_0 (sequence is synthesized)
gaggttcctgcggtctcctcctggctgccacccctgtccgtctctccgggttactctccagggagccgggagccgcttcaggttgcaatctgcgatgcaacggcgcctttgtttgactcc

SEQ ID NO: 932344 - DNA, 120 bp, Artificial Sequence
  ENSG00000286675_1 (sequence is synthesized)
agccttgttttgcctcataccttatcctcctatttagagtacctcagcacctcatgggctccgcttcaccagttcctcaatcagtcaatgcctctgacttctagccgccatccctcccag

SEQ ID NO: 932345 - DNA, 120 bp, Artificial Sequence
  ENSG00000286675_2 (sequence is synthesized)
tggatactttaagcaggcaagcaaaccaaacaaacgcccagcacgcttgcatgcagcaatctccgttttccggtctttggtcgcatgacttgacctcagcgtatcccctacacttgatct

SEQ ID NO: 932346 - DNA, 120 bp, Artificial Sequence
  ENSG00000286675_3 (sequence is synthesized)
tcacacacagcttcataggttaagacactttttttccagagaaatcatactttctatctgcgattgtggaactgcgattgctctaagcccttgaaaacagtttcctcaccatgaaagctt

SEQ ID NO: 932347 - DNA, 120 bp, Artificial Sequence
  ENSG00000286675_4 (sequence is synthesized)
gggccaaaaattagaagtgaaacccagccctccctctgtcttctactcttggcctaccttggccctatactttatcatccataaaccaaaacagtcgcctggcctgacaatgtttgatcg

SEQ ID NO: 932348 - DNA, 120 bp, Artificial Sequence
  ENSG00000286675_5 (sequence is synthesized)
gggaagtttgagttggggaattaacctacaacctgacagaatgaggcccgcccgtctctaacagagttcaaaacctcctgaagatgaaagtaacttcaaaactaactcagaccattttaa

SEQ ID NO: 932349 - DNA, 120 bp, Artificial Sequence
  ENSG00000286675_6 (sequence is synthesized)
cggttttgcttacaattaccagaactacatttctttgaaaatttgatttagcaatcgtaaacaagctgtactgtttgctgactatagcgtatctactggcaagttaccagtattaatgtg

SEQ ID NO: 932350 - DNA, 120 bp, Artificial Sequence
  ENSG00000286675_7 (sequence is synthesized)
ttgtccataacaaacctcggattaatgttattgttaatctgtttaattgaagagtttaacttcatatctaacttcatctactatgaaatcagttaccttcaggaagcaggattcctccta

SEQ ID NO: 932351 - DNA, 120 bp, Artificial Sequence
  ENSG00000286675_8 (sequence is synthesized)
ctctccactcacatgaaggaccagtgtctgttttggaggcatggagttggaaatgagttggagagatgacggtaacagtagcttctaaatatgaacctgatgcttatacaaccattatac

SEQ ID NO: 932352 - DNA, 120 bp, Artificial Sequence
  ENSG00000286675_9 (sequence is synthesized)
caaaagtaaaggtagctgtttaattcctttctgtggagcatggaagattctttctatttgcatatgcaataggccattcatagttgaatttgaatatgtaataggccattcatagttgat

SEQ ID NO: 932353 - DNA, 120 bp, Artificial Sequence
  ENSG00000286675_10 (sequence is synthesized)
agccttgggaaaatgaactaatttctttacatctgcatatcctcttatataaaaggggatacaagcattcaacatccaaggctgctatgaggaccaggtgcaaagaagaccttttaacac

SEQ ID NO: 932354 - DNA, 120 bp, Artificial Sequence
  ENSG00000286675_11 (sequence is synthesized)
atattgacccctcctctgcttcctgattttctaaattatccatttgtaacacacttattctcttaaggttgtccttgatatttctttttagactaattttatctgcacaattttagggac

SEQ ID NO: 932355 - DNA, 120 bp, Artificial Sequence
  ENSG00000286675_12 (sequence is synthesized)
taaaaaggagaatgtacaacatagtttgtccagaaacacgagtagatgactcttcttacagtcaaattttgtagtccataaaacatgcaaaatatttagtctatgacaatttcagagcaa

SEQ ID NO: 932356 - DNA, 120 bp, Artificial Sequence
  ENSG00000286675_13 (sequence is synthesized)
tgagacacagtagattcaaccataattgaaatcaaaataattaccacagagatgtattattttttgccatatcctcagaatagtaaatcttttaaggcaactgtagacactagttaattt

SEQ ID NO: 932357 - DNA, 120 bp, Artificial Sequence
  ENSG00000286675_14 (sequence is synthesized)
cctatgagagaatgttctctgtgacatttataataaaatcttccttactaaactctacttattctcaatgatatgttttttttttatgaaataaatgtggcattctcaaccaaagttagg

SEQ ID NO: 932358 - DNA, 120 bp, Artificial Sequence
  ENSG00000286675_15 (sequence is synthesized)
aaagcataataattatgtttctctttaaattaagctgctttccatcccaaaagcaaatacacagtcctattaggcaacctgggacataaaggggccatttggtgtcttgtgtaacagaca

SEQ ID NO: 932359 - DNA, 120 bp, Artificial Sequence
  ENSG00000286675_16 (sequence is synthesized)
aagacaactgcagggcagccaaaagacagatttatatcctgttaagaatagcaggaaatattttagtttacagcagtatgacaccacttgtcgtttccttaggcatacaagacaagtcaa

SEQ ID NO: 932360 - DNA, 120 bp, Artificial Sequence
  ENSG00000286675_17 (sequence is synthesized)
ctcaagcctgtggattttttgggtgaatggaaataactcccttctgtgcttgtttttcactggaatgctgacatgtgcaatgcttgaaaattcagatcatccagagtttaccctggcact

SEQ ID NO: 932361 - DNA, 120 bp, Artificial Sequence
  ENSG00000286675_18 (sequence is synthesized)
tgtaaagaagaaactatttcagcagtactgcagtgtccattttcaagtgagcaaaagtgtagtatggtagatgtagagaagagaaatcacgattacctgttatttttcttaaactcagca

SEQ ID NO: 932362 - DNA, 120 bp, Artificial Sequence
  ENSG00000286675_19 (sequence is synthesized)
aaattttagattaaaattcttcatacagatcactagttctccacaaatgtgaacctttccaagtctgtgactgtggaaatactttggtcattcaagggctgtggctgtgagctatatgta

SEQ ID NO: 932363 - DNA, 120 bp, Artificial Sequence
  ENSG00000286675_20 (sequence is synthesized)
tgttgtctgcgtgagcaaaaatgctgcccagtgaaaaatcaagtggaatatggaggaataattggcagtaaagataactgtttgctgagtgcctaagatgtgccaagcaacttaaactct

SEQ ID NO: 932364 - DNA, 120 bp, Artificial Sequence
  ENSG00000286675_21 (sequence is synthesized)
gtttggttagggttaaggtagtcgctaattataaaattgagctgtggaaccctgttagggaaagaagttgtttcaatgttggagtcagtgaggtgccgcttgtcggagaggtcccgcttg

SEQ ID NO: 932365 - DNA, 120 bp, Artificial Sequence
  ENSG00000286675_22 (sequence is synthesized)
tcagagaggtcccttgagttccataattttctttagttctgaatgaatccctggtttgtttgttttgttttattcaaaacttatatgtctcacatgtctctcaggctggattttctagga

SEQ ID NO: 932366 - DNA, 120 bp, Artificial Sequence
  ENSG00000286675_23 (sequence is synthesized)
agcatatgccatatttaatgtctttaaaacatgcattctgtctgaccttacattaactttaggatacatttttttctataggccaggaacattgctcaatattttcaactatgactttca

SEQ ID NO: 932367 - DNA, 120 bp, Artificial Sequence
  ENSG00000286675_24 (sequence is synthesized)
caatattttcaactatgactttcagtaaaaatgcagaaacatttttatagtggatgatttttatactttcatcaatgctgagagttgaaagacaatctttttttttttcttttctttttt

SEQ ID NO: 932368 - DNA, 120 bp, Artificial Sequence
  ENSG00000286675_25 (sequence is synthesized)
tacaggcgtgagccaccgcgcccggctgggttgaaagacaatcttaacaccgagaaggcatttttgaaatgggagattttaataatgtggttcaagtgtattgcatattgagcatttaat

SEQ ID NO: 932369 - DNA, 120 bp, Artificial Sequence
  ENSG00000286675_26 (sequence is synthesized)
taatctcaccaagagccgaagattttaggtcacaaggaggtactatttcagtgagttcataaagctgcatctctcatacaacttatttttccaaggaagactttatcaaaagctgaatca

SEQ ID NO: 932370 - DNA, 120 bp, Artificial Sequence
  ENSG00000286675_27 (sequence is synthesized)
caatgtattcttatttatacttcctgaaatgtgaaataccaatattctttagagtttgaaatgggacttatagtcatccaaaaccaggacccctggaagcagagactggacattggctta

SEQ ID NO: 932371 - DNA, 120 bp, Artificial Sequence
  ENSG00000286675_28 (sequence is synthesized)
tttctccacctcagagtaggaggttttccacttctccattgagatatgttccaggtccagctgaagaaggcaaaaaatgttcttcagataacttgtgtaggctaacacatggagaaatgt

SEQ ID NO: 932372 - DNA, 120 bp, Artificial Sequence
  ENSG00000286675_29 (sequence is synthesized)
ggattttctaaaatttaatgaaaaccttgccagacttggtagaaaaataagaaaattttacaagagaccaatctcgctgacacatattaattcaaaaaatactaagtgaaatattagcaa

SEQ ID NO: 932373 - DNA, 120 bp, Artificial Sequence
  ENSG00000286675_30 (sequence is synthesized)
acaaaatctatcaccacatttaaaaataataaagcattctgtaggttgtctcatcactttgtggagtgcatcccttgctatgcagaaggttttcagcttgatgtgatcccatttgtctat

SEQ ID NO: 932374 - DNA, 120 bp, Artificial Sequence
  ENSG00000286675_31 (sequence is synthesized)
ttttattttggttgcctggactttggagttcttattcaggaaatctttgcccagtccaatgtcttagagtgcttctccaatgttttcttctagaagttttagggtttccggtcctatatt

SEQ ID NO: 932375 - DNA, 120 bp, Artificial Sequence
  ENSG00000286675_32 (sequence is synthesized)
tgtctttaatccattttgagttgatttttgcatgtgacaagagatagggatctagcttcattcttctgtatgtgaatatcaattttccccctaccatttattagcctgtccttttcccaa

SEQ ID NO: 932376 - DNA, 120 bp, Artificial Sequence
  ENSG00000286675_33 (sequence is synthesized)
tttcccaatatatattcttgatgactttgccaaaaatgagttgactgtaaatgcatggacttatttcggagttctctaccctgttccactggtttatgtgtctgtttttataccagtacc

SEQ ID NO: 932377 - DNA, 120 bp, Artificial Sequence
  ENSG00000286675_34 (sequence is synthesized)
tcagctactgtagccactatagctttgtgatataatttgaagtcaggtaatgtgatgttctttttgcttagtattactttagctattctggatcttttgtggttctatacaaattttaag

SEQ ID NO: 932378 - DNA, 120 bp, Artificial Sequence
  ENSG00000286675_35 (sequence is synthesized)
ccttttttcccatttctgtgaataatgtcattgatattttgatagtattgcaatgaatctatagattgctttggatagtattgactttttaataatattgattcttccaatatatgaacg

SEQ ID NO: 932379 - DNA, 120 bp, Artificial Sequence
  ENSG00000286674_0 (sequence is synthesized)
gagtacattatgctcctcaagataatgaatggagaaaaatgtccaatgattgctagccattccgataatgtatttactctatgttgtgttattttgtttttgcagtaggacacaagtgat

SEQ ID NO: 932380 - DNA, 120 bp, Artificial Sequence
  ENSG00000286674_1 (sequence is synthesized)
tagaaaggatatcacatagtcagtgaccagctgagactgagtacggacaggggaagaagctaacttagacctaaagggacctgggatcaggagacatttctagataagcccctcagccag

SEQ ID NO: 932381 - DNA, 120 bp, Artificial Sequence
  ENSG00000286674_2 (sequence is synthesized)
ataacatcaacccatgacttccaataccaatgctgaagaggccacagaggagagagaatcttaaaacatttttaatatctgaaagttcttgtatttcaagaagtggaaagtttcttgata

SEQ ID NO: 932382 - DNA, 120 bp, Artificial Sequence
  ENSG00000286674_3 (sequence is synthesized)
tgtgtatgaaggtcaagattgagatagtgatactgagggtgggatgataccacactgaggctgggagttttatttctttcaaatctttctgtaggtatatctctgtggattcctaccact

SEQ ID NO: 932383 - DNA, 120 bp, Artificial Sequence
  ENSG00000286674_4 (sequence is synthesized)
tctaaaccatagttacaaggccaataaatacatagaacaatgttcctactgctcgtgagcatgatgctcttcctaatagctctatcggaaccctttattgctcatgaccttgtgttcata

SEQ ID NO: 932384 - DNA, 120 bp, Artificial Sequence
  ENSG00000286674_5 (sequence is synthesized)
tcatgctatctgattattcatcatttttcctggatctgcttgatatgaaatgtggatacagctatgtttgaagaaacatgttataggaaaagaaactccgacctcagaatctgaggattt

SEQ ID NO: 932385 - DNA, 120 bp, Artificial Sequence
  ENSG00000286674_6 (sequence is synthesized)
gtataatttggcctttacacaaaagaattatgtaatctggggcaagtcccttaatacagtatttgaacttaattttattgccctttctaggtctaaactctcagctgtgagtactaattt

SEQ ID NO: 932386 - DNA, 120 bp, Artificial Sequence
  ENSG00000286674_7 (sequence is synthesized)
gtggcatgatggtgaggtgaaatgacagaggctcatggcacgtcattgcagaatatccactagaatttcacaagtcaccagtcatggatttcaggatctgactgcttgtcatcttgggag

SEQ ID NO: 932387 - DNA, 120 bp, Artificial Sequence
  ENSG00000286674_8 (sequence is synthesized)
ttgtcttcatgggagacttcaggttctgagttcctgaatgtatcctccgtctacaggagagagggggctctggtcctgacttggcttcctcctgtctttgctgatggaagctgggttttg

SEQ ID NO: 932388 - DNA, 120 bp, Artificial Sequence
  ENSG00000286674_9 (sequence is synthesized)
atgagaaacttctcctggcatgctaaggtctactcacagcaaatgtaaagtcttagaggtcgaaggccttgataactgcctttcctgaccttgcactgtttctagtgagtttaatttaat

SEQ ID NO: 932389 - DNA, 120 bp, Artificial Sequence
  ENSG00000286674_10 (sequence is synthesized)
acaaagcaaaacaagtttgatgatagcctctggctgactgctggaacccaccacgcacaggaattcatgactgagtgacagcaggagcacttccctcatcacacatgatgcgcaggccac

SEQ ID NO: 932390 - DNA, 120 bp, Artificial Sequence
  ENSG00000286674_11 (sequence is synthesized)
ccagcgaggcacttcatctccaggttgacagttcctggctgactcgggtctgccacctggaagagcgtctgtaattctgtattgtggaacagaaaacaatgtgcagaatacattctttaa

SEQ ID NO: 932391 - DNA, 120 bp, Artificial Sequence
  ENSG00000286674_12 (sequence is synthesized)
aacagaagtacaaagtacttggaggcacctttatcatattccacatcctcaactttatttgcttttttcttctcttccatagatcttcctatttctgcatcatgatgagagtgttttaat

SEQ ID NO: 932392 - DNA, 120 bp, Artificial Sequence
  ENSG00000286674_13 (sequence is synthesized)
ttttataactgaagagtacactttagtatctcattttaaatgatggtgttccatacttttacttcttcttccaaaaaacaattacagaaatttcttcaagttctaagaaaaatactgtct

SEQ ID NO: 932393 - DNA, 120 bp, Artificial Sequence
  ENSG00000286674_14 (sequence is synthesized)
ttccttttcccagtatgttctctatacccataggtatccttcaaatactgcctaagacattccctattgagaaggccccagccagctagctgttcccagtgctcctgcctccacgctcac

SEQ ID NO: 932394 - DNA, 120 bp, Artificial Sequence
  ENSG00000286674_15 (sequence is synthesized)
ggactgtgggtcccggcagaatgtggctccatggacagagggtctctgcttcataccccgctgcacccccagggccagagaggtgcttgcatggaggagctattcaatacgtttagttga

SEQ ID NO: 932395 - DNA, 120 bp, Artificial Sequence
  ENSG00000286674_16 (sequence is synthesized)
atgaacaagcaaatgaatgaacaaaatattgtttaaagtatccatgttacaccaaaaatataatgcaattttctgatgtcttaaatcaaattctccagtggcaataaacataacaaaaac

SEQ ID NO: 932396 - DNA, 61 bp, Artificial Sequence
  ENSG00000286677_0 (sequence is synthesized)
tggttcagagcagaatgagctaagactttgagggactgttgcctctcagcatccggctctg

SEQ ID NO: 932397 - DNA, 120 bp, Artificial Sequence
  ENSG00000286677_1 (sequence is synthesized)
aagactttgagggactgttgcctctcagcatccggctctgcctcctcatttggacttctgggtcccgagttcctcctgtccctctgctctctctgatgccacggttaatcaactgaactt

SEQ ID NO: 932398 - DNA, 120 bp, Artificial Sequence
  ENSG00000286677_2 (sequence is synthesized)
tctcactcttatctttgattcccttttatcctggccctgactcttacctgcctggcaaaaccaaaacctcagatgcatgtttccgttcatctttgctgtgactcttacgtagctttgtgc

SEQ ID NO: 932399 - DNA, 120 bp, Artificial Sequence
  ENSG00000286677_3 (sequence is synthesized)
agatggagcaaagtgtgaagacagaaatccatgccccagcaggtgtgcatcctccaagctcagccaggccttccagtgtccagtattttcccttggtctcctgttccctataataacact

SEQ ID NO: 932400 - DNA, 62 bp, Artificial Sequence
  ENSG00000286677_4 (sequence is synthesized)
acggagattgcagtgaaccgaggttgcaccactgcacttgagcctgggcaacaagagcaaaa

SEQ ID NO: 932401 - DNA, 120 bp, Artificial Sequence
  ENSG00000286677_5 (sequence is synthesized)
ataccaaatgatatccttcttctattctccttctttcctccagtctcaggcaatgaatgggattgcctcctccagaccaagactaacttctccaactctgtcagctgactcagttactcc

SEQ ID NO: 932402 - DNA, 120 bp, Artificial Sequence
  ENSG00000286677_6 (sequence is synthesized)
ctcaccttctttagaaagctgctccatcaaccatcttctctcctatatgttcaacctctggctccctactgatgaataaaactttcattagcctgtcccccaatcctgcactcccttccc

SEQ ID NO: 932403 - DNA, 120 bp, Artificial Sequence
  ENSG00000286677_7 (sequence is synthesized)
aattatcatccaattgttttctctccatcagagacaaacatttgtttagggactatttcaaacatacttaaaaagtacagagaaccatgtagtaaacaaagatttaacagacattgacat

SEQ ID NO: 932404 - DNA, 85 bp, Artificial Sequence
  ENSG00000286677_8 (sequence is synthesized)
agaaccatgtagtaaacaaagatttaacagacattgacattttgccatatttcactagggttttcccgtttatggaaaaaaaatg

SEQ ID NO: 932405 - DNA, 79 bp, Artificial Sequence
  ENSG00000286677_9 (sequence is synthesized)
tgaggccgggagttcaagaccagcctagccaacacaagtggtggcatgcacctgtattcccagctactcaggaggctga

SEQ ID NO: 932406 - DNA, 120 bp, Artificial Sequence
  ENSG00000250501_0 (sequence is synthesized)
cctttagaaattgaaagaggaggagaggaggagagacccacagttgatctctgagaagtgagtagctggaggcaccaggataccagccaagcctaaaggataaagcaaatccctggacat

SEQ ID NO: 932407 - DNA, 120 bp, Artificial Sequence
  ENSG00000250501_1 (sequence is synthesized)
ggcttttgattccaagctaagaagtgcaagctcttccaaatacaactgcaactgccaagagattgatggaccagagaatggcctcttcattccaggcacttctaaagtccaagtggtcaa

SEQ ID NO: 932408 - DNA, 120 bp, Artificial Sequence
  ENSG00000250501_2 (sequence is synthesized)
ataccagcctctttttaccaatgttcccacctgtttcattcagccaaatttcattagatgaaggtttgaatggtgaagaaatgatggacgctgtttgtctcaaacaaggactctaatgat

SEQ ID NO: 932409 - DNA, 120 bp, Artificial Sequence
  ENSG00000250501_3 (sequence is synthesized)
acaacagaacaagtcacaagaaagcttgcctggaaaaccatacactggcctcttcgtggtgaagtccttcacaatccttacaaacatagaaaatattcagcaattcgtttgtttgttttc

SEQ ID NO: 932410 - DNA, 120 bp, Artificial Sequence
  ENSG00000250501_4 (sequence is synthesized)
cagtccactcttacttgagaaaaatgcaaaacatcaaagacacagaaaaaccaccagtctatacagcttgcccatactaaattgttattcatttcagaagagtgtacagtttctttctgt

SEQ ID NO: 932411 - DNA, 120 bp, Artificial Sequence
  ENSG00000250501_5 (sequence is synthesized)
actctattaaaccagttactctacaatagcaaacattttaggcaaacctaaccattgcttcccataaagatatttatatctttaagtggtatctgattcatccctaagaaatatgttatc

SEQ ID NO: 932412 - DNA, 69 bp, Artificial Sequence
  ENSG00000250501_6 (sequence is synthesized)
tttaagtggtatctgattcatccctaagaaatatgttatcaagatgtttgtttgtttgtttgtttgttc

SEQ ID NO: 932413 - DNA, 90 bp, Artificial Sequence
  ENSG00000250501_7 (sequence is synthesized)
ttgcacccggccgaagatttttgttttgactgtttttttctgaactacagggaaacgaaggcttttatgttattgtcccccttttctcac

SEQ ID NO: 932414 - DNA, 120 bp, Artificial Sequence
  ENSG00000250501_8 (sequence is synthesized)
ggaaacgaaggcttttatgttattgtcccccttttctcactaactggacttcctgtgacacgtgaagacgctatgcatgtttaataaatacactttgaatttaatgctcaaggaagataa

SEQ ID NO: 932415 - DNA, 120 bp, Artificial Sequence
  ENSG00000250501_9 (sequence is synthesized)
gcctcagcctcccaaaggaagcttttatagaagactcacccatattgcagactcattctctgcttgtagtcattggccagaattgtgtcacgtggtcacgcttagcggcgaggtaaaggt

SEQ ID NO: 932416 - DNA, 120 bp, Artificial Sequence
  ENSG00000250501_10 (sequence is synthesized)
gcctggctctgagacgggtcagctgagatgagtcagtcggaagaaagcattcaactggaaataaatcaccgcttcacaagcaccaagaacgaagaaaagaagggagagaaaagagagaaa

SEQ ID NO: 932417 - DNA, 120 bp, Artificial Sequence
  ENSG00000250501_11 (sequence is synthesized)
gataattccatggtcaaatagatttgaggaaacttgagttactcaactttatcaagtttctttcctacaggatttttttcagtccttaatatacaaacgtgcatattgactctcctaaaa

SEQ ID NO: 932418 - DNA, 120 bp, Artificial Sequence
  ENSG00000250501_12 (sequence is synthesized)
ttcagccaaatttcattagatgaaggaaggtggtgcattcttgagattgagaatacagatgagaagcaggtttgaatggtgaagaaatgatggacgctgtttgtctcaaacaaggactct

SEQ ID NO: 932419 - DNA, 120 bp, Artificial Sequence
  ENSG00000250501_13 (sequence is synthesized)
ctctctggaaaatctgactggtgctctttcctcgtgtgctccaagaacttaaaagccaattgtgatgtttccaaaataaagtacagagaaagacacttctatttcattcctctttcccag

SEQ ID NO: 932420 - DNA, 120 bp, Artificial Sequence
  ENSG00000250501_14 (sequence is synthesized)
tggcagattatttgtatccaagcttcatggaatttacccgagatgggataaatataattttgtgttttttaacagaataaggtttatctctccacagtttccatgtaaaattcttttttt

SEQ ID NO: 932421 - DNA, 120 bp, Artificial Sequence
  ENSG00000250501_15 (sequence is synthesized)
cctacaaccaactgggtaccttctactttttctgtgaaggcatttatttctggctggtcaatctgaattgttccattatcttgctacccactagtgatgaataaacttccttatttctga

SEQ ID NO: 932422 - DNA, 120 bp, Artificial Sequence
  ENSG00000250501_16 (sequence is synthesized)
aatacttatctagagtagtgttacatagagccacactttgggaactgtgttagtctagatttaccacaaaccccatcttctcactcatttattccattaataaactcatatgattatcaa

SEQ ID NO: 932423 - DNA, 120 bp, Artificial Sequence
  ENSG00000250501_17 (sequence is synthesized)
ttgattccaagctaagaagtgcaagtattaacagcatcagtcacagtagctgagtatctcctgtgagcttccataggaattgagcttgtctttacaagctcttccaaatacaactgcaac

SEQ ID NO: 932424 - DNA, 120 bp, Artificial Sequence
  ENSG00000250501_18 (sequence is synthesized)
agttgatctctgagaagtgagtagctggaggcaccaggataccagccaagcctaaaggataaagcaaatccctggacatggcttttgattccaagctaagaagtgcaaggacgactctgg

SEQ ID NO: 932425 - DNA, 120 bp, Artificial Sequence
  ENSG00000250501_19 (sequence is synthesized)
ccactacgtagaaaatagaagcaccacatccagatacagagtgaaagtgggagatgagtatcgaggctcttgcaataaatcaggtgtaagatgatgataccttggacaagtattaacagc

SEQ ID NO: 932426 - DNA, 120 bp, Artificial Sequence
  ENSG00000250501_20 (sequence is synthesized)
cagcatcatgaccagctgtctgaattgctggaaaatggcccctcagtaaaactaagctgaagccaaaccacatcctgaagatgaaacgcttttctggagaatccactgacacttcagata

SEQ ID NO: 932427 - DNA, 120 bp, Artificial Sequence
  ENSG00000287822_0 (sequence is synthesized)
agactgcagtgacagcagctgcgttcagtttgctcctcaaatcacagctcctttggcgtcctgaaacgccagactttgtctcctctgacgtgtgaaactcctgctttcttcttgggctct

SEQ ID NO: 932428 - DNA, 120 bp, Artificial Sequence
  ENSG00000287822_1 (sequence is synthesized)
cagcctagaagctacttatgggtaacttactgctgcacctgctgctgttgctgctttctatggtaaccatgaagtacacaccatgggagctacccacctgtgctccagaagttgcaatac

SEQ ID NO: 932429 - DNA, 120 bp, Artificial Sequence
  ENSG00000287822_2 (sequence is synthesized)
cggagaggtgatggagaggatgagatgctccctgaccctgcatcatatttcctcaccttgcaagccaatggctgctgatgctttgatattgcacagaataatgtatgaaaatatctccat

SEQ ID NO: 932430 - DNA, 120 bp, Artificial Sequence
  ENSG00000231024_0 (sequence is synthesized)
ttcccccattctttctttttgtgaaaggcaaaactcctcaaagtcctaaactgttaagagagttaggtgccccaagaggagacgggagagcggtgatgccttcagggcagcagcagaagc

SEQ ID NO: 932431 - DNA, 120 bp, Artificial Sequence
  ENSG00000231024_1 (sequence is synthesized)
agaactctggagtctgtgaagagcggggagctgagacccaactcgttatgttacgggttgtgtgttgctggatccggcagagacagccttgatgtgtcacccaagctggagtgcagtggt

SEQ ID NO: 932432 - DNA, 120 bp, Artificial Sequence
  ENSG00000231024_2 (sequence is synthesized)
ctcctgggctcaagagatcctcccgcctcagcctcctgggcagctgggactataagcatgcttcaccacatccgacatttttaattttttaagtttaaaataaaaatgtgatgttttgta

SEQ ID NO: 932433 - DNA, 120 bp, Artificial Sequence
  ENSG00000244137_0 (sequence is synthesized)
ggactcgctgtatccgagccccgagatgatgacgtgaccttagaagatggcagagccacacaatagaaggcgtttgggttcctgaatcactgtatgaacagagccacccacagaatatga

SEQ ID NO: 932434 - DNA, 120 bp, Artificial Sequence
  ENSG00000244137_1 (sequence is synthesized)
acatcctccctggactgtcataatgagtgaggaaaaaactttactgtgtttgagcctttatatatttggggtctattcactactgcagctagtgttaccttgagtcattggtgccttgaa

SEQ ID NO: 932435 - DNA, 120 bp, Artificial Sequence
  ENSG00000244137_2 (sequence is synthesized)
tggaaaatggttatctatgttatgcagtggcaaaacattgggtaaatctgttgcatgttgttatggactgaatgtttgtggtctcccctaaattcatatgttgaatcctaaccctcgaag

SEQ ID NO: 932436 - DNA, 120 bp, Artificial Sequence
  ENSG00000244137_3 (sequence is synthesized)
tagtagtgtcaggaggtggggcctttgggaggtgactaggttgtgagggtggagccctcatggatggggttagtgccattataaaagaggccccagagagctgccttgccctctttctac

SEQ ID NO: 932437 - DNA, 120 bp, Artificial Sequence
  ENSG00000244137_4 (sequence is synthesized)
catgtgaggacagagtgagaaggatccatctataaatcagaaacagggccctccacagatataggtactgcctgtgtcatcttcttggacttcctggtatctagaactgtgagaaataaa

SEQ ID NO: 932438 - DNA, 120 bp, Artificial Sequence
  ENSG00000244137_5 (sequence is synthesized)
caaaggaggagacccaggactcgctgtatccgagccccgagcttgggaatctctcaagcaccctgcatgtgttccacaaatctggggaacctaaaccctcatggttcccgaggcagagat

SEQ ID NO: 932439 - DNA, 120 bp, Artificial Sequence
  ENSG00000244137_6 (sequence is synthesized)
aagaaaggcgatgctaagaaacgtgctgcaggggaggctggcacattctgctccttagctaaccgcacaggcccatgggtccacacacatcagaccatggctctctgtggtctatctttg

SEQ ID NO: 932440 - DNA, 120 bp, Artificial Sequence
  ENSG00000244137_7 (sequence is synthesized)
ccattactttaaccaggctgtttctcatgcgctcatggagggtgactgaagatgccaccccgaggtgcaccctcagcctcgctggacacttacggctcgcattctccagccggaccaggc

SEQ ID NO: 932441 - DNA, 120 bp, Artificial Sequence
  ENSG00000244137_8 (sequence is synthesized)
atcagctgcaggaggtggctgctcagctgaaagcctgtggggacaaaggaggagacccaggactcgctgtatccgagccccgagggtatgcggaagcgagcaccccagtctgagatggct

SEQ ID NO: 932442 - DNA, 120 bp, Artificial Sequence
  ENSG00000244137_9 (sequence is synthesized)
cctgccggtgtgagcctgagggccaccatcctctgcctcctggcctgggctggcctggctgcaggtgaccgggtgtacatacaccccttccacctcgtcatccacaatgagagtacctgt

SEQ ID NO: 932443 - DNA, 61 bp, Artificial Sequence
  ENSG00000250509_0 (sequence is synthesized)
atcagtcggacacgattggcagggaaagcacgtgtgtttttgtgagaattatgccgagata

SEQ ID NO: 932444 - DNA, 120 bp, Artificial Sequence
  ENSG00000250509_1 (sequence is synthesized)
ggggctctgggagtggctgccaggtacctggtccatccctccaggccccttagagagaggactcagagaagagactgagggagatgggatgtgccagggtttcctgctaggagcctcatc

SEQ ID NO: 932445 - DNA, 120 bp, Artificial Sequence
  ENSG00000250509_2 (sequence is synthesized)
aagtaacagggcaccatcttggaagcaaagagagcagccctcgccagactccaagtctgctggagccttaatcttggacttcccaacctctagagttgtgagaaaataaatttctattta

SEQ ID NO: 932446 - DNA, 120 bp, Artificial Sequence
  ENSG00000250509_3 (sequence is synthesized)
taatttacccagtccatggagttgtgttacagcagcacaagtggactaagacgctgtcaacacttgttaatttctgttgttatgccatcgtagtggttgtaaactgatatcatgttgtga

SEQ ID NO: 932447 - DNA, 77 bp, Artificial Sequence
  ENSG00000250509_4 (sequence is synthesized)
atctgttcatgtgcttgttggccctttgtgtatcttctttgaataaatgtctattcaagttctttgtccatttttaa

SEQ ID NO: 932448 - DNA, 80 bp, Artificial Sequence
  ENSG00000250509_5 (sequence is synthesized)
actggggtccttttccaccttgtgagaaggcctttcctgtgtttacacccacctgcagcgtggataaagagtttctggcc

SEQ ID NO: 932449 - DNA, 120 bp, Artificial Sequence
  ENSG00000250509_6 (sequence is synthesized)
ggctgaggcgggcggatcacgagcaaaagcacacaagcctgtgggaaaataatttggcaataagcagcgagaaccatacaaataccatgttctctagctcaagactctgattgctgggaa

SEQ ID NO: 932450 - DNA, 120 bp, Artificial Sequence
  ENSG00000250509_7 (sequence is synthesized)
tttaccctgatgaaataacccgaaagaaggggaaaaccactcagggcaagggtgtggctctggagttacgtgctttgccttgacggcactagaaagcaaagttccgaggactgtgttgca

SEQ ID NO: 932451 - DNA, 120 bp, Artificial Sequence
  ENSG00000250509_8 (sequence is synthesized)
acttggaagcccgcgcaagcagctggaaggggtgctgtgattacagccgcgtgaaggcatgcgcgctggggcctggccagcggggtgcctggagaggtacctggtccatccctccaggcc

SEQ ID NO: 932452 - DNA, 120 bp, Artificial Sequence
  ENSG00000287078_0 (sequence is synthesized)
caagacgagggaacacttgacggctctgaagtggggagcagcttggcctgtacaatggaacctgaggcctgagtccagttaacaagagattgagctcaggagtccgagaccagcctgggc

SEQ ID NO: 932453 - DNA, 120 bp, Artificial Sequence
  ENSG00000287078_1 (sequence is synthesized)
tagccgggtgtggtggtgcgtgcctgtagtcctacctactgagaggccgaggcaggagaatcgctgtggccccggaggtccaagctgcaatgagctgtcaactgcactccaacccgggtg

SEQ ID NO: 932454 - DNA, 120 bp, Artificial Sequence
  ENSG00000287078_2 (sequence is synthesized)
caagctgcaatgagctgtcaactgcactccaacccgggtgacaaggtgagaccctgtctcaaactaaaacaaacaaaaaaaccgagagcggagtaatggggaagtggccagattcccatc

SEQ ID NO: 932455 - DNA, 120 bp, Artificial Sequence
  ENSG00000287078_3 (sequence is synthesized)
gtcttgttctggtggctatcttgggtcccagcctacctggagcgtgggctggtctcatctccacaatggccccgctgttgactagccaccttgaagtaatctttggaattttgcagctgt

SEQ ID NO: 932456 - DNA, 120 bp, Artificial Sequence
  ENSG00000287078_4 (sequence is synthesized)
gtctccaggcttggtttgtctgtctcaagattagcccttggaacttctcagaaggcagataattaaatactagcatacagtaagataaatgtgaagggagtatatacagtgagaaaggga

SEQ ID NO: 932457 - DNA, 120 bp, Artificial Sequence
  ENSG00000287078_5 (sequence is synthesized)
gggatatggggtctattttacagctaagggaaaaggcttttgcagtttgcttcaaggttgtatcttgaaacccaagagaaaggaaaaaaagttttaaaatgtattttaaagttaaactgc

SEQ ID NO: 932458 - DNA, 120 bp, Artificial Sequence
  ENSG00000287078_6 (sequence is synthesized)
tggattagtttcttctgtctaaaacattgccatctcctctcctgcctatgccttgaacttttaaattatgttttctagttagcgatctcccagtttacttggacaaagggcttttccatc

SEQ ID NO: 932459 - DNA, 120 bp, Artificial Sequence
  ENSG00000287079_0 (sequence is synthesized)
tatgcagttgtgttaggtattgccaaatttccctttaaaaggattgtgccaatttgtattctcacaagagatgctagtacaagtgttgagactgatgtgtggctagatggctggagagct

SEQ ID NO: 932460 - DNA, 120 bp, Artificial Sequence
  ENSG00000287079_1 (sequence is synthesized)
ggctgacatctcaccccgcagcatcaatgttagaaccggtgcttacgcggcttgcagttactagagagagccactagatggcagatacagcccatcacagacaacagtgagcacaccttt

SEQ ID NO: 932461 - DNA, 120 bp, Artificial Sequence
  ENSG00000287079_2 (sequence is synthesized)
ttccagattttgcttcaggggcctttgataacaattgtgtaagttgaagtaatagaatgtttctaaatgactaatagcacaacaactagctgttttgtaggttgttttttgtttttttga

SEQ ID NO: 932462 - DNA, 120 bp, Artificial Sequence
  ENSG00000287079_3 (sequence is synthesized)
ttgtttttttgagacagtctcgctctcttgtgcaggctggagtgcagtagcttgatcttggctcactgcagcctctacctaacctccgagtccaagtgatcctcctgcctcagcctcccg

SEQ ID NO: 932463 - DNA, 120 bp, Artificial Sequence
  ENSG00000287079_4 (sequence is synthesized)
ctgggattacaggcatgagccaccactcaggccacaactagcatttgtaatactagtaggaacagtaacattatttttattagcaagtaacatttttcatttgattattcattcatacag

SEQ ID NO: 932464 - DNA, 120 bp, Artificial Sequence
  ENSG00000287079_5 (sequence is synthesized)
tcatacagtaagtgtatatttgttctatgtgctgttataggcactgggatgaagagatttaaaaacaaacacaaccatcagcctgcatagagctttcattctcctgggggagagagacag

SEQ ID NO: 932465 - DNA, 120 bp, Artificial Sequence
  ENSG00000287079_6 (sequence is synthesized)
taaggaaatacaaaagccaaatacatagtctattggggagcgtaggtgctatggagaaagcacagaaggggaatagggtgtgtgtgcgtgcctgtgtgcacatatatgtgcatgcgtgca

SEQ ID NO: 932466 - DNA, 120 bp, Artificial Sequence
  ENSG00000287079_7 (sequence is synthesized)
tgtgtgtgtgtgtgtgtgtgtgtatgtggtgagcagggtagttagtttacaaccttaaacaatgtgatcagggaagggctcactgagaagcagctgactgagagaggaagctgtaaggac

SEQ ID NO: 932467 - DNA, 120 bp, Artificial Sequence
  ENSG00000287079_8 (sequence is synthesized)
agggagagaaggcgcgagcagcgttggagcggggtgtggaccttggagaccctgtaggctactgaaaggactttggatttgtccccgtgagaaaggagagccatgggagagtaaatcaaa

SEQ ID NO: 932468 - DNA, 120 bp, Artificial Sequence
  ENSG00000287079_9 (sequence is synthesized)
tccctcagaagcccagaaagcagctgtcctcagctcactcctctcaccgcagatcacccattcaccagatcccaggtaccgaactgaagatggtagaggaaaagtttttcctgcttaaca

SEQ ID NO: 932469 - DNA, 120 bp, Artificial Sequence
  ENSG00000287079_10 (sequence is synthesized)
tattcaactctctaccctcaatatatttggctgttattattctggtttacatgtatcataatttaaccagttccctactggtggatgtctaggtttccccgatgttttgctattaaaaac

SEQ ID NO: 932470 - DNA, 120 bp, Artificial Sequence
  ENSG00000287079_11 (sequence is synthesized)
acacatggtacacgtttttctagatcgggcagggtttgcccatctccacttcaagcagcacaaccaccatctgccagtgttggggtttactctacagtcagcaaacactgttggcacatc

SEQ ID NO: 932471 - DNA, 120 bp, Artificial Sequence
  ENSG00000287079_12 (sequence is synthesized)
cagtcagagaaactgaaaacagaaagcagaaatggcttacactggactaattttagaatttctaagtacatttaagtgatgactcatcccacttaaattcaaagctgtttgttgtgccat

SEQ ID NO: 932472 - DNA, 120 bp, Artificial Sequence
  ENSG00000287079_13 (sequence is synthesized)
ctggctcatcagaacatgaaagacttctcctgcaacctggaaaaaggccagagaggaagacgaatggaggagtcaaccccatgggaatgctgactgagtgttagctccccgtggacagga

SEQ ID NO: 932473 - DNA, 120 bp, Artificial Sequence
  ENSG00000287079_14 (sequence is synthesized)
atgtcactgcatgaataggctgcagtatgtctgggcctgtttttttttcataaaatgttccccccctgtttttttcttattccaaagcaatgcaacaaaaagcacaagaaatcaaaaagg

SEQ ID NO: 932474 - DNA, 120 bp, Artificial Sequence
  ENSG00000287079_15 (sequence is synthesized)
aaaaaatagatattggacttcatcaaaatgaaaaacttttgtgcttcaaaggaaatggaaagaaagtgaaaaaacaactgagggaatggaagaaaatattctcaaatcatcatctaacaa

SEQ ID NO: 932475 - DNA, 120 bp, Artificial Sequence
  ENSG00000287079_16 (sequence is synthesized)
aggttgtgttagtctgttcaggttgctgtaacaaaatatcatttcaggtcaccaggtggcttaaacaacagattcagttggccctccgtatccatgggtttcaggccttcgacttcaacc

SEQ ID NO: 932476 - DNA, 120 bp, Artificial Sequence
  ENSG00000267287_0 (sequence is synthesized)
gggagaggtggcgcgttgcctgggtgctcatggacaccaggtctgctccccatgcacttgtcgtctgtgccacgctgcaggggccaggcagccacaggcatcgtttgggccccgagctgg

SEQ ID NO: 932477 - DNA, 120 bp, Artificial Sequence
  ENSG00000267287_1 (sequence is synthesized)
ccaggctggagtcagggcccactaagccgcaggtgcctcttgcttgggggtgggggctgaagggtgtcttcctgccgtggagctatagctggtgcctggttccctctgtccagacacagc

SEQ ID NO: 932478 - DNA, 120 bp, Artificial Sequence
  ENSG00000267287_2 (sequence is synthesized)
tctgggcttgcagcctctgcctccctgatgggacagcaaccctgggcatcgctagaggctctgaggtctgcacggggcaccatcccgtattctgcagggtccagagacacagagagggag

SEQ ID NO: 932479 - DNA, 120 bp, Artificial Sequence
  ENSG00000267287_3 (sequence is synthesized)
gccagcccagcaccattgtgggagaaaggccagtgatgtcatcagggggctaaggctggcagccaccttctagtggacattactgctgagaactggccaggtgcctgcactcgctgccat

SEQ ID NO: 932480 - DNA, 120 bp, Artificial Sequence
  ENSG00000267287_4 (sequence is synthesized)
gagtaattgcccagtggcccgtgaggtgctggcagctcctccatttacaagttaggagacaggtacagagagaccaggtggcctgttccagcagcactgctctggctcttgaccaccacc

SEQ ID NO: 932481 - DNA, 120 bp, Artificial Sequence
  ENSG00000267287_5 (sequence is synthesized)
acatcagcagcaaaaccgccagggctgaaatcaatacagatttatccattctcaccaggctgcgggcgccttgcaggtctgtgctcctagctgggggcccagagagactctgcttccagg

SEQ ID NO: 932482 - DNA, 120 bp, Artificial Sequence
  ENSG00000267287_6 (sequence is synthesized)
actgcccgagtgtggaaggaacccagctgccagctgcaggactgaggtcccatctcctccctggcctcgcacaggccctcctgcctgccaagcagcaagtgatgccgcacctcagtctct

SEQ ID NO: 932483 - DNA, 120 bp, Artificial Sequence
  ENSG00000267287_7 (sequence is synthesized)
ccctctgctctccagttccctggacccccagcccaagctccggtgattaccaggtaattcctgtcccaagacagccgcgccgagtgtcctaacacagttgccacacggctccatgtcctg

SEQ ID NO: 932484 - DNA, 120 bp, Artificial Sequence
  ENSG00000267287_8 (sequence is synthesized)
tgcacaggccaggggttcgagtgggcatcagcaatgctcacttcagagcccctccgccacgacgtggccatgtgcacacagctccgtggccagcgctggaaactgcgtctcctgcctcca

SEQ ID NO: 932485 - DNA, 120 bp, Artificial Sequence
  ENSG00000267287_9 (sequence is synthesized)
gctgcgttacttggagaagcaggaacctctccatcctcactttccatccgcacatccagggccgcccacgtgcacccacaccgtgcgctcactgtgtggcctgtcgagaacacagtgtcc

SEQ ID NO: 932486 - DNA, 120 bp, Artificial Sequence
  ENSG00000267287_10 (sequence is synthesized)
tctgcccctgatttcccaggagagtcgcacgtctgtgatggtggtctcccaggcacgcatggccatggagcacgggaacgtgtgcgcctgctgggagcacatgggaagactgcacgccgg

SEQ ID NO: 932487 - DNA, 120 bp, Artificial Sequence
  ENSG00000267287_11 (sequence is synthesized)
gtgctgaggcttcctgtgaaaaaaagaacctgaaacaagtcttcctgagacccaggctggtgtggacacaaggaagccccgccggagggccctctttacatggggaggcctgaaccctga

SEQ ID NO: 932488 - DNA, 120 bp, Artificial Sequence
  ENSG00000267287_12 (sequence is synthesized)
gcagtcaaggaagttttggaagtgagtagctatggcttctccacctgctcctgcctggacggcgcccttcagaactcaagcccatccatgagacagcacccaccggggccagtgagtcac

SEQ ID NO: 932489 - DNA, 120 bp, Artificial Sequence
  ENSG00000267287_13 (sequence is synthesized)
tccatgaaggccaaagatcacctggacacgagtctcggggtaaccagcccccctgcagacctgcagaagcttggacagcaagtgggagtcagcagtcaggaaactcgggggctttgcacc

SEQ ID NO: 932490 - DNA, 120 bp, Artificial Sequence
  ENSG00000267287_14 (sequence is synthesized)
tggagggaagcccacctgatatgaaaatgctttcgaagcttgtggatcggagaggccagtggtgtaccgggtggtccaatcgatcagtcaggacgatcatcagccccatttctcaggtgc

SEQ ID NO: 932491 - DNA, 120 bp, Artificial Sequence
  ENSG00000267287_15 (sequence is synthesized)
agtacagcacgtccacgtcctcccgacaccgtgagtgcggccacaccgaagccaggggagcaggtgcgcttctccataggtcctggtttaaagcaagcggaaacaccacaggctcgggat

SEQ ID NO: 932492 - DNA, 120 bp, Artificial Sequence
  ENSG00000267287_16 (sequence is synthesized)
tgaggtggtaagggacgtccagtcctcaggtgaggttaagtccttctacagagacagcactggggggacctcacagtgccccccgggaagcgctgtttgggcaggctgcaggagctgagg

SEQ ID NO: 932493 - DNA, 120 bp, Artificial Sequence
  ENSG00000267287_17 (sequence is synthesized)
tggccagtcccgaacaccaggttgtggcagtggagacctggggggtggccagcggccccctatggaggttctgccgtgcgtgtcagggccccaggcagggctgtgcagcgccagcctcac

SEQ ID NO: 932494 - DNA, 120 bp, Artificial Sequence
  ENSG00000267287_18 (sequence is synthesized)
tatcagtgtggacacacatctgtgggaggggctctcgttttccccaccttccggtgagggaaccaaggcagactcagcaccaagcaggggtcaggccctggtggaggtggattttcttca

SEQ ID NO: 932495 - DNA, 120 bp, Artificial Sequence
  ENSG00000267287_19 (sequence is synthesized)
ctgtggcacagtcctgctcagtttctagtcctgatggaggtggtggaggccctggtggaggtggattttcttcaccgtggcacagtcctgctcagtccctggactgcccccctgcaccca

SEQ ID NO: 932496 - DNA, 120 bp, Artificial Sequence
  ENSG00000267287_20 (sequence is synthesized)
gcagcacaggccgcagagcccaggagatgtgggcaggagctttcccctcgcctgccccactcctgcccacccagtgggcaccccgtagatgggagcagctctccgtctagcacttggact

SEQ ID NO: 932497 - DNA, 120 bp, Artificial Sequence
  ENSG00000267287_21 (sequence is synthesized)
gctgggctgagtcatggctgcaggcaacggcttagtggcatctcccaggtgccactgcagggatagcctctgtgtctccaggctctgctgtggccccgcggagccaagcttacccatgcc

SEQ ID NO: 932498 - DNA, 120 bp, Artificial Sequence
  ENSG00000267287_22 (sequence is synthesized)
gctgagtcgggggctgcagaggcctgtgcgggctgcggtggctagacctgggcctggctgctcagatgctgctggaaccctgctctcagcctggaggctggcaggtctgccaggggccaa

SEQ ID NO: 932499 - DNA, 120 bp, Artificial Sequence
  ENSG00000267287_23 (sequence is synthesized)
cgggcaggcatcgcccgtctgaagctctttgcctctgaaggagcttcagcgccagccaggggcagtttatgagaaattcagagaaacatgtaggcttctctgtgtcttctgaagaactgc

SEQ ID NO: 932500 - DNA, 120 bp, Artificial Sequence
  ENSG00000267287_24 (sequence is synthesized)
caatgcctcacccacctctggccagaggactctggaaaacttgcgtttctggtatgtatagaaaagcgacatgctaagccgcaaagccgcccccttcaagacgcagcacacgcaaggctc

SEQ ID NO: 932501 - DNA, 120 bp, Artificial Sequence
  ENSG00000267287_25 (sequence is synthesized)
accctgccacgagcactggtaccggctcactttccgctctgctcggcgggactccggccaggcccagcgtgcagctgcagaaaggtttagagtgaggcttccacttcactctccggtcca

SEQ ID NO: 932502 - DNA, 120 bp, Artificial Sequence
  ENSG00000267287_26 (sequence is synthesized)
agagttatactatctggtggaagtgtttctttttccttttttggacagttaagctacagcgatgggccaactggcaccagtgtggagagacaggtattcctcactttgtggcaccaacgt

SEQ ID NO: 932503 - DNA, 120 bp, Artificial Sequence
  ENSG00000267287_27 (sequence is synthesized)
ggttctggcaaagtggcctcttttccagtaaaacagtcttctcccctccctcgccttccattttaggaccagtggtttgtccctggggaagcaaccccaattacagccagctttgccatc

SEQ ID NO: 932504 - DNA, 120 bp, Artificial Sequence
  ENSG00000267287_28 (sequence is synthesized)
tgtggaaatagcctggtcaccagaggcacagaagccagatgcgtggccatgccggcggcagcacccgcggcagcacccggggcagcccctgcccccgacccatgaatctcagtgtccccc

SEQ ID NO: 932505 - DNA, 120 bp, Artificial Sequence
  ENSG00000267287_29 (sequence is synthesized)
aggccgcccacgtcccactctgcccagcctacaccacctccctcaccgcaaagtgcccgctctgcagctccatgcccctgcccagtggagcctcagccccgtcccacctgcagcatgccc

SEQ ID NO: 932506 - DNA, 120 bp, Artificial Sequence
  ENSG00000267287_30 (sequence is synthesized)
agcccaagtgcccgaaacccagagcctcggactcagggcaaaaggaagccgccccattccaccacatcagggtctccactgtgcttatttagagcagagcacaactctccttgcgtctga

SEQ ID NO: 932507 - DNA, 120 bp, Artificial Sequence
  ENSG00000267287_31 (sequence is synthesized)
gtcccttcacacaggtgactgagaggctcaggacagagcattgcaggggagacagaggaggggctcggcctcgccaagcagctggctctattcatttagcagaaccgctgccccaccccc

SEQ ID NO: 932508 - DNA, 120 bp, Artificial Sequence
  ENSG00000267287_32 (sequence is synthesized)
tcccagcccctgcacggagggaggccactggggccggcccgtccccaacttctattttgttttcgccagagccgcctccagactccctcttcacattttatgtcaactctggggccctgc

SEQ ID NO: 932509 - DNA, 120 bp, Artificial Sequence
  ENSG00000267287_33 (sequence is synthesized)
tggctgaaagtgagttctgttttccggcagccctgtggcttttggactcggccttgaaattagttcatggcgacccaggcacacatcgcgctgggaagccacgtgggagccgtgcgggtg

SEQ ID NO: 932510 - DNA, 120 bp, Artificial Sequence
  ENSG00000267287_34 (sequence is synthesized)
ctgtgctcacacagctccgcgagacggccgcccaaacaaagctacctccgtgggccttggccggctgacaagaggaagagaaggagattactctaagctccaggtattctggtgagctgg

SEQ ID NO: 932511 - DNA, 120 bp, Artificial Sequence
  ENSG00000267287_35 (sequence is synthesized)
aagctggccgggagggccaggcgccagtgacacctccagccagcaggcccatgtggaggccccatcccgagagcgtgcccggggcgaggcgtgtccggccaccaccgaccaccagccgcc

SEQ ID NO: 932512 - DNA, 120 bp, Artificial Sequence
  ENSG00000267287_36 (sequence is synthesized)
caggaggcagaggtgaccggagagggggctgctcggttcagggaggagcccagcccccaacgcagggcacggatggaatctctcaaggttccctgggcatcctgcccacccaagctgact

SEQ ID NO: 932513 - DNA, 120 bp, Artificial Sequence
  ENSG00000267287_37 (sequence is synthesized)
gctaaggtcatcgatacggagcaggagcccaggcctagagtgtccaggccaagtgaccaccatgagtgcctgagaggccggacgtgcaggctggctcctggcttctcacctgagcctccc

SEQ ID NO: 932514 - DNA, 120 bp, Artificial Sequence
  ENSG00000267287_38 (sequence is synthesized)
cagccccttgcctccacgtctgagaatgcccggcgccccagcatggccttggggaggcggcggtgctgagtgcatggggccgagaggatggctctgggccagtcgggtgctgggacagtg

SEQ ID NO: 932515 - DNA, 120 bp, Artificial Sequence
  ENSG00000267287_39 (sequence is synthesized)
gctggcaggggacccatttggagaagagcccactgctctgagcagctccagctgcagctcccaccgccctcttgtgagggcctgcctgggcccgtgtccaaatcccagcaccacaggcca

SEQ ID NO: 932516 - DNA, 120 bp, Artificial Sequence
  ENSG00000267287_40 (sequence is synthesized)
catggccggcaggtctcacggggtgagcacagcagaggccgcttttacacagggacccctggggccccctccaagggctgctgcctgagagggagcgtggcccacggagaccccctggac

SEQ ID NO: 932517 - DNA, 120 bp, Artificial Sequence
  ENSG00000267287_41 (sequence is synthesized)
ttggcctctggggcccacctggtggtttctgagggtgctgccaggccagaagctcaaatcctgctggctgcgctgtcctgaggccacagccaacacccactcctgcctccagcccgctgt

SEQ ID NO: 932518 - DNA, 120 bp, Artificial Sequence
  ENSG00000267287_42 (sequence is synthesized)
cccttcccactgttagcggggcctgggggatgaaggaagaccaccacagtgcggtgggagagagaaagccctcggcttcatcctgggtgtgttgtggagatgcagacgggtccgaggtca

SEQ ID NO: 932519 - DNA, 120 bp, Artificial Sequence
  ENSG00000267287_43 (sequence is synthesized)
gacgagggtactggacttgccgaggtgtccacactcaaagggagcgtctggagcggggggcggcgtgaggagttcaggggcttcccgggagcagttccagctgacagagctccatggaaa

SEQ ID NO: 932520 - DNA, 120 bp, Artificial Sequence
  ENSG00000267287_44 (sequence is synthesized)
tcagacatgaccttggggaccgccgacctgtggggtgtgcaccagaaccccacactgtgggagcccagccttcctctcactgggtggcagtggctgggctcacacagaccacagcagtgt

SEQ ID NO: 932521 - DNA, 120 bp, Artificial Sequence
  ENSG00000267287_45 (sequence is synthesized)
ccagctcccctgtcaaggagagactcctcctcagggtgggctgcgggaccagcgccagcggtgatggggtccatcctcaccgtctcctgaagggcccggcctggcctgagacttcgatct

SEQ ID NO: 932522 - DNA, 120 bp, Artificial Sequence
  ENSG00000267287_46 (sequence is synthesized)
cggtgatgacagccaccagctggatgaactggccccgcgtccttcctactcctcatctcccttctcttgctgggacttcacgagagagcccgagttactgagtcaacaggaagtagaaga

SEQ ID NO: 932523 - DNA, 120 bp, Artificial Sequence
  ENSG00000267287_47 (sequence is synthesized)
tgaaacaagtactaattttttacattgattacagatttaaatgataatttttttatagattgggttcaacaaaatattaaaactaatgacacttattggccgggcgcggtggctcacgcc

SEQ ID NO: 932524 - DNA, 120 bp, Artificial Sequence
  ENSG00000287070_0 (sequence is synthesized)
ggctcagtagctggagcagctacgtgcagcgtaggggcttttctcttaggggtttccttgccatagcgtatgggagatggtgttaggcgggttaggaattaataaatgccatagagaggc

SEQ ID NO: 932525 - DNA, 120 bp, Artificial Sequence
  ENSG00000287070_1 (sequence is synthesized)
atcctgcgctgtaggaatgaggacagagaagggggaaagtttctgggggagaaaatagttttaaattgggcctagaaagacaaggcatgaatttgtttctctttactcacacgttttcat

SEQ ID NO: 932526 - DNA, 120 bp, Artificial Sequence
  ENSG00000287070_2 (sequence is synthesized)
tgcatacacacttggaaagtgaggtactatacgacctgtttagtaacgttaaaataatttaaaaaaaaatcttaacagggcagttaatgttaattataacactttgggccgggcgcagcg

SEQ ID NO: 932527 - DNA, 120 bp, Artificial Sequence
  ENSG00000287072_0 (sequence is synthesized)
tatatagaaattgtggagctgtcccagaagttgggagttattccagaagatttagtatcaagcaaggaccagaaagggaaggggagaaacgggaaaggcaggcagatgacagctttcagt

SEQ ID NO: 932528 - DNA, 120 bp, Artificial Sequence
  ENSG00000287072_1 (sequence is synthesized)
ccctgatggatgagagaagaggggaggccttcttccaatctcctcagcaagggggactgcagatgctattatgaacacgtgtaattcatggaaagaaatgaatatatcaatattaataga

SEQ ID NO: 932529 - DNA, 120 bp, Artificial Sequence
  ENSG00000287072_2 (sequence is synthesized)
agtttggaggaagctgattccaactttcatgagtgactttgaagagttcaagacttcagtggagaaaatcacttcagatgtggtgtaaacagcagagaactacaattagaaatggagcct

SEQ ID NO: 932530 - DNA, 120 bp, Artificial Sequence
  ENSG00000287072_3 (sequence is synthesized)
gacaatgtaactgaattgcttaaatctcacaattaaacttgaatgaaacttgcctcttagggataagcaaagaaaagggtttcttgagatgggatccactccttattaagatgccctgag

SEQ ID NO: 932531 - DNA, 120 bp, Artificial Sequence
  ENSG00000287072_4 (sequence is synthesized)
cattgttgaaatcacaataaaaagattgagaatattatataagcttagttgataaagcagtggcatggtttgagagagttgactctaattttgaagaaagatttattgtgggtaaaatgc

SEQ ID NO: 932532 - DNA, 120 bp, Artificial Sequence
  ENSG00000287072_5 (sequence is synthesized)
tatcagacagcatcccatgctacagggaaatcttttgtgaaaggtcaagtcaatcaatgtgataaaaatttattgttatattatttttagaaattgccatagtcacctccacccccagca

SEQ ID NO: 932533 - DNA, 120 bp, Artificial Sequence
  ENSG00000287072_6 (sequence is synthesized)
cccttcaccagcaaaaagattacaacttgctgaaaacccagatgattgttaacattttaaaactatacaatatttttaaattaaggtatgtatattgattttttagacataatattatta

SEQ ID NO: 932534 - DNA, 120 bp, Artificial Sequence
  ENSG00000287072_7 (sequence is synthesized)
ctcatttaatagagaacagtatagtataaacatgacttttatatgtactgagaaactaaaaaaaaaagtatgacttgcattgttcccatattttgtttattgtggtggcctgaaactgaa

SEQ ID NO: 932535 - DNA, 120 bp, Artificial Sequence
  ENSG00000287072_8 (sequence is synthesized)
cctgcactatctcagaggtatgcctgtatcacacatattgatttttgtgtgtagaaccaatcttgcatgccaaggatgaatcccatttgatcatggtgaatgacttaccctttacatgtg

SEQ ID NO: 932536 - DNA, 120 bp, Artificial Sequence
  ENSG00000287072_9 (sequence is synthesized)
ctgtggaatttggcttttcagtatttagttgaggatttttacatgtatattttggcctgtgatttttttttttttctagtagtgttcttgcctggctttggaaaactggatatccatatg

SEQ ID NO: 932537 - DNA, 120 bp, Artificial Sequence
  ENSG00000287072_10 (sequence is synthesized)
cagacaggtaaagttatatccttatcttacattttatacaagaatcaactcacaatagattaaagatctaaagataaggtcagaaactataaagtcactagaaaaatacataggggaaaa

SEQ ID NO: 932538 - DNA, 120 bp, Artificial Sequence
  ENSG00000287072_11 (sequence is synthesized)
gctccatgacattggtctgggcaatgaattttttggatatgacctttgaaagcacaggcaacaaaagcaaaagtagacataggggattacatcaaattaaaaagcttctgcactgcaaaa

SEQ ID NO: 932539 - DNA, 120 bp, Artificial Sequence
  ENSG00000287072_12 (sequence is synthesized)
gaaacaatagacaggttgaggagacaacctacagaatcagataaattatttgtaaaccatatatctgataaagggttaatatctaaaatctacatggggtagaggaataagggagatgtt

SEQ ID NO: 932540 - DNA, 120 bp, Artificial Sequence
  ENSG00000287073_0 (sequence is synthesized)
gagagcagtgttaacagcacctcacatctggggtggcctggaggctgggccagcatgaattagtgtaatgaaggtcttctcctctctcacacgaggttggaatctcacaccagatcaact

SEQ ID NO: 932541 - DNA, 120 bp, Artificial Sequence
  ENSG00000287073_1 (sequence is synthesized)
acctggattagagatacaaccaaagagcacagtaaactgcatggacatttaggaccagagcactaatataggttggctattaaatctggaaacaggaggaagttggctgccatgttgtga

SEQ ID NO: 932542 - DNA, 120 bp, Artificial Sequence
  ENSG00000287073_2 (sequence is synthesized)
agcccgtgaagaactaaagccttctgcccacaaccaatgcaaccagtgctaatttgtcagccttgtgagtggggccccttggaaacagatcctccagccccatgcagatgactgcagccc

SEQ ID NO: 932543 - DNA, 120 bp, Artificial Sequence
  ENSG00000287073_3 (sequence is synthesized)
aagctgacatcttgactgcaaattcatgagagaccccaagtcaaattcacccagttaaatcactcctgcatccctgactcacaggaattgtgagataataaatgtgtattattgttgtaa

SEQ ID NO: 932544 - DNA, 120 bp, Artificial Sequence
  ENSG00000287074_0 (sequence is synthesized)
aatgggggcggtcttccccatgctgttctcatgatggtgagttctcaccagatctgatggtttaaaaatgtgtgtcagtttcctccctctctgtctctcttgctgccttgtgaagaaggt

SEQ ID NO: 932545 - DNA, 120 bp, Artificial Sequence
  ENSG00000287074_1 (sequence is synthesized)
ccctctctgtctctcttgctgccttgtgaagaaggtgcttgcttctcctttgtcttccataatgattgtaaatttcctgaggcttccctagttatgcagaactgtgagtcaattaaacct

SEQ ID NO: 932546 - DNA, 120 bp, Artificial Sequence
  ENSG00000287074_2 (sequence is synthesized)
tcttaaaaaattatgcagcctcaggtagttctttatagcagtgtaaaaacagactaatacagaaaattggtacgaggaatgggatactgctataaagacacctgaaaatgtggaagcaac

SEQ ID NO: 932547 - DNA, 120 bp, Artificial Sequence
  ENSG00000287074_3 (sequence is synthesized)
tggtctcagatggagatgaagaacttattgggaactggagcaaagcattcaggaggtgcctggctgtttctgaaagtttacagtcatatgcattcacaaagagatggtctgaaattggaa

SEQ ID NO: 932548 - DNA, 120 bp, Artificial Sequence
  ENSG00000287074_4 (sequence is synthesized)
aattggaacttatgttgaaaagggaagcagcgcataaaagcttggaaaatttgcagcctcaccatgtggtagaaaataaaaacccatttttctggggagaaatttaagccatctggctgc

SEQ ID NO: 932549 - DNA, 120 bp, Artificial Sequence
  ENSG00000287074_5 (sequence is synthesized)
caaaatttgcatatgcaacgaggagctgagtggtaatatccaagacaatggggaaaatgtctccacagcatgtcagagacctttgtgctagcccctcccatcacaggcctagaggcctag

SEQ ID NO: 932550 - DNA, 120 bp, Artificial Sequence
  ENSG00000287075_0 (sequence is synthesized)
caaggcagtcttgtgctaaagaattgctaaaagagacagtgccttttgaatgcaccatatgtgttattcaaaagcagtggcaagtcgaagctcctatcttaatcctcgcttgttattatg

SEQ ID NO: 932551 - DNA, 120 bp, Artificial Sequence
  ENSG00000287075_1 (sequence is synthesized)
cctggatccaacttttgaaggataagagatttcacagatcattgattacaaaggcaatagccaacaccaacaccccagacatgagagggatgctaccttcgatgcagcctccctgcccgg

SEQ ID NO: 932552 - DNA, 120 bp, Artificial Sequence
  ENSG00000287075_2 (sequence is synthesized)
cagtcaagccaccgatgactgctactacctgagcaagcccaggagtgggactggtggctctgtaagaagaggaggaggcacctgagctggcacactcagctccttcaccatgtgatgccc

SEQ ID NO: 932553 - DNA, 120 bp, Artificial Sequence
  ENSG00000287075_3 (sequence is synthesized)
tgatgccctgcaccacctcaagactgcagagtccttaccaacaagacggcactcaccaaatgcagcccttagaccctggacttctcagtctttttaactgtaagaaataaattccttttc

SEQ ID NO: 932554 - DNA, 120 bp, Artificial Sequence
  ENSG00000287076_0 (sequence is synthesized)
gtggcatttttcctagggctgttccgagagaacagcggggattgaagggacggaggcaaggagatgcacaatccgggcagctctcgctcttctcggaaggcgaagggagtttggcggaga

SEQ ID NO: 932555 - DNA, 120 bp, Artificial Sequence
  ENSG00000287076_1 (sequence is synthesized)
agacggggttgattttcaaatcatggacggcttggtgaccttagcaggcccagaaagagggctcctccaattcaggtgtggagattgggaaggtgacaaggtgaaggcaattgaaggaag

SEQ ID NO: 932556 - DNA, 120 bp, Artificial Sequence
  ENSG00000287076_2 (sequence is synthesized)
agccgagggggacatggggaaggattttgtttcacccctcctaagttgaaccattgtcctttgaaggccggctcctggagaaattaaagggcccctgtgtgacacagccatgtcatacat

SEQ ID NO: 932557 - DNA, 120 bp, Artificial Sequence
  ENSG00000287076_3 (sequence is synthesized)
aaacagaactctgaagcctatcaactcctgaggctaagtaagagggaatgtaggggccaaggcagaagagaaaccaaaacctcagagcgctgagcaaagatgccaatcagagaaagagaa

SEQ ID NO: 932558 - DNA, 120 bp, Artificial Sequence
  ENSG00000287076_4 (sequence is synthesized)
attcatttgcgatgttaattaacaagcggctaattaaaacggcactttgagtgctaatcaatcgccttattaagttacagccatcactggaacaaattgaaacctccccgccccgttttc

SEQ ID NO: 932559 - DNA, 120 bp, Artificial Sequence
  ENSG00000287076_5 (sequence is synthesized)
tgcctttggtgcaggcggggccgcgttcccagataccgtgagaggccttggggcgcggaggttgggggcagcctcggtcagctttctcagtctctcccaggtctacagaatacgccactg

SEQ ID NO: 932560 - DNA, 120 bp, Artificial Sequence
  ENSG00000287076_6 (sequence is synthesized)
gacaagtgcctaagcagcgacttctggtccagacacaccgcccggggagtaagtagttgcgtcgaagaacaactcattcagcagcagttaacaccgacgtttcctcctagaaagagctcc

SEQ ID NO: 932561 - DNA, 120 bp, Artificial Sequence
  ENSG00000287076_7 (sequence is synthesized)
cgcaaagcggggggatgtgacctgtgggcccccagcaggggtaggaggcagttcagcccgagagggggcgctctagggcctggatcctgcatccctatttcctggaacacacccaacgcc

SEQ ID NO: 932562 - DNA, 120 bp, Artificial Sequence
  ENSG00000287076_8 (sequence is synthesized)
tcattctgaaaaccctgcttaggccctggccctggtgccgctcagcaaccaggaaagagctggacctgccttcaggcagcaagaacaggactgccagcctcctgtggctctgtctcccga

SEQ ID NO: 932563 - DNA, 120 bp, Artificial Sequence
  ENSG00000287076_9 (sequence is synthesized)
caagaagggaagagtgaggtggtgtgctgggcgtcggggacgaggacgcacgccagccaagacgtgcctcccacccagcccacgcgcgcttccccacccccctggccctccaaaatcgct

SEQ ID NO: 932564 - DNA, 120 bp, Artificial Sequence
  ENSG00000287076_10 (sequence is synthesized)
ccacctgcctggcagcctctgttgaaaccaaacacactcggagcgcccagtgcaacattcttggggtgccgagtagaagcgcagtaaagagagaccctagcggactcctgtctggtttgc

SEQ ID NO: 932565 - DNA, 120 bp, Artificial Sequence
  ENSG00000287076_11 (sequence is synthesized)
tttttaccgactcttacagaaaaaaagagaatgccattggaagaagctcttttgcgtggtgggcgatgtgtgggtgggggacttgtggcatggcccacggtgttgtttctgtgcctgcga

SEQ ID NO: 932566 - DNA, 120 bp, Artificial Sequence
  ENSG00000287076_12 (sequence is synthesized)
tgacacacgtatgtcttgagctgtgggctcgccttcctggaggtgcgcccgaccgcatctgctggtgggtctgagcgtgcttggggtgtcccaggagaactgagagaacggctcccacgt

SEQ ID NO: 932567 - DNA, 120 bp, Artificial Sequence
  ENSG00000287076_13 (sequence is synthesized)
gcaaagttccaaagcattaatattttcatcatattatcattattcaatataataatatttgttcggttagcggcactaattaggccacattaaaaccgtagtgtgtccctaatggtgcgt

SEQ ID NO: 932568 - DNA, 120 bp, Artificial Sequence
  ENSG00000287076_14 (sequence is synthesized)
aatgtgctcacactcacatttttctctctgaggatgggcggctgcaggctggtaggggaggagagacaggcaagcggcgggctggattagggcgtgacgccccccaccacgcacacaaac

SEQ ID NO: 932569 - DNA, 120 bp, Artificial Sequence
  ENSG00000287076_15 (sequence is synthesized)
atacacagcccactggatgtctgccgggtgggagccgcaatctccgcgcggtcgatggggccctccgctgcgcactcggccctgcgccgagcaccctgcagcctcctcccgcgacacggc

SEQ ID NO: 932570 - DNA, 120 bp, Artificial Sequence
  ENSG00000287076_16 (sequence is synthesized)
gctttgaactcggcggattgattttgcttcccttcccccttttgtgtgtgtttgcgttcaattggttaggtttttaagatttgggagggctggtgtgaaagaattaaaatactcttaact

SEQ ID NO: 932571 - DNA, 120 bp, Artificial Sequence
  ENSG00000287076_17 (sequence is synthesized)
ggagcccctccgccgagaactggaggtcccgcctcctagttcggcgctttcaggaccctcttcccagagggaatttctttcagaaattccagggtgggcttgtaaaagacgcttccgcag

SEQ ID NO: 932572 - DNA, 120 bp, Artificial Sequence
  ENSG00000287076_18 (sequence is synthesized)
agcaggtcccgtcagggtctttttcctgttcctggtgccagcggtcggcccgggcgccccgcagacctcggcgaggtagatgttaagctcggagagtgcccctcccgcaggcgccgtggc

SEQ ID NO: 932573 - DNA, 120 bp, Artificial Sequence
  ENSG00000287076_19 (sequence is synthesized)
ggtgtgatgtgtgtgctgaaatagggggatgggggaattcgaagccggattgggaaggcgggggggaggcgcacagaactcacaatgtacttcgcaatctaacaatctgaacattcattt

SEQ ID NO: 932574 - DNA, 120 bp, Artificial Sequence
  ENSG00000287077_0 (sequence is synthesized)
ctgccagcgccccacgcccgcaagcgcggcccctccgccacctcgcggcccggcctgacctgttaatcacgtccccacggctcttctagcggggacaccgccgtctgcaggctccgtccc

SEQ ID NO: 932575 - DNA, 120 bp, Artificial Sequence
  ENSG00000287077_1 (sequence is synthesized)
caccgtgcccagaccccgggaagtttgtcagtcagcaccctgatgccagccgattctcaaaaagccaggaggatccaagcagatcatttgccagacggtactgcagcaatggagatgaac

SEQ ID NO: 932576 - DNA, 120 bp, Artificial Sequence
  ENSG00000287077_2 (sequence is synthesized)
agataattcacacagaaagaaggatgcaggatgctcgagactcttgcagtaatttgggcaaagatttccacagtgcaaaatagaaaaaacaactggcaaatagctgtacaaattacagtc

SEQ ID NO: 932577 - DNA, 120 bp, Artificial Sequence
  ENSG00000287077_3 (sequence is synthesized)
cattttcatcatggaatgtcagtttggcaacaatggcatcgaggccccaaagcagctctgcagtaggggggttcctccttggtgactggatgggcacagccaagcacaggctcctgaaga

SEQ ID NO: 932578 - DNA, 120 bp, Artificial Sequence
  ENSG00000287077_4 (sequence is synthesized)
tcccagctccaggaaacatcagcatggttcattgcattgtccacctgaattcttcacccctccctgtggctgtgtccattgccctgtagtgttgcagttcccctcaggaaaaagatatca

SEQ ID NO: 932579 - DNA, 120 bp, Artificial Sequence
  ENSG00000287077_5 (sequence is synthesized)
tatgcatatgcacaatgcagcttgcctttttatgcttctcccttcaccacgaaaagagctttccctgggggtagcagctgtccctgcagcctgtgttcagaatgcacaaatgtgaggagc

SEQ ID NO: 932580 - DNA, 70 bp, Artificial Sequence
  ENSG00000287077_6 (sequence is synthesized)
tccctgcagcctgtgttcagaatgcacaaatgtgaggagccaagcccagccagcttgaaagtgagttgcc

SEQ ID NO: 932581 - DNA, 61 bp, Artificial Sequence
  ENSG00000287077_7 (sequence is synthesized)
gaaagaaagaaaggaaagaaaggaaggaaggcagacaaaattagccgggcgtggtagcgca

SEQ ID NO: 932582 - DNA, 120 bp, Artificial Sequence
  ENSG00000254049_0 (sequence is synthesized)
ctagacagaggatgaaatgcagtagttcaccaacatgttatgtttctatgaacaaccagatgcaaacgtcctggcattcatcctgcctgcttgctgtttgtaccatctccgtggtagcaa

SEQ ID NO: 932583 - DNA, 120 bp, Artificial Sequence
  ENSG00000254049_1 (sequence is synthesized)
ccatccaagctgctggaagcacagactgagctctatgagtcaattattttatatacctgggaacgtgctagccttcctgtcactctttgatgtcactatgtagacagtttgcagcctagg

SEQ ID NO: 932584 - DNA, 120 bp, Artificial Sequence
  ENSG00000254049_2 (sequence is synthesized)
cactcagggcgcagaacaatggaagtccctggaaggaaaggcttgcaagagaaaaccaagtggcttctgagatattcgaaagtccagttgttttccctttttaaaaattttcagatgctc

SEQ ID NO: 932585 - DNA, 120 bp, Artificial Sequence
  ENSG00000254049_3 (sequence is synthesized)
tttgatgccatttcataaagcctgtgattgggccaaaagtcttagttcaccatgtaccacaaatagtgtactctatatagcatatgcttaactaagaaaaaataaagatttagaaataga

SEQ ID NO: 932586 - DNA, 120 bp, Artificial Sequence
  ENSG00000254049_4 (sequence is synthesized)
gcactggaaatggttggccctgaagtgctcctaaggtaaccgcaagatgaggcaaaacaggattgagatgaaaaccaagctcacccacatcctacgtcaattagctatttttttttctgt

SEQ ID NO: 932587 - DNA, 120 bp, Artificial Sequence
  ENSG00000254049_5 (sequence is synthesized)
gtaaacaatgggagggaggtggattgtagcttttatggtagaggttcctcggcacctcctgacgcccccaggggtcccccctgccactgccctcagcccaaatataagctgacaacaaaa

SEQ ID NO: 932588 - DNA, 120 bp, Artificial Sequence
  ENSG00000254048_0 (sequence is synthesized)
gagagctcatcctaacctccagtgctgggatttcacaaaatgaaaataccttaaatatgcaacagtgttagcaaatgaacagcaacagagaaaaatcatttcttccccttttttatctcc

SEQ ID NO: 932589 - DNA, 120 bp, Artificial Sequence
  ENSG00000254048_1 (sequence is synthesized)
atcttcaaactttaatttaaaacaactatttttacataaactacaaagtcatagccagcagcatgtgcagcagagacagatagcctgaggttgcccagggacttttcattttatctttgc

SEQ ID NO: 932590 - DNA, 120 bp, Artificial Sequence
  ENSG00000254048_2 (sequence is synthesized)
ctgccgaggccaagatgagcacgctgataacgcgggctgcctgacagccaggggagattctgtaaatcatgctgctcccattgattacagtcgggaagagcattaaccctccttcacccc

SEQ ID NO: 932591 - DNA, 120 bp, Artificial Sequence
  ENSG00000254048_3 (sequence is synthesized)
aagatacgctgtctccacaagtgtttgtaacatcaacatgttacgggagcttttggaagatgaattcattgctagagagaagaccccttcgcaaaataaagaaatgccaacaagcctgag

SEQ ID NO: 932592 - DNA, 120 bp, Artificial Sequence
  ENSG00000254044_0 (sequence is synthesized)
tggcgcctccctcaggtctcacagtttggaggatagaatgggaaaatgctgattgcaagttatttccgacatccttgaacttacctcccacatgtgaatcacagcttctactgcatgccc

SEQ ID NO: 932593 - DNA, 120 bp, Artificial Sequence
  ENSG00000254044_1 (sequence is synthesized)
actccttttgcctaaatatgcagttatcatcatacatccagaattgccctctgaaataatcacagactcccactggcacaaagaagaacacatcacctagtcttggaaagaggaggaagt

SEQ ID NO: 932594 - DNA, 120 bp, Artificial Sequence
  ENSG00000254044_2 (sequence is synthesized)
aaggaaagtcttccaggagcccgtcagactttaagaaaatggcatcttctacttcctgttccttgggatgcttactcttggagcacagccaccaagctgtgagaagtgcaatccatacgg

SEQ ID NO: 932595 - DNA, 120 bp, Artificial Sequence
  ENSG00000254044_3 (sequence is synthesized)
tgggagctgtagactggagctgttccttttcggccatcttggcgcctccctcagcccacatgtgaatcacagcttctactgcatgcccactccttttgcctaaatatgcagttatcatca

SEQ ID NO: 932596 - DNA, 120 bp, Artificial Sequence
  ENSG00000254044_4 (sequence is synthesized)
taaatatgcagttatcatcatacatccagaattgccctctgtcccgggctgcatacatcatcagaggagaatgttgatcacctgtttccaagccttggcaaggcaattcaggataaatgt

SEQ ID NO: 932597 - DNA, 120 bp, Artificial Sequence
  ENSG00000270474_0 (sequence is synthesized)
attaagctgaatttttcttgttggtattttaaaaggtgttcagtgtgaggtggagctgatagagtccatagaggacctgagacaacctgggaagttcctgagactctcctgtgtagcctc

SEQ ID NO: 932598 - DNA, 120 bp, Artificial Sequence
  ENSG00000270474_1 (sequence is synthesized)
atgcagactctgtgaagggcagattctccatctccaaagacaatgctaagaactctctgtatctgcaaatgaacactcagagagctgaggacgtggccgtgtatggctatacataaggtc

SEQ ID NO: 932599 - DNA, 120 bp, Artificial Sequence
  ENSG00000254040_0 (sequence is synthesized)
ttgacagaaagagacagaatagtcttgtcggggaacctgttgaagattcaggagttgagaaatatgtttagagattctcagggccaaaaatgtgcttagaggtcaaacacaggaaagcaa

SEQ ID NO: 932600 - DNA, 120 bp, Artificial Sequence
  ENSG00000254040_1 (sequence is synthesized)
cttggatgattggagaccctgttcaaagatgacctcctttgtgacaactttcaggccccagagtgagttgttgttgcctcagtgccctcaggctctgaaagtgcctcttcctgcctggac

SEQ ID NO: 932601 - DNA, 120 bp, Artificial Sequence
  ENSG00000254040_2 (sequence is synthesized)
cacagcatgcagcacaccggttgatgaacacctgaccccaggtctactcctccaccagaagaaagacggcttcaacagcagtaagaagaaggaatcggaggtgtgcgaggcaagaatcaa

SEQ ID NO: 932602 - DNA, 120 bp, Artificial Sequence
  ENSG00000254040_3 (sequence is synthesized)
agagagcagctagaagatgtttgcagggagtggagctgctcgaatgtgaatgtcctggcaggaggggcgcagctgtgctcacgaaggtctccagcaggtttaattccggcactacctcac

SEQ ID NO: 932603 - DNA, 120 bp, Artificial Sequence
  ENSG00000254040_4 (sequence is synthesized)
ccagtgtgaagtccatcgtcccagtggcctttgccatgggctgagtgtgtgtcctgcagcatcatgaagctgggagaagatgtccacttgggtaattcattgaaggactgaacaaaatct

SEQ ID NO: 932604 - DNA, 120 bp, Artificial Sequence
  ENSG00000254040_5 (sequence is synthesized)
tgtgctaatctccgatcagtcactcccctgagcagccatcaaaggaggttctggctgccaagaaatgaccagctggccacacaggaccccaagggaaaagacagccaggctctggggcag

SEQ ID NO: 932605 - DNA, 120 bp, Artificial Sequence
  ENSG00000254040_6 (sequence is synthesized)
ataaccggctccccaacggcttgtgggaaccttatggtggtccctgtggcctttaggtcttgctgggcacttggagcaggccaggggctgtctctctctcttttttctttctcttttctc

SEQ ID NO: 932606 - DNA, 85 bp, Artificial Sequence
  ENSG00000254040_7 (sequence is synthesized)
tgccatagtggtttcaacatattggccaagctggtcttgaactcccaatctcaagtaatctgcccacctcagcttcccaaagtgc

SEQ ID NO: 932607 - DNA, 120 bp, Artificial Sequence
  ENSG00000254040_8 (sequence is synthesized)
caggcataagccactgtgcccggcctggctgtctctatttctattgatgacctcacagcctgtagaccctagggtcttaccacatacatttattctctctcccatccttcctgcagcctg

SEQ ID NO: 932608 - DNA, 120 bp, Artificial Sequence
  ENSG00000254040_9 (sequence is synthesized)
tttattctctctcccatccttcctgcagcctgggaagctgtagaaagaaggctaggtctactctccctgacacttctccaggacattggtttgtacccaccaatcccatctctattgtct

SEQ ID NO: 932609 - DNA, 120 bp, Artificial Sequence
  ENSG00000254040_10 (sequence is synthesized)
ccttggcaaaaccctccttctcccttctcatttgttctcagttgacctttggtgaaatgtttcactggcaatagtgactgagcaaaggcatcagaagatgaaggcaaggatactccaaag

SEQ ID NO: 932610 - DNA, 120 bp, Artificial Sequence
  ENSG00000254040_11 (sequence is synthesized)
tctaagtctacatattacacctcacagagggtttctcatggagaatacttggtcatgacacctgctggcagagggtacacatccccagccttcagatttccgcaaagccatgctgctgct

SEQ ID NO: 932611 - DNA, 120 bp, Artificial Sequence
  ENSG00000254040_12 (sequence is synthesized)
gtggatatcgggtgccactatcacagggaagaagcttcctctactcttttttcagagcttttatcccattggccttgccatggcttctgcagactctggctgtctgcctgaccactcacc

SEQ ID NO: 932612 - DNA, 120 bp, Artificial Sequence
  ENSG00000254040_13 (sequence is synthesized)
agggacaagcaacgagagccctaaccaagagactgggcaggtcacaggccaattttccaagctcaatttccaggccgccttccctaccccgcagaccccagctccagctttctgatatga

SEQ ID NO: 932613 - DNA, 120 bp, Artificial Sequence
  ENSG00000254040_14 (sequence is synthesized)
tgatatgaagcccagggatctactaagcctaaagctacttttcccttttcttcaaaggcaaggaaggatttaacttccaaatcttctagtgaagaacagaaaggaaaaaaaaaaaaaaaa

SEQ ID NO: 932614 - DNA, 120 bp, Artificial Sequence
  ENSG00000204362_0 (sequence is synthesized)
gaagacagctcgaccgtgatggaggagacaggcatttagaataagcatgaaataaaggtggctgttaaggggtcagctcccctcaccaaagtcacttttgatttacttacaaaagttttc

SEQ ID NO: 932615 - DNA, 120 bp, Artificial Sequence
  ENSG00000204362_1 (sequence is synthesized)
ttaagatttcttcagaacccaggtcaaaaggctgtggcaggaggccaggcagatcacagcgtccatgcctagatgctccctgacccccaggaaccagaagtgctgtctcctgaaggctct

SEQ ID NO: 932616 - DNA, 120 bp, Artificial Sequence
  ENSG00000204362_2 (sequence is synthesized)
aacatgggctgtgtggccttggaccaattgcttgccctctctgggccttcttattggtgacagacagactggtgactttctgagaggatctatgcaacctcaggctcctgcacctgggtt

SEQ ID NO: 932617 - DNA, 120 bp, Artificial Sequence
  ENSG00000204362_3 (sequence is synthesized)
acagggtcttctggaggggaagagatgagcagcaaggacaatagcagtgctcccttcccgggtcagttgcaaggattaaggatgatgtctgcaaagtgcttagtcagagccggcatacgg

SEQ ID NO: 932618 - DNA, 120 bp, Artificial Sequence
  ENSG00000204362_4 (sequence is synthesized)
ccccctcttcccggcctgctgtatcccaggacacagggcgtaagtgtggaggaggaagggctgcagggtgaggcagcccacactttggctcaggacagggatgggaccgggacatatggg

SEQ ID NO: 932619 - DNA, 120 bp, Artificial Sequence
  ENSG00000204362_5 (sequence is synthesized)
aaaatagtctgggggtcctgggtaatggcaggagcatgagctcagggtcgggtggctgtcctggatgacctgtgggactctcttcctctccaagccacgctttcctcaactgtcccttcc

SEQ ID NO: 932620 - DNA, 120 bp, Artificial Sequence
  ENSG00000204362_6 (sequence is synthesized)
ttgtgggatgcaagaggccacggcgagcgaaggcatgtgccaagagctgccactcaatgtgagtcagcgtgctggtcctccctccttttctccagggggcctaggacttttggggggagc

SEQ ID NO: 932621 - DNA, 120 bp, Artificial Sequence
  ENSG00000204362_7 (sequence is synthesized)
ctgaggacatgcttcgctgatgtcactgtgtggagtgtacaaatggccaccctgctgctcgttggttctatatgggcatccaggctggagagcagggggtggggagatggagatgccacc

SEQ ID NO: 932622 - DNA, 120 bp, Artificial Sequence
  ENSG00000204362_8 (sequence is synthesized)
agcaggggactggttcctagaagagagggcgagtttgggtggtcccagaggtgttcttcccagaaaagagagcaggaggcaggaggtgggcatggagaatgtggaggggggcattgacag

SEQ ID NO: 932623 - DNA, 120 bp, Artificial Sequence
  ENSG00000204362_9 (sequence is synthesized)
tgttctccaccacccatcagataagacctggagcctcattaccaaagacttaatgagattcgctttgttttcttatgagccaggcaaggtgccaggggaagcggcttccagccccaggct

SEQ ID NO: 932624 - DNA, 120 bp, Artificial Sequence
  ENSG00000204362_10 (sequence is synthesized)
ctgcagctggctgctgtgtgacccagagccaggcaccacacctctctgggccttagactccttatccatgagcttcctgcctgcaccctaacattcagtgtcattggccgagttacccaa

SEQ ID NO: 932625 - DNA, 120 bp, Artificial Sequence
  ENSG00000204362_11 (sequence is synthesized)
tggctcccagcctcagtttcttcatctgcacattagggataagtacagccatccacctgggaggtgtcaagggggtgtggccgcagcacccagcccatgcacaagttcagtgatcattac

SEQ ID NO: 932626 - DNA, 120 bp, Artificial Sequence
  ENSG00000204362_12 (sequence is synthesized)
ctgtctcccccagccctgcctgagtgccaggatcagcaggcttgggaagggggagcccccagggatgtggaaagtggagagggagcacatgggctctggggcctcggggctcctgggctc

SEQ ID NO: 932627 - DNA, 120 bp, Artificial Sequence
  ENSG00000204362_13 (sequence is synthesized)
tgttctgcctgtctgggagctgtctcctgctctcccttgcagtgtctctgtctctcttcgttctgttcctccctctgtccttcagtttttccctctccatctcagtctctggttgtctca

SEQ ID NO: 932628 - DNA, 120 bp, Artificial Sequence
  ENSG00000204362_14 (sequence is synthesized)
gtctctctttgcacctcactgtctctgcctttctctgcatctctcttcctttcctgggctctctctctctctttcatccctgttttgggctttctctgtctgtgtctctctgtttttcag

SEQ ID NO: 932629 - DNA, 120 bp, Artificial Sequence
  ENSG00000204362_15 (sequence is synthesized)
tctgcttctttctgtctccgttcatttctctgtatgtctttgtcccctgcactcccattctcctcccatgctgtcctctctgggggctcctctggcttcactgggccacaggcccaggct

SEQ ID NO: 932630 - DNA, 120 bp, Artificial Sequence
  ENSG00000204362_16 (sequence is synthesized)
ggggtgtgaagaagcaggagctcccccgtcagatgacgctaggtgccccagtcagggcagtgggggccagacaaagagctctgcgaggggtggcaaaatcctcttcccagggaagggaat

SEQ ID NO: 932631 - DNA, 120 bp, Artificial Sequence
  ENSG00000204362_17 (sequence is synthesized)
gtgggggctactggccagctgtgggatgggtggctgagaactctcataccactgtaaattctagatgtttttcacttatatcagcttcctgatccccctgagccaaaggcctagaaggtc

SEQ ID NO: 932632 - DNA, 120 bp, Artificial Sequence
  ENSG00000204362_18 (sequence is synthesized)
cctgtccctgtccttttggaatgtgcagtcttacttaccagagtgacaaggggaacagagttgaaacaggtggtttcccagcacaggagcctgtgggggctgcttagagaacagcacatt

SEQ ID NO: 932633 - DNA, 120 bp, Artificial Sequence
  ENSG00000204362_19 (sequence is synthesized)
ccctgggagccagagccatctgggagggctttctggaggaggcagatcatgagggatcaggatggggactaatatgtgctgagtgcctggtggtgctttataagtatcagcagattggga

SEQ ID NO: 932634 - DNA, 120 bp, Artificial Sequence
  ENSG00000204362_20 (sequence is synthesized)
ttctggaggggaagagatgagcaggtaggctttgacacctgcctgctttgtcctgagtgtctactatgtcatctgctttaaatgcgaagtccctgggacttgcgagttatctctaagcct

SEQ ID NO: 932635 - DNA, 120 bp, Artificial Sequence
  ENSG00000204362_21 (sequence is synthesized)
tctcttttcctgactttctgggagtgtgtgtacccccattccctcaccccagccatcagggccctttctgagttgggcctccttcctagctctgggctaggccccaaccctggccctttc

SEQ ID NO: 932636 - DNA, 120 bp, Artificial Sequence
  ENSG00000204362_22 (sequence is synthesized)
caaggccagcaggaactggaaggtccgtactcatgccctgggaggctccaggctctaaggggtgctggagtgatggagttgggcggctggtgctcagaggaccttaatggtgtggggaca

SEQ ID NO: 932637 - DNA, 120 bp, Artificial Sequence
  ENSG00000204362_23 (sequence is synthesized)
gctggaaactggttgtctcttgaaccctcttgccaccaggcctctgtccaggagggctgctgggggccaatgggccagacaccagacagtcacacctttggcagggctgaagtcgggggg

SEQ ID NO: 932638 - DNA, 120 bp, Artificial Sequence
  ENSG00000204362_24 (sequence is synthesized)
tgtgtgacacaatgggaggggctgggcctggcagtccctgcagcctataagcaccagcaacccatgaggggacacaggcaccctctggcctcatccttcttggagccagtgggatgtagc

SEQ ID NO: 932639 - DNA, 120 bp, Artificial Sequence
  ENSG00000204362_25 (sequence is synthesized)
aactaaaatacaagctctgaagtttcatggactggagttgcatctctgcttccatcctaattagcaagagaccttggtcacgttgcttaaactctgacactagattttccccctctgcaa

SEQ ID NO: 932640 - DNA, 120 bp, Artificial Sequence
  ENSG00000204362_26 (sequence is synthesized)
agcaaggacaatagcagtgctcccttcccgggtcagttgcaaggattaaggatgatgtctgcaaagtgcttagtcagagccggcatacggtaagtgctcaataaatgctggctcccatta

SEQ ID NO: 932641 - DNA, 120 bp, Artificial Sequence
  ENSG00000204362_27 (sequence is synthesized)
ttagtatcccttccctccacgccctcaacacatccctttatcatgatggaataaccaattgcctggtaacaacatgttcacacttccacgctccccatcaaccatgctcacctataaggc

SEQ ID NO: 932642 - DNA, 120 bp, Artificial Sequence
  ENSG00000204362_28 (sequence is synthesized)
aggctgcgaccagctcctcttcatctattcattgcctggcccatgctaggggcccaagaaatgtctgctgcatcaacgagtgattttgggaaaggtgctgagcccttctgtcccatgaag

SEQ ID NO: 932643 - DNA, 120 bp, Artificial Sequence
  ENSG00000204362_29 (sequence is synthesized)
ttcttgcgagacagtgtctcaccagcaacctggatcgtgagaaccacagcgggtgggccagatctagatggagagtgtccattgggcagagctgcttctgtgaaaggaaaggaagttttt

SEQ ID NO: 932644 - DNA, 120 bp, Artificial Sequence
  ENSG00000204362_30 (sequence is synthesized)
caagaaaccatgaggggggcccaagaatccaagtttctaactctgggatcggttttctgtcttttacctcggtttgcctctccctagctgtgtggtttatggcaagtcactctgtgcctc

SEQ ID NO: 932645 - DNA, 120 bp, Artificial Sequence
  ENSG00000204362_31 (sequence is synthesized)
tgtctccacgtgttcaaggaggcagccggtccaaggggccttcatagaaggggctgccgagatgtgagccctgcattggggggatgccccacagaggtgctgtcccccatcccctttcca

SEQ ID NO: 932646 - DNA, 120 bp, Artificial Sequence
  ENSG00000204362_32 (sequence is synthesized)
ggtatgagtgtcccccagctctgagtgaatcagtaggaggtgctggacctgggctgattctcacagtgggacctcaactctagccccgggttggctgacattagaggactttgggtcgtt

SEQ ID NO: 932647 - DNA, 120 bp, Artificial Sequence
  ENSG00000204362_33 (sequence is synthesized)
gttctggcagctgcaaggaagagccaatgtcagggagggaaaccccacattccctggcactatccaaacaaaggtttggttaaaacaaagaattctcatggagaagagtctgaaggaccc

SEQ ID NO: 932648 - DNA, 120 bp, Artificial Sequence
  ENSG00000204362_34 (sequence is synthesized)
aaaacacatatttctgtagacatcccatcccaaaataaacccatggatcaagccagacccaaatacaaggatgctgtgaaccacatggttgaatattccacactttccccatccattaaa

SEQ ID NO: 932649 - DNA, 120 bp, Artificial Sequence
  ENSG00000204362_35 (sequence is synthesized)
ccccacccagggtgggaaggggatggatttccctcagttctcagggcctagaagagcagggcttttttccctcaactggttgagttttactttgtgagcaccatgattcctaaaaccagt

SEQ ID NO: 932650 - DNA, 120 bp, Artificial Sequence
  ENSG00000204362_36 (sequence is synthesized)
tatattttctttttctcttgggccgccagggaactcacagcgaaatctaccaaccaaagaggatgtccatacctgtctttttctttcttccttcattttttgacttaatttcctcacttg

SEQ ID NO: 932651 - DNA, 120 bp, Artificial Sequence
  ENSG00000278668_0 (sequence is synthesized)
gccacattttcttaatccagtctacaccagaaacagtttctattgagaaaatggattttaatagaaaattctcatttaaaatttgggcagatatctgtattgttgagttaaccaaatgag

SEQ ID NO: 932652 - DNA, 120 bp, Artificial Sequence
  ENSG00000278668_1 (sequence is synthesized)
gatccatctacataagatgtagtatggactgatgccaagtgagcctggggtggaaatcagaactggatgcaaatcctgatgttatccgagaacaggcacctgttacataggctgtgttac

SEQ ID NO: 932653 - DNA, 120 bp, Artificial Sequence
  ENSG00000278668_2 (sequence is synthesized)
tgtggcaaaggtaatggtaaaacacagactggccagaagcattgtgtacaatgagaccttgcaactttgtgtatattagtatgtggggggatgtgaattattaaagacatttaaaactga

SEQ ID NO: 932654 - DNA, 120 bp, Artificial Sequence
  ENSG00000272908_0 (sequence is synthesized)
tgcagcagaattcattccatgtcccctctggatattagactgataatttggatcaggtctcagcatgggccattgaggaacactacagccctgctgagagataaaaaggattatccactc

SEQ ID NO: 932655 - DNA, 120 bp, Artificial Sequence
  ENSG00000272908_1 (sequence is synthesized)
aaggagttcacacctccgggccgacatggagaacgtgcctagaagcagacttggagggtgctcagtggtgggttgtggaatgtaagcctgaagaagcagagtttaattctacgggggtgc

SEQ ID NO: 932656 - DNA, 120 bp, Artificial Sequence
  ENSG00000272908_2 (sequence is synthesized)
tttcataatttagtaccctgacagggctcctggtgttggtccttagacactcctgggatggctccctggaaacatggaggaaaccttggtcgcatgacatgatacggagatgttggagct

SEQ ID NO: 932657 - DNA, 120 bp, Artificial Sequence
  ENSG00000272908_3 (sequence is synthesized)
gcctggacacagttacagagggaggcattaaaaggcttcgagagaaccctaaaccttgaatcagccttatagtcctggctcctagaagagtgtttctcaaagtgtactccacggaccacc

SEQ ID NO: 932658 - DNA, 120 bp, Artificial Sequence
  ENSG00000272908_4 (sequence is synthesized)
tggataagaagcacgtgaggcttttaattaaaaaaaaaaaaaaaagtacaggttctgggaagcatccaacacaataagacagaatcttggaatgaagggtgaaaatgtgcattttaaaat

SEQ ID NO: 932659 - DNA, 120 bp, Artificial Sequence
  ENSG00000272908_5 (sequence is synthesized)
aacctccagagctgattcttattcaaactgacttttaaaaactgctgcactagtggcaagagatcgaggggctgtcctgagcctgacacagaaaggtgttctagaaagctgctcacaggc

SEQ ID NO: 932660 - DNA, 120 bp, Artificial Sequence
  ENSG00000272908_6 (sequence is synthesized)
tccttcgcagcccaccaaatccgcctcactcttatctcccccagcccctcaaagcagctgctttgacagtttctcacatttttgcatgataatcccacaactgcaattccttctggcttc

SEQ ID NO: 932661 - DNA, 120 bp, Artificial Sequence
  ENSG00000272908_7 (sequence is synthesized)
ctgtgacctcacgcaagaaaaagttgtgtactaaatgaatctgctttaacttgctctccttcctcggggatcacacctttttaagaaagcctgtcccttaccttgaagcacaaacatatt

SEQ ID NO: 932662 - DNA, 120 bp, Artificial Sequence
  ENSG00000272908_8 (sequence is synthesized)
tttgtttgatctgccttttgtgcgtggggtgggagttaggtaggaatcttaaagtggagagccagtttcttcccaaattactgacctaacccatccttaacccccagttcaaggccacct

SEQ ID NO: 932663 - DNA, 120 bp, Artificial Sequence
  ENSG00000272908_9 (sequence is synthesized)
ttgtgatagtgaagcttccacatgctcactcagccccttctgctctctcttcttctctactgtgcatgtcggcttgtacttttgccagtttctctaaagacacaaccagaggtggggtgg

SEQ ID NO: 932664 - DNA, 120 bp, Artificial Sequence
  ENSG00000272908_10 (sequence is synthesized)
ctgtgtgtgcacaacttcaactttacatgtggggctgagtccctatgttgtatatccttgtgcaaaagcacaatatgttaattgctatagcttttaaaaaaataattaatagtttttcat

SEQ ID NO: 932665 - DNA, 120 bp, Artificial Sequence
  ENSG00000272908_11 (sequence is synthesized)
aatcaaattttcttgcttttttgttttttcaaaaaagcatacttttattgaagaataaaccccttatatatgtacacttatttataactatgaaccatgaactaggatagaaatgcattg

SEQ ID NO: 932666 - DNA, 120 bp, Artificial Sequence
  ENSG00000272908_12 (sequence is synthesized)
tgtatattacaaaacataacaaaaataataggggtagggaggtgcagatgttggtcaaaggatataaacctgcagttctatgatgaataagttctggacatctggaatacagcatggtga

SEQ ID NO: 932667 - DNA, 120 bp, Artificial Sequence
  ENSG00000272908_13 (sequence is synthesized)
ctatacttagtaatactatattgtacacttgaagcttactgaaagagtaaatctcaagtgttctcaccacacaaacccaaaggtaactatgttctcaccacacaaacccaaagggaacta

SEQ ID NO: 932668 - DNA, 120 bp, Artificial Sequence
  ENSG00000272908_14 (sequence is synthesized)
tgtattaattagcttgattgtggtaaccatttcacaatgtatacatttgccaaaacattatgttgtatacctggaatatataattttatttatcaattatacctcaataaagctgaaaga

SEQ ID NO: 932669 - DNA, 120 bp, Artificial Sequence
  ENSG00000272908_15 (sequence is synthesized)
ggggattactaattcccacaaaatacagatttaacaaaaacttttattcaacaaacagtgctatgaagttgtaaattggaaacaaaagaaataaaatttcatccacagtcttctcatcaa

SEQ ID NO: 932670 - DNA, 120 bp, Artificial Sequence
  ENSG00000272909_0 (sequence is synthesized)
aaatgccatcccaattcccctgatgttaaaagaaacatacagtctattcactggttttgcaaaaaacactaacctacaaacccttctgggccaacaagcttgagtgcgatccggtctgca

SEQ ID NO: 932671 - DNA, 120 bp, Artificial Sequence
  ENSG00000272909_1 (sequence is synthesized)
atgatggaggaattgccatgtgcgatgttggcaaacgggccagcatggacaaacactggagtgccctgtggaaaccaggacaccgtgagctgagctgccaatcctgcttcaaagtgggat

SEQ ID NO: 932672 - DNA, 120 bp, Artificial Sequence
  ENSG00000272909_2 (sequence is synthesized)
cacacattcaacggtatggaattgatttggaatcggaaggaagaatacttcccagagggaaaatataaagtcatctcttttatttcagtaacgtcccagtcacaggtgtgaggaagaatg

SEQ ID NO: 932673 - DNA, 120 bp, Artificial Sequence
  ENSG00000272909_3 (sequence is synthesized)
tcagtaacgtcccagtcacaggtgtgaggaagaatgagaagaaagagatgagcaagtggagaaggtcttgactacccaggttaagtgtgcttaattttttttttttttttttgacacgga

SEQ ID NO: 932674 - DNA, 120 bp, Artificial Sequence
  ENSG00000272909_4 (sequence is synthesized)
ctttataaccactctgctctgactgtccaaaaccaattcaagaaggcaggagtcactctgctcacctccagtgtctgcatgagattgggcttgattgcgtccttcataagcactgtcagt

SEQ ID NO: 932675 - DNA, 120 bp, Artificial Sequence
  ENSG00000272909_5 (sequence is synthesized)
gaaaccaatatttgacattctaggcttacccatgttagccatcttggaccaattgatactttcacctgaattggaccattcatggtttttttctggatatgctatgaagttgccaattat

SEQ ID NO: 932676 - DNA, 69 bp, Artificial Sequence
  ENSG00000272909_6 (sequence is synthesized)
catggtttttttctggatatgctatgaagttgccaattattaaattatttattttttgagacggagtct

SEQ ID NO: 932677 - DNA, 120 bp, Artificial Sequence
  ENSG00000272909_7 (sequence is synthesized)
ggcatgagccaccacgcctggccaaagttgccagatagaatacaaatgacattcacatgtaatatctggaaaaacatgtaactctagaaacaagcatcttaatcaagctcagctgctgac

SEQ ID NO: 932678 - DNA, 120 bp, Artificial Sequence
  ENSG00000272909_8 (sequence is synthesized)
tagaaacaagcatcttaatcaagctcagctgctgactgatgtgagaaatccattctagactattttagagcacgacaatgctcgttcccagagtactcagttatttgtaactctggtatc

SEQ ID NO: 932679 - DNA, 120 bp, Artificial Sequence
  ENSG00000272909_9 (sequence is synthesized)
tgggcagaaatttctataaataccaaactcaatatgtgtcttccaaagctgaaactgcaatattacgcaagagttcaataccaacttttaacatcaggtcactctattaagccatcaaag

SEQ ID NO: 932680 - DNA, 120 bp, Artificial Sequence
  ENSG00000272909_10 (sequence is synthesized)
tgtagctgaactacctagcaacaaagataaagcaatggtactcttgatgttctctgcaaattgaagtcatacacccacttttagagatgcccacaggatgaagatgttactcaaatcatc

SEQ ID NO: 932681 - DNA, 120 bp, Artificial Sequence
  ENSG00000272909_11 (sequence is synthesized)
tggaacttgtgatctattactaaagcataccagctattattcactctgatgtactttttaaacatttcataattatcttgtaattagcaaaataggattaaattgatgaattaattgcaa

SEQ ID NO: 932682 - DNA, 120 bp, Artificial Sequence
  ENSG00000272902_0 (sequence is synthesized)
gaactcgggagagctgccgtccctgacctcgacctgagacgtggaggagggacagggaaaaagccttcttctcgcagctgcaggttgccccaccgagggcatttttccgcaccgaggggg

SEQ ID NO: 932683 - DNA, 120 bp, Artificial Sequence
  ENSG00000272902_1 (sequence is synthesized)
cggggggcagaatgcacgccagaaaacctaagtgcgctgggtttaaaatagcaacaacaacaaaaattacaaataaccaaaaaacagcataagaattaaaaacagttatattccaatgtt

SEQ ID NO: 932684 - DNA, 120 bp, Artificial Sequence
  ENSG00000272902_2 (sequence is synthesized)
tttaatacttggttcacattttggatgctctccccagggatccgacggcgctgcggaggcggcagcgatgtttgggatcctaaagaaagcatcagaccagactcaggtctggacgtccct

SEQ ID NO: 932685 - DNA, 120 bp, Artificial Sequence
  ENSG00000272902_3 (sequence is synthesized)
caagtggcccggaggtaccgatattagtgtcaccgccgtcagtgccctgcccagaaataaaacctttgttctgagagaaattgaaaagctggaaaatatggagtaggcgatgtgaagaga

SEQ ID NO: 932686 - DNA, 120 bp, Artificial Sequence
  ENSG00000272902_4 (sequence is synthesized)
aactacagggaatgtagaggtcgggttttaaatgcgtatttcctcaaggatgttgtggaagcagagacaaggtggctggcctggagcaggctggaggacctccaaggatctccacaggga

SEQ ID NO: 932687 - DNA, 120 bp, Artificial Sequence
  ENSG00000272902_5 (sequence is synthesized)
ggcagttacatttaacaccctacctagcaaaagaagaaaagaacaaccccatgaaaacatccctggggttttaacaaaggaatccctgacaaaacgtgactgataactaggacagaactg

SEQ ID NO: 932688 - DNA, 120 bp, Artificial Sequence
  ENSG00000272902_6 (sequence is synthesized)
aaaagtggaagtaaagtcaatcccgaccccccaggacgcctgggaactcagggaagcgcctccagaagggaacagctcagaaaccctgaccagacctggcggacaagaaccgtgtgggcg

SEQ ID NO: 932689 - DNA, 120 bp, Artificial Sequence
  ENSG00000272902_7 (sequence is synthesized)
ggggacaggaacgcccacccagaggccgggagagcatggtccaggactggcagccactaacagcctctgaatgaaactgaggaaggaagtcaatggtaatcgggaccattagggtgcacc

SEQ ID NO: 932690 - DNA, 120 bp, Artificial Sequence
  ENSG00000272902_8 (sequence is synthesized)
agggcatatagaacagtcggggacggtaagaaaacattccttccagagacattcactggcacctcccgcgcagacacactgccaggcccgggaatcgcagagatgaactgggagacttgt

SEQ ID NO: 932691 - DNA, 120 bp, Artificial Sequence
  ENSG00000272902_9 (sequence is synthesized)
ctgccctggagaactcacagctgttgagcagcaaatctcttcaacctttcggagatggactgcatttcctaccaagaccctggctgatagcagagtgaccccaggaaacacagttcctca

SEQ ID NO: 932692 - DNA, 120 bp, Artificial Sequence
  ENSG00000272902_10 (sequence is synthesized)
ggaggggcagcaggattactccagttagcactgggaatagtgtgaggggcatatggaccacaaagctttgggggcttttgctgctgttgctcttgattgctatggcaacagtaataatta

SEQ ID NO: 932693 - DNA, 120 bp, Artificial Sequence
  ENSG00000272902_11 (sequence is synthesized)
taaagattgtagagtgaaatggatgtttctgactgccctggagagtttttaaacaatggaagagataaacatgaagtattaaattcttattttaaggtacagatatgctgaaatccaaag

SEQ ID NO: 932694 - DNA, 120 bp, Artificial Sequence
  ENSG00000272902_12 (sequence is synthesized)
aaccatttatctgggataggcacaggacagaataagttcatcttcagatactaaatataattgtacagattacagaattgtggcaaaggttaagtgctcaacctcagcaagttctcttgc

SEQ ID NO: 932695 - DNA, 120 bp, Artificial Sequence
  ENSG00000272902_13 (sequence is synthesized)
taagattaggacactgattgggaaggagtaggaccatagacttgtgataggaacatttggacagacacagacaaagccgaattcccaaatctcaaggctcccttgtatacagaagcagcc

SEQ ID NO: 932696 - DNA, 120 bp, Artificial Sequence
  ENSG00000272902_14 (sequence is synthesized)
ccgcctcccctgtgcaaggaaattagccttcacatacactaagagctttcaagacttcactggggcctctgcctcccacatggatgcctgttctcctccaaacttgcccctgatgcacct

SEQ ID NO: 932697 - DNA, 120 bp, Artificial Sequence
  ENSG00000272902_15 (sequence is synthesized)
cattgactccaggagcataacaagaataaactctctacagagcccagaaggagaaatgcaaggtcagccagagaagaggaggatggaaatagattatataccacgaaagctggaaaatct

SEQ ID NO: 932698 - DNA, 120 bp, Artificial Sequence
  ENSG00000272902_16 (sequence is synthesized)
gaaaatcttgccaatatgtgttgcagagaagctgagaactgtgtatgggaatggattctaaagtgttagactaaggaggatgaaatactaggttaggccaggcatggtggctcacaccta

SEQ ID NO: 932699 - DNA, 120 bp, Artificial Sequence
  ENSG00000272902_17 (sequence is synthesized)
gcactttggaaggcagagacaggaggatagcttgaggccaggagttcaggaccagcctcggcaacgcggtgagacaccgtctctacaaaaaatgtaaaaattagccacgtgtggtggtgc

SEQ ID NO: 932700 - DNA, 120 bp, Artificial Sequence
  ENSG00000272902_18 (sequence is synthesized)
acgcgtgcctctggtcccagctgctcaaaggctgaggtgggaggatcatttgaacctaggaggtcaaggctgcagagacctataatggcaccattgcacttcagcctggtgacagagcaa

SEQ ID NO: 932701 - DNA, 120 bp, Artificial Sequence
  ENSG00000272902_19 (sequence is synthesized)
gaccctgtctcgaataaaatataaagtaagattcagcaaaatttatgaatatgcatacattcccctgggatttatgatttagtgtgttatatattggagtgattaaaatgttttagacaa

SEQ ID NO: 932702 - DNA, 120 bp, Artificial Sequence
  ENSG00000272905_0 (sequence is synthesized)
cagtaatttccttccaaataagttcacatgtaataagtagaaattctgtacaggaaaaaagcattaaaaatactattataactgcttcatttgctgggaaccattacaagtagtataaat

SEQ ID NO: 932703 - DNA, 120 bp, Artificial Sequence
  ENSG00000272905_1 (sequence is synthesized)
tagctttttccagaaggatcctcttgtagcagggtttatgaatgtaacccccagcaaaatgtgactatatattaggagagccagtttggagcagaggcctgaaggtccctgctatgcagc

SEQ ID NO: 932704 - DNA, 120 bp, Artificial Sequence
  ENSG00000272905_2 (sequence is synthesized)
caggttccataggtgtgacaaaacagcattaaagctcagtattttgcatatttttagcatttaaaaatatttttgctttagtgtgaggaaagtaaggatgggcaaagaggcgatcaaaat

SEQ ID NO: 932705 - DNA, 120 bp, Artificial Sequence
  ENSG00000272905_3 (sequence is synthesized)
agctattgctatgacattttagaaaacaaagttggggccgtatttctttaaaaagataagcctctaaaaatgcttggcaaaaaaactatagtgttaaaataggccagtgatattaatgag

SEQ ID NO: 932706 - DNA, 120 bp, Artificial Sequence
  ENSG00000272905_4 (sequence is synthesized)
aaaatgaaagtatatatcaggaataaagtgatattgcataggagtattgtatttttatgaattttgtgccagttgtttacatgtactatatatgttaaataaaaaaatcatgaaaaatga

SEQ ID NO: 932707 - DNA, 120 bp, Artificial Sequence
  ENSG00000272906_0 (sequence is synthesized)
ccggccccttccctctcggatgggggccctgggggtgacgtacacaccccatccttcccgcaccgcctctgcccgccgcccgtcgcccgccatagttgttgacgtagctttagtcgatcg

SEQ ID NO: 932708 - DNA, 120 bp, Artificial Sequence
  ENSG00000272906_1 (sequence is synthesized)
cgaagatggctttatggaccctaggttctcctgccggtggtggcgatggcttctcgggggtgttgggcggtggccgctgtggtcagggaggcagttgcgagtcgctggggccgccgcctg

SEQ ID NO: 932709 - DNA, 120 bp, Artificial Sequence
  ENSG00000272906_2 (sequence is synthesized)
cgtcgtcgctgctgtgtagcaaacctgcctctgggcccatggtgtgtcttgagggctgtgagagaggcagtgcctgagctgggtcagctgctgtggatcgctcccgcctcctggctggag

SEQ ID NO: 932710 - DNA, 120 bp, Artificial Sequence
  ENSG00000272906_3 (sequence is synthesized)
gcaccaaagaggaggagaagggggaggaggacgtctctgccatcgcccttaagtaaaggaggggtgggggcgatagaaggatggcagggcaacttgcctgtcctaagtctagccgctcgt

SEQ ID NO: 932711 - DNA, 120 bp, Artificial Sequence
  ENSG00000272906_4 (sequence is synthesized)
ccgtcctatctcccagtaccaagtctcggggaaaaggagtgcgacgagggtggagaagacccaagtttcgcttctcggccccaggctgttgcgcagtttccctggaatctttttgatcga

SEQ ID NO: 932712 - DNA, 120 bp, Artificial Sequence
  ENSG00000272906_5 (sequence is synthesized)
ctgctacgttgaccatgtccttcccagtgtccttagcaggagtgatggccagagagagaacttttgcacatgccatgttttcgtggcaaaaattttagtttcaagtaccttatgagggcg

SEQ ID NO: 932713 - DNA, 120 bp, Artificial Sequence
  ENSG00000272906_6 (sequence is synthesized)
gttacctagttttgaattttgtcacttgttgagggtgtacaaaatcctatctagagtcatactcgttggatgtattttcttttccgaaatgtacccataggacacataaccttattcctg

SEQ ID NO: 932714 - DNA, 120 bp, Artificial Sequence
  ENSG00000272906_7 (sequence is synthesized)
gtctttaatatttctcggttttataccaagcagcagtgttcggaagaccatgttagtgctacattgtgcacagtgagaaatgaacaagttttttaattaaagacagcactgtaattttaa

SEQ ID NO: 932715 - DNA, 120 bp, Artificial Sequence
  ENSG00000263990_0 (sequence is synthesized)
atgtaaaatagggattcattcccaaacagtcctcattgtgacagaattctcattgcccagcaggaatggcactccagaacacagccagccttctgaccaagtcactcagagcaacactct

SEQ ID NO: 932716 - DNA, 120 bp, Artificial Sequence
  ENSG00000263990_1 (sequence is synthesized)
tctgtgaattttagttcctttctattgggaaatatttcatgtagttatcatcaatcatcttttagttaagtaagtaattaacagcccacacagttagacccacagctacccaggtcatgt

SEQ ID NO: 932717 - DNA, 120 bp, Artificial Sequence
  ENSG00000263990_2 (sequence is synthesized)
tctaagacccacaacacaagaactaattaatctaggctgaactatctgatcttcattcatgtcccagaggtacgtacaaatgagcagcaaaagcgaggcatggtggcgcacatttgcaat

SEQ ID NO: 932718 - DNA, 120 bp, Artificial Sequence
  ENSG00000232360_0 (sequence is synthesized)
atgaggatttagggtccccgtctgctaatgccccagatttgcttgataacgttgtcgtcggaagcaagtccaggatgtgagatgggaaggagagtagatggactcatgatgaaaggacag

SEQ ID NO: 932719 - DNA, 120 bp, Artificial Sequence
  ENSG00000232360_1 (sequence is synthesized)
tctcccattgcagtggcagtgatcacagaggagagatgcctatgttcacctcttccacctggatggatgctgagctcttagaaattgactttccaggggatacagaggctcatgcctata

SEQ ID NO: 932720 - DNA, 120 bp, Artificial Sequence
  ENSG00000232360_2 (sequence is synthesized)
gtcccagaactttgggaggccgaggtggaaggatggctagaggccaggagtttgaagctgcagtgagcttgagaccagcttgagactagaccctgtctctataaaaaatgtttaataaaa

SEQ ID NO: 932721 - DNA, 120 bp, Artificial Sequence
  ENSG00000232363_0 (sequence is synthesized)
tttccctcctctggggcttgcttgcaaggcggggttgggtcaaggttggggcagcctctctcttcctccctgcttggtgcctcagtgaccagccagctccctgccccacccagctggccc

SEQ ID NO: 932722 - DNA, 120 bp, Artificial Sequence
  ENSG00000232363_1 (sequence is synthesized)
caggccaccggccgggcctgggactcaacttgccaacttacagcctgagggagggctgggctcttcaaaaacagcctcaaatcatccaggccgctgacagccacagggcaagcgcccaga

SEQ ID NO: 932723 - DNA, 120 bp, Artificial Sequence
  ENSG00000232363_2 (sequence is synthesized)
tggagcccttcccatggactgggcctttgcacacacattgcaccaaattctcacagcagccgagccaggggcaacacacggaacgtctttcatcctgtggacgggaatcacaacatccag

SEQ ID NO: 932724 - DNA, 120 bp, Artificial Sequence
  ENSG00000232363_3 (sequence is synthesized)
cagtgtcggggctgttgcaagaaactgcccagcacaggacctgggccttcgcagtttaatcacctcgttcctcttcctgcctggagaacggcagggactgtgttgtgctgctggtcacca

SEQ ID NO: 932725 - DNA, 120 bp, Artificial Sequence
  ENSG00000234207_0 (sequence is synthesized)
agctgaaaattcaagcggaagctgctatgatagaatttgcaattcacccctgcggagtggaacagacccagatatgtgaagcttgaatatatctacctgagtaaagtgatatttgctggg

SEQ ID NO: 932726 - DNA, 120 bp, Artificial Sequence
  ENSG00000234207_1 (sequence is synthesized)
ctgagaaaaggacaggagaagaaactgggtgcagaattggtttttccctcttcttcctacctgagccatccagacagcacagctgccccacagataaaagcaaccatccttccaaggcaa

SEQ ID NO: 932727 - DNA, 120 bp, Artificial Sequence
  ENSG00000234207_2 (sequence is synthesized)
tctcatattctgaccgtgcaaagtggttgccattctgagaatggaggtgaggaaactgaggctcaagggtgaaactgccttgcctaaggtcacacacctaggaactgacatggttatgat

SEQ ID NO: 932728 - DNA, 120 bp, Artificial Sequence
  ENSG00000234207_3 (sequence is synthesized)
tcaatttcaaacctggtgctcatcctctaacactgggacaaagctggttataaatcatgctggcagtctattgagcctgtggttttggctggtgtgaagatgttgaaggaaggtttgtat

SEQ ID NO: 932729 - DNA, 120 bp, Artificial Sequence
  ENSG00000234206_0 (sequence is synthesized)
gccagaagagcagttctccaggcccagaagtaagctacacccacaattctgtatgcagctgtgagaaaggagagtggaaatccaagtcaatgcagtatcaccgtgttcccaatcacgagt

SEQ ID NO: 932730 - DNA, 120 bp, Artificial Sequence
  ENSG00000234206_1 (sequence is synthesized)
gcctgactggatggagccctctggtaccctcaaagagaagcaactcgcctcatgacgatgagcgccctggaattccatggaagacagcacaaaaccaataaaaccactggtgttcagtta

SEQ ID NO: 932731 - DNA, 120 bp, Artificial Sequence
  ENSG00000234206_2 (sequence is synthesized)
gctaggattttacccctactgggccatccacgcttttagaaccacagattctcagggaatgcagcattaacctacatacagctagaaaattgacagtagcatatctcaacccaattacct

SEQ ID NO: 932732 - DNA, 120 bp, Artificial Sequence
  ENSG00000234206_3 (sequence is synthesized)
taagagtgatggaatcctcgtttcactatcaaggaagctgcagtcaaggtcaaacagatgagcgccctggaattccatggaagacagcacaaaaccaataaaaccactggtgttcagtta

SEQ ID NO: 932733 - DNA, 120 bp, Artificial Sequence
  ENSG00000287698_0 (sequence is synthesized)
gaggcctgcctgggagtgggactgagagcagtggctctgagcagaagatggagatggtcaaggccccacatcgagggttgcaatcttgtcatccataactcttataagaatgagccctgg

SEQ ID NO: 932734 - DNA, 120 bp, Artificial Sequence
  ENSG00000287698_1 (sequence is synthesized)
cctggaagagaggccaaatgtctaatcagcaggcctggaacaccgccggtgccaagaaagagccaagcagccactccctggggctggctgcagatgaggcccttgtggtttccccactca

SEQ ID NO: 932735 - DNA, 120 bp, Artificial Sequence
  ENSG00000287698_2 (sequence is synthesized)
tgggtttcaaaagactgtgacttccaccttggtttgctcggtctgatgaaggaactttgagctgtgagctgcactgtgaactttgctgtgagctgccctgtgatgggagaggaggcctcc

SEQ ID NO: 932736 - DNA, 120 bp, Artificial Sequence
  ENSG00000287698_3 (sequence is synthesized)
gcctcacagccctggaggacctcaatgctgccaacgtgtgaccagatgcagatccttctccagtcaagcctggacatgacatgacagcagccctggggaccttgatgctgtggcctgtgc

SEQ ID NO: 932737 - DNA, 120 bp, Artificial Sequence
  ENSG00000287698_4 (sequence is synthesized)
aagaccctgagccagccgcacccagatccctcacccacagaaactgccagattttaagtcttctgcttgtaagccactctttttgccatagtttgtgtgcagcaatagataactgctcta

SEQ ID NO: 932738 - DNA, 120 bp, Artificial Sequence
  ENSG00000234203_0 (sequence is synthesized)
gcgggcaaggcgcacatgaccccgggaatgagccacagacaatggcagacggcccagagagtcgggaatgctcagtgcctgtcggttccaacggaaaaggagcacagcagcttccagacc

SEQ ID NO: 932739 - DNA, 120 bp, Artificial Sequence
  ENSG00000234203_1 (sequence is synthesized)
tgccatccgcttctccatctgctccagtcgctctagtatggacatccggaactggttgtctgagggggaacgggtatgggaggctgagtgggcagtctaggtgatgccctgaacaccaaa

SEQ ID NO: 932740 - DNA, 120 bp, Artificial Sequence
  ENSG00000234203_2 (sequence is synthesized)
agtagacctgtcccaagatctggggatgaggacacagaaccatattcttttatcttccccaaaacaacagctcctttaccccttcacctaaataaagcccaccaggactcagtccttaaa

SEQ ID NO: 932741 - DNA, 88 bp, Artificial Sequence
  ENSG00000287695_0 (sequence is synthesized)
acaggcatgagccaccatgcctggctatttccttcttttttaaggctgaataatattagatagatacacacacaccacattttcttta

SEQ ID NO: 932742 - DNA, 120 bp, Artificial Sequence
  ENSG00000287695_1 (sequence is synthesized)
gagatagatacacacacaccacattttctttattcatctgttggtggacacttaggttgtttccatatcttggctattgggagtagtactgcaatgaacatggcagtacagatatctctt

SEQ ID NO: 932743 - DNA, 120 bp, Artificial Sequence
  ENSG00000287695_2 (sequence is synthesized)
agtacagatatctcttaaggatagtgattttattctctttggatatatatccagaaatgagattgctggatcatatggtagttctgtttttaacgttttgaggaacctccatactgtttt

SEQ ID NO: 932744 - DNA, 120 bp, Artificial Sequence
  ENSG00000287695_3 (sequence is synthesized)
gaaaatatgagccaaagctcattctctaataacatttcttgactagtgcattcaagtatctgccctgtcttaacattttagctaattgctaacacagcacatgcagtacatactttcagc

SEQ ID NO: 932745 - DNA, 120 bp, Artificial Sequence
  ENSG00000287695_4 (sequence is synthesized)
aggactgaacatttttagtcatctaacaaagacatttcatctcatgacaagttttttggacatacctcaatgtgctgtgtctgtagctaacttaattacaggagccgccttggcagtacc

SEQ ID NO: 932746 - DNA, 120 bp, Artificial Sequence
  ENSG00000287695_5 (sequence is synthesized)
aggaaccaaatgttatgaccagcaactctcctataggtagtactgcttttataacagtgtaaatcacagttgtgccaattttttttttaaagaagctaaatggaagatttaaaccttaag

SEQ ID NO: 932747 - DNA, 120 bp, Artificial Sequence
  ENSG00000287695_6 (sequence is synthesized)
ttgtttgggctttgaatccttgtgttcttagaacacaagctttagtcagacagcagactttgagctagtacttaacctctctgtgcctgattgagtaaaactgggctactttctcagagt

SEQ ID NO: 932748 - DNA, 120 bp, Artificial Sequence
  ENSG00000287695_7 (sequence is synthesized)
gctcagagcatctatcaaccttgataccatcatattccttgctaggaaattctgtgtttattcatcccttctttttctttcatcctcctttctagttccacattgaagatcccaaactta

SEQ ID NO: 932749 - DNA, 120 bp, Artificial Sequence
  ENSG00000287695_8 (sequence is synthesized)
aaccatcattaataataatatatgagaacagtaataaatgtcaccatttattaacacctaatgtgtgccaagatctgttcatttatgatctcaccgagtcctgtgaggtgaaactgagga

SEQ ID NO: 932750 - DNA, 120 bp, Artificial Sequence
  ENSG00000287695_9 (sequence is synthesized)
ttaggaaggtgtaaactggacaagcgcatggcagagtcagaatccaaactcaaatttatttggatcaagagtgatacactattatgcactacttcctgttacctcctatgtggtgatagg

SEQ ID NO: 932751 - DNA, 120 bp, Artificial Sequence
  ENSG00000287695_10 (sequence is synthesized)
tgtggtgataggaataacttataaggatttttttttttttagacaggatcttgctctgtcattcaggttgaagtgcaatgatgcaaccatagcccactgcagcctcaaactcctgggctc

SEQ ID NO: 932752 - DNA, 78 bp, Artificial Sequence
  ENSG00000287695_11 (sequence is synthesized)
agcctcaaactcctgggctcaagcagtcatcctacctcgcctcccaagtaaatttttagtagagacaaggtctcgctg

SEQ ID NO: 932753 - DNA, 120 bp, Artificial Sequence
  ENSG00000287695_12 (sequence is synthesized)
gctgggattacaggcgtgagccaccaccacacccagtctacttctaaggatttaatgccttatgttttcttcatttatttctcatagaaccattcactcttagcactttgactttgaaaa

SEQ ID NO: 932754 - DNA, 120 bp, Artificial Sequence
  ENSG00000287695_13 (sequence is synthesized)
accattcactcttagcactttgactttgaaaatcagggaccaggttgagccagacaaaatattcacctataaggagaaggaatgaaaaaccagacatttttctacttggctatcaatccc

SEQ ID NO: 932755 - DNA, 120 bp, Artificial Sequence
  ENSG00000287696_0 (sequence is synthesized)
tatatagagattatgcttctggttgttaacagcctccagaaggcaggttgaattatcattcactgtgctttccaatgaagataattgtgtaccctggaaaaactagaaataattaacata

SEQ ID NO: 932756 - DNA, 120 bp, Artificial Sequence
  ENSG00000287696_1 (sequence is synthesized)
gctgcagaggaaaattatctgactccaagttttctatttttttttcctttggtaaacttgattctggatttaagttagtactgacgcttatttgccattcagtgggcactagaagccaat

SEQ ID NO: 932757 - DNA, 120 bp, Artificial Sequence
  ENSG00000287696_2 (sequence is synthesized)
gatttaatgatgacaagccatcaaaactgcaaaaatagttaaggctgccatatattgagcctttactctggggtctttattatgcatacatgtatatacacatatatgtatctatgtata

SEQ ID NO: 932758 - DNA, 120 bp, Artificial Sequence
  ENSG00000287696_3 (sequence is synthesized)
tgtgtgtatgcataattttcataataattctgaggtatttttatcccagagtaaagatttaaaggaataaaaacatgaaactgaggcttatcccaatttacccaagatacatcaacaacc

SEQ ID NO: 932759 - DNA, 120 bp, Artificial Sequence
  ENSG00000287696_4 (sequence is synthesized)
tcaagtacaggtttgtcacagaatctgtacactaaatgttgattttatacttcatttctgactagtgttttaaaaacagagaccttgtcagtctgtttatttctccaaagtgtccttcaa

SEQ ID NO: 932760 - DNA, 120 bp, Artificial Sequence
  ENSG00000287696_5 (sequence is synthesized)
gtttaattaatgtgtctcccttaatgtgaagatgaagttatatagaaagtgtgattggatatacattcaaattacaataaatacacctaaaactgcaaataagcttgagggtgaccataa

SEQ ID NO: 932761 - DNA, 120 bp, Artificial Sequence
  ENSG00000287696_6 (sequence is synthesized)
tgatcattaactaattttgctactaatccatcataactaggttcaaagtaagcacaacagtcccgtcttggaaacggaatatgtgttataaaacaaagtaccaaatgaagacttataatt

SEQ ID NO: 932762 - DNA, 120 bp, Artificial Sequence
  ENSG00000287696_7 (sequence is synthesized)
aactgtttaaattgtgtatctttgggaacacatacatttaaggttgatgaaatattattggatctgtttatacttcagaaggaagtgacagagaaaaaaggaaagaagatgagatatagg

SEQ ID NO: 932763 - DNA, 120 bp, Artificial Sequence
  ENSG00000287697_0 (sequence is synthesized)
agacacaccaggccgccatgttgtgtaaggttagtctctcagcctccgcgagaagaaggcgaaaaatggggaggagcagcctggttactttcaaacgagaaagaacggatatgttaagcg

SEQ ID NO: 932764 - DNA, 120 bp, Artificial Sequence
  ENSG00000287697_1 (sequence is synthesized)
tggagggctcctaatggtagcggtttgattttcagtgagtttggcgcggtggagacgtcaccgcggtctaacagttccgacgtggtggcgtcatcactggccgccgtaggaggtggagct

SEQ ID NO: 932765 - DNA, 120 bp, Artificial Sequence
  ENSG00000287697_2 (sequence is synthesized)
acgttggcctcgtgaccgggccctgtagcggaagcccaggtcaaggccctaacaaaagggcccgcctatggccacagtttcaggccctcctttcagtcatggactgttgaagcacgattt

SEQ ID NO: 932766 - DNA, 120 bp, Artificial Sequence
  ENSG00000287697_3 (sequence is synthesized)
cctggtgctttcgcccctttcaccgaccatttcaagagtccgtagttctcgcctgggtttggattcggtataagtgagcctgtttaccatcaaagaaaatggtgaaatgtcttctggaga

SEQ ID NO: 932767 - DNA, 120 bp, Artificial Sequence
  ENSG00000287697_4 (sequence is synthesized)
cgatgttctcttctggttctaaccctgtcactcagtgagacccccagagaagcctagttttcagattattctagtccttggcaggctcaagatgtcaacaacacggttggaaacaacccc

SEQ ID NO: 932768 - DNA, 120 bp, Artificial Sequence
  ENSG00000287697_5 (sequence is synthesized)
gcgcactcagctttatagatcgtccaaggcagcaattagaatcagcaactcggagaggaaaaaaagctgttagcggaatggaggctgaccattatctgtagtaaagaatcggaagtacag

SEQ ID NO: 932769 - DNA, 120 bp, Artificial Sequence
  ENSG00000287697_6 (sequence is synthesized)
tacaaaaataaattaccgaaacgcaacatgcgtgaatttcacacaaaaaaatgaagttgagggaaagaagccagacatggaagagttcatattgcgtggttccatttaaaaactagccca

SEQ ID NO: 932770 - DNA, 120 bp, Artificial Sequence
  ENSG00000287697_7 (sequence is synthesized)
tggtgttaatgagcatagtggggaggacaatgacatgaaagagccaccagggggcttttgaggttcaggtaatgtttcttgatttggacactgattatagataggtgggttcactttaga

SEQ ID NO: 932771 - DNA, 120 bp, Artificial Sequence
  ENSG00000287697_8 (sequence is synthesized)
aatctcattgagttgtaaacgtatatttatgtacgtagttttttctgtagattatgcttaaggcccggcgaaggggaatttgcccaggtaatggaaatattacaccgatacatagaattg

SEQ ID NO: 932772 - DNA, 120 bp, Artificial Sequence
  ENSG00000287697_9 (sequence is synthesized)
tcaaagttcatgggatgaactcctaagagctgtgtattttatcgtataaatttttttaagtgtccaaccaatagcctggaattattaagtacataattaaataaaaacaaatatcccatg

SEQ ID NO: 932773 - DNA, 120 bp, Artificial Sequence
  ENSG00000287690_0 (sequence is synthesized)
acgggaagacaacggaaatccaaggaaagctacgaaggctgttatcagagaaaaatttcctcgaagcactttagctgtcactttgaagtgttagtgacatcctttggcagtgattaaatg

SEQ ID NO: 932774 - DNA, 120 bp, Artificial Sequence
  ENSG00000287690_1 (sequence is synthesized)
tgccacatgccactaatcttgtttagaatccttaaagaggacagcagcccttacacaggatgcttcgatctgatgacgatggtgtttatgcagtgatgtgtggctcacaggcacgtatac

SEQ ID NO: 932775 - DNA, 120 bp, Artificial Sequence
  ENSG00000287690_2 (sequence is synthesized)
aacaccatcaactcttccatctcatacctcatcagagctttccatctgatcccatttggagaaggatatcacacctgaggaatccacgtgtaagctattgctcttgtatgagttcaggtg

SEQ ID NO: 932776 - DNA, 120 bp, Artificial Sequence
  ENSG00000287690_3 (sequence is synthesized)
cacacgcactgtggacgcacactgcactgtgccccccaacggctgacaacgtggagccgggatgcaggagcatccgccttctccaagcttctctcccacctctcactgtgatactgagca

SEQ ID NO: 932777 - DNA, 120 bp, Artificial Sequence
  ENSG00000287690_4 (sequence is synthesized)
gaactccccaaagaaaaatcatttctcaactgtgaaactagggaagactaaccagatgtgatagcacactgtattctgatcgaaagtgaactattcttccatcatattggtcaagctttc

SEQ ID NO: 932778 - DNA, 120 bp, Artificial Sequence
  ENSG00000287690_5 (sequence is synthesized)
aaaaacacttacctatacttcagggcgaaagattctcagcatcctctaacaaatgtttgcctcagaaccattgaaaagaaaaggtttagaattaatgacagagaacaatgtacccacagc

SEQ ID NO: 932779 - DNA, 120 bp, Artificial Sequence
  ENSG00000287690_6 (sequence is synthesized)
tgcattttgctcttttgaaaattagatatttttctgcagataatactacagaaccacaataaaagttatcatcatgcttcacatctagtaatgaacgtgaaacaagcaccctcgaatagc

SEQ ID NO: 932780 - DNA, 120 bp, Artificial Sequence
  ENSG00000287690_7 (sequence is synthesized)
tgcatcgagcatgaaagggcacgggccccactgccggccgggtgaattctagacgggccccactgccagccgggtgaattctagcagatacttcacccaaaatgcttcagtgtgcatcaa

SEQ ID NO: 932781 - DNA, 120 bp, Artificial Sequence
  ENSG00000287690_8 (sequence is synthesized)
acacaatgtccccagtttccccccaatatccttaaactgatttattctgcacaattccatcacaaagtttttcacttatttgtcgaatctcaacagtattcttgaatgaagtatcctcca

SEQ ID NO: 932782 - DNA, 120 bp, Artificial Sequence
  ENSG00000287690_9 (sequence is synthesized)
gtttttgttgctgtttagacatttacatttatgaacaaagagttcagggcagctgctctgtagaatgtttcatagtctggactgatttcgtggtttcttcataattagattagggtaaaa

SEQ ID NO: 932783 - DNA, 120 bp, Artificial Sequence
  ENSG00000287690_10 (sequence is synthesized)
tatttttagctgctgtacatcacgttaggagacctgtcatgtcaacttgcaccattgtgggagacactcgcttctgcctgccgggtcgcctttgtgaagataacctttcccatcgtaatt

SEQ ID NO: 932784 - DNA, 120 bp, Artificial Sequence
  ENSG00000287690_11 (sequence is synthesized)
aataagtaggatgtggggcaatagctcctcaacctttcccctcatggctttagcacttataaaaaatgtaaaaaaaaatatcaggtgtccattttcaaggctgagggtgggggaagaatc

SEQ ID NO: 932785 - DNA, 120 bp, Artificial Sequence
  ENSG00000287690_12 (sequence is synthesized)
taattaactttgaacagcacctggatggcagaatccctctagacactgacaacccaccgcaaccccaaactttacaactatttcacccaactcttttcaacagaagttctcatttttgtt

SEQ ID NO: 932786 - DNA, 120 bp, Artificial Sequence
  ENSG00000287690_13 (sequence is synthesized)
catatatattgaatatttccaaactattcaatttaccttccacagaaattgctcctttttattactcaaagttcatcggatcatagtaattaatgatcatacttcagtgtatctagggta

SEQ ID NO: 932787 - DNA, 120 bp, Artificial Sequence
  ENSG00000287690_14 (sequence is synthesized)
agactgactacaaggtacatcagtagtttacatgccctacaggaagaaaacaccaaggacacataacaagcatcactgcaccacccacaactgatgttggtgacaacgtgcagacacaat

SEQ ID NO: 932788 - DNA, 120 bp, Artificial Sequence
  ENSG00000287690_15 (sequence is synthesized)
atttgcacccggagtcagtgaaatgtggtgaatgatgtcatgtgtgcaaagtagtacaaacaggtcagggaacaaacagagcggactcctgggaaccacgtgtatctccagtggctgcca

SEQ ID NO: 932789 - DNA, 120 bp, Artificial Sequence
  ENSG00000287690_16 (sequence is synthesized)
actcaggccggtctgcagaggattctgccacagcctgggctggaggctacacacctggctggtggatctgagacagagcagggcgggtaactgaagaccaggctggaaaggttctagctt

SEQ ID NO: 932790 - DNA, 120 bp, Artificial Sequence
  ENSG00000287692_0 (sequence is synthesized)
cctttcctgcgttgcaagtaagggagcacagtccatgttccgtccatcctggccagctttcttgggccttgagggaacagctcacagtgaatccggattctgttgtcctttgctgcctgt

SEQ ID NO: 932791 - DNA, 120 bp, Artificial Sequence
  ENSG00000287692_1 (sequence is synthesized)
tgacttacaggatcactgtgacctgaccaaggacaaagaagatcccaacttccttggaccctagctggcgcccagatgcctgcaatcatcatcatctcttgatccaaaccaccttttctt

SEQ ID NO: 932792 - DNA, 120 bp, Artificial Sequence
  ENSG00000287692_2 (sequence is synthesized)
cctcatattcgcctcccataaaaaccctcttgccaggcaggaaaatataagacggtactttagaagttaagttctaagctagttcaccattttctccgttttgctggctttatgaataag

SEQ ID NO: 932793 - DNA, 120 bp, Artificial Sequence
  ENSG00000287692_3 (sequence is synthesized)
cctgctttttctgccactaattcttctctctcatgtttggcttttgatcagccaaagctgggttcagttacaaagagcttgccctgtttctttgcccttatccccaaacatggacacctg

SEQ ID NO: 932794 - DNA, 120 bp, Artificial Sequence
  ENSG00000287692_4 (sequence is synthesized)
actctccaggtagaactaatttgagtccattgggctcataatcattgtggtagattgcataattgacttcaattccaagccagccaggaactttcccatcaagtcagccccttcctgtgt

SEQ ID NO: 932795 - DNA, 120 bp, Artificial Sequence
  ENSG00000287692_5 (sequence is synthesized)
ccacagccatttcagtgaaccttgcaattcttcccactaacaaagcagaatatatttcttcacaccttaactttgggttcagccatatgacttggtttgggcaactgaaggaagtggaaa

SEQ ID NO: 932796 - DNA, 120 bp, Artificial Sequence
  ENSG00000287692_6 (sequence is synthesized)
tgacaaagtaccatgatgagcttaggccttaagatgccttgaatttgcttcatgccctcttgcacatctgctctcaccataagaagaacttctgcgaacattctgtcccctcagcctaag

SEQ ID NO: 932797 - DNA, 120 bp, Artificial Sequence
  ENSG00000287692_7 (sequence is synthesized)
cacaagaatgagcacattggaagccaacctgagcccaaatcattgtgagcagccaagactacctggatacataacttgaaagggtgctgcccagatagctcagcctcaatcagtcagccc

SEQ ID NO: 932798 - DNA, 120 bp, Artificial Sequence
  ENSG00000287692_8 (sequence is synthesized)
tcagacacgtgagtcatataaatagtttttattttaagccactgaattttggggtagggcttaaggtaccaaaagctaattgaggccaggtgcggtggctcatgcgtgtaatcctagcac

SEQ ID NO: 932799 - DNA, 120 bp, Artificial Sequence
  ENSG00000287692_9 (sequence is synthesized)
tttgggaggccaaggtgggaggattatttgagcctaggagtttcagaccagccttggcaacacagcaaaaccctacctctaccaaaaacaaaacaaaaaatttctaaagctaactgataa

SEQ ID NO: 932800 - DNA, 120 bp, Artificial Sequence
  ENSG00000287692_10 (sequence is synthesized)
aatcatttatctagttcagtgaataagtgtggtagaagttaaaacagaaaaaaatgctattatttctaaaataatttccccttggactgcatttgctaaattagcaagtgattaaattaa

SEQ ID NO: 932801 - DNA, 120 bp, Artificial Sequence
  ENSG00000287692_11 (sequence is synthesized)
tcctagtttgtattatttgctgaaatgtgtgtgtttcctggcatagcctaagaagaaaatgtatctacactctcattttgtagaactctgagaggaccatccagtcattgctgacaaagc

SEQ ID NO: 932802 - DNA, 120 bp, Artificial Sequence
  ENSG00000287692_12 (sequence is synthesized)
ccagtcctacatatcatcatagtacatgaggggcatgtacagttaatgtgaaaaataagctcaattgtcctgatatgttgcagtccaaaacttcatttatgagtcatttatttagaactc

SEQ ID NO: 932803 - DNA, 120 bp, Artificial Sequence
  ENSG00000287692_13 (sequence is synthesized)
agaacactcttgcccatagaaacaatattataatgtttccaggcaaacaacaaaaacccatttaaccccaaaatataactgactgatatcagtagtcagttgggagacgacttcttcctc

SEQ ID NO: 932804 - DNA, 120 bp, Artificial Sequence
  ENSG00000287692_14 (sequence is synthesized)
attgcttggatttccttctccctttatgctttctcttccttgtttgcccttttcagaggaagaggagggctagttgattaaattttattgggcctcctttcctaagtgggcagaattgct

SEQ ID NO: 932805 - DNA, 120 bp, Artificial Sequence
  ENSG00000287692_15 (sequence is synthesized)
gtattgaaaggctgtgaggacctgccactatctttcaggtctgtgtcctcccacacaacgtttgtcttcatggacttggagtctgctctgcactttctctctctctgtctctctctgtct

SEQ ID NO: 932806 - DNA, 120 bp, Artificial Sequence
  ENSG00000287692_16 (sequence is synthesized)
ctttctctctctcttccaccctccctccctctccttccttcccagacatacctgagcctatggttcccatgattcatatttgcaaagaaaattctactgtagtctcaggcctaagacgaa

SEQ ID NO: 932807 - DNA, 120 bp, Artificial Sequence
  ENSG00000287692_17 (sequence is synthesized)
ttctccatctcaaaatactgaaaatcctttattcagggagttgtgcagatttttaataaatcaatgcttaatgtctctcatttggctggtgatcttttgctggatgcagcatcagtttga

SEQ ID NO: 932808 - DNA, 120 bp, Artificial Sequence
  ENSG00000287692_18 (sequence is synthesized)
gaggactccttgagcccgggattgcaagaccagcctgagtaacatggcaagaccccatctcagaaaagaaaaaaaaattcctaagactcattcctcttctgttcatgatttctttgggaa

SEQ ID NO: 932809 - DNA, 120 bp, Artificial Sequence
  ENSG00000287692_19 (sequence is synthesized)
aaatttttcctatgttccaactgtggaagactggatacaccttgaatgcaaccttctttcatgtcttcaaggtaagactctcatttcgcaatgacttatcttttggaagaatctctagtt

SEQ ID NO: 932810 - DNA, 120 bp, Artificial Sequence
  ENSG00000287692_20 (sequence is synthesized)
ctttcatggaaaagtaatggtcatgttttgttagaagaaaagttgattttgaagaaactaaggcagtagaaaccatgtgcatgttccatttctttgaaaattccataaacgtgcattaac

SEQ ID NO: 932811 - DNA, 120 bp, Artificial Sequence
  ENSG00000287692_21 (sequence is synthesized)
ttattcagttcagagctcagagattaaacttttctctaacattgggatataaatttattctgatataaactctcaacattacctttctgagataattctgaggttgttcagtaacatcaa

SEQ ID NO: 932812 - DNA, 89 bp, Artificial Sequence
  ENSG00000287692_22 (sequence is synthesized)
acctttctgagataattctgaggttgttcagtaacatcaattttactaacttttttcctcagttaaaactttataactgtattcatttt

SEQ ID NO: 932813 - DNA, 120 bp, Artificial Sequence
  ENSG00000287692_23 (sequence is synthesized)
tccaagctgtcctcgaactcatgggctcaagcaatcctcatgtggcttatctcacagttttaaaaaccaaagtattcaatatagacatgtagtctccctgtttatcactagaattttctt

SEQ ID NO: 932814 - DNA, 120 bp, Artificial Sequence
  ENSG00000287692_24 (sequence is synthesized)
tttcaattctgaaagcaatttccctccacagtctatgtctcacatcctaaaagagatcatgtaaattatcatttgtttccccacaaattttatagtcagcaaaatacatcattgaaacca

SEQ ID NO: 932815 - DNA, 120 bp, Artificial Sequence
  ENSG00000287692_25 (sequence is synthesized)
cagcaaaatacatcattgaaaccatgtatcttaactataaaaatttaataaaattttttaaactttgagattttccagccttcctttaatataactggtacttaaaaatgaatatagatc

SEQ ID NO: 932816 - DNA, 120 bp, Artificial Sequence
  ENSG00000287692_26 (sequence is synthesized)
tcaaatactttttaagacttcaccttcagataatagtggcttgaaccatgggcttacaaattgagaccaccacgtgaatcaattctgtgtatctactaccaaaaccacttttaatattct

SEQ ID NO: 932817 - DNA, 120 bp, Artificial Sequence
  ENSG00000287692_27 (sequence is synthesized)
ctcagaaatgcatgctcttacacgttgttgagtggctcagggctaactgccactcactctgggccaatggaagcctccacccctagccaggccagttgcacaggtgctggctcttcttag

SEQ ID NO: 932818 - DNA, 120 bp, Artificial Sequence
  ENSG00000287692_28 (sequence is synthesized)
aggtaggtagagatgggaggctctggtgcagtagaaggccgacttctcctgtgtggaagaagttcccctgctctgctgtgggagagcataagtgttctgagagaagcaggggcaagagag

SEQ ID NO: 932819 - DNA, 120 bp, Artificial Sequence
  ENSG00000287692_29 (sequence is synthesized)
gaaaggggaaaacactaggagaatttgatcttagctccacgtacccaaaggccagatacatcactgcccctgccacagttacattctctttaaaacacatcaagacactcctttcccttc

SEQ ID NO: 932820 - DNA, 85 bp, Artificial Sequence
  ENSG00000287692_30 (sequence is synthesized)
tctctctttccaaggtcctgctcttttgcccaggctggagtacagcggggcaatcatggcttactgaagccttgacctctctggc

SEQ ID NO: 932821 - DNA, 90 bp, Artificial Sequence
  ENSG00000287692_31 (sequence is synthesized)
gtttacaaggtcctgctcttttgcccaggctggagtacagcggggcaatcatggcttactgaagccttgacctctctggagtagctggga

SEQ ID NO: 932822 - DNA, 83 bp, Artificial Sequence
  ENSG00000287692_32 (sequence is synthesized)
aagatacccctttctttgaattacagaaatggggatgtgtctgaccctgatcactacttttggccacttcatgagctctccta

SEQ ID NO: 932823 - DNA, 120 bp, Artificial Sequence
  ENSG00000287692_33 (sequence is synthesized)
accctgatcactacttttggccacttcatgagctctcctatgagagagctaccagctgttaggaggccaggaaggagggtcccaggtacaggccaaaatcccctagagtccctggacacc

SEQ ID NO: 932824 - DNA, 120 bp, Artificial Sequence
  ENSG00000287692_34 (sequence is synthesized)
agcatacacactttcgagatgcccaccctcttaagctttggaggagatggggataacaccctggccctagcactgctcaactttcacctgacatatatggtatatttcttttagaaatca

SEQ ID NO: 932825 - DNA, 120 bp, Artificial Sequence
  ENSG00000287692_35 (sequence is synthesized)
cacctgacatatatggtatatttcttttagaaatcatagcaaaagtcataacagtagtagtaatttataaatcatagtaaaatttttttaaatgtcttctaaaatttgggatgtagtatt

SEQ ID NO: 932826 - DNA, 120 bp, Artificial Sequence
  ENSG00000287692_36 (sequence is synthesized)
aaatatctcatcataaaaaatgataggtaatcaaggtgatggatatgttaattagcttgatttaatcattgccaccttctatacaagctgtataacaaaacatcacattgtgccccgtac

SEQ ID NO: 932827 - DNA, 120 bp, Artificial Sequence
  ENSG00000284523_0 (sequence is synthesized)
actgaggattgggggtctttggagctcttggacctgaagaacgattaagtttttctcccttcagagagccaagagatggggtcttgctgtgttgcccagggtggagtgcagtggctattc

SEQ ID NO: 932828 - DNA, 120 bp, Artificial Sequence
  ENSG00000284523_1 (sequence is synthesized)
acaggtgtgatcatagctactatagcctcaaaccctgggttcaagtgagtcctttgaactagaacattggccttttctggttctgcagaagcttccagccttcagatttgaactgggaca

SEQ ID NO: 932829 - DNA, 120 bp, Artificial Sequence
  ENSG00000284523_2 (sequence is synthesized)
ctggctctgcagattttggacttgccagccttcataattgtaacctacactcctgtcatttgtggaatgattgctggagccagaggccaggaagaagttcatgagcctgagagaaaaagc

SEQ ID NO: 932830 - DNA, 120 bp, Artificial Sequence
  ENSG00000284523_3 (sequence is synthesized)
aaggatttccagttctaccctactgaagttcagctgtcaaaccaagggcccagacaggtctgatgggcctgggcagggtgtggcctggacaggtctgatggctgttccctaatggatatt

SEQ ID NO: 932831 - DNA, 120 bp, Artificial Sequence
  ENSG00000284523_4 (sequence is synthesized)
tcccttggagaagtgatgaggaagtgtgagcggagctcacttcaattggctgattaccctgttataccatggttgtgcactagtggaagcgggacgtctctggaggggtgtgtcagcatg

SEQ ID NO: 932832 - DNA, 120 bp, Artificial Sequence
  ENSG00000284523_5 (sequence is synthesized)
tacctacaacagcggcagtgatggcagccagctgggacctgaaacacagagggaccctgaggccagtactcacggtgcctgcgtagtgaaccagctcgaagtggacctcgggccccttgc

SEQ ID NO: 932833 - DNA, 120 bp, Artificial Sequence
  ENSG00000284523_6 (sequence is synthesized)
tcttgccccccttgggcttcaggaagttgctggacttgcccaggtggttgtcgtacagggctgccttgaacgtggcatcggtggctttggggaagacgcactgttcctccaagatggaga

SEQ ID NO: 932834 - DNA, 120 bp, Artificial Sequence
  ENSG00000284523_7 (sequence is synthesized)
cccaaaagaggacaaactggtactgagcccagggccagtgtagagatgcaccagacacccacgtgggcatccaggaagcaggactctgtgcagtgacatctgggaacagtgcctggtgct

SEQ ID NO: 932835 - DNA, 120 bp, Artificial Sequence
  ENSG00000284523_8 (sequence is synthesized)
ccatgaccttgtcatcaaacaccatggccattaagacttgaaagaggctgaaatcatcgagtccaacagaagggaagactgagatctgaaggggccagatagctccccaaatgctaatcc

SEQ ID NO: 932836 - DNA, 120 bp, Artificial Sequence
  ENSG00000284523_9 (sequence is synthesized)
atcccacctaaacagtggcccctggcaagcttggccttctgaaaaatggggaagtcaatgccacctgtgctctctgctttttttttttaatttaatttatttattttgagacagagtctc

SEQ ID NO: 932837 - DNA, 120 bp, Artificial Sequence
  ENSG00000284523_10 (sequence is synthesized)
gtgaaccaccatgcctggccacaacacacattcttgaaggggaccatttgctaaaaccttccatgtggatgtggttataggtaaaactattatattgcctgggtcagagcgtgactctgc

SEQ ID NO: 932838 - DNA, 120 bp, Artificial Sequence
  ENSG00000284523_11 (sequence is synthesized)
cactcacaggttgtgggacattggacaaggaagttcccttctctgtgcctcaatgttcccatctctgtgcctcaatgttcccatctgtgaaatgggtgtaataaaagtatcccctccccc

SEQ ID NO: 932839 - DNA, 120 bp, Artificial Sequence
  ENSG00000284523_12 (sequence is synthesized)
tgtcggcggcccttcagaggagatgctgccccacggaacgcctggcaagtgctggcgaagcggcatgggcgtcccactccgttcctcaaccaatttcctcacaatcgcgagccgaagtgt

SEQ ID NO: 932840 - DNA, 120 bp, Artificial Sequence
  ENSG00000284523_13 (sequence is synthesized)
gctggatttccatctcattcaggtccgtctccatcttcttcttgagccgaagtgcctctgcccggcccttggcctctgcctctaggctggcctgcaaggactcgattgcccgctggtggt

SEQ ID NO: 932841 - DNA, 120 bp, Artificial Sequence
  ENSG00000284523_14 (sequence is synthesized)
tcttcctaacctacactcctgtcatttgtggaatgattgctggagccagaggccaggaagaagttcatgagcctgagagaaaaagcaaggatttccagttctaccctcttggacttgacc

SEQ ID NO: 932842 - DNA, 120 bp, Artificial Sequence
  ENSG00000284523_15 (sequence is synthesized)
ctctgcaggctctccacatgctccgtcagctcggccatggagtccacgtgcttcttgcgcagtgtggaggccgtcgcctcgctctgcagggcggcctcttccagctcccgccgcagcttc

SEQ ID NO: 932843 - DNA, 120 bp, Artificial Sequence
  ENSG00000284523_16 (sequence is synthesized)
agcagctcagcctcccgcttgcggttctgctcgatctggggtagaggaggagcagcttagcagaactggccagtgccagccttttccgggtggacaccgcccagctgctcggtggtcccc

SEQ ID NO: 932844 - DNA, 120 bp, Artificial Sequence
  ENSG00000284523_17 (sequence is synthesized)
tttttttttttgagaccaagtttcattcttgtcacccaggctggagtacagtggcgtgctctcgtctcactgctacctctggcttccgggttcgagtgattctcctacctcagcctcctg

SEQ ID NO: 932845 - DNA, 120 bp, Artificial Sequence
  ENSG00000284523_18 (sequence is synthesized)
aagtgatcctcctgcctcagcctcctggaacatgtggttttgagcttcagagctcagtggcctcagacaggggcgttgtggctgcagtgtccactgcctgcccagagaacctacactcct

SEQ ID NO: 932846 - DNA, 120 bp, Artificial Sequence
  ENSG00000284523_19 (sequence is synthesized)
aggccaggaagaagttcatgagcctgagagaaaaagcaaggatttccagttctaccctacagagtcttgttctgttgcccaggctgcagtgcaatggagtgatcttggctcactgcaacc

SEQ ID NO: 932847 - DNA, 120 bp, Artificial Sequence
  ENSG00000284523_20 (sequence is synthesized)
acctgcctctgcctcccaaagtcctggggttacaggcgtgagccaccgcacccagcccgattcacatcactttaaactgaagacattatcacagaaccctaggagtgacatgagactcct

SEQ ID NO: 932848 - DNA, 120 bp, Artificial Sequence
  ENSG00000284523_21 (sequence is synthesized)
tgcacatgggaaatctttgcttatggaaaagaagaaaagcaaggtcaggggcaggtggatagacataaaggtctttaccaacaagttcaggcttcttgtttgagagaatctggtagaaga

SEQ ID NO: 932849 - DNA, 120 bp, Artificial Sequence
  ENSG00000284523_22 (sequence is synthesized)
tgtggtagcttctctcggctgcttgctgtgagatgacacgagatttctctaagagatctgaaaaagaagtgaagatcctggtgagtacacagctgtttccctggagttcagggctccata

SEQ ID NO: 932850 - DNA, 120 bp, Artificial Sequence
  ENSG00000284523_23 (sequence is synthesized)
ctcctctccataaagcccagaacagtcaccagtggtgagccccacgcttcgctcttcccagacacgcagcctccggggacctgactgccacggggggagtcctgggaacggggccagcct

SEQ ID NO: 932851 - DNA, 120 bp, Artificial Sequence
  ENSG00000284523_24 (sequence is synthesized)
cctgggcaccaacaggctgcaatcagaaggacctcccacttggcttgatgctcctctgttgctgtttcaaaattcctttattattattattatttttagagacagggtcttgctgcgtta

SEQ ID NO: 932852 - DNA, 82 bp, Artificial Sequence
  ENSG00000284523_25 (sequence is synthesized)
cactgcaacctctgcctcccaggttcaaagcaggaatcccctctccataaagcccagaacagtcaccagtggtgactgtttg

SEQ ID NO: 932853 - DNA, 77 bp, Artificial Sequence
  ENSG00000284523_26 (sequence is synthesized)
gggactacaggcatgtaccaccatgccaggctaatttttcacattttttgtagagatgggatcttccctcccgcctc

SEQ ID NO: 932854 - DNA, 120 bp, Artificial Sequence
  ENSG00000284523_27 (sequence is synthesized)
tcccaaagtgctagaattacaggcataagccacctcgcctggcctgaaattcttaatattttttaagaagagcccctcattttcatgttgcaccaggcctcacagattatgtagctgcac

SEQ ID NO: 932855 - DNA, 120 bp, Artificial Sequence
  ENSG00000284523_28 (sequence is synthesized)
gcctcacagattatgtagctgcacagacaaaccctccaaggagggcctgacttacagctctctatgtcggctccagccagtttccctgtggttccaaagtggattcggatgaacttgccc

SEQ ID NO: 932856 - DNA, 120 bp, Artificial Sequence
  ENSG00000284523_29 (sequence is synthesized)
tgagcagggaagagaggggagggatcaggagggaggtcgtccacagctttagaccagtaagtggcccagagttggccaagggttgctgatcggggcctgcggggatgtaaccgggctcta

SEQ ID NO: 932857 - DNA, 120 bp, Artificial Sequence
  ENSG00000284523_30 (sequence is synthesized)
ttggagtatcggatttcccacgaagatagagaaacacacggacaggtctcagagctaaatctagggtctgtggtttggggcatttgtaggggagagaagtcccagcaggagggctgctac

SEQ ID NO: 932858 - DNA, 120 bp, Artificial Sequence
  ENSG00000284523_31 (sequence is synthesized)
cctttggaattctgcatagagaccaggcaccatgggaatttggaggacctcccatgcctctttatcgggagccttccatgtcattcctctctctggcttgcatggtacagccatcaataa

SEQ ID NO: 932859 - DNA, 120 bp, Artificial Sequence
  ENSG00000253404_0 (sequence is synthesized)
cctcccgccgccgccccgcccgctcctcccggccgttccggcctccgcttttggggaaagggaaggcccccaccgcgaagagagtctggcaacgccggaccgggacccccgagggacctc

SEQ ID NO: 932860 - DNA, 120 bp, Artificial Sequence
  ENSG00000253404_1 (sequence is synthesized)
ttcctccccgccgcccacctcagaattccttcctccccggcccctagtgggagcttaggccgggagtgacccctgagagggaggaggagcggtgactcctggaacagcccgcgggcggag

SEQ ID NO: 932861 - DNA, 120 bp, Artificial Sequence
  ENSG00000253404_2 (sequence is synthesized)
cctgggcctacttgagagcggagggtgggaggagcgtgaggatcgaaaaactacctatggcttactacgcttattacctgggtgacaaaataatctttacaccaaacccccatgacatac

SEQ ID NO: 932862 - DNA, 120 bp, Artificial Sequence
  ENSG00000253404_3 (sequence is synthesized)
aattaatttatccatgcacatgtaccctctgaaccaaaaataaaagttggaaagtaaaggaaaaaaaaaatcaccctccagtgcttcccatctcactctgaataaaatttatttgatctc

SEQ ID NO: 932863 - DNA, 120 bp, Artificial Sequence
  ENSG00000253405_0 (sequence is synthesized)
agcggccggacggatcttggttgcaagagggagaaagaaaggccgggtgcctgggagggcgcggagctgctggagcgcggtctggaccgcgaccgcggcggtggcggtgggagctagggt

SEQ ID NO: 932864 - DNA, 120 bp, Artificial Sequence
  ENSG00000253405_1 (sequence is synthesized)
caccttgtgaagcgagcgctcctctgtgccgcaccgcctctgggaggaagccccattgccctcttctttctaagctgtcatcctcctgctgcaatcgtcattacagtaccgctggtgacg

SEQ ID NO: 932865 - DNA, 120 bp, Artificial Sequence
  ENSG00000253405_2 (sequence is synthesized)
tgggcctcgctcgattggggaggagagtgtgaaaacagacagagagacacacacactgagagagggagacacccaggcagaggggatgcaaatggaattccgcagaaagaaaagagagct

SEQ ID NO: 932866 - DNA, 120 bp, Artificial Sequence
  ENSG00000253405_3 (sequence is synthesized)
taacgcgcgcggcgagttccgcaggggcagcgggactcgatggccttaagttttccacagcctggcttcatcttgagatggctattcgtacaagaagtcgctttcccgtttgcctggacc

SEQ ID NO: 932867 - DNA, 120 bp, Artificial Sequence
  ENSG00000253405_4 (sequence is synthesized)
aatttggacctctgaccgacgtgcaaactggtcggagggctgcagcacccgggctgcccaagtgggccgcaattttacggtcctttatggactcctggcttccgcgcctccatgcctctt

SEQ ID NO: 932868 - DNA, 120 bp, Artificial Sequence
  ENSG00000253405_5 (sequence is synthesized)
acaccctgccagccacaaactgcccggatcggcgtttgatcttgccctcgcctggggaaagtgtcttccccgagcaattgaagcattccccgagcagttgaaacactgggtgcttggggt

SEQ ID NO: 932869 - DNA, 120 bp, Artificial Sequence
  ENSG00000253405_6 (sequence is synthesized)
ctcagtcccgccaatgccagaacacagtaggagacccccgccagaacgcagatagcagagagagttgctcagtaccgctggtgacgccactcggcgagcgcaagtggataaatagaaacg

SEQ ID NO: 932870 - DNA, 120 bp, Artificial Sequence
  ENSG00000253405_7 (sequence is synthesized)
tctgccacagcgaagatgaaaggaaacccgcagctaatggctcggcagtgatgcgccagatggccttaagttttccacagcctggcttcatcttgagatggctattcgtacaagaagtcg

SEQ ID NO: 932871 - DNA, 120 bp, Artificial Sequence
  ENSG00000253405_8 (sequence is synthesized)
gggcccagggaaaaaaggcttggcctcatagaagcggcaaagggctcctggggcatctgcagcctccctggccaacaaaaaagtgggggcagggagagatggagccgcaagttgagaagt

SEQ ID NO: 932872 - DNA, 120 bp, Artificial Sequence
  ENSG00000253405_9 (sequence is synthesized)
gtcacaaagctgggaatgaggaaagagatcaggtgctggcagacgccagacccagaagatgctgtgtagtcgaggctccaggtcccatgccaaggggctggattctccctggtagtaaat

SEQ ID NO: 932873 - DNA, 120 bp, Artificial Sequence
  ENSG00000253405_10 (sequence is synthesized)
catctctcactctctcctccaaatgactgatggccttaagttttccacagcctggcttcatcttgagatggctattcgtacaagaagtcgctttcccgtttgcctggacctcgcctgcac

SEQ ID NO: 932874 - DNA, 120 bp, Artificial Sequence
  ENSG00000253405_11 (sequence is synthesized)
tccagtccctgcctaggggcagtggtacctgtctccaaaagtggatggcgtttgaggtagaagagagtgaagtcgctgaaaatgccctaaaacagcaaggaagaagctggtataaaactc

SEQ ID NO: 932875 - DNA, 120 bp, Artificial Sequence
  ENSG00000253406_0 (sequence is synthesized)
acacaaagctgtctaattcagtatttaaaacagagcagggactcaaaaagcaacatcagagttggagtagcttgtggaagaagcaagtgaagttctgtaaagcagtcttattaatgagag

SEQ ID NO: 932876 - DNA, 120 bp, Artificial Sequence
  ENSG00000253406_1 (sequence is synthesized)
tgaactccaccaggacagcaagcatgcttgcctcactcatctctgaatgcccaacatgtagcagagagcctggcacatagcgtggcccccagtttgagtggatcaatgaaagacgatgat

SEQ ID NO: 932877 - DNA, 120 bp, Artificial Sequence
  ENSG00000253406_2 (sequence is synthesized)
gttatcctcattttacaggtgaagcaagagatccagagaaggaagccacttctcaaggtcacagcctattagtggaattgctgacgcttgaacccgggagtcctggctctcagccacttc

SEQ ID NO: 932878 - DNA, 120 bp, Artificial Sequence
  ENSG00000253406_3 (sequence is synthesized)
tttacactcctgagctacccaggagcagggttttcttgccaattctgggggatatcatattgaatcctggtgtccccacttggtgagggtgtccaaggcccagatctcagtggtagcaga

SEQ ID NO: 932879 - DNA, 120 bp, Artificial Sequence
  ENSG00000253406_4 (sequence is synthesized)
acccccacaagacactcacagcccaagtgagcgtgactctagcactgcttggcctggtccccctcattccaggatcacttagcatcctttcaggcaggtccttgaatgccctgcaattac

SEQ ID NO: 932880 - DNA, 120 bp, Artificial Sequence
  ENSG00000253406_5 (sequence is synthesized)
tcccactctcccaggagccaggagagggatggggataattaatgagaaggtgacaggctcatcttcattactaagaatatctcccacccttggaggcatttccactgtaggtttaatggt

SEQ ID NO: 932881 - DNA, 120 bp, Artificial Sequence
  ENSG00000253406_6 (sequence is synthesized)
gcattctctctcaggatcacaaagctatgcactttacttccttgcttaactcttttagcacctgtgggaagttggaagaatgaaagcactaacctgtgaggctgtgagctccatgagggc

SEQ ID NO: 932882 - DNA, 120 bp, Artificial Sequence
  ENSG00000253406_7 (sequence is synthesized)
agggcctttgactgatttgctcactgccacaccttcagttgtgagaacagcagcggggacacagtagatcctcaatagatatttgctaaatgaatgattgaaatgggagcttcccatgtg

SEQ ID NO: 932883 - DNA, 120 bp, Artificial Sequence
  ENSG00000253406_8 (sequence is synthesized)
tcacgaaattactacacctatatcttatagcaactgttctcggtctattttacatattagacagccaagtttcagagagttacgagacttgcccaaggtcaaaaacttagtaatcagtgg

SEQ ID NO: 932884 - DNA, 120 bp, Artificial Sequence
  ENSG00000253406_9 (sequence is synthesized)
agccaggatcccccctgaggcactctgggtgaaagcacccaacagggaaagattaagattaggaattcaggcagggaggcaaagacgtggtttattctagtgatatccaggtagggatga

SEQ ID NO: 932885 - DNA, 120 bp, Artificial Sequence
  ENSG00000253406_10 (sequence is synthesized)
gaatgggagggcagtttcaatactaggaggtttgttcaccagggaaggaggagaggaatattgtgcaacaaattttcaagccaagtgcaaactccaggttcccatggtggtcaggatgaa

SEQ ID NO: 932886 - DNA, 120 bp, Artificial Sequence
  ENSG00000253406_11 (sequence is synthesized)
ggcagggtgcaggttgctgagcctcataacactggttcctgcagcaggaatcactcaagaacccaggcaatgagggattggtgtgcacaggaagggacagggacctgaatatcaggcagg

SEQ ID NO: 932887 - DNA, 120 bp, Artificial Sequence
  ENSG00000253406_12 (sequence is synthesized)
gcctgggtcccaggggtaaagtggaaagaaccctggaggggagacgcaaggccaggccctgctctgccctgacgcactcccattctcacacaagtctcttcttttctctgggtctatttt

SEQ ID NO: 932888 - DNA, 120 bp, Artificial Sequence
  ENSG00000253406_13 (sequence is synthesized)
ccccatctctacaatgagggttggcactttacagtttagagtgactctgggatccttaccactccagcatcagttcatataagtaagtagacagcatcttagaaatggtcactttgttta

SEQ ID NO: 932889 - DNA, 120 bp, Artificial Sequence
  ENSG00000253406_14 (sequence is synthesized)
atccaacataggaattcctgctccaggattcttagcagatggcacaagtttctgttgggtagctctgggccagtggttctccactgaggatgattttgaccccctagggacatgtggcaa

SEQ ID NO: 932890 - DNA, 120 bp, Artificial Sequence
  ENSG00000253406_15 (sequence is synthesized)
tatctgagacatttttgattgtcagtgggaagaagcacgtggttggcatctaatgggtagagaccaaggatggtaccaaataccctacaatgcacaggacagcccacagtgtcaccagtg

SEQ ID NO: 932891 - DNA, 120 bp, Artificial Sequence
  ENSG00000253406_16 (sequence is synthesized)
ctgaggctaaggaactcagctgtaggcacagggggactcattgcatcttgagggaactcatggctgtgggcattgtggctaggacaagctgatactgacacactccctgtaactgctgcc

SEQ ID NO: 932892 - DNA, 120 bp, Artificial Sequence
  ENSG00000253406_17 (sequence is synthesized)
ctggccttagatctacctggaggaagggccctaattccttctcaagatggctatccaatcacagcgattccaccaatgacattcacctgtggagggagtatgcatgggccagggtcaggg

SEQ ID NO: 932893 - DNA, 120 bp, Artificial Sequence
  ENSG00000253406_18 (sequence is synthesized)
ggggatgggggaagagaggactgtgttaaattgtgggtggggttggggaaatcctgggtgcctatgaagcatgtagtgactgaactgggcctcaaatgataggatttccaaagaagggca

SEQ ID NO: 932894 - DNA, 120 bp, Artificial Sequence
  ENSG00000253406_19 (sequence is synthesized)
caggaagacaagggaaagggccatgagttcattttaagtccaaacaaagtctctccacaaggcccagcccatacaccctgcttgcctcctggctgcatctcacttctgtctgcgccctgg

SEQ ID NO: 932895 - DNA, 120 bp, Artificial Sequence
  ENSG00000253406_20 (sequence is synthesized)
ccacacaggctccacttgcccttatgcactcgccatttcttcacccacctcagagtcttgcaggctctgtcctctcattttggtgcatcctattccactttttgttcagttgctatggtc

SEQ ID NO: 932896 - DNA, 120 bp, Artificial Sequence
  ENSG00000253406_21 (sequence is synthesized)
tggatgtttttgtgtcccccacatccatatgccaaaattcgaacccccaaggtgatggtcttaggaggtagggctatttgggaggtgattaggtcatggaccagtgtccttataaaagag

SEQ ID NO: 932897 - DNA, 120 bp, Artificial Sequence
  ENSG00000253406_22 (sequence is synthesized)
gcgccagagagctgccttgccccttccaccatgtggagacacagagagaaggtgccatctctgagaaagtgggtccacatcagataccaaatctattggacccttggtcatggacttccc

SEQ ID NO: 932898 - DNA, 120 bp, Artificial Sequence
  ENSG00000253406_23 (sequence is synthesized)
agcttccagaactgtgagaaatagatttctgcttataagctgccctgtctgtatctcagtctgctgaggttataacagcccagatgaactacaacatcagttaacacccactcatggtct

SEQ ID NO: 932899 - DNA, 120 bp, Artificial Sequence
  ENSG00000253406_24 (sequence is synthesized)
ggatctcagctcctggcccttcgtcagggagccctcctggggctcctcctaccccgttatgtgctctcaaaggcccacacttctctccttcataacacttaccacagctgatgtttattt

SEQ ID NO: 932900 - DNA, 120 bp, Artificial Sequence
  ENSG00000253406_25 (sequence is synthesized)
atgtgattatggattaatgcccatctccttcaggggactgtagggctgggtgagcctcaccatggacgctggcacagagcctacacatggcagggctcaagaaacaatcattgagtggat

SEQ ID NO: 932901 - DNA, 120 bp, Artificial Sequence
  ENSG00000253406_26 (sequence is synthesized)
gaataaatgatcaaaagttagctttggtagcttaggtgtcgggtatgttcaaggctacaaaggaagcctgggaccttggcaagattttaaatgctaggctgaagtgtttgtagctaaata

SEQ ID NO: 932902 - DNA, 120 bp, Artificial Sequence
  ENSG00000253406_27 (sequence is synthesized)
ggcagacagggaggggctctgaagagcagggcagtgccaagagcacgtgatgccctgggatggtgggctgggcagagggtagaggactgagcagaatctggagactaattaggggactgt

SEQ ID NO: 932903 - DNA, 120 bp, Artificial Sequence
  ENSG00000253406_28 (sequence is synthesized)
tgtaagaatcctggggtaagagggctgggaagcagcagatggaaagcagccctggttagctttgtggggacgactggcactcctcattcctctgtgtgttctgagagtccctgggaagcc

SEQ ID NO: 932904 - DNA, 120 bp, Artificial Sequence
  ENSG00000253406_29 (sequence is synthesized)
ctgagcagcagcctggcatgatgctctgagatgtggggagaaggaggtagagtagaggctgtgatgctatagacactttgcaacccaggcatccctctgaggttctctgaccccttgggc

SEQ ID NO: 932905 - DNA, 120 bp, Artificial Sequence
  ENSG00000253406_30 (sequence is synthesized)
ctgtgcagctcagcttcccacccccaaggcagagccaggagagtctgctcagagcactgccagggaagcagtccagctgggcagcgggtggaggtgcacagagacggaaggcagattaca

SEQ ID NO: 932906 - DNA, 120 bp, Artificial Sequence
  ENSG00000253406_31 (sequence is synthesized)
tgtcacttcatattagccacaccggcaaccttcccaatccacccagagaggggccaattaattgcaattctgaggacaaggcaaaagccaagataacactgaacctgaagccaagataac

SEQ ID NO: 932907 - DNA, 120 bp, Artificial Sequence
  ENSG00000253406_32 (sequence is synthesized)
actgaacctgaagatcgcatctcctttccagtcatgagcaggtcggaaggccttacagagggtcagatttacttacctgtgaggtacatttcctctccttcggtgaacatctggtggcag

SEQ ID NO: 932908 - DNA, 120 bp, Artificial Sequence
  ENSG00000253406_33 (sequence is synthesized)
cgtacacacctggcacaggttgggtggtagtgcttccctcctgcctatggaaatgaaaagatgaaacaggaggtcagagccagggctgctgtctagtggggcagattgggtttgaatctt

SEQ ID NO: 932909 - DNA, 120 bp, Artificial Sequence
  ENSG00000253406_34 (sequence is synthesized)
tcctgggtacattagtgttgtttgcatcttcatggccctaaagttggttggagctacccaagggagtccacaaccatctaaaagaccagccgggaagcttcgtgattcactccatggatc

SEQ ID NO: 932910 - DNA, 120 bp, Artificial Sequence
  ENSG00000253406_35 (sequence is synthesized)
cctgatggcagttcaggggacttccctgaatacctgctcttctattctgacactgggaaggacacttgagaggccactggtccaacttcctcatttccagaggaggaaacaggcttgctt

SEQ ID NO: 932911 - DNA, 120 bp, Artificial Sequence
  ENSG00000253406_36 (sequence is synthesized)
tgaggacatcccagcatttccccaagtgagaggcccttaccactaatgttacatgaaatgattttaagtggtacatgaacttgggatttaataacattggaccaatggaaaaaaaaaaaa

SEQ ID NO: 932912 - DNA, 120 bp, Artificial Sequence
  ENSG00000278084_0 (sequence is synthesized)
gaggaagaattgcccaaataacttgttctttgtggctagaaaatgcttacatggaactcaccaggccacattcatattactatgtttgtgatcatccaaacataaaaccagttcctaggc

SEQ ID NO: 932913 - DNA, 120 bp, Artificial Sequence
  ENSG00000253400_0 (sequence is synthesized)
ggggttatacgctctgcttagcttcagccatgttggcctcactaaaagttaatccatagttatttaagtggaaattttcagaaaatccatttcggagcaaatgttatgtgagagtctaaa

SEQ ID NO: 932914 - DNA, 120 bp, Artificial Sequence
  ENSG00000253400_1 (sequence is synthesized)
cctctgtttgattgaatatcaggtgccctgatcatatttaccagtgggtcagattcctctaagatgtaacagctgtgtaaaggaacacaggctacaacctttgccagaaagactgtcgcc

SEQ ID NO: 932915 - DNA, 120 bp, Artificial Sequence
  ENSG00000253400_2 (sequence is synthesized)
aaagtcatctgaccatcagatctggaggtgtgagacagaagacaaatgtgaggacaaccgggaacaggaggaataagctactgaagtaagaagataccagtcctcgtcccctgacacaca

SEQ ID NO: 932916 - DNA, 120 bp, Artificial Sequence
  ENSG00000253403_0 (sequence is synthesized)
gtatcaactaaaaccaagtaattatatattttggatgtattatttgactctcagaagcctgttgtaacttacagctcccaaacttgagtggacaagcatgcccatccataggaaagttaa

SEQ ID NO: 932917 - DNA, 120 bp, Artificial Sequence
  ENSG00000253403_1 (sequence is synthesized)
agttcaagttttcattgctacttactataaataccctcttatgaatgctacagccatctgtacctggaacagagtccccagaacacctactggtccatcctcaatgtaaaaggtggagag

SEQ ID NO: 932918 - DNA, 120 bp, Artificial Sequence
  ENSG00000253403_2 (sequence is synthesized)
catcagcctttccaaatgacctctttactgttttaataaaatatactgataatgatgttgccacaaaagacaattatgctttaggttttatagacatactcaataaacttttatatggaa

SEQ ID NO: 932919 - DNA, 120 bp, Artificial Sequence
  ENSG00000205018_0 (sequence is synthesized)
aagcgatgccaggggcaggtgagggtcggacgcgctcaggcccagccctcgccccttcaggtctgggggacacagtggagtcccagcctcaagaagtttccccaacctctcagaaacttg

SEQ ID NO: 932920 - DNA, 120 bp, Artificial Sequence
  ENSG00000205018_1 (sequence is synthesized)
aagggcaatgccaggtaccgaaaaaccggcccccgccccttatccccggccgacccgtccgccgaggtggctgccctgggaacctcctgttcctcgtccaggagaggaaacgcacacccg

SEQ ID NO: 932921 - DNA, 120 bp, Artificial Sequence
  ENSG00000205018_2 (sequence is synthesized)
ggccggacgcacagaagccgcaccctggctggggccacaagcctgacagctaccgacaagcccccacccacaggagcacgcgacgtgctctcttttcaagggaaaggtttttcttcctgg

SEQ ID NO: 932922 - DNA, 120 bp, Artificial Sequence
  ENSG00000205018_3 (sequence is synthesized)
gccctggaatgggcctgaagtcagccggcctcagcccacagggtgaatgaggggtgggcacagcccggccgcggccccagcacacacgggcggacgcaggggcgggggagcgccagcccc

SEQ ID NO: 932923 - DNA, 120 bp, Artificial Sequence
  ENSG00000205018_4 (sequence is synthesized)
gcagtgtgttcggagcccagcggctctgagtcgccgccaccagcctggccgccttctgctccacgtctgttcacccgtcccctggaccggcaccgccacagagggtcagagtgttggcac

SEQ ID NO: 932924 - DNA, 84 bp, Artificial Sequence
  ENSG00000205018_5 (sequence is synthesized)
gtcagagtgttggcacctgtcttccgggtcagttcacccgtcccctggaccggcaccggtcagttcacccgtcccctggaccgg

SEQ ID NO: 932925 - DNA, 120 bp, Artificial Sequence
  ENSG00000205018_6 (sequence is synthesized)
tggcacctgtcttccggatctgttcacccctcccccggaccggcaccgccacagagggtcaggagtgttggcacctgtcttccgggtcagttcacccgtcccctggaccggcaccgccac

SEQ ID NO: 932926 - DNA, 85 bp, Artificial Sequence
  ENSG00000205018_7 (sequence is synthesized)
cacccgtcccctggaccggcaccgccacagagggtcaggtcccctggaccggcaccgccacagagggtcagagtgttggcacctg

SEQ ID NO: 932927 - DNA, 72 bp, Artificial Sequence
  ENSG00000205018_8 (sequence is synthesized)
ggcacctgtcttccggatctgttcacccgtcccctggaccggcaccggtcccctggaccggcaccgccacag

SEQ ID NO: 932928 - DNA, 73 bp, Artificial Sequence
  ENSG00000205018_9 (sequence is synthesized)
tggcacctgtcttccggatctgttcacccctcccctggatcggcaccgggtcccctggaccggcaccgccaca

SEQ ID NO: 932929 - DNA, 72 bp, Artificial Sequence
  ENSG00000205018_10 (sequence is synthesized)
acccgtcccctggaccggcaccgctcgcctggaccggcaccggcacagagggtcagagtgttggcacctgtc

SEQ ID NO: 932930 - DNA, 72 bp, Artificial Sequence
  ENSG00000205018_11 (sequence is synthesized)
tcacccctcccctggaccggcaccgctcccctggatcggcaccggcacagagggtcagagtgttggcacctg

SEQ ID NO: 932931 - DNA, 85 bp, Artificial Sequence
  ENSG00000205018_12 (sequence is synthesized)
acccgtcccctggaccggcaccgggtctgttcacccgtcccctggactggcaccagcacagagggtcgagtgttggcacctgtct

SEQ ID NO: 932932 - DNA, 120 bp, Artificial Sequence
  ENSG00000205018_13 (sequence is synthesized)
actggcaccagcacagagggtcgagtgttggcacctgtcttctgggtctccatccctccctttgtttgttgagtgactgcatgttctcatttccttatcatacaattctttgagaggtat

SEQ ID NO: 932933 - DNA, 120 bp, Artificial Sequence
  ENSG00000205018_14 (sequence is synthesized)
cattagctgcgtcttattttattttcaccttcttttctgttacctgtatgtttgaattttcctataagtatttttgtttcatctttgcttttttaaattaaaaaatcagttttaaaattg

SEQ ID NO: 932934 - DNA, 120 bp, Artificial Sequence
  ENSG00000257534_0 (sequence is synthesized)
ggctctccctcctttgtctctcagctggtgctccaggctttcttgtccacccctgtccacagagccaggctgcaccttgttcatgcccatggggttgccactcaactttcagaggatttg

SEQ ID NO: 932935 - DNA, 120 bp, Artificial Sequence
  ENSG00000257534_1 (sequence is synthesized)
acggccccatcctggcatctcccgatgctgagtgccggcaggttctggttaatgttcagtcttatacctgctactccatttgaagtctctttgcttgacatcactagagaaggagagaac

SEQ ID NO: 932936 - DNA, 120 bp, Artificial Sequence
  ENSG00000257534_2 (sequence is synthesized)
tgactaccatactgggttttatcacccttccaagagccgagctttgggtggttttctggaaacccatcccatacatgtgggatgtaggtaggttctgtcctcctgagagaggctcagact

SEQ ID NO: 932937 - DNA, 120 bp, Artificial Sequence
  ENSG00000257534_3 (sequence is synthesized)
atgaaagacctagaatgtaggtgacctagagcggaggctgagtgaaacctccaaaaagtaggccaaagtcagggtggaagaaccctgaaggataaaggtactccctaaaagtgagacttg

SEQ ID NO: 932938 - DNA, 120 bp, Artificial Sequence
  ENSG00000257534_4 (sequence is synthesized)
tggaagctgtggttggaaccctcaaaccttccatgtgtggccctggctcaggaatatgatatgactgcaggggtccacactggatctgggggtgcagtgggactggaggggtcattgttc

SEQ ID NO: 932939 - DNA, 120 bp, Artificial Sequence
  ENSG00000257534_5 (sequence is synthesized)
tatcagtgttccttgcttctctggcttcctcccctctttctctgactcctttggtggcttctccctgccactccctgcctgtcccctgctcccttctctttgccatgttctcccctgtgg

SEQ ID NO: 932940 - DNA, 120 bp, Artificial Sequence
  ENSG00000205015_0 (sequence is synthesized)
atgcagtggaggagaggacagacgtccggaactgggtagagatgggcctgccgtgggtgcgatctgctggggacacagacccacgcagcaggggagaggacagacgtccggaactggtgc

SEQ ID NO: 932941 - DNA, 120 bp, Artificial Sequence
  ENSG00000205015_1 (sequence is synthesized)
tgtcccacgtccccacccctgtggccagctccgcccactcagcctcagccttgctggggcctggcccgacctcaggagtccctgctggcctggccacccttgtgccttcgcctcagccat

SEQ ID NO: 932942 - DNA, 120 bp, Artificial Sequence
  ENSG00000205015_2 (sequence is synthesized)
cggggaggctcgggtggtctcagggccaacgccaggtgagacctcagggggggtcaggggcttctgaacaaaaacggcacccccatacctgatggggctcctctgagcccacctggactg

SEQ ID NO: 932943 - DNA, 120 bp, Artificial Sequence
  ENSG00000205015_3 (sequence is synthesized)
accccctgtggccgccaggggcagctggtggcctgcctgaatgtgggggcagtgtcacccctgagcccagagagccggagcacagcagggtccaggatggccccagctacagacactgcc

SEQ ID NO: 932944 - DNA, 120 bp, Artificial Sequence
  ENSG00000205015_4 (sequence is synthesized)
tggcttcctccacaccccgagatccagctgcgtctcctctgtcccggggaaacttacgggaaacttatgggcggaagtccctctgcagggcccactacccagagccagccacatgcactc

SEQ ID NO: 932945 - DNA, 120 bp, Artificial Sequence
  ENSG00000205015_5 (sequence is synthesized)
gggctcaggggccgtgggggctggtggccccagcccttctggatccactccccacccctcactcactccgtggggaccttcatctgcctagatgggctggtctgtgctctgacggcccca

SEQ ID NO: 932946 - DNA, 120 bp, Artificial Sequence
  ENSG00000205015_6 (sequence is synthesized)
ggactgggtgtcggcctcaccccagcgccctggcggcctcccggccagagtagaatgttggaagggcatggcccatggccgacgccaggctcccggccagggcccacctgtgtttgtctc

SEQ ID NO: 932947 - DNA, 120 bp, Artificial Sequence
  ENSG00000205015_7 (sequence is synthesized)
ctcaccccggcctcctccagcctcaggccctgcctgtcagacaggggcacttgcccaggggctcctcagggagcagttggtacctgcagagcaagcccccagagcccctgccacaggcac

SEQ ID NO: 932948 - DNA, 120 bp, Artificial Sequence
  ENSG00000205015_8 (sequence is synthesized)
cccagcctcaggtcaggtctggaatggacacagcccccagaccaagaccagggcctcctcaccccggggtcccctcccttggtgtcgggtgtcacccaaactccctggacgtcacccttc

SEQ ID NO: 932949 - DNA, 120 bp, Artificial Sequence
  ENSG00000205015_9 (sequence is synthesized)
tgccctccacgccccacaccctgggtaggagccgccttcacagctgctaacccctgccctccagcccccactgcctcttcggtaacggggctgtgactggcctaagccctgggcctccac

SEQ ID NO: 932950 - DNA, 120 bp, Artificial Sequence
  ENSG00000205015_10 (sequence is synthesized)
agggcccctgtccagcccaccttgctcaaccgcagcgttccgcatcacgcctgccccttagtggttggggtgtgcatgtatatttatacactgtaattacataaatacaatttaataatc

SEQ ID NO: 932951 - DNA, 120 bp, Artificial Sequence
  ENSG00000257530_0 (sequence is synthesized)
agctcctgtttgaggctgtcgtactcagcctccagttcatcatactgctgtttgagggtcagcttctcctccagcaccaccagcccgtactcggcagcctggatcttctcgtgggtggtc

SEQ ID NO: 932952 - DNA, 120 bp, Artificial Sequence
  ENSG00000257530_1 (sequence is synthesized)
tctgacctctgacacgttgatgaatgatgatgaactgctgaaaagagatggaacctgcaattgcagggtctccatcacttaggctggagtggagtggcatgatcatgactccctgcagcc

SEQ ID NO: 932953 - DNA, 120 bp, Artificial Sequence
  ENSG00000231183_0 (sequence is synthesized)
agagaatggggagcacacccaagcctgagacaacagctctgctaagtgcccttgagagggcacggtggggtcagcaccaaagccagaccactaaagagaaaaagagagaaagacaggatt

SEQ ID NO: 932954 - DNA, 120 bp, Artificial Sequence
  ENSG00000231183_1 (sequence is synthesized)
gcagaggagaaatgagaatggcagaaaaaataattttttaagccaaaaggaatcagagaagagcagaagtgcctctaggataaagcgtagcaggcagttagggaaaaagggctgttaatt

SEQ ID NO: 932955 - DNA, 120 bp, Artificial Sequence
  ENSG00000231183_2 (sequence is synthesized)
accttgaagctctgactacattagaaagcctcgcaagacagtcgttgcttgcacgggcaggtagagaacttttcctgtccattgttcttctgaattataaatcactgacctctttatgat

SEQ ID NO: 932956 - DNA, 120 bp, Artificial Sequence
  ENSG00000231183_3 (sequence is synthesized)
ttctaaagggaaaatgacttcaagcttcttagagttcccctaaggcattctctatattcaatataatatgggaagccctgggtttgtctttgtatgtttcatctgcagtgacctgaaatc

SEQ ID NO: 932957 - DNA, 120 bp, Artificial Sequence
  ENSG00000231183_4 (sequence is synthesized)
ttctccacttatcaactaaggggtggttggcaataaggatgggtgggagagaaaaaaaaacagaatttgaggaggagagcatttaaaccctcagactgtgtgttctgtgacatcaaagac

SEQ ID NO: 932958 - DNA, 120 bp, Artificial Sequence
  ENSG00000231183_5 (sequence is synthesized)
tggcaacattctaaaggaaaagcagctgtgaagtcataattatgttcacttcccactggcaactggcaagccctttatttttgtgcattcggaactcaccaagaataaataaagtccatt

SEQ ID NO: 932959 - DNA, 120 bp, Artificial Sequence
  ENSG00000231183_6 (sequence is synthesized)
ccctccttgaggggctattctgccattccatctaggatttaaaagtttgccaattcctaaaacatctattgttatcaatagtcttgtgtctttcacaaagcggactttacaaaataagat

SEQ ID NO: 932960 - DNA, 120 bp, Artificial Sequence
  ENSG00000231183_7 (sequence is synthesized)
gccatgtccagccaaataaatgagactgaacttcatggttgttgtttttacttcatcccggcaaaagaaatgaaattaaatataaaaagcagatgaccaaataaagtccaaatgaattaa

SEQ ID NO: 932961 - DNA, 120 bp, Artificial Sequence
  ENSG00000231183_8 (sequence is synthesized)
aaaatgtgaaagaaataatctatctcaagaccttgctgttcttgactgttcaaaaattctttaaataaaatataatatggaagctgtgctctgcatgtcgagaccatttcactgttgagc

SEQ ID NO: 932962 - DNA, 120 bp, Artificial Sequence
  ENSG00000231183_9 (sequence is synthesized)
cttcacagccagaaaacaggctcaaaataattagacttgaacaaaatcacattatttactttttgctttaataaggaggtgattattagaagatgaaccatgactaccaagatagcagat

SEQ ID NO: 932963 - DNA, 120 bp, Artificial Sequence
  ENSG00000231185_0 (sequence is synthesized)
aatgaatggagggcggcggcgactgctgcagctgggccagctgcgcgggctgcaccccctcccagcctgcgagaggaggaagctagtagaagatttgtaccaacaaaaccaaggagtaaa

SEQ ID NO: 932964 - DNA, 120 bp, Artificial Sequence
  ENSG00000231185_1 (sequence is synthesized)
caacttgagaataactgcatgagctcagggcttggactgtcagattccatttctaagcttccagaagagcgacacatagacactggggaagtcagagcctttgaactccaatgccatccc

SEQ ID NO: 932965 - DNA, 120 bp, Artificial Sequence
  ENSG00000231185_2 (sequence is synthesized)
tccatcttctaaaacccagaaaattgtgtgtaacacatgatgactgaaagggagtaggctgaccagttaagagcctgccactggaatggaaggctgtgggaaggtgaggggacggtggac

SEQ ID NO: 932966 - DNA, 120 bp, Artificial Sequence
  ENSG00000231185_3 (sequence is synthesized)
atcaaccgggaagagctgaaagatggcgttaccagaacaacttccagtaaaagaaggcactgaggtttaagtgctacgtgggagcagttgccgatttttgcaatgggaggctgcatagat

SEQ ID NO: 932967 - DNA, 120 bp, Artificial Sequence
  ENSG00000231185_4 (sequence is synthesized)
gcccagaagtcctgggatttacacctctagtagaaaccctcaaccagagaaggatggaagtcaatgggtgaccctgcagcctgtgagaccatcttggcccttgtcagggcagccatttgc

SEQ ID NO: 932968 - DNA, 120 bp, Artificial Sequence
  ENSG00000231185_5 (sequence is synthesized)
cattgcagatgaagggtgggggagaggccagagactccttcagactgtgttggaaatgtcatgaaaatggaaattctcacaacctgagagtcatagacctggatttgggtttctgctgtg

SEQ ID NO: 932969 - DNA, 120 bp, Artificial Sequence
  ENSG00000231185_6 (sequence is synthesized)
tggtccccagttgtcttctctgtaaaatgaagctgttaagagctctgatctcatcacgttgccatgagaaaggaataggacaaggtccaggagggagcttgcatataatgagtgctagga

SEQ ID NO: 932970 - DNA, 120 bp, Artificial Sequence
  ENSG00000231185_7 (sequence is synthesized)
aatgtcagctatcattatccttgttaatatgaacctgtgtttagtgggttgattttctgaactttgatagcagttggggtttcacggagcatttgggatgaataaacaagcatctctgga

SEQ ID NO: 932971 - DNA, 120 bp, Artificial Sequence
  ENSG00000231185_8 (sequence is synthesized)
cgcacaccatcacatcctacataatatttagctctgaggcgtttccagatgggaagtgcgtttctgtattttcatagccgtgttctctacgtgaatggactggcgtgaagctgggggctg

SEQ ID NO: 932972 - DNA, 120 bp, Artificial Sequence
  ENSG00000231185_9 (sequence is synthesized)
ggctggcagggcagaacaacttccagtaaaagaaggcactgaggtttaagtgctacgtgggagcagttgccgatttttgcaatgggaggctgcatagattcaagtgtgagaattcgaaga

SEQ ID NO: 932973 - DNA, 120 bp, Artificial Sequence
  ENSG00000231185_10 (sequence is synthesized)
gattcaaagactatatcaccaccatggtcttgccagaatctgccctctgagtcatttcttaatctactgattatctgtagaaccagccttatataaacaaggaagcatctagcaggtgag

SEQ ID NO: 932974 - DNA, 120 bp, Artificial Sequence
  ENSG00000231185_11 (sequence is synthesized)
cgttaccagataaggaaactgagtctcagggaggtcaagagacatgccaaagcacagcttggaagtggtccattggattcgaaggggtcctcacacgaagcaggaagtcaccctgtatct

SEQ ID NO: 932975 - DNA, 120 bp, Artificial Sequence
  ENSG00000231185_12 (sequence is synthesized)
cctcaaccagagaaggatggaagtcaatgggcagagtgctcgggagacctttacctgttttacctgattacatcctctgaggtatgtgccatttatacctggggaaactgaggctcagaa

SEQ ID NO: 932976 - DNA, 120 bp, Artificial Sequence
  ENSG00000231185_13 (sequence is synthesized)
aaatgaccttgtctgtggtcacacagctggtaaggggtaggaatggaatttaaacccagttgtctaacttcagggcccacatttcagccacaactgaggtttttcctaacctaaccccat

SEQ ID NO: 932977 - DNA, 120 bp, Artificial Sequence
  ENSG00000231185_14 (sequence is synthesized)
cttttaccccctgggggtggcctcacttcctctgggggctctgacagctctctggcctgtcttcagcttagaaatctgcaaaagtcattggccaggctcaggagaactaatcctttgtgc

SEQ ID NO: 932978 - DNA, 120 bp, Artificial Sequence
  ENSG00000231185_15 (sequence is synthesized)
cagaggtccaaagatagacaactaactcaaaattgtatcttcgctttaatcactgctctggtgatatttgcattaatgaaagagaaaagaaagcatccccaacagatggaaaaggcggct

SEQ ID NO: 932979 - DNA, 120 bp, Artificial Sequence
  ENSG00000231185_16 (sequence is synthesized)
cctgctgatggctcactgtgtgccaagtgctgtgctgggcaccaggcatattgaacgggtcctggttactgccctctggtgcttacgctccatcaagagaagtagacaggaagcatctaa

SEQ ID NO: 932980 - DNA, 120 bp, Artificial Sequence
  ENSG00000231185_17 (sequence is synthesized)
tgaaactaaggacaaataggagaaaagtcggcaaaaagataagggagagagaaatagggaaaaaaagcgatcaaatgccagaaatggggctgaaaagatgtagaagtggtttctaagcat

SEQ ID NO: 932981 - DNA, 120 bp, Artificial Sequence
  ENSG00000231185_18 (sequence is synthesized)
gggtttatcatctcttttctcatctttgcatcaactacatgagtttttccaagcgtggtctgtgagtctcttgcatcagaattccctggaagtacagtcagtcctctgtgtccaccagtt

SEQ ID NO: 932982 - DNA, 120 bp, Artificial Sequence
  ENSG00000231185_19 (sequence is synthesized)
attccctggaagtacagtcagtcctctgtgtccaccagttctgcatctgcagattcaacccactgtggatagaaaatattggaggctgggtacagtggctcatgcctataaccccagcac

SEQ ID NO: 932983 - DNA, 71 bp, Artificial Sequence
  ENSG00000231185_20 (sequence is synthesized)
tcacttgaacctgggagacgaaggttgcgactctatctcaaaaaaagaaaaagaaaatattcggaaaaaaa

SEQ ID NO: 932984 - DNA, 120 bp, Artificial Sequence
  ENSG00000231187_0 (sequence is synthesized)
gggaggctgtcgctcgggtccggctgcgggccacaggccgcggatcgcgctctgccagcgccccacgcccgcaagcgcggcccctccgccacctcgcggcccggcctgacctgttaatca

SEQ ID NO: 932985 - DNA, 120 bp, Artificial Sequence
  ENSG00000231187_1 (sequence is synthesized)
cgtccccacggctctcctagcggggacaccgccgtctgcaggctccgtccccacagtgcccagaccccgggaagtttgtcagtcagcaccctgatgccagccgattctcaaaaagccagg

SEQ ID NO: 932986 - DNA, 120 bp, Artificial Sequence
  ENSG00000231187_2 (sequence is synthesized)
aggatccaagcagatgatttgccagacggtactgcagcaatggagatgaacagataattcacacagaaagaaggacgagggattggatcaagctggggcgagatagagtggggaagtgat

SEQ ID NO: 932987 - DNA, 120 bp, Artificial Sequence
  ENSG00000231187_3 (sequence is synthesized)
gagctaagaaaaattagcctgcaagcatgacgtgtcgcacgtcagcaaggctgcagccttggattctgatgtcttgagaagagcgattcacctgtgaattctcacagccctggcctcaga

SEQ ID NO: 932988 - DNA, 120 bp, Artificial Sequence
  ENSG00000231187_4 (sequence is synthesized)
aagacggcccgggaccaggcccgatggcacccctcttcccagctctcagccagggcggaaggcacaagtgatggccctggcctccgcagtcacactcctcctgaaagctgactggctgaa

SEQ ID NO: 932989 - DNA, 120 bp, Artificial Sequence
  ENSG00000231187_5 (sequence is synthesized)
cctcacctcttggctagcttgccacccagctcttgagaacatgtttgtccaaggcctcttggcaggtctcgatgactccttcccctaagggcccccagtcacctgctaaggctcccaggc

SEQ ID NO: 932990 - DNA, 120 bp, Artificial Sequence
  ENSG00000231187_6 (sequence is synthesized)
ccctgtgaaactggctcggtgccccaatagactctccacctccagaccctaagccggccagcccagagtgcagcaaggcaccacacctaccctgtgagggcactcgggccccgcgctggc

SEQ ID NO: 932991 - DNA, 120 bp, Artificial Sequence
  ENSG00000231187_7 (sequence is synthesized)
ctctgacagcacaggaagcttctgcattcacgctgaggcctgtcttttgccttccttagataaacttgccagaaaccccatagtgcttcaggcctttgggataattcccctgagccccat

SEQ ID NO: 932992 - DNA, 120 bp, Artificial Sequence
  ENSG00000231187_8 (sequence is synthesized)
aggccagggcctggcattcagtagttgctctaaaattgtgttttcacccactctcttccaggtagtcaggacagggaagcccaggcttctggtcaccactcaccaaatctctcccctgcc

SEQ ID NO: 932993 - DNA, 120 bp, Artificial Sequence
  ENSG00000231187_9 (sequence is synthesized)
cctctatcagggatcagctcctataggccttaacctagcagactaggtaaagcagagctggtggcatcaagggtcccgggggctgcagagccctggctggtacaggaggctgggctctcc

SEQ ID NO: 932994 - DNA, 120 bp, Artificial Sequence
  ENSG00000231187_10 (sequence is synthesized)
tgtaggtctgcaccttcccagcaacgcggagggcaccagaccctgcctgctccagaggctgtacctgaaagatgaagtgctcgtcaaactgcgggttggaggttttgcgtttggtcttgg

SEQ ID NO: 932995 - DNA, 120 bp, Artificial Sequence
  ENSG00000231187_11 (sequence is synthesized)
gctcagcctcctgctcatattccaccgagaaccacagccgccccaggcagccgtcggggaagtcggtctcacttttgtcctccgggaacttgtacagctctgggttgatggcccccacca

SEQ ID NO: 932996 - DNA, 120 bp, Artificial Sequence
  ENSG00000231187_12 (sequence is synthesized)
tacatgcatctcctatgacagagggtgggagggctggcaggccagaggaaggcaggggcatgggagacagtggcaagctctgggcacccatccccatcctggcccatccgtctctgctga

SEQ ID NO: 932997 - DNA, 120 bp, Artificial Sequence
  ENSG00000231187_13 (sequence is synthesized)
gcctcagctagcctgaccacatctgccccactctcctcaccaggctaaacacatcccctctctctggtgcagctcctccaagaagccttctcaccatgaaggcattgcatggccaggctg

SEQ ID NO: 932998 - DNA, 120 bp, Artificial Sequence
  ENSG00000231187_14 (sequence is synthesized)
gggatccagcagagtcctgccccctgggattggcccccatccttggaggtcaggacctgtttcaaggacacagtgcccatcacctggcctagcccccttccatggcgtctagggaatgac

SEQ ID NO: 932999 - DNA, 120 bp, Artificial Sequence
  ENSG00000231187_15 (sequence is synthesized)
tcagcgataaaacattgcctttcttcttcctcttcaaattagaagggccaaggtgattattgggtggttcctgtgatggtctcttggtagatcttcagggcaaagaggtggcagaaagct

SEQ ID NO: 933000 - DNA, 120 bp, Artificial Sequence
  ENSG00000231187_16 (sequence is synthesized)
gtgtttgcagcccctaccattctgtcctcttggtcaaccaacccatcatcctagagtgggacccagcacaagttctgtacatggcgtgcctgggttccaattccaatctgttgcttacag

SEQ ID NO: 933001 - DNA, 120 bp, Artificial Sequence
  ENSG00000231187_17 (sequence is synthesized)
cctcagttaagactatgtaaaatggggtgataattcctccccctcagagtcatggtgaggtctcactccaaatcagcacccaaggccatatcttaccctcatggggtgcagcaagcactt

SEQ ID NO: 933002 - DNA, 120 bp, Artificial Sequence
  ENSG00000231187_18 (sequence is synthesized)
cataaatgaaagcacccagaaagagtggtccctgggtggtccctggcatccctggctggttcaggttgtgttccggagccaagctggtgaaagcagatggggccacccgagcagaccctg

SEQ ID NO: 933003 - DNA, 120 bp, Artificial Sequence
  ENSG00000231187_19 (sequence is synthesized)
acctctgggcagccctggcaaggacactcaccaaggccgccgctggaggtgtgaggcagcagctctgatgccgggcaggggtcccatggggcatcggcccactctccactgtgcaggggc

SEQ ID NO: 933004 - DNA, 120 bp, Artificial Sequence
  ENSG00000231187_20 (sequence is synthesized)
acccaatctcggccttgaagggttgggggcaccacgaatggcacagctggtggcctgtccagagtcagggagacaacatgtaggtggcaagtcaatggtgtggtctcagagcgctcagcc

SEQ ID NO: 933005 - DNA, 120 bp, Artificial Sequence
  ENSG00000231187_21 (sequence is synthesized)
agccaggacggttgagcaccaggggctggaggaagaaaagccatcgggagccaggaggaggccagggcaccattttctgggcccataccaggcaacacacacacacacacacgcacacac

SEQ ID NO: 933006 - DNA, 120 bp, Artificial Sequence
  ENSG00000231187_22 (sequence is synthesized)
tacaaattacagtccattttcatcatggaatgtcagtttggcaacaatggcatcgaggcccaaaagcagctctgcagtaggggggttcctccttggtgactggatgggcacagcgaagca

SEQ ID NO: 933007 - DNA, 120 bp, Artificial Sequence
  ENSG00000231187_23 (sequence is synthesized)
caaattcctgaagatcccagctccaggaaacatcagcatggttcattgcgttgtccacctgaattcttcacccctccctgtggctgtgtccattgccctgtagtgttgcagttcccctca

SEQ ID NO: 933008 - DNA, 120 bp, Artificial Sequence
  ENSG00000231189_0 (sequence is synthesized)
cctcagggacagcaacatggcccagttagaaggtgtggaaatgacagtgcgtgtggacagtgaaggtgtgcccagtacaggaggggtaaggaggacatcttgtacagcagcagtgaccaa

SEQ ID NO: 933009 - DNA, 120 bp, Artificial Sequence
  ENSG00000231189_1 (sequence is synthesized)
aatgagggtgaaagcggtctaccatagagtggaatagctatataattcctgacctcatgatgggcactggaatgcttccacagcatttcttggatcaaagcaagtcacaagaccagtgca

SEQ ID NO: 933010 - DNA, 120 bp, Artificial Sequence
  ENSG00000231189_2 (sequence is synthesized)
gactccgggactggaaaaatagactccaacacttgatgggaggagctgcaaagtcatgtcacaaatgatgaggagagagccaaaggaaggattagtggtccaaatgtgcaatctaccacg

SEQ ID NO: 933011 - DNA, 76 bp, Artificial Sequence
  ENSG00000231189_3 (sequence is synthesized)
cccatcaaaatcagagagaatcaaagttcattttgcaaattggctgggaccctcatagccttaaagacagaaaacc

SEQ ID NO: 933012 - DNA, 85 bp, Artificial Sequence
  ENSG00000231189_4 (sequence is synthesized)
caacacatggacacagggcggggaacatcatacacaggggccggtcggggggtggcggactgggggagggatagcattaggagaa

SEQ ID NO: 933013 - DNA, 120 bp, Artificial Sequence
  ENSG00000231188_0 (sequence is synthesized)
aattttggaatcttctttgtggaaaccgtcaggaaacactgacatgtgttttcacccagcagcaggcgaaagggcttggatgtggaataagaatagctggcagatgattgagctataggc

SEQ ID NO: 933014 - DNA, 120 bp, Artificial Sequence
  ENSG00000231188_1 (sequence is synthesized)
gaagcttaaggtctcatgcccaggatgctttcttataggccaaatggtatcactccattctactggtgtcagctgcttgaaatagtgtagacacagagaattctgggacccgtgtcgctc

SEQ ID NO: 933015 - DNA, 120 bp, Artificial Sequence
  ENSG00000231188_2 (sequence is synthesized)
agaaacaatgtcaaagtcctggctgaaggtatctacattacccacgaattgctgtatatgagtggaatgtacaagcatggatgcaacagcaagagaactaaatttgttttgtgcttcaaa

SEQ ID NO: 933016 - DNA, 120 bp, Artificial Sequence; identical to SEQ ID NO: 831189
  ENSG00000183385_0 (sequence is synthesized)

SEQ ID NO: 933017 - DNA, 120 bp, Artificial Sequence; identical to SEQ ID NO: 831190
  ENSG00000183385_1 (sequence is synthesized)

SEQ ID NO: 933018 - DNA, 120 bp, Artificial Sequence; identical to SEQ ID NO: 831191
  ENSG00000183385_2 (sequence is synthesized)

SEQ ID NO: 933019 - DNA, 86 bp, Artificial Sequence; identical to SEQ ID NO: 831192
  ENSG00000183385_3 (sequence is synthesized)

SEQ ID NO: 933020 - DNA, 120 bp, Artificial Sequence; identical to SEQ ID NO: 831193
  ENSG00000183385_4 (sequence is synthesized)

SEQ ID NO: 933021 - DNA, 120 bp, Artificial Sequence; identical to SEQ ID NO: 831194
  ENSG00000183385_5 (sequence is synthesized)

SEQ ID NO: 933022 - DNA, 120 bp, Artificial Sequence
  ENSG00000232985_0 (sequence is synthesized)
cagatcttaaactaatgtgaatgattccaggtgttactaatggcttcagtgaaatgtgccagtatctaagacttctactaaatctgagataattctttgaggtagcggcatgaacagcat

SEQ ID NO: 933023 - DNA, 120 bp, Artificial Sequence
  ENSG00000232985_1 (sequence is synthesized)
tgtggaagatgtcaagccagacctgtaatgatcgccacggcgctggattgacggttgccctctcttgtctggcgctgcgtggaaagcgggtgaaggcagagaagcctgcctgctgaccca

SEQ ID NO: 933024 - DNA, 120 bp, Artificial Sequence
  ENSG00000232985_2 (sequence is synthesized)
tcgctctgccccatcaggagttcaatttacttcccctgacacgcagcgatgaggcggtatgggttgcatttgattggtccatgtaggttaaataaaaattggtttaatgaatatttcaaa

SEQ ID NO: 933025 - DNA, 120 bp, Artificial Sequence
  ENSG00000232986_0 (sequence is synthesized)
ttacagaatcatcagggaacactggaagcacaggagcgtaatgtcctcgaggttcatccatgttgtagcatttgtcagaattttcttcctcttgaaggctgaagagcagtccgttgtatg

SEQ ID NO: 933026 - DNA, 120 bp, Artificial Sequence
  ENSG00000232986_1 (sequence is synthesized)
cattcatccattgatagacacttgagttgcttccacatttttgctattgcgcataatgctgccatgaacatgggcatcagttgcagctgttttttctccaagaaaatgacatcctgagct

SEQ ID NO: 933027 - DNA, 120 bp, Artificial Sequence
  ENSG00000232986_2 (sequence is synthesized)
aagccagactgtctctcgcttacccctcaactgtgccatttatgagaaaattcaaactttgtctaatgctacaagctgggaaactatgtctacaaccaaaataaaggatttaaatcttga

SEQ ID NO: 933028 - DNA, 120 bp, Artificial Sequence
  ENSG00000232987_0 (sequence is synthesized)
atggagcggggctccctaaggacaaggagcacagtgtctgctttctttgcaagcacagtgctgacaaggaacagaatacccacagcgactgcttccaggaaacggctgcagggcgggcgg

SEQ ID NO: 933029 - DNA, 120 bp, Artificial Sequence
  ENSG00000232987_1 (sequence is synthesized)
gagcctctgcgagagcagccccttcccagcaagccggcctgcagagttgggattttctgtctccattcggtggtataccaagtgcctgcctcccacacccagctgcccctaatccctgcc

SEQ ID NO: 933030 - DNA, 120 bp, Artificial Sequence
  ENSG00000232987_2 (sequence is synthesized)
tgaaaacgtgctcctgggtcacggaattcatgctgagacacagccacacacagccaggctcaggggtccaccctccagggaacaccaccccgctacagggccacgatcacacacacaccc

SEQ ID NO: 933031 - DNA, 120 bp, Artificial Sequence
  ENSG00000232987_3 (sequence is synthesized)
ccaagtggagaccccgctcccaggcacagacgcacagctgtggatgcacgtcctcggtgacaagctcccaggtggaaactccagagcaagcgtgtcattcatacaccccgggcccagaga

SEQ ID NO: 933032 - DNA, 120 bp, Artificial Sequence
  ENSG00000232987_4 (sequence is synthesized)
tgtggacgtgtccagcacgcctgttctctccaagtgaccaggaggagacaatccctaggagctgacacaggtgacgaaggcccgaggtggcccgccttttcccccggccccattcccatg

SEQ ID NO: 933033 - DNA, 120 bp, Artificial Sequence
  ENSG00000232987_5 (sequence is synthesized)
tgtccttccccaggcagggatttgaagtgggcagagtcttccatgttctccaggagaggttttctgggtgcccctctccccctccctacggttcccctgccccgccaccctgggcacccc

SEQ ID NO: 933034 - DNA, 120 bp, Artificial Sequence
  ENSG00000232987_6 (sequence is synthesized)
tggggctgcctgccgcaccctgcagccgccacctggggaagccggcttttatctcctgagccctgctttgtaaacctcctgcagagttggatgtttataataaaggccgtttatagacct

SEQ ID NO: 933035 - DNA, 120 bp, Artificial Sequence
  ENSG00000227193_0 (sequence is synthesized)
cagctgctcttgatgaaaacggcagtggctctgaaaagagcctttagatcgaccacttaaaaatataccttaggccctctccccgcggatgcggctgaccaactggatgtccttgggcat

SEQ ID NO: 933036 - DNA, 120 bp, Artificial Sequence; identical to SEQ ID NO: 912508
  ENSG00000227193_1 (sequence is synthesized)

SEQ ID NO: 933037 - DNA, 120 bp, Artificial Sequence; identical to SEQ ID NO: 912509
  ENSG00000227193_2 (sequence is synthesized)

SEQ ID NO: 933038 - DNA, 120 bp, Artificial Sequence; identical to SEQ ID NO: 912510
  ENSG00000227193_3 (sequence is synthesized)

SEQ ID NO: 933039 - DNA, 120 bp, Artificial Sequence
  ENSG00000276952_0 (sequence is synthesized)
gaacggctggaaatcacagcgtgtcgttcaaaacgaatgaaccaaccaagcagaagtggagcatctggaaagcctgaaggccaacaatagaagacgatgcaacaactgacgactgggggt

SEQ ID NO: 933040 - DNA, 120 bp, Artificial Sequence
  ENSG00000276952_1 (sequence is synthesized)
ggcggagcgggaggaggaaagcctgaaggccaacactaaaagacgatgcagcaactgactgtgggggtggtggagcgggaggaagggagggggtgacccgcgagtctcactgccgctcat

SEQ ID NO: 933041 - DNA, 120 bp, Artificial Sequence
  ENSG00000276952_2 (sequence is synthesized)
gaggaaaatggggcaaggaaagatgatgcaaagttcccgtgcaccatctcggagccgggaagccacagccccgggaagcacctcccgtggtgcccacacggcagaggggtcctcagcggg

SEQ ID NO: 933042 - DNA, 120 bp, Artificial Sequence
  ENSG00000276952_3 (sequence is synthesized)
ggtggcctctagcctctgtcctaccatgtgtgtctcaaacgcacccagatcctccaccccatcgaggcttactcattgggaataggagatctattcccgggaggagctttgtatcggaaa

SEQ ID NO: 933043 - DNA, 120 bp, Artificial Sequence
  ENSG00000276952_4 (sequence is synthesized)
ggaggatgtgtggttcctttggtttttaaaatacctactttattaaattacaaaattttagaaacctagtttttccttaaggtttcattatctattaaacctagcaaatattcacattga

SEQ ID NO: 933044 - DNA, 120 bp, Artificial Sequence
  ENSG00000276957_0 (sequence is synthesized)
aggacaaaaaaatttttattgaaaatagagctcttaaaaagatgcttggtataaataagtcatgcttctgttaatgacaggactagttaaaaggataagatttgtatgtctgtgtctctt

SEQ ID NO: 933045 - DNA, 120 bp, Artificial Sequence
  ENSG00000276957_1 (sequence is synthesized)
gtaaaattgaatcatcaattcttaagaagcgaaaccaggatatataagtattacataatatgcccagaaagtaatgtgaacaaaattcagacgtacgttgaagctcccattttaagaatc

SEQ ID NO: 933046 - DNA, 120 bp, Artificial Sequence
  ENSG00000276957_2 (sequence is synthesized)
gatggatttaatgagacaaatgaaaagtggtttaacataacacacagcagagcatatgctgttatgctttggtgtttgttccctagcccttgttcctcataatagattgtggaatgtttc

SEQ ID NO: 933047 - DNA, 120 bp, Artificial Sequence
  ENSG00000276957_3 (sequence is synthesized)
aaaaatgctgtaacttttttttgctaattgtggtcttaacaaaaattgttcttgattttaaaaaaagatggataggattggttattgaactttgatattaaataaagttttagtgatagt

SEQ ID NO: 933048 - DNA, 63 bp, Artificial Sequence
  ENSG00000273356_0 (sequence is synthesized)
tcactttgtcaccaggctggagtgcagtggagcaatcttggttcgctgcaatccaggcgcata

SEQ ID NO: 933049 - DNA, 120 bp, Artificial Sequence
  ENSG00000273356_1 (sequence is synthesized)
ctgggattacaagtgtgagccactgtgtacagcctttgtgttaacttactttgaattagccccttattccaaagctgcctcctgaaaggaggcttcctaaaaggtgttgctttggggtaa

SEQ ID NO: 933050 - DNA, 120 bp, Artificial Sequence
  ENSG00000273356_2 (sequence is synthesized)
taagaggtgctggtgaagtgagactagcttgcgcatctctctgccatgaaggaaactagctccgcagacgttttactaaccacagcagaccccctccttgaggaacccagaagggcagag

SEQ ID NO: 933051 - DNA, 120 bp, Artificial Sequence
  ENSG00000273356_3 (sequence is synthesized)
agcatcagatgaaatcaactgctgagagagggaagtgagtgctgtgttggcaccgctgccagaaactcttgagaatgagcatcgtgtgccacttatccactgcttgccgacttcagtagc

SEQ ID NO: 933052 - DNA, 120 bp, Artificial Sequence
  ENSG00000273356_4 (sequence is synthesized)
aagagcctccagaatgctcatggataaacatcatctttgtggccacacattgttttatgagctgagtcatcagactggctggctccttaaatgctgctgtgtgattctctaggcagcaga

SEQ ID NO: 933053 - DNA, 120 bp, Artificial Sequence
  ENSG00000273356_5 (sequence is synthesized)
aaacaaggagagaagatatgaagtgtatctcatcgagctttgtagagggccagtatcattcaccaaaggtgatgggggatttaccattatggagtttgcttgtgataaaaaattattgat

SEQ ID NO: 933054 - DNA, 120 bp, Artificial Sequence
  ENSG00000273356_6 (sequence is synthesized)
cttccttccagggggtatcttgtttttgattctatctccgccctttttcctggacagaaaataaacatgcaaacaaaaaccctattggaacaaaaatataaatttctggaaaacattaaa

SEQ ID NO: 933055 - DNA, 120 bp, Artificial Sequence
  ENSG00000273356_7 (sequence is synthesized)
agcactcatttactaatgtattaattaaaacaatatttactgagcacctactatgtgtcagatgctgcatgctaggcactaaaaataaaaaagaatatagcatggtgctgtctccaggta

SEQ ID NO: 933056 - DNA, 120 bp, Artificial Sequence
  ENSG00000273356_8 (sequence is synthesized)
gctcacagtcaagtgggcagcaagcaagtgctgggaattctctgacacatctggaaacatctgggggtgcttctcatggtggggcttattcattagagcccatccagaagtgccacatca

SEQ ID NO: 933057 - DNA, 120 bp, Artificial Sequence
  ENSG00000273356_9 (sequence is synthesized)
gtctccacgaattaaaatcaggagagctttggccatttctcatttgaagaccttggctaactgaaagaaatccacattttaataacattttgaatgggttgataaaataggaacagatgg

SEQ ID NO: 933058 - DNA, 120 bp, Artificial Sequence
  ENSG00000273356_10 (sequence is synthesized)
ttaaagtttgtcattttagggaaaataatgaaatattgtactgcttaatctgtcttcctgtcacactcttccctatcccctccctactgaaaatatattcagatgcaacaaaacttaaag

SEQ ID NO: 933059 - DNA, 120 bp, Artificial Sequence
  ENSG00000273356_11 (sequence is synthesized)
tttacctgaccctggggttcatatggggataagctccagctgctgacaccttctgatcaagagaaggcagaatgtcaccactatcacctgcactttgtttggatttgcctctatacccac

SEQ ID NO: 933060 - DNA, 120 bp, Artificial Sequence
  ENSG00000273356_12 (sequence is synthesized)
ctatttttaacagccaccagtcttaacgaatttcctgcagaaaacttgattccttccttgctcatcgagttgcaatttatcatctaaggtaatgagttaaacccaaaagtaacagtgaca

SEQ ID NO: 933061 - DNA, 120 bp, Artificial Sequence
  ENSG00000273356_13 (sequence is synthesized)
tgataagtgaaactgtttgcatactttgttttttaaattgctctatcatgtttatcttttttatagctactcaataagacattgcaatgaatttttaattaaaaccaatatgtctataac

SEQ ID NO: 933062 - DNA, 120 bp, Artificial Sequence
  ENSG00000273355_0 (sequence is synthesized)
aagggggaggacccggaaggatggggtgggggcgtaaagatgaaggttaatcaaggtcctcatggactgaaccttgaggcccttctgctgcagtcacttttgccctatcagacttttaga

SEQ ID NO: 933063 - DNA, 120 bp, Artificial Sequence
  ENSG00000273355_1 (sequence is synthesized)
gtaacttcctctctttatttcctctttggtggggttatcagaattattttgtgactattggtttcctttgcggtttttagtgaaattcagaatcatcttcgacggataggaaatagtgca

SEQ ID NO: 933064 - DNA, 120 bp, Artificial Sequence
  ENSG00000273355_2 (sequence is synthesized)
atatgtgtcagtattccggtattctaggaacttaaggaaatgcatataagggtttgaacatttttttcttcagctcactaaatgaacgaaaggtaggcgtaggcgttaaagagacacata

SEQ ID NO: 933065 - DNA, 120 bp, Artificial Sequence
  ENSG00000273355_3 (sequence is synthesized)
atgtggaacgatgctgtattttcttagctactaaaacttcatttgtcattgactgtctcagggctttaaaattttatgtaggtctatattcagcttttattaaaatagaaaattccttga

SEQ ID NO: 933066 - DNA, 120 bp, Artificial Sequence
  ENSG00000273353_0 (sequence is synthesized)
ggattcacattgagacgttgttctctccatgtgtgatctcagacagagctaatcagcttctctgagtttcagattcctgctttataaaagagtaagacttttgtagggttgtttataagg

SEQ ID NO: 933067 - DNA, 120 bp, Artificial Sequence
  ENSG00000273353_1 (sequence is synthesized)
attaaagacgttttttgaaaattgtgtttttggaaaagttcatcaagttcatcatgaatgtcccctgaattgatttgtacttaggagatctcactgtaaataaagtcatgtggcaaaaca

SEQ ID NO: 933068 - DNA, 120 bp, Artificial Sequence
  ENSG00000273350_0 (sequence is synthesized)
cctctcctccagcatggctgattctggttgctaagactctatcatccagggcagagatgaagcttcactcttgccagagggactattggctctgaaagacctctagtacaggggaaaaat

SEQ ID NO: 933069 - DNA, 120 bp, Artificial Sequence
  ENSG00000273350_1 (sequence is synthesized)
tgtctaccctttgtctaaactatgcattttgtccagggtcaggaaaaggttaagtcttaggattaaatacaggatattttttttcttgctgagaacagtgagagaagaccgggataggga

SEQ ID NO: 933070 - DNA, 120 bp, Artificial Sequence
  ENSG00000273350_2 (sequence is synthesized)
tggggcagaactagtgtttttgttttcacattcagttctcctgaagcggtgtttggctgaaatggaacaacttctcaaagaaacagggttagattaaaagcagcctgttcctctgccaaa

SEQ ID NO: 933071 - DNA, 90 bp, Artificial Sequence
  ENSG00000285696_0 (sequence is synthesized)
ctgtcgaacttcttacctcaggtgagctgcccatctgggcctctcaaaagtgccaggattacagacatgagcccctgtgtccggccaggt

SEQ ID NO: 933072 - DNA, 120 bp, Artificial Sequence
  ENSG00000285696_1 (sequence is synthesized)
tgccaggattacagacatgagcccctgtgtccggccaggtgtaggaactttataccatcttcaggttacagaagtaatgtgagctcccagcatggccaaaaacatgttattttggtaaat

SEQ ID NO: 933073 - DNA, 120 bp, Artificial Sequence
  ENSG00000285696_2 (sequence is synthesized)
caggttttagtggcaacacaggttacgggtagggaaaggagacctggctaggaaaggtggtcttgttagaagctttctgagagaatggatgttaaatgtttaagacctttaaaggtgtca

SEQ ID NO: 933074 - DNA, 120 bp, Artificial Sequence
  ENSG00000285696_3 (sequence is synthesized)
gattccagacaagggaagtcctggctgcattaatggagattctccatagacgcagatttctttcaaaaaagacagctttgcagcaccacttctgtttgctggccctctgatagccatctc

SEQ ID NO: 933075 - DNA, 120 bp, Artificial Sequence
  ENSG00000285696_4 (sequence is synthesized)
ggccctctgatagccatctcaaaatatgtcaaataaatataatttgagagacgaagtctcactatattgcccaggctgatttcgaactccggggctcaagcaatcctcccacctcaacct

SEQ ID NO: 933076 - DNA, 120 bp, Artificial Sequence
  ENSG00000285696_5 (sequence is synthesized)
ggtgtgagccacctcgcctggccttacctactattcttgccagtggtgtaacattgagcctcttcgctgcatctgccgtcatgagaaccagagcagctgctccatcattcagtgtactgg

SEQ ID NO: 933077 - DNA, 120 bp, Artificial Sequence
  ENSG00000285694_0 (sequence is synthesized)
ggcttttagcagcctgacgccttggtttttagtttctgtctctagtgacaggtggaaaagaaggatgaggaaggggctttactggcccaaccagaaatagtaactaagaacccatgactg

SEQ ID NO: 933078 - DNA, 120 bp, Artificial Sequence
  ENSG00000285694_1 (sequence is synthesized)
tattctctcccttggacacccctgggaagctctgtactggtctacattgaatacgtctttgctgctctgggatccatcctccagtcttcagtcagctaagaaaatgacctgtgggcacgt

SEQ ID NO: 933079 - DNA, 120 bp, Artificial Sequence
  ENSG00000285694_2 (sequence is synthesized)
tggcttcctttcttcggattaagtggttgttcagagagaggctgagtctgattgtttacacaagaaggaagtgaacactggctgtgtgcctggcactgttaggagccatcaaaccatgtc

SEQ ID NO: 933080 - DNA, 120 bp, Artificial Sequence
  ENSG00000285694_3 (sequence is synthesized)
cagaaaggacgcagggaaaggagatgtcgatgtttccagacattttgtgatgtgaagagagcgcctgaaggtttttgatgatgcttaactcacgtgctttgcttaaagaactgcagggac

SEQ ID NO: 933081 - DNA, 120 bp, Artificial Sequence
  ENSG00000285694_4 (sequence is synthesized)
tgacctgaaacgctaagcatggaatccaggttgcagaacatcccactctggaaagaaggctgagccgttcatctgtattcctgttgcaatcaagctaatgccagccagaccaccaggtgg

SEQ ID NO: 933082 - DNA, 120 bp, Artificial Sequence
  ENSG00000285694_5 (sequence is synthesized)
cccattattcaagacagtcattgagactagacagactgaccagcatgtattcagctcttgtacataattcccccagactccccctcgcataacacccctggccagcctgagaaattcgag

SEQ ID NO: 933083 - DNA, 120 bp, Artificial Sequence
  ENSG00000285694_6 (sequence is synthesized)
atggtctttgtgacactagcccaccatctcctcaggttgccagctcctcataaacctacttctcctccgaccaactcttgtgtctccagtttggctctcaaggagcgagcagccgaacct

SEQ ID NO: 933084 - DNA, 120 bp, Artificial Sequence
  ENSG00000285694_7 (sequence is synthesized)
cagtgacatttctaaatgctatgacatacaggctgtaagcactcacaaggcaagcaacatgaactcaattccctgagtcatgggaaatgacgggctcctatgactacctttgtttaaagt

SEQ ID NO: 933085 - DNA, 120 bp, Artificial Sequence
  ENSG00000285694_8 (sequence is synthesized)
gaaaaggaaatacaggtaaacttagagtgcccagaattgagatggaaagcttttattcttggggaactgtaagtaagatgatgtgcatgtgaaaaaaacccacaaactacaagtcccaaa

SEQ ID NO: 933086 - DNA, 120 bp, Artificial Sequence
  ENSG00000285694_9 (sequence is synthesized)
gagtagtggaaagcctgccctttagattggaacagtgagcccaatgggcaagggttccagttgagactcatcctgtggagtggagcccaggtttccataaaggtcccacgatgactggaa

SEQ ID NO: 933087 - DNA, 120 bp, Artificial Sequence
  ENSG00000285694_10 (sequence is synthesized)
gtgacttcgcaaaccccacccctctactccctccatgctgcatctcagggtcagggctggggcaggaagcaaattgcacacctgtaacatgaagacaagcgaaaggatttaaggtgaaga

SEQ ID NO: 933088 - DNA, 120 bp, Artificial Sequence
  ENSG00000285694_11 (sequence is synthesized)
aggttaggatggaagccctcctagtaattcattggtgttggagagatgactgtatttctacctcggtgaaagccaagcttttaattcaatatcactccaaaaacacaaattacaagttgt

SEQ ID NO: 933089 - DNA, 120 bp, Artificial Sequence
  ENSG00000285694_12 (sequence is synthesized)
gtgatacacagacgattaacccacctaataattaaattaaaaaacactttttgagggaacaaattagattatgttttccgaatcagcagcttagagatttttattacctattaataaaaa

SEQ ID NO: 933090 - DNA, 84 bp, Artificial Sequence
  ENSG00000285694_13 (sequence is synthesized)
aatcagcagcttagagatttttattacctattaataaaaattatctaaacatccatcaccataacttttcctctactttgtttc

SEQ ID NO: 933091 - DNA, 82 bp, Artificial Sequence
  ENSG00000285695_0 (sequence is synthesized)
gctacccattagttatttttcctgatttcaaaacatacccggttcaacctttcctgtctctctgtttcagagccagcctgtc

SEQ ID NO: 933092 - DNA, 120 bp, Artificial Sequence
  ENSG00000285695_1 (sequence is synthesized)
ttcaacctttcctgtctctctgtttcagagccagcctgtccagaagacacatggatattagttttgccagcctgtccagaggacacacagacactagtttaggaggacctacttgtgtta

SEQ ID NO: 933093 - DNA, 120 bp, Artificial Sequence
  ENSG00000285695_2 (sequence is synthesized)
gacaggcctgccatttttccagggttgtctgtgacaatgtggtgaagtctgtctaattcaacaagggactttcagcagccagaaactatactctacaaccagctttatcagtagtaaagg

SEQ ID NO: 933094 - DNA, 120 bp, Artificial Sequence
  ENSG00000285695_3 (sequence is synthesized)
ctgatattttcacttccatttgttcattgtctattttttaaaattttccaattggctcgaagctcaagaggagaagaaagggagtaatttattgaccaccccccccccgttttgtcatgc

SEQ ID NO: 933095 - DNA, 120 bp, Artificial Sequence
  ENSG00000285695_4 (sequence is synthesized)
aatatcatgggagagataaataagaggggacaaaaagaaaaagaggaacagtgaaaaatctgcagcacagtcctttactcagctctggaaggaagccaaaaaggaaaaattaaggttaaa

SEQ ID NO: 933096 - DNA, 120 bp, Artificial Sequence
  ENSG00000285695_5 (sequence is synthesized)
aaaaactatgttattttaaaacagcttattgaaggaaataatagtaacaggaaaaatcaatgaagtgcacaaagccgaataaaaagcaatgaagtctggagtaaaggcaaacactattgt

SEQ ID NO: 933097 - DNA, 120 bp, Artificial Sequence
  ENSG00000285695_6 (sequence is synthesized)
attcaacagaaggaatcatgggactaataacaagtatgtactttttattacatgaacaaataaaacatttccaattgaagccactgatcccaataccttgcagtgcttgagaatcataaa

SEQ ID NO: 933098 - DNA, 120 bp, Artificial Sequence
  ENSG00000285695_7 (sequence is synthesized)
aagcattcagaatctttttaaaaagtcaattcaatgcttacagtatattatcaatatcagtaaagtgatatttgccggaaagtcaccccagaactataatgtcaattatgtcttagaaag

SEQ ID NO: 933099 - DNA, 120 bp, Artificial Sequence
  ENSG00000285695_8 (sequence is synthesized)
catgtaagcactatcctctcaggagcatttctgaaagaataatttttcttttttaattactggagagtcagatcaggacattggatggaggtctttttactccccacctaaccctagggc

SEQ ID NO: 933100 - DNA, 120 bp, Artificial Sequence
  ENSG00000285695_9 (sequence is synthesized)
attgaacttcatcaacaatattaacatggtaggaaaatacaaagcaactctatgtgtacagaataaatcttagcttattccttctgcatctaacctgtagtctccaaagaccaggatctg

SEQ ID NO: 933101 - DNA, 76 bp, Artificial Sequence
  ENSG00000285695_10 (sequence is synthesized)
cttctgcatctaacctgtagtctccaaagaccaggatctgggaaggccaatgagaagaagccttatttgtttattt

SEQ ID NO: 933102 - DNA, 120 bp, Artificial Sequence
  ENSG00000285695_11 (sequence is synthesized)
gattacaggcatgcgccaccacacccaggaactggaaatgaaatccttcgaagaaaaaacagagggttgggaaatggtaaaagacctttttgatctcatccatcttgagggatgcggcct

SEQ ID NO: 933103 - DNA, 120 bp, Artificial Sequence
  ENSG00000285695_12 (sequence is synthesized)
aagacctttttgatctcatccatcttgagggatgcggcctaaagcacatacagtcctccaaagaaaaagtaatgccgtgttacaaaacaggtttcctattttgatgcacctggacatacc

SEQ ID NO: 933104 - DNA, 120 bp, Artificial Sequence
  ENSG00000285695_13 (sequence is synthesized)
gaggactaaactgtccttagaagggatgtgcacattcacatcaagacacaagacaacaccatcagacttctggaaattatttaaaacttaagttttggttatggattactgttggagcca

SEQ ID NO: 933105 - DNA, 120 bp, Artificial Sequence
  ENSG00000285695_14 (sequence is synthesized)
catctctgaaggacaataataaatggattccagacacatggacagacccagaagactccaaagcaggggcaatattgcctgtttctagcaaacccataaaaatgaaacaattgggcacca

SEQ ID NO: 933106 - DNA, 120 bp, Artificial Sequence
  ENSG00000285695_15 (sequence is synthesized)
attgttttagaaaagcccactctcttcaaatgtgagatgaaaaatgagaagaaaaaggtgttaagaaggacctaattaagaatttttatgttacgtatttgaacaacttgactctgatgc

SEQ ID NO: 933107 - DNA, 120 bp, Artificial Sequence
  ENSG00000285695_16 (sequence is synthesized)
aacatcatgatgtagggaatggttcagaagtcatactcgtgaagtagaaagaaaagaaaaacaaacagaaagttgcaccagaattagtgtggcactggtttatttcctacctgattgtaa

SEQ ID NO: 933108 - DNA, 120 bp, Artificial Sequence
  ENSG00000285695_17 (sequence is synthesized)
aggaaaaattgagatatgctaatttatcatgcagccgcataacttcataatgcaaaatttatgagaagagatgagaggaaattggagaggaacattatgggagcaataaatacttatata

SEQ ID NO: 933109 - DNA, 120 bp, Artificial Sequence
  ENSG00000285692_0 (sequence is synthesized)
gggcaggggatggggcatcagggtgctggatgagaatctggctctgctctgggcgggctgtcaccatggtgctggcagtacccaccaccattccacaaccaccattgattgaggagactt

SEQ ID NO: 933110 - DNA, 120 bp, Artificial Sequence
  ENSG00000285692_1 (sequence is synthesized)
ggtgctggttatacagactactgacttcgtgaaaattcagaaatcaaaataattcctgaatctgctggccactggagagctgtgaacactttctctgccaacaaggattacccaattacc

SEQ ID NO: 933111 - DNA, 120 bp, Artificial Sequence
  ENSG00000285692_2 (sequence is synthesized)
aaaagcaaacaaagacaaactggctattcaagtactgcaaaccagataggaaagagacagtatccatgaccttctgttcatgcggtggaggaagaaattgcttcccagaaaggcttagcc

SEQ ID NO: 933112 - DNA, 120 bp, Artificial Sequence
  ENSG00000285692_3 (sequence is synthesized)
acaaaaagccactccactctgacaagccgattactgtctatggagaagcaaaatgcctcccttaggactatgggaatagccaacaagtctctctattctaaggataaaaccagacatgtg

SEQ ID NO: 933113 - DNA, 120 bp, Artificial Sequence
  ENSG00000285692_4 (sequence is synthesized)
gaccatttttgcattgagcgtttaaccacagtcatctttatgaccaaaaaagaacaggaatttaaacaagaatggataaatataaattaagtctatttttcttcctgattcttcaagagt

SEQ ID NO: 933114 - DNA, 120 bp, Artificial Sequence
  ENSG00000285692_5 (sequence is synthesized)
aagttccttgatcttaacttctatttatgaaagttctggcctgaaaagaaccttgaggggttatcgagtccatccttctgctttccaggagaattcataactaatgctatcagatggatg

SEQ ID NO: 933115 - DNA, 120 bp, Artificial Sequence
  ENSG00000285692_6 (sequence is synthesized)
agaagggtcactagcctaggagttcagagatgtcagaggcagaatatactgcatttggatttcaacaagatacctcttgctatttcatagaaaataaaggttagattatataaaatggca

SEQ ID NO: 933116 - DNA, 120 bp, Artificial Sequence
  ENSG00000285693_0 (sequence is synthesized)
tgcttcccaggccgtcgcgctcctggccgcgcacccagccagggacccagaggccctcagccccgggctctgcgcgtacactgagggcgcggcgcagcaggacagcaagataaggaagca

SEQ ID NO: 933117 - DNA, 120 bp, Artificial Sequence
  ENSG00000285693_1 (sequence is synthesized)
gagactgaagggaggaatccccgctttccggggatgatggcgttcgagttgggtctgtgagggatgaaataggagttggccagagggagagagggactctaggcctcgagaagagcacgt

SEQ ID NO: 933118 - DNA, 120 bp, Artificial Sequence
  ENSG00000285693_2 (sequence is synthesized)
gcagaggttccgtgacacgaaaacgccagaactggcggactcttgggtgcttggagacactatataaataaggaactctggctgtgtgcatgggagagtatattaacagggcttggcctg

SEQ ID NO: 933119 - DNA, 120 bp, Artificial Sequence
  ENSG00000285693_3 (sequence is synthesized)
gctgtgaggtgcagagatgccgtttctctcaggctgggaacttcaggaaagccaggaccaagtcaatcttgatctaggctctgtcttcagcatctagaaccaggcttggcaccaactgag

SEQ ID NO: 933120 - DNA, 120 bp, Artificial Sequence
  ENSG00000285693_4 (sequence is synthesized)
taggacaatttggccatctacacactgatatatatgcacatccttggacccagcagttgcactccagtgtgcaacaggatgaatggttacagatatcatggtacattcataagacagaat

SEQ ID NO: 933121 - DNA, 120 bp, Artificial Sequence
  ENSG00000285693_5 (sequence is synthesized)
accccccaaactccatctcccaacatgccgcgggccccctttctgtcagcctgactcttgagctcctgagaaatgtagtttttccagcggcccagccccagaaaggtcctagccaagaac

SEQ ID NO: 933122 - DNA, 120 bp, Artificial Sequence
  ENSG00000285693_6 (sequence is synthesized)
tacagttcccatgtggcaatgcgcgcgccattccggtggaattcaccgcggtctccagtttgccatgatggatgccagaacctgcacgtggggcttggtgacgcgatgactgagatgctg

SEQ ID NO: 933123 - DNA, 120 bp, Artificial Sequence
  ENSG00000285693_7 (sequence is synthesized)
gagtccccggtcagaaggacgatgccgagcgcgccgtattttctcctgcctctcctcagatcgccgccgttgttgggctgtggagacgtctcaaccaaagtggagccgacagaggccccg

SEQ ID NO: 933124 - DNA, 120 bp, Artificial Sequence
  ENSG00000285693_8 (sequence is synthesized)
ggagccgtggtgacagagcggccacaaccactagggggcgggaggcagagcggcccctagtccgcccctagtccgggacctctgggcggtcccgggcgggaagcgcacgcgcaaacgcgg

SEQ ID NO: 933125 - DNA, 120 bp, Artificial Sequence
  ENSG00000285693_9 (sequence is synthesized)
ggcttcgcggccgctgtaaacaccaaagagcgcctgcgcaagccgagagtctcgggatcgacacgtgggggcgcctgagcgaagataaccgtaataaatagtaacctaacggtccagtca

SEQ ID NO: 933126 - DNA, 120 bp, Artificial Sequence
  ENSG00000285691_0 (sequence is synthesized)
agcatcattacctgtaataaattttactgatttttcttttaactaattcctctcattttcacatttcttgtgcttttttgttaggtattagtgctaaaatactctatagactttaagtag

SEQ ID NO: 933127 - DNA, 120 bp, Artificial Sequence
  ENSG00000285691_1 (sequence is synthesized)
gtgaacatttcaaacagcttcataaaattcatatatatctatattttaatttgtaatgttttatgaaagagcatgatacacattcattttaaacccttaaaaaaattctgtttcagccac

SEQ ID NO: 933128 - DNA, 120 bp, Artificial Sequence
  ENSG00000285691_2 (sequence is synthesized)
cattaaacaataaggccagatctcttggttagtgtgtatgtctttgtgtgtatgtttcttttttatttttggtagctaatttgtagaagttcagttctgtggtaaggcaagatgatctct

SEQ ID NO: 933129 - DNA, 120 bp, Artificial Sequence
  ENSG00000285691_3 (sequence is synthesized)
aggcaagatgatctctatgctttttaagagaaaatcatgaacttaatagaaatgcaatattgagttaaaaatcttcttaaatattatattatccatttttcctaaaggaagaatttatta

SEQ ID NO: 933130 - DNA, 120 bp, Artificial Sequence
  ENSG00000285691_4 (sequence is synthesized)
agcatgcaatttcagagctgataggaatataagaagtaactaccctgaacttctttgtctgtggataagaaaatatgctcataagagtccgtgacagaccaggaaaagaatgtagttatc

SEQ ID NO: 933131 - DNA, 120 bp, Artificial Sequence
  ENSG00000285691_5 (sequence is synthesized)
taattgctaaaccaggactctccttcaaaactacgcagccatgtctgttccaggttctgtgcagactataaacttgttctcataagccaaaatgtgctgaccgaattctccaagcacatt

SEQ ID NO: 933132 - DNA, 120 bp, Artificial Sequence
  ENSG00000285691_6 (sequence is synthesized)
atctgtgatctaccttccaataatgcacatacttctttttcataataaaagtactttcatttacctattaaagtgaagatcaggcaaattacccaaagttgtaaagctaatctgatactt

SEQ ID NO: 933133 - DNA, 120 bp, Artificial Sequence
  ENSG00000285691_7 (sequence is synthesized)
acgcgttaaatcacaaaagatattttataattctaaaatattagttttattttcaaattcaatttaaatgtatggacaatttccccttctcctggggctacatagccatagtaagaactg

SEQ ID NO: 933134 - DNA, 120 bp, Artificial Sequence
  ENSG00000285691_8 (sequence is synthesized)
taatcgctttctcataagtgaacattcactatggacactgtgatgcatagctttgtgcacactcttctggtttccttgtccaggtttatttttcatgattgccagagagggaaagaaaat

SEQ ID NO: 933135 - DNA, 120 bp, Artificial Sequence
  ENSG00000285691_9 (sequence is synthesized)
agagcatttttataaagggcttcaggatatttaaatatattttaatgtatttgattgcattttgacttttgagcctcaccatcagctaaatcccttgtcagcctatgactccaatcctgc

SEQ ID NO: 933136 - DNA, 120 bp, Artificial Sequence
  ENSG00000285691_10 (sequence is synthesized)
aattgtttcccaaaaactgaaggagttctagacaaatcagtgttattattctgaatcaccctttttaaaaacaatcctttgttttttgtgcatatgatattgttatgggttgaattgtgt

SEQ ID NO: 933137 - DNA, 120 bp, Artificial Sequence
  ENSG00000285691_11 (sequence is synthesized)
ctccccaaaaatatatgttgaagtcattagccccagagcctaagaatgtgactttatttggaaataaggtttttacagagacaatccaagtttaagtcatgaggctagtccctaatccaa

SEQ ID NO: 933138 - DNA, 120 bp, Artificial Sequence
  ENSG00000285691_12 (sequence is synthesized)
taggactgatgtccttataaaaagagaaatttgggtccagagaaggatatgcacagagggaatgcatatcctgtgaaaagacagagacacagggagagcatcatttgaagatgaaggcag

SEQ ID NO: 933139 - DNA, 120 bp, Artificial Sequence
  ENSG00000285691_13 (sequence is synthesized)
gaattggagaacttcatctacaaggccccaaagcttgcccgcaaacctccagaggccaggagagaggcatggaacagattcttcgtcacagccctcagaaaaaaactcatcctgtggaaa

SEQ ID NO: 933140 - DNA, 120 bp, Artificial Sequence
  ENSG00000285691_14 (sequence is synthesized)
ccttgactttggacttccagcctcaataagggtcactaatctactcttatctcaactgtgactttgaatatggtgatgaagatatgaacagggatatgctactaaatccagattaatggg

SEQ ID NO: 933141 - DNA, 120 bp, Artificial Sequence
  ENSG00000285691_15 (sequence is synthesized)
agtgaaccagatgctttcgcagaggcattgaggaagagaacaggctcttctactgagttgctaaggaaagaacaactaagaggtggagtctctagatttgcccatctgcatctgtctgat

SEQ ID NO: 933142 - DNA, 120 bp, Artificial Sequence
  ENSG00000285691_16 (sequence is synthesized)
ccactccacaggaaggcaagaaaacaggggtcccaggaatcttctgcccttctgcccatgactctgcctgcaccagacgacacttactggtgttcactcaagcacagtaatccattggaa

SEQ ID NO: 933143 - DNA, 120 bp, Artificial Sequence
  ENSG00000285691_17 (sequence is synthesized)
acaagaagcttgcacagtgaatttaatagtcttctgagactttgggtcctggagttttcagcatcaacaatactaggcacaggtgtttacgaataaacaaaaatatgtgcttatacattc

SEQ ID NO: 933144 - DNA, 120 bp, Artificial Sequence
  ENSG00000285691_18 (sequence is synthesized)
actgcataggactaatcttgagtacccaaccaaaaaaaaaaaatcagatggataatcagggtcactaatctactcttatctcaactgtgactttgaatatggtgatgaagatatgaacag

SEQ ID NO: 933145 - DNA, 120 bp, Artificial Sequence
  ENSG00000285691_19 (sequence is synthesized)
ataccagctgaccattcaaaagaataaagaagggattctggagctcacacgggagaataagacgtgggttagactcttccatagaatccagtgctgaaggccatcttgcctgaaaaaatc

SEQ ID NO: 933146 - DNA, 120 bp, Artificial Sequence
  ENSG00000285691_20 (sequence is synthesized)
ctgtcagagcctcctactctaacttagattttgcagaaaagactggacagagttgtggtggttttggggactagaaagacggtccttgttgatcatagtagggtttcctgcaagggatat

SEQ ID NO: 933147 - DNA, 120 bp, Artificial Sequence
  ENSG00000285691_21 (sequence is synthesized)
gggagtgaaccagatgctttcgcagaggcattgaggaagagaacaggctcttctactgagttgctaaggaaggcaagaaaacaggggtcccaggaatcttctgcccttctgcccatgact

SEQ ID NO: 933148 - DNA, 120 bp, Artificial Sequence
  ENSG00000285691_22 (sequence is synthesized)
gggtcccaggaatcttctgcccttctgcccatgactctgcctgcaccagacgacacttactggtgttcactcaagcacagtacatgagtgaaatgtgaaatttggtgccgtgactcggat

SEQ ID NO: 933149 - DNA, 120 bp, Artificial Sequence
  ENSG00000285691_23 (sequence is synthesized)
cctactctttgctctgtgacaaagatccacctgcaacctctggtcctcagactaaccagcccaaggaacacctcaccaattttaaatcggttcctttccttttctggtagagacaaagga

SEQ ID NO: 933150 - DNA, 120 bp, Artificial Sequence
  ENSG00000285691_24 (sequence is synthesized)
aggagacgcattttatccatgaacccaaaactccggagccggtcacggactcgggaaaacagtcttcccttggtgtttaatcacgcggggacaactgcctgattattcacccacgtttca

SEQ ID NO: 933151 - DNA, 120 bp, Artificial Sequence
  ENSG00000285347_0 (sequence is synthesized)
aaaaccaccccgtttcagccctcagcctcagggctgagattcaggctcaggtctaggggttggggaatattaaagtttacaagtacaatcttactccatccatacacacacatggagaag

SEQ ID NO: 933152 - DNA, 120 bp, Artificial Sequence
  ENSG00000285347_1 (sequence is synthesized)
catacacacacatggagaagccaggagaggacgcggccagagatgggctcctgcccttgaacccctgctggggtggaagcagagatgggggctccctatgttgcccaggctggtctcaaa

SEQ ID NO: 933153 - DNA, 120 bp, Artificial Sequence
  ENSG00000285347_2 (sequence is synthesized)
gggattacaagtgtgagccaccacgccaagcctgactttaagatttttgccaatccagtggacaagacaggagactggaagaaggggccagaaattcagactcagaagccccctccagag

SEQ ID NO: 933154 - DNA, 120 bp, Artificial Sequence
  ENSG00000285347_3 (sequence is synthesized)
ccccctccagaggccacaaggcagcctggtcctctctgaaccagtggctcccactcactggccccttgtctctgcctggactcctgcggatgagtggaaggccaagagggcgccctctgg

SEQ ID NO: 933155 - DNA, 120 bp, Artificial Sequence
  ENSG00000285347_4 (sequence is synthesized)
tgcccactagatcgactcccaattaatcacttaactgtgtgaccctgggccaactactcaacctctctgtgcctcgggtcctcctctgaacatggggataaagacagtgcttgcctcgtg

SEQ ID NO: 933156 - DNA, 120 bp, Artificial Sequence
  ENSG00000285347_5 (sequence is synthesized)
gggatgttgtgtgtgtatacatgcatacacacgtgtgcaaagagcttagagccacgcctggtaccatttacatgctcagtaaatgtttaggaggattgttgtgataacccagcagactga

SEQ ID NO: 933157 - DNA, 120 bp, Artificial Sequence
  ENSG00000285347_6 (sequence is synthesized)
tgtgtaagcctatggtcccatctcagggcatgtgggtgtcacaggatcgtagtcctaacagcccaaaaataatgttaaaatgactcaaggacttcacttatgcttctgagcatcctgaag

SEQ ID NO: 933158 - DNA, 120 bp, Artificial Sequence
  ENSG00000285347_7 (sequence is synthesized)
gaaataggcacagtctacagaactacttcctaatgctccccttagttcaactgtccacttcctcagcacagtccctgtatgtctttggaggtcccccttctccagacctccttcattcag

SEQ ID NO: 933159 - DNA, 120 bp, Artificial Sequence
  ENSG00000285347_8 (sequence is synthesized)
ccaacagcgtttattgagcacctgctctgtgccagccagctgctgttctaggctcttagaataaatcagaaaaccaaatagatgaaaaattctcattgttcacaagtagattctagacgt

SEQ ID NO: 933160 - DNA, 120 bp, Artificial Sequence
  ENSG00000285347_9 (sequence is synthesized)
ctccccagagcaaagcccaggcccttggccttcctctcccctgcctctttcttcctcattctgcacccagaacccaagaaaacgctgcagcccttcctgggagggcaggagagaggaaag

SEQ ID NO: 933161 - DNA, 120 bp, Artificial Sequence
  ENSG00000285347_10 (sequence is synthesized)
atctgagttggccaagccaggctctccagcaggcagggctccagcagaggctgggcaccttcagccatcagcaactgtgtcccattacctgtggaaagcaccagccctggcctggaaaac

SEQ ID NO: 933162 - DNA, 120 bp, Artificial Sequence
  ENSG00000285347_11 (sequence is synthesized)
ccttggggagcttgcagcacagggcaaggtgcacagtaggcacttggtggctggcagggccctctggggcatcctatgggtgaatatcttgctgagcccatggaaggcccatgtcagaat

SEQ ID NO: 933163 - DNA, 120 bp, Artificial Sequence
  ENSG00000285347_12 (sequence is synthesized)
ccagtaatgtgctggggaggcgagctggggtggggttggaagtggtgctcaccagcccagccagggttcctcttaaaagtcacagtgctcgaagccagtacagtgcctcaccccttttta

SEQ ID NO: 933164 - DNA, 120 bp, Artificial Sequence
  ENSG00000285347_13 (sequence is synthesized)
tgccctcacctggctcatctcccatccattagtcctcaaggtacatctgtgagtcccatgggtcaggtagtgggtgcaatgggaggagatgagggtgtggacttgtcctcagatctacct

SEQ ID NO: 933165 - DNA, 120 bp, Artificial Sequence
  ENSG00000285347_14 (sequence is synthesized)
cttagtacctatgagaagtcagcaaccaccctgaccctctgtgtcttcatctgtaaaatgcatatattagtctcttctttggtggaaaggattaaatgagatgttgcatatggaggcatg

SEQ ID NO: 933166 - DNA, 120 bp, Artificial Sequence
  ENSG00000285347_15 (sequence is synthesized)
tgagggttttgtaagtgctcattctcccttttgcctcaggaagaaagcctccaccttcagactatcaggcacctggggacagaccccaggacactgccttttgtggctcttgccacccat

SEQ ID NO: 933167 - DNA, 120 bp, Artificial Sequence
  ENSG00000285347_16 (sequence is synthesized)
ggtcacctcagttactcaagccacacatgcatgttcgtgcatcccccacatatacacagaaactcacgggcgttatatcaaccagggttcctagctgcaagcaacagaaagcaaccatga

SEQ ID NO: 933168 - DNA, 120 bp, Artificial Sequence
  ENSG00000285347_17 (sequence is synthesized)
ctgacttaagcagaaaaggaatttctcaaaagaatattatttgatttatggaatcacaggaaatcatccaggtctctacctggaaggcagaatgaaccttattaaaatcagttgagatgc

SEQ ID NO: 933169 - DNA, 120 bp, Artificial Sequence
  ENSG00000285347_18 (sequence is synthesized)
gcacttagcattgtgccttgcacagagtaactgctcaggaaaggttatccaataataatgaaagcatgtcttatggtgtgacacctctgctcaaaatcctttcatagatccaattgtcta

SEQ ID NO: 933170 - DNA, 120 bp, Artificial Sequence
  ENSG00000285347_19 (sequence is synthesized)
ccatggaaacccggcctctgggctgtggatacttgtgatgggagaggtggtgcgggctccgaattctttccaatagtctgcaaacccgcagagccatgaagcattgtctgtaggccagca

SEQ ID NO: 933171 - DNA, 120 bp, Artificial Sequence
  ENSG00000285347_20 (sequence is synthesized)
ctcatcctccacccctctgcctgcttctccgctctcctagttccttctccctcctctaggaattcagcattgccactctgattggctggattttgggacattgattgagccttgttttct

SEQ ID NO: 933172 - DNA, 120 bp, Artificial Sequence
  ENSG00000285347_21 (sequence is synthesized)
agtgggcaggaggctctgtgtcttaaaggccactggcccagctgccaatgaatcagtactttgtttccccaggtagagtgggggcagggggcagggaacgggcagggcaagtttggggca

SEQ ID NO: 933173 - DNA, 120 bp, Artificial Sequence
  ENSG00000285347_22 (sequence is synthesized)
ttctgctccgaggtccctctagccaaacgttatcaaatctcatccaacatgctcctggctctccatttcagatgtctgtaaactggggactacaaaatgcaaatatgtttaagagttgct

SEQ ID NO: 933174 - DNA, 120 bp, Artificial Sequence
  ENSG00000285347_23 (sequence is synthesized)
ggaagcaggtgcacaatgcttctttgagtatctccgtgtctgtggctgatatccagatgcaaggcttcttccgggcatccctgggaatgggagtgcatagacatactggtcaaattacag

SEQ ID NO: 933175 - DNA, 120 bp, Artificial Sequence
  ENSG00000285347_24 (sequence is synthesized)
cacagcctctacacctttactgaagatggaaaactgttttccaaagttgacttgcctaacatgatgtaactatcatgcaaaaataaaaataaaattaagaataaaaatttaaaaatgaaa

SEQ ID NO: 933176 - DNA, 120 bp, Artificial Sequence
  ENSG00000235984_0 (sequence is synthesized)
gtggtttgcaaaaaacttcttttctgagcacttcaacaaaggttgccgtgaacagtgactgtctgacagcaagggatcctggtcgcctaaggagaagacacaggagtaatgagaagacac

SEQ ID NO: 933177 - DNA, 120 bp, Artificial Sequence
  ENSG00000235984_1 (sequence is synthesized)
attaacatgaaacgctggagtgcagggcacaataatggttgactgcagcctcaacctccagggctcaagggatccttccacctcagcctccccagtagttgggattacacagatatttca

SEQ ID NO: 933178 - DNA, 120 bp, Artificial Sequence
  ENSG00000235984_2 (sequence is synthesized)
agattcagcatcatttcagaccctgaaaaatccctgaaaattgaattctcaatagataatgcaactccacataatatctggattttgtaaatgcttgctaataaattattttacaacgtg

SEQ ID NO: 933179 - DNA, 120 bp, Artificial Sequence
  ENSG00000235984_3 (sequence is synthesized)
gcagtttcagtgtcttcctgtggtctgtgaagaagagaaacttaacaacaagaagagggaaagggaaggtcgcctaaggagaagacacaggagtaatgagaagacacaggaggtagagca

SEQ ID NO: 933180 - DNA, 120 bp, Artificial Sequence
  ENSG00000235989_0 (sequence is synthesized)
ctccacagttcataaccgttggctggttatgaaccgttcataacgggcgttaataaccataccctgttagactaagcatggtccacccgcgaatcctctacagagatggccaagcgctgg

SEQ ID NO: 933181 - DNA, 120 bp, Artificial Sequence
  ENSG00000235989_1 (sequence is synthesized)
ggtcgtggctgcgtcctctaggccaggccttggtgggcagctgttgacatgtccagaaccccaggaagtgctgaaggtacctgcagttcaggccccatggaagcccagacctccttcacc

SEQ ID NO: 933182 - DNA, 120 bp, Artificial Sequence
  ENSG00000235989_2 (sequence is synthesized)
cttcggggacactgaaattggccaaatgtttaggccatgaggatggctgctgagtaagcccataatccctacatcggacacaagtaagcaggtgaaggcctacaggtagcagccttgtgc

SEQ ID NO: 933183 - DNA, 120 bp, Artificial Sequence
  ENSG00000235989_3 (sequence is synthesized)
aaaggaccttctcaccacagatcagccagaccatcttcctccttccaagtcatcaaagagttccaagctggtcacctgtcccttgatgttcccaggaaaccaggaaagaggacccctgca

SEQ ID NO: 933184 - DNA, 120 bp, Artificial Sequence
  ENSG00000235989_4 (sequence is synthesized)
ttttatcttcccatccagagtggcaggatctctgcctgggaaacaggcttcattcagcacagctgtggtagcattaacaaagcaaagtgggcacatgtagaagttgaagctaaaacattc

SEQ ID NO: 933185 - DNA, 120 bp, Artificial Sequence
  ENSG00000235989_5 (sequence is synthesized)
tgtttctgtggatgttaagggggtgaagataaaacaatggaggtgatgaggaggaataacttgaagacagtttaaagccacagtgatacaaagaatgaagagaaggaaggtgctggattt

SEQ ID NO: 933186 - DNA, 120 bp, Artificial Sequence
  ENSG00000235989_6 (sequence is synthesized)
tactaagaaaacagactgagttcaggagtctcaccagtagaactttatagtattgcgtttcgattacatgtgtgtgaattttaaaaactgattaccctccagtaaaaatgtggaaccaat

SEQ ID NO: 933187 - DNA, 120 bp, Artificial Sequence
  ENSG00000235989_7 (sequence is synthesized)
ttgcatttggattaaaacattaggtttggggacaaaagtggaccccatgctgcctgagatgaagagagagagcaggatggcagaggaatcaccagctcaagaaaccccaagacttggaca

SEQ ID NO: 933188 - DNA, 120 bp, Artificial Sequence
  ENSG00000235989_8 (sequence is synthesized)
gtcttccagcagaagaggccagggtctctcagtgtactactccaaacaggcctctcctagagatgtagtctgggaaggtccaaaacccaccagacaggcacatccagtggggaaaagact

SEQ ID NO: 933189 - DNA, 120 bp, Artificial Sequence
  ENSG00000235989_9 (sequence is synthesized)
tcccattccagtgtggcctgcatccctcacctctgcttcccagtcttctgctgacctcagaggagcagggtggccattgctgatctgggttagggagatgccagaaacacacccaggttt

SEQ ID NO: 933190 - DNA, 120 bp, Artificial Sequence
  ENSG00000235989_10 (sequence is synthesized)
gaaccacaggttagtggtacaaagtcacagtccttgtgccttcagaaaacccagaggccccaaatacgagtgggaagagagttgggaaaaactgaaccagactcttccaatggccattaa

SEQ ID NO: 933191 - DNA, 120 bp, Artificial Sequence
  ENSG00000235989_11 (sequence is synthesized)
tgcagagatgcctctggagtccctgtggccacgggatctcactggccccctcttcaggcaccttgatggggctcagtggggccaggccgaagggtggaagtagaaaagcatcaacaggct

SEQ ID NO: 933192 - DNA, 120 bp, Artificial Sequence
  ENSG00000235989_12 (sequence is synthesized)
gtccagatcaattggcaccatccaaggccctgctgcacccacacatggaggtcaccagctcagccccaggggttctttcacacacaagctccttccctaaggagtcctgtggggttccac

SEQ ID NO: 933193 - DNA, 120 bp, Artificial Sequence
  ENSG00000235989_13 (sequence is synthesized)
actcagtgtgctgcccaagtcagagatttaccacagatctgtctccccctcaacctggactcaagttactgtggtgagaaacctcactgtccatggttaactgaagaaatccctccttca

SEQ ID NO: 933194 - DNA, 120 bp, Artificial Sequence
  ENSG00000235989_14 (sequence is synthesized)
gaaagaacttgagtagtagatgaggtggttagacaggatctttttccctcaagctgtttggacgccacagccaggaccaactctgacagctgcgagagagagagcccctccaatgtggaa

SEQ ID NO: 933195 - DNA, 120 bp, Artificial Sequence
  ENSG00000235989_15 (sequence is synthesized)
cctcctacacagccccccttttgggtccctggatatgagcccccagcaggaccaccactctagggggaagtctccctcccatccctcagatccccacattgttcctcctgtaggagaaaa

SEQ ID NO: 933196 - DNA, 120 bp, Artificial Sequence
  ENSG00000235989_16 (sequence is synthesized)
gtcagccctgcccctggagcttctccaagatggcactggactcgccgttatcttgaggagccaggagctgaaatggctccggcttagcaacccagtatggccaaagtggaaaggttctct

SEQ ID NO: 933197 - DNA, 71 bp, Artificial Sequence
  ENSG00000235989_17 (sequence is synthesized)
gtcctttgctctcacaggcacagcatcttcttttaaaaaataaatatttataaacttaaggaagattcaaa

SEQ ID NO: 933198 - DNA, 120 bp, Artificial Sequence
  ENSG00000235989_18 (sequence is synthesized)
taacgggcgttaataaccataccctgttagactaagcatggtccacccgcgaatcctctacagagatggccaagcgctggggtcgtggctgcgtcctctaggccagcattgctgcccttc

SEQ ID NO: 933199 - DNA, 79 bp, Artificial Sequence
  ENSG00000235989_19 (sequence is synthesized)
ggtccacccgcgaatcctctacagagatggccaagcgctggggtcgtggctgcgtcctctaggccttcagcttactaca

SEQ ID NO: 933200 - DNA, 120 bp, Artificial Sequence
  ENSG00000235989_20 (sequence is synthesized)
gcaggagagaggctggctgagatggagcacacagctgagagctagcaactgcaacaagcgtaacaatcataatcacaacagttacaacaaatgcaggggcaggggtgggggaatgaagag

SEQ ID NO: 933201 - DNA, 120 bp, Artificial Sequence
  ENSG00000235989_21 (sequence is synthesized)
tgtggaatcgaaggtcaggccagactcaccagaggaaaagatattagctcatctgaattcatagcactcagctgcttcttggagatggggaaacttggaggcaggaagtaccgtaaacaa

SEQ ID NO: 933202 - DNA, 120 bp, Artificial Sequence
  ENSG00000248587_0 (sequence is synthesized)
acacgacaccctcccctggactgtgaaacaatcattggcccaataaaggctctgataagctctacagttatattttaaaccttaaagcatgggttgatgctatttaactcagtattttcc

SEQ ID NO: 933203 - DNA, 120 bp, Artificial Sequence
  ENSG00000248587_1 (sequence is synthesized)
ttccaaagttatttgatcagagaaccatcctgtcctcctccctttttttttttttaaatttgaggagcatctcactggggtaccgcactgtcacttaggctggagtgcagtggcatgatc

SEQ ID NO: 933204 - DNA, 90 bp, Artificial Sequence
  ENSG00000248587_2 (sequence is synthesized)
tcagcattaaatccaggactacctactaaaaggaactgaaccttttctacatatggttatgcatagtacagataggtatacgtggagggg

SEQ ID NO: 933205 - DNA, 120 bp, Artificial Sequence
  ENSG00000248587_3 (sequence is synthesized)
atatggttatgcatagtacagataggtatacgtggaggggactaagagcttaaagacaacaggaagtggagcccacgacatttctgttcagcaatggagcaaggaagaaataaagtcaag

SEQ ID NO: 933206 - DNA, 120 bp, Artificial Sequence
  ENSG00000248587_4 (sequence is synthesized)
tgccagtggtctctgcacgctgctccaggaaagggggcttgcctgagatgctccacaaataaaaattgggaaaaatgctgaaatctggggaaaattaatgacaaattttcttaaaaaggc

SEQ ID NO: 933207 - DNA, 120 bp, Artificial Sequence
  ENSG00000248587_5 (sequence is synthesized)
ctgaggggctctccctgcccgggggcagttcggggccttccccgattctctcctacaagaatgctggcgaaaaccacaactcgtttcctgtttccaaggacataaaggaaataccttcag

SEQ ID NO: 933208 - DNA, 120 bp, Artificial Sequence
  ENSG00000248587_6 (sequence is synthesized)
taaaaactctactaccactgagctcttcaagtcttgcagcagatgggaatttactctgagacgagagcaagacatgctggtttcacctgtacacatttaccaaagtcagcacaggagtat

SEQ ID NO: 933209 - DNA, 120 bp, Artificial Sequence
  ENSG00000248587_7 (sequence is synthesized)
gtccttgaagccaatctctgggctgtcaactcttgttcttatttgaccttcaggaacctctaaaatgtgcagtccatgagaatggactctaaatatgaggacattgaggatcagagatgt

SEQ ID NO: 933210 - DNA, 120 bp, Artificial Sequence
  ENSG00000248587_8 (sequence is synthesized)
tgaaaaacttgcccaaggatgcacaagtggaatggtaaagacaggatttgaattctgacctctctgactccgtgtcacaaactcctgaaagtgtgaaaggtgactgttgtctcttgggca

SEQ ID NO: 933211 - DNA, 120 bp, Artificial Sequence
  ENSG00000248587_9 (sequence is synthesized)
caggtagctgccaacaggtgagcctctcagcggatccctgatagaggtaggatggcaaatagcttctttaatatgacagcctcagtgtagtggctggcaaggagctgcgattgggaggaa

SEQ ID NO: 933212 - DNA, 120 bp, Artificial Sequence
  ENSG00000248587_10 (sequence is synthesized)
ctggaagtgacacccaagctcattgagcaagcatgctgtgagtgccatgataaagtgaagagctcaggagaaagattggatcaattatagaaaataatgaaggtacattttctttgcata

SEQ ID NO: 933213 - DNA, 120 bp, Artificial Sequence
  ENSG00000248587_11 (sequence is synthesized)
actaaatgtaggtactggaatacctgagttttggctgggcacagaactgtctggaatacagactgcaattcccagccttctgtgcagttctgtgtggccatgtgactaagttgtggtcaa

SEQ ID NO: 933214 - DNA, 120 bp, Artificial Sequence
  ENSG00000248587_12 (sequence is synthesized)
tatgagtcacggaagaatagaagaacaactcagaggaggaagaagtcagacatagccagacacggctgctagcagttccaccaatgaaagaggagaccaggatgtttaaaacaggcaaac

SEQ ID NO: 933215 - DNA, 120 bp, Artificial Sequence
  ENSG00000248587_13 (sequence is synthesized)
acaaggtgcgaaaaaccagaagcgaaaacttctgaggtcatttaagcaaggactatcgttatccccggaagcagagagaagttccctttgcccaacatcacactgcaagcacgtgttgga

SEQ ID NO: 933216 - DNA, 120 bp, Artificial Sequence
  ENSG00000248587_14 (sequence is synthesized)
gctgagattcaaacccaggcatccagggtccagggcccatgcttttaatatattccatatcttaggagaatttcccctatttaaacaataaaagtgcaaaaatcttgtggctagccaaaa

SEQ ID NO: 933217 - DNA, 120 bp, Artificial Sequence
  ENSG00000248587_15 (sequence is synthesized)
agcgccgggctttcctcgcgcctgtcgaaggccggccttcccgctcgggtgtctcgccctctcgcttctccgcagggcaggaggcagtggcgagaaaaggagctgccggccggagttcta

SEQ ID NO: 933218 - DNA, 120 bp, Artificial Sequence
  ENSG00000248587_16 (sequence is synthesized)
attcccttcagcttcaggagtgagttgattattcacatgttctttttagggggtttaagctgctagtccttaaagaatagatgctgaaggttgtcattgattcctctttccttcctccca

SEQ ID NO: 933219 - DNA, 120 bp, Artificial Sequence
  ENSG00000248587_17 (sequence is synthesized)
cgtctgctctgggccttctcattgatgtagtatcttaggttacttccaaaataatttgagaaatggatttatagaagaagctagctttccagtagaaaagtttagatgacaagattaatg

SEQ ID NO: 933220 - DNA, 120 bp, Artificial Sequence
  ENSG00000248587_18 (sequence is synthesized)
tgataagaactaagaaagcccttcctagttttcattgaaaatgtgtttttaatgcccagaggtgcccagtcaaaaaggaaatattacagaaggattattttcatcagcagagttcttggg

SEQ ID NO: 933221 - DNA, 120 bp, Artificial Sequence
  ENSG00000248587_19 (sequence is synthesized)
cattgcaagttccagtgtaattagggaaatcacatgcgagtacatcaatacacttcagatgccaatacattgggcttaatgaggacaacaagcctgcttttattaggggattgaataaaa

SEQ ID NO: 933222 - DNA, 120 bp, Artificial Sequence
  ENSG00000248587_20 (sequence is synthesized)
gtgaaaggagttcttgaaaagaattggtaattttggatgggataattcatcacttcactccagatcagtttttcacagtaagaagtgctggctcttcagaaaatttggcataaccaaagt

SEQ ID NO: 933223 - DNA, 120 bp, Artificial Sequence
  ENSG00000248587_21 (sequence is synthesized)
ttattgtcactatctcctccttctcacattgtcctttgtcgcacccccagcaggtccacagtgatcctgcgggccacccccatggaccctgcccgttttcttccatcgggggctatctta

SEQ ID NO: 933224 - DNA, 120 bp, Artificial Sequence
  ENSG00000248587_22 (sequence is synthesized)
cgtcagtctttcaaggtctcctcagtaatgcaggccagttggatttttgctttcttttcccagaggacaattcagcctcagcgtcttagtctaaaaggattcatgcaagcgtgtcagatg

SEQ ID NO: 933225 - DNA, 120 bp, Artificial Sequence
  ENSG00000248587_23 (sequence is synthesized)
ttttattaggctaagggggaggtattttgggttgtggggagcacttactgcaaccctgtatgaaattccctactcagtgatgttcaggctgcacgggccaacatggaaagggcttaaggg

SEQ ID NO: 933226 - DNA, 120 bp, Artificial Sequence
  ENSG00000248587_24 (sequence is synthesized)
agatgacaaaaacaaaatctcttcttccacaaagattttcagttgatcaattttgttacttttttgtgatgaaactatctgcactgcagctaatgatttttttctgaaggtggaaaaggt

SEQ ID NO: 933227 - DNA, 120 bp, Artificial Sequence
  ENSG00000248587_25 (sequence is synthesized)
aggagcaacagctttcagttctaaggatacattctgttgaccttcataagccctaggaactagaggggcaagattgaggaggaaatagagaaaataatttgctctatagtattttccccc

SEQ ID NO: 933228 - DNA, 120 bp, Artificial Sequence
  ENSG00000248587_26 (sequence is synthesized)
tgagctgccatctggggctttcagagcttagcactgcactcttgcaatgttgcacacaccacaggagcaatatcaagagatgtcaaacatgagtggtattggtcactggaaacagcagat

SEQ ID NO: 933229 - DNA, 120 bp, Artificial Sequence
  ENSG00000248587_27 (sequence is synthesized)
tccaaatagctgtctcaccagactattctttcagaagattcatttgtgccaactacttctttgtcatggatccttcctggttctgcaacacagatgtggaaagtgaagagaacacgtcat

SEQ ID NO: 933230 - DNA, 120 bp, Artificial Sequence
  ENSG00000248587_28 (sequence is synthesized)
ggaattccatttctaagagtggaaaatatacaatttaccatgggatgtttaagatattaatatattgttcaccatgtgtatccagagctttagtagaagtaggttaaaagagccgtgcat

SEQ ID NO: 933231 - DNA, 120 bp, Artificial Sequence
  ENSG00000248587_29 (sequence is synthesized)
gtatacacggtgctcctcattgtcaaacgctgaagcctgttacaggctgggtttgggggctgggggtacttacgggacaaagtctgactctcggtctgtaggctgagtgccttcttagtg

SEQ ID NO: 933232 - DNA, 120 bp, Artificial Sequence
  ENSG00000248587_30 (sequence is synthesized)
tgttgggactcagcatgtattcaccccatctgtactcacaagcctaattcattaatcaggatgacttactgggctgtgagccctttgaggacaggaccttgtacctttatcttgtgcctc

SEQ ID NO: 933233 - DNA, 120 bp, Artificial Sequence
  ENSG00000248587_31 (sequence is synthesized)
ttatcaaggcatacatgatgtcagatcaactgcatgtgtttaaagttttacacttgatgagttttgatatatgtctatacccgtgaaaccatcactgcaatcaagataataaacgcattc

SEQ ID NO: 933234 - DNA, 120 bp, Artificial Sequence
  ENSG00000248587_32 (sequence is synthesized)
atccaccctaaagtttctcgtgtccctttgcaagccaccccccttcctcccattgttcccagacaaccactattctgctttctgtcactgcagatgagtttgtgttttctggaattttat

SEQ ID NO: 933235 - DNA, 120 bp, Artificial Sequence
  ENSG00000248587_33 (sequence is synthesized)
ataagtggaatcatacaacatgtactctgtttttctggctgttttcactcagcataattttctcaagattcattgaagttttatatattaatagtttgctacatttcattgctgaatagt

SEQ ID NO: 933236 - DNA, 120 bp, Artificial Sequence
  ENSG00000248587_34 (sequence is synthesized)
attccattgtataaatcataataggcacctaacaagtgtttgtggctttacactgacttgaaaattaatttttaagaatataattgggcaaaaagtggacaatgggataccactctattc

SEQ ID NO: 933237 - DNA, 120 bp, Artificial Sequence
  ENSG00000248587_35 (sequence is synthesized)
tccaataagtggaaaactcacttgtcctccaacaattctggataaatgaaagaacgaattgaactgagactggaatccgggtctcccagtactttgtagttcctatccatatggcttgtc

SEQ ID NO: 933238 - DNA, 120 bp, Artificial Sequence
  ENSG00000248587_36 (sequence is synthesized)
aggaaggccacagggaggttaactaactctgcgtaaccagaaacaatcccacatcagactgttggcagtgggagtggaacactcagagctgaaccgcatgcaagatggttgcattttcat

SEQ ID NO: 933239 - DNA, 120 bp, Artificial Sequence
  ENSG00000248587_37 (sequence is synthesized)
ttgcaatgtcgtcatcttcctcatggctaaagaggtattttggagttgacatgaaggctactgtaatttttagaggcattttctttctggcctgtatttacatattgtggtagaagagtc

SEQ ID NO: 933240 - DNA, 120 bp, Artificial Sequence
  ENSG00000248587_38 (sequence is synthesized)
agaagacttcaagcttcaaaagtgaatcttgttgcgagttacaaaagcaccacccggtggggtgcagctctcagcatgtgtcaccacaggcactgtgatttccctgtcttcatccaactt

SEQ ID NO: 933241 - DNA, 120 bp, Artificial Sequence
  ENSG00000248587_39 (sequence is synthesized)
tggttgctgttcttcatgctcaggaattctgcaactgctgtagcttttgctgttgttatgtctgtaggtatggactcatttctaccattctggaatgaaacattatttcaagggaagctt

SEQ ID NO: 933242 - DNA, 120 bp, Artificial Sequence
  ENSG00000248587_40 (sequence is synthesized)
ctcattgtaaaaggtccacacattcagaaggaaactgggagtacattttctcataggcctggagcattaactgactatgcatctttcccctcagtgttgtcatcatgttgtaaggggatg

SEQ ID NO: 933243 - DNA, 120 bp, Artificial Sequence
  ENSG00000248587_41 (sequence is synthesized)
gctctgcgcctcctctgggcgcactgcctgggagcacgagactggtttgtctgatgctgctgccggagctgaggtcttgcctggagatccgaacgagacaccacgtcaaccggcgcgggg

SEQ ID NO: 933244 - DNA, 120 bp, Artificial Sequence
  ENSG00000248587_42 (sequence is synthesized)
agtcccgtgaagacatgagggcgccaggagcgcagttcgtaacttctgtcattggatgagaagagataaggacaacagagaatcccgttccctgtctagcttggcagcactgcccttctt

SEQ ID NO: 933245 - DNA, 120 bp, Artificial Sequence
  ENSG00000248587_43 (sequence is synthesized)
gttgaaagcattgatttatttgccttccccatctggccttccaggctgaagcactgaacatttctactccatttttttttaatgaaatgaaagcccagagatgtgatgatttttaagagt

SEQ ID NO: 933246 - DNA, 120 bp, Artificial Sequence
  ENSG00000248587_44 (sequence is synthesized)
tgaactgagctgcaagcttgtggatcatgtaagtgctaacagaggcagacggagaaggaagatctgtcatgaagtgctacggtgggaggtgcgtcagcttggggtggaggggtcccaggt

SEQ ID NO: 933247 - DNA, 120 bp, Artificial Sequence
  ENSG00000248587_45 (sequence is synthesized)
ggccccaggagaagaggcctctgaacaaagaagacaatgcttgggttacggtggaagggacacggaagggtctggaatgctggaaggagccaagagcagatgccatcttggtgatgtgtt

SEQ ID NO: 933248 - DNA, 120 bp, Artificial Sequence
  ENSG00000248587_46 (sequence is synthesized)
tcatcttcaggacctgagacccatctggtcaaatatttgtgtgtatatgcaaaattttaggtcatttgttaaaaggagctcatgaatacatgtccttgacttcccagagatggaaaaaac

SEQ ID NO: 933249 - DNA, 120 bp, Artificial Sequence
  ENSG00000248587_47 (sequence is synthesized)
acttctctccgccaaagaacttccaaatagtgcttctagcctatgctcctcatcagtgtccatgtctctcagatgtctctagttttggttgaggaatgaggaaatgtggttgcctccttt

SEQ ID NO: 933250 - DNA, 120 bp, Artificial Sequence
  ENSG00000248587_48 (sequence is synthesized)
tattggctgattcgtctgctgagctcctaacttcttagctaatctaggtgaaaccaacccttgtcctggaccctgggcttttgtggaggactgtcttactgttcacaaatactccgcctt

SEQ ID NO: 933251 - DNA, 120 bp, Artificial Sequence
  ENSG00000248587_49 (sequence is synthesized)
ttccatgagaagctaatttatccctgcctgttgaaattgggcatggacaatgacttgcttggttgtctaataaaatgtgagcagaaaggatatgcgtcacttctgagccaaaagttttca

SEQ ID NO: 933252 - DNA, 120 bp, Artificial Sequence
  ENSG00000248587_50 (sequence is synthesized)
gagccagtgcatggttggccatgttttctcttgcctttgtaggcacacaataaatgtttgttgaaaaaagatgaataaaaggaaagagccccaattaggagctgggttagctgaggccta

SEQ ID NO: 933253 - DNA, 120 bp, Artificial Sequence
  ENSG00000248587_51 (sequence is synthesized)
gctgggttagctgaggcctattcccagagtttccactaactagctgtggcataatcatttggctactctactggccataaatggttctttgttattttgaaatggagtctcgctctgtca

SEQ ID NO: 933254 - DNA, 120 bp, Artificial Sequence
  ENSG00000248587_52 (sequence is synthesized)
tcttgaactcctgatctcaagtgatctgtcagccttgggctcccaaagtgcataaatggttcttaagatttctttttttttttttttttgagatgggggagggtcttgctatgttgccca

SEQ ID NO: 933255 - DNA, 120 bp, Artificial Sequence
  ENSG00000248587_53 (sequence is synthesized)
cttgctatgttgcccaggctagtcttgcactgttgggttcaggccatactcctgcctcagccttggagtagttgggattatagacgtgagccaccatgcccagctcaggattctttcatt

SEQ ID NO: 933256 - DNA, 120 bp, Artificial Sequence
  ENSG00000248587_54 (sequence is synthesized)
cagctcaggattctttcatttctaaaaccctgtgcagatattgcagaagtaaagtgatgatttttggatgcttattggaagtcttgttcatgctggtgaatggggaaaagactttgggtg

SEQ ID NO: 933257 - DNA, 120 bp, Artificial Sequence
  ENSG00000248587_55 (sequence is synthesized)
ttccaacacctttctcagacttccccacactccccctcaggacatcagaaggagggcccccgaattcattcttgcagcaaagagcctcaagactctgctcagaccaggaaatgagggacc

SEQ ID NO: 933258 - DNA, 120 bp, Artificial Sequence
  ENSG00000248587_56 (sequence is synthesized)
tgttcctacaaattgctgtcaaaatgtattcttaatatttgttctctggagtcactgttttggtgacctcagtccctggaggctcctcctgggggcgataggatgccttcagaggggagc

SEQ ID NO: 933259 - DNA, 120 bp, Artificial Sequence
  ENSG00000248587_57 (sequence is synthesized)
tgacagccctgtgttgtgtctgggctcgcgggaggccatcgctgtgtccattggagccagatgttttcccagcccttaacctgctgtggtttcttagctcaacgtctccagtgcgactct

SEQ ID NO: 933260 - DNA, 120 bp, Artificial Sequence
  ENSG00000248587_58 (sequence is synthesized)
cccataacacccagcgccatcttgtagacgcgctcatgcttccggaccgcgggcgccccaccgggaagagcgctccacgctgaagaggaaggaaacttcacacttaattcatcaaattca

SEQ ID NO: 933261 - DNA, 120 bp, Artificial Sequence
  ENSG00000248587_59 (sequence is synthesized)
aactgagctgtggtgaaaggaacggggcagagtgaaaggaacacccatatgccccagaagaccccggggcatcgctgcctttcagcttcttttgcgctttctgcagctcgtgtcacattc

SEQ ID NO: 933262 - DNA, 120 bp, Artificial Sequence
  ENSG00000248587_60 (sequence is synthesized)
caaggacactcagctccgcacatgcacagagggccgcgtctgtcccgggggcgtgttacctaaaaccaggcgctgacctccaggtcaggaactcttgagtatttaatctctccgccgttc

SEQ ID NO: 933263 - DNA, 120 bp, Artificial Sequence
  ENSG00000248587_61 (sequence is synthesized)
atggctacccgggtggcctctgaaatattacttaatgtctctgggttctgatttcctcaattgtgtggtacccagtgaccttacgatgacatttcactacctacgaaaaatggcgccatc

SEQ ID NO: 933264 - DNA, 120 bp, Artificial Sequence
  ENSG00000248587_62 (sequence is synthesized)
tgaatgtttagtctttacctagaagtataagaaggggtttcttgcctgggaatgatcctgtgaagctgaggtcacagtttatcttctcaattagggcagggattagtacaacagaaggtc

SEQ ID NO: 933265 - DNA, 120 bp, Artificial Sequence
  ENSG00000248587_63 (sequence is synthesized)
attcgtcaagaaaaaggaaagcttctccctttccaaaaatgcaagtagtgaaacttacatttctcacttttccctgattgctcagaactaaatataaaatttaattggcaagtattttag

SEQ ID NO: 933266 - DNA, 120 bp, Artificial Sequence
  ENSG00000248587_64 (sequence is synthesized)
tcttttggtcataatttttaattttattaaccttactgatttgacagggtcaaatctaaataaataataatattttatttattatacaatacataaatttctgcatagcttgaagggacc

SEQ ID NO: 933267 - DNA, 120 bp, Artificial Sequence
  ENSG00000248587_65 (sequence is synthesized)
ctgcatagcttgaagggaccttgtggattgttaaatccaactatgtagtttacagattaagcagttaaagtctgcagagaagggacaggactaaatgtcatcagcttgttagttccaaag

SEQ ID NO: 933268 - DNA, 120 bp, Artificial Sequence
  ENSG00000248587_66 (sequence is synthesized)
ctgggtgggaaaagcagttcttccttctgattcttagaccaataattcattcctccattccataatgacgattcttagaacgtgaccttacctgtaacagtagggacaaagcaagacaat

SEQ ID NO: 933269 - DNA, 120 bp, Artificial Sequence
  ENSG00000248587_67 (sequence is synthesized)
tgtctttgagtttcaggaacagactttttagaattaaatagtttcaggtacatgctatagggaattcagttgatttgtcctggttagaaagcactttgttcacacctatacatatgactc

SEQ ID NO: 933270 - DNA, 120 bp, Artificial Sequence
  ENSG00000248587_68 (sequence is synthesized)
taggttatgggttcttctggagtcttctgaacctgctgggcatttctgactggatgaaaattaacaaaagtctatgttcatcctgatgaaaattagcagcagttcatcttagtttaattg

SEQ ID NO: 933271 - DNA, 120 bp, Artificial Sequence
  ENSG00000248587_69 (sequence is synthesized)
ccacaacgtgcagctatgagagtatgtatattttcattcacgtatttgaaatatttatggattgtctgttatatgactagtactaggggttctataaatttacccatataatgtgtatgt

SEQ ID NO: 933272 - DNA, 120 bp, Artificial Sequence
  ENSG00000248587_70 (sequence is synthesized)
attgacttttaacatggtggctctgtggtgggatgtggggttaacctaacatcattacaaaatttacaaatcatagttatggtggtttatttggaaatgttttctgtggatgccctgtct

SEQ ID NO: 933273 - DNA, 120 bp, Artificial Sequence
  ENSG00000248587_71 (sequence is synthesized)
catttattgtatatgaatttttgttatgtttaatctctagggttggtttggcttgtgactctcattttttatttgaaatatttcaaacatacataaaagagtgtatgtccagatgtcatt

SEQ ID NO: 933274 - DNA, 120 bp, Artificial Sequence
  ENSG00000248587_72 (sequence is synthesized)
tatctagcaaacacatgactctgtagaacagtagttgccaactttatttattaatgtagtagcggaaccctttttgcaaatggcatgctatgcagaagcccattatataaaacatctcag

SEQ ID NO: 933275 - DNA, 120 bp, Artificial Sequence
  ENSG00000248587_73 (sequence is synthesized)
agcttctctggttgaagcaaaatggagggcttggagccttcctagattaaaccccaccttggccacccctttctacaccacggtagccccttgaatctgctcacccagcctgaaggtctt

SEQ ID NO: 933276 - DNA, 120 bp, Artificial Sequence
  ENSG00000248587_74 (sequence is synthesized)
gtgagcacatctgaaaagcacagattaagaaccagaaagcaagctaaacacagtgatcagattagccatagcaggtgatccagtgtccaaacagtaaagcccatccgttttcttcataga

SEQ ID NO: 933277 - DNA, 120 bp, Artificial Sequence
  ENSG00000248587_75 (sequence is synthesized)
attgaccagtctttaggacaactagaaatcttttctttctttgttttaaaaaggaagacaagtcaagatacagcaaataaaaatgctcagcacatttgctgaaatcttagcaaaatcaaa

SEQ ID NO: 933278 - DNA, 120 bp, Artificial Sequence
  ENSG00000248587_76 (sequence is synthesized)
tcctcttcttcttcctgctctctgttgtctggaaggtggctgtaatgtctggagctctggcagccattttggactagaagagaccttgagaatggcggccgctcatgacagagcaataaa

SEQ ID NO: 933279 - DNA, 73 bp, Artificial Sequence
  ENSG00000248587_77 (sequence is synthesized)
ccatagagtgccatggccgacctggactacctcctgccaggcttctcaactgagaaatatataactttcgatc

SEQ ID NO: 933280 - DNA, 62 bp, Artificial Sequence
  ENSG00000248587_78 (sequence is synthesized)
gcactccagcctgggactaactaactgaataaattttgatcttatttaaaccacactgtttt

SEQ ID NO: 933281 - DNA, 120 bp, Artificial Sequence
  ENSG00000248587_79 (sequence is synthesized)
aactgaataaattttgatcttatttaaaccacactgtttttgtgggggtttttgtttgtttcttgcagacaaaacaattctaactcatacagttagtaagatggagttagttagaacaag

SEQ ID NO: 933282 - DNA, 120 bp, Artificial Sequence
  ENSG00000248587_80 (sequence is synthesized)
agggagcttaatgttgctggaagatcgtttccatcatgctaatatgtccatctccagtgtatggatgtttctgactagaaacctgtgtcaactgttagaatctcttttcatgagttctgg

SEQ ID NO: 933283 - DNA, 120 bp, Artificial Sequence
  ENSG00000248588_0 (sequence is synthesized)
cttagcagctgaagactgatgctgcctgatcacctcaaaagccctgtagaccaccacagacgccgagcttcgagtaactctcacagtggaagtgctgtgctgccttctgaattctcctac

SEQ ID NO: 933284 - DNA, 120 bp, Artificial Sequence
  ENSG00000248588_1 (sequence is synthesized)
gcagtggccaggtcgtatggtccttacattccaggaaattgtaaagctcttcaaactcttcaaattataaaactcttctcttgaagacaaccccttttcttggcaaagaggacctaactg

SEQ ID NO: 933285 - DNA, 120 bp, Artificial Sequence
  ENSG00000248588_2 (sequence is synthesized)
aatgtgttgagatacccatgaatctgctcctctgatcacagttctgatgacatgcaaaaactaccttggatcaagagaagcatctccatgagggcctaatgcctataagaaaatatcaga

SEQ ID NO: 933286 - DNA, 120 bp, Artificial Sequence
  ENSG00000248588_3 (sequence is synthesized)
gcggggacattctgaaggtttgtatctgacctatctttggttttaatcactgaagttctcgacgttttaataagttgaaggtgctgggtcacagtctaacttaataaggcccgccacaga

SEQ ID NO: 933287 - DNA, 120 bp, Artificial Sequence
  ENSG00000248588_4 (sequence is synthesized)
gagttggtcacctctgattgctcccataagtcttagcacatctggtacactgtccttggttgagaaatgttttccataacttttctcttgttcactaccctgcatataaattgtttttat

SEQ ID NO: 933288 - DNA, 120 bp, Artificial Sequence
  ENSG00000248588_5 (sequence is synthesized)
taacctgagaatgatacagcactgtatatttgtgtgagcttttgccattttcagctttatcctatggaaagagagttgattgtttcctccaaaatggaattaaacactgtttatcaccaa

SEQ ID NO: 933289 - DNA, 120 bp, Artificial Sequence
  ENSG00000248588_6 (sequence is synthesized)
ttttgtaacctagagattaacaacaggctaaagcttgcagatccagtttcacaatgtttttttgcacatgctgtagaggtgatgcagcagcttcctgatgtccagggttttggtgtatat

SEQ ID NO: 933290 - DNA, 120 bp, Artificial Sequence
  ENSG00000273828_0 (sequence is synthesized)
gaggtacagcgtagttttgtcctccgcgaagtccctcaggctcagagcacagccgtgtaattgtctgcgtctctcccgcgctcaatcaggggcttgctttggaaccccggtgcctgctag

SEQ ID NO: 933291 - DNA, 120 bp, Artificial Sequence
  ENSG00000273828_1 (sequence is synthesized)
tgttctgcatacagtgagcatccaaaaaatgtgttaagcaagtgactggagcccaattcctgctgccgccaaggagtcaggcctgctggccctctcccctttgcctctcctcttttacta

SEQ ID NO: 933292 - DNA, 120 bp, Artificial Sequence
  ENSG00000273828_2 (sequence is synthesized)
ttacaaagctggcccttcaaagcacagtgctctctgcaatacagaagccctcgctatctctacagtggagaaaatgtgcgccacgggaaaaggtcatagcatagaacaatctgaagagca

SEQ ID NO: 933293 - DNA, 120 bp, Artificial Sequence
  ENSG00000273828_3 (sequence is synthesized)
ctggtctgcatcccacttagaaacctccaactccaaatgtcaattttcctcctgagacagcatttctgggctgctgcctcccgctccagagagatgtgcttctgggaaagtcaactacac

SEQ ID NO: 933294 - DNA, 120 bp, Artificial Sequence
  ENSG00000273828_4 (sequence is synthesized)
tgtgcaagaggtctgtgaaatgtgtcggcacttccataaaatagatgtaactgaggatcttcagtcgggccctcttctcctgcttattccttggcaaagaatttctaagatcctcctcta

SEQ ID NO: 933295 - DNA, 120 bp, Artificial Sequence
  ENSG00000273828_5 (sequence is synthesized)
gcaccctgggcactcaggaagtaaaagccacctttttctagccactagggaagaacaagggctggtgtttcccagtctgtccggagagtgactctttacccaacacatggaagctacctg

SEQ ID NO: 933296 - DNA, 120 bp, Artificial Sequence
  ENSG00000273828_6 (sequence is synthesized)
gatgctgagtgaagataaatagtgccgtctccttgggtcgtttaattccaagcaaggcccatattgattttgcctctccctgtactaacctgttcggtgatgtacagctgaggaccatct

SEQ ID NO: 933297 - DNA, 120 bp, Artificial Sequence
  ENSG00000273828_7 (sequence is synthesized)
gcataacggagggtataatactctgggtttggcaacgaccacctatgcaagagaaaaacagtatatcccacttggccactctcttgttcagaagctgctcataagtaattttcaaaagag

SEQ ID NO: 933298 - DNA, 120 bp, Artificial Sequence
  ENSG00000273828_8 (sequence is synthesized)
ttgctcaagggattgggtggcctatttggaatacagtggaaacaaagctttaggttgtcatgttgaaaaaatcatggcctcagccttttgtaaagatgagcaccacaataggaggtgtgc

SEQ ID NO: 933299 - DNA, 120 bp, Artificial Sequence
  ENSG00000273828_9 (sequence is synthesized)
agaactgaggaggggtctcagatcctacctcaatagggcaatgctagactttaaggaaaaaattaagaagtataaacgtcttaggggtatggttgtcaactgtacttccttcccaagaca

SEQ ID NO: 933300 - DNA, 120 bp, Artificial Sequence
  ENSG00000273828_10 (sequence is synthesized)
atgattcccaagacccccatgctgaggacctgcctaactggagatccttcccagaactcccctcaaggtgtaggagtgctctttcagtcggagctgccactgttgaaaacgaggtccatt

SEQ ID NO: 933301 - DNA, 120 bp, Artificial Sequence
  ENSG00000273828_11 (sequence is synthesized)
tcaacctacccatcacaaacttccttgataatggatgccaggggccgtttctgaaagagagagagagaaagccttcaacagcagcaacatcctactcatgccaaggttctgacaagaggc

SEQ ID NO: 933302 - DNA, 120 bp, Artificial Sequence
  ENSG00000273828_12 (sequence is synthesized)
ctgccaagcagggtcaagctggggcatgagaatgaacttctttcctaacagcttttgttgaagaggaagcctctcccaagccatggtgaccgaccttccctagggtgggccaggcccaaa

SEQ ID NO: 933303 - DNA, 120 bp, Artificial Sequence
  ENSG00000273828_13 (sequence is synthesized)
gcttagccttcctgttgctcgttcttactcttgatgccggtggtccccatccctcaagatgtcctctgccatgcactccccaggtgcctttccttgaaccactgcttctcacttcaggag

SEQ ID NO: 933304 - DNA, 120 bp, Artificial Sequence
  ENSG00000273828_14 (sequence is synthesized)
catacctggtcgatttcaaggagctgggcgttagcacctggccactcaatggccactttgacaatgtctgacggtggtggcatcgttcccaatgggctctaattctgcgagacaaaaaca

SEQ ID NO: 933305 - DNA, 120 bp, Artificial Sequence
  ENSG00000273828_15 (sequence is synthesized)
cagacacggctgcctggggagaaagaatcagaaaggtggaaaaagagtatttcttcatttttcactcttgttacatgttttgaagagtttgaagacagacactgcataaagtaacacatg

SEQ ID NO: 933306 - DNA, 120 bp, Artificial Sequence
  ENSG00000273828_16 (sequence is synthesized)
aaactacctggtttgaatttttctagatcataccacaacttctgcttaggattttgtctcttgagattaaatcagcaagaagaaatgggacaaactatctatcatccatagatcagccag

SEQ ID NO: 933307 - DNA, 120 bp, Artificial Sequence
  ENSG00000273828_17 (sequence is synthesized)
tagcaagatatgccaatgtggcacttcagtttaagagtcaagaagactcagtggtagaggaatgtatttactgcaaattcctgtcttgagaccttgggaggagagaagcatatgctccga

SEQ ID NO: 933308 - DNA, 120 bp, Artificial Sequence
  ENSG00000273828_18 (sequence is synthesized)
gacagataagaatagacagccttttcttggttgagtggttagctggaggagccaggctacttctttctgcagtcatcctaggaagatcccagcatcagcagggcccagctacatgctctc

SEQ ID NO: 933309 - DNA, 120 bp, Artificial Sequence
  ENSG00000273828_19 (sequence is synthesized)
ttgcttcctccccactcatcgatgccacccctttcccctcaaaggacacaatgcaaagcctcctctgtgtgggacgacatcagaaaatggggaagataactgggacaggaaatgctattt

SEQ ID NO: 933310 - DNA, 120 bp, Artificial Sequence
  ENSG00000273828_20 (sequence is synthesized)
tcgtccctactgccaagggcaagggcggctgacaactcaagtggagagaggtaaggatatcctcacacaagggcccctcttataaggacaaggctttgcaagtacctctgaccccctccc

SEQ ID NO: 933311 - DNA, 120 bp, Artificial Sequence
  ENSG00000273828_21 (sequence is synthesized)
taaagcattctctctccaaggtctgacgaagggaagtcacttggctgatggattatttcaatgtatatttacactccttgcctacaagttcaggagaggcccctctcttaatgaaaaaga

SEQ ID NO: 933312 - DNA, 120 bp, Artificial Sequence
  ENSG00000273828_22 (sequence is synthesized)
cctttctgcatcctccaggtttagccattcacccacaattcatgcctcgctaatggggaccacctgcctctcctggcgtacaaagcatagctgtcgcgaggctattatgcatgtatgcta

SEQ ID NO: 933313 - DNA, 120 bp, Artificial Sequence
  ENSG00000273828_23 (sequence is synthesized)
tcaatttttcagcccaaacacagatgtcagttctcacagcctggtaagtataaacctcttagatgaaaaggagtaaaagtcctgtcccccacaagcccatcggcctcagaaagagggatg

SEQ ID NO: 933314 - DNA, 120 bp, Artificial Sequence
  ENSG00000273828_24 (sequence is synthesized)
ctttcatgaccatttcctagtcagaatgggatgcttcagaagtctactgtcataaaaagccagcatttccagaacatgacaatgtaaaggaactagttttccaagtgctttcacttattt

SEQ ID NO: 933315 - DNA, 120 bp, Artificial Sequence
  ENSG00000273828_25 (sequence is synthesized)
tattgtgtcctcccagcagccccacgaattaggcagaacaggattatcacctccatttgaagatggcacaactaaagctcagtgttttgttaagtgcccaaggtcacccagctagtaagt

SEQ ID NO: 933316 - DNA, 120 bp, Artificial Sequence
  ENSG00000273828_26 (sequence is synthesized)
cataacggttgacagaacttggactggcttcggccaatgctttccccttttcctttgagccagcctcaacttctgtccactgcaattaaacgcagcctaaagggattgaagtgggttggc

SEQ ID NO: 933317 - DNA, 120 bp, Artificial Sequence
  ENSG00000273828_27 (sequence is synthesized)
cttatggcccccaaggcttccataacttctgcagctcatggcagaatttttcacatgtaatttttatgtgcctagacacacgacaaacctcagaaaagaaactggccctatctgcataat

SEQ ID NO: 933318 - DNA, 120 bp, Artificial Sequence
  ENSG00000273828_28 (sequence is synthesized)
ttctggggaaaatgctctgctccagttacagcaagacagggagttcttgttctaggggtggcgccatcaatctctggatgcttagagatgcatccttatccttatcggcaaagctgctgc

SEQ ID NO: 933319 - DNA, 120 bp, Artificial Sequence
  ENSG00000273828_29 (sequence is synthesized)
aattagtagacaggactgcacggttgtgaggtcaattttaaaaactgagatataatttacatacaataaaatgcagagggcttaagggtacatatgtttgtatatataaatatacatcat

SEQ ID NO: 933320 - DNA, 120 bp, Artificial Sequence
  ENSG00000273828_30 (sequence is synthesized)
ataaatatacacatgcatctccctgtaaccagcactcaaaacgagacactgaacattttcatcaccctagaaaattacttcatacttcctcttcccgtcaatccttccagtcctttaaag

SEQ ID NO: 933321 - DNA, 120 bp, Artificial Sequence
  ENSG00000273828_31 (sequence is synthesized)
gggaatttctgacttatcatcatccatgagttttgcctggttttgtacttcatataaatggaactatacgatatgactttttagatcatttgtttagtttggcttcttcttatttttaaa

SEQ ID NO: 933322 - DNA, 120 bp, Artificial Sequence
  ENSG00000273828_32 (sequence is synthesized)
ataagcaggcacagaaggtacaacagaaagaacactgggctgggataattgtccctgctgaaacaagtgactggatttagaaccaaaggcctcaggacccaatcctaggtctttcacaat

SEQ ID NO: 933323 - DNA, 120 bp, Artificial Sequence
  ENSG00000273828_33 (sequence is synthesized)
gtatacatggccctttaaccaaatctcagttttcttctattgaaagatgtgagtgtagaactaaagcatgtctcaggtgccttctaagtctaaaagtccatgattcttaagtggaattta

SEQ ID NO: 933324 - DNA, 120 bp, Artificial Sequence
  ENSG00000273828_34 (sequence is synthesized)
aaaaatccaagtgaggatgcccattttaaagtccttaccaaatgaagttacacccttccttaatttcgatggtgctgctaagaaacaaaccccatgatttttaactcctttctgaacgcc

SEQ ID NO: 933325 - DNA, 120 bp, Artificial Sequence
  ENSG00000273828_35 (sequence is synthesized)
gtctttggagattaagctaaagctcattaggttatagctattattttctcttgaccccatatgacatatcctagattgactctctctttattaaagttagccctgaatgattctcggctg

SEQ ID NO: 933326 - DNA, 120 bp, Artificial Sequence
  ENSG00000273828_36 (sequence is synthesized)
ttcaaaaattcgtatacattttaaagcatggagatttgcaaccaccaaactatttgaaagatattaataagcccccattctcagtgactctgtccttcccacaaagcccaggcagcctct

SEQ ID NO: 933327 - DNA, 120 bp, Artificial Sequence
  ENSG00000273828_37 (sequence is synthesized)
ctgaactgaatgacactctccacaaccctgccatagctgatgggactaaagtgaatacccaactttagctgaactattccagttctttctcttgaatttaaaagacagagactggctggg

SEQ ID NO: 933328 - DNA, 87 bp, Artificial Sequence
  ENSG00000273828_38 (sequence is synthesized)
aactactcgggagactgaggcagggaggacaacagattgcaccattacgctccagcctgggcgacggaatgagactccatcataaat

SEQ ID NO: 933329 - DNA, 120 bp, Artificial Sequence
  ENSG00000273828_39 (sequence is synthesized)
cgctccagcctgggcgacggaatgagactccatcataaataaatacacacatacatacatacaaacaaataaaagacacagactaagggaactgggtgataatgaccctggagaagtaag

SEQ ID NO: 933330 - DNA, 120 bp, Artificial Sequence
  ENSG00000273828_40 (sequence is synthesized)
atcatagtaagcttcagagcgaataccatggcaagccaaagatccgtacgagccaaagatatggagaataaaaaaccaagagcctttcagaggaagtgattctgcaggaggaatccataa

SEQ ID NO: 933331 - DNA, 120 bp, Artificial Sequence
  ENSG00000273828_41 (sequence is synthesized)
atatctaaatgaactgaggccagaaatcagaaagagatggaaaagccattacctgctaactttccagattatgtggctattacttcctatgctcggggtacctgaaagtccactgtatcc

SEQ ID NO: 933332 - DNA, 120 bp, Artificial Sequence
  ENSG00000273828_42 (sequence is synthesized)
cagttcaagagggacacagaatcacttatctatttcccaagaccaaagaagacattggacctttgtcaaactccaacacctgttgggagaacctaaggaagttgttaagcaagtgactgg

SEQ ID NO: 933333 - DNA, 120 bp, Artificial Sequence
  ENSG00000273824_0 (sequence is synthesized)
ggatgatatatgtgaaagttcttagtaggtacagaaattatactaaaaaagacaaacaaatccacatgctatgatgcagtgtggactatctttggtcacctacatgtcaaaggtggtctt

SEQ ID NO: 933334 - DNA, 120 bp, Artificial Sequence
  ENSG00000273824_1 (sequence is synthesized)
aaactgctctggtttggtaaatgttggagtagactagaagtcagagagtacggaatccacccttatttgctctcaggctttggtttacaatgagctcaagtgtagggattgtgtcaaatg

SEQ ID NO: 933335 - DNA, 120 bp, Artificial Sequence
  ENSG00000273824_2 (sequence is synthesized)
attcctggaatcctttacaatttgtaaaattctatgaattcgtgaagtctgcaaaatgtgaatccgaggtgtatgtattgtagagcaactattagaccatttatcacattatacatatat

SEQ ID NO: 933336 - DNA, 120 bp, Artificial Sequence
  ENSG00000273824_3 (sequence is synthesized)
ccatcatcccatacctttgagtccagccccagaaagagcagtcccttgcataccatccagcatgaccttgggcatcctttccccactccccaccatagctgtttcggctagagttggaaa

SEQ ID NO: 933337 - DNA, 120 bp, Artificial Sequence
  ENSG00000273824_4 (sequence is synthesized)
cctgtccacggtaggccccttggagtctcctgctggacacttgggattagaatggagacagtcaagttaacagacagtaatgctggacctggacggtcactagcacgtgttggaagctga

SEQ ID NO: 933338 - DNA, 120 bp, Artificial Sequence
  ENSG00000273824_5 (sequence is synthesized)
gggcaccagccagtgtaagccactgtggatggtgtaataggagagcaaaggaaggcaatctgggaatgggttggatggggagggagaaaaggtgggggaaagagagaaatgtaaaatgag

SEQ ID NO: 933339 - DNA, 120 bp, Artificial Sequence
  ENSG00000273824_6 (sequence is synthesized)
ggaagcagaggaagagataacatggcaatgaagaaagtaacatctttggtcattttctgttccaatcacccacagcaggcctgtcagttctctcttaccttctgttctcttttacctaag

SEQ ID NO: 933340 - DNA, 120 bp, Artificial Sequence
  ENSG00000273824_7 (sequence is synthesized)
tagattttagtggcttttctattcttgatctccaaccatgccctaagacatatggtaacacagactgaggattctctgacggcagggctttgtctcattcctttttggaacaagcacaaa

SEQ ID NO: 933341 - DNA, 120 bp, Artificial Sequence
  ENSG00000273824_8 (sequence is synthesized)
gtagatgctcaatgaatttatattaaaatgacatgaaaatcatatgtttgtatctgaagtgtcactgatggcatttatatgaaaaaggttaattaaaatagataattatgtttcaacagg

SEQ ID NO: 933342 - DNA, 120 bp, Artificial Sequence
  ENSG00000273821_0 (sequence is synthesized)
caggaggcagcactggccctgcgggaagtggccactccgagcttaggggccttcttagatggctgagtgccggcaatgcaggaccctggaggtgtttcagtttcctggagctatctcaac

SEQ ID NO: 933343 - DNA, 120 bp, Artificial Sequence
  ENSG00000273821_1 (sequence is synthesized)
agaagctccttccagggccctcggggaggatcctagcctcctccagcctccggtggaggccgcagcccttcctggtctttcctcctcgcctccgtcacctcatggccttttcctctgtgc

SEQ ID NO: 933344 - DNA, 120 bp, Artificial Sequence
  ENSG00000273821_2 (sequence is synthesized)
ctgtgtctcttcttataaggacactcatctggatttagagcccaccctaatccaggataacctcatcgtcttgtgattatatctgcaaagaacctatttctaaataaagtcacgcaggta

SEQ ID NO: 933345 - DNA, 120 bp, Artificial Sequence
  ENSG00000237728_0 (sequence is synthesized)
gtgttcacacagtgctaagggaacacgctgacgtgtgtgacatcaagaactccagtgcccacacagcccgagtccggatgggacgtttgaaatcaggaaggagtgtgggttggatccacg

SEQ ID NO: 933346 - DNA, 120 bp, Artificial Sequence
  ENSG00000237728_1 (sequence is synthesized)
ggctcacggtcagaggatgctgggacaaacgccacgagaggttcctttttgtctggctcacccagaagagaggctcctctcctcccttccctgcagcacaacggcctggctggcacccaa

SEQ ID NO: 933347 - DNA, 120 bp, Artificial Sequence
  ENSG00000237728_2 (sequence is synthesized)
agggcagccggcatgggctgacctcagaggagcaaggcgtgtttgcagctctgccgctcacatccacagtggccatgacaacaggtgcagcaccatccattaaagccctgtgtcatttca

SEQ ID NO: 933348 - DNA, 120 bp, Artificial Sequence
  ENSG00000237728_3 (sequence is synthesized)
ctccaccctttcctgtccagaccactgtgaaggcctttagtcacctcctagagaagcaagattttcagccctggctttctacccccacaccctacagccggccaggggacagggtcgtgt

SEQ ID NO: 933349 - DNA, 120 bp, Artificial Sequence
  ENSG00000237728_4 (sequence is synthesized)
atggagggctcatcaatgtatggagaaatgaaagagcgccgcatttcacattggagggatctgggtttgagtccttgggccagccttgctacagtgggggcaagaacaccaatcacactg

SEQ ID NO: 933350 - DNA, 120 bp, Artificial Sequence
  ENSG00000237728_5 (sequence is synthesized)
gcttattacggaattcaaatgtggcagagtatttaaactatgaagtgtagaataaattaattggcttgccaattccccatagctagtactagaggctggcctcagatggaagaaccaggg

SEQ ID NO: 933351 - DNA, 120 bp, Artificial Sequence
  ENSG00000237720_0 (sequence is synthesized)
agagaacagcggtccatggagggagggcgtgagcctggggttttactgaggaaggatagtgggtttttcagtccctgaagctgctgctctgcccactcaggaaggtgaggaaggcagacg

SEQ ID NO: 933352 - DNA, 120 bp, Artificial Sequence
  ENSG00000237720_1 (sequence is synthesized)
acagcgtacatccagcctctgctcttgagatcttcccggattcttactcttgcttccagcttctgacccaagagaagcacccggttcacgaatgattcccaccagtgccagcatcgtgcg

SEQ ID NO: 933353 - DNA, 120 bp, Artificial Sequence
  ENSG00000237720_2 (sequence is synthesized)
cttccaactttcccaatttcagggctccctgttggccagagccaaccagaaggaggagagcaagaagccacggacactgtcagcgtccatgccacaacctcacaggcatggccaggggga

SEQ ID NO: 933354 - DNA, 120 bp, Artificial Sequence
  ENSG00000237720_3 (sequence is synthesized)
gcggtgggtggcccagcctgcgagagaagcagaccctgctcagcccacccctgagatcacgcagccggcaccggcgcactctggggggactctgggccctgctctcacctcgtgagtctg

SEQ ID NO: 933355 - DNA, 120 bp, Artificial Sequence
  ENSG00000237720_4 (sequence is synthesized)
aacaagtcacctcttctctctacgctttaaacgctgcatctgtacggcagagataaaactgcagctcctccacggggcttccgtgagggttaatgaagtaacacacgcacggcagctgac

SEQ ID NO: 933356 - DNA, 120 bp, Artificial Sequence
  ENSG00000237720_5 (sequence is synthesized)
atgcagcaagggctcagccaccgtgagcttctcagcctccccggggctgcagacccagcacctggggcctcaccttcccagagactggcccaggtggtaaagcggcagcgcgaacttcct

SEQ ID NO: 933357 - DNA, 120 bp, Artificial Sequence
  ENSG00000237720_6 (sequence is synthesized)
aggagtgagggacgagggtgaacaaagggcatgggagggaacaagggcatatttcctaccccttaaattcaagcagctcttcgaggtcccaagagcactttcagctgaatgcacatggat

SEQ ID NO: 933358 - DNA, 120 bp, Artificial Sequence
  ENSG00000237720_7 (sequence is synthesized)
gccgtgaggccgctggagacggtgcgttgtctgaatggtgcggagagagctcccgaggctcacaaaggctgggcgatgtgcccaaggccgtatggcttgttacccgcggtgcagccatca

SEQ ID NO: 933359 - DNA, 120 bp, Artificial Sequence
  ENSG00000237720_8 (sequence is synthesized)
cacacacagagcctgggtgcatgtgtctctgtgctcagtctccccacaggtacggcagcccccctgagggcaggcattgtgcctgatgcacctttgtctccagcagcacacagtcagggc

SEQ ID NO: 933360 - DNA, 120 bp, Artificial Sequence
  ENSG00000237720_9 (sequence is synthesized)
tcagcccacgtgtgggccagtgcagcgttttctccagagcctgctccaggaagaggaggaaatcttctctctgactactgggaacttaacaggaagaggagggacaagtgtgctcctatc

SEQ ID NO: 933361 - DNA, 120 bp, Artificial Sequence
  ENSG00000237720_10 (sequence is synthesized)
tgcctacttgttctccctccatgctgaggtttttctacctccacatgattaaaaaacggcaaataagttagcatatgaaaatatgtagcaagggtgaaaatggccctgcgggaggtcaca

SEQ ID NO: 933362 - DNA, 120 bp, Artificial Sequence
  ENSG00000237720_11 (sequence is synthesized)
gccatagtgacagtgttccaggcttccaggtgtacctgccacaccgggccgagtggaaagaaggccttcccagaagggcgccatctcagtgttggcaaggccaaggctcctacatgactt

SEQ ID NO: 933363 - DNA, 120 bp, Artificial Sequence
  ENSG00000237720_12 (sequence is synthesized)
tctttccagaatcggtgtaacagtcccataaaggatgcttcagttttccagcaatctcctctcctgggtgtgggcactgctggcaagcaaatcaattggtcccacagctctgccatccaa

SEQ ID NO: 933364 - DNA, 120 bp, Artificial Sequence
  ENSG00000237720_13 (sequence is synthesized)
gacacagagctgagctgacatcctccagagaaccccagagactcacacctgggcacctgggcccgttcaacacggagcaacaggcaggcactgagcgtgctgtcagctgagcagtgaaaa

SEQ ID NO: 933365 - DNA, 120 bp, Artificial Sequence
  ENSG00000237720_14 (sequence is synthesized)
gggacgagctgctatgtcaaaaatgacacgccggcttctgctggtcttgcaaaagagctctgcagtgatgtgactgcagctgacatcccgcaacagcagcggctggtttctgtgctggat

SEQ ID NO: 933366 - DNA, 120 bp, Artificial Sequence
  ENSG00000237720_15 (sequence is synthesized)
tgaaattcatccagctccctgtgttcacagcgatgacttccaatgctaattctcagcgagcagggcatgaaatatattcacaggcgctgcttggtgagggccctttggagttatttgagg

SEQ ID NO: 933367 - DNA, 120 bp, Artificial Sequence
  ENSG00000237720_16 (sequence is synthesized)
agagaacagcggtccatggagggagggcgtgagcctggggttttactgaggaaggatagtgggtttttcagtccctgaagctgctgctctgcccactcaggaagtgagatcttcccggat

SEQ ID NO: 933368 - DNA, 120 bp, Artificial Sequence
  ENSG00000237720_17 (sequence is synthesized)
tctttgggcaagagaaagagagagggggagagagagagtttgctgatgtagtctttttcctttttgataagagtgagtgcctggtctgatgcctgaacaggggaagcataagaagagaga

SEQ ID NO: 933369 - DNA, 120 bp, Artificial Sequence
  ENSG00000237720_18 (sequence is synthesized)
ggcagactttcatcttccgcaaagacacagggacgtgctctgcctcatgcaaatgagctgttctaaaagcgtccctgtgtcctgctgagccgcctgggctcccttagcccttctctccac

SEQ ID NO: 933370 - DNA, 120 bp, Artificial Sequence
  ENSG00000237720_19 (sequence is synthesized)
ctgcatgccttcttacaacaaactgcgtggtgggcgcaccagccttccccatctgactctgtgtgctgcccacctggtggttgtgctggaggttttgaagagtgagactttggccccagg

SEQ ID NO: 933371 - DNA, 120 bp, Artificial Sequence
  ENSG00000237720_20 (sequence is synthesized)
tctcctgcctgagagctgcgtaaacctagagccttgtctcacagagcccctgttcccacagcattaaagtggagatgacagagtccctcctggagagccggtctagccattcagtgagtc

SEQ ID NO: 933372 - DNA, 120 bp, Artificial Sequence
  ENSG00000237720_21 (sequence is synthesized)
caggtcggggcattgggaccagccactcggacaggaaggaccaatacgggagcaggtttgtggacagaatctgaccagtcactgcacctggtcccgtgagtgtggggctcagtcctgtgg

SEQ ID NO: 933373 - DNA, 120 bp, Artificial Sequence
  ENSG00000237720_22 (sequence is synthesized)
ctcatgtcatgccctgcaggctgatgtgagggacaggccatggccagcgatgcttgtctctgctccacgctgttcacaaactcgttagtagctgagacttactccccacagtcccccact

SEQ ID NO: 933374 - DNA, 120 bp, Artificial Sequence
  ENSG00000237720_23 (sequence is synthesized)
gcctgtctcttcaaagcaaggccgtttctcacactcagcctgagtctccttgagtggggcctttcaacagccagggccccttcttccctgggcagagacgccagaccaatctgaataatg

SEQ ID NO: 933375 - DNA, 120 bp, Artificial Sequence
  ENSG00000237720_24 (sequence is synthesized)
gcaccccgtgtatgtctgtgaagtgcaggaaggcagtcgacaggccagcctcaccctggcctccatcaccctggggcccggatgcctctgcccgctcagcctcagtgaccttagggcctc

SEQ ID NO: 933376 - DNA, 120 bp, Artificial Sequence
  ENSG00000237720_25 (sequence is synthesized)
tggggtagagaaaggagggtggatgcactgagctctctggccgagtggacatgccggccaggccaggctgtgacgtcatcctgggtgggggctgtcgaatgttgcccctggtggcttgga

SEQ ID NO: 933377 - DNA, 120 bp, Artificial Sequence
  ENSG00000237720_26 (sequence is synthesized)
ctggaggactgagggagaaatgggctctcagtgagacacagctccctcctgtctaaaatggggacgtggtggtgccccaggccagagaaggcaaccctgctcacagtcactgtctatatt

SEQ ID NO: 933378 - DNA, 120 bp, Artificial Sequence
  ENSG00000237720_27 (sequence is synthesized)
ggaaatggggtgaagggtctgcagacgcttgtcccagctctgacattacccatttgtagaaccttggaccagtgaatcaactgccataaatcccagtttccacacccgggaggtggaccc

SEQ ID NO: 933379 - DNA, 120 bp, Artificial Sequence
  ENSG00000237720_28 (sequence is synthesized)
ctcaatgccacacacgcttccagctggctcaagagactgagcgagactggactcgcagcagccggcgtggtgcctgcacacgcgtgtgcggtggttctcagcagggggcggcgcggtgcc

SEQ ID NO: 933380 - DNA, 120 bp, Artificial Sequence
  ENSG00000237720_29 (sequence is synthesized)
cgcacacgcgtgtgcggtggttctcagctgccggttcctgagtcttcctctctttccatccaaactacgcacttgcttacagcactgaaagtgcgatgcagtctcttggggcctcgcttt

SEQ ID NO: 933381 - DNA, 120 bp, Artificial Sequence
  ENSG00000237720_30 (sequence is synthesized)
catcctatgggagatcttgggctgaagaatagtatccaaggacagttctgactttagtacttgggtttattttattttttttgaaaaaagcaatattcatcaaactatacaaaatgttgc

SEQ ID NO: 933382 - DNA, 120 bp, Artificial Sequence
  ENSG00000237720_31 (sequence is synthesized)
aattagcttcttattgtcactgaactcagtaatgaaggaattgagaattttgttttcctttcatcatttttatgtttccttgtacgctgtaatgaatgtcgccacttactctcaggtaac

SEQ ID NO: 933383 - DNA, 120 bp, Artificial Sequence
  ENSG00000237720_32 (sequence is synthesized)
tatgtggagtgacatgagctaattacatactttgtaacctccaatcagcagaatctcacaatatatcatgataatgcccttgtatttcactgcaagaatgcctggcagaattgcgggtta

SEQ ID NO: 933384 - DNA, 120 bp, Artificial Sequence
  ENSG00000237720_33 (sequence is synthesized)
attatgcacacctttaatagaatcatggtgtggggcaggagtgggggcctcaggagagagagatgcggagtcagctcctctgcccttcccggtcctgacggctgcacggttgtcctctgc

SEQ ID NO: 933385 - DNA, 120 bp, Artificial Sequence
  ENSG00000237720_34 (sequence is synthesized)
tgccagggaggtatatgttggttgcatttatttatataattataaaaagcccttacccttgcaaagcaatttatactgaacaaaatatattcataggtagtatttcatttgattcacaaa

SEQ ID NO: 933386 - DNA, 120 bp, Artificial Sequence
  ENSG00000237720_35 (sequence is synthesized)
acaacaacaacaagaaagtatgttttgaagttggattctcttgtgctgtgcagcctcctcctctggacttaaaaatggccatactggtatcagccatcggtctgcgaagggctaaaggtc

SEQ ID NO: 933387 - DNA, 120 bp, Artificial Sequence
  ENSG00000237720_36 (sequence is synthesized)
cggggcacctgctgagtgtggctgtacaccaagtcctctctcaactcgctcttaggacaaatgctggtgcttctcaggctggatctgactggcttctggctttcacagaaccggaataag

SEQ ID NO: 933388 - DNA, 120 bp, Artificial Sequence
  ENSG00000237720_37 (sequence is synthesized)
ccggaatgagccggaatggcctctagagatgctctgaggtcggcaggccagaccattcctcctggagcctctgcttcaccgaattctgatggatccctgcccactctgcttggcctgtgc

SEQ ID NO: 933389 - DNA, 120 bp, Artificial Sequence
  ENSG00000237720_38 (sequence is synthesized)
ccctcctggcaccatctgcctgagcctgggctggcgctctgtcagcctttgcaacacagctatgagacttggaaagctggagtttggtttagcagagaaatgcatttgaaatcttccctc

SEQ ID NO: 933390 - DNA, 120 bp, Artificial Sequence
  ENSG00000237720_39 (sequence is synthesized)
taggcccccctctttctgttccccctcctcacctccctccaggaccaatttatctgccagtccagcctccaagaggagctggggccaagttggagacctgcttatgcttgtcagcctctg

SEQ ID NO: 933391 - DNA, 120 bp, Artificial Sequence
  ENSG00000237720_40 (sequence is synthesized)
tggccagatgacaagagagcagcccacagctgggagaggactgggaagtccccgtgtgcagagcgtgcttaacaggggggcgggcaggtcagaagcttccccctggctgcaaaggaggtg

SEQ ID NO: 933392 - DNA, 120 bp, Artificial Sequence
  ENSG00000237720_41 (sequence is synthesized)
tggaggacagctccctggagttccattcttggcctctttgcacctgcgcacagtccctggtggtgctgcaccctcacaagggctccacgcctatttctagctcctgccttctctgcagag

SEQ ID NO: 933393 - DNA, 120 bp, Artificial Sequence
  ENSG00000237720_42 (sequence is synthesized)
ttccaggcctgtgtttggctctatctacttggaagactcacaggttcttcaaaaccaaccaacgtgaagccagtttgtcctgacttttaccccaaacctgatgactgcttcatcccctgt

SEQ ID NO: 933394 - DNA, 120 bp, Artificial Sequence
  ENSG00000237720_43 (sequence is synthesized)
taggggccatgtctgtagctcccctgccacggagcagaatctgcctctccataagcgttaagctctggggactgtgacatccacgctgggcctggctcctgccttccgcctcctgcccag

SEQ ID NO: 933395 - DNA, 120 bp, Artificial Sequence
  ENSG00000237720_44 (sequence is synthesized)
cccctgccagcagcacatggtggagaccggttgcccaaagctcttgttctcagatgtgggcagaacgggaatctgccatgtgcccgtggattaaaaaaaagaaacccaggctgcttttct

SEQ ID NO: 933396 - DNA, 120 bp, Artificial Sequence
  ENSG00000237720_45 (sequence is synthesized)
gtctgttagaaggagcctgcacttcaagatagtggggatgtatattttaaaaaatttcacgctcatgggccaaagattttcccggggctgtgtgctgatttgcagcctatcatgtgtggc

SEQ ID NO: 933397 - DNA, 120 bp, Artificial Sequence
  ENSG00000237720_46 (sequence is synthesized)
tttgggacactggggaaggtgtggagcagtttaagtgacaaacgggttggaaaagcaaaggacaccaggtgaggatgatggaatttacatcctgttgcttccctgatagttcctgccaat

SEQ ID NO: 933398 - DNA, 120 bp, Artificial Sequence
  ENSG00000237720_47 (sequence is synthesized)
gtaatggctgcatgcattcagtagaggaaaggagagaagaaagaaggaacagatttagtcctgcccagaatctgcacttccacggaggacgccaggatatcacgggagagactgcagctc

SEQ ID NO: 933399 - DNA, 120 bp, Artificial Sequence
  ENSG00000237720_48 (sequence is synthesized)
tgatcaaatggggcgagctcttggcaggagccagcatgttcctgtgttccatttgggaggacagtttactttaatgatgtactttgaaatcaggtggacgtctgtaactcctggaccttt

SEQ ID NO: 933400 - DNA, 120 bp, Artificial Sequence
  ENSG00000237720_49 (sequence is synthesized)
cgcagcctttccagccacggtcatctctgtggagtcaggggcagggactttgggatcagcttctgcccttgtgaaaacagcagagcagcctgagagccaggaaggacctcacctgagtat

SEQ ID NO: 933401 - DNA, 120 bp, Artificial Sequence
  ENSG00000237720_50 (sequence is synthesized)
cagatcacctcatcaggctgaattgtgtggatctagggattttaaagaggtgattaaggtaaaatgaggttattagggtggcccttgacccagtgtgactggtatcctcataagaggaga

SEQ ID NO: 933402 - DNA, 120 bp, Artificial Sequence
  ENSG00000237720_51 (sequence is synthesized)
ttaggacacagccacacagagggacgaccacctgaggatccctgagaagatggcatctggaaggtgaggagagaggcctcagaaggaatcaactctgctgatacttgatgccaacttcca

SEQ ID NO: 933403 - DNA, 120 bp, Artificial Sequence
  ENSG00000237720_52 (sequence is synthesized)
gcctctgaaactgcgagcaaggtggtttgttattcagcaatggataattagagcactgactcaccttgatgggcctcatcatcattcatccagaaatcttttattgagaaaaataatatt

SEQ ID NO: 933404 - DNA, 120 bp, Artificial Sequence
  ENSG00000237720_53 (sequence is synthesized)
tgccatgttgtgcaaggagttggggttgcaaagctgggtgctgtgatctataacacaaggcagcaggattgtctgacctccgagagccatgtgccctgggatcatctggccacagttatc

SEQ ID NO: 933405 - DNA, 120 bp, Artificial Sequence
  ENSG00000237720_54 (sequence is synthesized)
tcacagaattcctaatgcacagtctgtgtgggaggtgatgccggagtcccccctccctctgggctcctccccgtgctctgctcacatcactggggggttggcggcagcctgctgagtcct

SEQ ID NO: 933406 - DNA, 120 bp, Artificial Sequence
  ENSG00000237720_55 (sequence is synthesized)
ttcgaccctcagcccgctctccagcactcagactggccgaaacctgtgccgctggctccaccctcaggtctccccactcctctcattagccaccggccttctcagccttctcttattctt

SEQ ID NO: 933407 - DNA, 120 bp, Artificial Sequence
  ENSG00000237720_56 (sequence is synthesized)
gtgactcttgcctgaccctgcctcagctctgtgtcctcccagactgctgactgtgaggctttgcccagcggattttccatcgccaaattagagcttttctttcctcgcctgactgctccc

SEQ ID NO: 933408 - DNA, 120 bp, Artificial Sequence
  ENSG00000237720_57 (sequence is synthesized)
tgtcactgtcttctgtatcttcctgttcctgattttggctggctatcaagagaagaagatctacaatcatcctatctctcatggcaccttaccatgtgcaactccctcgtatctaatacc

SEQ ID NO: 933409 - DNA, 120 bp, Artificial Sequence
  ENSG00000237720_58 (sequence is synthesized)
tcacttcaccttttctgttcttctatttatgagctacgtgatgtcagacaaggcacttaactactctgggctttggctcccttatttaacgataggtatcataataatacctgtcctgtc

SEQ ID NO: 933410 - DNA, 120 bp, Artificial Sequence
  ENSG00000237720_59 (sequence is synthesized)
caatttacagtttgtctgacagttattcatttaacaaacatgcattgggttcctactgagtgctgggtgatgtatccagcattgctaagacaacggccgtgagaacagcaagcatgcctg

SEQ ID NO: 933411 - DNA, 120 bp, Artificial Sequence
  ENSG00000237720_60 (sequence is synthesized)
ggttttgcattctagtgggacgtcttaatctattttctgctaaaacataataccacaaactaggcagttgatgaagaagatacatttacttcttgcagttgaagaggctgggaagtccaa

SEQ ID NO: 933412 - DNA, 120 bp, Artificial Sequence
  ENSG00000237720_61 (sequence is synthesized)
atcccatggtggaaggtggaaggtggaagggcagggactaagaagagcaccaggtgccagactcactttgtaacaacccactgtcataataactaacctgacctcacaacccagtcacct

SEQ ID NO: 933413 - DNA, 120 bp, Artificial Sequence
  ENSG00000237720_62 (sequence is synthesized)
cctgacctcacaacccagtcacctcccaacaaagttgcattgggattgaatttataacacaagaacttttggggggcaaattcaagccaggcatgggggttagtgtaaataaatgaatag

SEQ ID NO: 933414 - DNA, 120 bp, Artificial Sequence
  ENSG00000237720_63 (sequence is synthesized)
ctcagctgctgtgttgggagaaggctgggaacagagaaaggcaacatgaacagacatggtcaacaggctcatggaacctcactcttgagtcatcttggctcagccactagataggagtca

SEQ ID NO: 933415 - DNA, 120 bp, Artificial Sequence
  ENSG00000237720_64 (sequence is synthesized)
agaaacaccagaaaattccaggttctggccatctgagttcttttgagagttttggacattgaggaatagaggctgacaaccactgttgtacccagtccaaatccttgacctatgggatcc

SEQ ID NO: 933416 - DNA, 120 bp, Artificial Sequence
  ENSG00000237720_65 (sequence is synthesized)
ccacccacctccccaaggccaagaaagcaactgcccttccacggcctggggttcactgagtgagggtgtgagcctggcacccccatccagtcttcttttcagtatgtccaaaaaattaag

SEQ ID NO: 933417 - DNA, 120 bp, Artificial Sequence
  ENSG00000237720_66 (sequence is synthesized)
tcatctcatcattgatatgcaatgtacgttggtgggggcatcttttaaaacggaaatgagagtaatatgataaggaaagacagacacaggcccagcccctgctcccattagcaactccca

SEQ ID NO: 933418 - DNA, 120 bp, Artificial Sequence
  ENSG00000237720_67 (sequence is synthesized)
tgaacgcagcacagctgcaggagctggtccggctgctgcatcctctccccgctgcagctgagggcgttctgagtgagaaattaattcctcatcggaattgtgtctgaatttagcagataa

SEQ ID NO: 933419 - DNA, 120 bp, Artificial Sequence
  ENSG00000237720_68 (sequence is synthesized)
taattgtagagctttaaactgacattttaagaatgaccactgtaattctggcaagcaacagtggattccataaatgatggagattctaagaacaggattgatttccacaggccagggtcg

SEQ ID NO: 933420 - DNA, 120 bp, Artificial Sequence
  ENSG00000249984_0 (sequence is synthesized)
ccctctagtgttcactgctcatcagattattcctccaacaaataagacagagaactgcctgtttttttggttccctatcgaaggacggagcttggaacaacatttataacggtttaatga

SEQ ID NO: 933421 - DNA, 120 bp, Artificial Sequence
  ENSG00000249984_1 (sequence is synthesized)
cacaaagagtaaaagaccagtctatggcaaattccactgggacatcccattcgccacaaggactgaaatgacccactccgaaagcagcatgtgaagctttgagtctttcttccctccgcc

SEQ ID NO: 933422 - DNA, 120 bp, Artificial Sequence
  ENSG00000249984_2 (sequence is synthesized)
actctccagagaacattaaatcgtacttttcattcccctcaccatagggggaacccccttaatgatgacagagaaagaaaaattccatcacactgtcctatgataccattctgctgtcaa

SEQ ID NO: 933423 - DNA, 120 bp, Artificial Sequence
  ENSG00000249984_3 (sequence is synthesized)
ccctggtcagagaatcaaacatggcttccagcaggtggatgttgctgaaggtcacagacagcaaaatgcagaggttacacatggaggaagcacaggttcccacagcaaattaagtcatct

SEQ ID NO: 933424 - DNA, 120 bp, Artificial Sequence
  ENSG00000249984_4 (sequence is synthesized)
gtgaagccttctcatttcccagcgactaaatttatgactgcttttaagggtcatcatcgcttgcatgcacttgcactttatttaaagtatttgagattttggaaaagcagggttgtccca

SEQ ID NO: 933425 - DNA, 120 bp, Artificial Sequence
  ENSG00000249984_5 (sequence is synthesized)
attaaaaatacatacatgagctacatgtttaaagaaaatggggaaatttaaaaatgtgtttatgtaactcttttagtaattttaaaagtgtaaatagtagattgaacatgagcatgtttc

SEQ ID NO: 933426 - DNA, 120 bp, Artificial Sequence
  ENSG00000249982_0 (sequence is synthesized)
agcgagactccgtgggcataggaccctcccagccagctgattaaattctagttccccatgatgcatggaacttgcttgaggactggtggagtacctggactatagacttcattctgaaat

SEQ ID NO: 933427 - DNA, 120 bp, Artificial Sequence
  ENSG00000249982_1 (sequence is synthesized)
ggtggagtacctggactatagacttcattctgaaatcccaccaactcccaaagaacccatcatacagcccatggtgcatgcacactccaggtaccactaccatatgactacaggcccaac

SEQ ID NO: 933428 - DNA, 120 bp, Artificial Sequence
  ENSG00000249982_2 (sequence is synthesized)
gtagccaatctagttggcttctgtgtgttccatagccttgccatgtgccttggaccatgcaatattgatgatgatacaagtaatcctttagtgagcacttatcagtgtaccgggtgctgt

SEQ ID NO: 933429 - DNA, 120 bp, Artificial Sequence
  ENSG00000249982_3 (sequence is synthesized)
gctaaatgtgcttcaaacaacatttcattgaactcccacgactcaatgaattcatttctattgcagatgaagcctctgagaagttaggtaatttttctctaggttacagtgcaagtaagt

SEQ ID NO: 933430 - DNA, 120 bp, Artificial Sequence
  ENSG00000249982_4 (sequence is synthesized)
acaagagccaggactaaaactcaggcttgttagaagtgtccaaaatccatgttcctaatgacttgtagcatgagggttcccagaagctagctctgagatggagatttgtatgcaggagat

SEQ ID NO: 933431 - DNA, 120 bp, Artificial Sequence
  ENSG00000249981_0 (sequence is synthesized)
tgcagtcacccggataaagcagcacttaccttaattgaaattttctctgtgaacgagcctaatggatgaactacaactatgattataatttgcaaggagattagctgccgtgctagccat

SEQ ID NO: 933432 - DNA, 120 bp, Artificial Sequence
  ENSG00000249981_1 (sequence is synthesized)
cgcaggacttaaacaaatgtgctttctcctgctgtttttcaaggtgccttcgtgtaagatattaggtacagtgaaacaattaatagactgatagagctgacttgtaagacaagcttaaag

SEQ ID NO: 933433 - DNA, 120 bp, Artificial Sequence
  ENSG00000249981_2 (sequence is synthesized)
gtaaaatgaatttaaaggtttattacagccctccagagtgcaactctctgaatttataaaaaggaagtattcatactaaataagcatatttggcagattgctacagacacaagcactcaa

SEQ ID NO: 933434 - DNA, 120 bp, Artificial Sequence
  ENSG00000249981_3 (sequence is synthesized)
accacggcatgaacacagccttgcttgtgtagttttccaaacggcattttcaattagcattaaacttgcaaaaaatgtttgcattgtaccattaaccagagtaacgtaggagaatacagc

SEQ ID NO: 933435 - DNA, 120 bp, Artificial Sequence
  ENSG00000249988_0 (sequence is synthesized)
tctcatttgcttcaatttgccgaaagatcaaatactctcctgagtccttcttttctctccacgaacttgccaagaattctgggatcaactctatttccataaaacaggaagagagaaaag

SEQ ID NO: 933436 - DNA, 120 bp, Artificial Sequence
  ENSG00000249988_1 (sequence is synthesized)
gcccgaaactgggatggaggagaagcagccaaagagttgttctgtttcttaagttactttgaaggttgtacacttttaatattcattttgaggaataaataatttagacatccaattaaa

SEQ ID NO: 933437 - DNA, 120 bp, Artificial Sequence
  ENSG00000249988_2 (sequence is synthesized)
ctcactgtatgtggggtaacagaaagaagaataacccaacatagaaagcctcaaagcaggaagatactacacagacttccaaagaagcagtgagaggacaccatctgatgctggctgcac

SEQ ID NO: 933438 - DNA, 120 bp, Artificial Sequence
  ENSG00000249988_3 (sequence is synthesized)
caagaagcctgaatggctgtcagtgtcagagaggaaagaagaaagatgagagggaaagctaagaaaaggtgagaagaaagggtcaggaggagaaatgcaaagagactgggataatttttt

SEQ ID NO: 933439 - DNA, 120 bp, Artificial Sequence
  ENSG00000249988_4 (sequence is synthesized)
ggcagcttactgtgactgcaccatccaaaatttggtataaggatttggaaatttgaccaatatttcttagaaggattttgcaccatcagatacattttgatattagaagataaagagatt

SEQ ID NO: 933440 - DNA, 120 bp, Artificial Sequence
  ENSG00000270547_0 (sequence is synthesized)
agaggtgatgcaagcagtgaatgagaaatcaggaaaatttccattaaactctgcctaagtcctttagggctctgtctctgttttgttcctcttaaggttgtcacttctatgcctaatgat

SEQ ID NO: 933441 - DNA, 120 bp, Artificial Sequence
  ENSG00000270547_1 (sequence is synthesized)
tatctcattggttccaggacattgttaccatttacctccactggatatctattttctttcaaaaagcacaatcaacgtgccttttccctgattttctctgccaaacatatcagattgtgg

SEQ ID NO: 933442 - DNA, 120 bp, Artificial Sequence
  ENSG00000270547_2 (sequence is synthesized)
gaggtttatggatacacagtacttcacaggcaacctgaaaggtcccaatttgggccccgagtctgctggagaaaagagaaaggctaagaagcagcctaccttacctgtggctctgggtct

SEQ ID NO: 933443 - DNA, 120 bp, Artificial Sequence
  ENSG00000270547_3 (sequence is synthesized)
gaggatggccaggagaacagagagcaaagcagagccaatgcaagacctctggccctggaagccgaagggtctctcacaggtcaacgcaggatctactccatcatcatcttcactagcaca

SEQ ID NO: 933444 - DNA, 120 bp, Artificial Sequence
  ENSG00000270547_4 (sequence is synthesized)
cccagttcgattgaggagccttgacgtgggatattgatgggatattgagagaaaagagaaatggtgaatcaagcactaatctcaaagcttctgcacagaactacttacatgtcacttcct

SEQ ID NO: 933445 - DNA, 120 bp, Artificial Sequence
  ENSG00000270547_5 (sequence is synthesized)
agccaaaaggggacacataatctcttacgggggagggcaccacggggagagaaacccgaatatttggtgaatagtaacacaatctactttgttatagaatctgtcctcaatggtcttaca

SEQ ID NO: 933446 - DNA, 120 bp, Artificial Sequence
  ENSG00000270547_6 (sequence is synthesized)
gtctaagagcattacatttagttacggtagtcttaaatatgatactaaatgaattgaatagccagacatctgtgaaagtaaaactgtgataatacaaagtcagtgtgcttttaagtttca

SEQ ID NO: 933447 - DNA, 120 bp, Artificial Sequence
  ENSG00000270547_7 (sequence is synthesized)
attgcttaaagttatttggaagtaaggatcacatgagttcagagccccaggattcaaaaataactccggaatcttttatcactccccaaaggaaaagcaataataagtaagttaccagac

SEQ ID NO: 933448 - DNA, 120 bp, Artificial Sequence
  ENSG00000270547_8 (sequence is synthesized)
agacattcatgtaatctctctgaaactgtaagactaacaaaggaaaattttcaaaaggcagaaatactttattatttatttgcaatagaaattattcagccgggcgcggtggctcatgcc

SEQ ID NO: 933449 - DNA, 66 bp, Artificial Sequence
  ENSG00000270547_9 (sequence is synthesized)
attagctgggcatggtggcacatgcctgcaagcccagctactcaggaggctaaggcaggagaaaag

SEQ ID NO: 933450 - DNA, 120 bp, Artificial Sequence
  ENSG00000270547_10 (sequence is synthesized)
gcaggcacagtgctctgtgccatccagggaccagccgtgtgctctcgagttactggagcagcgcaagcagctccagtggtctcagctgtggagacagctgtttgcccaccgtctgcgatg

SEQ ID NO: 933451 - DNA, 120 bp, Artificial Sequence
  ENSG00000270547_11 (sequence is synthesized)
gcagagccaatgcaagacctctggccctggaagccgaagggtaagaacagagagaaaccttggagaacattcttgcatagaatttatctaatagtgacagaaaaaaaggaggctataaat

SEQ ID NO: 933452 - DNA, 120 bp, Artificial Sequence
  ENSG00000270547_12 (sequence is synthesized)
gtgcaacacctgaaattcctggggcgaatcaaacagcaaattaaagctcagacaaccttcacctgcaaaccatgcacagtataaggaactcattttaatgttttctggctgaagtcatag

SEQ ID NO: 933453 - DNA, 120 bp, Artificial Sequence
  ENSG00000270547_13 (sequence is synthesized)
tcctggcagatgtgatagattctacaaggttggacaggttaaattcttgcaaggaagtcctttctggaacacccaagaattacagaaagtttagctatctttcagatgagatttcattct

SEQ ID NO: 933454 - DNA, 120 bp, Artificial Sequence
  ENSG00000270547_14 (sequence is synthesized)
cagttttacttgttccatgacccttccaaactacacacgggattcttttcattcagttgccttggccagcattttatcaccaatagtcctattttatgtaactgagtttgccttgccctt

SEQ ID NO: 933455 - DNA, 120 bp, Artificial Sequence
  ENSG00000270547_15 (sequence is synthesized)
tactgcatttaggtaaatggaatggtgttttttagacttccgaaactatttgtagaccttttccttcacaagtttgaaatagatgtgaggcattcattttactcagacaacattgagccc

SEQ ID NO: 933456 - DNA, 120 bp, Artificial Sequence
  ENSG00000270547_16 (sequence is synthesized)
aattcacttgggaaaatgcatcttgatgtgtaattcatcatccagagcctgtccactattctgttcctccctgagagtaaattaggcactttgaaaggtgcattaaactcttcctggcta

SEQ ID NO: 933457 - DNA, 120 bp, Artificial Sequence
  ENSG00000270547_17 (sequence is synthesized)
ctaggtaccatttagaactgtggggcaataatttacttcatggtaccttggtgacctcaaaaagtttatattgttttgaaagttcttaattttctcccactaaataatttatgcattcag

SEQ ID NO: 933458 - DNA, 120 bp, Artificial Sequence
  ENSG00000270547_18 (sequence is synthesized)
aggttgggtgtgcttatgtttccagagagacaacagctattgaatagcataaataagataaaatagtcatgctagtgtagaaattaaatgttcacaaatgtgttatcgagtctatccata

SEQ ID NO: 933459 - DNA, 120 bp, Artificial Sequence
  ENSG00000270547_19 (sequence is synthesized)
gaataaaagtgtagcttataaaacaattattgctttggatttcatgttttaaatttacaagactgtgttacattttgttgtaattagtaatgcttcatagctacaaggattaccagatcc

SEQ ID NO: 933460 - DNA, 120 bp, Artificial Sequence
  ENSG00000270547_20 (sequence is synthesized)
atatcactgcatttttccatagcacaaaacacatttatccaaagtaaaaatagtgtgctaaacatactgaagtttctgacagacacttatatttctcttcattctttcattcacagcaga

SEQ ID NO: 933461 - DNA, 120 bp, Artificial Sequence
  ENSG00000270547_21 (sequence is synthesized)
gtttcatccatattaaataaattggttaagttttgatacctcctactttaatcactcatcttatgtactaaaatgaaccaaattaagtttgagccaacaaataaaagtgatatgctttga

SEQ ID NO: 933462 - DNA, 120 bp, Artificial Sequence
  ENSG00000259947_0 (sequence is synthesized)
gcattggaatcactgtagaacacatagatttggcgtgagatggcttcattgtgaacgagttcccgtttattgtgtcaaagtcaagccattgagcagccaggtacggatgggccaactgcc

SEQ ID NO: 933463 - DNA, 120 bp, Artificial Sequence
  ENSG00000259947_1 (sequence is synthesized)
gagccacggtggagaaggtggagaagagcgatggagttctcagcgaaatcagagctgcctcggtggatggagctgaattcctgaggaaaagctcaactcagttatggacggatcttgttc

SEQ ID NO: 933464 - DNA, 120 bp, Artificial Sequence
  ENSG00000259947_2 (sequence is synthesized)
ctatcaggggatccccaaggagaacgcttggcgtgtcctcctttggtccagcctgggttgcagcttcgatgctccctctgtgcaggggggaaggtacctgcagattgcccatctgtaccc

SEQ ID NO: 933465 - DNA, 120 bp, Artificial Sequence
  ENSG00000259947_3 (sequence is synthesized)
caggatttaggggacacctgatgaggtatttgtgtttaatcatcatcttgatgcggacgcttttaggaacaaggactgagactgggagggattataaataaacactcaaatgacaggaaa

SEQ ID NO: 933466 - DNA, 120 bp, Artificial Sequence
  ENSG00000259946_0 (sequence is synthesized)
gtgcagggacaaggattggaaggtaaagtccttattcagaccaatcttcctgcagggactatacgtagctttgggaaagggactttgaaacactttgattttcttttcagtaatataatt

SEQ ID NO: 933467 - DNA, 120 bp, Artificial Sequence
  ENSG00000259946_1 (sequence is synthesized)
atggtacttattcttttatgttattaaatattcttttggataacactgaggaaggggtgtttgtgagaaacagcactggtatttagagttcccagctatgaaggaaatgctcttcacagg

SEQ ID NO: 933468 - DNA, 120 bp, Artificial Sequence
  ENSG00000259946_2 (sequence is synthesized)
tattagagtacaactgacttgaaaaaaaattcatctctccgtggttatatttctacaagaagttgtttaaatttaagtaaaatattaatatatgttatttgtctaacagtgaaagagaaa

SEQ ID NO: 933469 - DNA, 120 bp, Artificial Sequence
  ENSG00000259946_3 (sequence is synthesized)
aaatcaagaacaataaaacattagagaagaaaatagaaaaatcctgtgaaaaaggtccaaatgcaggctgcaaagaggggaagccagtcctagcaaacacctaaccaactaaatgacctg

SEQ ID NO: 933470 - DNA, 120 bp, Artificial Sequence
  ENSG00000259946_4 (sequence is synthesized)
aaaaaaaagtctgtcagcctctatctacctggatctcattagtaaaattaggaggcaggatgaaataatttataaggttgctattagctttaaaatttttatgagttcagagcctttaaa

SEQ ID NO: 933471 - DNA, 120 bp, Artificial Sequence
  ENSG00000259946_5 (sequence is synthesized)
aacatgatgtcttcagcagaaaacaccactgtgaattttttttcaatattccttttaactataatggaaacaagttaaaaataataggtctaatgttcataaatccattaaatatttact

SEQ ID NO: 933472 - DNA, 120 bp, Artificial Sequence
  ENSG00000259946_6 (sequence is synthesized)
ggtcactctcttgatgactattttgatttaatacatggtatatataaatcatcaatattttcaagttcaaaaatgcacagggaggaattttatggcttctgtgatggctttgaacaaaag

SEQ ID NO: 933473 - DNA, 120 bp, Artificial Sequence
  ENSG00000259946_7 (sequence is synthesized)
ttccttgtttgtgtaagtgtttatatactgatcatttgtcagtaagcctgagaatctaagcacaatattatatatgcatgctaagtgcttagtttatcattatgattttcctcttgaatt

SEQ ID NO: 933474 - DNA, 120 bp, Artificial Sequence
  ENSG00000259946_8 (sequence is synthesized)
taaattgtgtaatgcagataatttaacttttctagggttctcgtttatttttaaaatgttagtgtccaggtaacaaccagaaaaaaaaaaattctaagccatgtggtatgctaatactga

SEQ ID NO: 933475 - DNA, 120 bp, Artificial Sequence
  ENSG00000259946_9 (sequence is synthesized)
aaataaaatgagtgttatttcccttgagggaaatgtaattaaagataaaggggagatatgcctagaataatgacattcactatacataactaataagataatattgttttaaaattctgt

SEQ ID NO: 933476 - DNA, 120 bp, Artificial Sequence
  ENSG00000259946_10 (sequence is synthesized)
aaatttttcttattttacttaattttatgtccctgctggtatttttgctttttcataaaaattatcatttatttttctcaactgcatattgccatcttcattttttaattttctcacata

SEQ ID NO: 933477 - DNA, 120 bp, Artificial Sequence
  ENSG00000259946_11 (sequence is synthesized)
ttcatagaattgttctctgtaatagatactgtacagtaattatttgttgatcgattaaccttttcaatgctacttccgacacctacttctcatcctccgtgtaacagatactgtcagtta

SEQ ID NO: 933478 - DNA, 120 bp, Artificial Sequence
  ENSG00000259946_12 (sequence is synthesized)
cctatccttaacagcctttccactcccaacttctgtgaatggacaagagatgcaattgtgatcactgaacatgaggcaacatcttctaggaagacatttccatagtcttcagacaaaagg

SEQ ID NO: 933479 - DNA, 120 bp, Artificial Sequence
  ENSG00000259946_13 (sequence is synthesized)
gagagatatcttttcagacaatctttgaacaatcctatatgaagcttacctgaagttgctgtagccgtttggcaagtctggggagactaacagacacactgaggatagcagaaaataaag

SEQ ID NO: 933480 - DNA, 120 bp, Artificial Sequence
  ENSG00000259946_14 (sequence is synthesized)
atagaaacagcccaggtttttggtgaaattcatgagcttctgaataacgaaccccataccaccctacctctataaaagaattcttaatatgtgacataataaaatttctttattatttaa

SEQ ID NO: 933481 - DNA, 120 bp, Artificial Sequence
  ENSG00000259945_0 (sequence is synthesized)
tggggagttctgggggccatagggtctgcctgagtgtaggaattggagactgggggactacagggaagggagtcagtgcctgggagggtggggtctgagtgtttggaggggctggagagg

SEQ ID NO: 933482 - DNA, 120 bp, Artificial Sequence
  ENSG00000259945_1 (sequence is synthesized)
tgggagctgggtgtgtaggtgggctaggtccccaggctaggctttctgggccaacggcctccactgaagcctcagccaaggcagcatctacactagcctcactgatgtggctcagagtcc

SEQ ID NO: 933483 - DNA, 120 bp, Artificial Sequence
  ENSG00000259944_0 (sequence is synthesized)
aatgaactggggccaaactgtagagagcttggatgaatagtttagtgcaaagatgaatactgtagtcaatctctccttactccttaacttcgctcctcttcattgtcccccatgcttcgt

SEQ ID NO: 933484 - DNA, 120 bp, Artificial Sequence
  ENSG00000259944_1 (sequence is synthesized)
gctctggtaccagacatttcacaattggccaactgttatccactttctccatccctaccttacatgtggaagaatggaactaaccccaacaagcttcatcagccacctttgattttccta

SEQ ID NO: 933485 - DNA, 120 bp, Artificial Sequence
  ENSG00000259944_2 (sequence is synthesized)
agccaatcagcagggcttatctacctattcacaggaattggttcagggacagacctagccgactgctggagccagctcccaggggcttcagagagtccactgcaggcccctctaccgcac

SEQ ID NO: 933486 - DNA, 120 bp, Artificial Sequence
  ENSG00000259944_3 (sequence is synthesized)
gggagagagcattgctagacattcatctgtacactacctggatgaacaagacctaatttaggtccatgagacgtgaggagatatttaatcagggtttggagaaaccatggaagaagagtc

SEQ ID NO: 933487 - DNA, 120 bp, Artificial Sequence
  ENSG00000259944_4 (sequence is synthesized)
tattcttttgtgtagggagagttataaagaaattggatgtgagactactaaagccattttggccatcaaaggacctaaccagaggacagagttgacacacagagaagagatgctctgaaa

SEQ ID NO: 933488 - DNA, 120 bp, Artificial Sequence
  ENSG00000259944_5 (sequence is synthesized)
ggatcaaagaggtctggagtcagagcgctgagggtgtggacttctgaatccacccccaaagcccgtatgcctcttcactcttcagttaaatgagccaataaagtccctgttttaaaacca

SEQ ID NO: 933489 - DNA, 71 bp, Artificial Sequence
  ENSG00000259941_0 (sequence is synthesized)
aagtttgcactgggaaactctcccttttaaaaccatcagatctcctgagactttttcgccatcacggctcc

SEQ ID NO: 933490 - DNA, 120 bp, Artificial Sequence
  ENSG00000259941_1 (sequence is synthesized)
gtggggacacagccaaaccatatcaaatgttttatgctaactgaaaaaaaaaaaaaaaaaacagattcaaaagtctatatccaatgcgattctatttatgtgacatttgggaaaagtcca

SEQ ID NO: 933491 - DNA, 120 bp, Artificial Sequence
  ENSG00000259941_2 (sequence is synthesized)
tgcgattctatttatgtgacatttgggaaaagtccaaaatttaagaaccaaacacagatcagtggttgcctggtggtggaattagggaaggccttcactaaattcacagggaattttggg

SEQ ID NO: 933492 - DNA, 120 bp, Artificial Sequence
  ENSG00000259941_3 (sequence is synthesized)
gggctgatggaactgttctatgtctcaattatagtgatagttatattactgcatacatttgtcaaaactcatagaattgtacactaaaaagtgtgaatttactgcatataaattttgtct

SEQ ID NO: 933493 - DNA, 120 bp, Artificial Sequence
  ENSG00000259941_4 (sequence is synthesized)
aagtgattttgatattaaaatttattacaagataaagctaattatacaagaccaaaatgtttaaaaagcagggtttttaaatatgaccatacaaacgagaaatgtaagggtactaataaa

SEQ ID NO: 933494 - DNA, 120 bp, Artificial Sequence
  ENSG00000259941_5 (sequence is synthesized)
gggggcacattttcttactaaatctcgggatatgctatattacataattcttatcgtcactacattttacaaagcaatctcaaacagtatatttttattttcacaatggcacactaatat

SEQ ID NO: 933495 - DNA, 120 bp, Artificial Sequence
  ENSG00000259941_6 (sequence is synthesized)
aagctaggatagtttatttaaaatacattctccccttaaatatgacaccaaaagcacaggaaaccaaataaatattagataaactggacttcatcaaaatttaaaacttttgtgccttta

SEQ ID NO: 933496 - DNA, 120 bp, Artificial Sequence
  ENSG00000259941_7 (sequence is synthesized)
gagtaccataaagaaagtgaaagacaacccactgtaggggaaaactatttgcaaaatatacctgataagggacttgtatctaaacacataaagaacttaaaagttcttattattcagtaa

SEQ ID NO: 933497 - DNA, 120 bp, Artificial Sequence
  ENSG00000259941_8 (sequence is synthesized)
ttttttcaaatccaatttaaaaaatgggcaaagaccttaacagacatttctccaaagaaaatatacaaatgccaataagcacatgaaaagatgttcaacatcattagttattagggaaat

SEQ ID NO: 933498 - DNA, 120 bp, Artificial Sequence
  ENSG00000259941_9 (sequence is synthesized)
gcaaatcaaaaccacaatgaggtaacccttttacacttgcagtatggctataatcaaaaagataatctagcagatgttggtgaggatgtgtagaaattaggagcttcatgcactactggt

SEQ ID NO: 933499 - DNA, 120 bp, Artificial Sequence
  ENSG00000259941_10 (sequence is synthesized)
atttccatatgacccagcaattccattcctggctatataaccaagagaaatagaaacatacgtgcacacaaaaacttgtacatgaatattcaaagtatttaaaattgtcagacagtagaa

SEQ ID NO: 933500 - DNA, 120 bp, Artificial Sequence
  ENSG00000259941_11 (sequence is synthesized)
acaacccaaataacctaaagctacgaactgataaacagataaattaaatgtgttatatccatataacagaatgttacttgccaataaaaagaaataaaatactgataggggctgcaacat

SEQ ID NO: 933501 - DNA, 120 bp, Artificial Sequence
  ENSG00000259941_12 (sequence is synthesized)
gaatgaaccttgaaaatatcttaagtaaaagtcagtcacaaaagaccacatattatatgattccacgtatatgtgatttccagaatagacaaatttattgagacataaaatagaatagtg

SEQ ID NO: 933502 - DNA, 120 bp, Artificial Sequence
  ENSG00000259941_13 (sequence is synthesized)
gttgcctagggctgtaagggattgaggggagcagggtcagggtgtggtggctaaagggtatgaagtatcttttagggattatgaaaatggttgtggtgatagttgcacaattctatgaat

SEQ ID NO: 933503 - DNA, 120 bp, Artificial Sequence
  ENSG00000259941_14 (sequence is synthesized)
acaccaaaagccattgaattgcatactttaaaagggtgaattacatctcaataaagttgttaaaaatattctatgtaaggggaaagagttttcagtaaatactaataaaataactgaact

SEQ ID NO: 933504 - DNA, 120 bp, Artificial Sequence
  ENSG00000259941_15 (sequence is synthesized)
gtcaaaatggcatctatacaaatgtgtaaccttaataattttcttgtatctgtggcattaagttaggaaaaataccaaataattaccctttctactgaagacaactgttgctgtaatcca

SEQ ID NO: 933505 - DNA, 120 bp, Artificial Sequence
  ENSG00000259941_16 (sequence is synthesized)
tcatactttttgtttgcttcttcgaaaagagttttgtatttttctacttgagactgttgcatattaattgttcgctgctgtctcataaaatcttcttcaaaattttttacttgagacttt

SEQ ID NO: 933506 - DNA, 120 bp, Artificial Sequence
  ENSG00000259941_17 (sequence is synthesized)
aaattctgaatttcatcctcctatagttataaagttatagattatgtgaaaaaatatgtaagatttgttatcaaaacaaagcagaaaaaaagacgtttcatatgttctttgatatttata

SEQ ID NO: 933507 - DNA, 120 bp, Artificial Sequence
  ENSG00000259941_18 (sequence is synthesized)
cacgtttcatgaaaaacaaattagtctatttttatcttcaaaaatggaagtcaaatgttttatttgcatttaatagcttacactacatttgtaagactaatatagagaattctaattgta

SEQ ID NO: 933508 - DNA, 120 bp, Artificial Sequence
  ENSG00000259941_19 (sequence is synthesized)
tgtagcaagaatttaagatatttcagctctgtgaaaattcaacatctcagaataaagttcagtacttatatacaatttttgaattcaaaatttaactatgatttatatctaaataaagta

SEQ ID NO: 933509 - DNA, 120 bp, Artificial Sequence
  ENSG00000259940_0 (sequence is synthesized)
tttgctgatgaactcgttgaccgtcatgagggtctgggaccattcctcatctgtgtacctcgaaccaacttccactgggacagttcggcagccagcgatctcctggatatactccaaact

SEQ ID NO: 933510 - DNA, 120 bp, Artificial Sequence
  ENSG00000259940_1 (sequence is synthesized)
agcagaaagacacacattggcatcgtcactgctaatatctgttgggcatagtactaagtgtgctttgcatgtggtcccctttcatcctcggaaaacctcacgtgcagagacaaggactgt

SEQ ID NO: 933511 - DNA, 120 bp, Artificial Sequence
  ENSG00000259940_2 (sequence is synthesized)
catccccagcttcactgatgaggaaccggcatggagaggtggggctccctgctcaaggctgtgtggctcatacacagtgctgtgcagctttgcagacagggccggtaagtctggttggct

SEQ ID NO: 933512 - DNA, 120 bp, Artificial Sequence
  ENSG00000259940_3 (sequence is synthesized)
gggctgctctagttccctgcttgccaacagcctcctcacttctttctttgctcattttgtcactaagctgagaaacctttgaacaaatagcggacagcgtggcaggtggcagtctcctgg

SEQ ID NO: 933513 - DNA, 120 bp, Artificial Sequence
  ENSG00000259940_4 (sequence is synthesized)
actctgccctctagcctgggactgattccaggcctcatcagttacaggccaggggatctgaggcaggttactgaacccgagtccttgatccccatttacagaatgggggtgatgacaaca

SEQ ID NO: 933514 - DNA, 120 bp, Artificial Sequence
  ENSG00000259940_5 (sequence is synthesized)
cctgtcctagtgccaggtacgtagtaaaatgcttaatgaagccttgctgtgaggagagctcctgcaatgagaattcctccacatgtgtcagcgggtaccattccctccgcgaaaccacaa

SEQ ID NO: 933515 - DNA, 120 bp, Artificial Sequence
  ENSG00000259940_6 (sequence is synthesized)
aacaggcggactccatctaccttcctggagagatgcctccttatttccaaactcatgcagagccgcggcatgacagccacgctccagctgcctgatctgatctccccatcatgattctga

SEQ ID NO: 933516 - DNA, 120 bp, Artificial Sequence
  ENSG00000259940_7 (sequence is synthesized)
actagaaacaaacacaagagaccacagaatccctcagagagagaggggctgtctcttgggttatttctgctcttagcttcagggccctgagatggtctgaaattgctaggatcctgtaaa

SEQ ID NO: 933517 - DNA, 120 bp, Artificial Sequence
  ENSG00000259940_8 (sequence is synthesized)
attgcataacagaaacattctaggactgccacttagggactcattaaaaaaccgcttaaggcgagcaaggtagaaggtaagaatcccataacctgcggcataaattcagagcaccttact

SEQ ID NO: 933518 - DNA, 120 bp, Artificial Sequence
  ENSG00000259940_9 (sequence is synthesized)
tttcactcttttttaaccccttggcaatcagtcaagggctgctagtgaagcatctacaaggttgcatttccctggggatggtcgggaggaattcagggagccctggggaacgctaaaatg

SEQ ID NO: 933519 - DNA, 120 bp, Artificial Sequence
  ENSG00000259940_10 (sequence is synthesized)
ggaaaagggacctcacctccctcagcgaccacccacctccacttctgcatgcacggccagtggtcagccacgcctttcaggatcacgggcctccctggaaccaaaaactgctccctgaaa

SEQ ID NO: 933520 - DNA, 120 bp, Artificial Sequence
  ENSG00000259940_11 (sequence is synthesized)
tgctggagggacggacggtgcagccgggggactgttttttctaacttcacatctggaatcaaaccatggtccgcccttgctttctgtttaaaatcaaaacagaacaaaatagcaaccacc

SEQ ID NO: 933521 - DNA, 120 bp, Artificial Sequence
  ENSG00000259940_12 (sequence is synthesized)
tcaggaagtcgacatttgaggtattccaccaggaacctgtgtcaggggtaggagagcttagctgtcaagagtaccagtaacaacaatagacaacgtttgttattattactgctactatta

SEQ ID NO: 933522 - DNA, 120 bp, Artificial Sequence
  ENSG00000259940_13 (sequence is synthesized)
ctatttgctcctcatgagatcaaggtggtttttttcttaaccatttcatcaaaaatgtttgtttcattataaactgctttcacagacattctgcaataaaggaaaacttactatctccaa

SEQ ID NO: 933523 - DNA, 120 bp, Artificial Sequence
  ENSG00000258010_0 (sequence is synthesized)
gagcagtgaggagtgaaggcccacttctctccacaaagggtagactgaggttattccatggcacagtataaggccctgaatatacagaaaggaaagatggagcccatcgagaagggagaa

SEQ ID NO: 933524 - DNA, 120 bp, Artificial Sequence
  ENSG00000258010_1 (sequence is synthesized)
gaaggaccagcaaacagccaggacaagctgtgtgaaaagtgacacagcaggtaaatccagagagctctgggaaccagaggtgccaaacagcacaaaccaggagagaccatcagtgggacg

SEQ ID NO: 933525 - DNA, 120 bp, Artificial Sequence
  ENSG00000258010_2 (sequence is synthesized)
gtaacagacaaggtaggaggaactccccgaggtcaggaagcagtgtctattcatttgtcgtatggaatcaccacacccttcagtgatggccatgctttccttgtcgccttctttgagatt

SEQ ID NO: 933526 - DNA, 120 bp, Artificial Sequence
  ENSG00000258010_3 (sequence is synthesized)
gagtgggccccacagaacggcgttcccagaagccttggtgactgctcagatcccagctgctttacctgccagcatcctgaaactcagtaagatcagagtccagacctcgtaagatgttga

SEQ ID NO: 933527 - DNA, 120 bp, Artificial Sequence
  ENSG00000258010_4 (sequence is synthesized)
cacaccagtgacacacaccacacacactccatacacaccactcacatcaacatacacaacactcacacacatcacacacaccactcacatcaacacacgtacacaccctcacatacatgc

SEQ ID NO: 933528 - DNA, 120 bp, Artificial Sequence
  ENSG00000258010_5 (sequence is synthesized)
cacacacacatcagtcacatcgacacacatgcacactattcacacacacacgacacacaccattcacacacaacacatcacataccactcacacaacccacactcccccaccattcacag

SEQ ID NO: 933529 - DNA, 120 bp, Artificial Sequence
  ENSG00000258010_6 (sequence is synthesized)
caacatacatacacaccatttgcattcacaccaacacaccacacacaccactcacatcactcaacacatacacaccattcacacacacaccacacatataccactcacaacacacataca

SEQ ID NO: 933530 - DNA, 120 bp, Artificial Sequence
  ENSG00000258010_7 (sequence is synthesized)
caccattcacatacacacaccatttggacacaccacacacacaccactcacaccactcacatcaactcatacaaagcattcacacacaccacacacacaccactcacatcaacacaccta

SEQ ID NO: 933531 - DNA, 120 bp, Artificial Sequence
  ENSG00000258010_8 (sequence is synthesized)
cacacaccactcacacacacaccacgcacacacatcacacatcattcacaaacacaacacacattgctcatacaccaatcatatacacacacccccacacaccacacacaacacaaacca

SEQ ID NO: 933532 - DNA, 120 bp, Artificial Sequence
  ENSG00000258010_9 (sequence is synthesized)
cacatgcacacaccattcacatcaataaacacaccatgcatacaccacacacatgcaccactcacagaaatctcaccacacaaaccactcaaaccaacatacacaccacacacacaccat

SEQ ID NO: 933533 - DNA, 85 bp, Artificial Sequence
  ENSG00000258010_10 (sequence is synthesized)
caaaccactcaaaccaacatacacaccacacacacaccataaacacacatcacactactcatacacataccacagacacctctct

SEQ ID NO: 933534 - DNA, 120 bp, Artificial Sequence
  ENSG00000258010_11 (sequence is synthesized)
ctcttctctggctttgtcactctggactttgcttccggcttcaagtttctaggtgtaatatgtgaagattaatggcaatgaagcaaacgtgcataagaaaatccacgcagcaaaggcaat

SEQ ID NO: 933535 - DNA, 120 bp, Artificial Sequence
  ENSG00000258010_12 (sequence is synthesized)
tccgttattctcaagtccatagatgcccagtgtgacattgtgaactggagaaaaaggagcacttcctgttcaggaaatcttgtaaaatcataaatgtcaggactcagtcaacaatacccc

SEQ ID NO: 933536 - DNA, 120 bp, Artificial Sequence
  ENSG00000258010_13 (sequence is synthesized)
aaaatgaaggcctcagaagcatcctcagaggaaaaatttatttctctgatcttctcttgccctcctgtctcttagcgccattctcccctgaggctagacacagacactagaatccctctg

SEQ ID NO: 933537 - DNA, 120 bp, Artificial Sequence
  ENSG00000258010_14 (sequence is synthesized)
ccccagggcagggcatggaagccagaagcctttttccccaaagccagccataaaacttaaagatgtcactctaactttccctctgcctttctgtgtgaaaactggccataaagaaactat

SEQ ID NO: 933538 - DNA, 120 bp, Artificial Sequence
  ENSG00000258010_15 (sequence is synthesized)
ctgccctaccttgtttgactgaaggtcataagaccctcattccagagagggtcctgcctcatactcagaaggaaggaatgcacgttcagcaaggccaagaagaatctaaacagacaggcc

SEQ ID NO: 933539 - DNA, 120 bp, Artificial Sequence
  ENSG00000258010_16 (sequence is synthesized)
ttgctgagtttccccactcagccgattgacattggatcatgcccttttcgtctaatcctatatctacacggctgtccatactttgttgaacataagcataaaaatggtcagtttcctctg

SEQ ID NO: 933540 - DNA, 120 bp, Artificial Sequence
  ENSG00000249673_0 (sequence is synthesized)
ctcttccggccggagtcagtggcggggttctcgccggtcctgcgggtcgctgcttggctgtgggttagcagcaccctgagcggagcggaagagctgcccgccgccgcgtaaccccgaggc

SEQ ID NO: 933541 - DNA, 120 bp, Artificial Sequence
  ENSG00000249673_1 (sequence is synthesized)
cgagactcctggcctggcctccttgggcccacgacgcctgccccgcggagcggacccatgggcctgaggtttgtgtgcggggcctcaggcgagcgctggcgcagcctgtcccccatcgtc

SEQ ID NO: 933542 - DNA, 120 bp, Artificial Sequence
  ENSG00000249673_2 (sequence is synthesized)
ccctgcgggcctggccctccccgtggaaggaccgcgggcttcggggccccacgctggggggctgactcctgccacacacacagcggtggccgcgggcctggggcggcagcacagccattc

SEQ ID NO: 933543 - DNA, 120 bp, Artificial Sequence
  ENSG00000249673_3 (sequence is synthesized)
attctgctcgggctgcgtgagctgaccccgctctctgtgcacctacttttgctgcgtttggtgctgagcctgaagtcccaggacaggcggctgagggggaaagatggtgtgaattgggtg

SEQ ID NO: 933544 - DNA, 120 bp, Artificial Sequence
  ENSG00000249673_4 (sequence is synthesized)
ggcagagacaactgaaagccacaggacccggttggcacctttttggccgcctgcgcctttgcctgcagccccgctccctgggtcacccgaaggaggagctggcgctctttccgggcgcag

SEQ ID NO: 933545 - DNA, 120 bp, Artificial Sequence
  ENSG00000249673_5 (sequence is synthesized)
aagcacccgacccacgctggaggaaacggtccctctgggcaggagaagctttgggcctggctggagcacactcacggaaccacgccaacgcctggcctgtagccagctcccacctcccct

SEQ ID NO: 933546 - DNA, 120 bp, Artificial Sequence
  ENSG00000249673_6 (sequence is synthesized)
cccaccttctaaaatgcttgcggatctcacgtggccgaccctaaccagatacacatggggaaaggaatcaggtggcacacataccgcctttactccatagagaacttccaattgtgggtc

SEQ ID NO: 933547 - DNA, 120 bp, Artificial Sequence
  ENSG00000249673_7 (sequence is synthesized)
ggcacagacgcaacccagtctcctcccacctccgagagtgcagtgtcctgaatggagaaccccagcacccagaagcatccactgaaggactaaattctacacatgaaggcaaacgtccgt

SEQ ID NO: 933548 - DNA, 120 bp, Artificial Sequence
  ENSG00000249673_8 (sequence is synthesized)
gtgaaccagtcgcagctgataacacacagaccattcccgatcccagaggtgcatttcaggattcattctatttcatcagagacggggtcttcctgtgttgcccaggctggtctcgaactc

SEQ ID NO: 933549 - DNA, 120 bp, Artificial Sequence
  ENSG00000249673_9 (sequence is synthesized)
tgccttggcctcccagagggttggaattgcagatgtgaggtacttctttgatagtgcctccatgcatgcagaagatgacgtggagagctccgcgcggcacagggcaggaagctggtgtgc

SEQ ID NO: 933550 - DNA, 120 bp, Artificial Sequence
  ENSG00000249673_10 (sequence is synthesized)
actctcatggatccgaagccaacacacgcctctcaactgaggactctgcccctctggcattcttccagccaccagccctgggggccaggagccactgagtgggtcacacagccttagagg

SEQ ID NO: 933551 - DNA, 120 bp, Artificial Sequence
  ENSG00000249673_11 (sequence is synthesized)
gcaacgagggcaggagctcgccctggcggtccccatgcagacaagaggtacacactccctggcatgcaaagccacccaactgggtttcactgaagggtgaggggcggggtgtctaccgtg

SEQ ID NO: 933552 - DNA, 120 bp, Artificial Sequence
  ENSG00000249673_12 (sequence is synthesized)
ctttccaaataccgctcagtcacccagagcttgaaacttacaatgagccaccccatcccagccacaaatctaaaggggttcacttgtttcaaaatcaacttgtttgtggttaaaagtcag

SEQ ID NO: 933553 - DNA, 120 bp, Artificial Sequence
  ENSG00000249673_13 (sequence is synthesized)
tcccagctctacagtggctggagcggcacgtgtgagaagccggcttgcgctgtgaggctcacaagccctgggtgaccacctgcccacttggcatgctgacaccatcattccacctacctt

SEQ ID NO: 933554 - DNA, 120 bp, Artificial Sequence
  ENSG00000249673_14 (sequence is synthesized)
agtaactctggaatgtatttttatgactctaaatgggagaaaaattgttctgcttaaccccacatcccagatgacacaccatttttacttacacaaccaacttatcaatgactgtgaggt

SEQ ID NO: 933555 - DNA, 120 bp, Artificial Sequence
  ENSG00000249673_15 (sequence is synthesized)
ctggtgggtcatctgtagccaaatcgccaacgtattccaaaagaaagccaaacagtttctgcaggaacatgaattgggaaataaagctcagtgctcagcaccaagaacaaagccacaggc

SEQ ID NO: 933556 - DNA, 120 bp, Artificial Sequence
  ENSG00000249673_16 (sequence is synthesized)
ccacctcttcctaatagatgcagttttccacctgcagccaaaaagacaacctgttattagcttttttcccagaggacaggcatctctatgaaactgccattgcaaaatttgccgacagtg

SEQ ID NO: 933557 - DNA, 120 bp, Artificial Sequence
  ENSG00000249673_17 (sequence is synthesized)
ttgccgacagtgagataaccagctccattttgcttctaacctccatgccctccttgtttactgctgcacgcaggttgaactgtgggaggaacttagtttaaaacaaagatgataacagcc

SEQ ID NO: 933558 - DNA, 120 bp, Artificial Sequence
  ENSG00000249673_18 (sequence is synthesized)
aaacctttcctggggattagcctgcttttgtgggaccaacagattagccacaagattagaaactacggttgaagagtcacgcagcgggaggctacaggattctgaccctccccaaactgc

SEQ ID NO: 933559 - DNA, 120 bp, Artificial Sequence
  ENSG00000249673_19 (sequence is synthesized)
tcctggcgataacatcaccatcgtaaagcctaagatcagcacttggtgggtcacctggcaccacccaggctcatctgatgttgtggcacccaggaactgactcagtgcgaaaacagcttc

SEQ ID NO: 933560 - DNA, 120 bp, Artificial Sequence
  ENSG00000249673_20 (sequence is synthesized)
gactccctgtgatttcatctctgacctgaccaatgggtacttctgactcactggctgccccccacccaccagcttatctttaaaaactccaaaccccagatgctcagggagaccgagtaa

SEQ ID NO: 933561 - DNA, 120 bp, Artificial Sequence
  ENSG00000249673_21 (sequence is synthesized)
taataaaactccagtctcccacacagctagctctgcgtgaattaccttttctctgttgcaaatgccctttcttgataaattggctgtctaggtaacagggaaggtgaacccactgggcag

SEQ ID NO: 933562 - DNA, 120 bp, Artificial Sequence
  ENSG00000249673_22 (sequence is synthesized)
ttacacttttatccacccttccagctggatcacgcgccctcttcaatgacatgacacgcagctagagtgtatgagcttgctgccggcaccttccgtcctggatcgcatagcaaggcctca

SEQ ID NO: 933563 - DNA, 120 bp, Artificial Sequence
  ENSG00000249673_23 (sequence is synthesized)
atggacagccaggtgcctggtccggtcccacttttttttctgtcctgttctcgtttcctctttgcttggccaaagagggttgggccagggtcctgagtgcaaaggcttggcttggtgaat

SEQ ID NO: 933564 - DNA, 120 bp, Artificial Sequence
  ENSG00000249673_24 (sequence is synthesized)
taaagtggcagtagccgtgtggcagagaaaatttgtagatgggtgaaatcctgggcctacacagtgacaaagtgtatatagacagccagcctagttggtggatgtgacaaccccagactc

SEQ ID NO: 933565 - DNA, 120 bp, Artificial Sequence
  ENSG00000249673_25 (sequence is synthesized)
ttctagatttgtggatccgtgcacctgccagacctgtctctgagccatctggggaggctgggtaagatttcccccgtcagggcctgagcctcatctccaagctgctggcttcagcccagc

SEQ ID NO: 933566 - DNA, 120 bp, Artificial Sequence
  ENSG00000249673_26 (sequence is synthesized)
tgccaccagcgctgtctctgtcttgcgctttccagagagagactgactcattttgagctccaggcctaccaggcagcccaaccgcggcagtaactgcctctcacactgaggatggctcat

SEQ ID NO: 933567 - DNA, 120 bp, Artificial Sequence
  ENSG00000249673_27 (sequence is synthesized)
gctctggtccagccatggcttgaacacctcccaacaagaacaaagccagactcattctccctagcatcttcttccttgctcaaagatcccacaccccgttagaagctggaactgggtcct

SEQ ID NO: 933568 - DNA, 120 bp, Artificial Sequence
  ENSG00000249673_28 (sequence is synthesized)
tgtcaccttcctcacctccccagtcgtagtctggttaatccttacatctcaccacggtcaccgtggctagatgtgacctccgcgatgcttcaggcacgtaccagggcagcctgggcaggg

SEQ ID NO: 933569 - DNA, 120 bp, Artificial Sequence
  ENSG00000249673_29 (sequence is synthesized)
ctggtcactgtgatctcatgaggtgtgaacttgaccccggccttctttcctgggatgccggctaaggacacaagttcagtgtttgccctggcttgtagcccagcgggggctccgtcatcc

SEQ ID NO: 933570 - DNA, 120 bp, Artificial Sequence
  ENSG00000249673_30 (sequence is synthesized)
ctcagcaaggtggcaggtcccaacaagccttgcaccacgaggaagtggcagtggcattcgggatatggctccctggccagcttgtgaagttcaaggggctcgttacttcttacagctcac

SEQ ID NO: 933571 - DNA, 120 bp, Artificial Sequence
  ENSG00000249673_31 (sequence is synthesized)
agtccctcccgggtccagcacacctgagggctgacctccctcttgattagtgcaggggaaaagcactttaaaaagctgtgtcatgcgtaacttgcacatcttctgattctgacctgaaac

SEQ ID NO: 933572 - DNA, 120 bp, Artificial Sequence
  ENSG00000249673_32 (sequence is synthesized)
aactgtggctgttccagcagagggactgtgggtgatgtttcccttctctgatttctaaaatatctgcaaacttgtttcatttataattgaaaatataatttgcataacaacagtaaattc

SEQ ID NO: 933573 - DNA, 120 bp, Artificial Sequence
  ENSG00000249673_33 (sequence is synthesized)
cgccctggcggtccccatgcagacaagagggtcactggcttccttgctttgctcttcctggacatcttcctcgacattcatctttccatcctaccaagagcgtggaaaccacagggcatg

SEQ ID NO: 933574 - DNA, 120 bp, Artificial Sequence
  ENSG00000249673_34 (sequence is synthesized)
aggacaggcggagacaacgctggaccatctcacagccacatcaagaggctgcccacatcagggctttctacgtggttgcaaggaacacaaacctgtgtgctccatttgcccactggcact

SEQ ID NO: 933575 - DNA, 120 bp, Artificial Sequence
  ENSG00000249673_35 (sequence is synthesized)
aggcctcctgcccaccacccgcttctaggctattcgagccgcaggagctacaggctgctagagaaccctgcggcaggatgctgggcgcggttcagcttttgccagggagcagcatgggac

SEQ ID NO: 933576 - DNA, 120 bp, Artificial Sequence
  ENSG00000249673_36 (sequence is synthesized)
tgggatttggaaggtgtacagtggctgcgggctttagcaggaggagtgtctacagcaccttctgctcctccaggtaacctagtgtttttatcagtatccattttcctgtgtggatctctt

SEQ ID NO: 933577 - DNA, 120 bp, Artificial Sequence
  ENSG00000249673_37 (sequence is synthesized)
ctgcttgaaacctgtcctgcctatttttcttccctggaccctgactgatacactcttaaaacgagaaaagggtaccgatttataaagttcgtgaattaaaaactacaccagtcatggaaa

SEQ ID NO: 933578 - DNA, 120 bp, Artificial Sequence
  ENSG00000249673_38 (sequence is synthesized)
ctcaatgacatcactcaaagaaaattcacaactctagccttgagttagctccctcaatagtatgatgaggtcatgcagatagaatcatacagttattaacaaaagtagttgatgttaacc

SEQ ID NO: 933579 - DNA, 120 bp, Artificial Sequence
  ENSG00000249673_39 (sequence is synthesized)
gagtaatcagttttatctgtgttcctttgagacagagagagagagtgagaaagagagcgtgagcaagtgagtgcacatactattgttaaagtcttctctctaaagttttaatatctgata

SEQ ID NO: 933580 - DNA, 120 bp, Artificial Sequence
  ENSG00000249673_40 (sequence is synthesized)
taccataaacacccagataaagaactttagagaaactggttaaaaagatttaaaattcccaactgtaataaatccctaaaatgaataccaaaaaaatgtttttaaattaaaaaaagagag

SEQ ID NO: 933581 - DNA, 120 bp, Artificial Sequence
  ENSG00000249673_41 (sequence is synthesized)
agaaagagaaaatgaaggcaaacatcttactttgtaggaaagcaaacgcctgtcatctttatctagcacgaagccatcattcagatcatctgctgacatatgttttggtttcttaacatt

SEQ ID NO: 933582 - DNA, 120 bp, Artificial Sequence
  ENSG00000249673_42 (sequence is synthesized)
ttcatcctcatcctttccaagcattcttcgaagtctctcagcctgagcaggaaggaatgagatgtcttagagcacactcttccaacatatggtgagggggccgtgcagtcctgccctggg

SEQ ID NO: 933583 - DNA, 120 bp, Artificial Sequence
  ENSG00000249673_43 (sequence is synthesized)
cagcgggctgggcctacggtcctcccagctctgaggctggtgcatccagcctgctttctgcctgcagttttcaatcaggcatgcaaacactagctaagcagcacattcctcatttaacaa

SEQ ID NO: 933584 - DNA, 120 bp, Artificial Sequence
  ENSG00000249673_44 (sequence is synthesized)
aatcaactgttcaaactttgtggccaatactctccagtcaccaggcaagcctattattctgaggccttcacagcccaattctgctggccagccccgactgggactcatcaccccctgcac

SEQ ID NO: 933585 - DNA, 120 bp, Artificial Sequence
  ENSG00000249673_45 (sequence is synthesized)
cgagagaataggagccaggacgccaagagcaagcagctccacggcctccactatttgaccacacactggacacgggaagaagctagtgatgtggttatgtcaaaacagccagctgagcca

SEQ ID NO: 933586 - DNA, 120 bp, Artificial Sequence
  ENSG00000249673_46 (sequence is synthesized)
atgttgtggcacccaggaactgactcagtgcgaaaacagcttcgactccctgtgatttcatctctgacctgaccaatggctggatcacgcgccctcttcaatgacatgacacgcagctag

SEQ ID NO: 933587 - DNA, 120 bp, Artificial Sequence
  ENSG00000249673_47 (sequence is synthesized)
tcctggaaccctggctgcacccacagatacagccactcctgggcccatgtggatgtaaccttcgagtgccggaatgcctcgtctccatggagaccaaactcaagggcctgactggcccag

SEQ ID NO: 933588 - DNA, 83 bp, Artificial Sequence
  ENSG00000249673_48 (sequence is synthesized)
ggatcagctgagaccaggagtttgagaacagcctaggcaacatagggagatgctcatctatacaaacaatttttgaaaattag

SEQ ID NO: 933589 - DNA, 120 bp, Artificial Sequence
  ENSG00000249673_49 (sequence is synthesized)
taaagcaatgtcctgagactggcacctgggggctgccctcttcctgccagactgagtgcctcagagtgctacaactgaccagaggggagaagccaactgaggcagcctgtttacttctaa

SEQ ID NO: 933590 - DNA, 120 bp, Artificial Sequence
  ENSG00000249673_50 (sequence is synthesized)
gggactaacccacatgaaaagacccaggcctcctgcgccggcctcacggcccctacacgcgttatcaagcttggagtcaactggacgacctgctgtccctcagacagctgtgagtgccac

SEQ ID NO: 933591 - DNA, 120 bp, Artificial Sequence
  ENSG00000249673_51 (sequence is synthesized)
acttcaccataccgggacaatgtgcctttgcatgtgtgtcctctgcccaccctgggcccatgaacagctcactccccttgcaaaacttgactgtaactccctctagaagaatttttggac

SEQ ID NO: 933592 - DNA, 120 bp, Artificial Sequence
  ENSG00000249673_52 (sequence is synthesized)
ggcacaagccacagccacaccagcaggaagtggatacaggataaggggcagggctcacatctcatcctcatcagcctttgaccaggcgacggagtctgtgatagctagcttatctgctct

SEQ ID NO: 933593 - DNA, 120 bp, Artificial Sequence
  ENSG00000249673_53 (sequence is synthesized)
atgctccagggacctggccggaacgagccgagttgctgtcctcatggaactctcatcctagtggggcagagacaaggacggtgtaacgtgcccgggggtcagcaccacagacaaaacgca

SEQ ID NO: 933594 - DNA, 120 bp, Artificial Sequence
  ENSG00000249673_54 (sequence is synthesized)
gggagcacggcacagtgtgggccagggaaggcctggcttcccaagggtgtgggcgcgagcagcatggctgtggggagttctaggtgcagagaactactccagagacgaagccaggcctgc

SEQ ID NO: 933595 - DNA, 120 bp, Artificial Sequence
  ENSG00000249673_55 (sequence is synthesized)
gaggaggccggagcgcatgaggggaaggcacgaggcaaggctgccagggctgtgctggtggtgcgggacggtcctgtgggggtagctgcggagatggcactgatgccttcggctccagca

SEQ ID NO: 933596 - DNA, 120 bp, Artificial Sequence
  ENSG00000249673_56 (sequence is synthesized)
gcatcctgggctggtgcgggccaataaggggcagggttggggcaggatgaaaggcacaagccacagccatgtcaagcaggaagtggatgcagggtacagcctgtcagggtcagggtgaaa

SEQ ID NO: 933597 - DNA, 120 bp, Artificial Sequence
  ENSG00000249673_57 (sequence is synthesized)
ggcagggaggcgggtaggccataggtgaatttggagcagcctgtagaggacaggatgtgccatcaaagacttgttcttgggtccagctgagactgtcccttggggcttcctgtcaccttg

SEQ ID NO: 933598 - DNA, 120 bp, Artificial Sequence
  ENSG00000249673_58 (sequence is synthesized)
tgcaggatagtgagaccatccttggaaaacccatcgggactgcagagcgcggctcagagctgactgtccaggcctggcaggggctgacccctgggcgctggtgcaccctccgtgcggcct

SEQ ID NO: 933599 - DNA, 120 bp, Artificial Sequence
  ENSG00000249673_59 (sequence is synthesized)
cttggaggaagcacacaaggcgacagttcccagctgccgcctgagatgcagcatctgctttactccagcccagcactgctcaccgtcactgcccactcttatgattttacttcccttcat

SEQ ID NO: 933600 - DNA, 120 bp, Artificial Sequence
  ENSG00000249673_60 (sequence is synthesized)
atttgtgattttgcaaagatggtgttgacttacagctgcagcatcaaatgactgactgccaccagcttggccccagctcagggacatgtctgagcccaggcagagcaccctagtggccgg

SEQ ID NO: 933601 - DNA, 120 bp, Artificial Sequence
  ENSG00000249673_61 (sequence is synthesized)
gaagcctcacctggagctcctgcgggtggctgcagtccgccaggtgatccgtgaggagggcttggagaggccccatgatggcgtggaaggatggcagggacccgtacatgagcacgcagc

SEQ ID NO: 933602 - DNA, 120 bp, Artificial Sequence
  ENSG00000249673_62 (sequence is synthesized)
gcttcagcagggccaggcccacagccaggcaggacagtctgtgagggcaggaggcaagaggaggtccaacttgttctgtttgtcactgacaaaaccaataacgtggcaaaaatgaacttc

SEQ ID NO: 933603 - DNA, 120 bp, Artificial Sequence
  ENSG00000249673_63 (sequence is synthesized)
cccacttccactaggctgaaaactccagtgtggccaccttggccggccagggttgggcccatgcaaccacgggcaaggcaggctcagggtcaggcctaacgcaggaggggaggctgtggg

SEQ ID NO: 933604 - DNA, 120 bp, Artificial Sequence
  ENSG00000249673_64 (sequence is synthesized)
aaccgcagcgccagctgggatggggcggctccatttttggttccaaattatgatttgtgaaatcaagcaaatgtattttgaaaatgaaaagaaaaagggacagcaagccaacatgcctca

SEQ ID NO: 933605 - DNA, 120 bp, Artificial Sequence
  ENSG00000249675_0 (sequence is synthesized)
ttccaggggctctgggagtggctgccagaggaagatactgagggtaagaagttgagcagccccctagaagtcacagatttggttttgtcactgaagaactaaatgtaagtaggtatatgt

SEQ ID NO: 933606 - DNA, 120 bp, Artificial Sequence
  ENSG00000249675_1 (sequence is synthesized)
atgtacacagcacaatgatagtatctgctcaaaactgtatttggtaatagccatattgctctcttgagcaaaaattttagccatgcctaacaacactaatttgccagaaacattctaaag

SEQ ID NO: 933607 - DNA, 120 bp, Artificial Sequence
  ENSG00000249675_2 (sequence is synthesized)
caatacaaataaagcaaaaatgtacacaacagcattttataaaccaaaatcaaagtggtggtctaatttggtgtggcctgtgttaaagcttcattcagaactccaaagagagaaagtatt

SEQ ID NO: 933608 - DNA, 120 bp, Artificial Sequence
  ENSG00000249675_3 (sequence is synthesized)
tggtatcattctaaaaaaccgggcactatatacttgagaggaataaaacctggaaagcaggcagataacaaacttatttattcaattatttatctaataaatgtctattaaataacttct

SEQ ID NO: 933609 - DNA, 120 bp, Artificial Sequence
  ENSG00000249675_4 (sequence is synthesized)
tcgtgcttgggaaacatttaaatatcaaaccgatcaataagacacacaaaaactcctatcctttggagtgtaaatgctactgaggggactgcccaaaaactaggaatataattaatatta

SEQ ID NO: 933610 - DNA, 120 bp, Artificial Sequence
  ENSG00000249675_5 (sequence is synthesized)
aattaagtagtatgatagaagatgatgtgagcaatgcaaaaactagagaaaagtaacggggattagaagtgccaggtaagtgtgtgcagaaattttggccatatgacaatttaaatagaa

SEQ ID NO: 933611 - DNA, 120 bp, Artificial Sequence
  ENSG00000249678_0 (sequence is synthesized)
aatgaaagacaggacatagagtgaacatgggatttaggaaagtggaggactatgagaaagacaattttggtcagagtcttattcaagaatgggaacttggaagaacatgtggaaataaat

SEQ ID NO: 933612 - DNA, 120 bp, Artificial Sequence
  ENSG00000249679_0 (sequence is synthesized)
tgctcagccctagggccgagcgggagatgtgcggcgagtgcagaagggcggacccgggatgtcccgggttttcgagcggggagccgcctgctgaatgcccttctgctgccctccgttccc

SEQ ID NO: 933613 - DNA, 120 bp, Artificial Sequence
  ENSG00000249679_1 (sequence is synthesized)
ttacccgggctcatcgccgcggctcatctctctcgcaaccgccgccgcacgcacccgctccgccgccccgcgcagggcatcctgtcgccagcgcatccctcagaggagtttcagcatttg

SEQ ID NO: 933614 - DNA, 120 bp, Artificial Sequence
  ENSG00000249679_2 (sequence is synthesized)
gggatttgaacggcccatgaccaatattgtgaaaggacttttgtttgctgcaatgaaaagaagactcctatttttcaataatgaattaacctaaacatgtattaaaatatgctcatgaaa

SEQ ID NO: 933615 - DNA, 120 bp, Artificial Sequence
  ENSG00000249679_3 (sequence is synthesized)
atgatttgcataccataaaattcatcttttaatgattgttgtggctcttactagatcccttgcatttccatatgaattttagggtcatcttgtcaatttctgcaaaaatggcagctggaa

SEQ ID NO: 933616 - DNA, 120 bp, Artificial Sequence
  ENSG00000249679_4 (sequence is synthesized)
ttttgagagagacaacattgaatctgtgcctcaaattaggagtacggccaccctaacaatacattttgaatacatcatcccacttcctctgccgccatggtttttgatgggaaatcagct

SEQ ID NO: 933617 - DNA, 120 bp, Artificial Sequence
  ENSG00000249679_5 (sequence is synthesized)
cttactctcattgaggatcctttgtacattatgacttgcttctctcttgatctttcaagattctctcttttgtctttggcttttaaccgtttgattatgatgggtctaagtgtggatctc

SEQ ID NO: 933618 - DNA, 120 bp, Artificial Sequence
  ENSG00000249679_6 (sequence is synthesized)
tttgagtttgtctcttgtggagtttgtcaatgtaggctgctgattttaataatgaacgagggcttttggttttcaaagctgtcacggagctggggctcaggaaataggactggggaagtt

SEQ ID NO: 933619 - DNA, 120 bp, Artificial Sequence
  ENSG00000249679_7 (sequence is synthesized)
tcaggaaataggactggggaagttaataggttggtgcaaaagtaatcacggttttggactgtgaattttaagtcattataactaggttcgaaacatctttattaatcaaaataggaacca

SEQ ID NO: 933620 - DNA, 120 bp, Artificial Sequence
  ENSG00000249679_8 (sequence is synthesized)
accactgcactgctcctggccaaatgcattgttggtgttgtgagttgtctctgctcctttatgacgcattttgaacttgaattaaaaaaattgcttgaatttgctttttgtctaacatca

SEQ ID NO: 933621 - DNA, 87 bp, Artificial Sequence
  ENSG00000249679_9 (sequence is synthesized)
atcatttccatagtctaaaataaatagcaagtaatgtcattagcaaaaaagcataacgtgagaaatgcccattaaaatgatgtatcc

SEQ ID NO: 933622 - DNA, 120 bp, Artificial Sequence
  ENSG00000249679_10 (sequence is synthesized)
atgaatgctgcctggattattgcaagacttgggttaatttccagatgtgtgaaaaagttgcttctgacaattgtgctgttgttctagtcacttttacggagaagagaatttttagaggtc

SEQ ID NO: 933623 - DNA, 120 bp, Artificial Sequence
  ENSG00000249679_11 (sequence is synthesized)
cttactctgccatttgtgttgatgtcacctaataatgttaacttctggacccaaataattcacccatccacaaatgcattttccacctaaaatgattagaagttctgctaaatctgttgt

SEQ ID NO: 933624 - DNA, 120 bp, Artificial Sequence
  ENSG00000249679_12 (sequence is synthesized)
ccagctttccagcctgcctgtctgttttctgttccttgtaaaggaacacaagactaggaattctcaaaataacacttttgagacagaccaccatgctttatcaaacacagtgacatgctg

SEQ ID NO: 933625 - DNA, 120 bp, Artificial Sequence
  ENSG00000249679_13 (sequence is synthesized)
tagttttaggcttttcttcacttttcttagcttggcaagagatccatactcagttcccaatccaggtgcaaaatgacaagtaaggggaaacttttaggttcatgtctaaacaaaactcag

SEQ ID NO: 933626 - DNA, 120 bp, Artificial Sequence
  ENSG00000249679_14 (sequence is synthesized)
gcttacacaatccaggtgactgggtaaagggctctgcgctgatcttcaggcattgtgtctgctgctttcagtgtttcttgcccaggatcaaggacaatttaaagtcaagtggttccacaa

SEQ ID NO: 933627 - DNA, 120 bp, Artificial Sequence
  ENSG00000249679_15 (sequence is synthesized)
ttaatatttttagttatttccaggaattccatttccaagtttggctcactctatggcaaacctggaaatggaattcttaaataactacaaagacatccttattctgggtcttgccatctt

SEQ ID NO: 933628 - DNA, 120 bp, Artificial Sequence
  ENSG00000249679_16 (sequence is synthesized)
tgggtttcaggtatatggtaggcctaggtccctaccacttgtggaagcataaaattacattttcatacatgtgtgtcctggtcttcttcccttaaccccttactattgccctgaggagcc

SEQ ID NO: 933629 - DNA, 120 bp, Artificial Sequence
  ENSG00000249679_17 (sequence is synthesized)
atcgtcagatcacttccttatctagaacaattccatctaatcaccttcaaggacaagcagttctcagtgatggtgatacacttcagaggattatctgcctctatgttatggctgtcacag

SEQ ID NO: 933630 - DNA, 120 bp, Artificial Sequence
  ENSG00000249679_18 (sequence is synthesized)
gggtgggaagtctattgggatttagtgcaattggaccagggatgtgaaatgatctgtaatgtgccaaacagtcctacatattgaggaattctcctgtattgaccggatacggtggctcat

SEQ ID NO: 933631 - DNA, 120 bp, Artificial Sequence
  ENSG00000249679_19 (sequence is synthesized)
gtaatcccagcactttggaaggctgaagtggcaggactgcttgggaccagccctggcaacatagcaaggctttatctctataacaaaataaaaacattagccaggcgtggtggcacatgc

SEQ ID NO: 933632 - DNA, 84 bp, Artificial Sequence
  ENSG00000249679_20 (sequence is synthesized)
agaggatcagttgagcctatgaggttgaggctgcacagtgagctgtgattgtacccctgcactccagcctgagtgacagagtga

SEQ ID NO: 933633 - DNA, 120 bp, Artificial Sequence
  ENSG00000249679_21 (sequence is synthesized)
tttgacgggggtggttgtctacccaatgaagagtctctctgattgctttccgtctgcgtggtccagcctctattcaatggagcaagagaaaacagatcaaagacgaccgggcgtggtggc

SEQ ID NO: 933634 - DNA, 120 bp, Artificial Sequence
  ENSG00000249679_22 (sequence is synthesized)
cgacagagcgagactgtctcaaaaacaacaacaacaataacaacaaaaacaaaacaaaacaaaaaaccagatcaaacagcagagatggaattcctttggggtgggtggattggcttctac

SEQ ID NO: 933635 - DNA, 120 bp, Artificial Sequence
  ENSG00000249679_23 (sequence is synthesized)
tgtgaacagtttattccaacttaggcacaatgattgcttctggtaacgtcaggcactgttgtattttactgagggcctctctgctccgagctccctgccctgctttgaccttttggtctc

SEQ ID NO: 933636 - DNA, 120 bp, Artificial Sequence
  ENSG00000249679_24 (sequence is synthesized)
acgttcctccttttgccctaaccaggcttatcccccactgccttcttgggatgtatcctggctaaccggacagaggacacatcagtgtgtgagttcatggcaggaggaatggaataaggg

SEQ ID NO: 933637 - DNA, 120 bp, Artificial Sequence
  ENSG00000249679_25 (sequence is synthesized)
ccacatggcacgaatgccatggagatgttagaattatcttggttgacttgatcctgcactagcaagtgtggctatttaaacataaggtccctgccgggcacggtggctcacacttgtaat

SEQ ID NO: 933638 - DNA, 63 bp, Artificial Sequence
  ENSG00000249679_26 (sequence is synthesized)
gggctctatctctgaataaataaaagttcccttgtaatggaagctgacagtttttcaatattt

SEQ ID NO: 933639 - DNA, 120 bp, Artificial Sequence
  ENSG00000249679_27 (sequence is synthesized)
aagttcccttgtaatggaagctgacagtttttcaatattttgtttcaacatttgtgtaacttacactgggtaaggataatgtattttaagtaacatcctgttgcctgtatttgtttccct

SEQ ID NO: 933640 - DNA, 120 bp, Artificial Sequence
  ENSG00000249679_28 (sequence is synthesized)
gtgtttatacagaggaggatactatgtatactaaatgtatacacagttcatgtatgcatttactaaacactatacgttaacaggggtgggggagtttaaagtgaagtcttgattcttaga

SEQ ID NO: 933641 - DNA, 120 bp, Artificial Sequence
  ENSG00000249679_29 (sequence is synthesized)
cgtgacttttcaacatacatttgggcatcttttttttttcatgagaatctatctgaaattgtaagtcaaaattgctgactcatgtgatgtgacaatttggaggtatatctaaggagtgac

SEQ ID NO: 933642 - DNA, 120 bp, Artificial Sequence
  ENSG00000249679_30 (sequence is synthesized)
agtcacaatgtgctaaatgttggggaccttacgtttcaagttgatgaatagaaatttggttttcacagttgcctttagtctataaagtcttaaaggagaagaaatgaactgtcgccaagc

SEQ ID NO: 933643 - DNA, 120 bp, Artificial Sequence
  ENSG00000249679_31 (sequence is synthesized)
tgtatcgtaaattccagggttaaaagtgaaacttacactatgccactcccacatttgtcacagagcggcatcctctgtgccccgcctgaaccgccatggactttcgtcaccggagctctc

SEQ ID NO: 933644 - DNA, 120 bp, Artificial Sequence
  ENSG00000249679_32 (sequence is synthesized)
acactccgcgttccagccggacggtcatctgaaaaacaaagcgtttccatttatggctagggaacagctggccgcagcctgtgcttggcttctattttaaagtgtgcactttaacctgaa

SEQ ID NO: 933645 - DNA, 120 bp, Artificial Sequence
  ENSG00000249679_33 (sequence is synthesized)
gttgcatctgcaccgtcattccgagaggggcaggactgatgcaatcataagggacgctgttctgaaatagggcattatagaatggaattagtgaaaacatttattttgttgtggttggag

SEQ ID NO: 933646 - DNA, 120 bp, Artificial Sequence
  ENSG00000249679_34 (sequence is synthesized)
gaaactgttacaaaaacgctcaaaggagcagagggcattattattttttattgtagcaaaatatacataaaatttaccattttcaccatggttaggggtgcaattcaatgacattaggta

SEQ ID NO: 933647 - DNA, 120 bp, Artificial Sequence
  ENSG00000249679_35 (sequence is synthesized)
catccaaaatgttgtgcaagcactgccaatatccacctccagaactatttcttcacctcacagaacctctgtacccatgaaacagtaactccccacccatgaaacagtaactccccgtgc

SEQ ID NO: 933648 - DNA, 120 bp, Artificial Sequence
  ENSG00000249679_36 (sequence is synthesized)
gctgtgtgggctcattccgattgtcgtggagcatccggtacacgtccgactcggggggcaccgaggctgtgggctcgctgaaacacaggcacggcggggagcatcgtcaggtgctgggag

SEQ ID NO: 933649 - DNA, 120 bp, Artificial Sequence
  ENSG00000249679_37 (sequence is synthesized)
gcaccagacgtgcaagaggccagagacatcaatactcagccattactctatgcacagccactcctgaacagaggtctagtattttcaagtgaatctctagtatagttaaaagcataatgt

SEQ ID NO: 933650 - DNA, 120 bp, Artificial Sequence
  ENSG00000249679_38 (sequence is synthesized)
gaattcaaatggctgccttggaaatgtcattgaacaacaaatcggggagtcacacccacactcctccacttggcaaaatactttggaaggaaactaaaagataattgtcaggaaatagta

SEQ ID NO: 933651 - DNA, 120 bp, Artificial Sequence
  ENSG00000249679_39 (sequence is synthesized)
attaagaagaacaagacttgagtctgatggatacataatgatagatgtgaacaaaattaacttttcccagagaaaaggcaatatacacatgacagaaagtgcagcagtgagcactcagat

SEQ ID NO: 933652 - DNA, 120 bp, Artificial Sequence
  ENSG00000258018_0 (sequence is synthesized)
ttcatttgcactccctgtggtcccaggtggcagaaatgaggatgaagccaagtgtttggagttcttgcgaagaaagatacaacagccacacaaggtattattaactttattacttgtcag

SEQ ID NO: 933653 - DNA, 120 bp, Artificial Sequence
  ENSG00000258018_1 (sequence is synthesized)
gaagaggtgggggaagcagttaagattcggctagatgagaggtgagtgtactgcattacaatctctggagggtgtggtgggcatatgagctggaaaggaccattatttatttactacttt

SEQ ID NO: 933654 - DNA, 120 bp, Artificial Sequence
  ENSG00000258018_2 (sequence is synthesized)
cttctccctgaaaacagaaacatcttcctccttggcctaccatggtgccagcaatctccagcattagcgatggctccttgggggtaacctgcagaagcttcttaactgggttaaggcatc

SEQ ID NO: 933655 - DNA, 120 bp, Artificial Sequence
  ENSG00000258018_3 (sequence is synthesized)
ttattaccttgcaggagtaaggcaatcgccagctcactgatagtacacaatgatttcgctcattccatccactcttggccattggtgcagcaggaagggccttggggtcctccaatttgg

SEQ ID NO: 933656 - DNA, 120 bp, Artificial Sequence
  ENSG00000258018_4 (sequence is synthesized)
gcagtgctggagatccgtcaaacgtcctatgctgggcaccttatgggacgccagaaaggacgatgccggaaatgagctatggagacagggccacgcaaggtcaaagtgagccttgagctg

SEQ ID NO: 933657 - DNA, 120 bp, Artificial Sequence
  ENSG00000258018_5 (sequence is synthesized)
tagcttggggccggcctgaagacttgaagggtttggggcagggcagacctgtaccttaggaccagcgcggtggcgctgtaggtgacgacgtctcggaggaggtcagcaccgccctccaaa

SEQ ID NO: 933658 - DNA, 120 bp, Artificial Sequence
  ENSG00000258018_6 (sequence is synthesized)
tgtccagtgtgaggatacaactgggaactaaagctggaagatgccagacattcagcagggagttccctcatcagcagctggctaactggggaactgaaagtcacaaggcgctcgtttctg

SEQ ID NO: 933659 - DNA, 120 bp, Artificial Sequence
  ENSG00000258018_7 (sequence is synthesized)
ataactccatgaaaattcactctgggtcagaaatcaatctttggagttctgaacatgcagcttttctcatgggccttttggagaacaatcagctactcagccatcagagccttttttgct

SEQ ID NO: 933660 - DNA, 120 bp, Artificial Sequence
  ENSG00000258018_8 (sequence is synthesized)
ggatggcaggcaggaactgacagcaaaccatcgtctctacaacacgcagaagatcagcaccaagtctccattctccgaaaacatgtgtccatgcagctctcccaggggaggtctgcgctg

SEQ ID NO: 933661 - DNA, 120 bp, Artificial Sequence
  ENSG00000258018_9 (sequence is synthesized)
cagtggaaggccccaggagcgtgggagccagctcatcgcatgaaggaaacacagagttgtacctccagatgccaggcggagcggcgacgtgacgcacggtggacgaggagccaggatgcc

SEQ ID NO: 933662 - DNA, 120 bp, Artificial Sequence
  ENSG00000258018_10 (sequence is synthesized)
cagctctgctaccaacacagagtgggaatttgcacacctcacatggtgtcagtttccaaatgctgctgtaatcaatttccacaaagtggtggcttagaaaaacagacatgtattcgctga

SEQ ID NO: 933663 - DNA, 120 bp, Artificial Sequence
  ENSG00000258018_11 (sequence is synthesized)
cagttctggagcccagaagcctgaaaccaacgtgagggttctaggggaagatcctcatttgccccctcccaatttggtagttctgggtgttccttggcttgtggactcatcactccaatc

SEQ ID NO: 933664 - DNA, 120 bp, Artificial Sequence
  ENSG00000258018_12 (sequence is synthesized)
tctgcatctgtcttcacattgctttccctgcttctctgtgtgtccattctctgcatgtctaatttgtaaggatatgagtgattgcatttagggcctacttgggttatccagggagatccc

SEQ ID NO: 933665 - DNA, 120 bp, Artificial Sequence
  ENSG00000258018_13 (sequence is synthesized)
ctcatctcaagaaaattgatctaatcatgtctgcaaagacccttgatccagataacattcacaggttctagggatttgattgggatatctttggggtgaggggggatatttttcagcctg

SEQ ID NO: 933666 - DNA, 120 bp, Artificial Sequence
  ENSG00000258018_14 (sequence is synthesized)
ccacacccacttcccttcttctggcctcttccagaaaatgatggcccctctgagccccgagttccccttcagctttgaagttctgcaggtgatcctcagacagcctagcctgcattgcca

SEQ ID NO: 933667 - DNA, 120 bp, Artificial Sequence
  ENSG00000258018_15 (sequence is synthesized)
agttcacgacaatgttatctcaatagagtacctgatattttttcaaagcactttcccatctgttattttgcttcatgctcctgatcacctctcggggcacacagggcaattaatattaaa

SEQ ID NO: 933668 - DNA, 120 bp, Artificial Sequence
  ENSG00000258018_16 (sequence is synthesized)
cccatttaattgatgaaacaacagaggcccaaaaactcctaactcactttctccttgagttagtcagctaatgggaaccaggagcaggccaggtggtttcccagggcatgcttttttttt

SEQ ID NO: 933669 - DNA, 120 bp, Artificial Sequence
  ENSG00000258018_17 (sequence is synthesized)
ttctctctctctttcattgtatatagcctttcaccaccacaggctttgttctggaagcccaggaaggtaggcaagtcaaagcttgtcatgtagatccaagcccaccctgaatccctgatt

SEQ ID NO: 933670 - DNA, 120 bp, Artificial Sequence
  ENSG00000258018_18 (sequence is synthesized)
catatcccctggagagtgtggcaggaacttcatttgcactccctgtggtcccaggtggcaggtaagctctcagtctctggctgtatactgttagagacctcttcttcccgtgggtagctt

SEQ ID NO: 933671 - DNA, 120 bp, Artificial Sequence
  ENSG00000258018_19 (sequence is synthesized)
cccaagcaagggggttttcccaaacctcaagaactgcaggactatcagacattagcagaattagatctgcctggcctccgggccaaaaaaagatttcaattgtttcaggacagattaaat

SEQ ID NO: 933672 - DNA, 120 bp, Artificial Sequence
  ENSG00000258018_20 (sequence is synthesized)
tcaggactgggaatagggcaggggaggtcttttttcgcagtcccacctgcctgtgacttgcagatctggacgaagaatttcctgtcctaactaggcctcagtttccctgaaataacatcg

SEQ ID NO: 933673 - DNA, 120 bp, Artificial Sequence
  ENSG00000258018_21 (sequence is synthesized)
agcatggtgtgacgtggggaggcaagagtcaatgccaatgcaggcagccccctcccaccaagcaaagcggcttacagacttcggagaggaaacaaaacatctacatgcaaatgttgaacc

SEQ ID NO: 933674 - DNA, 120 bp, Artificial Sequence
  ENSG00000258018_22 (sequence is synthesized)
agatttcagagcaagagagcaacttcaagagccaaggcagttccaactaccaggtgtttaataccttttcagcttgggtggatcatggatctctttgagaaactgaggagacagtcttgg

SEQ ID NO: 933675 - DNA, 120 bp, Artificial Sequence
  ENSG00000258018_23 (sequence is synthesized)
aactgaggagacagtcttggattctctctctgtctctctctctctcccccacctccccctctcttgcaccttcttctccctgcaaacaaaatcagagtcctgctctgtcacccaggctgg

SEQ ID NO: 933676 - DNA, 120 bp, Artificial Sequence
  ENSG00000258018_24 (sequence is synthesized)
cctgcctcagcctcccaaagtgttagaattacatgcgtgagcccccacacctggcctggatcctctcttttgtagaaaatgcacttgcatagcaaacacacacacacatacacacctctc

SEQ ID NO: 933677 - DNA, 120 bp, Artificial Sequence
  ENSG00000258018_25 (sequence is synthesized)
gcacttgcatagcaaacacacacacacatacacacctctcacttttttaatgaaatgtcagggtgtctgctgatgcctgaagcacatccgagggccgcagtgagatattcttctttggaa

SEQ ID NO: 933678 - DNA, 120 bp, Artificial Sequence
  ENSG00000258018_26 (sequence is synthesized)
gtgctcaacaaccctgggaggtaggtgtggcagggtctcttttcatacaccataaaacagagacccagaggcagctcgcaacttgctcaggtcatgtattagtgagcatcagaggcaggc

SEQ ID NO: 933679 - DNA, 120 bp, Artificial Sequence
  ENSG00000258018_27 (sequence is synthesized)
caggacccccaattgcacaggtctaggaagcaccatttcatccaagtctatgttgcatgccaaagagtgtcactgacagagaacacagtgagaccactgctaccgccctggagttaggca

SEQ ID NO: 933680 - DNA, 120 bp, Artificial Sequence
  ENSG00000258018_28 (sequence is synthesized)
gtgcagcagctctagaggacctcagccagggtcttctgataaccatttacaggcatatatgcaaaaagccccacggggtgacagaggtaaggagtcctggagggggatcagagagggatg

SEQ ID NO: 933681 - DNA, 120 bp, Artificial Sequence
  ENSG00000258018_29 (sequence is synthesized)
caattgccgaagacttggatgcctaagcttgcaaatggaagactatttctaaatcatttattcattccacagcttcataggtggaggtgattcataggtggttcctatgtgaatttcagt

SEQ ID NO: 933682 - DNA, 78 bp, Artificial Sequence
  ENSG00000258018_30 (sequence is synthesized)
gtggaggtgattcataggtggttcctatgtgaatttcagttccccttccccccgacctagagtaaaatccacactgtt

SEQ ID NO: 933683 - DNA, 65 bp, Artificial Sequence
  ENSG00000258018_31 (sequence is synthesized)
caccaccaccgcgccaagctaattttttgatttatactagagacggggtttcaccaagttggcca

SEQ ID NO: 933684 - DNA, 120 bp, Artificial Sequence
  ENSG00000258018_32 (sequence is synthesized)
atctctgtggctcagcagggacccctccatgcctctctgtctctcctctctcttgccactgcctttcttgttcattacactccagcaaccctgaccttctgtcagttcctagcgcttgcc

SEQ ID NO: 933685 - DNA, 120 bp, Artificial Sequence
  ENSG00000258018_33 (sequence is synthesized)
aagctttcccctccccagggcctttgcacttgctgttcctcctgccttggaagattctagccctggctgttcccagggctggctccgtctcatccttcagctctcatcttgaatgtcact

SEQ ID NO: 933686 - DNA, 120 bp, Artificial Sequence
  ENSG00000258018_34 (sequence is synthesized)
ttctcagagagatcttctttgactttatctaagaatatccctccactattctctagccatctgtttctttttagcacgtataacaatctgtaactgttttatgtcttaatttgcttatgt

SEQ ID NO: 933687 - DNA, 120 bp, Artificial Sequence
  ENSG00000258018_35 (sequence is synthesized)
atttattatctatctctcccttgatcatagaaaacatggtaaagattgtagctacggtgtcctgttcaccattctatccctagcccctagcacgtattaagggttcaataattgcagact

SEQ ID NO: 933688 - DNA, 120 bp, Artificial Sequence
  ENSG00000258018_36 (sequence is synthesized)
gaatgactgaaaggcatgtttggaagcagaagtattcctcggccaccactttatcttacttagtgcagtaatgcaatcaacatttggctcctgctgtgatgctaccctgatctcgggctg

SEQ ID NO: 933689 - DNA, 120 bp, Artificial Sequence
  ENSG00000258018_37 (sequence is synthesized)
gtgaaagcgtgactctccaagatgagccatccaagaaaccacatagaaaagatcaaggtcccataacttcagcttggggaagcaagaacaaatgtggcattcctcacttaagaaagaaga

SEQ ID NO: 933690 - DNA, 120 bp, Artificial Sequence
  ENSG00000233110_0 (sequence is synthesized)
gccatcgcggcaggctaaacagaaatgctgagcctcccaagctaaagggaaagtcagccctgctgaggaggggggcggaggagctcagtcactgaggctgccacaccagagtcgggggtg

SEQ ID NO: 933691 - DNA, 120 bp, Artificial Sequence
  ENSG00000233110_1 (sequence is synthesized)
agggatcaaggcgaggctgacaggtgacagggtgagtggaaaatcctaagagcaaagcttctcagggaccagcaacccgcgcaacacaggtgcgacatgaagacatcatctgtggcaggc

SEQ ID NO: 933692 - DNA, 120 bp, Artificial Sequence
  ENSG00000233110_2 (sequence is synthesized)
tgtcgctgttccaacagttttatcatcttacagaagatcatggatggtaaagatgaagttgccttttaagtgggaagaatggaacgtctctctgcttccaccacaaactaaagttaagac

SEQ ID NO: 933693 - DNA, 120 bp, Artificial Sequence
  ENSG00000233110_3 (sequence is synthesized)
cacagaaacaaaaacaaaacaaaagaaaacccacggagttttatggaaacgtaaacacaccttcaggaaatcctcctgcctctcctggctttcaaagccagtgttgcacaatgggaaatg

SEQ ID NO: 933694 - DNA, 120 bp, Artificial Sequence
  ENSG00000233110_4 (sequence is synthesized)
ctttcaaagccagtgttgcacaatgggaaatgaagacaaatccaatgttaaaaaatgctgttgtgaaagatgtgttggtgagagatggtgttttgctatgttgtccaggctggtcttgaa

SEQ ID NO: 933695 - DNA, 120 bp, Artificial Sequence
  ENSG00000233110_5 (sequence is synthesized)
tttcaggcatagtgactgcacctaaccttcagtgagatttcaaatgattatcactgctaacctgttctttccaaaatacagactttcccgcaacaagaacacttttctgcctgtgctctg

SEQ ID NO: 933696 - DNA, 120 bp, Artificial Sequence
  ENSG00000233110_6 (sequence is synthesized)
tgagagccagtctcatccggagctgctttttgctaagtttcaggtctgtgaggagcaaggaaggacttgatggtgataaaggcaccaggtcatatgccaggacctgccgcaaggaggagg

SEQ ID NO: 933697 - DNA, 120 bp, Artificial Sequence
  ENSG00000233110_7 (sequence is synthesized)
tcccaggggtctcactctcgactcacagtgtgggcagaggccaacaggaagctgataactcctgaacgtctctcagggacaaaatgggcccgaaaaagaaacacacagagagaatcttca

SEQ ID NO: 933698 - DNA, 120 bp, Artificial Sequence
  ENSG00000233110_8 (sequence is synthesized)
agacaacgtgtgacaccttcaggctgatttaactcatgtatcagaaaggagaaggaatttgaaaggaaagtttgaaaaggcattttcctggtgctgtggaagtaatcgcatgtaactgaa

SEQ ID NO: 933699 - DNA, 120 bp, Artificial Sequence
  ENSG00000233110_9 (sequence is synthesized)
taacagtgagtgttttaatactgcccttttcaaatgacccttctaagcatgtaactttggaatgatggaatgatcgctttaggtcttttttacactgaggtccacttttaccgtctccca

SEQ ID NO: 933700 - DNA, 120 bp, Artificial Sequence
  ENSG00000233110_10 (sequence is synthesized)
gtgggtgtaaaagtaaggttagaacatgttctgtatgtctttgaagctcgcagttactcgttacacagccagcagagcagagagggagacagagttatccatcttaggaatcactgaagc

SEQ ID NO: 933701 - DNA, 120 bp, Artificial Sequence
  ENSG00000233110_11 (sequence is synthesized)
attgggaagttttcctagtgtgtcaattaaaatcttctcagagaactatgggttcttttaaaaattagtttctggtcactgtcataaaagatggagagactattacaatttctcgtaatt

SEQ ID NO: 933702 - DNA, 120 bp, Artificial Sequence
  ENSG00000233110_12 (sequence is synthesized)
taagaggcctcatgttagtttgatctttcacgtgcaaagccatacatcttacattttggtacagttgtccattttgtgggtcaaggttagtctcaaatttagaagataagaagaatactt

SEQ ID NO: 933703 - DNA, 120 bp, Artificial Sequence
  ENSG00000233110_13 (sequence is synthesized)
acggttcccccccaccttgaatattttcatgagtaaacacaggacgctgtggctgaaatgaaatgattttcaatgtaatcaatgtttaaactggtactaattaaaagataatttggataa

SEQ ID NO: 933704 - DNA, 120 bp, Artificial Sequence
  ENSG00000233117_0 (sequence is synthesized)
agtatgagaaagttctgatcttgacagttcacgtaacattcaatcaattataccattgctctatctctaaagttttctttttctccttttctcagtgtcttaccaagaatgaaaggcaac

SEQ ID NO: 933705 - DNA, 120 bp, Artificial Sequence
  ENSG00000233117_1 (sequence is synthesized)
ctatgtaaaaactatgggctttctagtataaataaaaactactcatctccagaaaataaacaatgactgctaagatgattgaaaaaagaaaggagaagaaagtagcttgtaaaagcgtgt

SEQ ID NO: 933706 - DNA, 120 bp, Artificial Sequence
  ENSG00000233117_2 (sequence is synthesized)
gaaatgcattcacgttggaatctcctacaggcacttcagtctgccagcaatcccactactgtgtatctacccagaggaaaagaagttattatatgaaaaggacatctgcacatgcatgtt

SEQ ID NO: 933707 - DNA, 120 bp, Artificial Sequence
  ENSG00000233117_3 (sequence is synthesized)
aaaaatatggaaccagcccaaatgccatcaatcaatgagtggatgaagaaactgtggtagacatatacgacggaatactactcagccatgaaaaagaaatgaattaatggcattcacagc

SEQ ID NO: 933708 - DNA, 120 bp, Artificial Sequence
  ENSG00000233117_4 (sequence is synthesized)
gatacaatggactttggggacttgggtgaaaaggtgggaagagggtaatggcaaaaggactacaaatcaggttcagtgtatactgcttgggtgaagggaggaacccgaatctcacaaatc

SEQ ID NO: 933709 - DNA, 120 bp, Artificial Sequence
  ENSG00000233117_5 (sequence is synthesized)
accactaaagaacttacccatgtaaccaaatagcccatgttctccaaaacctatggaaataattttttttttagaaaaaggtccaatcagtttgttaaaataaccatctttcaatctcta

SEQ ID NO: 933710 - DNA, 120 bp, Artificial Sequence
  ENSG00000233117_6 (sequence is synthesized)
agtttgttaaaataaccatctttcaatctctaatttcaaaaaacaacacatctttattttcggaaccatgtcagattaaagtcctgagagagagaatctttctcttaaggaagggtcaat

SEQ ID NO: 933711 - DNA, 120 bp, Artificial Sequence
  ENSG00000233117_7 (sequence is synthesized)
gaagagttagctttctgtctcagtcttaactgtaattctaaagtttgcttttgctcaccattttatccacataaattaaatatcggttaacacatttaattatagttttttttttcaaaa

SEQ ID NO: 933712 - DNA, 120 bp, Artificial Sequence
  ENSG00000233117_8 (sequence is synthesized)
aatgcgaggacagtttgagcccagtgctctctgactgaggtagaacccccgggaaggtgaagagggcagccgtctgcgaaacagcccagcatttaagaatgggcagcacctggccaggtg

SEQ ID NO: 933713 - DNA, 120 bp, Artificial Sequence
  ENSG00000233117_9 (sequence is synthesized)
catttgagaactaggaatgtggcaacaataacatttatttatttggatgaagagaagaagatgtattggattccctgaaacaatcattgacctgcctgaatcccaactgttgcactgact

SEQ ID NO: 933714 - DNA, 120 bp, Artificial Sequence
  ENSG00000233117_10 (sequence is synthesized)
ccactaattcaccaatccacttgagctgggaggagagcccatgcacagaagtttatggataaacagacctgaacgtctagcatgatgtcaaatttatatggccacagaactacaaaagga

SEQ ID NO: 933715 - DNA, 120 bp, Artificial Sequence
  ENSG00000233117_11 (sequence is synthesized)
aattttttcactaactatattggaaatgtttttggaaatttataacagtttgaaaaatattgtagaccaacatgtagcctagaaatattaaaacattaagaagcaagtatggcatgaata

SEQ ID NO: 933716 - DNA, 120 bp, Artificial Sequence
  ENSG00000233117_12 (sequence is synthesized)
catagaatatatgtagatactattctattttatcatttactactataaatatatgcaaatctattaaatgaggttaacatttatcaaagcatgtggtcacaaactcttatagtttgtaca

SEQ ID NO: 933717 - DNA, 120 bp, Artificial Sequence
  ENSG00000233117_13 (sequence is synthesized)
tggcaccatttacagacaaggaaatagaagccaatgtaaaaatgcagtattaagtcataaccgcataaaagtaactgtggcacatactgcactaccatgataatttcacaggcacctccc

SEQ ID NO: 933718 - DNA, 120 bp, Artificial Sequence
  ENSG00000233117_14 (sequence is synthesized)
actgctattgtggtgagcccacgtgttgtgagcttccgcataaagccctgcaattctgatcattgccacgtgggcagtttgtgtctctagttagttgtgtactgtagtaaaaagtgatct

SEQ ID NO: 933719 - DNA, 120 bp, Artificial Sequence
  ENSG00000233117_15 (sequence is synthesized)
cgcagttcttgcataatttccgtgtttagtgcgatatggtaaacattgaatagcaccatgaaacccacacgaagggccactggtgatgttggaaggctcccaagaagcagagaaaattca

SEQ ID NO: 933720 - DNA, 120 bp, Artificial Sequence
  ENSG00000233117_16 (sequence is synthesized)
tgacattacaaaatcagtcaaatttcttcatatgcactgtagattgaggtctgcagctggggtttcccattgttttaagataaatgaatcagcctaaagatcattgtaaaaaaagaaaaa

SEQ ID NO: 933721 - DNA, 120 bp, Artificial Sequence
  ENSG00000233117_17 (sequence is synthesized)
tttcacgattctgtctgaaagcttaaagatgtatgttttacaaaaatagctctagtacaataggacaataaaacgtgaactcttgaagatctgaattggaattattttctgacagactat

SEQ ID NO: 933722 - DNA, 120 bp, Artificial Sequence
  ENSG00000233117_18 (sequence is synthesized)
attttcaatttctttatttgataaatgaagatggataacattgacctcatgtgtaactacaacgaattcaagggtgtggacatgtttttcaggtcttcagactgtaaacattttaagtgt

SEQ ID NO: 933723 - DNA, 120 bp, Artificial Sequence
  ENSG00000233117_19 (sequence is synthesized)
gattgctgtgaatgaaggaaacccagagccatcatgacaagcctaaactcaaaggggactgatttcttctacactgaatgtttcattagtgacagggcccagataataaagaattgtgct

SEQ ID NO: 933724 - DNA, 120 bp, Artificial Sequence
  ENSG00000233117_20 (sequence is synthesized)
tgatggctgctttcaatcactggaagaaccatgaaagtgcgagagattcctcccggtgaatgaagccagctcaccaccgtcaagggcaagggatcagcgtgtgttcacatggaggcctct

SEQ ID NO: 933725 - DNA, 120 bp, Artificial Sequence
  ENSG00000233117_21 (sequence is synthesized)
caccgagggaacccaagggggacagcacaggaattgcagagccagcacccatggaatgggcagggatttgggtttcatccaaccagccagttgatcaataatcactgaatgtctgtcacc

SEQ ID NO: 933726 - DNA, 120 bp, Artificial Sequence
  ENSG00000233117_22 (sequence is synthesized)
cattgcatcctctcctgagtagtgaggctaggccagtgccagtcacctggaaatccttactgttctgcagttgacattttgagaggcaagtcaaacaatatatataaacaactagaatgt

SEQ ID NO: 933727 - DNA, 120 bp, Artificial Sequence
  ENSG00000233117_23 (sequence is synthesized)
ctagtgtgtttcaggaggtaaatgccgtgccgggatgagcagaaggaggatggagccgttgctgggcagatagactgattttagataaagccgtctgggtgcaggaaagaagaccttaaa

SEQ ID NO: 933728 - DNA, 120 bp, Artificial Sequence
  ENSG00000233117_24 (sequence is synthesized)
gagggaatgacatttgagcaaagtcttcaacaaactgaacccaggaagaaaacattccgaaagtcagagaaaagaggaagtacgaagggccagagccagggaggacattggcggagatgc

SEQ ID NO: 933729 - DNA, 120 bp, Artificial Sequence
  ENSG00000233117_25 (sequence is synthesized)
agccgcagaagcgtcaggggccctgcagccgcgatgcaaacagagaagtgggcgcatggagcatacggggcagagaaccagcaccatctgaatacactgcttaggctgttggggccatgg

SEQ ID NO: 933730 - DNA, 120 bp, Artificial Sequence
  ENSG00000233117_26 (sequence is synthesized)
catcatcttggcaggaaacgacagtggctaggaccacagtagtcaccgtagagatggagagaagtggccagatcatagatacattttgaagattaagcggacagaatttgctatggatta

SEQ ID NO: 933731 - DNA, 120 bp, Artificial Sequence
  ENSG00000233117_27 (sequence is synthesized)
gatgtgggtgaaacagagagagagagagaggatagctccaacatgtgctgtctgagcagctaaaggggtggagcaggatgaataaagtaaagaaaagattgaaatggagacgaagggcca

SEQ ID NO: 933732 - DNA, 120 bp, Artificial Sequence
  ENSG00000233117_28 (sequence is synthesized)
ctgtaagtgagacatccagacgcagcccaatactcccaggggagcttgcttacggcagattccagtcacaagaagcaccaaaaatgtctcctctttcatttatacatgacgcaaaatcaa

SEQ ID NO: 933733 - DNA, 120 bp, Artificial Sequence
  ENSG00000233117_29 (sequence is synthesized)
gaggataagctgctccaatttgaaagccacacgttcctttaagggcagggctgggcgaatgggttcaaccctgactgctctccaccgtccatgcaggaccacagcctagggtgaaggggg

SEQ ID NO: 933734 - DNA, 120 bp, Artificial Sequence
  ENSG00000233117_30 (sequence is synthesized)
cccttctctgggtgttgctgggagggagaaatattcctgagatgagcttaagacacagcacttctcccctgtggtgtgagagccactgtgcctacaaggacactcacagaagctgtcatt

SEQ ID NO: 933735 - DNA, 120 bp, Artificial Sequence
  ENSG00000233117_31 (sequence is synthesized)
tgggattcgctgccaagagcagagcacggctgttgatgcgtcgaaactgaaaagccttcttcagctgggtgggcaagacggctgtctatggagaccctcctgagtacagatgcacctgct

SEQ ID NO: 933736 - DNA, 120 bp, Artificial Sequence
  ENSG00000233117_32 (sequence is synthesized)
tttagcctcacatagacgggggctctttaggactgtgggctgaccctgagaagaagccccatggaagcctgcttatctccaaatcccccgtcctttctcctgaaagacagtctcagtgag

SEQ ID NO: 933737 - DNA, 120 bp, Artificial Sequence
  ENSG00000233117_33 (sequence is synthesized)
tgaagttctagcattatagatttgttcctttgtaagtctgacaggatttatggtttgcaaacattttttatgagaatgaaaattactttgggaaaagtcattcatttaccacccttacta

SEQ ID NO: 933738 - DNA, 120 bp, Artificial Sequence
  ENSG00000233117_34 (sequence is synthesized)
atatttggaattgggcaaattcctgcagagggtaagaggaccaggaacaatgaaaaagtgtggctgtccatgcaggtaaaagggccccacaggctcatgtgaattactttatttaacagc

SEQ ID NO: 933739 - DNA, 120 bp, Artificial Sequence
  ENSG00000233117_35 (sequence is synthesized)
atcctctgctgttgctgaggagagaggagtggccctggcttctcagtcatattttccagccctgacttgtttacctgtctccaagaattgacccaaagtaacacctttaaaatggaattt

SEQ ID NO: 933740 - DNA, 120 bp, Artificial Sequence
  ENSG00000233117_36 (sequence is synthesized)
attctctcctctattttaaataacacctggatgaatgagagtctttacaacagatacgactagaaggagagacgctaggaaacacagagggaaacatgggtcatttgcatctgcagctgt

SEQ ID NO: 933741 - DNA, 120 bp, Artificial Sequence
  ENSG00000233117_37 (sequence is synthesized)
gtgtgtggcagctcaacactggaagctaagttttcctattcaggaagatgaagctctcggtgtctgtgccccatcccatgcccctggctacctattcacatccggggccaattagtgctg

SEQ ID NO: 933742 - DNA, 120 bp, Artificial Sequence
  ENSG00000233117_38 (sequence is synthesized)
ttgaatttattccaaaatcctcaggcaaaatagaactctttttgattaccttggagttgacttctccctagttcctctccacaatgatttcttgcttttcaccgaaactctttgagaagt

SEQ ID NO: 933743 - DNA, 120 bp, Artificial Sequence
  ENSG00000233117_39 (sequence is synthesized)
tctatttttttgtcattggtcagagcagcattttattttgcatttcaattcaatttttagtgatggattttggatttttatgttcacctgccaactactttaacccagaaaatagcagca

SEQ ID NO: 933744 - DNA, 120 bp, Artificial Sequence
  ENSG00000233117_40 (sequence is synthesized)
ttgagcagttcctgacgtagcggaggtctaccagttgtcatacagtatcagctgccattaccccttctgttgtgtggtcctgagactggtgtgcaccttcacagctcaagggtcagtggt

SEQ ID NO: 933745 - DNA, 120 bp, Artificial Sequence
  ENSG00000233117_41 (sequence is synthesized)
tgctgcaggcaattctgctgttggataaatgcttagccctttgagctttacatatttttaacagaagatcaaagaagctgaaagagtgatggaaattaaactggtcttatctatctatat

SEQ ID NO: 933746 - DNA, 120 bp, Artificial Sequence
  ENSG00000233117_42 (sequence is synthesized)
tttaatgactgacttggcatcctagtgtggtagcaagaactttggactgaaaaaaatatcacttcacagctgttcggctgtgtgacctgaagcttttttttttttttttgagacggagtt

SEQ ID NO: 933747 - DNA, 83 bp, Artificial Sequence
  ENSG00000233117_43 (sequence is synthesized)
ggagtgcaatggcacaatcttgactcgccacaaactccacttcccgggtttaagcacttctgcctcagcctcccgagcagctg

SEQ ID NO: 933748 - DNA, 70 bp, Artificial Sequence
  ENSG00000233117_44 (sequence is synthesized)
cctgaagcaatttaagtggactttcaaattttcaattttcccattgggaaagtgtaagttttgggaaaag

SEQ ID NO: 933749 - DNA, 120 bp, Artificial Sequence
  ENSG00000233117_45 (sequence is synthesized)
ttcaattttcccattgggaaagtgtaagttttgggaaaagtcagtagtttttacattcttttgttctgatgacgcttttttgtaaaatccacatgtggaagccattagatcattttgtgg

SEQ ID NO: 933750 - DNA, 120 bp, Artificial Sequence
  ENSG00000233117_46 (sequence is synthesized)
ggcacagtttgaagaccacaggacttcatgatttctgagatctacccattcttccaatcccagcttccagcatcctctgggtacatcagaacctcccagtaaaaggatggtgttggcagc

SEQ ID NO: 933751 - DNA, 120 bp, Artificial Sequence
  ENSG00000233117_47 (sequence is synthesized)
tgtcctggaaatgctcagcctcgctgggaatgggtcccctcttacttgctgggtgaccgtgagcatgttgatcccacctcagagcccccgcttcctcctcctctataaataggaccatgg

SEQ ID NO: 933752 - DNA, 120 bp, Artificial Sequence
  ENSG00000233117_48 (sequence is synthesized)
atagtagcttggagaattcaataaaatatagtgtgctgaacactcagcacgtgcactaggaagaaccaaaaatgagcagaaccctcactgatatttaatgtcccctaatttgtcaaggga

SEQ ID NO: 933753 - DNA, 120 bp, Artificial Sequence
  ENSG00000233117_49 (sequence is synthesized)
cattatattgcataagatttgctttaaagaaagtaaattcctttcaggcaagttgtttgagtcaccaataggtttaaatcaaaggaagtttttgtcctcacgattttgcattttttagtg

SEQ ID NO: 933754 - DNA, 120 bp, Artificial Sequence
  ENSG00000233117_50 (sequence is synthesized)
cctttccacaacaaatgtataaaaggagcattatttttaagtgtaactattttggaaacttcttacttaaaagcaattttctactacaagtcaaaggattaaagcaaaaaaaaaaggtga

SEQ ID NO: 933755 - DNA, 120 bp, Artificial Sequence
  ENSG00000233117_51 (sequence is synthesized)
atctgcagcagcatatattgtatatgttttctagaaatacttttttaaagaaggcagagaaccctaagctaaaagcagaatttaaatttctagcattcattcagcagctgtctctataag

SEQ ID NO: 933756 - DNA, 120 bp, Artificial Sequence
  ENSG00000233117_52 (sequence is synthesized)
gagacagggttgaattgtgtccaagtcaagcatcagatttccagggaaagcagaggagaaattagaaagtgtgcaggaagcagcagaaatggctgttaaaaggtgatagccttctaaaat

SEQ ID NO: 933757 - DNA, 120 bp, Artificial Sequence
  ENSG00000233117_53 (sequence is synthesized)
tgacaagacttcttgggtcagataacagatccaagggctagaggtctgaattcaggcatggtcgggggaggaggagggggaagtgtacagaaaaagtgggtcagtgccaagggcatctca

SEQ ID NO: 933758 - DNA, 120 bp, Artificial Sequence
  ENSG00000233117_54 (sequence is synthesized)
gcctgtttggaggaattcaaaatcatttaggtaaagggttagaggtcagaaaaaatgatcagcacagcagtgaggggtcattgggacgtccttggatggaagtccttcaacccagcagtg

SEQ ID NO: 933759 - DNA, 120 bp, Artificial Sequence
  ENSG00000233117_55 (sequence is synthesized)
ttgcaaggcctcaggttcccggtacctgtcagtttttgcagctcgaggaggacagcctgggatctcaagcttatgtttcataaagttgccatcctaagctttggcatgacaaagtctctc

SEQ ID NO: 933760 - DNA, 120 bp, Artificial Sequence
  ENSG00000233117_56 (sequence is synthesized)
tccttgacaacgttccttagggccttctcagcccttttctcaatgaggattccacgttggctcccatcctcgctgggcctgcatacctccttttcagcaagaatcctgctgaggcagttt

SEQ ID NO: 933761 - DNA, 120 bp, Artificial Sequence
  ENSG00000233117_57 (sequence is synthesized)
cacaagaacttcccacccttaatgcctgatcatcacaggcatcctatcaaatttcatacccctttctttgatgccttatcaccttggcctgccttcagcaaggatttgttgttattttgg

SEQ ID NO: 933762 - DNA, 120 bp, Artificial Sequence
  ENSG00000233117_58 (sequence is synthesized)
ttgtcatttgtttgtttgtttgttttattgaaacaaggcagattctaggctttatgattaaactctaaactaatccacaggctgagggccagatattctctcaccacaaagcatgagcac

SEQ ID NO: 933763 - DNA, 120 bp, Artificial Sequence
  ENSG00000233117_59 (sequence is synthesized)
atataagttcagtcccatgccacaaacatctgtggccctttcaagccagatgtgaaatcacatcctgaccaaaaatacaatttttttaatgtgacgttttcgagtgcttttaagatttta

SEQ ID NO: 933764 - DNA, 120 bp, Artificial Sequence
  ENSG00000233117_60 (sequence is synthesized)
tctgtacctaccatgacattcatcatttaatcagtctcactctgccaactcaaggcgactgtatatcatgctttttaaaaccatcgaacatgctacaatgcccaaaacacatccagattg

SEQ ID NO: 933765 - DNA, 120 bp, Artificial Sequence
  ENSG00000233117_61 (sequence is synthesized)
ttattgcattgggtcattgcataatctttctggcttcgcgccgctgcctcctaaacttccccagccaccagcacaatctctccaggagcactatactgtccctgaaagctcctcacccca

SEQ ID NO: 933766 - DNA, 120 bp, Artificial Sequence
  ENSG00000233117_62 (sequence is synthesized)
tccctggagggcagttcctgctccccaaatagctcgagcctccttgcttgtcccctttaatcccccagtgcttggggtacccatatattgacaacgggtgttaagaaacaatgtcatcta

SEQ ID NO: 933767 - DNA, 120 bp, Artificial Sequence
  ENSG00000233117_63 (sequence is synthesized)
aaaccccttccagatgcaattacattttaactcaatgggaaatggcttgtcatacacttcacgaggaatatgaatgttggcattttaggaaactgcagccagtgaatatgaaagagatgc

SEQ ID NO: 933768 - DNA, 120 bp, Artificial Sequence
  ENSG00000233117_64 (sequence is synthesized)
tgcccaaagggctggtcatccagggtgccacctgccaaccttgtggtacgagtgtcctgggctggaggaaacctgcctctccagggacatgggaaaagaactcatcatgggaaaaagaac

SEQ ID NO: 933769 - DNA, 120 bp, Artificial Sequence
  ENSG00000233117_65 (sequence is synthesized)
catcttctgcctcaaagacagcatggttatgtaggaagattgagaagagtaaatagctccaaaagaaaaaacaaagtaaaacagaacaccaagtaggagaatatcaactgtaagtatacg

SEQ ID NO: 933770 - DNA, 120 bp, Artificial Sequence
  ENSG00000233117_66 (sequence is synthesized)
ccaaagtgaattaaaatccaccatggagaagaacacgcatgctgagaggggctctctccttggctctgccgtcctgaaggcagtgtggggagagaaggagctggcttttgatagcaatac

SEQ ID NO: 933771 - DNA, 120 bp, Artificial Sequence
  ENSG00000233117_67 (sequence is synthesized)
ggacactctgggagctgtgctgaatgtttcatactttccttaatgtaatttccacagcatcaccacaatcattactgtctctgctgtacatggggaaaagcttgagttaacagaagttaa

SEQ ID NO: 933772 - DNA, 120 bp, Artificial Sequence
  ENSG00000233117_68 (sequence is synthesized)
acaattcaccagtgatcacacttacatgaaaaagccaggtattctatctgtctgataacttgagcctggccattacattcagttctgctgtctttaaaataaaaaccctggattaagtca

SEQ ID NO: 933773 - DNA, 120 bp, Artificial Sequence
  ENSG00000233117_69 (sequence is synthesized)
gccctatttcccctaagctttcaattgatcctcctaagagcagagatcacttaggcactgagctatgcagctgctgcctgagtctcctggacgcctgccctcacctccagccacatgaaa

SEQ ID NO: 933774 - DNA, 120 bp, Artificial Sequence
  ENSG00000233117_70 (sequence is synthesized)
aacattcaagctttaacttcagaaatgttctctaacccactcccagacacccaactgattaaatcatagattagaggaaaaaattcttgcctgaaattgtcatcttgcacgtatgctgat

SEQ ID NO: 933775 - DNA, 120 bp, Artificial Sequence
  ENSG00000233117_71 (sequence is synthesized)
gtccagaaggacacatcctggtgggaagtgactgcatgttttgttcatattacaagtcctgttgacaaaagagaataatacaggtgtcctcctgaaactgtcaccacagtgaccttcctc

SEQ ID NO: 933776 - DNA, 120 bp, Artificial Sequence
  ENSG00000233117_72 (sequence is synthesized)
agcacttcatctcacgggttaattaaaccaacctgtagtggcaaagtttagtggtagtgaaaataaacataatcctctttctgttgcccaacctttcagtttcattttgtaatttttcaa

SEQ ID NO: 933777 - DNA, 120 bp, Artificial Sequence
  ENSG00000233117_73 (sequence is synthesized)
tacaggggcacaataagtgataatcctggattccaaatgatttccacttctttctctgccaccttccctgccccaacacctgccatccctcatttacacaattcaagtaatcaaggggca

SEQ ID NO: 933778 - DNA, 120 bp, Artificial Sequence
  ENSG00000233117_74 (sequence is synthesized)
gtttggctccctttttctggaggcaaacttttgcagagttttaacttactcagtgggaagaaaagcccccaaaacactgaagcataccaagcaaataaataaataaatgcacaaaggctc

SEQ ID NO: 933779 - DNA, 120 bp, Artificial Sequence
  ENSG00000233117_75 (sequence is synthesized)
cctgcggttgtctgacgaggatactggagcaagcagcctgaagaacaaacgtctgactgttgaaacagcgagacaggaataaacccatggggccacatctgggagtgtgagtgtgtgaat

SEQ ID NO: 933780 - DNA, 120 bp, Artificial Sequence
  ENSG00000233117_76 (sequence is synthesized)
ggaactaagctggtctcccacacaacaggaattccaccaaaagtatgcgctctgtatgggaggacagaaaaaaaatgtgtttaaaatatcactaaggaaacccagatacattatctctgc

SEQ ID NO: 933781 - DNA, 120 bp, Artificial Sequence
  ENSG00000233117_77 (sequence is synthesized)
cagactacagaagacagtacagttagtgcttgtctcaaaatgacagaaacagagaacatgctttgatgatgtcgaagatgcaggaaaatagaaaaataaaaacggtggaaagattttttt

SEQ ID NO: 933782 - DNA, 120 bp, Artificial Sequence
  ENSG00000233117_78 (sequence is synthesized)
ttaatgccctaaaatgagcaagacgcctcccttttcatagcaccaggagacatttccattgcttttttttcatgcttgtggctttttgagggcaaagagtaagtgaaatccaataatttg

SEQ ID NO: 933783 - DNA, 120 bp, Artificial Sequence
  ENSG00000233117_79 (sequence is synthesized)
gtctttctgctccaaagttttggctgccataaacttattgttcgaatatcagaatggttgttcctgctttgacgcctgtgaaacaatttgtttcaatatcatagcacagttttaaaagta

SEQ ID NO: 933784 - DNA, 120 bp, Artificial Sequence
  ENSG00000233117_80 (sequence is synthesized)
aagggtaacaccctaacccccacgttgttcaagggtcaactgtattgcagtcaaaaacagaaatttaaaaaaaaaattccttcaaaaaaataaaattgtattacacacttgctaatccaa

SEQ ID NO: 933785 - DNA, 120 bp, Artificial Sequence
  ENSG00000233117_81 (sequence is synthesized)
tcctacaggcacttcagtgtggatcagcctgacttcaatccatctgtgcttcccagggccgactcctgaattcctcctccatgccatcataccttattggctctcctgctgttacgttca

SEQ ID NO: 933786 - DNA, 120 bp, Artificial Sequence
  ENSG00000233117_82 (sequence is synthesized)
gtcataatgttaaaaactcagactattaaaatgtaaagatatgaattctttttgaaattgtcaacatggaagagtctatctacagtctgcttttaatttagccgcaaaatgacttagctg

SEQ ID NO: 933787 - DNA, 120 bp, Artificial Sequence
  ENSG00000233117_83 (sequence is synthesized)
atgcaacaatttcacatgctgaggaagagttttcgattgccgaattagtgtgataaagtgatggtgaggttttctgttgactctggaagcaacaacaaaaatggtggtgctcttctccat

SEQ ID NO: 933788 - DNA, 120 bp, Artificial Sequence
  ENSG00000233117_84 (sequence is synthesized)
acccatgttcatagatatatcgttacagatgacactcaaactttgattttttttcttttttggctgactgcttgaaacacatgtagccccaggaaacaagtagagccaccccagggaact

SEQ ID NO: 933789 - DNA, 120 bp, Artificial Sequence
  ENSG00000233117_85 (sequence is synthesized)
gagtaaccgaagactctaaaccatgtgcagtagaaatccttgactcttgttacagagatgcctggaggttaatccacatgacagggatgaattatctattgatgggatatttttaaaata

SEQ ID NO: 933790 - DNA, 120 bp, Artificial Sequence
  ENSG00000233117_86 (sequence is synthesized)
tcacccaaaagtttgtaagcatatacataaaattaattcaaataatttaatgtgaaagctgaagaatgaatcagtaaattttaagaaaaaagtaaacccagataataagacaaattgtag

SEQ ID NO: 933791 - DNA, 120 bp, Artificial Sequence
  ENSG00000233117_87 (sequence is synthesized)
ataagaacaatcacaaattgttgattctaacatgcagttttctactgcttaaaaccctttgaagtcttaaccaaatacactgtcaccatttttataaactcatttattgtgaaccattta

SEQ ID NO: 933792 - DNA, 120 bp, Artificial Sequence
  ENSG00000233117_88 (sequence is synthesized)
ttaattgatacacaagcacacactttttagaggtagatattgcaataaataattctgacactttagttaacagtttaatcaactaaaagataaattcccgacaaatgtgttaaatgacaa

SEQ ID NO: 933793 - DNA, 120 bp, Artificial Sequence
  ENSG00000233117_89 (sequence is synthesized)
attttatttttcatcataacccacgtttgagtctacaggtggtagttacaatatctaaagagaaatttatatcatatgtcactggataaaacaagaggcatggtctgactttgggaaagg

SEQ ID NO: 933794 - DNA, 120 bp, Artificial Sequence
  ENSG00000233117_90 (sequence is synthesized)
ctgaatatatagcacagacaggcactttttaatgggcttttgcaggcctcaataatcattttccaaatacatttgcaataagtttcaaataacacacttcaaattaaagatcatgtagat

SEQ ID NO: 933795 - DNA, 120 bp, Artificial Sequence
  ENSG00000233117_91 (sequence is synthesized)
tcaaatgttttactaccaatatttatccatttacataccataaaattgcaaaattgaacattcgtacaaaagcattttaaaatgcccctgactaaaataatattttctgcaaaaatacaa

SEQ ID NO: 933796 - DNA, 120 bp, Artificial Sequence
  ENSG00000233117_92 (sequence is synthesized)
ataattcatgtattacttatagtttgctttagatatggtggttctttgtgtaaaatgtatttgtttatttttattatttatttatttcttatttttcatttttgagacagagtctcactc

SEQ ID NO: 933797 - DNA, 60 bp, Artificial Sequence
  ENSG00000233117_93 (sequence is synthesized)
gcatgtgccatcatgcccagctaatttttctattgatctgcccacctcagactcccaaag

SEQ ID NO: 933798 - DNA, 120 bp, Artificial Sequence
  ENSG00000261831_0 (sequence is synthesized)
caagaagccccaggtattcctaatcccaattgtttaagtctttccagtgttaaccaccagacatgtgatggattaaggactccagattattccagttcccagctgtcttagtcagggttc

SEQ ID NO: 933799 - DNA, 120 bp, Artificial Sequence
  ENSG00000261831_1 (sequence is synthesized)
tgttgcagctcaagtccaaaggcaatctgctggcagaatcctctcttctgtttcctcagtgtgtttttacttaagaaactgattggatgagccccacccacattatggagggaaattgcc

SEQ ID NO: 933800 - DNA, 120 bp, Artificial Sequence
  ENSG00000261831_2 (sequence is synthesized)
agtgctctggatgcaaatggatttttccttaggaattcagagttgctgagttttgcatcaagactgaaagaggccaaaaagagaagctgtgtggtaggactgtgtgatgactcatcctac

SEQ ID NO: 933801 - DNA, 120 bp, Artificial Sequence
  ENSG00000275371_0 (sequence is synthesized)
gactaggcttaagtgccagcgaagtatccaaattcctgatcctttccccagctgttactttgttaacccctgccttcctgcagaacactgacttggccttttcctgctgagggtctgaga

SEQ ID NO: 933802 - DNA, 120 bp, Artificial Sequence
  ENSG00000275371_1 (sequence is synthesized)
cagccgtgctataattaatgaacgaatgtctccccagccagactgtaagctcaccaaggacctctccccaccctcactggtctcatttacacattataactgcacctgggacagagtaga

SEQ ID NO: 933803 - DNA, 120 bp, Artificial Sequence
  ENSG00000275371_2 (sequence is synthesized)
cattcaataaaatatgctagatggcctgagatggataaattacctctctatcctaaaactccacatatgcacagaatttcagggtgttcacagttcccttagtattcatgaatgctgggt

SEQ ID NO: 933804 - DNA, 120 bp, Artificial Sequence
  ENSG00000275371_3 (sequence is synthesized)
aagaaccactgtccttaaaagaccttgggggttatctctgaggggagctggggagctgggaagatctgggctccttctccacggagaccctaagcagtggggagtttttctgaggtccgc

SEQ ID NO: 933805 - DNA, 120 bp, Artificial Sequence
  ENSG00000275371_4 (sequence is synthesized)
cccagaatcctcggcttattgtgaaggacaggggcatctcggggttctggggaggcaaggagaggcatgagaatctgtctgctctggggaagcagagaggaggcatgagctgcaggggag

SEQ ID NO: 933806 - DNA, 120 bp, Artificial Sequence
  ENSG00000275371_5 (sequence is synthesized)
gctctggggaagcagagaggaggcatgagctgcaggggagccgtggtgggcattccagaggccctactacctgcaggatccaagtcacatcttggggctgggtgtggtggctcacgcctg

SEQ ID NO: 933807 - DNA, 120 bp, Artificial Sequence
  ENSG00000267811_0 (sequence is synthesized)
ttgggtcacgtggtcagccaagggggcgggccctcgcggtgcgggctccaagactggtgagtaagcagtcggcgtcgggaatggggagtccttggaccagagcaaggcctgctcacctga

SEQ ID NO: 933808 - DNA, 120 bp, Artificial Sequence
  ENSG00000267811_1 (sequence is synthesized)
agaccccggcgtggcgaaggctgctaccgagacgacggcggcgggggcggtggcggcggcgcccactcacgagctcacactcattccctctcccggggccccggccccgccctccccaat

SEQ ID NO: 933809 - DNA, 120 bp, Artificial Sequence
  ENSG00000267811_2 (sequence is synthesized)
gtcggcgggcgccttggaaagtttccggccctccaggaggcttcctggctcttgattggccagtgtgaacagactgtagagaccggcggtcacgtgacgctgaagattcccgcttcttaa

SEQ ID NO: 933810 - DNA, 120 bp, Artificial Sequence
  ENSG00000267811_3 (sequence is synthesized)
agcaacctctcttgctacgtttgcgagtaggtgtgtattgttttaacacacgtttaataagcatattttattttttttaccaccacaatagtaacgaggaaataaacagtctcaaagaca

SEQ ID NO: 933811 - DNA, 120 bp, Artificial Sequence
  ENSG00000267815_0 (sequence is synthesized)
ccagtcgggttggagtttatttctgccagagcctggaggctgggagggtaaaggacactcctttagtcccagagggaagctccgaaccctcagagcaaccagaagggagggcagagcatg

SEQ ID NO: 933812 - DNA, 120 bp, Artificial Sequence
  ENSG00000267815_1 (sequence is synthesized)
ggtggacgcagaaatgggggaaggagagtggctacgtagagagtgagagcgagattcctaaaaagatgcacagagagaccctcagagagaagcagagggaatgggttgcactggctgagg

SEQ ID NO: 933813 - DNA, 120 bp, Artificial Sequence
  ENSG00000267815_2 (sequence is synthesized)
atggtggaggagccgtctcactcccttcctaatgtctatagatcaataacgagggaagaaaggaggacagggagctgatggaaacacagcttgccaactgtacccagtcccccaacaagc

SEQ ID NO: 933814 - DNA, 73 bp, Artificial Sequence
  ENSG00000229839_0 (sequence is synthesized)
tgttgcatgggatggcaatgtccacatagtgcagaggagaatctgtgttacacagcgcaagttcctgctgcaa

SEQ ID NO: 933815 - DNA, 69 bp, Artificial Sequence
  ENSG00000229839_1 (sequence is synthesized)
gatgggaatccagaacaacgccgtatggacccctctgcagcaggagaccttatcaaaattctcctagat

SEQ ID NO: 933816 - DNA, 120 bp, Artificial Sequence
  ENSG00000229839_2 (sequence is synthesized)
cccctctgcagcaggagaccttatcaaaattctcctagattacatgacagcagccctgggaacagaagttacattctgaggtactgggagttggaatttcaacatatgaattttgggagg

SEQ ID NO: 933817 - DNA, 120 bp, Artificial Sequence
  ENSG00000229839_3 (sequence is synthesized)
atgcaacaaaatactccccagtgcttagagggtcctgtgcttatcaagcatctgtttagaaagccctttcacatgcatgatctcatctgatccttagaacagaactgttaaacaggaaga

SEQ ID NO: 933818 - DNA, 120 bp, Artificial Sequence
  ENSG00000229839_4 (sequence is synthesized)
gatcaagccagaagtgtttgactcttcaacaataatctggtgcccaaacacgtggggccacagagaagactcaggaccctgaaggagttgcctaaaaccctagctaaggtactagcaggg

SEQ ID NO: 933819 - DNA, 120 bp, Artificial Sequence
  ENSG00000229839_5 (sequence is synthesized)
gcccagtgaaacctcaccaagttctagcttctcctctggtgaaactgattgtgaaaacagaaaaggagaatggctatgccctcaaactacctggaaccctgattcttctcaaacttggcc

SEQ ID NO: 933820 - DNA, 120 bp, Artificial Sequence
  ENSG00000229839_6 (sequence is synthesized)
tctaatatccaacgggacataacatctgggtctcgctatgttgtgcaagctggcctcaaactcctgacctcaagcgatcctctttcctcggcctctcaaagtactgagattacaagcgtg

SEQ ID NO: 933821 - DNA, 120 bp, Artificial Sequence
  ENSG00000229839_7 (sequence is synthesized)
actgcacccagccaactatatttctgatttactttttgttgggaaaaaatcactagtaagtggacctgtgcagttcaaacccgtgttgttcaagggtcaaatgtatagtactttcctgag

SEQ ID NO: 933822 - DNA, 120 bp, Artificial Sequence
  ENSG00000229839_8 (sequence is synthesized)
ttctgtgagttgttctaattatagagcctgaaggaggcttaagggatccctccaatttatagccagttggtcagaaatgaagatggcctgggacccccaaccccaacttgcaacaggcat

SEQ ID NO: 933823 - DNA, 120 bp, Artificial Sequence
  ENSG00000229839_9 (sequence is synthesized)
ctgaagtgagggcagtctttttgggaactgtgcctctaacttgtggggtctatgctaacttttgagtggttagcatcagaattgaaatattgcagtatattctaagtctctaagttgaag

SEQ ID NO: 933824 - DNA, 120 bp, Artificial Sequence
  ENSG00000229839_10 (sequence is synthesized)
atttactgctattaacacattttgatagatctaaattgttgatgccagaaagattttcaatctcaagaataatcgagagccaacaatttagcttatagtctgaattcaacagcttgtatc

SEQ ID NO: 933825 - DNA, 120 bp, Artificial Sequence
  ENSG00000229839_11 (sequence is synthesized)
tcagccacaagtgataattttaggaaaagaagtgccaaatgttacactgagaagacaaaagtcaacttggaaatgatctctctcttcaagcaaaataaaaaactaacatgtagtctccct

SEQ ID NO: 933826 - DNA, 120 bp, Artificial Sequence
  ENSG00000229839_12 (sequence is synthesized)
tgaaaacttcttgttataagcctgccagccaagaaatacaaccagtgagggtttgtccttcaggccccagaaatacgtattgttacgtatttttggtcaattttaagtccttgccctacc

SEQ ID NO: 933827 - DNA, 120 bp, Artificial Sequence
  ENSG00000229839_13 (sequence is synthesized)
caccacccacatcaattctgtccccttcaattaatatcctacctgagttgctactcctaatactatctgagctctaattattttaagtcaaataaagtgcctggccctaatcaatgaaaa

SEQ ID NO: 933828 - DNA, 120 bp, Artificial Sequence
  ENSG00000229839_14 (sequence is synthesized)
ccaaaaaaacaaccctttaaatacaccagcagagagaattttgccttgagcttggaaagatgttgtttaaagtgatgtctccaggaataaagtctgaaggaaaaatggtttgtttctaag

SEQ ID NO: 933829 - DNA, 120 bp, Artificial Sequence
  ENSG00000229832_0 (sequence is synthesized)
tattctgtattttatatacgtatacctttatcaagttataaatgtgtgtgtttgttcacctcccgagtagctacgaccacaggtgtgcaccaccatacccagcgaatttttatttttatt

SEQ ID NO: 933830 - DNA, 120 bp, Artificial Sequence
  ENSG00000229832_1 (sequence is synthesized)
acccagcgaatttttatttttattttttttggacagttgaagtctcactatattgcccaggctggactgaaactcctgggctcaagtgatcatctcaccttggcctcccaaagtgctgag

SEQ ID NO: 933831 - DNA, 120 bp, Artificial Sequence
  ENSG00000229832_2 (sequence is synthesized)
ttaaaattgcaaatctccctggaggttgtggtcaaaccctcttggggagaccaactgaacatttgcagaggatacacaaactactccgttaatgcagagttgtgttggtctactctcagt

SEQ ID NO: 933832 - DNA, 120 bp, Artificial Sequence
  ENSG00000229832_3 (sequence is synthesized)
gtatagtctcccctctataaatggcactgtcccaggggaaagccgaagtgctaagggtaatatattctaacttctttaacatccttatccggctttctacttttcataagttttggtaat

SEQ ID NO: 933833 - DNA, 120 bp, Artificial Sequence
  ENSG00000232648_0 (sequence is synthesized)
ggcaccgcggggcttgatcagggaggtaggcggtgctccctccggcccccggcgtcgtgtgccctgcgggtttcgtggcccttcccctacgctggaatcttctgtgtcatttagggggag

SEQ ID NO: 933834 - DNA, 120 bp, Artificial Sequence
  ENSG00000232648_1 (sequence is synthesized)
gggatgcgggacggcatctgtttgacaacgcattggtcccacagacagcctttaaaaacaactgcttttggggggtgtcagaacatttaagcacaggacgtcggtgaggcttcctggcgg

SEQ ID NO: 933835 - DNA, 120 bp, Artificial Sequence
  ENSG00000232648_2 (sequence is synthesized)
agtggggcacacgccagctttacgggactttttgctcagtcctgccccaggactgcaatcggaggggacctggggcatggaggagacgcgagtgaaaacctagtcagcgggcgggccctc

SEQ ID NO: 933836 - DNA, 120 bp, Artificial Sequence
  ENSG00000232648_3 (sequence is synthesized)
ggccccataatctacgtgatctcctagtggggtttaatttcggtgtagtgtaaatgagatgtcaggcagaggagctgattttaattacagatggacatttttgaaagaaatgggtgcaaa

SEQ ID NO: 933837 - DNA, 120 bp, Artificial Sequence
  ENSG00000232648_4 (sequence is synthesized)
tagaatgaatgcatggataattttaatggaatgcctatgtaaacaaggccaattatattttagtacaacatcttttcatcacagaaatgatatcttcagggaaaagacttcgaaaaagtg

SEQ ID NO: 933838 - DNA, 120 bp, Artificial Sequence
  ENSG00000232648_5 (sequence is synthesized)
cctgaagtgacacaacacatgttttcttctggtatctggctaaagaatgaaatctggcagaaatatttaatgaagaggaatctgaacatagcagttgagaaagaaagattgggagaagac

SEQ ID NO: 933839 - DNA, 120 bp, Artificial Sequence
  ENSG00000232648_6 (sequence is synthesized)
tcctgaggacatattttttcaatttgagatataattaatttgttttccagtaaaatagatattagtagatctatgacatacaggaaacaatcgaaaatagagataagtggtaataatacc

SEQ ID NO: 933840 - DNA, 120 bp, Artificial Sequence
  ENSG00000232648_7 (sequence is synthesized)
tcattacttaagacatctttttcagaaaattattcttcagtgtgtggtgcattggctttctaggaaagaacgggagggagaaccctgctgacatgaataatggcctgggggagaggggga

SEQ ID NO: 933841 - DNA, 120 bp, Artificial Sequence
  ENSG00000232648_8 (sequence is synthesized)
gagaagcaagagaaaggagcagttaagaggaaaatgatgtcatatggaaagaaggaaatagatcagggcgtctttaagagctaatatcaattgggtttagtgtctgtatttagaggatgg

SEQ ID NO: 933842 - DNA, 120 bp, Artificial Sequence
  ENSG00000232648_9 (sequence is synthesized)
gagagaagaggtatcatctagggttttggcttgggccacaggtagatcttgttaaggctgtacgaaatagaaaatccaggaggtaacgcaggtgtgtgggggaaatgatacaaatgtaaa

SEQ ID NO: 933843 - DNA, 120 bp, Artificial Sequence
  ENSG00000232648_10 (sequence is synthesized)
tcatacaaggatatgaaccctgtagattttacaactttgagctctatccttcttaggccttctcttctaagcagcataaactactgctgcctacatgttgcctgttcataaaggctgagg

SEQ ID NO: 933844 - DNA, 68 bp, Artificial Sequence
  ENSG00000232648_11 (sequence is synthesized)
ctactgctgcctacatgttgcctgttcataaaggctgaggcaggggaccctccagcctggcgacagag

SEQ ID NO: 933845 - DNA, 120 bp, Artificial Sequence
  ENSG00000232648_12 (sequence is synthesized)
gctcggtccttcgtgccgtcctccccgctgggaggggcagctccagctccgctcggctcgctccgcccggccacaccggctttttccccatcaggcggtccgagtgcggctcctcgcgag

SEQ ID NO: 933846 - DNA, 120 bp, Artificial Sequence
  ENSG00000232648_13 (sequence is synthesized)
cctgcaaaggagcagcaggcggttccttttcggacgacctggagcgaggcctgcgggactgcgcgccccggcgggcggcgtgcggctcccggcatgcgcggcggctgcgttcccgccgcc

SEQ ID NO: 933847 - DNA, 120 bp, Artificial Sequence
  ENSG00000232648_14 (sequence is synthesized)
atattttagtacaacatcttttcatcacagaaatgatatcttcagggaaaagacttcgaaaaagtgcctgaagtgacacaacacatgttttcttctggtatctggctaaagccttctctt

SEQ ID NO: 933848 - DNA, 73 bp, Artificial Sequence
  ENSG00000235615_0 (sequence is synthesized)
gtgtttgctttctatgtgtcctgggtttcttctttctggtgggctcatggtctcgctgacttcaggagtgaag

SEQ ID NO: 933849 - DNA, 120 bp, Artificial Sequence
  ENSG00000235615_1 (sequence is synthesized)
cgctgacttcaggagtgaagctgcaggccttaacgctagatggaaaagttctccaagtccctacccggcccagaagcccagctggcttcacctctcactggcactggctgcaggacttcg

SEQ ID NO: 933850 - DNA, 120 bp, Artificial Sequence
  ENSG00000235615_2 (sequence is synthesized)
tgcaggacttcgccgcacctagcccgggcactcccgcagcctagaggaagctcctcccagacaatcaagaggaaaagaggggaagcgagaaagagacggagagccgccagcgtggccaaa

SEQ ID NO: 933851 - DNA, 120 bp, Artificial Sequence
  ENSG00000235615_3 (sequence is synthesized)
gaccccactaagagggaagggcggtccacgcacgggacccagcctccgatcaagcccagcaggtgtcgagatcgcgcccacccggaccccacgccggccggccagcgctgcgcgcagccc

SEQ ID NO: 933852 - DNA, 120 bp, Artificial Sequence
  ENSG00000235615_4 (sequence is synthesized)
cagctcctgcccgcgcctctctcttcacacttcccggagagcagagggagccggctcaggcctcagccagccccagagaagggccctcacagcgcagcggggggctgaagggctcctgga

SEQ ID NO: 933853 - DNA, 120 bp, Artificial Sequence
  ENSG00000235615_5 (sequence is synthesized)
gcgcggccagagcagacatggagaacgaggaggcgcggagagcgagcgagggctgctagcacgttgtcacctgtcatgatgttgtaaaataagaaagagtaaatgttattttagaattcc

SEQ ID NO: 933854 - DNA, 65 bp, Artificial Sequence
  ENSG00000235615_6 (sequence is synthesized)
atcccagcactttcagaggctgaggcgggcggatcgtgaggtcaggagatccagaccaaaaaatt

SEQ ID NO: 933855 - DNA, 64 bp, Artificial Sequence
  ENSG00000235615_7 (sequence is synthesized)
aaaactcagaggcaggagaatggcgtgaacaccggacgcggagcttgcagtgagccaagatggc

SEQ ID NO: 933856 - DNA, 61 bp, Artificial Sequence
  ENSG00000235615_8 (sequence is synthesized)
ccttccttgtttcctgctgtagttatttgtcaaaagatacaaaaaatctgtaagagttaag

SEQ ID NO: 933857 - DNA, 120 bp, Artificial Sequence
  ENSG00000235615_9 (sequence is synthesized)
atttattttgctgcaacactactatgcacagtgacatggtcaagttgctttttataatgatttctagtgatattaatttgcatcagtcgttttcatgaccccaaagccaactcaataata

SEQ ID NO: 933858 - DNA, 120 bp, Artificial Sequence
  ENSG00000235615_10 (sequence is synthesized)
ccagaaaatacttgtttgcttgcctacattttgtaataatccaatgtcctgaaataaaaatgaatattttcttcctggaaataaagtgagataattttcttcttccgagagactcatgaa

SEQ ID NO: 933859 - DNA, 120 bp, Artificial Sequence
  ENSG00000235615_11 (sequence is synthesized)
acaagaacagaatgacattatactaaactatttcacaaatattggtcaacagtggaggcttttttgttcatttatgtaaatttcatttggctctattttcctaagttgcattttatgctt

SEQ ID NO: 933860 - DNA, 120 bp, Artificial Sequence
  ENSG00000235615_12 (sequence is synthesized)
ctttcacctgccttgccaaatgaaaagaaaaatcatttatttattaaaacatacactaacagaagaaaataatttcactcttcacaaactttggcattatgaagtcactggttactggag

SEQ ID NO: 933861 - DNA, 120 bp, Artificial Sequence
  ENSG00000235615_13 (sequence is synthesized)
atttaatttctgtaacatatctgaagtggttatttttttctttccatgaaggaaaccttttggaattaagatatggtacattgaactaaacggggattgcatttgctgtttctgtgataa

SEQ ID NO: 933862 - DNA, 120 bp, Artificial Sequence
  ENSG00000235615_14 (sequence is synthesized)
cattttacatctgaaattccaataaatatttctcttcttgctttgaggtggtttagttaatcattcaggtggttggctttcataagaagtaaaggcgtgccagcatttatagtttcccag

SEQ ID NO: 933863 - DNA, 120 bp, Artificial Sequence
  ENSG00000235615_15 (sequence is synthesized)
agttcgtttattgcctcaagcttgtatttattcttattacactcactagcttagataccaggtgaatacctgggagaaagaaacaattaatttcaaaagtaataaaaataaaagaacaaa

SEQ ID NO: 933864 - DNA, 120 bp, Artificial Sequence
  ENSG00000235615_16 (sequence is synthesized)
aaaatacaaaactattcaacatgccagcaatcctgttctcttaagaaacctacctgtttttttcaatgtgtgtaagttttagcattttatagcaattagatgagtctgtatatcattaga

SEQ ID NO: 933865 - DNA, 120 bp, Artificial Sequence
  ENSG00000235615_17 (sequence is synthesized)
acttctgtccttggaattaggacaaaactattttctgcaataaatatttggctctagaaatctattttgacctgtaccataatgcatagcagcagaattaaaatattgtgtgttatcatc

SEQ ID NO: 933866 - DNA, 120 bp, Artificial Sequence
  ENSG00000238262_0 (sequence is synthesized)
ctaaaacagtcggcctggttgatttctgggagggcctctctccttggcatgtagaagtggccttggggagaaggcggggccggccagggtttctactcctgcctcatggagacccgcctc

SEQ ID NO: 933867 - DNA, 120 bp, Artificial Sequence
  ENSG00000238262_1 (sequence is synthesized)
tgcgactgctgcacagccacgaggctgagccgctgcggatgcatgcgtgacttaggaatgtgtgctggtgtgtttgccacagcaacaggatgaggaaagcacagctccaagagaggtggg

SEQ ID NO: 933868 - DNA, 120 bp, Artificial Sequence
  ENSG00000238262_2 (sequence is synthesized)
agctcatccacctggggaagcatgagcaggagcaggaagggtcactctgggactgtgctcatgggaccctgagatgcagcagaaagagcagtgtgaggagcaaagtgacgctgcctgcag

SEQ ID NO: 933869 - DNA, 120 bp, Artificial Sequence
  ENSG00000238260_0 (sequence is synthesized)
cgcggagcggctgggaaggaggggctgggaatcttggagccccttggcccgcggggaaagcgggtgacccgccctgcaagtgggatgcccccttcggccttctggagcgcagagcaatgc

SEQ ID NO: 933870 - DNA, 120 bp, Artificial Sequence
  ENSG00000238260_1 (sequence is synthesized)
actctgaagccggagggtagaaagtgctggaatgcgcgcccgggcccaggctgtcgcgagccttcagcaagccagtgcacacagagagggctgcccagagatcccggtcagcgctcgcag

SEQ ID NO: 933871 - DNA, 120 bp, Artificial Sequence
  ENSG00000238260_2 (sequence is synthesized)
gtctccccggcaagggtgcccactgcaagcacaggcgtgagaaatggcccagaaaagagtggtcagggcaatgtgttcttggcacgcccagcaagacctgccagagggacctacagacga

SEQ ID NO: 933872 - DNA, 120 bp, Artificial Sequence
  ENSG00000238260_3 (sequence is synthesized)
gtgtctcccagctatcttaccagcggggaccttgaggtccaagtatccagtccggttagaaatggccgcggatccaacaggtgctggtgagtgggagaatacccctgagggaggaagaac

SEQ ID NO: 933873 - DNA, 120 bp, Artificial Sequence
  ENSG00000238260_4 (sequence is synthesized)
agaggccgggagggagctgagtggatgtagatgagaaatacctggacagctgcaagctgtagtcagtgatgggcaactggaaccagagattccagagagagggagggagaaagagggagg

SEQ ID NO: 933874 - DNA, 120 bp, Artificial Sequence
  ENSG00000232643_0 (sequence is synthesized)
tggggaccgagggtcggcgtcacagtgagagagccatgatggaggacggggtcaccctgcttgcccaacgcggggagctccgtcatacagaaccccagtgagttctggaggtcacgctct

SEQ ID NO: 933875 - DNA, 120 bp, Artificial Sequence
  ENSG00000232643_1 (sequence is synthesized)
gtttcataaatgaaaagctggggcaggggccttgccacacggacactcctcgggcctcacaagctcctgtgggtgaccaggctgctccccaccgccggcgtgggctgttgctaccctgca

SEQ ID NO: 933876 - DNA, 120 bp, Artificial Sequence
  ENSG00000232643_2 (sequence is synthesized)
catccctcgggtgggcagcggtgcttgaaacgccagctcccgcccttcctgcctagtggcttgacggcttcattgtgctaaccacccaggcaagcttgcgtgactaacggaggagcgtct

SEQ ID NO: 933877 - DNA, 120 bp, Artificial Sequence
  ENSG00000232643_3 (sequence is synthesized)
ccccttagattcttcccgcccggagccggggacagcagaaaaccacctgacctccagattctctctcgtccagtggagattctcctgcccgaaggcaggcgctctccaaggtccctctcc

SEQ ID NO: 933878 - DNA, 120 bp, Artificial Sequence
  ENSG00000232643_4 (sequence is synthesized)
cctcgttgtcagaacaaccccagctctgccacctacaccttgtgtgaccttgggcaagtcagagaaacttctcagatgcacaatctcgtcacgctcctagtttccaagcccacacacctg

SEQ ID NO: 933879 - DNA, 120 bp, Artificial Sequence
  ENSG00000232643_5 (sequence is synthesized)
agggtcaatgtcccttattgcacccccaccccataccgactccatcagcaagtcctgtttgttcttgccccaagtatctctcctgtctgcccattccctgcatctcccccgtcaccaccc

SEQ ID NO: 933880 - DNA, 120 bp, Artificial Sequence
  ENSG00000232643_6 (sequence is synthesized)
cgggccagtccccgttacccgcacctggaggtctgcaccagccccacctgcactccggcgtccactctcgcccccattgctgtgatctccacacaaccacgagcggccttgagagcgcag

SEQ ID NO: 933881 - DNA, 120 bp, Artificial Sequence
  ENSG00000232643_7 (sequence is synthesized)
cgaggccgtgaggctgcgcagagcccctcagtcagcaggaccgcgctcacggttcagtgggccgtctgctagaggctttccgcagttcattccttctccccacacaactctgaaggatca

SEQ ID NO: 933882 - DNA, 120 bp, Artificial Sequence
  ENSG00000232643_8 (sequence is synthesized)
gccccagctctggggcccaggactgcttggctcatcgaagaatcccgccatgcaggtatgacctggatagtacttgacattgcattgtagtggggaaaaataaaaaggaacatgaaacct

SEQ ID NO: 933883 - DNA, 120 bp, Artificial Sequence
  ENSG00000235610_0 (sequence is synthesized)
accaaaactatatagaggagaaagtaggacaactttagaagtttatgagatgacatgaaaatgagacatgaaaacaatccaggggcaacgtgagaatatatatttcagtggaaccatgtc

SEQ ID NO: 933884 - DNA, 120 bp, Artificial Sequence
  ENSG00000235610_1 (sequence is synthesized)
ctctgccatccatagctgtcatccagaaaatatttattgaatacccactactctattagaaaatgatcataactctcctccctcttacattatccattatttggacctgaggtaaaatgt

SEQ ID NO: 933885 - DNA, 120 bp, Artificial Sequence
  ENSG00000235610_2 (sequence is synthesized)
tgaatcgatcaaaagtatttctcacatttttggtctttatttgatggaaaatgctcaataaattggacaattcactggacttgagcttaagatctactattgattgatattattatttca

SEQ ID NO: 933886 - DNA, 120 bp, Artificial Sequence
  ENSG00000235610_3 (sequence is synthesized)
aaagagataaaatttcctgttgtcatgagctttccttctagaagggaaagacaggcaatgaacaaataagtaaaatacagcattttaaatgacaataagtgctacagaaaatgaaaagca

SEQ ID NO: 933887 - DNA, 120 bp, Artificial Sequence
  ENSG00000235610_4 (sequence is synthesized)
ggactggggacaaggactgcttggagaaggttgtaattttaaataaagtggtcaggaaaggccacacggacaaggtgatgttggagaaaagatctgaaagaaatcaaagtttgcaccatg

SEQ ID NO: 933888 - DNA, 120 bp, Artificial Sequence
  ENSG00000235610_5 (sequence is synthesized)
tggttatctgtgagaggcgtcttccagggagagaggaccctgaggcgggagggtgtttgatgtgttctagtaacagccaggaggctagtgcccatagaaccacatgaataacagtatgtg

SEQ ID NO: 933889 - DNA, 120 bp, Artificial Sequence
  ENSG00000238265_0 (sequence is synthesized)
gtaagatgtcccttattcgtctgtcatcttccgccatgattgtgaggcttccctagccatgtggaactgcaagaattctatcactgaactaccaatgcctttggaagtatccaatatttt

SEQ ID NO: 933890 - DNA, 120 bp, Artificial Sequence
  ENSG00000238265_1 (sequence is synthesized)
ggttgttttgctacctatgggatcatgcatatcagtacttggaaataaatgatgaaagcagcagctcagccacctgtcctcaatgatgggagggcattcacctctacaggaaagaagaca

SEQ ID NO: 933891 - DNA, 120 bp, Artificial Sequence
  ENSG00000238265_2 (sequence is synthesized)
gatctatgctgcttgtaagcatggtaatggcacacttcctgtcaaacaagttggtgacattgactaggcatggcttctgggaaaatgtcatgtaagctttgttaccatctgagcaaaatg

SEQ ID NO: 933892 - DNA, 120 bp, Artificial Sequence
  ENSG00000238265_3 (sequence is synthesized)
gagatgttccttgactgaaatatttagcatgtgtgtgtgtgtgtgtgtttaatttatgtggccacagttattacatggaagacacatattttaattttggccataaaatatactcaacat

SEQ ID NO: 933893 - DNA, 120 bp, Artificial Sequence
  ENSG00000238265_4 (sequence is synthesized)
cataaggaagcacctggagagctgtgttccttttcctgaggcttccctgttccttgtgataacttacatacttggaattatagagacttaattttggttaaaatctctaatttgtgtgaa

SEQ ID NO: 933894 - DNA, 120 bp, Artificial Sequence
  ENSG00000235612_0 (sequence is synthesized)
aatgcaagggggtggggaggtggacttggtgttaaagagaaaaccacactgtcgacaagagccagacttcaaaagcatctaaagaaacaaagacaaagctgccatcatcatttgttagta

SEQ ID NO: 933895 - DNA, 120 bp, Artificial Sequence
  ENSG00000235612_1 (sequence is synthesized)
gacagttgtcatggagtggggattgactcactttaagcaaaagaatgcatccagcattgtttaaagagggaggcaacagccaagaagagctatgtgaggcctctcttggccctccagttc

SEQ ID NO: 933896 - DNA, 120 bp, Artificial Sequence
  ENSG00000235612_2 (sequence is synthesized)
ttcattagggagcaaagaaaggaggactttgccaagagcaaacctgaaacattcctttgggttcagttcaatcgcctgcaagtcacgtttccacacaaacatgtccccaggactgaggat

SEQ ID NO: 933897 - DNA, 120 bp, Artificial Sequence
  ENSG00000235612_3 (sequence is synthesized)
ttcaaggcgtctcttggatgaagacatggcaaaagctaccaccaccatgcagctctgtgattcttctactagtgtcttccattggctgaactcagctgaacactacagggtaaagaagcc

SEQ ID NO: 933898 - DNA, 120 bp, Artificial Sequence
  ENSG00000235612_4 (sequence is synthesized)
cagatgatgctgtctgttgaagtcagtttcttgaagcacaaagcaggtaaggggaaaggtgaaaagtggatctggaggaacaaacaggatataccctgcaaaatcattgatattactatt

SEQ ID NO: 933899 - DNA, 120 bp, Artificial Sequence
  ENSG00000235612_5 (sequence is synthesized)
tctaaaatagaaaaaatacacaaatttaaaaagtgatggcatttgaaacttacttctgtcatcaaatgtgataaaaataattcccatctaataaaattattgggtaaccttgaaaatcaa

SEQ ID NO: 933900 - DNA, 120 bp, Artificial Sequence
  ENSG00000223799_0 (sequence is synthesized)
gatgcacacgaggaagaggaagggatcctcgcaagctttgaaaggcgccgtcaagtcaaataaataaatgccctacaacaccaacccaggactgagatctgcatgctggaatgacggtgg

SEQ ID NO: 933901 - DNA, 120 bp, Artificial Sequence
  ENSG00000223799_1 (sequence is synthesized)
tggtggtggctttcagtattccccaggttttgtccggagcaccggcacgccctctcttgaagtccgctctccgcacagtggttagacgggaagatccggagctgtccagtgtcttgggta

SEQ ID NO: 933902 - DNA, 120 bp, Artificial Sequence
  ENSG00000223799_2 (sequence is synthesized)
atgcacggcatcgcctgatgtctgacgctagaacaccacgtaaagtcaagcagagggaagtgaatgcgccctaggcccctgcaggccaccaagaagagctagagggagttggtgcaatcc

SEQ ID NO: 933903 - DNA, 120 bp, Artificial Sequence
  ENSG00000223799_3 (sequence is synthesized)
tagagatgccggcaggtgcaccaatctgtggcacacgtacgctctccaatggaagacaactcaagaccacaccaagtttgtattaaaaaagtactgttgtgttactttttaccaacctcc

SEQ ID NO: 933904 - DNA, 120 bp, Artificial Sequence
  ENSG00000223799_4 (sequence is synthesized)
aatcattatacaaaatgttaaaaaatacacaaacacacacacacactcacagccatagaggttatcgcaaaagatcaacccagaatctttcagaatatgacagatgcactgagaaggcag

SEQ ID NO: 933905 - DNA, 120 bp, Artificial Sequence
  ENSG00000223799_5 (sequence is synthesized)
ataaattgattcaatatacaaaaggcctctttcctatggaatttcattagattaaataaggtgttccctcctcacagcctcatccttatgagcaatcatataaataatctatttaaagtc

SEQ ID NO: 933906 - DNA, 120 bp, Artificial Sequence
  ENSG00000223799_6 (sequence is synthesized)
cttgaactataacttgtataatttttagttttccccctttgaaggggcctaagagaaaggtttgagaaaccagctcttgaggggggcaggggtgaggggtaagaggtcctgtgcctttca

SEQ ID NO: 933907 - DNA, 120 bp, Artificial Sequence
  ENSG00000223799_7 (sequence is synthesized)
ttcatcctgggagcttctcaggattgcagcatttccacctgagtgttcattcttgtacattttctcatctttctcctgggttcctaggatcttggagattacctagtccaatccttttac

SEQ ID NO: 933908 - DNA, 120 bp, Artificial Sequence
  ENSG00000223799_8 (sequence is synthesized)
ttcagaaacaaaaaacctgaggctcagaaaggctaagtcaaatgcctagggtcacacagggaaactgtgggagttggatccctgagtcccagtccttaaactggttgctacatgacattc

SEQ ID NO: 933909 - DNA, 69 bp, Artificial Sequence
  ENSG00000223799_9 (sequence is synthesized)
atgccactacgcccagttaatttttctaattttgttttgtagagacagatttgccatgttgcccaggct

SEQ ID NO: 933910 - DNA, 120 bp, Artificial Sequence
  ENSG00000223799_10 (sequence is synthesized)
ccatgttgcccaggctggtctcgaattactggcctcaagcgatacgcctgtttaggcatcccaaagtgctggggttaccggcaggagcaattgctccgggccagacttcccttcccccgc

SEQ ID NO: 933911 - DNA, 120 bp, Artificial Sequence
  ENSG00000223799_11 (sequence is synthesized)
cgggccagacttcccttcccccgcccacacccccccaacccggcctagatccacaggcactgtaatcacagctgacacactcgactcggaatcagcatagagagcactctgaaaattgtc

SEQ ID NO: 933912 - DNA, 120 bp, Artificial Sequence
  ENSG00000223799_12 (sequence is synthesized)
aaatagggtccctgaaacttgtataccatacttctcctgaagatcttgaagcatctttgtgtttgctttttttttttttaacttaaaatatggcattcaggttttatccctctccccgac

SEQ ID NO: 933913 - DNA, 120 bp, Artificial Sequence
  ENSG00000223799_13 (sequence is synthesized)
gccatgtttcctttctgtattagtcacacacgtgatcctaaagtctgtcttccccactttaactggggagggctggacaaggtggaattccaattgcaggagacaggatgtgacatgggt

SEQ ID NO: 933914 - DNA, 120 bp, Artificial Sequence
  ENSG00000223799_14 (sequence is synthesized)
gaggtgcccaaggctcaccgactgaaacttcgatggctcttccctgtttccttgtgcagggccccccttctctccactgctcacctggctctcctcctcccttcctgcctgctttgcagc

SEQ ID NO: 933915 - DNA, 120 bp, Artificial Sequence
  ENSG00000223799_15 (sequence is synthesized)
tcttgctactattttccttttctttccctgctcccaccctggcccaatttatttcacagaaatatcacagggccagccaggcacagcggctcacccctgtaatcccagcactttacgagg

SEQ ID NO: 933916 - DNA, 120 bp, Artificial Sequence
  ENSG00000223797_0 (sequence is synthesized)
tacaaatatggcgttttggacgggctcgatagtttgcttggcctctactcaaggaatgctgatggtatagcaagaaggtattctgagcattatatcaatggggaagttctagatcttttg

SEQ ID NO: 933917 - DNA, 120 bp, Artificial Sequence
  ENSG00000223797_1 (sequence is synthesized)
caaagcaggagagtcatcctagggcatccagaggccttcagggtggcctgaagtctcccaccgcaccacctttgggttaacctagcctgtcccacagaagatgatgaagttgggtctgga

SEQ ID NO: 933918 - DNA, 120 bp, Artificial Sequence
  ENSG00000223797_2 (sequence is synthesized)
ggtctggaggcaagctgactcagatggattctcgattttatgatgctggactggagatgggtttcaccatgttgcccaagctagtctcgaactcgtggactcaagcaatccacctgcctc

SEQ ID NO: 933919 - DNA, 120 bp, Artificial Sequence
  ENSG00000223797_3 (sequence is synthesized)
aaagtgccttacaggcgtgagccaccgcacctggctgaactgttgtggagactgaagaggtcgtatgtactcattggtgcagctacaagacagtgatgccttctgaagtctgggttccca

SEQ ID NO: 933920 - DNA, 120 bp, Artificial Sequence
  ENSG00000223797_4 (sequence is synthesized)
gtgactacgtctatggagcagagcccttctaaactataatgaacatgtcgtgagccagaaataaacttgtgttatgttaagctactgggatttgggggactgtttgttccctcagtacag

SEQ ID NO: 933921 - DNA, 120 bp, Artificial Sequence
  ENSG00000223797_5 (sequence is synthesized)
tctagactaacctgacgtattaacataagtgtctacctaacacaacatgccaaccatttaattatactcaactcaattcaacctgactcttccttagctggatatcaattatatagaata

SEQ ID NO: 933922 - DNA, 120 bp, Artificial Sequence
  ENSG00000223797_6 (sequence is synthesized)
aaggctttacaagggtaagggtcttagtattgttcactaatgtatgccaagttcttagaacagtgcctgggacaatattatttgtgatatgagtgcattttaaaagttttaataatctca

SEQ ID NO: 933923 - DNA, 120 bp, Artificial Sequence
  ENSG00000223797_7 (sequence is synthesized)
gtctcaaaaaaaaaaaaaaaaagttttaataagactctgagtggggctttcaaaaaccagaatgttgaagatctacaaaggtcttaaaatagctcagatgggtttagatacagtcaggac

SEQ ID NO: 933924 - DNA, 120 bp, Artificial Sequence
  ENSG00000223797_8 (sequence is synthesized)
tgctagctatgtttcatgttgataagagagaactccaattttttaggtccatcctatagcccagctgatgaaaagaagataaaattcagagatggatgaaacacatttcatcctcaaggc

SEQ ID NO: 933925 - DNA, 120 bp, Artificial Sequence
  ENSG00000223797_9 (sequence is synthesized)
ctttcttgtgttctttcatttttaaattcctctgctattactctttacggagaagagaacagagcaaaatgtattcctttgaatagtgtaatttaaaaattactccagagcaaagtcaaa

SEQ ID NO: 933926 - DNA, 120 bp, Artificial Sequence
  ENSG00000223797_10 (sequence is synthesized)
agatgtgatatgtaggccgctagcctacacttctaacttaagtttttagttttaattgtgaagtataatgttgtttttaaatatagaaatttcaagctctagaaccatcacactaagatg

SEQ ID NO: 933927 - DNA, 120 bp, Artificial Sequence
  ENSG00000223797_11 (sequence is synthesized)
acaatggtaattacactgacagctgcagatattagcatgaactcaataccaaaaataaatcagaccatgaataatggaaataaaagaaaactggcagttttaagaaattccagaaataga

SEQ ID NO: 933928 - DNA, 120 bp, Artificial Sequence
  ENSG00000223797_12 (sequence is synthesized)
gcagagaaaatggagggaagaaattatcaaagaagtagaatgaaaatttccagaagtggagaaaagaaatgtccagattaaaagtgctaaataaaaacatgccattgtgaatttttaaaa

SEQ ID NO: 933929 - DNA, 120 bp, Artificial Sequence
  ENSG00000223797_13 (sequence is synthesized)
cagtgatgatggagagaagagagagagagaaaattagagacagggagagggcagtgaggaagagaaagagaaagagaaaaggtaacttacaagtaatggaaatgaaattagcatcagact

SEQ ID NO: 933930 - DNA, 120 bp, Artificial Sequence
  ENSG00000223797_14 (sequence is synthesized)
tcttaataataacactggctattagaagatagtgaaatgttgctttaagattccctcctatgtccaagtaaaatgatgataataacaaataattccaatatgcagacaatagttactatc

SEQ ID NO: 933931 - DNA, 120 bp, Artificial Sequence
  ENSG00000223797_15 (sequence is synthesized)
tattgactattttatcaagtgtcaggaactgggctaaattcatcacattgatctcatttaatgctcaaaacaaatttaaaaggtaacattattatccccattttacatatgaagaaatga

SEQ ID NO: 933932 - DNA, 120 bp, Artificial Sequence
  ENSG00000223797_16 (sequence is synthesized)
gatgcaaaaagattaagtaacttgtgaaaggtcagctttggaggcaaaatgtgacagtttccaaaaattataaaaatacaatgattaggcagtgagacattagtgtcatagctagcatac

SEQ ID NO: 933933 - DNA, 120 bp, Artificial Sequence
  ENSG00000223797_17 (sequence is synthesized)
accacaatactcacaagcaagaccaccaaggcaatgatggttggagttcggtagagggccttgaggcctaaaatgagaagacccagaagacacttgagggggaggtaaaaaccaggcact

SEQ ID NO: 933934 - DNA, 120 bp, Artificial Sequence
  ENSG00000223797_18 (sequence is synthesized)
ggtattctttgtagaattgatggactggccccataatcaggtgcataaaccaccttctctggtgttagcgagacccacacttctaagatggagtagcaaataagctccccttctccccag

SEQ ID NO: 933935 - DNA, 120 bp, Artificial Sequence
  ENSG00000223797_19 (sequence is synthesized)
gccgcctgggaccgctctcagccccttcggcctctacctgaagagccacgccccgtctgctacacccaactgattggttcctcaatcacagagaggaaaggcaacatgaggatgacgtca

SEQ ID NO: 933936 - DNA, 120 bp, Artificial Sequence
  ENSG00000223797_20 (sequence is synthesized)
aattgtgtactaaaacagtgttgcagggagggtatgcatggtctagttttctgatattttggttatccctgagatgaattacaataacatttgttttacttttttctttttcttttcttt

SEQ ID NO: 933937 - DNA, 120 bp, Artificial Sequence
  ENSG00000223797_21 (sequence is synthesized)
aagactacacagtccttggagaaggtgtcagtcactaccctcaatttgtagcctcaaatatcacaaacccagcatgtccagaccttctcccttgcgtcttacactaacttctcctggctt

SEQ ID NO: 933938 - DNA, 120 bp, Artificial Sequence
  ENSG00000223797_22 (sequence is synthesized)
cagccagagatggggggaaaggattttctgctcttctaactcatggttttggaataattgatttcttcccctttatgctcatttcttccctttgttgccagtcccttcacacttaccttc

SEQ ID NO: 933939 - DNA, 120 bp, Artificial Sequence
  ENSG00000223797_23 (sequence is synthesized)
aggtgtgagccaccacgcccagctaacattagttttaatggagattcaaaaaatctatttttaaaaaattaaaccaggtgatagaatatttcacttaaaaataatctcatagaatatttc

SEQ ID NO: 933940 - DNA, 120 bp, Artificial Sequence
  ENSG00000223797_24 (sequence is synthesized)
atagaatatttcacttaaaaataatctcatagaatatttcatttaaaaataatctcagttaaagaaaaagaaattaggctgggcagatggctgacccctgtaatcccagcactttgggag

SEQ ID NO: 933941 - DNA, 77 bp, Artificial Sequence
  ENSG00000223797_25 (sequence is synthesized)
agaccagcctggccaatatggtgaaaccatgtctctaccaagaaatacaaaaattagccaggtgtgatcatattgct

SEQ ID NO: 933942 - DNA, 120 bp, Artificial Sequence
  ENSG00000223797_26 (sequence is synthesized)
gaattgcttgaagccaggaggtggaggttgcaatgagttgagatcaaactactacacaccagcctgggtgacagaataagaccttgtctcaataaaataaaataaaaataaaaaaattag

SEQ ID NO: 933943 - DNA, 120 bp, Artificial Sequence
  ENSG00000223797_27 (sequence is synthesized)
taatcccacccactttggactcacacaggaagtgattactacagagcttgtctatgggtcccaggatgaggggtgctttctttcccatctaatgtaaattattttcttggcactagctca

SEQ ID NO: 933944 - DNA, 120 bp, Artificial Sequence
  ENSG00000223797_28 (sequence is synthesized)
gctctcagcagatgttatctatttaggcagcacttgaatgtggctgttaatataaatttctgctttaccatttccacagcacccctcaacagggtgctactatacaatattacagatgaa

SEQ ID NO: 933945 - DNA, 120 bp, Artificial Sequence
  ENSG00000223797_29 (sequence is synthesized)
agagctgaggcccaggatacaatatcctgaaaaaaactgaatcctgctgacagttgcccaagtgaagctggaagtggatctttctgcagtggatccttgagatgactgtagccctggctg

SEQ ID NO: 933946 - DNA, 120 bp, Artificial Sequence
  ENSG00000223797_30 (sequence is synthesized)
acaacttgattgctgcctgtgaaggaccctgaaccagaggactcagcgaaattgtgcccagattcctgacctacagaggcagtgagataataaatgctgttgaggtcacaaagttttgag

SEQ ID NO: 933947 - DNA, 120 bp, Artificial Sequence
  ENSG00000223797_31 (sequence is synthesized)
gtatttgttaatacagcaatggatacttaatacagcttcctacatggtctccctccttcgacctttacactacaatctgtcgtccacacagcagtcagagatccttttaaaacataagtc

SEQ ID NO: 933948 - DNA, 120 bp, Artificial Sequence
  ENSG00000223797_32 (sequence is synthesized)
agatcatcatgacactcacctccctgctaagtgtcctgcaaggcctttcacggtctgatcccctatcctttctctttcctcatctcctatcactcttgcccttgcaaattttcttccagc

SEQ ID NO: 933949 - DNA, 120 bp, Artificial Sequence
  ENSG00000223797_33 (sequence is synthesized)
actctggcctccttgctgttcttcagtatggcaagcaacctgctgcccggagcccacacactgactgtcccctctcctaggacactcttccctcaagggctcccatatcttgcctgctgg

SEQ ID NO: 933950 - DNA, 120 bp, Artificial Sequence
  ENSG00000223797_34 (sequence is synthesized)
ctcctgcatcttcttcaagtctgctcaaatgtcaccttctcagtgaggcccatcctggctatcctctttcagttctgacagaaaataatttattgctttattacatcattattttgttgt

SEQ ID NO: 933951 - DNA, 120 bp, Artificial Sequence
  ENSG00000223797_35 (sequence is synthesized)
agcagaaaacgttgtcttgttctttcctgtaacccaagtgccttgaacattgcctcattaattgcttgcgctcagtaatatgtgttgaataaatgggttaagtagtttattaattgtgaa

SEQ ID NO: 933952 - DNA, 120 bp, Artificial Sequence
  ENSG00000223797_36 (sequence is synthesized)
actaaatcctgtctgaaaggtttggagcagcttgttgaaatagcaaatggagattctgtgttttaagttgtggctaaggtagaatcatccatgatgtatgtggagccagctcctgtgtcc

SEQ ID NO: 933953 - DNA, 120 bp, Artificial Sequence
  ENSG00000223797_37 (sequence is synthesized)
tggacttaaacatctgtatctgacgtgtgggtaattatattgctatcctacacctttgacccattcatctcggctcacctgtgatccaggctatgctactaaagttgggtgagagagtct

SEQ ID NO: 933954 - DNA, 120 bp, Artificial Sequence
  ENSG00000223797_38 (sequence is synthesized)
gcaacacaaggaaaacatagagccatcatttagtaaatcaaacccataataatacattttgttgttaaatgtagccaatctctgagtattttttattaaagtatctctaatgtttaaaaa

SEQ ID NO: 933955 - DNA, 120 bp, Artificial Sequence
  ENSG00000223797_39 (sequence is synthesized)
catctaacacattcatcatgtttcaactgtcctcagcccctgcttggcttccctcctgtatgtgtcagtgcccaaagtccggaaggggccaaggtggcaggggtctggcgtgtcagtgcc

SEQ ID NO: 933956 - DNA, 120 bp, Artificial Sequence
  ENSG00000223797_40 (sequence is synthesized)
aacctcagtgtgtgcccacctggctgggctgtgacagtgcccgggttcggccccaaccttgcttcatgattggagcgggcactgggagcagggagaggccaggcagtgggagcagacact

SEQ ID NO: 933957 - DNA, 120 bp, Artificial Sequence
  ENSG00000223797_41 (sequence is synthesized)
tcgcaggggggccttcctgggcccccaagagcacagagatgcctgggtttgcagccgggcctgggcagctgcagtggcacctggggagggcagggcttctgcctgttccatggagtgtac

SEQ ID NO: 933958 - DNA, 120 bp, Artificial Sequence
  ENSG00000223797_42 (sequence is synthesized)
aaccccagccgtgcctccctgctgcagccgatgtcttggcagtggccactctagatgggtcactgctgccaccaatatgacattaatgaagtagacttaaagttttcaggggatttaatt

SEQ ID NO: 933959 - DNA, 120 bp, Artificial Sequence
  ENSG00000223797_43 (sequence is synthesized)
aatcatgattttaagtggtgctaatgtttctggaaatttaatctcttagacttgacttatttgaacattcatcatagagcaagctaaagttattgtttctaatttacataaaaattacta

SEQ ID NO: 933960 - DNA, 120 bp, Artificial Sequence
  ENSG00000223795_0 (sequence is synthesized)
gatcctgtgaataaaatggcgcagacgtgcttgtgcggctttcctgctggagtccatgagcgtctcgaggatttggataggttgagcctttattgggctgtcaaggtgtcttcctagacc

SEQ ID NO: 933961 - DNA, 120 bp, Artificial Sequence
  ENSG00000223795_1 (sequence is synthesized)
ccctgtgtgctgccagcccggggcatgtgtgttcatgtcatgtcacaatctgttcagagtactgtcatcagcaacagagcatggctcagcacgcgggcaaaactgcaccaaccacgatgc

SEQ ID NO: 933962 - DNA, 120 bp, Artificial Sequence
  ENSG00000223795_2 (sequence is synthesized)
atggacacagcacccatctagccctgacctggtggtttgtttgtgtccccttgctctgccctacccaaggaggatggggggttcagtgtgtaaaaaaataaagtctggactcatagataa

SEQ ID NO: 933963 - DNA, 120 bp, Artificial Sequence
  ENSG00000223791_0 (sequence is synthesized)
gggcagggagggaaggtcccggcggccggccggcctcggggctgtttttgtccgctttccgggggtcgtgaggggccggtggcccggcaacagtggcttcagttaccacaggacaacaca

SEQ ID NO: 933964 - DNA, 120 bp, Artificial Sequence
  ENSG00000223791_1 (sequence is synthesized)
agatatacagcccatggcatatccagtaaccaggaaaacaagcattctcacgacccagccgaactccttctaaccatcaacctgaaattccagctttatcaagactcataaagtaattgt

SEQ ID NO: 933965 - DNA, 120 bp, Artificial Sequence
  ENSG00000223791_2 (sequence is synthesized)
gcatgcttcttgctcaatccctaccaggaaacctgtatctaccaggagttgtcatagaataagaagttcaaaagctggaagaaatcttcagggtcataatttcagcctcctgcttccaga

SEQ ID NO: 933966 - DNA, 120 bp, Artificial Sequence
  ENSG00000223791_3 (sequence is synthesized)
acctttcttaagtgtttggtttcaggagtcctggtagagtatataaaaatgatgacattctttgctatatatttgaaaaaattttttaaacttctgaaaaactgattgtattctttttgt

SEQ ID NO: 933967 - DNA, 120 bp, Artificial Sequence
  ENSG00000223791_4 (sequence is synthesized)
tctgatgaaaagatgtaaattcagaagaaaacaataagaagatgaaataaactcaggatgaggaaaataatctaaaaatagttattaaaattgaaatttcctcctatgaaaatttggatt

SEQ ID NO: 933968 - DNA, 120 bp, Artificial Sequence
  ENSG00000223791_5 (sequence is synthesized)
tctgatacttaaaaatatatgtctacattatgaatacaaccagtaaaaaaatcatgtgttataaagacaagaactagcagagatcacaggaaaataaaaggtttgatttgctgaagtgat

SEQ ID NO: 933969 - DNA, 120 bp, Artificial Sequence
  ENSG00000260891_0 (sequence is synthesized)
tcaactatacattatactacaggattcacttatttatgaattcaccagcagtcaggagatttaagttccaacggggcagactttctctatcttgttttcccctgaatccctagtgcttac

SEQ ID NO: 933970 - DNA, 120 bp, Artificial Sequence
  ENSG00000260891_1 (sequence is synthesized)
caggaagctgtcaaaaatgtttgaaagtcactgcacaaaagaagagtcaccactggtcagttttgcagtactggctaaagcattcagatgccccaagagtcaaaaacacaataacgaaat

SEQ ID NO: 933971 - DNA, 120 bp, Artificial Sequence
  ENSG00000260891_2 (sequence is synthesized)
agtgagactccgactcaaacaacaacaacaacaacaactctcatctttttgcctataaggaattattcttggcctctgttgtacaacttcaagtaaaaggacctaacctacttagaaggg

SEQ ID NO: 933972 - DNA, 120 bp, Artificial Sequence
  ENSG00000260892_0 (sequence is synthesized)
gcacgcggaccacgcggccatgccggggtccctccaggaggcggaagcgcggcacactgcctgtgcggttggccagctcgccagcatctaggacggtggggtccaggcgcagggtggcac

SEQ ID NO: 933973 - DNA, 120 bp, Artificial Sequence
  ENSG00000260892_1 (sequence is synthesized)
cctggggccatggcccacctgcccacacatgcagcagagccctcacagtgacgttcactacggctgatgcattgacacccctagccagtgccaggactctgaagtggtcatgagaggagg

SEQ ID NO: 933974 - DNA, 120 bp, Artificial Sequence
  ENSG00000260892_2 (sequence is synthesized)
agatgcccatactggggtccctggatgaggcggtatgctgcctctggctcctcccgatctgaaaccacccggagctgctgctggctcagtgaggagcgccccaaagcttggggcacctcc

SEQ ID NO: 933975 - DNA, 120 bp, Artificial Sequence
  ENSG00000260892_3 (sequence is synthesized)
aggggtgcccgcagctgcacctcgatggcggatggtaggatgtccacagccagggacatgggcaggggtgggcacgaaagtggaagccatcctgctgggtgcccccaccgccgtgggcat

SEQ ID NO: 933976 - DNA, 120 bp, Artificial Sequence
  ENSG00000260895_0 (sequence is synthesized)
gtagaggttacagaggggccacccacttggctggggcaagcaggaatgctttccagagaggccacacttccaggctgtggggacccgagcacaggggtggcgagttctggcatttattat

SEQ ID NO: 933977 - DNA, 120 bp, Artificial Sequence
  ENSG00000260895_1 (sequence is synthesized)
tattatttgttccagaacaaaattcaactcccatcctcagttggccaataatgtggtaggaacaggtgggagctgacccccagatgcagggtgctgggtgctgtgctgattttctggggc

SEQ ID NO: 933978 - DNA, 120 bp, Artificial Sequence
  ENSG00000260895_2 (sequence is synthesized)
tgagtggctttagaccatggagatgtgctgtgttgcagttctggaggccagaagtcccaggtgcaggtgccagcaggactgggcaccctctgaaggccctagggaagcgtccctccttga

SEQ ID NO: 933979 - DNA, 120 bp, Artificial Sequence
  ENSG00000260895_3 (sequence is synthesized)
gctccttggtgcccatccaagcacctgcccctgcccctttgggagccccaccacagtctatgatcatgcatttattgatcacttattaacttatttattggctaattacacatttgttga

SEQ ID NO: 933980 - DNA, 120 bp, Artificial Sequence
  ENSG00000260895_4 (sequence is synthesized)
ctattgaaaatgcgaactatgtctggtttacctttgaatcccagcatctgtgaagagccggctcctgctattattattgttaatcagtattagtattagcattaaatgaatgaacaggta

SEQ ID NO: 933981 - DNA, 120 bp, Artificial Sequence
  ENSG00000260894_0 (sequence is synthesized)
tgagtggggcctggcagttctgaagggccagagtctgtggacttatgaactgagtctaggtgtgcagatggggcagggtctgtagatgtggggacagagcctgttgtaccgagggtagag

SEQ ID NO: 933982 - DNA, 120 bp, Artificial Sequence
  ENSG00000260898_0 (sequence is synthesized)
agtgcaggggagaggcaggggtgttgaggcacaggagccagatgagaggaacgtcagcagcaaagcaggtggacagcacggaagaggcagtacatcttaacaaaatcagggttctggatg

SEQ ID NO: 933983 - DNA, 120 bp, Artificial Sequence
  ENSG00000260898_1 (sequence is synthesized)
aagggaggggtggtgaatggttgctgcaatcaacagttcatacttcaatggaaagaaggtgggatttgattcctggctgcaaatcttcactctgtcacctgctatctgtgtgccctcagt

SEQ ID NO: 933984 - DNA, 120 bp, Artificial Sequence
  ENSG00000260898_2 (sequence is synthesized)
ctcccatcaaggagtgatgtctgtttctccacttcttgaatctgggctggccttgccaatagcatatggcagaagtgacatcgttccatttctgagtcaaagcctgaggaggccttgcat

SEQ ID NO: 933985 - DNA, 120 bp, Artificial Sequence
  ENSG00000260898_3 (sequence is synthesized)
gcttctactctctcttgcaaccctgcactgccacatatcaacaagacttatcaacaagcctgggatagcctgctagatgatgaaagaaatatggcccgcttgctcccatcactccagctg

SEQ ID NO: 933986 - DNA, 120 bp, Artificial Sequence
  ENSG00000260898_4 (sequence is synthesized)
atagccaggcaaccctaagaagcaaagtcacctagctgattagtagctgaccactgacacaaaagtaagatcatctgagaccagaagacagcccatctgagctcagcccaaattactgac

SEQ ID NO: 933987 - DNA, 120 bp, Artificial Sequence
  ENSG00000260898_5 (sequence is synthesized)
ccacaaagtaataataaataaatggttattatttttatgtcactgaattttgaagtggtttattattgaacaaaagctacctgatacccatcttttttttttttttttttgatatggagt

SEQ ID NO: 933988 - DNA, 81 bp, Artificial Sequence
  ENSG00000260898_6 (sequence is synthesized)
ttttttttttgatatggagtctcccagactccaccctccgcctcctgggttcacgcaattcttctgtctcagcctcctgag

SEQ ID NO: 933989 - DNA, 120 bp, Artificial Sequence
  ENSG00000260898_7 (sequence is synthesized)
gattacaggcatgagccaccgcaccaggcctacccttcctaagagtctttgctctggctcttactttcatctggaatactctgtgacttgatctttgcatgcctggctgctttatgtcat

SEQ ID NO: 933990 - DNA, 120 bp, Artificial Sequence
  ENSG00000260898_8 (sequence is synthesized)
tcatatctctgctcaaatacaatttcctcaaaaagggctacactgaccaatcaatataataagcctgtaggtctctacggcttctccctatttatttgtttatttttagagatgaggtct

SEQ ID NO: 933991 - DNA, 120 bp, Artificial Sequence
  ENSG00000260898_9 (sequence is synthesized)
tcagccttctgaatagctgggactacaggtgcatgccaccttgactggctaatgttttttttttaatttttttttagagaagggggtctcactatgttgcccacactagtcttgaacccc

SEQ ID NO: 933992 - DNA, 120 bp, Artificial Sequence
  ENSG00000260898_10 (sequence is synthesized)
agcctcctgggtagctgggattacaggtgtgagccacaatgcccagccatttttttttttcttacacagaaaagctccaatattcacttagatactgcagaaggaaaagagaggctgaaa

SEQ ID NO: 933993 - DNA, 120 bp, Artificial Sequence
  ENSG00000260898_11 (sequence is synthesized)
gcagaaggaaaagagaggctgaaagggttggatcaaggaagtaggaaagggaatttctggggcatttccttcccccaatcccagaatagccacagaaatcacagtcaccaagagctgctg

SEQ ID NO: 933994 - DNA, 120 bp, Artificial Sequence
  ENSG00000260898_12 (sequence is synthesized)
cttctgaataacatgacagtgatggtaaattttccaaaatgttgattgtaacagagtttgccacatgaccaaactggtggatcatagagtggacagacatcaggagctctggaaaaaaaa

SEQ ID NO: 933995 - DNA, 120 bp, Artificial Sequence
  ENSG00000260898_13 (sequence is synthesized)
ttgctactcagtacctactcaagttgtaatggggagagaaatggactgatatgccggatttttgttgcagagagctggcaaacttgcagtaagtaactagctgcattcaaactgactgac

SEQ ID NO: 933996 - DNA, 120 bp, Artificial Sequence
  ENSG00000260898_14 (sequence is synthesized)
gcacatagatggagccctgaaatccatagctccgttgaagaggcagcagaatttatctactccgacccaggtttgcggaatttatcaactccaacccaggtgctaggctgcttgtggtag

SEQ ID NO: 933997 - DNA, 120 bp, Artificial Sequence
  ENSG00000260898_15 (sequence is synthesized)
ggagtgaagccatcatgctgatggatttggtggtgacaaagcaggctgtcaggaagaagtaggtcccccagattctcccgggcaaggggacaacactggaaactacatgtggtagtttcc

SEQ ID NO: 933998 - DNA, 120 bp, Artificial Sequence
  ENSG00000260898_16 (sequence is synthesized)
agtatgttaggcttttccttctgaaacttggcaaagtagaatttgctgaaaagtaagcagtacagcttgtttttaatttcgtttctcaagaaaacccagctaagtctcatcatgactgtt

SEQ ID NO: 933999 - DNA, 120 bp, Artificial Sequence
  ENSG00000260898_17 (sequence is synthesized)
tactcttgtttcttttgggaaattaacttcttaatataactttgactaaagatatgtagatttgtggtatgaaaagaaaatctatctgttggatgatgttcccagtgaagtactatccat

SEQ ID NO: 934000 - DNA, 120 bp, Artificial Sequence
  ENSG00000260898_18 (sequence is synthesized)
ttgttattttaaaagttattctcttttgttctaaacagtaaatagtgccaaaactaagaaaaacatgtattatagtttcaacgtcaggctgacttgcctgcagatctgttcgcaatagac

SEQ ID NO: 934001 - DNA, 120 bp, Artificial Sequence
  ENSG00000260898_19 (sequence is synthesized)
cacaaccctcagctgtcaggtttccctggcacccagaggggactgagccagcagctgacctgaaaacagcgagtctgctgactgtccagcgatcatttccctctattgagaattttaacc

SEQ ID NO: 934002 - DNA, 120 bp, Artificial Sequence
  ENSG00000260898_20 (sequence is synthesized)
aaaagtacaaagaaaggaggtagtgtcatttggaagaaccttaaatatgcagtgtcactgaagtcaggggaagaaaagaatttcacggagaagggcgtgttcaatgcgtggaaggctgca

SEQ ID NO: 934003 - DNA, 120 bp, Artificial Sequence
  ENSG00000260898_21 (sequence is synthesized)
gagtagataatgaagattcaaaaaggcaaatctgagaggagttgcagtacagtcgtgtggtttctagactacacggcgtttcgaaagtgggtaaaggcagacatcacgcgtcttcaagaa

SEQ ID NO: 934004 - DNA, 120 bp, Artificial Sequence
  ENSG00000260898_22 (sequence is synthesized)
gttcagaagaaagaggaagagtgttgtcatagtgggtaaggtcaagtatctttgattgcaaaacaacagtcgccagaagagaaggggctaaaagttggaacgaggaagaaggctcggaga

SEQ ID NO: 934005 - DNA, 120 bp, Artificial Sequence
  ENSG00000260898_23 (sequence is synthesized)
aaggtgtcagacaaagcgggattagcaagaagctgttagggctggtcctaccgggatgagagaaaggcgcagaggccagccgagtggaaagagcagcggtgacgaaccgggttccactca

SEQ ID NO: 934006 - DNA, 120 bp, Artificial Sequence
  ENSG00000260898_24 (sequence is synthesized)
gacgtccgacacttctcgccaaggggccagcgcggacagcagcgcctcccggggacctctgagaagccctgtttctgcgcggctccgcccgacctccaaggccgacctcggaggctcaga

SEQ ID NO: 934007 - DNA, 120 bp, Artificial Sequence
  ENSG00000260898_25 (sequence is synthesized)
gacccaggccccgttggcactcaccccactgccacgcggcgccagcgccggactggccgcacgataagcgcgtcccaggctgccgccaaccggccctcgggggagacgggtcccgggggc

SEQ ID NO: 934008 - DNA, 120 bp, Artificial Sequence
  ENSG00000260898_26 (sequence is synthesized)
gcaggcgcgggccccagacacagcgagctccagagagagcgcagcgccgagcctggcagctctggctccagcaggaagacgcagcccacggccagcgccaggaagcccgcgtacgcggag

SEQ ID NO: 934009 - DNA, 120 bp, Artificial Sequence
  ENSG00000260898_27 (sequence is synthesized)
ccgcgccacagcgccatggggacccaggcgccgcacctgcgcgaaccaactcctttcctagcccgcgcctcttccgggctcggcgcgcgccgatgtcgacacaagcgctacgtcacaagg

SEQ ID NO: 934010 - DNA, 120 bp, Artificial Sequence
  ENSG00000260898_28 (sequence is synthesized)
gcgctacgtcacaagggtgcgccacggggccccccaaggggcggggcgacgggcggcgccaggacggagcgaggggggaccccacgcctcagtcccaggcctggcactgcggtgttgccg

SEQ ID NO: 934011 - DNA, 120 bp, Artificial Sequence
  ENSG00000260898_29 (sequence is synthesized)
acaacggcggttgtgccagtccgggcgctgcacccccttcccggaactctaatcgtatccccaaatagagggatgggaacacatttgctttcgcagtaaaacgaaacggacagattgtga

SEQ ID NO: 934012 - DNA, 120 bp, Artificial Sequence
  ENSG00000260898_30 (sequence is synthesized)
agaagcggacaaacctcgcgttaatattcgaaccagtgggtgtccccattggcacggatcacacccccatcttttaatccctccctccgcccgtgtcccctcatttgctagacttgtcct

SEQ ID NO: 934013 - DNA, 120 bp, Artificial Sequence
  ENSG00000260898_31 (sequence is synthesized)
attccgcccctttggaaggtggccgagaccctcagccactaaaggacttcgtcgagacaggagagcccgcagagatcgttctcttctggataaccagattattccacaatcaaactttaa

SEQ ID NO: 934014 - DNA, 120 bp, Artificial Sequence
  ENSG00000260898_32 (sequence is synthesized)
cccttttgggggcgctgttccctttaacaaactctggaaaatgtacacaatcttgtgcacaacacgagagttatggacctgggttgagaaacgctgctttcttttgttcccccttggtga

SEQ ID NO: 934015 - DNA, 120 bp, Artificial Sequence
  ENSG00000260898_33 (sequence is synthesized)
catcacttaaacccagccctctcttcgctgatacttttctgtgcatgaggctaggttgagagacagtgaagctaggctgggtaccagctcattctcatcagccacaatgcccggcctagt

SEQ ID NO: 934016 - DNA, 120 bp, Artificial Sequence
  ENSG00000260898_34 (sequence is synthesized)
cttgttccctggtttgtttccacttttccaattctctcggctcctgaccttggctttgtgtccagttttccactgtgaccctgacctttggacttggcagcgaaactttatttccctaac

SEQ ID NO: 934017 - DNA, 120 bp, Artificial Sequence
  ENSG00000260898_35 (sequence is synthesized)
tttgatcttgggcattagtcttcattctcctcagccccacctcatcagaacttccccatcctggtcatctaccttcccgcagttcatcctacccagcctacctgaccatgccatcccttt

SEQ ID NO: 934018 - DNA, 120 bp, Artificial Sequence
  ENSG00000260898_36 (sequence is synthesized)
cgacaaagatattcacacaggaacagatttgggctaccttggaaaagaagccaaagagccagtcagatctttatgaagccatgaaagccatcttccctagagttgcctgtcacttctctc

SEQ ID NO: 934019 - DNA, 120 bp, Artificial Sequence
  ENSG00000260898_37 (sequence is synthesized)
tgatcatcccacctcagcctctccagtagctgcgaccacaggcacgtgccactaaatgattattttttcaagggagaaatcatgcctgtcatacaaataaaaaatgaacaagtgtaaaag

SEQ ID NO: 934020 - DNA, 120 bp, Artificial Sequence
  ENSG00000261761_0 (sequence is synthesized)
atcttttccattataacagaaaaaatattataaggaaatgtctcaaacttttctttcttacagttcagtctcattgaaaagaaagatgtctacatcattgagaagaaaaagaagcccaat

SEQ ID NO: 934021 - DNA, 120 bp, Artificial Sequence
  ENSG00000261761_1 (sequence is synthesized)
gtggattcagcacaattaacacggagtacttgtcaaggcacagacactgcaggaataaattgtaggctgcatttctggtcttaggactcagtcaaatgggacatacaagccatgcaagcc

SEQ ID NO: 934022 - DNA, 120 bp, Artificial Sequence
  ENSG00000261761_2 (sequence is synthesized)
attccagaattggggaataaataggagagatcaacagaaaggccatttgaatcagaaccagcaggcaggaagtatgaaaccatctagcagcctgttctgtaaggacaaaagatcattaaa

SEQ ID NO: 934023 - DNA, 120 bp, Artificial Sequence
  ENSG00000261761_3 (sequence is synthesized)
taggcaaattgcagaaagccagggatagtatggtttagctttctttaattcctctttgttgagtttcccattgtcttagaaattattcaggaggtaagacctactggtgtatggcacagc

SEQ ID NO: 934024 - DNA, 120 bp, Artificial Sequence
  ENSG00000261761_4 (sequence is synthesized)
aggaatatcaggcctattaatcacaatcaagtctctaatgcttgtattaataaatcatgtttaatgtagaataatttctgaaaataatgccacagatcaataaataaatctctaagaaaa

SEQ ID NO: 934025 - DNA, 120 bp, Artificial Sequence
  ENSG00000261761_5 (sequence is synthesized)
ggtagcagaagcaggaagagagccagcaagaagacacctaccctggcaggaagacacgtacccgtgaagatagagaaagaggccatccagttcagtctcattgaaaagaaagatgtctac

SEQ ID NO: 934026 - DNA, 120 bp, Artificial Sequence
  ENSG00000261761_6 (sequence is synthesized)
tgttagataaaaagcaaattctagcgactttcttatttgagttcaaaatgggtcgtaaagtaagcagcaaagacaattcacatcattaacaaagcatttggcccaggaactgctaacgaa

SEQ ID NO: 934027 - DNA, 120 bp, Artificial Sequence
  ENSG00000261761_7 (sequence is synthesized)
ggagacgagagccttgaagatgaggagcgtagtggccggccatcagaagttgacagtgaccaattgagagcaatcatcaaagctgatgctcttacaactgcatgaaaagttgctgaagga

SEQ ID NO: 934028 - DNA, 120 bp, Artificial Sequence
  ENSG00000261761_8 (sequence is synthesized)
tcgataagtgggtgtctgataagctgaccaaaaatgaaaaaaattgtcgttttgaagtgtcctcttctcttattctacacaacaataacgaaccatttctcagttggattctgatgtgca

SEQ ID NO: 934029 - DNA, 120 bp, Artificial Sequence
  ENSG00000261761_9 (sequence is synthesized)
aggaaaagtagatgttatatgataaatggcaatgaccagctcagtggttgggccgagaagacactccaaggcacttcccaaagccaaacttgcaccaataaaggtcatggtcactgtttg

SEQ ID NO: 934030 - DNA, 120 bp, Artificial Sequence
  ENSG00000261761_10 (sequence is synthesized)
atggtctgctgccggtctgattcactacagctttctgaatcccagtaaaaccattacttctgagaagtacgctcagcgcatcaatgagatgcaccaaaaactgcaacacctgcagttggc

SEQ ID NO: 934031 - DNA, 120 bp, Artificial Sequence
  ENSG00000261761_11 (sequence is synthesized)
attagtcaacagaaagggcccaattctctacaacagccaactgcacgtcacaccaccaatacttcaaaagttgaacaaattgaggtgggaagtttttgctttatccaccatattcacctg

SEQ ID NO: 934032 - DNA, 60 bp, Artificial Sequence
  ENSG00000261761_12 (sequence is synthesized)
gttcgtcggatcccaaagcatggatttttatgctacaggaataaacaaacttatttctcc

SEQ ID NO: 934033 - DNA, 120 bp, Artificial Sequence
  ENSG00000261761_13 (sequence is synthesized)
tggatttttatgctacaggaataaacaaacttatttctccttggcaaaactgtgttgattgtagtggttcctattttgattaataaagatgtatttgagcctacttataatgaattaaaa

SEQ ID NO: 934034 - DNA, 120 bp, Artificial Sequence
  ENSG00000261761_14 (sequence is synthesized)
ctgaagttcccagggtcatatctgagaacttgaggccaggggagtttagacactctaagtagaagacacccaggcaagacttttgtggataaggacaattatacaagttcatagccttct

SEQ ID NO: 934035 - DNA, 120 bp, Artificial Sequence
  ENSG00000261761_15 (sequence is synthesized)
gaaataagcttagttctaataatctcaggaaaaacacaaaataatttagctatactgatggtttttggagaacaattttccccagatttaaaaaagatgatggatgtggctaaatcactg

SEQ ID NO: 934036 - DNA, 120 bp, Artificial Sequence
  ENSG00000261761_16 (sequence is synthesized)
tccctaacctctttatagaacccagaggttccagccttaagatttaatttccagggttaggatgcaagaagtgacttacttttgagttctaccaggaagcaaaatggcacacatcaaaaa

SEQ ID NO: 934037 - DNA, 120 bp, Artificial Sequence
  ENSG00000261761_17 (sequence is synthesized)
taactcgtttggcgatttcatgagtttccaagcactttataaaatgtacagtcatcagcttttttcttattgcaataagaaactatttaaatgctagaaaattgtatatttccagcttca

SEQ ID NO: 934038 - DNA, 120 bp, Artificial Sequence
  ENSG00000261761_18 (sequence is synthesized)
tcttactaccctagagaatggggagatgttatttgatcaattgtttttctaaaatttatgactgttagaagccaagtctaaatttatatagaaaaagttcaaggaaatgatgtaactatt

SEQ ID NO: 934039 - DNA, 120 bp, Artificial Sequence
  ENSG00000261761_19 (sequence is synthesized)
ctctaagaaggtgatttaagcctctggattacaggaggtttaagatgttgcccttgtggtaatgcagtgttttaacttaagggccatcgtgaacatcaattttccctcatgaaacaaatc

SEQ ID NO: 934040 - DNA, 120 bp, Artificial Sequence
  ENSG00000261761_20 (sequence is synthesized)
accagccaaccaaaacctctattacttctatatttcctgaaggactcttccattcccaaattgagtgtatgaattgcagcctcataaaggtaccaccgaaatgtggcagtctcatttgga

SEQ ID NO: 934041 - DNA, 120 bp, Artificial Sequence
  ENSG00000261761_21 (sequence is synthesized)
gacacacattacaaaagagtttcagccaaaatagtttgaatcagaaagtggtctttgaatagtgattcagcctaatacatcactaagaaggagaaacaaatgaggcattggagacctttc

SEQ ID NO: 934042 - DNA, 120 bp, Artificial Sequence
  ENSG00000261761_22 (sequence is synthesized)
atccaagtgtcaaataggaaaagtcgttcatgtaccatggcatgtacaggaaagcagtgatgtttcaagaactaactggcaaagactatcagattttagaaacaaagtctgcatttcatg

SEQ ID NO: 934043 - DNA, 120 bp, Artificial Sequence
  ENSG00000261761_23 (sequence is synthesized)
atgccccaaaatctagttgaaaacataatattcaatatttgttacctctttttttgtatatttatttgttatactgaactgaattattcacttattatttgaagttatgttcttatagga

SEQ ID NO: 934044 - DNA, 120 bp, Artificial Sequence
  ENSG00000261761_24 (sequence is synthesized)
agctaggcaccaaccagcagttgctaataatatactataatttagtaagtaattcaattgaataaaatttatgacaaatttaacaaacatgttaattaaaatgcatactcacgctgcagc

SEQ ID NO: 934045 - DNA, 120 bp, Artificial Sequence
  ENSG00000261761_25 (sequence is synthesized)
gtcacattaatctttgtgccaccagtgcctatgccatgcttagtatgcatcaaatatttgagcagtacacaagtgagtactctgagagctccccccaccaaaaatatgatgattaaatac

SEQ ID NO: 934046 - DNA, 120 bp, Artificial Sequence
  ENSG00000261761_26 (sequence is synthesized)
agttatgatcagatccccagagtgtggctctaaactgtatgggggccaagtttgaatactgttgtgtcttacactgttattacctatccagtatctatttccccatattccttataaata

SEQ ID NO: 934047 - DNA, 120 bp, Artificial Sequence
  ENSG00000261761_27 (sequence is synthesized)
aaacctagattttgattgggacagtaaggtgtcccactgaaaactcatttctctaaccaatgtgatgccagtgcttgcccaaaaagagggcatcccttcgaaataaaaaggcaaagcttc

SEQ ID NO: 934048 - DNA, 120 bp, Artificial Sequence
  ENSG00000261762_0 (sequence is synthesized)
tcccaaagtggtgggattacaggcatgaagccactgcgcccagcctaaaagaacttttgataactccattaactgttataatggagttctgcctacagattatcacaatttagaaacaaa

SEQ ID NO: 934049 - DNA, 120 bp, Artificial Sequence
  ENSG00000261762_1 (sequence is synthesized)
agattatcacaatttagaaacaaagttactgaagacaaaattaaaacagttcacccactgccctcaccccaagaaattaaaacaattcatcaggtcagagccaagaaatatggcaggatt

SEQ ID NO: 934050 - DNA, 120 bp, Artificial Sequence
  ENSG00000261762_2 (sequence is synthesized)
attccttagaatataacactaaattttctttagagttatccaagatgctgatgggggaagtggagaagtgagatttgtgtaaatgccccattttgcaggtgctttaactgaaacaagcct

SEQ ID NO: 934051 - DNA, 120 bp, Artificial Sequence
  ENSG00000261762_3 (sequence is synthesized)
tagtaaagatcttttatagaaaatatgtcaacaattctggccctcaatctatgcttagtcttacttaagggtcatgctgtttactctgccaaaattaatgaaagtaacttctgaacttaa

SEQ ID NO: 934052 - DNA, 120 bp, Artificial Sequence
  ENSG00000261762_4 (sequence is synthesized)
aatggaagaagatctgcatttgtaaatacacatcacagacctcacggacatcattttccttcatgatgtgtcttgtaatgtagcgaatagaatcgagcgcagcttccaatgtgtttctag

SEQ ID NO: 934053 - DNA, 120 bp, Artificial Sequence
  ENSG00000261762_5 (sequence is synthesized)
aagattttggtccactaccactctcagtttcctctttctgagtgaagtacctgtctacatgacttctcatgcaaagcagtttgggaagcgtgtgaagaaatatcttgcggaccaaaggcg

SEQ ID NO: 934054 - DNA, 120 bp, Artificial Sequence
  ENSG00000261762_6 (sequence is synthesized)
ccatggcattatgtgttgaggaagaacgatgatgaatgttgatagcgaagacggttaccataattgacagtgtcacaaaaatcatggtaaataccagatactctccaattagaggtatga

SEQ ID NO: 934055 - DNA, 120 bp, Artificial Sequence
  ENSG00000261762_7 (sequence is synthesized)
caagtacagttaaaaatgagagcccaatacagggtattataaggaacaaggtataaaagagaggcaggcgcttgattacaaatgagtaagtgacatacggataccagcaacagctgtcgg

SEQ ID NO: 934056 - DNA, 120 bp, Artificial Sequence
  ENSG00000261762_8 (sequence is synthesized)
ttctgtttcctttgctccctgttgcactcacaatctcccattctccattatcaaaaaaatctctcttgtctacatcttggtcctctagaattatatcaacctgtgatccatcataagtcc

SEQ ID NO: 934057 - DNA, 120 bp, Artificial Sequence
  ENSG00000261762_9 (sequence is synthesized)
aagaaccaaatttcatggaacagttctgaaggtcaaatgggaaaaacgtgacatctatggtacaggaacttttgtagtttgccggtggagtccaggtgacagtgccattgtacctgatga

SEQ ID NO: 934058 - DNA, 120 bp, Artificial Sequence
  ENSG00000261762_10 (sequence is synthesized)
ctgttttcgtactggtcccttcaaaacgtccatctgcactaaaatacacacatataaaataacaatgcagaaattaaacaatgcacatgaattgtattaatataagcctaatataaaagc

SEQ ID NO: 934059 - DNA, 120 bp, Artificial Sequence
  ENSG00000261762_11 (sequence is synthesized)
aggcctatcattgattgcatgaaataatttttaaattactatacttcagataagatatacgtgctacatagggaccctgctccaggaatatcttccttaaatatctaactctactagaac

SEQ ID NO: 934060 - DNA, 120 bp, Artificial Sequence
  ENSG00000261762_12 (sequence is synthesized)
tgaaccccttcttctgcatctactccagaactgacaaattttcacagaagcctgagattctaatgattgaaaagacctcaccttacacacagaatagactcaggctattgacacaatggg

SEQ ID NO: 934061 - DNA, 120 bp, Artificial Sequence
  ENSG00000261762_13 (sequence is synthesized)
cacgcatacagccagaacctgaatccacactcctagactccctccacagtgctcttcttccttcatcgcaaatactggccgttttttactttgatggggaaagaccatgaacaccaagct

SEQ ID NO: 934062 - DNA, 120 bp, Artificial Sequence
  ENSG00000261762_14 (sequence is synthesized)
gggcatgaccctgaaaagcagctatgcctctcaagctctcccaccaagtgaattcatatatgagaaaagtctagtatagaatccatatactaggaaagcacaccaccaacataagatttc

SEQ ID NO: 934063 - DNA, 120 bp, Artificial Sequence
  ENSG00000261762_15 (sequence is synthesized)
tttaaaatgttgctgtcttcaaattcatgtggcttttgcacactattctgtaatatatccatgtttaatataaaaatgttttcaattactgaaaataaaatgatgctccaggaagctgca

SEQ ID NO: 934064 - DNA, 120 bp, Artificial Sequence
  ENSG00000261763_0 (sequence is synthesized)
agtttggccttattttctagcaaaaactcattgcttagctgcatttaataatccatggaacatttctattaacttcagtgtgtgaattgtgtgactgcagaatgggtaaaaaaaaagtga

SEQ ID NO: 934065 - DNA, 120 bp, Artificial Sequence
  ENSG00000261763_1 (sequence is synthesized)
gaatcaggaatacaaaatatgcagaaaatgaaaataagtgagatgttaaatatttgatcaaggcctttattttcaggtaaccagttgccatcttggggtctcaaatgccaacagaagcca

SEQ ID NO: 934066 - DNA, 120 bp, Artificial Sequence
  ENSG00000261763_2 (sequence is synthesized)
cagaatactattctgaattattaaagtgactaggagaaccttgtttctttttactacttttaaatgagtatgtagcctctcaagctaacctttgcttaaacatttaacatagacattggg

SEQ ID NO: 934067 - DNA, 120 bp, Artificial Sequence
  ENSG00000261763_3 (sequence is synthesized)
tgaaatataaaaaagcaaaagttctcagtctaatactcaacctgtaattataaatcagattacataatacagctcagccatttcattttatttttctgtgttctaacaatttttttcagt

SEQ ID NO: 934068 - DNA, 120 bp, Artificial Sequence
  ENSG00000261763_4 (sequence is synthesized)
ttgagaggaacctaaccaagattagttgaaagtctgcattctagaatatttttatctgtatgtgtactgaatatatttttcatttgctcaattcaatgcattcattcattcaacagatat

SEQ ID NO: 934069 - DNA, 120 bp, Artificial Sequence
  ENSG00000261763_5 (sequence is synthesized)
ttattgaatatcaggtgctaggcactgttgtgggtgtgaggacatatcagggaacaaaatgtataaagattcagccactcttgggccctacacttctgcgagggagacagataatgagca

SEQ ID NO: 934070 - DNA, 120 bp, Artificial Sequence
  ENSG00000261763_6 (sequence is synthesized)
aaatatcctccaatgataggtagtaagtactacaaaaggggttgtatgggagtatttttgtttgttaagtggagctgtctactagaaagctaatgaattgggaaagttatcctaagagtg

SEQ ID NO: 934071 - DNA, 120 bp, Artificial Sequence
  ENSG00000261763_7 (sequence is synthesized)
ggcggtgtgttatttaggtcaatgaggacagcagcaccatggttctaggtgcaaataggcccagtgtgtccaaggaacagcaacagagtcaaggaaaccagagatgagaatggctgacag

SEQ ID NO: 934072 - DNA, 120 bp, Artificial Sequence
  ENSG00000261763_8 (sequence is synthesized)
ctggagcacttgtcagggcagatccttgagggccttgcacaccagggggaggacttgagattttaccctaattgtggtggaagccactggaaacttttgagcagaggagtgttataaact

SEQ ID NO: 934073 - DNA, 120 bp, Artificial Sequence
  ENSG00000261763_9 (sequence is synthesized)
gattcacgttttaaaaggataattttagctcaatagtaagtatagccatgaagccaaattgacaaagtgaaggttttctagtgaggacctgctttgatgcttgtataagaaagatctggc

SEQ ID NO: 934074 - DNA, 74 bp, Artificial Sequence
  ENSG00000261763_10 (sequence is synthesized)
gtgaggacctgctttgatgcttgtataagaaagatctggcatgagcactatctgttcactgtttgtaagaaaac

SEQ ID NO: 934075 - DNA, 120 bp, Artificial Sequence
  ENSG00000261763_11 (sequence is synthesized)
aggcggaggttgcacgccactgccctccagcctgggctacaaaagtgaaatttcatctcaaagaaaagaaaagaaaatgcccatctgctgaagtagttgcagtgactgaaaagtttgccc

SEQ ID NO: 934076 - DNA, 120 bp, Artificial Sequence
  ENSG00000261763_12 (sequence is synthesized)
tctttggtcatttgaaaagtccaccagtctcccttttacattttacttttacccactcaaagcttgcttttcctcagcgacaggtcagaagtcaaggttagaataggttcatccaaatac

SEQ ID NO: 934077 - DNA, 120 bp, Artificial Sequence
  ENSG00000261763_13 (sequence is synthesized)
agaggctgccccagtctacggcctcatcacaatccatccacaagcaagctttccagaatggcctcaggtccatcccaggactgtgactctcagccatctgcacattgcttactgcccaaa

SEQ ID NO: 934078 - DNA, 120 bp, Artificial Sequence
  ENSG00000261763_14 (sequence is synthesized)
gagttcctcctgaaacttcatcagcacactgttaagtgatagaaggaaactgcagaatagtgttatactgtagccagatctcattttagtaatgacatttttatgcctagaaataatgtt

SEQ ID NO: 934079 - DNA, 120 bp, Artificial Sequence
  ENSG00000261763_15 (sequence is synthesized)
cacagttttctagggttttcccctaggattaagccctaaacatctattatagtagctggcttaatcttttattgagctccccttttcttccctgtattgcttcttcattactctgctggt

SEQ ID NO: 934080 - DNA, 120 bp, Artificial Sequence
  ENSG00000261763_16 (sequence is synthesized)
gttccatgtacctctcaaataactacttgcattaattcttacctcaggatctggttctgaggcactcaagctgagacatcctctatgtaaaatcttcctccttcctgaggtggcattagg

SEQ ID NO: 934081 - DNA, 120 bp, Artificial Sequence
  ENSG00000261763_17 (sequence is synthesized)
tggccaccttccttgagccataatggcagataggatccaggagaaatgaaacttaccaataaaggagagatctgaaaatattattcccattatacccataatccagtagtctttttgtga

SEQ ID NO: 934082 - DNA, 120 bp, Artificial Sequence
  ENSG00000261763_18 (sequence is synthesized)
gcttaagcaaatacaagacttgcatttaggtattcctccttctaaaaaattaggaggtagttgcctctccaaaatggatttctcagccattgcgtcttcaccgcttaggttaggtaaagc

SEQ ID NO: 934083 - DNA, 120 bp, Artificial Sequence
  ENSG00000261763_19 (sequence is synthesized)
ttggctattatatgaggttcttaccttccagcacaaggggacgctacttttttaaaaaaatatttttatttccataggttattagggaactggtggtatttggttacatgagtaagttcc

SEQ ID NO: 934084 - DNA, 73 bp, Artificial Sequence
  ENSG00000261763_20 (sequence is synthesized)
attagggaactggtggtatttggttacatgagtaagttccttagaggagatttgtaagattttggtataccct

SEQ ID NO: 934085 - DNA, 86 bp, Artificial Sequence
  ENSG00000261763_21 (sequence is synthesized)
tcccattcttccccttctttgcatcctcatagcatagctcccacttatgagaatataccatgtttggttttccattcccgagttac

SEQ ID NO: 934086 - DNA, 120 bp, Artificial Sequence
  ENSG00000261763_22 (sequence is synthesized)
agttgctgtgaatgccattaattcattccttttttcttgcctaggaaaccaggcttcctcctagaccaagctttagtcttcactacctcaggcagagaaagcttcccttgcatgaggaag

SEQ ID NO: 934087 - DNA, 120 bp, Artificial Sequence
  ENSG00000261763_23 (sequence is synthesized)
tcattgcccagcctcttctctgctctctgtgtgcagcttctccctccctggcctagggccctgacccagaatgactcttcagcccacgattttaatcgaaggcctctaatcaacctgtgg

SEQ ID NO: 934088 - DNA, 120 bp, Artificial Sequence
  ENSG00000261763_24 (sequence is synthesized)
tactacatgctacacaagattctcagaaatccctaagctttctcatgagcctcccaccctgctgggaaataagctgacttatcaattaaagaatatccaaagatgttaagccacttaatc

SEQ ID NO: 934089 - DNA, 120 bp, Artificial Sequence
  ENSG00000261763_25 (sequence is synthesized)
ctccccaaaactcagtgcggtaggggttgttacctcccattatacgaaaggaaagtgaggcttgggaagtaaagagacttgtccaagatcaccttctggagccacattttacaccacagg

SEQ ID NO: 934090 - DNA, 120 bp, Artificial Sequence
  ENSG00000261763_26 (sequence is synthesized)
taagagaaaagggatccgagagggcacggacactgtgtcttcagactgagtggggaagtaccatttacctgggtacttattgggtgcaagttgcatgcccccggtgctaatacacaaggg

SEQ ID NO: 934091 - DNA, 120 bp, Artificial Sequence
  ENSG00000261763_27 (sequence is synthesized)
acaaatttatgggcctcctaaaactgtggacagtgcacccgtccagccaacttcatgggtgcaccgtgaggctctggtgatgtggacaggcttataaaacactctccatactaagatgag

SEQ ID NO: 934092 - DNA, 120 bp, Artificial Sequence
  ENSG00000261763_28 (sequence is synthesized)
gttgtgttcctgtgtctaggaaacgctggaaattaagtgtacagcaatcaaaaaaccttgacatcatccttgatgtctctctttttcgcacactccaattcactccattaggaaactgta

SEQ ID NO: 934093 - DNA, 120 bp, Artificial Sequence
  ENSG00000261763_29 (sequence is synthesized)
ttggcagaatctagtgaatcttgtccttcaaggcctctctctgcaaggctcccatgagccctgggggcttatggagagttctgggtgggcagaggaagccagactgcgttagggaagcaa

SEQ ID NO: 934094 - DNA, 120 bp, Artificial Sequence
  ENSG00000261763_30 (sequence is synthesized)
atttgggacctaaatttcctaagaaggttttaggggatagggaccccaatctctaagaccccaggattctgttaagatttattttctcattccaaataaatgttcactggcaagccctaa

SEQ ID NO: 934095 - DNA, 120 bp, Artificial Sequence
  ENSG00000269578_0 (sequence is synthesized)
cgctgtgggggcagtggctgtggagagcagcgctgcctgcctcctggcttcatctgcaagtttccctcgctgcagaagtcaggcatgcctactgatggagctcctacttctgccccaagc

SEQ ID NO: 934096 - DNA, 120 bp, Artificial Sequence
  ENSG00000269578_1 (sequence is synthesized)
cctgggcttcctctttctgagttgctcatggggttcagtcagggctccgcgtgctgcctgtactcaggtggcatttcccgtcccccgggctgagttgtagcatgcaattgcatacttgcc

SEQ ID NO: 934097 - DNA, 120 bp, Artificial Sequence
  ENSG00000269578_2 (sequence is synthesized)
caagcattacaggagctgtggctgcaggacagggagggccacatggacatgacagaccactcaggtggccggctgctcctgggagtagcaggagggccccagcaggaagtgcttttcaag

SEQ ID NO: 934098 - DNA, 120 bp, Artificial Sequence
  ENSG00000269578_3 (sequence is synthesized)
tggtgagcttggtggctgtggccgagacatgcaccttcccgtcattgttcctcccagtgtcattcttcctctgagaagctgtgaacttgaggctttgcccctggggtttgaggctcccat

SEQ ID NO: 934099 - DNA, 120 bp, Artificial Sequence
  ENSG00000269578_4 (sequence is synthesized)
aggtcccctcagaggaaggtgccttcactgggcagagcctggtggacctgcaccagccccatgaggctgagcggagagtgcagggtggggcccgcctgagggtaagcacagcagcacccc

SEQ ID NO: 934100 - DNA, 120 bp, Artificial Sequence
  ENSG00000269578_5 (sequence is synthesized)
tcagggctgcgctttccagagctgagagggagggcagagctggggtcttggggtggaggtggggtggggatgcaggtgccgcctcttgtactgacttgcaccagaggcagtttggctccc

SEQ ID NO: 934101 - DNA, 120 bp, Artificial Sequence
  ENSG00000269578_6 (sequence is synthesized)
agctgcctgggaacacgtgcggagtttgtcagaagcaggaagacttggtgtggcgggaaccaaatcacagacacacactctcccagcaaagccctgtttgattcacccgtgtgtcctcag

SEQ ID NO: 934102 - DNA, 120 bp, Artificial Sequence
  ENSG00000269578_7 (sequence is synthesized)
cagacacgactgtgtgttgggggttggggggtgggcgaggtgactcagccgcggacggcattagaatgcttagcacattgaaggcagactgtctgtttctgggtgccatctgtggcatgt

SEQ ID NO: 934103 - DNA, 120 bp, Artificial Sequence
  ENSG00000269578_8 (sequence is synthesized)
ttgggtttggaaggacagcttgcttgctgatgaacacttccacagtcttttgagctaagtagtttttgtaaattactgtctagaccattctgcattaaaaaaaaaaaaaaaacccgacaa

SEQ ID NO: 934104 - DNA, 120 bp, Artificial Sequence
  ENSG00000261766_0 (sequence is synthesized)
tggtttatctgaggaaaggggcaggcggtccaggagtttgcatctctgaggctggagatgaagatggtggtagtggtgggggagggggtgggtagaaataatgaggtcagggccgggcgc

SEQ ID NO: 934105 - DNA, 86 bp, Artificial Sequence
  ENSG00000261766_1 (sequence is synthesized)
ccaagactgcgccactgcaaaaaataataacaataataataatgaggtcaattccagacgtgcttttgggacgtctgtgggcatat

SEQ ID NO: 934106 - DNA, 120 bp, Artificial Sequence
  ENSG00000261766_2 (sequence is synthesized)
gtcaattccagacgtgcttttgggacgtctgtgggcatatagtctggagctaagaagagacatcaaggccagttagagaaatcgagaacaattaaagtacggagggtagttgaaagcatg

SEQ ID NO: 934107 - DNA, 120 bp, Artificial Sequence
  ENSG00000266385_0 (sequence is synthesized)
taaagaaatgttcatcagggcctcagaaagcaaggcagagaacaggtccctgaaatttactagcttgcaccaaaccatcagataaagataggttaatatttgacagaaaaaactcttcaa

SEQ ID NO: 934108 - DNA, 120 bp, Artificial Sequence
  ENSG00000266385_1 (sequence is synthesized)
aaagagacagtgaaatactcttgagatgaatccaggtattaaaaagttcaggaaaaaaaattgtctctggaaaaaaaaagaatcaaggagagaccaggtgcggtggctcatacctgtaat

SEQ ID NO: 934109 - DNA, 120 bp, Artificial Sequence
  ENSG00000266385_2 (sequence is synthesized)
cagccttgggcaacatagtgagaccccatctctaaaattatgtaaataaaaatataaaaataaaaaagagaaagcaaataaccccaaaataacttttatttttgttttttattttattat

SEQ ID NO: 934110 - DNA, 90 bp, Artificial Sequence
  ENSG00000266385_3 (sequence is synthesized)
actgcagtgagccgagattgctcactgcacttcacttcactcactgcactgcacttcagcctgggtgataagagcgaaactccgtctcaa

SEQ ID NO: 934111 - DNA, 120 bp, Artificial Sequence
  ENSG00000228048_0 (sequence is synthesized)
gatggtggtacattctttgattggatggacactggagaagacatagtttagaaggaaatctgcttgttgaaaccaagatgacaatggcaatttgttaccttctggaaataaaggagcaat

SEQ ID NO: 934112 - DNA, 120 bp, Artificial Sequence
  ENSG00000228048_1 (sequence is synthesized)
gtgtatattggcttcatttggaacattgtcttacctatatttgacacttaataactttggtgattaattgattgactgaacaaccactggcaaaaagagtaataagacgtaaaaagtaat

SEQ ID NO: 934113 - DNA, 120 bp, Artificial Sequence
  ENSG00000228048_2 (sequence is synthesized)
cgttgagcacattttaagacaacgtgattaatgttctttgtagaaacttaagaggatccaacagtccacattcatagaaatattgtaagaaacagatgaaataaagatttatgaaaaggc

SEQ ID NO: 934114 - DNA, 120 bp, Artificial Sequence
  ENSG00000227959_0 (sequence is synthesized)
gtccgcactcgcggcccctaacctgccccgggagcccgggagtgcggcttgggaaggagggaaaggagtgtgtgagcagggattggcccgaacctatctccacgctctcccccgggactg

SEQ ID NO: 934115 - DNA, 120 bp, Artificial Sequence
  ENSG00000227959_1 (sequence is synthesized)
gaggtgaaggggggcgtggagaaaatctcagggaacaggggcttcgacagggggctcccgcccgcccgagccccctccccaaaatgcgaggcctgcacagtatgccttctccgcaaaacc

SEQ ID NO: 934116 - DNA, 120 bp, Artificial Sequence
  ENSG00000227959_2 (sequence is synthesized)
tcggcaagcgggttagtgaattcaggtcactaagaagctgagcccgcggaaagctgcccaaacacccccttctctaggggactccccacgccccccgccgggacgcgttcccgaagtcgc

SEQ ID NO: 934117 - DNA, 120 bp, Artificial Sequence
  ENSG00000227959_3 (sequence is synthesized)
gaccaagctgaaaccgcttattctccggagcccctatgaccccgggtgggggccagggctcgcctcgatcgcagcccgtgcgccctccggactccagttcgccgggactgggcgacacca

SEQ ID NO: 934118 - DNA, 120 bp, Artificial Sequence
  ENSG00000227959_4 (sequence is synthesized)
gaagcggctagtgtgagtgaaacaaacgggaaatttgctctggcccgcctgcccagccacccacggctgcctgttggccaatcaccatttgaccagtccaggaagagcaactgtggcagg

SEQ ID NO: 934119 - DNA, 120 bp, Artificial Sequence
  ENSG00000227959_5 (sequence is synthesized)
cctgatttcctgggaggccccagactccctttgcctacctcttcctctctgaccccatcctcgctttgatgcccgggacctgctacccaggtacgtgggtcttctctgccggatgtggac

SEQ ID NO: 934120 - DNA, 120 bp, Artificial Sequence
  ENSG00000227959_6 (sequence is synthesized)
atcttggcctctcgccttggtgcctactcttgggaagcgggtccagacatctctcctgcaggaagagaggaagggttaattacaggcgttggggataattaaagcctttgaccaagagga

SEQ ID NO: 934121 - DNA, 120 bp, Artificial Sequence
  ENSG00000228044_0 (sequence is synthesized)
cctttcgaagaattttgtaactagccagaagggtttttgaaggcgtctctcataagatggcatttgagcagagacctgaggaagtgaaagatggagggctgaagcttccagttagaggaa

SEQ ID NO: 934122 - DNA, 120 bp, Artificial Sequence
  ENSG00000228044_1 (sequence is synthesized)
caagcaaagaccccgagcaggatcaggaaagtgtggtagagacataatcaaagattcagacaaagatataactacagaatgcacatgacggttttgttaatacaccaaaaggaaaaaaat

SEQ ID NO: 934123 - DNA, 120 bp, Artificial Sequence
  ENSG00000228044_2 (sequence is synthesized)
catctatagtttggaataacatgaagattgttaaaaactatgtttacaagaatggcaataacagagaaacacttgctatataattttcacaataacaaggtgaagaaatattatatatat

SEQ ID NO: 934124 - DNA, 120 bp, Artificial Sequence
  ENSG00000228044_3 (sequence is synthesized)
atataataaaattcaaatttttaagagaaattaaaatgtatagaaaacattggaaaaggatacacttaataatctttttttcagcatggtagaattgtgggtgatttttgttccctttat

SEQ ID NO: 934125 - DNA, 120 bp, Artificial Sequence
  ENSG00000228044_4 (sequence is synthesized)
tcagcatggtagaattgtgggtgatttttgttccctttatattttttaatactttgtactttttaatgacaaatgtatatactaccatttaatgataaaaatatatttttaaaatactgg

SEQ ID NO: 934126 - DNA, 120 bp, Artificial Sequence
  ENSG00000228044_5 (sequence is synthesized)
tcatttaatcacaaaagaaggaataccagcaagaccacccaggccccagctccggtttttcctgaagaatttggccgcatctccctttttgaaggcagagtttcatcttggtttttgaag

SEQ ID NO: 934127 - DNA, 120 bp, Artificial Sequence
  ENSG00000228044_6 (sequence is synthesized)
aggttggaggagtgggtggacggggaggaatcatcccacagggccttgtacgcactgcaaaaactttagtcttttgctctaagaaattaagtccgttaattaaaaacaaatgaacagaaa

SEQ ID NO: 934128 - DNA, 120 bp, Artificial Sequence
  ENSG00000228044_7 (sequence is synthesized)
ttagaaagcaatttgagttatcacgctaattaaaggggtgtgcaggcacaagacctgactagatctagatccctaacgttaacaaaaatcagatggttgagaataagaatttcacataaa

SEQ ID NO: 934129 - DNA, 120 bp, Artificial Sequence
  ENSG00000228044_8 (sequence is synthesized)
tgttggctgcagccacagcccctgcaatgcagaccaggatgagggaaagccgctggaagaggcctacagcattttttattagtaaatccagaggacgtgttatataaagtgtaagacaac

SEQ ID NO: 934130 - DNA, 120 bp, Artificial Sequence
  ENSG00000228044_9 (sequence is synthesized)
aagatgttatacttcacagtaagggctagtttctaaacatgaaagaacacatagcttatgtaacatgacatttgttggagaatatgccctagaaaatcatgatatcacagatatatacta

SEQ ID NO: 934131 - DNA, 120 bp, Artificial Sequence
  ENSG00000228044_10 (sequence is synthesized)
aatatctgaaggagattacggagaaaacatttccagcggaggagttctttaatatagacagagcttgtttcagaattggtatcttcctgaatatttggctgcttggaaaaagttacattg

SEQ ID NO: 934132 - DNA, 120 bp, Artificial Sequence
  ENSG00000228044_11 (sequence is synthesized)
gtgccgggattcagcccttgcctggacagaggtggccgctagagtcatcagcatggacactggcaccagtgactacataggtcccaggatcgtagccagccacctcgggtgcctccggag

SEQ ID NO: 934133 - DNA, 120 bp, Artificial Sequence
  ENSG00000228044_12 (sequence is synthesized)
caccagaaaagggaagaaagcctgaggggcctgcgtggacctccctaaacacactgcgcatgctccattccaaacggtatggcgagcactgcgcatgcgggaaacccaccctgtaaggga

SEQ ID NO: 934134 - DNA, 120 bp, Artificial Sequence
  ENSG00000228044_13 (sequence is synthesized)
agaatcctgggaaagaggcaagcctatgaagtcccaggatcaaggttaaagaccctcttttttactgtcttcttgtgctctcttttctctcttggaccttcaggcgcctgcttgggtctc

SEQ ID NO: 934135 - DNA, 120 bp, Artificial Sequence
  ENSG00000228044_14 (sequence is synthesized)
tttcaagcgaattttgctttctttcctgttctaaagccttttaactaaacttccactcctgctctgaaacttgctctctttttctgccttaacgcccctcagtcgaattctttcttctga

SEQ ID NO: 934136 - DNA, 120 bp, Artificial Sequence
  ENSG00000228044_15 (sequence is synthesized)
ggaggcaaggactgaagttgctgtggacccatagggattcgccattggtaactcggggtaactcggctctcttccactgctgacgtatgtagcaagtcctgtcttcgggttggcaggcac

SEQ ID NO: 934137 - DNA, 120 bp, Artificial Sequence
  ENSG00000234567_0 (sequence is synthesized)
tgtggtttcactgctgttcaagggctctgttttgactgcaagaagagacactacgtagaagaataagtacataaaataagctgcattcatactaagtgagcatcaacaagcacctcttga

SEQ ID NO: 934138 - DNA, 120 bp, Artificial Sequence
  ENSG00000234567_1 (sequence is synthesized)
tttctcaaccaaatgcaagcttacacaccaaatgttttgatttcaaaagaaacaatattttaatgtcctaggttgaagagttttgtgggattattattctgtatcttcaaagtaagtgag

SEQ ID NO: 934139 - DNA, 120 bp, Artificial Sequence
  ENSG00000286040_0 (sequence is synthesized)
acttgcacattaattatgttgcttgatcgccgagcattgggtgtctgtctattgtcctagatgaggctggaaatattcttcagctcaatagtttgagtcgccatgaagttttgactacct

SEQ ID NO: 934140 - DNA, 120 bp, Artificial Sequence
  ENSG00000286040_1 (sequence is synthesized)
ccttcagccctaggattcctcaactgaccgctggctctatctctcagcaaatcttcccgtcccactggacacatggaaactttggatctctatgcaacaatcaaagggaacaagcaactg

SEQ ID NO: 934141 - DNA, 120 bp, Artificial Sequence
  ENSG00000286040_2 (sequence is synthesized)
tagggaaagtaggaagtccaacaatttcttcttcatagaccgttttgcctgatcttcctgaggaaagagagctagaagacatagacaaggatgagaagagctattcttaggggagagcca

SEQ ID NO: 934142 - DNA, 120 bp, Artificial Sequence
  ENSG00000286040_3 (sequence is synthesized)
gatttcagtatgtgctcatgtttgggagcttatgctctggaatcaccggcttcagaccttgactctaccacttgatgtgggatgagaaaactggtccagagaaggggacttgatgatgcc

SEQ ID NO: 934143 - DNA, 120 bp, Artificial Sequence
  ENSG00000286040_4 (sequence is synthesized)
agtgacagaaccaggatgataactcgcatctcctgattctcttgcgctttatttcatcacacatatgaaagaagatgagaaacgttcagcattcagtagtggggaccactttgagattag

SEQ ID NO: 934144 - DNA, 120 bp, Artificial Sequence
  ENSG00000286040_5 (sequence is synthesized)
tttgtcaattgccatataagtatgcttttgcttggtatatctgtgtaaagcaatatgtactctatgtactaaaggtacatgataattgtgacttgaggacaatacaaagactgactggtt

SEQ ID NO: 934145 - DNA, 120 bp, Artificial Sequence
  ENSG00000286040_6 (sequence is synthesized)
tgtgattaaacatttcacatagtagtaggtgcttggatattattatctttaaaacaaatgtaaaactgatttcaaactaaagcatgagtattttaacaaatatatcaaatatcagagagg

SEQ ID NO: 934146 - DNA, 120 bp, Artificial Sequence
  ENSG00000286040_7 (sequence is synthesized)
aaggaggaaggattttagaacaatgaacctggaaaatgtgattatttttgacatgttttcacattcctacaatacaagtcacttgataaaaatgacctaaaaagtttttctttttttttc

SEQ ID NO: 934147 - DNA, 120 bp, Artificial Sequence
  ENSG00000286040_8 (sequence is synthesized)
tgtgccatcttctcagctcccaaccatgtcattttaactaacagaactgcagcctatttgtacttttttccttctgcatcagtttcgattcctttttatatacttgcttttatctaggtg

SEQ ID NO: 934148 - DNA, 120 bp, Artificial Sequence
  ENSG00000286040_9 (sequence is synthesized)
tcacattctctctaaatgatagattgtaatcttagccataggaaaaaaaaaaggaaacttagaaaatggatggatttgattttaagagatgtaggctaggcacgtggcagctacagagaa

SEQ ID NO: 934149 - DNA, 120 bp, Artificial Sequence
  ENSG00000286040_10 (sequence is synthesized)
gtgagcctctagtgaatgctagcattatatgtgttttatattaacccttggttccaagcatataaaaatattttgtaagaaatttcttcatgtattttgtaaaattattgtaaaagtcct

SEQ ID NO: 934150 - DNA, 120 bp, Artificial Sequence
  ENSG00000286040_11 (sequence is synthesized)
tcctcctcaagtctctgaggataatccaaaatctttggcagttttaagaatcaggaatatgaattttattctcaaatacatttcatctctcactttaattatgtgtaaagtggtcatgta

SEQ ID NO: 934151 - DNA, 120 bp, Artificial Sequence
  ENSG00000286040_12 (sequence is synthesized)
tatatatatttatatatatagaaaatttactaatgtcatataaaggaaatatttagcaatgtgaatgagaaatgaataaaactttcatagaacctatagtctaatagaggaggcacggaa

SEQ ID NO: 934152 - DNA, 120 bp, Artificial Sequence
  ENSG00000286040_13 (sequence is synthesized)
gcacggaagtaaagagacaattataacataacgtgacagaccttaaccataggggtgtagaaatagtgctggaaggaataaagttgtggcttctgtaaagcagggactgcgctgaaaaca

SEQ ID NO: 934153 - DNA, 120 bp, Artificial Sequence
  ENSG00000286040_14 (sequence is synthesized)
tgttttggttttgttaaaaagagcatatctgctcactgagttgaagttctgtgcatagacagatgattcaaggatcctcattcaataaatcaggaaggcatcatgctttccagttcttat

SEQ ID NO: 934154 - DNA, 120 bp, Artificial Sequence
  ENSG00000286040_15 (sequence is synthesized)
tgacagtgtgtaaaatagattttaaaaacagctgaatctagagggggaatgcagggcaaatcaaattatttaaatgatttctccaccccagtgaagtttaaagaaccatatttagaagaa

SEQ ID NO: 934155 - DNA, 120 bp, Artificial Sequence
  ENSG00000286040_16 (sequence is synthesized)
gaatctaatttcacatgcaactgattaagttttacatgagtttgaaagggaaatggtttggggcatgagagaagtcggggaaaatgtcaaattctgctgaaccagatttcccagtgtggt

SEQ ID NO: 934156 - DNA, 120 bp, Artificial Sequence
  ENSG00000286040_17 (sequence is synthesized)
tttattttcagtttgtaatggagtttcagagtctcacactcacgttttaggtataactgttaacacagaaacctatttaatagttatataaaatattcttaatagtattaacaatgcagt

SEQ ID NO: 934157 - DNA, 120 bp, Artificial Sequence
  ENSG00000286040_18 (sequence is synthesized)
ttcttcattatttgagcagatgattgagaggtgattgttttgcaatgagaatcttccatagaatacaatcagtaccagttattgagacctgtgtcaggcactgttctacctgccttatat

SEQ ID NO: 934158 - DNA, 120 bp, Artificial Sequence
  ENSG00000286040_19 (sequence is synthesized)
gtgttcattcatttagctttataacatccataaaaagtacaggaaaatattatctctattttatggatacaaaaagttaggtcagagaaagtgctttcccaatgtcacacacctattaag

SEQ ID NO: 934159 - DNA, 120 bp, Artificial Sequence
  ENSG00000286040_20 (sequence is synthesized)
ttcaggaatttaaattttgtattcaagcttccacagatctatttttaacaataggcctagatgttcagagaatattttaaaatttttatgttttctggatacactttatattaggaaact

SEQ ID NO: 934160 - DNA, 120 bp, Artificial Sequence
  ENSG00000286040_21 (sequence is synthesized)
ttggatttaattatctgagatgatgtaaccccactttaaaatttgattttattcaaccaacaggaatagcaaggagacatgtactatcagacatataatgaaaataatcattagaaggaa

SEQ ID NO: 934161 - DNA, 120 bp, Artificial Sequence
  ENSG00000286040_22 (sequence is synthesized)
aattgacatatactatttttaaataactcacatttatttagtgtattacagtttacaaagcacaaatatctgtctgtgttaatcttacacttcttcttgctaccatattttaatttgtac

SEQ ID NO: 934162 - DNA, 120 bp, Artificial Sequence
  ENSG00000286040_23 (sequence is synthesized)
caacatcttgctttatgtattcttttactttctctccatgtatttccaccagttactcttttctctatttttatttcttagaatattttggtgaaaatttagctcaaaagttctaaatga

SEQ ID NO: 934163 - DNA, 120 bp, Artificial Sequence
  ENSG00000286040_24 (sequence is synthesized)
gtaaggtctttttttcccatatgctaatcttggggactagtcttcattctggatcaccgttattgatccacacagtggtttaagtttctttctgagcctgggatggagacaggtaggaag

SEQ ID NO: 934164 - DNA, 120 bp, Artificial Sequence
  ENSG00000286040_25 (sequence is synthesized)
gcagaatgaagttctatacacacagaagcttactgccttggttgctacagactaacactctgcctatgttctttgtcccatgtccctagcttctagggatagtgctctgaagtgccctca

SEQ ID NO: 934165 - DNA, 120 bp, Artificial Sequence
  ENSG00000286040_26 (sequence is synthesized)
aagtaattttgttttaaatcctatcctttctccacgtgccacacaacattctgatgtcacttctgtttcctcacaacagcagagttgtgacaagtgtgtatttgacaatcaagtgagaca

SEQ ID NO: 934166 - DNA, 120 bp, Artificial Sequence
  ENSG00000286040_27 (sequence is synthesized)
agcccataagagaactcattaagattttatcctgataatcagacctagaatcttatttaaggggaaatcaaaaacaacaacaacacacctatcacataagaatcttagatcaaaatcatc

SEQ ID NO: 934167 - DNA, 120 bp, Artificial Sequence
  ENSG00000286040_28 (sequence is synthesized)
caaaatgtcttcaaatgagccacttatatccccaactttttgtttcgtcgtgtagatcttggtggggtatacatatgcactatgatagaaaaaataagacctagtgtttgataaattcgt

SEQ ID NO: 934168 - DNA, 120 bp, Artificial Sequence
  ENSG00000286040_29 (sequence is synthesized)
agggtattatgatttacaataatccattgtatagctcaaaataactagaagagaataatttgaatgtttgtagtgtaaagacaaatatttaaggtgacagatatcccaattatacaaatt

SEQ ID NO: 934169 - DNA, 120 bp, Artificial Sequence
  ENSG00000286040_30 (sequence is synthesized)
tgatctttacaaattgtatgcatatattgttatcacatgtatcctgaaattatgtacatctattatgtatcagtaaaaaagaatcagttgtgatttgatcaagaggactaatctcttggg

SEQ ID NO: 934170 - DNA, 120 bp, Artificial Sequence
  ENSG00000286040_31 (sequence is synthesized)
gattggagcatgggaggagggagaagatggagtatttctatccctcctctgaatcaggtttgctgcagttcccacaataattgtgttcctccatagctttcactttctctgccctatggt

SEQ ID NO: 934171 - DNA, 120 bp, Artificial Sequence
  ENSG00000286040_32 (sequence is synthesized)
aacactcttccttcccttcagccctgcaacccaaggaggctaatggtttcccattcttgtcaacaccgatgtgtctcagaccctcagttggttccattaatcctgtccatacttatgtta

SEQ ID NO: 934172 - DNA, 120 bp, Artificial Sequence
  ENSG00000286040_33 (sequence is synthesized)
aatatctcttcattaaattctcagaatttcagctgagtgtgtcatctgtttccttctggcatcctcactgatgtacacctattttaaaaccctgaatttccctagtaagtatcctagagc

SEQ ID NO: 934173 - DNA, 120 bp, Artificial Sequence
  ENSG00000286040_34 (sequence is synthesized)
taaagcctcagtgagaacctggctgagcaggcaggttgctcagccaggttctctgagcacctggctggagccaggcaacatttgaagcaagtactgcctaagcacattacaatgatggac

SEQ ID NO: 934174 - DNA, 120 bp, Artificial Sequence
  ENSG00000286040_35 (sequence is synthesized)
aacctcacagcctgggatgtaggacatgtcttcactgtattcagttcattctatattattgttatttatatgatgcccctcttaggaccagatcctgtatcaatttatttttttgttttt

SEQ ID NO: 934175 - DNA, 120 bp, Artificial Sequence
  ENSG00000286040_36 (sequence is synthesized)
attttgtaagtggcagaaaacactaacttaaaaaggcctaaatcttaaagaagatgcattatcttctgtaatataaatccaaaagcaggaaagacttagtcaaaattttattagggcaaa

SEQ ID NO: 934176 - DNA, 120 bp, Artificial Sequence
  ENSG00000286040_37 (sequence is synthesized)
aattctgttatttttgtatcttccctcttcagttgtcatgcttacttcattctcagggtggcttccctcagggttccaacatggttgccaagggcaaacaggactacaagcttcttgatt

SEQ ID NO: 934177 - DNA, 120 bp, Artificial Sequence
  ENSG00000286040_38 (sequence is synthesized)
tacactgggaaatagcccttggcccctcacaacgatcatactcatatccttggctttacggtgtatgactaacagcaacaataattatttttaaaaattaggtaggagacaaagatctca

SEQ ID NO: 934178 - DNA, 120 bp, Artificial Sequence
  ENSG00000286040_39 (sequence is synthesized)
agatctcatgtgacttggtataaaaatatataaattctggatatttgaatataagagggatgtttttatttttccttaaatattagatgataggaaaatacattcagaaacttaactata

SEQ ID NO: 934179 - DNA, 120 bp, Artificial Sequence
  ENSG00000286040_40 (sequence is synthesized)
gacaaaatgacttttaatattgtttcataacaactcttccaacttgtgccagcctacacttagcctttttacttacattagcattgagagaaaagccatcttgctcacagcatcattgtt

SEQ ID NO: 934180 - DNA, 120 bp, Artificial Sequence
  ENSG00000227958_0 (sequence is synthesized)
cacagcccagcctcatcaatggggctcagaagtctctgcatgtcagtgtgattgcctccatgtctccagccttctgatgtggctccttgcaggtccctgactgcttggccaagcccggcc

SEQ ID NO: 934181 - DNA, 120 bp, Artificial Sequence
  ENSG00000227958_1 (sequence is synthesized)
catgcatatgtgtagagtcttgccttgggccttctcgagtatcccttgatgttctgcccaggaggagggtcccccgtcttcaccgatggaataggaagaataatggcctcccagacacgc

SEQ ID NO: 934182 - DNA, 120 bp, Artificial Sequence
  ENSG00000227958_2 (sequence is synthesized)
acagggactttgcaggtgtgatgaagatatggaccccaagatgacagacctccctggattaagtgagcataatggaatcacaggcccttaaaagtggaagaagaaggcaaaagagtccaa

SEQ ID NO: 934183 - DNA, 120 bp, Artificial Sequence
  ENSG00000227958_3 (sequence is synthesized)
aaggtgaagaggccaggtagacagaagctctgtgtgggagagggagctgagccaccactgcaggctttaaggtgggggaagggttgagaaccaggcccatgcctgatctctaggagctga

SEQ ID NO: 934184 - DNA, 120 bp, Artificial Sequence
  ENSG00000281128_0 (sequence is synthesized)
ggaagaggctgcacagttagaaaagacgaagaagaagcgagaaacgccgccgctgccggcgccgcccccgcggatgctcacgggttgctgagaggggcttcaggccgggccgggccgggc

SEQ ID NO: 934185 - DNA, 120 bp, Artificial Sequence
  ENSG00000281128_1 (sequence is synthesized)
cgccgccgccgccgccgtctctgtctctcatctccctcgcctgagcccggcctcgcctcacagcggctcaacattcaaacttccatcacggctgcagcttctgagaggagagcatcttct

SEQ ID NO: 934186 - DNA, 120 bp, Artificial Sequence
  ENSG00000281128_2 (sequence is synthesized)
aggatcatgtagtcggagattaaaaagagttctactttttcctttccaacctggaagccttttattgcaatttcttatctgactgtactgtctgatatctccagtgcaaggttgaataaa

SEQ ID NO: 934187 - DNA, 120 bp, Artificial Sequence
  ENSG00000281128_3 (sequence is synthesized)
aaaattataggcaaagcattcagtcttttgaagctttcatgtttaagttcttcagtttttggactcttggacttaaaccagtgatttgccaggggctcttggaccttcggccacagactg

SEQ ID NO: 934188 - DNA, 120 bp, Artificial Sequence
  ENSG00000281128_4 (sequence is synthesized)
aaggctgcactgtcaacttccctacttttgatgttttgggactcagactggcttcctggctcctcagcttgcagaagacctattgtgggactttaccttgtgtttgtgggtcccatgaag

SEQ ID NO: 934189 - DNA, 120 bp, Artificial Sequence
  ENSG00000281128_5 (sequence is synthesized)
gagcaggaaactcaattgtggaagcacacgtttttccctttattaatgttcatgactcctcctataccttattgtatatctatatttggccattccactcagcatgtatttcttttccct

SEQ ID NO: 934190 - DNA, 120 bp, Artificial Sequence
  ENSG00000281128_6 (sequence is synthesized)
ttgcccctccctagacatgtctgtttctggcttcttgccagagctgtgcttcccagcctgtcagaatggccacactgcaggctgcaaccctttatgagaaataaagctctcccttccaaa

SEQ ID NO: 934191 - DNA, 120 bp, Artificial Sequence
  ENSG00000281128_7 (sequence is synthesized)
ggaccgcagccgggtaatggctgcggcagcagctgctggatggtggcagctactgggcctgcttctcctcagcagccagaggcctggcagcggcggcagcggaatggggagaagacgaat

SEQ ID NO: 934192 - DNA, 120 bp, Artificial Sequence
  ENSG00000281128_8 (sequence is synthesized)
aatcctccgaacggctgcctcctccagcggcctccggagcccgggccacggggggtgcggcggcggcggacgagaggtttaaaaccggcccgggtccctccatgtgccgccgccgccgcc

SEQ ID NO: 934193 - DNA, 120 bp, Artificial Sequence
  ENSG00000281128_9 (sequence is synthesized)
gccgccgccgccgtgttggaggcagtagaaggggagagaccaactctccggcgttcccagccctggaaatggtgacaggcgactcagaccccctccctggagctgcagccgccggggcca

SEQ ID NO: 934194 - DNA, 120 bp, Artificial Sequence
  ENSG00000281128_10 (sequence is synthesized)
gggcgccgccgccgccgcttctccccccgctccaggagggggaggtgccgccgccgccgcgcctcagccggctcccgcccaagcccacggcttccaccttccctttcaggagaagccgag

SEQ ID NO: 934195 - DNA, 120 bp, Artificial Sequence
  ENSG00000281128_11 (sequence is synthesized)
gttcagtctgttcataatttgttgagattttattatgattgggtacaggttattttgtcaaatttattttattgcatacactgagataatatgatatgttttttattctattaatatggt

SEQ ID NO: 934196 - DNA, 120 bp, Artificial Sequence
  ENSG00000281128_12 (sequence is synthesized)
atattacgttagttgattttggatgtcaagccaatcttccactggcaggataaatcccacttggtcatagtatataatcgttttatatattgctaaatgaggtttgctaatattttatgg

SEQ ID NO: 934197 - DNA, 120 bp, Artificial Sequence
  ENSG00000281128_13 (sequence is synthesized)
agaccatagacatactagtttgtagttttcttgtgatttcttttattagtatcaaagtaattctgacctgttaggctgaattaggaaattgtggactgaactgggatgaatttaggaata

SEQ ID NO: 934198 - DNA, 120 bp, Artificial Sequence
  ENSG00000281128_14 (sequence is synthesized)
atcttattctttattttgtgaaagtttttttttttgtaggagtggtattattatttaaatatctgatgggatttaccagtaaagtcagctagtcctgagcttttctctatgacatggagt

SEQ ID NO: 934199 - DNA, 120 bp, Artificial Sequence
  ENSG00000281128_15 (sequence is synthesized)
gataaactattgctcacatgttaaagtcaagccatggcctatatttgtatgactcataaataaactaagaataaattttatacttttaaagtgttagaagacggaagaggaggaatagga

SEQ ID NO: 934200 - DNA, 120 bp, Artificial Sequence
  ENSG00000281128_16 (sequence is synthesized)
gaaaaagaactgacagaggttgcatatggcccaaaatatttactacctagctccttacagaaaaattttgctgacctcttctctgtatggtgttatttactaaaatacttctttacttgt

SEQ ID NO: 934201 - DNA, 120 bp, Artificial Sequence
  ENSG00000281128_17 (sequence is synthesized)
aatatgtctatccagacatgtggctttttttctcagttactcttatgtctttctaggaatatgtctgcttcatccaagttgtcaaattcattgacatagtgttgttcataacatttccat

SEQ ID NO: 934202 - DNA, 120 bp, Artificial Sequence
  ENSG00000281128_18 (sequence is synthesized)
atgtttctatagggttactaattgtattcttcattttcactcctgactttgcaatttctattttcttgctttttatcttgttcagtctgactaaagtgttatcaattttatagcgtttca

SEQ ID NO: 934203 - DNA, 120 bp, Artificial Sequence
  ENSG00000281128_19 (sequence is synthesized)
tttggttgacttttatttttccagtgtcttcaggtagaagtttagattatgatggaaacttttgtggttgttttcctaatgtagttatttaaagctatacatttccctttaattatggct

SEQ ID NO: 934204 - DNA, 120 bp, Artificial Sequence
  ENSG00000281128_20 (sequence is synthesized)
gcgttccatgtacatcgatatatttttggttttttagttaaaagcataattactctagaaattccttctgaagcccacaagttatttaggagtgtgatgtgtttaattttcaaatatttg

SEQ ID NO: 934205 - DNA, 120 bp, Artificial Sequence
  ENSG00000281128_21 (sequence is synthesized)
tgatttttccagcttctttctgttgtttatttctaattaaatccctctgtgatgagagaatatactttgaattattttaatcctcttatctgtacgttattatataatatataatctata

SEQ ID NO: 934206 - DNA, 120 bp, Artificial Sequence
  ENSG00000281128_22 (sequence is synthesized)
tggggaaatactctatgagcacttgaaaaaccgtacattctgctgttgctgaatacagtgttgtaaaatcatcaattaagtcaaatagttttgtagtgtttttcaggtcacttttaccct

SEQ ID NO: 934207 - DNA, 120 bp, Artificial Sequence
  ENSG00000281128_23 (sequence is synthesized)
tatttactttctgtctagttggtgtgatcaatttttcagactggaggatttaagtcaccaactataattttgatatgtttatttttgtttcatttctgtcatttttactttatgtatttt

SEQ ID NO: 934208 - DNA, 120 bp, Artificial Sequence
  ENSG00000281128_24 (sequence is synthesized)
gggactctgttgttaggctccaggacttactccacagtgctgtacaggcacatggtttctacactaaaagtaactaaacttagagatttgtgggataccatcaagtatacccacatgtgt

SEQ ID NO: 934209 - DNA, 120 bp, Artificial Sequence
  ENSG00000281128_25 (sequence is synthesized)
aaaattggagtctcagaaagagagaagggagagaaagataaagaaaaaataatggccacaaacttctcaaagttgtgaaaaagattaatcaaaagaacctagaagcttaacatctctcaa

SEQ ID NO: 934210 - DNA, 120 bp, Artificial Sequence
  ENSG00000281128_26 (sequence is synthesized)
acacagtaaacacaaagatatctatgtctagatacattatagttaaacctcagaaagccaaaatccacaaataatatactgaaatcaatatttgttctcaacaagagaaaaatgactcat

SEQ ID NO: 934211 - DNA, 120 bp, Artificial Sequence
  ENSG00000281128_27 (sequence is synthesized)
catgtgaaagagaagagtaatacaattaacctgactttaaatcacaaacaatggagatcagaagataatggagaggcactgaaagaaaaaaaaaattccacccaaaattctctatccagc

SEQ ID NO: 934212 - DNA, 120 bp, Artificial Sequence
  ENSG00000281128_28 (sequence is synthesized)
aaaactatcctctacaaatgaaaatgaaataaagacatgcccagataagcaaaagctacagaattttgtggttagcagacctgtcttacaagaaatattaaaggaagtcatcaggctgag

SEQ ID NO: 934213 - DNA, 120 bp, Artificial Sequence
  ENSG00000281128_29 (sequence is synthesized)
agaaaatgacattgttagtaactaaaatccatagtaagaaattaagagcaccttaaaggataaacatatgtgtgaataaatataaaaaatacatacacacatataaacacacatagaagg

SEQ ID NO: 934214 - DNA, 73 bp, Artificial Sequence
  ENSG00000281128_30 (sequence is synthesized)
taatatacataaagtagaagaatgtggaaggactagactggctaaatcttctggccttcatctttctcccatg

SEQ ID NO: 934215 - DNA, 120 bp, Artificial Sequence
  ENSG00000281128_31 (sequence is synthesized)
aactcctcttcatctatcttattagttctgtccctttagagaacccagaatgtaaattagtacagccattttgacaaacagtatggaggttcctcagaaaattaaaaatagaactaccat

SEQ ID NO: 934216 - DNA, 120 bp, Artificial Sequence
  ENSG00000281128_32 (sequence is synthesized)
ataatctagcaattccagttctagatataaattcaaaggatatgaaatctgtatgttgaagaaatatattcactcttatattccttgaagcattattcacacagccaaaatacagaatta

SEQ ID NO: 934217 - DNA, 120 bp, Artificial Sequence
  ENSG00000281128_33 (sequence is synthesized)
acctaggtttccaccaatggatgactagatgaagaatatatgacttatattctgtatatgtatatatatattctctatatgtatatgtatatacatacacacacacacacacaaaaaaaa

SEQ ID NO: 934218 - DNA, 120 bp, Artificial Sequence
  ENSG00000281128_34 (sequence is synthesized)
tggaatactactcagccatacagaaaaaggaaatcatataatttgcaacaacatggagacattatgctaagtgaaataatccaggcacagaaagacaaataatgcatggtctcacttatt

SEQ ID NO: 934219 - DNA, 120 bp, Artificial Sequence
  ENSG00000281128_35 (sequence is synthesized)
catggaatccaacaaagtcaaacccacagaagcagagagtagaagggtaattgccaagcactgggatgtggtttgaggaagggaggcatgggaaatagggaaatgttggtcaaaggtaca

SEQ ID NO: 934220 - DNA, 120 bp, Artificial Sequence
  ENSG00000281128_36 (sequence is synthesized)
tgttttaatcagaaataagttcaagagatctattatgcagcgtgattactatagttaataatatatttactcttgaaaattgctaagaatgtagattttaaatgttcctaccaaaagaag

SEQ ID NO: 934221 - DNA, 80 bp, Artificial Sequence
  ENSG00000281128_37 (sequence is synthesized)
gaagtcaaaaccaaatggtattattccacaatgtatacatatatcaaaatgtcacaatatcacattgtataccataaata

SEQ ID NO: 934222 - DNA, 120 bp, Artificial Sequence
  ENSG00000226780_0 (sequence is synthesized)
ccggctagccggtgcaggatccacaatcttcaagggtggccaggtgcttccaagatcctaaacgcagttaaccactcggcgaggtagaaaacaggcccagagaagttcaagaacttgctg

SEQ ID NO: 934223 - DNA, 120 bp, Artificial Sequence
  ENSG00000226780_1 (sequence is synthesized)
tagaagattactgaacgagtaagcagcagaggccggtctagaaccagccccgtgtgcccttctgacagcgcagcagcagcacttaacacctaaccggcttggctaaattctatgtgagag

SEQ ID NO: 934224 - DNA, 120 bp, Artificial Sequence
  ENSG00000226780_2 (sequence is synthesized)
aaacaccatccagtccagaggcagcttacagctcaatagagaaggatgaattcaaaattcttctggcattattacttgccaaagaagagtggggacatgtgtccctcttctgccatactg

SEQ ID NO: 934225 - DNA, 120 bp, Artificial Sequence
  ENSG00000226780_3 (sequence is synthesized)
tgacctggacagaagaaagtgaataacgacatttttctccctgaagccttcgggagcttggcctgcagaagcctcttcttggttaggactcagaaccctctcagaacattgtgacctgcc

SEQ ID NO: 934226 - DNA, 120 bp, Artificial Sequence
  ENSG00000226780_4 (sequence is synthesized)
agagctggcattgcacagagaccttcctgggcaacccttgattcaccgtcccataaatgtccagatggaggaagtggtctggggaagatggaccattacgaagattaatgcaccttttat

SEQ ID NO: 934227 - DNA, 120 bp, Artificial Sequence
  ENSG00000203325_0 (sequence is synthesized)
actccagaatgggctccctcagtcggaagtctccccgctccaccgcccccagtgtaacccctccaacccagaaacgccgactgcactagcgccccctgcccagaatctccacccttagcg

SEQ ID NO: 934228 - DNA, 120 bp, Artificial Sequence
  ENSG00000203325_1 (sequence is synthesized)
ctgaagccacgcccactgggtgggcgaaaggaatacgacacaaggagattcccttaacataggatgcatcttgtacttgatgtgaaaagaaaccactcggctgggcgcagtggctcacac

SEQ ID NO: 934229 - DNA, 88 bp, Artificial Sequence
  ENSG00000203325_2 (sequence is synthesized)
gtgagacaccgtctcaaaaaaaaaaaaagaaaccactatgtcagtttaattggcagcctttcctttctttctttacagcacttaaaga

SEQ ID NO: 934230 - DNA, 120 bp, Artificial Sequence
  ENSG00000286045_0 (sequence is synthesized)
gactcctcggcgccatcgctgtcgctggaatcagccgcgcgctgccgaaaagtccttttcggcctgtgagccatggccgaggcccgagcgcccggcgccctagaacccgctgaaccgcaa

SEQ ID NO: 934231 - DNA, 120 bp, Artificial Sequence
  ENSG00000286045_1 (sequence is synthesized)
gccgcagcttcagtgcccgccccctagggcgcgctcccgccgcgcctggccgccgagtgcgcgcgcccgtcccgcctgccttctgctcaccgctactctgtctgcgcctgcgtgctttgg

SEQ ID NO: 934232 - DNA, 89 bp, Artificial Sequence
  ENSG00000286045_2 (sequence is synthesized)
cgtctgagatgtggggagcgcctctgtcccaccgccccgtctggggtgtgaggagcgggtacccagcagctcactgagaacgggccatg

SEQ ID NO: 934233 - DNA, 120 bp, Artificial Sequence
  ENSG00000286045_3 (sequence is synthesized)
ctgataaagccatttaaatttaaatttattcactgaagttatcatgaatagttacatagcctttgaattattcttaacaatccaaggaaaaatttactataatagatcacttcttgatgt

SEQ ID NO: 934234 - DNA, 120 bp, Artificial Sequence
  ENSG00000286045_4 (sequence is synthesized)
ggttatatatgttagaggacaagtagaatagtccatgtctaagctaaaataaacatctacctctctaaaacagatccaggtgaattctgggatatattttcatcacccttattttatatt

SEQ ID NO: 934235 - DNA, 120 bp, Artificial Sequence
  ENSG00000286045_5 (sequence is synthesized)
ctaggcttctgtctttgagacttattgtgaaggtgaataagtaatcatattttttaggttattacttttttgcagttggccaatatatcctattcagacatctaaatatgactgcatagc

SEQ ID NO: 934236 - DNA, 120 bp, Artificial Sequence
  ENSG00000286045_6 (sequence is synthesized)
atgattcaattcatcctatgacagaaggaggagttaaccctaatccaatatggactctgttctctgaacgactgtactagtccattccagcactgtttaaagacatacctgagattgggt

SEQ ID NO: 934237 - DNA, 120 bp, Artificial Sequence
  ENSG00000286045_7 (sequence is synthesized)
aatttaaaaagaggtttaattagctcatggttcagcaggctgtataggaagcatgatggtggcatctgggtggcttctggggaggcctcaggaaacttgaaacccctcaggtgaagggga

SEQ ID NO: 934238 - DNA, 120 bp, Artificial Sequence
  ENSG00000286045_8 (sequence is synthesized)
agcacacagatcagctcacatggccatagtaggagcaagagagagatgggggagatgccacacacttttaaatgaccagatctcacgagaactcaatcattattgtcatgacagtactaa

SEQ ID NO: 934239 - DNA, 79 bp, Artificial Sequence
  ENSG00000286045_9 (sequence is synthesized)
ctgggtggagacagagatccaaaccatatcaacaactttctgatcttgattagcaaaatctcagcaatggtaaaaatct

SEQ ID NO: 934240 - DNA, 120 bp, Artificial Sequence
  ENSG00000286045_10 (sequence is synthesized)
ctgatcttgattagcaaaatctcagcaatggtaaaaatctgaatatcaacaatatcatcttcctttggcaggggattgagaaaaataattgcttctgttttctgatagcatccaatttgg

SEQ ID NO: 934241 - DNA, 120 bp, Artificial Sequence
  ENSG00000286045_11 (sequence is synthesized)
agcaaattcctacatccttaacacccaccgtcaatcatctaagacaaactcaaatcctaaaaccttcctactgagagagcccaggagtagtaaacccaagttccacaactgcaggtgcat

SEQ ID NO: 934242 - DNA, 120 bp, Artificial Sequence
  ENSG00000286045_12 (sequence is synthesized)
ttgtagtagtctttgactggagggaattgacagattgagtgatgtaaaattgccattgttgtaagcaaaaaatcgttgcatattggccattttatatggttcaacttaatgcaacaaaca

SEQ ID NO: 934243 - DNA, 120 bp, Artificial Sequence
  ENSG00000286045_13 (sequence is synthesized)
tggccattttgagggtctatctctgagagtcagtggtaattctaagagaaaaagccctactactacatgttgagcatccctagtccaaatacctgaaatccaaaatgatccaaaatctaa

SEQ ID NO: 934244 - DNA, 120 bp, Artificial Sequence
  ENSG00000286045_14 (sequence is synthesized)
aaatctaaaacctttaaagtggcaacatgattcaacaaaagggaaattccacatgtgacttcatgtgatggagcacagtaaaaatgtagacaaaactttgtttcatgcacaaaattattt

SEQ ID NO: 934245 - DNA, 120 bp, Artificial Sequence
  ENSG00000286045_15 (sequence is synthesized)
gtgtaaagttaccatcagcctatgtgtatactgtgtgtataaaacataaataaatttcatgtttagacttggatcctatccccaaaatatttcattatgtatgtgcaagtattccaaaat

SEQ ID NO: 934246 - DNA, 120 bp, Artificial Sequence
  ENSG00000286045_16 (sequence is synthesized)
ctgaaaaaaatctaaatttgaaaatcttctggtcccatgcattttggataaggaacattcaacttatatttctactactagatgatagataagttatcaagagttaataggaaaatgtgg

SEQ ID NO: 934247 - DNA, 120 bp, Artificial Sequence
  ENSG00000286045_17 (sequence is synthesized)
tagaaacagtagatagcttttaaattaatgttgtctggagagaaagataggaaagaattagatattggagaggcttcagagggtttatatgcaaagacagagatgaaagtaaaaaaaaaa

SEQ ID NO: 934248 - DNA, 120 bp, Artificial Sequence
  ENSG00000286045_18 (sequence is synthesized)
ggagttaaaaatactgcagagagtaaatactggaaccccagaagcatggaaaaggttggaatttagtcctcaaggaagaatagcccaggaaataataactgcaaactcaaagtagacctc

SEQ ID NO: 934249 - DNA, 120 bp, Artificial Sequence
  ENSG00000286045_19 (sequence is synthesized)
cgatgtgcgaagactgttctaaaatccttgcaagttgaatcttgaaaacatcatgttaagggaaggaagccagtgacaaaagaacagagagtgcatgatttcatttatatgaaatattca

SEQ ID NO: 934250 - DNA, 120 bp, Artificial Sequence
  ENSG00000286045_20 (sequence is synthesized)
gaataggtaagtctacagaggcagaaagttgatttgtggttgccaggagctttggggagggaagaatggggagtggctgctaatgggtacagggtttctttttggggtgataaaaatgtt

SEQ ID NO: 934251 - DNA, 120 bp, Artificial Sequence
  ENSG00000286045_21 (sequence is synthesized)
tgttctaaatttagattgtgatgatggttgtacaactctgtgaatatactaaaaatcatttaactatatacattaattatgcaaattgtatgtgaattatgtatcaataaagatattttt

SEQ ID NO: 934252 - DNA, 120 bp, Artificial Sequence
  ENSG00000203327_0 (sequence is synthesized)
caccgtgcccggccttttacagataattttaagtcaaactttgcatagttttccaagttgagttaaaattctctatgaaaataatttatctatcatttaccaaatgtaatactgaaaata

SEQ ID NO: 934253 - DNA, 120 bp, Artificial Sequence
  ENSG00000203327_1 (sequence is synthesized)
tgtgaaagatactgattcacagattcaacaaacccaaagaatcccaagcatcataaatacgaagaaatactcaactagattcatctcagtgaagttgtcaaaaatagagatcataaaatt

SEQ ID NO: 934254 - DNA, 120 bp, Artificial Sequence
  ENSG00000203327_2 (sequence is synthesized)
tgaataatactccattgtatgtatatactacattttgtttatccattcatctgttttttggacacttggattgtttccatttttggctatgtgaataatgccactctgaaaattcatata

SEQ ID NO: 934255 - DNA, 120 bp, Artificial Sequence
  ENSG00000203327_3 (sequence is synthesized)
caagtatctgctttcagtttcttttgaaaacctgcttatttttgacatatcttttgtttataagcacaaatctatttagaataaagccagtggatattttatttccacaatcctttcata

SEQ ID NO: 934256 - DNA, 120 bp, Artificial Sequence
  ENSG00000203327_4 (sequence is synthesized)
aatactgtaagctcttactctgagccatcaatagttaccaagagcactatataataatcagaagcagcagccagcagttatctactgacaaactcgttttttattttattttattttttg

SEQ ID NO: 934257 - DNA, 64 bp, Artificial Sequence
  ENSG00000203327_5 (sequence is synthesized)
agacggaatcttgccctgtctctcaaattattctcctgcctcagccttccgagtggctgggatt

SEQ ID NO: 934258 - DNA, 120 bp, Artificial Sequence
  ENSG00000267383_0 (sequence is synthesized)
ggctttccgcttttggcgcggcctttgtctctagctgcagccggcgtttcaggtctcgtcttcactggtctgtgtcctattctcctggaggcccagcctctgtggccctgtgacctgcag

SEQ ID NO: 934259 - DNA, 120 bp, Artificial Sequence
  ENSG00000267383_1 (sequence is synthesized)
tctcctggaggcccagcctctgtggccctgtgacctgcaggtattgggagatccacagctaaaaccccaggacaccctggaagcatagaaatgtctccctctgatgccgagccgaagctg

SEQ ID NO: 934260 - DNA, 64 bp, Artificial Sequence
  ENSG00000267383_2 (sequence is synthesized)
ggcccctctgcctggctgcccagtctgaaagtgaggagggtctctgcccggccgccatcccatc

SEQ ID NO: 934261 - DNA, 90 bp, Artificial Sequence
  ENSG00000267383_3 (sequence is synthesized)
cgccatcccatctaggaagtgacgagcacctcttcccagccaccatcccatctaggaagcaaggagcgtctctgcccggccgcccatcgt

SEQ ID NO: 934262 - DNA, 67 bp, Artificial Sequence
  ENSG00000267383_4 (sequence is synthesized)
tctgcccggccgagaccccgtctgggagggaccattgcagtttagagaggaatttatatagggatgt

SEQ ID NO: 934263 - DNA, 120 bp, Artificial Sequence
  ENSG00000267383_5 (sequence is synthesized)
attgcctggacactgcacagcggaatttatatagggatgtgaagtttcagaactacagaaacttggtcttcctttagattatattttcttccatcttccgcatcctcctgttcttcagcc

SEQ ID NO: 934264 - DNA, 120 bp, Artificial Sequence
  ENSG00000267383_6 (sequence is synthesized)
taaatgaaaaaagatacagagaagacacatttgctttttatccactgcacttccactcactattagtcaatgtggttacagctgagaatagcagttttctggcagggcagccacttctca

SEQ ID NO: 934265 - DNA, 120 bp, Artificial Sequence
  ENSG00000267383_7 (sequence is synthesized)
gcaataaacagcacactgaaaaaaaaggataaatccttcataaaaagctaatgaactttttttttcctggaaactttaaaatccctcaaaaactgtttattatacaggtgaattttgata

SEQ ID NO: 934266 - DNA, 120 bp, Artificial Sequence
  ENSG00000267383_8 (sequence is synthesized)
gtcatgatgggcttatcggtaggatttctggtagcaagcacgggcaccaggacctccaaactttttggacttgcagcgacggggatcagctaccagcagggtccggtcatactggatgag

SEQ ID NO: 934267 - DNA, 120 bp, Artificial Sequence
  ENSG00000267383_9 (sequence is synthesized)
aggcttaatacttagaaagtgctagagcagcctctattaggggatctcttctctgattgtactccacttgctgtaacaccaaaggatgcagaaccaggttctgtagcagaaattgctggt

SEQ ID NO: 934268 - DNA, 120 bp, Artificial Sequence
  ENSG00000267383_10 (sequence is synthesized)
gtctgtggcaggggagggcacctgaggacagggaagaagaaacatatttttatctttatggagcagcacattgttcccaaataccttctgctttaagggacagaaatggatggacttttt

SEQ ID NO: 934269 - DNA, 120 bp, Artificial Sequence
  ENSG00000267383_11 (sequence is synthesized)
ctgtcttttctgccagttgatgtcatgcttgcaggtaaacatgtggtactgacacccttaaaggcatattctcaagaggcaggtaaaaaaccaattccaaaaaagtattgcaacaaaagg

SEQ ID NO: 934270 - DNA, 120 bp, Artificial Sequence
  ENSG00000267383_12 (sequence is synthesized)
aagcaccaaataactataatatctttatggcttgcaaaaatataggcagaaaagggctttcttttctagggaagagcaaacaagattagaaaggaggtgggagaggaacagcaaatggag

SEQ ID NO: 934271 - DNA, 120 bp, Artificial Sequence
  ENSG00000267383_13 (sequence is synthesized)
ggtgaaaaagtcagattttagatcagagaatggcttaccctgaaatcagcatgttcttaggagggacataaaatggggttgtatgttgactcagactgagggtagcttgaatttcaggag

SEQ ID NO: 934272 - DNA, 82 bp, Artificial Sequence
  ENSG00000267383_14 (sequence is synthesized)
tgtaatcccagatacttgggaggctgaggtaggaaaattgcttgagccctggaggtgaaagctgaagtgagccgagatggcc

SEQ ID NO: 934273 - DNA, 120 bp, Artificial Sequence
  ENSG00000267383_15 (sequence is synthesized)
agtgacactccatctcaaaaaaaaaaaaaatcataattgattttgactgctgaaggcaaattcagctggttttttgttttttttttaatgagaaaaaggagaaaatgtgcagagtgtatg

SEQ ID NO: 934274 - DNA, 120 bp, Artificial Sequence
  ENSG00000267383_16 (sequence is synthesized)
agtgtatgtctggctgtgtgataggcaagaaaagggagcatcatcttaatcataacgggaagagtgtttctttccataaactgttcctgaagcacacaaaggaaggagaattttattaat

SEQ ID NO: 934275 - DNA, 120 bp, Artificial Sequence
  ENSG00000267383_17 (sequence is synthesized)
cacaaatatttttcataattatctatgtgtttcatctttcctcatctcttttctttgttctatgcatttcttccacttggcttttcctgggctgcatcttatatattaaaccagtaagca

SEQ ID NO: 934276 - DNA, 120 bp, Artificial Sequence
  ENSG00000267383_18 (sequence is synthesized)
gatgacaaggcagattcagaagaggaagaggcagactagtgtaaaaaactaacttcagattctgaatgtgaggaacagcaactggaggaaattaaagaaaacaaagggaaactgaaaaag

SEQ ID NO: 934277 - DNA, 120 bp, Artificial Sequence
  ENSG00000267383_19 (sequence is synthesized)
ctcaccagactgtacaagaagtgtgtgtcagcatctgcttctgatgaggatttcaggaagcttaaaatcatggtggaaggaatgagcggccgactctggagcccaagctgttgcttccca

SEQ ID NO: 934278 - DNA, 120 bp, Artificial Sequence
  ENSG00000267383_20 (sequence is synthesized)
tcagaactacagaaacttggtcttcctttgtgaattttgatagtcatgatgggcttatcggtaggatttctggtagcaagcacgggcaccaggacctccaaactttttggacttgcagcg

SEQ ID NO: 934279 - DNA, 120 bp, Artificial Sequence
  ENSG00000267383_21 (sequence is synthesized)
ggccaggctggtcttgaactcatgacctgaggtgatacacctgcattggcctcccaaagtgatgagatagcagacgtgagacaccatgcccaaactgacaaacttttttaatgatacatc

SEQ ID NO: 934280 - DNA, 120 bp, Artificial Sequence
  ENSG00000267383_22 (sequence is synthesized)
taatgatacatcgatgttgcgtaccagagtttatgagtaaacatttttcttaatcactgtcttgcagttccatgtgtgttttttcagtgtaggttttttcttttttctttttttttcctt

SEQ ID NO: 934281 - DNA, 120 bp, Artificial Sequence
  ENSG00000267383_23 (sequence is synthesized)
caggttaggtaaattcaatcagctacttagctcagtgaagatgtattcaaaccaagccacacaccacatcacatttttttttccataaatgtaaaaatgtaaaaatgtttttaataacct

SEQ ID NO: 934282 - DNA, 120 bp, Artificial Sequence
  ENSG00000267383_24 (sequence is synthesized)
ggcacccgggtgtttttaattctgctctcagtaaaccagtctagtgaggttttgttcatgtatctaggaaccaccagaaatgcttgacaacagttggctgagactttctcgcaaagaaga

SEQ ID NO: 934283 - DNA, 120 bp, Artificial Sequence
  ENSG00000267383_25 (sequence is synthesized)
tttgacctggcaaataagagccatctatgacacttcagtgaatgttcactatcacccatttgaaatgtggccaaataccatgtactattatatttgcttccatcatcacctgtctactaa

SEQ ID NO: 934284 - DNA, 120 bp, Artificial Sequence
  ENSG00000267383_26 (sequence is synthesized)
aaggagacctatacttttttttcataaccttaaatacccaacttctgccacaaaaacaaaaagataagagtgtgattttacatcacacattcttggaaaaaaaatagagttcttgtcttg

SEQ ID NO: 934285 - DNA, 120 bp, Artificial Sequence
  ENSG00000267383_27 (sequence is synthesized)
gtggaagttctaaagagcgggtgagagactaaatgactaccaggagctagataattgctgttttactatcaaatgttcattttcatttctacattgtctcaagttatgttaatataaagt

SEQ ID NO: 934286 - DNA, 120 bp, Artificial Sequence
  ENSG00000267383_28 (sequence is synthesized)
aataacttttatccaggaaatttcaaaaaagcttattttttcatcagccataatagtaatcaaagacagagaaatgaaggcttttacatgtcataatttatattttaaaattaacatgct

SEQ ID NO: 934287 - DNA, 120 bp, Artificial Sequence
  ENSG00000267383_29 (sequence is synthesized)
tttatattttaaaattaacatgcttctagaaataaaaaaggaaaggaagaaagaaatatacaaactaatcagcctggtcaacatggtgaaagcctgcctctactaaaaatacaaaaatta

SEQ ID NO: 934288 - DNA, 120 bp, Artificial Sequence
  ENSG00000267383_30 (sequence is synthesized)
taatctcagctacttggaatgctgaggcactagaattgcttgaaccttggaggcggaggttgcagtgggtcaagatcacggcactgcccttcagcttgagcgacagaatgagactccatc

SEQ ID NO: 934289 - DNA, 120 bp, Artificial Sequence
  ENSG00000267383_31 (sequence is synthesized)
tctccttcttggaagcctcatccacatatttctggtaataggccaccagggctttggaggtggactgacggatagcataaatctgggccacatgagcaccacccttcacacggacacgga

SEQ ID NO: 934290 - DNA, 120 bp, Artificial Sequence
  ENSG00000267383_32 (sequence is synthesized)
tgtccacaccagcaaatcgctccttgccaagaagcagaactggctccagcagctcgtattgtagcatgcgcggctcagtcatctccaggggctgcccgttcaccttgatgagaccattgc

SEQ ID NO: 934291 - DNA, 120 bp, Artificial Sequence
  ENSG00000267383_33 (sequence is synthesized)
cgcgtctgcagtgcgccacagctgtggctgtcttcttgcgtccgaagacttgcaccgattgcagcgggcccttggacggcatggctgcgagcgtggactagagaacctcaccgcgcggcg

SEQ ID NO: 934292 - DNA, 120 bp, Artificial Sequence
  ENSG00000267383_34 (sequence is synthesized)
ctgcaaccggaaaaggcaaaaagctaatgaactttaagaaaaacaggcatatgcatcactaatgcttgcggtaaaataaagattcattttgttgattgctattgagctctggtactattt

SEQ ID NO: 934293 - DNA, 120 bp, Artificial Sequence
  ENSG00000267383_35 (sequence is synthesized)
aaaacatgttattttaaataggaatactgtgaatggttattttgtcaatataattaagaatatgacatcacactaatagtctcacttatagttgtataacatcaaatgctatttttaatt

SEQ ID NO: 934294 - DNA, 120 bp, Artificial Sequence
  ENSG00000267383_36 (sequence is synthesized)
catataagtattcaatttatgtcaccctcctttgctatttcaaagccttctccactttgtatgagtggaaaacaggccagcagttcccaggaaagcacgtggcgctattgctactttaac

SEQ ID NO: 934295 - DNA, 120 bp, Artificial Sequence
  ENSG00000267383_37 (sequence is synthesized)
aatgatcgtgaagagcatttgtttcggtgcgactcgtgtcaaacactgttcaaatatgttttatgggatttcattgacatttaagtgtctaaattatctggaatttaacatttttcatga

SEQ ID NO: 934296 - DNA, 120 bp, Artificial Sequence
  ENSG00000267383_38 (sequence is synthesized)
acctaaattgaataatcttttactaaaagcttttccgaggcagagaaagatttatatcattttattatcatatggaagaagtgtgttaaccatgttttcagtaatcactctgaacacagc

SEQ ID NO: 934297 - DNA, 120 bp, Artificial Sequence
  ENSG00000267383_39 (sequence is synthesized)
attctcagctcccagtatgcatccttagtcactcaggggaaactggtttctctgtgaagaggtagaagaaaatgctgagtggaggcaccacactgcacagcaatgctttccacatgcacc

SEQ ID NO: 934298 - DNA, 120 bp, Artificial Sequence
  ENSG00000267383_40 (sequence is synthesized)
tatgagggtcttcatttaattgggctgttatttgcatggctagatacttactgaatttagtcatactattttttagcagctaatggcatctgttacccattaattttatacatttgcttt

SEQ ID NO: 934299 - DNA, 120 bp, Artificial Sequence
  ENSG00000267383_41 (sequence is synthesized)
ttgaaaaacaaatcttttgttaatttactctaattgagactacatttacaatcttcaatttttcaatgttaaagcaaatcagagaagagcaatgtgtgtatatagtgtgcattttcctgc

SEQ ID NO: 934300 - DNA, 120 bp, Artificial Sequence
  ENSG00000267383_42 (sequence is synthesized)
ctatcaaagttttcccttcattgcattggaaacccaaggaagccacctataaaatactcccattcaacactttggcctggattttagatttcagaaggtcaaaaacaatgactgagcaaa

SEQ ID NO: 934301 - DNA, 120 bp, Artificial Sequence
  ENSG00000267383_43 (sequence is synthesized)
gccaaaatcttgtttttgtttcttgttagtaatctggccatttccaaaagcatagcaattacgccaagccattgaaaagatgtggtttttattaattttgtccgtttccaatgttttatc

SEQ ID NO: 934302 - DNA, 120 bp, Artificial Sequence
  ENSG00000267383_44 (sequence is synthesized)
tatttgttacttttatcacgttaattatttaaaataaactacataaccaatcatgcattcaagaaatcttaaggtgtttacactttaatcttgtattacagtatagtagaatcctctata

SEQ ID NO: 934303 - DNA, 120 bp, Artificial Sequence
  ENSG00000267383_45 (sequence is synthesized)
attagaagttaattatttatgaattcattgtttttaaggtttttcaaatgtgaaaaacaattaggtatgatttgaaataagttcaattctaggacattacccactggtcttcatggtatt

SEQ ID NO: 934304 - DNA, 120 bp, Artificial Sequence
  ENSG00000267383_46 (sequence is synthesized)
tctgtaatggatagtgtaaatgcagacatgctgattgaattagaatgagttcagccttgttggtaaactattggtatcccagaggctgaccattcactacagcttactaaatgttgttcc

SEQ ID NO: 934305 - DNA, 120 bp, Artificial Sequence
  ENSG00000267383_47 (sequence is synthesized)
ataatgccagagagcacttttacccaggttaccattttcctcccatttatgtggttctgttgtggtctcctgcttctcttaagctatcccaggtgagaggtgattatttcttgcatgaat

SEQ ID NO: 934306 - DNA, 120 bp, Artificial Sequence
  ENSG00000267383_48 (sequence is synthesized)
gagatttcctttttttccctgtcataggatccttagattctccctactggaagcaacatgcagaagggcaggaatgataacaatgtacaaatatgttttctgccatgtggtcaccataag

SEQ ID NO: 934307 - DNA, 120 bp, Artificial Sequence
  ENSG00000267383_49 (sequence is synthesized)
cagcttgcaacatggcccacctagaagtcacttactttcaggcaagcaggggtgtttttctatgatgtgtctttctcttaaaagcacctctgattaagtttagcacagtcaggacaatct

SEQ ID NO: 934308 - DNA, 120 bp, Artificial Sequence
  ENSG00000267383_50 (sequence is synthesized)
ccattttgataaacacaaagtcaacacatgagtaacctaatttcttgagtgattttcccaccagttgcacatttttttacactcaaggaaaaagtattacacagcaggtgtgcaacagac

SEQ ID NO: 934309 - DNA, 120 bp, Artificial Sequence
  ENSG00000267383_51 (sequence is synthesized)
tgggaatccagcgtattatcttagaatgttacctacccacttgaataaaattttaaaatagtctttctgctgttttgttatctacgtaaacaaagacattatgtgcaaataataattaac

SEQ ID NO: 934310 - DNA, 120 bp, Artificial Sequence
  ENSG00000267383_52 (sequence is synthesized)
tactttccagttttattcattacaaatattagctaacatctttttttctggcttaaattattttgtccttatgtaccaatttatacattcgcacacacatagaacaacaaaaatataccc

SEQ ID NO: 934311 - DNA, 120 bp, Artificial Sequence
  ENSG00000267383_53 (sequence is synthesized)
aattatatacttttggttacattttcattaaaataagtgttataaataatttgtttgtttgaagagggcttttattgttgtactcaagagtgttatttatggagacaaaattgcctgtgc

SEQ ID NO: 934312 - DNA, 120 bp, Artificial Sequence
  ENSG00000267383_54 (sequence is synthesized)
ggacaccctggaagcatagaaatgttcttcagacaatcagtaaaaacaaacttctccaagctaaaggaggatgttcgaatccatcataaagaagctggaaaccttgaaaaaagattagat

SEQ ID NO: 934313 - DNA, 120 bp, Artificial Sequence
  ENSG00000267383_55 (sequence is synthesized)
gacctgatagagctgaaaaccatggcccaaaaactacgtgatgaatgcagaagcttgagtatccaatgtgatcaacaggaagaaaaagtatcagtgattgttaaaatgaatgaaatgaag

SEQ ID NO: 934314 - DNA, 85 bp, Artificial Sequence
  ENSG00000267383_56 (sequence is synthesized)
gagtatccaatgtgatcaacaggaagaaaaagtatcagtgattgttaaaatgaatgaaatgaagcaagaagagaagtttagagat

SEQ ID NO: 934315 - DNA, 120 bp, Artificial Sequence
  ENSG00000267387_0 (sequence is synthesized)
gatcctccctacttagcctcccaaaacactgagattgcagccatgagccactgcgcctggccaggtttgatttctgtagtagctgttcaattgtgggtcaagggtcaggttctggggtaa

SEQ ID NO: 934316 - DNA, 120 bp, Artificial Sequence
  ENSG00000267387_1 (sequence is synthesized)
ggaggtattgggcttctcacatttaaggtcagaagtccagtcctgggtcaggggttgggatcagagatcaaggctgagctctgagtttggaggtcagggattggactctcagtgattgaa

SEQ ID NO: 934317 - DNA, 120 bp, Artificial Sequence
  ENSG00000267387_2 (sequence is synthesized)
atccttaggtcagaggtacagtcactgaggataggagtcaggagtggagttcgggacagtcaaagtcgaggttaagttttaggtcatcacctccttccgctggggcacgcggcgccacca

SEQ ID NO: 934318 - DNA, 120 bp, Artificial Sequence
  ENSG00000267387_3 (sequence is synthesized)
gacgtggtcgcaggaggagcaggcaaactgccggtccacagcagggataaggtcgtcctgggcacgttgaaacatgcgtaggttggcttctgtcagtggcaggagggaggtcgccactgc

SEQ ID NO: 934319 - DNA, 120 bp, Artificial Sequence
  ENSG00000267387_4 (sequence is synthesized)
ctgtggaatggggcaggtggggatgaggtgggggggtgtcaccccttctgcaccaacataagcatcagccctcctctccctacagacgagtcctcttcctgccccagtgaatatctcccc

SEQ ID NO: 934320 - DNA, 120 bp, Artificial Sequence
  ENSG00000267387_5 (sequence is synthesized)
gcctgcagatgtccccctcccaactcccccatcccaagccctagccaccaactcacctgaatgtcccggtcctgcttcatatcttctggtggatcctgggtggagatagcaggggcagaa

SEQ ID NO: 934321 - DNA, 120 bp, Artificial Sequence
  ENSG00000267387_6 (sequence is synthesized)
actggggatggggctcaggcctctttccacccgtttgctgggggaggcccccggccgcaatgagtagggtgcccctaactcgccagaagctcacagagcaccactcacttattgagagcc

SEQ ID NO: 934322 - DNA, 120 bp, Artificial Sequence
  ENSG00000267387_7 (sequence is synthesized)
aggtgtgtggcctcagttgtcctcatagcagccctgagaggtgggcacacctgttaccttattgctcagatggggaaactgaggcttaggggagggcttgcctgagtgaggctagcctga

SEQ ID NO: 934323 - DNA, 120 bp, Artificial Sequence
  ENSG00000267387_8 (sequence is synthesized)
cccccatactcacttcctgcctgcaaatgccacatgcttgttgatgttgtgacatatcgcccctttgaggccacgttgtgctcggctaagtgggagagagatgtgggttcaaatcccagc

SEQ ID NO: 934324 - DNA, 120 bp, Artificial Sequence
  ENSG00000267387_9 (sequence is synthesized)
tgtatcacttccagctgtggggacttgggcaagccactccctgccccctgggttcccactgacaggcatgttagagcccaggctctgactccaggtggccagggttcaaatcgcagctgc

SEQ ID NO: 934325 - DNA, 120 bp, Artificial Sequence
  ENSG00000267387_10 (sequence is synthesized)
ccctgcttgctggcaagtgacttcggcctcagtttctttgtctgtgaaatggggataaataataggacctgtctcctggggtcactgcagtgatgaaataaataaattcctggaatcttg

SEQ ID NO: 934326 - DNA, 87 bp, Artificial Sequence
  ENSG00000267388_0 (sequence is synthesized)
acccagagagtcatcctggagatgggtctttttgttatcctcatttcatagagaagacagttgaaggtttaagccatgaaatcactg

SEQ ID NO: 934327 - DNA, 120 bp, Artificial Sequence
  ENSG00000267388_1 (sequence is synthesized)
atagagaagacagttgaaggtttaagccatgaaatcactgcccaaggccacatgctgaacagatgtcagctttgaaccccaagcctgcttgggctgctgggaaacaggcatgttgtctca

SEQ ID NO: 934328 - DNA, 120 bp, Artificial Sequence
  ENSG00000267388_2 (sequence is synthesized)
gagggcaccgcgctcggcgaagactcagcgagactggacgctgaccatggttctgaacacactgtgctgcgggacctgggcttttcctgtaaccctgaaatcccattcaacctcttacgg

SEQ ID NO: 934329 - DNA, 120 bp, Artificial Sequence
  ENSG00000267388_3 (sequence is synthesized)
tcctgagaaacaacggaagaccagggagatgagagaaaagtgagggaatgctgagagagagaggctgggtttcttagaaatgaagacaaggacttcaattcatttatttataacagctca

SEQ ID NO: 934330 - DNA, 120 bp, Artificial Sequence
  ENSG00000267388_4 (sequence is synthesized)
gagctggactctggagccaagagtcctggatgcaaatcctgctccaagctgtgtgattctgcataagtcaattcatttctctgactatctacttcccctctattaaaggtggataatagt

SEQ ID NO: 934331 - DNA, 120 bp, Artificial Sequence
  ENSG00000262231_0 (sequence is synthesized)
cagtgcagttaagtgacttgccttagtgcacacccccagaaagtgacagcaccagcatttgaaccctgacacaagcatctccaaaactgcattcttcccactgtgccacagttaagatga

SEQ ID NO: 934332 - DNA, 120 bp, Artificial Sequence
  ENSG00000262231_1 (sequence is synthesized)
gtccaccagccctgtttaggtgagttctggccctccctgtgtgtccccacatgcagccaactgcatccaacctgtccatgccaggtcctgtcctgagaacagtgggcagtgctgggcttg

SEQ ID NO: 934333 - DNA, 120 bp, Artificial Sequence
  ENSG00000262231_2 (sequence is synthesized)
gagcccagtggaggctcagactgatttcacctggcatttcctcaagactttggtgtttgaactgcgttttgaaggcaaagaagtcagatagacaaatgaaagagagggaaaaggcactcc

SEQ ID NO: 934334 - DNA, 120 bp, Artificial Sequence
  ENSG00000262231_3 (sequence is synthesized)
tgaaagagagggaaaaggcactccaggtagcaggaacagcatgtgcagaatcaaagaggcatgaagaaaacttaaaatgtagtcttccaagtcatgtaccctagaacttaaagtataata

SEQ ID NO: 934335 - DNA, 120 bp, Artificial Sequence
  ENSG00000262231_4 (sequence is synthesized)
aatctggctcttctgccatctgccatgagaggaatggagtgggtaaccactggtcccaggagaatgagatccttgaaacagcccaacccacagcctggagcccagcccatgagagccacg

SEQ ID NO: 934336 - DNA, 120 bp, Artificial Sequence
  ENSG00000262231_5 (sequence is synthesized)
gctgtcagtgggaagtaagtgcttgttgccatctcctcagtctgcagacagtgtgtgttgcatagcattattgccacaatagctgactaatggactgtgggacccttggctagttactta

SEQ ID NO: 934337 - DNA, 120 bp, Artificial Sequence
  ENSG00000262231_6 (sequence is synthesized)
tgttcatctctgtgagatgcagtttcctcatctataaaaaaatgagcaataaccctttaccttgaagccctagtgtgatggtttaatgggctatgacataagtaaagcacatggcctggt

SEQ ID NO: 934338 - DNA, 120 bp, Artificial Sequence
  ENSG00000267038_0 (sequence is synthesized)
cctttggtcctaatatcagcgccaacgtggattcacagccaaaaggagttcatgatgcatctcccatggaaagagcttatacctcaaacccacaaggctcccctctacattcaccacatg

SEQ ID NO: 934339 - DNA, 120 bp, Artificial Sequence
  ENSG00000267038_1 (sequence is synthesized)
ccaagacaacgaagcttaaaaaaaggcaataatgttggaaaaagacatgaatatggtctgtattaaattgattctactttttatttagtcatgactctggactaactttcaaaaagtaaa

SEQ ID NO: 934340 - DNA, 120 bp, Artificial Sequence
  ENSG00000267039_0 (sequence is synthesized)
atgtaggtaaatgataacttaaaatgtggcaaatgtaacaggagcttctgcttccacccaagatgaataaattgggacaagaattgtcctcatgctataaacaactagaaaaatgaaaaa

SEQ ID NO: 934341 - DNA, 120 bp, Artificial Sequence
  ENSG00000267039_1 (sequence is synthesized)
aaaatgtatgaaacaacagttccagatgttggagaaaggacagaggaggatatgctgccagagaaaagtctccacagtaaacctgctggaatgaatactattatttactcctcattttgc

SEQ ID NO: 934342 - DNA, 120 bp, Artificial Sequence
  ENSG00000267039_2 (sequence is synthesized)
tttcttcagctttgtggcaaactgcccctaccaccacccctccagcaaaaaaaaattgttggtgaagaacgcaatcacaaatagctttataaagagatgaaaatattgcctcacttctaa

SEQ ID NO: 934343 - DNA, 120 bp, Artificial Sequence
  ENSG00000267039_3 (sequence is synthesized)
gtgaggctggattttcagaatttttttttttgcaactttcatatgatgtccggtctggcaacacatgtggcaaaaatgaaggctacatttttccctagatagaagagcacatccaatgtt

SEQ ID NO: 934344 - DNA, 120 bp, Artificial Sequence
  ENSG00000267039_4 (sequence is synthesized)
tccaacatgatagttcagaagattcaacaactgtgaaaagtgctaatctcagaccattttaagagattatagagaaaaaaatgaaaaatctggaataaaaataaacagctatgaaactcc

SEQ ID NO: 934345 - DNA, 120 bp, Artificial Sequence
  ENSG00000225488_0 (sequence is synthesized)
catagcagcttcccaaagcaggcggctccctgggctggaggaggcgcgatgcccagaaagaacccaggtgcaggtgggagagggaacccagcctagcagcgggaagtggggtgaggacca

SEQ ID NO: 934346 - DNA, 120 bp, Artificial Sequence
  ENSG00000225488_1 (sequence is synthesized)
cactcgtccgagttggacaagggcgaggtgcacttcgcggcgtcatgccctcctcactgcccagcctggacctgcccctcctgtccccctcccgactcacttcccatggcaaggaggtgc

SEQ ID NO: 934347 - DNA, 120 bp, Artificial Sequence
  ENSG00000225488_2 (sequence is synthesized)
ctgcgatcagtagccagcatcgctgtggaagcggcgaggtccacactgccctgcccaaccctcctgggctgccctcctcctcgcatgtcgcctgctgggattccagtccagctgccttgc

SEQ ID NO: 934348 - DNA, 120 bp, Artificial Sequence
  ENSG00000225488_3 (sequence is synthesized)
caccaacgggctgagaaccgttaagagctaccgtttccagcgtgcctggccaggcgcgcgccgcttcgctcctccccccgagaacttcaccaggctcccgagcctggggcatgctaggat

SEQ ID NO: 934349 - DNA, 120 bp, Artificial Sequence
  ENSG00000225488_4 (sequence is synthesized)
tgtagtcccgaagctcttgaaagggcgggagcggtgaagagactacatacagctcccagcatgcacagcaaggccggcacaaccggacttcgccttcaggactgcgcgccgcctcctgtt

SEQ ID NO: 934350 - DNA, 120 bp, Artificial Sequence
  ENSG00000225488_5 (sequence is synthesized)
catgctggctgggattgtaatccattcgcccagtgatgaaaaaactggaagctaatcaaagacgacaactcccagtatgccaggcttagctcccgcccaccaatccacacctccctgtgt

SEQ ID NO: 934351 - DNA, 120 bp, Artificial Sequence
  ENSG00000225488_6 (sequence is synthesized)
ccagagcagttctgccatgccaaggagagcctggttgttcccaaacctctcctgcctgccaggcgacagcgggaccagggtggctgatcgtatcttgtaattatgtcactacctccccct

SEQ ID NO: 934352 - DNA, 120 bp, Artificial Sequence
  ENSG00000225488_7 (sequence is synthesized)
aagatgctggcttcatgcttcgtcagtgccagaagtttgattcctcacggagcagcaggagacagggagctgctcacaaacctgtcaaggttcccatagtaacgctcctcctcctggagc

SEQ ID NO: 934353 - DNA, 120 bp, Artificial Sequence
  ENSG00000225488_8 (sequence is synthesized)
ccacccctgacacgccccttcggacatgcgcagtgtagcccctgcgtaggaatgtggttaacggccagatgtctgacagttctccgacttctgggcattccacgtaggacgctttctcat

SEQ ID NO: 934354 - DNA, 120 bp, Artificial Sequence
  ENSG00000225488_9 (sequence is synthesized)
gagtgtctgaaaccgtcagttcactgccagaaatggagatacatgtttcctgataaactggcacttgccttttcaaagccaccatttcctctatcctctgggctgtcacaaatcctcctc

SEQ ID NO: 934355 - DNA, 120 bp, Artificial Sequence
  ENSG00000225488_10 (sequence is synthesized)
tgcacctcaggagtgccccttggagccacgttcaccacttctctgcccctgacccaggctggttcccaggccttggggtcctagcgtggacctcctggaagtaattaatgcagttttcca

SEQ ID NO: 934356 - DNA, 120 bp, Artificial Sequence
  ENSG00000225488_11 (sequence is synthesized)
gattaactcgaagtaccccacgactaaacgctaatgaaactagaggaggcacagcttcagctccgtgcaggatggatgcacaagagcagaatctccatgggacgcctttctggagcatca

SEQ ID NO: 934357 - DNA, 120 bp, Artificial Sequence
  ENSG00000225488_12 (sequence is synthesized)
gtattactgcaggatttggaagaaacaaattcaaataatttccaaagtaagacactggaaatttaagaggaagctggaaactcatctgcctttaatacttttttttctccaagaaaaaaa

SEQ ID NO: 934358 - DNA, 120 bp, Artificial Sequence
  ENSG00000225488_13 (sequence is synthesized)
aagaaactctaaggagaacctatttttcactcttctaagtagttaaaattagaaatcacagcaagtcaatagaaagctctgccttgccagtctcctaaatcacaatatggccttggtcaa

SEQ ID NO: 934359 - DNA, 120 bp, Artificial Sequence
  ENSG00000225488_14 (sequence is synthesized)
agcaacctatatgtcatcatacaaactacaggctacgatgagcacctcattttctttctggaaggctgaccttaaatgtcctgcacattcctatagtgcatatttacccttttcctatac

SEQ ID NO: 934360 - DNA, 120 bp, Artificial Sequence
  ENSG00000225488_15 (sequence is synthesized)
taagtaagccctaaatcttggcagtaacagcctggggaactacctgtcttgctaccactcaagaccatgcttctgtccacaaattccccccaataaattaccctttactgacaaactgga

SEQ ID NO: 934361 - DNA, 120 bp, Artificial Sequence
  ENSG00000225488_16 (sequence is synthesized)
caatttttggaagtttttagctattagttggtgatttactttgtacctcatttaatttttctgtcccctctccaacttggactcaatcactctacaggtctctaagactcttcattttct

SEQ ID NO: 934362 - DNA, 120 bp, Artificial Sequence
  ENSG00000225488_17 (sequence is synthesized)
ttaagctttttctctcttttattcagaatgggcaatttctattgctctgtcttctgtttctaatctttgaataagctcaaaagtatttcttttaatttccttatcttcctattgtttcat

SEQ ID NO: 934363 - DNA, 120 bp, Artificial Sequence
  ENSG00000225488_18 (sequence is synthesized)
aatttccatttctttgcttaggttccacatctcttaaaatattttcctttacccccatgaacagatttataatagctgcctttaaacatcctgaattagaacaccttgaatatcttagga

SEQ ID NO: 934364 - DNA, 120 bp, Artificial Sequence
  ENSG00000225488_19 (sequence is synthesized)
tcacttctactgcctgctttttaaattgtgtatggatctcattttcgtgtttcctcacacgtctcatgaattttaaagttgtgtactaaaactgtaaagaatcattatagagactctcaa

SEQ ID NO: 934365 - DNA, 120 bp, Artificial Sequence
  ENSG00000225488_20 (sequence is synthesized)
gtagtgaggtcacgaacagtgtctgtgtttctgctgtaaatagggctttcttggtaacacttaatttccctttttaaatattcctttggaaccacgtttagtaatttgctggtggaactt

SEQ ID NO: 934366 - DNA, 120 bp, Artificial Sequence
  ENSG00000225488_21 (sequence is synthesized)
aacagtgataattctttgaatccatttttctttttcgttttttgagatggagtctctctctgtagcccaggttgtagtgcggtgactgaatccaggctcactgcaacctccgcctcccgt

SEQ ID NO: 934367 - DNA, 68 bp, Artificial Sequence
  ENSG00000225488_22 (sequence is synthesized)
aggcctgaatccatgttaacatttagttttccagattaactcgaagtaccccacgactaaacgctaat

SEQ ID NO: 934368 - DNA, 120 bp, Artificial Sequence
  ENSG00000225484_0 (sequence is synthesized)
tttctttctttcttttttttttctgtagcaaccatctttcctgtgaaaaattccctctcgtactttagttctgtggatccaaaatttatagcattcttctaccaccacaggggctcatat

SEQ ID NO: 934369 - DNA, 120 bp, Artificial Sequence
  ENSG00000225484_1 (sequence is synthesized)
tagcattcttctaccaccacaggggctcatatgacattaacagacaagacacttttcagaaagacaggtaagtcatttgttaaaatctcactactgttgtttaacagaaacatatatatg

SEQ ID NO: 934370 - DNA, 120 bp, Artificial Sequence
  ENSG00000225484_2 (sequence is synthesized)
catgtatatgtgtgtactgtatggaaaaagtggaattagagtttatctagaaaagaaaaaattacctcatctaagtgcagaaatgaataatacttaaaccataccatacaattctctatc

SEQ ID NO: 934371 - DNA, 120 bp, Artificial Sequence
  ENSG00000225484_3 (sequence is synthesized)
tattgtactttcacagaaggtgtttgatacttaatactgtgtttattaagaaaaatctttgcaatggttatggaattaaaatttcatgtaaaaatgattatgtagatcaagaaaagttgc

SEQ ID NO: 934372 - DNA, 120 bp, Artificial Sequence
  ENSG00000225484_4 (sequence is synthesized)
ttgcaattttctggattcctgatattttaaataaaagtagtttccaaaggtgatttttttattattttaatttttaatggaaattttcacaatataaccatcctacataattttattttt

SEQ ID NO: 934373 - DNA, 120 bp, Artificial Sequence
  ENSG00000225484_5 (sequence is synthesized)
ctgcacactccaaaatttttaaagaaaaaggagagagagaaaaaaaagtaaaagaaaagaaacccaaaagggaaaatatagctaaggtgaactgcaaaaccatattcctgctgctgtcag

SEQ ID NO: 934374 - DNA, 120 bp, Artificial Sequence
  ENSG00000225484_6 (sequence is synthesized)
ttatgatgcactgagaaaacttcagagacctaaactttttccagagaagagaagctttactggtgttccagccctaagaaacctttgttcaagaaaacggcagatgctctgttgaatcca

SEQ ID NO: 934375 - DNA, 120 bp, Artificial Sequence
  ENSG00000225484_7 (sequence is synthesized)
ttgaggtaaatttgatagtacattttgatagtacgggaggcgatacggcatggtgacagaaaagcgccggcttggttagcaggaccacctggcagggctgcaggctgtgccacttaccag

SEQ ID NO: 934376 - DNA, 120 bp, Artificial Sequence
  ENSG00000225484_8 (sequence is synthesized)
gcaggggaccttgggccagctgcttggcctcactcaccctgtttctcagctgcaattgggatgaacagactgcctgcttcggggttgcctaaaactcacattggttaatgatgtgaaatg

SEQ ID NO: 934377 - DNA, 120 bp, Artificial Sequence
  ENSG00000225484_9 (sequence is synthesized)
cttagcgcagtgcctggcatagagagaattctcattagatgatacctcagctgggctttaggagctacagaagaagctgcatctccatgagctcagcgtgtttctagctttcctttttgt

SEQ ID NO: 934378 - DNA, 120 bp, Artificial Sequence
  ENSG00000225484_10 (sequence is synthesized)
tttctattcaacctttcacccaactcagcttctcaatccctaaatgacaaaggtttgggaaggaagacttggaccgaggcttgcatttgtttctgagaattaaacgttatgttttcttca

SEQ ID NO: 934379 - DNA, 120 bp, Artificial Sequence
  ENSG00000225484_11 (sequence is synthesized)
gtgttggaccttccggagcttctcagaagacagagggttttcttttgagaaaaagtacttcaactcggccgggcacggtggctcacgcctgcacgcctgtaatctcagcactttgggaag

SEQ ID NO: 934380 - DNA, 62 bp, Artificial Sequence
  ENSG00000225484_12 (sequence is synthesized)
gaaaaaaaaaagtactctaactcattttcatttttgtaggacttgaattttttagggcagtt

SEQ ID NO: 934381 - DNA, 120 bp, Artificial Sequence
  ENSG00000225484_13 (sequence is synthesized)
cattttcatttttgtaggacttgaattttttagggcagtttcagtttcacagaaaaattaagaggaagacgtagagatttaccatatatatgtagtaatatatattatatatggtaatat

SEQ ID NO: 934382 - DNA, 120 bp, Artificial Sequence
  ENSG00000225484_14 (sequence is synthesized)
ggtaatataccatatattactatatatatatatataacaagcatgtggaggcagggtatattatatatatacacacacacacaccctgacataatatatatatatatatacacacacaca

SEQ ID NO: 934383 - DNA, 120 bp, Artificial Sequence
  ENSG00000225484_15 (sequence is synthesized)
gacataatgtgtatatacaatataatatatattatatattatattatgtatgtaatatatcctgcctccacatgcatggcctccttcattatcaatatcttcctccagagtggtacaact

SEQ ID NO: 934384 - DNA, 120 bp, Artificial Sequence
  ENSG00000225484_16 (sequence is synthesized)
gttaaaattgcctctacgttaatacaattttattacccagtggtaaatatacataacataaaaggtaccatttaatcattttcaattctaaaactcagtgatattgaatacattcacaat

SEQ ID NO: 934385 - DNA, 120 bp, Artificial Sequence
  ENSG00000225484_17 (sequence is synthesized)
cactaattctccattccctttgccccagcctccatgccctggaaacatgcaatctgcattccctctacattaatttgactattcatgatctttcatgtaagtagaatcatatactgtttg

SEQ ID NO: 934386 - DNA, 120 bp, Artificial Sequence
  ENSG00000225484_18 (sequence is synthesized)
tccttttgtgtctggcttattttgtttagcataatgttttcaaggtttatccatgttgtaaacatgtatcagaacatcattccctttttatggctaaataatcttcccttgtatgtacat

SEQ ID NO: 934387 - DNA, 120 bp, Artificial Sequence
  ENSG00000225484_19 (sequence is synthesized)
gccacattttgtttatctacacatacaggtttgttttcactttttgactcttgtgaataagaatgagtgatagtatctggtgtgtgcatacagccattttcttactaaaggccaatagca

SEQ ID NO: 934388 - DNA, 120 bp, Artificial Sequence
  ENSG00000225484_20 (sequence is synthesized)
tcaagcagtctactaatggttgttatttatctgattaggatccagagttccaaaaaggttaattctttttttttccagtttaatggcagtttttgtggagggattgacttctataactcc

SEQ ID NO: 934389 - DNA, 120 bp, Artificial Sequence
  ENSG00000225484_21 (sequence is synthesized)
ctattccaatcttctaaaatccactttaaaagaatggtttaaattgtgtgcttgtaggatgaaattgataaacaattattttaccaactttcaaaattacatcatagagataatgtcctt

SEQ ID NO: 934390 - DNA, 120 bp, Artificial Sequence
  ENSG00000225484_22 (sequence is synthesized)
tgactattgggtgttcacatatttggcatgttatgaacaactttctggaagataaaggccttttatctcatacttaatattaagacaggaaccagtgtgctagcaatggcttttgggttt

SEQ ID NO: 934391 - DNA, 120 bp, Artificial Sequence
  ENSG00000225484_23 (sequence is synthesized)
gatgtgatatatttgtatgtaatgattttttaaaacttagagagaaaaatcctctcatacaaaacaaaatagtttttactgttatgagaaagtagttattaattacttataaaacatgca

SEQ ID NO: 934392 - DNA, 120 bp, Artificial Sequence
  ENSG00000225484_24 (sequence is synthesized)
agtatctttatgatatttggtgatttatttttctccagccatcttgtcttgttgttagtggggaaaaaaatagggatgctctttatctatgaaaatgtgaaaagtatatacacattttaa

SEQ ID NO: 934393 - DNA, 120 bp, Artificial Sequence
  ENSG00000225484_25 (sequence is synthesized)
gcaacgtgttggaccttccggagcttctcagaagacagagggttttcttttgagatccctcccgtagctgtcatacagagtgcgatttatgacttgtaagttgtgctatggagcttgaca

SEQ ID NO: 934394 - DNA, 120 bp, Artificial Sequence
  ENSG00000225484_26 (sequence is synthesized)
attcttcctccattacctcactgcctccggtggctgctgggataccggaggactcgggtcccggctcgactcagtcctccagccgcccggggaatacctctagttcttcccggccgccgc

SEQ ID NO: 934395 - DNA, 120 bp, Artificial Sequence
  ENSG00000225484_27 (sequence is synthesized)
ccgcttcctcctccgcctgccggcctccttcgccccgtcccgtccgcgcagcgcgtccggcccgcccgcaggccagcttctctcgggagcccccacccaggcgcatggctccatgaagca

SEQ ID NO: 934396 - DNA, 120 bp, Artificial Sequence
  ENSG00000225484_28 (sequence is synthesized)
gaccttccggagcttctcagaagacagagggttttcttttgaggatttaaacctcagacacagggagctgacctattcaccttagaatcctctggggcacccattacagtgtctgtacca

SEQ ID NO: 934397 - DNA, 120 bp, Artificial Sequence
  ENSG00000225484_29 (sequence is synthesized)
aggaggcaacaaagaacggcggaacagactggagcagaaggaccacccagcagagccaagccaaatcactgaccctcagaggcctgatgtgaatgcttatggcttcagtccattggattc

SEQ ID NO: 934398 - DNA, 120 bp, Artificial Sequence
  ENSG00000225484_30 (sequence is synthesized)
tgcagtaatctgccgatctacagtattaccacagtaaataaccgatagacctgaaaacgaatgcatgccttgtgccaaaattgcaggaaacctcaccaggagaaacaattttatatgagg

SEQ ID NO: 934399 - DNA, 120 bp, Artificial Sequence
  ENSG00000225484_31 (sequence is synthesized)
gaatgtactctctcctttgcattttccctcaaatctatatttttagcccctcacttgtctctacagagcctcagttgcttaatctaattgctgactgaacatctccaggaaactgtgtgt

SEQ ID NO: 934400 - DNA, 120 bp, Artificial Sequence
  ENSG00000225484_32 (sequence is synthesized)
acgtgtttgtattcatagtatatttatttattatctgtttacttccatgggatatagtctccataagagagtagtcatcattgtatttgttgatgcttaataaataatcattgaatgggc

SEQ ID NO: 934401 - DNA, 120 bp, Artificial Sequence
  ENSG00000225484_33 (sequence is synthesized)
ttccctcatctaattgcttatctacatacaatgcctggaaggaaataaatgtaatggcccgtagcaactggccttcaggtatcaagtttaagtccctttaagcagaacagcaaattgagc

SEQ ID NO: 934402 - DNA, 120 bp, Artificial Sequence
  ENSG00000225484_34 (sequence is synthesized)
acagaatgaactggtttcatggtagcgtactgcaattagatgcaagaatagggaaagcagggtgcttcaagtggtgacacaattagtatagcactgagggacttctctttccacttcttc

SEQ ID NO: 934403 - DNA, 120 bp, Artificial Sequence
  ENSG00000225484_35 (sequence is synthesized)
aactccgcctgcattccgctggctgaagagttgatgacatccctgaaaaatcttccctctcttgtttctctgatgccacctctgtgttctccgcctcactggccacacttcctttacctc

SEQ ID NO: 934404 - DNA, 120 bp, Artificial Sequence
  ENSG00000225484_36 (sequence is synthesized)
ccaaacttttaactctgagtgtcccaaacttgtctcatcacctacccctgctgcccagctccccagcctgttccccttctgacacgggcactctccttctgctctcttgggagagaaaca

SEQ ID NO: 934405 - DNA, 120 bp, Artificial Sequence
  ENSG00000225484_37 (sequence is synthesized)
atgaaggcctatttggcacttttatttctattcaaggaaccagactgtgaacaagtttaccatttagtcctttggactgtgtcttgaattcatccctcttctccattctcaccagcacca

SEQ ID NO: 934406 - DNA, 120 bp, Artificial Sequence
  ENSG00000225484_38 (sequence is synthesized)
tcatcatgatggctaatatttcctgagcacctttcattcaggcatgatgccaggtgcaccaacttacttaatcctcatagccaccacctgagcaagctcctgttttataaatggaccagt

SEQ ID NO: 934407 - DNA, 120 bp, Artificial Sequence
  ENSG00000225484_39 (sequence is synthesized)
tcttgttgctgttgtacaagttattttctttctataacgtcctccttgtcctccttccacattcttaaagaaactttcccttcctttaaagtactcagggagccctgcattgcttcttga

SEQ ID NO: 934408 - DNA, 120 bp, Artificial Sequence
  ENSG00000225484_40 (sequence is synthesized)
atcatctcacagtggtctctcttttcactaaatgtccaatatgctgcacataagtaccccaaagttagcacagaattgttccatggctgtcatatatgttaaaaatcattaaaagttcat

SEQ ID NO: 934409 - DNA, 120 bp, Artificial Sequence
  ENSG00000225484_41 (sequence is synthesized)
tttttctcccattatgggaaggatacatgctcctactagtaaatttagttggtagaaaaaaattatcactatctagactgctttccctttagtctttatgcatagctttctgtctgccta

SEQ ID NO: 934410 - DNA, 120 bp, Artificial Sequence
  ENSG00000225484_42 (sequence is synthesized)
tttttactttgtgtttgtaacttactattataaaatatgcatctctatgttcattgtcaacattatttacaataacatggagtggatttacatgtattctctatatttggattaaaggag

SEQ ID NO: 934411 - DNA, 120 bp, Artificial Sequence
  ENSG00000225484_43 (sequence is synthesized)
atagagtatgtgaaattaaatgggagaagtatctgatacataacaggcaatacaaatattatcacatagcgtcaatttatttgtgaatattgaaagctccaaaaaagaaaaaaagttttt

SEQ ID NO: 934412 - DNA, 120 bp, Artificial Sequence
  ENSG00000225484_44 (sequence is synthesized)
ttttaattcccgtaattacttattgcagtattgtgttcatacaaactgctcagtcattttggagaaataacaatttttttcctcatcatgaagtaaggtatgctcactgcaaaaaaaatc

SEQ ID NO: 934413 - DNA, 120 bp, Artificial Sequence
  ENSG00000225484_45 (sequence is synthesized)
cactgcaaaaaaaatctagaaaataaagaggaacatgctaaagaaaagaatactcccatataatctctgtcttcataaataatcttttgtaacgcttatacactgctggtgggaatgtaa

SEQ ID NO: 934414 - DNA, 120 bp, Artificial Sequence
  ENSG00000225484_46 (sequence is synthesized)
tgaaaagtagcgtagcaattccttgaaaaacttaaaatagaattaccgttcaacccagcaatcccattattgggcatatacccagtggaatgtaaatcatcctgccataaaaacacatgc

SEQ ID NO: 934415 - DNA, 120 bp, Artificial Sequence
  ENSG00000225484_47 (sequence is synthesized)
caatagcaaagacatggaatcaacctatatgcccatcaatagtagactgaataaagaaaatatggtacatattcaccacagaatactaagcagccataaaaaagaaaaagatcatgtcct

SEQ ID NO: 934416 - DNA, 120 bp, Artificial Sequence
  ENSG00000225484_48 (sequence is synthesized)
gccataaaaaagaaaaagatcatgtcctttgcagcaatatggatggagctagaggccattatcctaagcaaactaatgcagaaacagaaaaccagatactgcatgctctcacttataagt

SEQ ID NO: 934417 - DNA, 120 bp, Artificial Sequence
  ENSG00000225484_49 (sequence is synthesized)
gggagatacaccatgagaacacatgaacacaaaaagcggaaaaagagacaccatggcctacttgagggtggaggctgggaggagggagagaatcaaaaaacttcctatggagtactatgc

SEQ ID NO: 934418 - DNA, 120 bp, Artificial Sequence
  ENSG00000225484_50 (sequence is synthesized)
ttattacctgcgtgatgaaataatcactttgaacattgtcagtacattatcttctaatctagactcttttctatgttctatatgcacacagaaatacacatgcaaagctgaacacatatg

SEQ ID NO: 934419 - DNA, 120 bp, Artificial Sequence
  ENSG00000225484_51 (sequence is synthesized)
tgaaacaaaattcagacactcaaattttccgccaatacatgataaaatcttgcacaatagcttcctccacagaggaaaatgtctttactacatcttaaaaatggggtaaatgaatagtta

SEQ ID NO: 934420 - DNA, 120 bp, Artificial Sequence
  ENSG00000225484_52 (sequence is synthesized)
ggctcttcagtgtaataatcatggtaaatattctcaatgtgcgaaaatacaaacaaaagactttctctcccagcaaatttagacccacatgaaaatttaagcacaatcattttaaacgaa

SEQ ID NO: 934421 - DNA, 120 bp, Artificial Sequence
  ENSG00000225484_53 (sequence is synthesized)
tttaccctggagcttagtggttcgagctcaaggttgaggagcagtctggggacatcagctcttaatatttttcaagttttggagcaagtggtttctaggttctgagtgaagtgaaacaga

SEQ ID NO: 934422 - DNA, 120 bp, Artificial Sequence
  ENSG00000225484_54 (sequence is synthesized)
atctctaggggcatgtggtaaagataatcccatactatgtactgcgtagagttaaagagaagaggcgagagcatgaagataaaccagtacaatcagtcgttcacataccactaactacaa

SEQ ID NO: 934423 - DNA, 120 bp, Artificial Sequence
  ENSG00000225484_55 (sequence is synthesized)
tgatactcccgtttgcttcctgtgaagtagttactaataatcactgatgtcgctttttaatttcatacatcctttaactatcttcatataggtattgaaagagtcaacataaaagccaca

SEQ ID NO: 934424 - DNA, 120 bp, Artificial Sequence
  ENSG00000225484_56 (sequence is synthesized)
tccattttctaattttgaacaatagttagagaaacctaatatcttctcatatttttgtcttgcttctgtctcatgagttcccaaaatagatatattatctgaatgaagagttcatgggca

SEQ ID NO: 934425 - DNA, 120 bp, Artificial Sequence
  ENSG00000225484_57 (sequence is synthesized)
cagagaagagaagctttactggtgttccagccctaagcattgacttcactaatggatgtgacctggttggcagcagtagcttgcacaacatgcttgtttgcaaaacctttgttcaagaaa

SEQ ID NO: 934426 - DNA, 120 bp, Artificial Sequence
  ENSG00000225484_58 (sequence is synthesized)
gttgtacagtggcctgattatagctcactgtagcctcgaaattctgggctgaaatgatcctcctgcctcagcctccaaagtagctgagactagaggctggtcttgaactcttgggctgaa

SEQ ID NO: 934427 - DNA, 120 bp, Artificial Sequence
  ENSG00000225484_59 (sequence is synthesized)
cacctctttcttgtttcctctctcaccatgtgatctccacacacattggcttgccttccctttctgacatgagcggaagcagcctgaggccctcaccagatgtggatgccagtgccatgc

SEQ ID NO: 934428 - DNA, 120 bp, Artificial Sequence
  ENSG00000225484_60 (sequence is synthesized)
ttcttgtacaatctgcagaatcataagctaaatacacctcttttctttataaattacccagccttgggtattcctttatagcaacacaaacggagaaagacatatgcaatttgccatttt

SEQ ID NO: 934429 - DNA, 120 bp, Artificial Sequence
  ENSG00000225484_61 (sequence is synthesized)
aatcatttttaactgtacaatttggtggtattaattatatttacaatgttgtgcaaccgttaccaccatctattaccaaagccctttcatcaccccaaatagaaactgtgcttattcagc

SEQ ID NO: 934430 - DNA, 120 bp, Artificial Sequence
  ENSG00000225484_62 (sequence is synthesized)
aaaaactcccattttcctctccttccagcccctggtaacctctggtaacctctaatctacttcctgtctctatgaatttgcctattgtaaatatttcacataatggtatcatacactatc

SEQ ID NO: 934431 - DNA, 79 bp, Artificial Sequence
  ENSG00000225484_63 (sequence is synthesized)
cttttgtgtctcttatagcatgtatcagtattccattcttcttttctatggctgaataataattgtatgtatatactgc

SEQ ID NO: 934432 - DNA, 120 bp, Artificial Sequence
  ENSG00000225484_64 (sequence is synthesized)
cctcttaccctcgtttctcacctttcaccctgtccctcggcccgcttttcccctccccgctctgtcctgtcgttttcttaacactcttcacacgcgcacttcctcctcctcctcttctct

SEQ ID NO: 934433 - DNA, 120 bp, Artificial Sequence
  ENSG00000225484_65 (sequence is synthesized)
ttttcccacccctacctttgggccctccttccttaacctccgctggccccccattccatgatccgtccacctgacacgctgggtttcatgcctctctttcccaggctgtgggttgtgccc

SEQ ID NO: 934434 - DNA, 120 bp, Artificial Sequence
  ENSG00000225484_66 (sequence is synthesized)
agaagagaagctttactggtgttccagccctaagaaacttaaatcctcagtgtgacacaactcagtccttctactgcagcagctcttttataaaagcctcccaaagctccaagaaggaac

SEQ ID NO: 934435 - DNA, 120 bp, Artificial Sequence
  ENSG00000225484_67 (sequence is synthesized)
tgagatactatttcaacaaattagcccagttttgatttggatggcaagactcaaagacaacaacaacaataaaatcacaacttgatttaaaagttaaattcaataaactgtagaagcagc

SEQ ID NO: 934436 - DNA, 120 bp, Artificial Sequence
  ENSG00000225484_68 (sequence is synthesized)
catatgacattaacagacaagacacttttcagaaagacaggttgttcttttgggccacatctaagaaatctttgtctagccaaaagccacaaataatttctcattttttggcttctggaa

SEQ ID NO: 934437 - DNA, 120 bp, Artificial Sequence
  ENSG00000225484_69 (sequence is synthesized)
gatgtacagttaaatgttatatttgggactgttatctaatttgattaaattgcactctacaatatgatatttgaattgatgaaaaattagtaaatgttaatattttttaaagtagccaaa

SEQ ID NO: 934438 - DNA, 120 bp, Artificial Sequence
  ENSG00000225484_70 (sequence is synthesized)
tcttgcaatttatatataatagagaagactagaaaatcccccatatttatttcctcttacttcgtactactaaaatttgtatttaggcatttggtttctcagataaacattacattcccc

SEQ ID NO: 934439 - DNA, 120 bp, Artificial Sequence
  ENSG00000225484_71 (sequence is synthesized)
gcaggcgtgagccaccacgcccggccgagttaaagtactttttctggaacaaagaaacttagcataaatagttaaaatagtaagagttgtaattaagggaaatttcagctcaatatgact

SEQ ID NO: 934440 - DNA, 120 bp, Artificial Sequence
  ENSG00000225484_72 (sequence is synthesized)
tcaacagtttaaaaaatgtattatttcacataagaccatggagagaggaattggaagccccagaattgattgggtcagaaattgaaaatgatactatcagtgacccaggtttgaatgtct

SEQ ID NO: 934441 - DNA, 120 bp, Artificial Sequence
  ENSG00000225484_73 (sequence is synthesized)
ctctccacagcattgacttcactaatggatgtgacctggttggcagcagtagcttgcacaacatgcttgtttgcagtgagtagtagagagaaggttttgctttcccagaaactctgaaaa

SEQ ID NO: 934442 - DNA, 120 bp, Artificial Sequence
  ENSG00000225484_74 (sequence is synthesized)
aggtcatcaaacctaaatttccttagccttcttcttccatgagcaaatcactagcagatgattgctagcaaggtgttactattacaatgaacccctaagtgtcagagaaagagttagttt

SEQ ID NO: 934443 - DNA, 120 bp, Artificial Sequence; identical to SEQ ID NO: 873520
  ENSG00000225484_75 (sequence is synthesized)

SEQ ID NO: 934444 - DNA, 120 bp, Artificial Sequence
  ENSG00000225484_76 (sequence is synthesized)
gcctttagttctacaagtgacatctcaaaggggagatgattcatcaatttcaaactttccctgaaagtaatactggatgaaaattaacttggcaaacataattaataatcatgggttatt

SEQ ID NO: 934445 - DNA, 120 bp, Artificial Sequence
  ENSG00000225484_77 (sequence is synthesized)
aattacttctgcaaggtgggtgtgctgattttaaaaggcttgaataaaacataaatttccttaatttatactgtaaatggagtaatttggtgatgtaaatggtaatatgtaagtgacttc

SEQ ID NO: 934446 - DNA, 120 bp, Artificial Sequence
  ENSG00000225484_78 (sequence is synthesized)
tgcttcagatcttacaacttaaaatatttttctaaaattagtttttgtaccatctctccagcatgttccagcctttatcagtcagtccaggcttctataacaaaatatcatggactgaat

SEQ ID NO: 934447 - DNA, 120 bp, Artificial Sequence
  ENSG00000225484_79 (sequence is synthesized)
tgcttacacaacagacatttctcacaattgtagaagctggaaagggcaagattaaggtgctagcaaatttgtttcctggtgagggtcctcttcccggcttgctgtatcctcacatagcag

SEQ ID NO: 934448 - DNA, 120 bp, Artificial Sequence
  ENSG00000225484_80 (sequence is synthesized)
atagagagagaaagagagagagagagagagcactctatagactctcttcctgttcttctaaggacactaattccattgatgagggccctacgctcatgactttgtctaaacctaattaat

SEQ ID NO: 934449 - DNA, 120 bp, Artificial Sequence
  ENSG00000225484_81 (sequence is synthesized)
tctcaaaggcctcacttcccaacactgtcacattgtggggtagggctttaacatatgaaatttgagggaaaaggaatgttcagtctagaacaaagccccatacatttcaaaaagctgtgg

SEQ ID NO: 934450 - DNA, 120 bp, Artificial Sequence
  ENSG00000225484_82 (sequence is synthesized)
gacaggagggaatggggatggtattcagtggtaccacatccaagcaagtcttgtatggttaaaacaaatcaatataataacatgaaattttacacagaaacctatctgattataaactgt

SEQ ID NO: 934451 - DNA, 120 bp, Artificial Sequence
  ENSG00000225484_83 (sequence is synthesized)
atgcttaccatagtcaacactgatgtacattgttttaaaaatacttaatagtgttctttgtttaaccaaataatagaggtattaactagtttcctagtgctgccaaaagaaattgctaca

SEQ ID NO: 934452 - DNA, 120 bp, Artificial Sequence
  ENSG00000225484_84 (sequence is synthesized)
aaatttgtggcttaaaatagtaaaaaaagaaaaaaaaaatctcaattatagaggccagaagaccaaaatcaaggtggaggcagagccatacatcctctgacggctctagggaagaatcct

SEQ ID NO: 934453 - DNA, 120 bp, Artificial Sequence
  ENSG00000225484_85 (sequence is synthesized)
tccttgcctcttctagattctgttggctcctggcactccttggcttgtgacagcataactctaacctttgtctctatcttcacatgaccttgcttgtgtttctgtgtcccaaatacccat

SEQ ID NO: 934454 - DNA, 120 bp, Artificial Sequence
  ENSG00000225484_86 (sequence is synthesized)
gactcactctaaattcaggatgatctcaccctgagatctttattatatctgtaaagctcctatttcaaaataaggtgatatttacaggtattggaatgggagagggtctaggactcagac

SEQ ID NO: 934455 - DNA, 120 bp, Artificial Sequence
  ENSG00000225484_87 (sequence is synthesized)
gcacccttatgaggatactacgtgacccattacaaggcacaaagtaattaccataggcaaaccactgatgagagctcactccagtttggaatatattcacgtttccatataagagaaaaa

SEQ ID NO: 934456 - DNA, 120 bp, Artificial Sequence
  ENSG00000225484_88 (sequence is synthesized)
cctggttcagttcatcttggcatcagtacacgggtgggattcagagacatgtaggtgtggaataccagattccaccaaacttaaaaagctggcatactaagttgataaaacgatgtagag

SEQ ID NO: 934457 - DNA, 120 bp, Artificial Sequence
  ENSG00000225484_89 (sequence is synthesized)
tgtgaagttgagttgagaatgcttatgccatacagtttatgtatcttataatagccttaatcacacttccagtaattttccccatcattgggtgctaaaaaataaaattaaagaattaga

SEQ ID NO: 934458 - DNA, 120 bp, Artificial Sequence
  ENSG00000225484_90 (sequence is synthesized)
ataaaaaatatatatacctctttgagtggaagaatgctgtcagcacattttgttattttattccattgtataaagtctccgtagtgctctcttcataaatgtattgaaggtttggctaaa

SEQ ID NO: 934459 - DNA, 120 bp, Artificial Sequence
  ENSG00000225484_91 (sequence is synthesized)
ttgtatcaaatttgtgattaaatacaaatgtgaatagtataaaacattacaaagggcaatctgaatactatgctataccaattttacaattttacagtgacttacagatgccataaatat

SEQ ID NO: 934460 - DNA, 120 bp, Artificial Sequence
  ENSG00000225484_92 (sequence is synthesized)
ttactttaagggagtaaaataagttataaagtcatatttaagaacacctaaatccttgaataaatttaaaatggtattattatttacgtatgaagtcagctgactattgaaagcttattt

SEQ ID NO: 934461 - DNA, 120 bp, Artificial Sequence
  ENSG00000225484_93 (sequence is synthesized)
ttcaataacagaaatatatgcattatctaaaacacatattccaatattttcaagaaacaaaatactgaattaaattatctgtatttaaatgtttattttgcttataaaggtccatgaaaa

SEQ ID NO: 934462 - DNA, 120 bp, Artificial Sequence
  ENSG00000225484_94 (sequence is synthesized)
tgcttaaaattggtttatttgatctaaaaagttaatatgcaatttttatttttaatgtatcatttttcccatgtattgttttctaaataacactttcatcctaagtagatcactgaagaa

SEQ ID NO: 934463 - DNA, 120 bp, Artificial Sequence
  ENSG00000225484_95 (sequence is synthesized)
acaaaatgctgttttctttatgaactcgtaatacatttcactaataattaggatgctgttcaaggtgttgaagtgtacaatataacaaattgcatttgcagttgaatagtagcagagtag

SEQ ID NO: 934464 - DNA, 120 bp, Artificial Sequence
  ENSG00000225484_96 (sequence is synthesized)
aagctgaaaaaataaatcatgtataaaagtagcttaaaacagatgatagcagagcaaagagtttcctgccaacgccctctaaaaatcggtccttttaggcttttgtgctggtattaggtt

SEQ ID NO: 934465 - DNA, 120 bp, Artificial Sequence
  ENSG00000225484_97 (sequence is synthesized)
tcagttatagacaagacatatatatatgtgacctttcctttccttttctataccctggagtcaaagtctcctataaaaggacatttgcagcaagtattttcagctggagtaggaggaaag

SEQ ID NO: 934466 - DNA, 120 bp, Artificial Sequence
  ENSG00000225484_98 (sequence is synthesized)
ggcaggagtaggagagcagtatgatcacctcttgccaatgcaatttcacttgatttgcaactggtgtttagtaaagaattttgctatgcaaaaatagtgtcttaattggattattgtaag

SEQ ID NO: 934467 - DNA, 120 bp, Artificial Sequence
  ENSG00000225484_99 (sequence is synthesized)
acaaagtatgcatttttcatgtcgtattagtattttattaataaggctagggaaacccactaaatccctatactaaagtgaatttgattctcccatagaaacttaaatcctcagtgtgac

SEQ ID NO: 934468 - DNA, 80 bp, Artificial Sequence
  ENSG00000225484_100 (sequence is synthesized)
tatccgtttatcttttgatagacattttggttgtttctaccttttgtctattgtgaataatgctgctatgaacattagtg

SEQ ID NO: 934469 - DNA, 120 bp, Artificial Sequence
  ENSG00000225484_101 (sequence is synthesized)
cttttgtctattgtgaataatgctgctatgaacattagtgtacaagtcactgattaagttgttgttttcaattctttggggtattgtattaggccattcttgcattgatataaagaaata

SEQ ID NO: 934470 - DNA, 120 bp, Artificial Sequence
  ENSG00000225484_102 (sequence is synthesized)
tgtattaggccattcttgcattgatataaagaaatacctgagactgggtaagtgccaaagaaaaaagggtttagttggctcacatttctgcagtctgtacaggaagcatagcagcatctg

SEQ ID NO: 934471 - DNA, 120 bp, Artificial Sequence
  ENSG00000225484_103 (sequence is synthesized)
ggaaggcaaagtgggtgcaggcatgtcacatggcaaaagccagagcaagagaggaagtggggaggtgctgcacacttttaaacaatcaaatcttgtgagaactcacaatcttgatgacag

SEQ ID NO: 934472 - DNA, 120 bp, Artificial Sequence; identical to SEQ ID NO: 880283
  ENSG00000225484_104 (sequence is synthesized)

SEQ ID NO: 934473 - DNA, 120 bp, Artificial Sequence
  ENSG00000225484_105 (sequence is synthesized)
cagtcaaactatatccggtatatacttaagagtagaattactgggtgataattctgttttacgttttgaggaattgccaaactatcttcctcagcagttaaaccatttacattcccacca

SEQ ID NO: 934474 - DNA, 120 bp, Artificial Sequence
  ENSG00000225484_106 (sequence is synthesized)
gaggtatactaggtttccaatttctccacatgttcaacaacactagttattttttcttctaattatagccattctagtaggtacaaagtggtatctcattgtggttttagcatcttttga

SEQ ID NO: 934475 - DNA, 120 bp, Artificial Sequence
  ENSG00000225484_107 (sequence is synthesized)
gttgcttattgaccatttacatgtcttttttttagagaagtgtctaagtcttttgtccattaaaaatttgagttatttatcttttatttgttgagttgtaggattctttatgcattcaat

SEQ ID NO: 934476 - DNA, 120 bp, Artificial Sequence
  ENSG00000225484_108 (sequence is synthesized)
tcttttgggtattgtattaggccattcttgcattgccataaagaaatgcctgagtatattagttttttgtcagatgtatgatttgcaaacattttctccaattttttgtgttatcttttc

SEQ ID NO: 934477 - DNA, 120 bp, Artificial Sequence
  ENSG00000225484_109 (sequence is synthesized)
actctctttatagtgtcacttgatacacaattttgatgaagtccaatttatcagttgtttcatcacttgtacttttgatgttatatttaagaaaccattgtcaaacccaaggtcatgaag

SEQ ID NO: 934478 - DNA, 120 bp, Artificial Sequence
  ENSG00000225484_110 (sequence is synthesized)
atttttcagtatgttttcctctaagagttttatagcatttaatatttaagtgttttatagcattaaattttggtctttgatccattttgagttaatgtttgtacattgtgtaaaagtata

SEQ ID NO: 934479 - DNA, 120 bp, Artificial Sequence
  ENSG00000225484_111 (sequence is synthesized)
ggtccaacttcattcttttgcttgtggatatctagtttccccaacaccatttgttgaagagattgtccttttccccattgagtgatcctggaacccttgctgaaaattaattacccatag

SEQ ID NO: 934480 - DNA, 120 bp, Artificial Sequence
  ENSG00000225484_112 (sequence is synthesized)
atgtgagtgttagttctggcctctcgattctattccattggtctatattgtctatctctgtgccaagtccatgctatttcaattattatagctatgtagtacattttaatatcagaaaat

SEQ ID NO: 934481 - DNA, 120 bp, Artificial Sequence
  ENSG00000225484_113 (sequence is synthesized)
gtgagtcctacaactttgttcctcttcagattattttggctattttgggttccttgaaattttatatgaattttagaataggtttttccgtttctgccaaaagcgctgttgggatcttat

SEQ ID NO: 934482 - DNA, 120 bp, Artificial Sequence
  ENSG00000225484_114 (sequence is synthesized)
tagcgtgattacattgactctacatatcattttgagtagcgttgtcgttttaacaatattaagtcttccaacttatgaacacaggatctctttccatttatttaagtctgctttaatttc

SEQ ID NO: 934483 - DNA, 120 bp, Artificial Sequence; identical to SEQ ID NO: 880293
  ENSG00000225484_115 (sequence is synthesized)

SEQ ID NO: 934484 - DNA, 120 bp, Artificial Sequence
  ENSG00000225484_116 (sequence is synthesized)
agattttttactgctagtgtgtagaaacacgactgatttttgtgtgttgattttgtattctgaagccttgctaaatttgtttattagctttaagaggctatttttggtattctttagggc

SEQ ID NO: 934485 - DNA, 120 bp, Artificial Sequence
  ENSG00000225484_117 (sequence is synthesized)
tttctacacttatatcacttgcaaatagagatagttttacttcttcctttctaatttggatttattttatttctttttcttgcctgatgggtctggctagaactgccaatactgtgttga

SEQ ID NO: 934486 - DNA, 120 bp, Artificial Sequence
  ENSG00000225484_118 (sequence is synthesized)
atagaagtggcaaacacaggcatccatggcttctgattttagtggaaaagcttgaaatttttccccattgagaatgatgttagtcgtgagttcttaatacatggtctttatcatgttgag

SEQ ID NO: 934487 - DNA, 120 bp, Artificial Sequence
  ENSG00000225484_119 (sequence is synthesized)
acagttcctttctattcctggtttgttggacagttctatcataaaggaggaatggattttctcaaatgttcttctatatcaattgagatgatcatgagtttttcactccttccttctatt

SEQ ID NO: 934488 - DNA, 120 bp, Artificial Sequence; identical to SEQ ID NO: 880298
  ENSG00000225484_120 (sequence is synthesized)

SEQ ID NO: 934489 - DNA, 120 bp, Artificial Sequence
  ENSG00000225484_121 (sequence is synthesized)
atagttttcttgtattgtctgtctagctttggtatcagggtaatgttggcttcatagaatgactcagaaagggttctgtttctcaactttttggaggagttcgagaaggattagtgttaa

SEQ ID NO: 934490 - DNA, 120 bp, Artificial Sequence
  ENSG00000225484_122 (sequence is synthesized)
ttcgtttctaaacgtttggtagaattcaccagcgaagtcatcagttcctgggcttttctttgttaggagagttttggttgctgattcaatcaaaattgaatatcattactttttatagat

SEQ ID NO: 934491 - DNA, 120 bp, Artificial Sequence
  ENSG00000225484_123 (sequence is synthesized)
ctattcagatttattctttgttcttgagtcaactttgttggtttgtatgtttctaggaatttgtctgtttcatctaggttatccaattttttgacatatagctcttatactaattctctt

SEQ ID NO: 934492 - DNA, 120 bp, Artificial Sequence
  ENSG00000225484_124 (sequence is synthesized)
acaatcctttttattcctataaatcagtagtagtgtctttcatttctgattttagtagttgagtattctttttccttaatctagttaaagctttgtcaactttgttgatctcttcaaaga

SEQ ID NO: 934493 - DNA, 120 bp, Artificial Sequence
  ENSG00000225484_125 (sequence is synthesized)
actaattttttgtttcattgattctattgtttttctattctctatttcatttatttttgctctaatccttattatttccttcctctttatggcttcaaactcaattgaacataaagtatt

SEQ ID NO: 934494 - DNA, 120 bp, Artificial Sequence
  ENSG00000225484_126 (sequence is synthesized)
aagaaatttgacttttttctcaaatgtctaaaatgtaacaagaaatatgtctagagtcatcaaaaagcagcctgtttgtcagatttactgtttaatccatgtaaacagctttcatataat

SEQ ID NO: 934495 - DNA, 120 bp, Artificial Sequence
  ENSG00000225484_127 (sequence is synthesized)
tcatgatagaatattactatgtgctttggaagacactgaaggaaagacaaaaggtcattgggcagaaccaccctagattgactgttaaggccatcttctagtttgcaggacttgtggtag

SEQ ID NO: 934496 - DNA, 120 bp, Artificial Sequence
  ENSG00000225484_128 (sequence is synthesized)
acagacagaataatatcctggacctcttgggtgtatacaggacaaactgaaataaactctcatttttagatcataatgtcatcatgaaacatatcaattcggtctatttctgaagaaaac

SEQ ID NO: 934497 - DNA, 120 bp, Artificial Sequence
  ENSG00000225484_129 (sequence is synthesized)
aagcacaatgataaagtttgaatgtttgtctcctccaaatctcatgctgacatttgatccccaatgttggaggtggggcgcactgggaggtgttttcgttacgggggcagatccctcatg

SEQ ID NO: 934498 - DNA, 120 bp, Artificial Sequence
  ENSG00000225484_130 (sequence is synthesized)
aatggcttggtgctgtcttcatgggattaagttctcactcctacttcctgtgagatcttattgttaaaaagaatctgataccttcctcccctctcttgctctcttcctccctgatcatgt

SEQ ID NO: 934499 - DNA, 120 bp, Artificial Sequence
  ENSG00000225484_131 (sequence is synthesized)
gacacacgggttcccctttgccttccaccacgatggaggcttcctgaggccctcaacagaagcagatgctggcgccatgcttctcgtacagcctgcagaattgtgtgagccaaataaacc

SEQ ID NO: 934500 - DNA, 120 bp, Artificial Sequence
  ENSG00000225484_132 (sequence is synthesized)
tcttttccttatatattacccagcctcaggtatttgtttatagcaataaaaacagactgagacacatgatgaagaccctttgatatcctataaatattgatttctctccctgagagaaga

SEQ ID NO: 934501 - DNA, 120 bp, Artificial Sequence
  ENSG00000225484_133 (sequence is synthesized)
gcatgaatctaagtgatgccattactctaatgtgaattccacaactcttctcaaagatgtggcccatatgttcctaataatggctttctaagaatctgttctgaaggggtaccttctctc

SEQ ID NO: 934502 - DNA, 120 bp, Artificial Sequence
  ENSG00000225484_134 (sequence is synthesized)
tgattttcatttgcatttcctgcttagcttacacacttcaccttgcctatccacctgtcctgaccccaataacctccatcatcagacatctcatcttacctacctactttctacttttcc

SEQ ID NO: 934503 - DNA, 120 bp, Artificial Sequence
  ENSG00000225484_135 (sequence is synthesized)
cagtccttcccgtgcttcataaaccatgatcatgagctagagacacaaggtcatagctaaggagttgggatcagaaaatcaccttctgtgattttccattattgtcaatacataacttca

SEQ ID NO: 934504 - DNA, 120 bp, Artificial Sequence
  ENSG00000225484_136 (sequence is synthesized)
acaaaatcaagaaaatcatgaaaggacatcctaaggggtcaggtgaggttgcagtggggttagtcggtcaatagtttctttatgccaattaggatttctgcagaaaacaatgaaatactg

SEQ ID NO: 934505 - DNA, 120 bp, Artificial Sequence
  ENSG00000225484_137 (sequence is synthesized)
gtttaaacagtaaaaatattttaattccttacagaagcccatggaacatacactccaggtttaattcatcagctcaatagcatcatcaatgacttaggttctttccactttctgcttgtc

SEQ ID NO: 934506 - DNA, 120 bp, Artificial Sequence
  ENSG00000225484_138 (sequence is synthesized)
atctgtgttggctttattttcaagctagctcctccctggttgcaagataattgcagcaggtttagttatcatattcggacatgctaacgcccagggtagtgatcccttccttgcatttct

SEQ ID NO: 934507 - DNA, 120 bp, Artificial Sequence
  ENSG00000225484_139 (sequence is synthesized)
ttctcattttaagaacaaagtgtttaaaaaattatacttaaaattattggcatctctgtcaattgaaagatgtcaatctctttcatttttcctaatcactaataacatctactaaaaaca

SEQ ID NO: 934508 - DNA, 120 bp, Artificial Sequence
  ENSG00000225484_140 (sequence is synthesized)
aaatgtctgtgtaaataatttatttgaataaaattaaagttgttgagtgagctcggcttttgaggagtgggaaaggaggggtgcatagattagtggaagatgagaagctagtggggctca

SEQ ID NO: 934509 - DNA, 120 bp, Artificial Sequence
  ENSG00000225484_141 (sequence is synthesized)
agtccagcaggagcaggagtttggagccaggacttcctagcctctcagggtttttttttaacttccttacctgaaatgatttgtgctatataacttgtcctggctaaactttcttaatct

SEQ ID NO: 934510 - DNA, 120 bp, Artificial Sequence
  ENSG00000225484_142 (sequence is synthesized)
caactgtttcatttaatcaataacaactactgcgccaccttcataatatcaattttcagcatttcatttactgaatatcatttcctttccttccagactattctactgtgtcaaattcaa

SEQ ID NO: 934511 - DNA, 120 bp, Artificial Sequence
  ENSG00000225484_143 (sequence is synthesized)
tattcctttgactcaataggatctccaatccagtgaccccattatttgtttgtttattagaacaagaaaaacaaactttcccagaaactccccagtagactgctcctcatgtctcattgg

SEQ ID NO: 934512 - DNA, 120 bp, Artificial Sequence
  ENSG00000225484_144 (sequence is synthesized)
ctagaactgagttgcgtgcccattcctaaaacaaaactggcaagaaagatagttaccaagattggttcagaccaaatcaggattttttcctgaggagaggataaagtgagcttcctggga

SEQ ID NO: 934513 - DNA, 120 bp, Artificial Sequence
  ENSG00000225484_145 (sequence is synthesized)
ggcaaatatttacacattccaaagattccaaagaaaaaaagagaataaatactgggtcgttaactaatagtaagtgctacggtattacaggtaaaatttatccttttagccctagcaaca

SEQ ID NO: 934514 - DNA, 120 bp, Artificial Sequence
  ENSG00000225484_146 (sequence is synthesized)
agtgacaccttctgaagccattattcatttgtcaggaatagggcaagtatcaggaaaagaaacaccgaaataaactctgtttccatttattgcattctagcactggttctaccaaatatt

SEQ ID NO: 934515 - DNA, 120 bp, Artificial Sequence
  ENSG00000225484_147 (sequence is synthesized)
tgttggatgactttaggtaaagcatctagcctctctgtcttgattgccacacccacaatatgagataaatattattctgcatacttcctgggagagctgggaagataaaatcagatcatt

SEQ ID NO: 934516 - DNA, 120 bp, Artificial Sequence
  ENSG00000225484_148 (sequence is synthesized)
ataccacataaagcaaagcaataacacttccatattttagcttcccacactgcctatctgtcctattttcatttattcatttatactttttaacaaacagttgctagtagtttgcttaat

SEQ ID NO: 934517 - DNA, 120 bp, Artificial Sequence
  ENSG00000225484_149 (sequence is synthesized)
gtaagatatgggatgaatattttcatgatggcccctgcatctaagttatcatttagcagtacctgccttatctcttgtacagaatcagattagacagcataggaagaatgaaaaggtgag

SEQ ID NO: 934518 - DNA, 120 bp, Artificial Sequence
  ENSG00000225484_150 (sequence is synthesized)
gtgggataataaggaatgttgtttgtggaaacataatggttgcttcaatttgagtgtaaactgtcctttttactgaagcaattgcaaccaagtgtgttagtttacaggtgcctacattgc

SEQ ID NO: 934519 - DNA, 120 bp, Artificial Sequence
  ENSG00000225484_151 (sequence is synthesized)
ttttttggcttaggtattgtttgggttttaatactgactggtatataatacagacaaatcaactcaatcaaagaaaccaactcaatcaaagaaagatgggtctacatacaacaaaactga

SEQ ID NO: 934520 - DNA, 120 bp, Artificial Sequence
  ENSG00000225484_152 (sequence is synthesized)
acaaaatctgcaagaagagtgattcatacatgggctattgaggcaacatgaaatggacattaatcgactaagtaaaaaacagatttcttgaagaattaataaagaacttttgttttggaa

SEQ ID NO: 934521 - DNA, 120 bp, Artificial Sequence
  ENSG00000225484_153 (sequence is synthesized)
tcatgtctttaattgaatgggatattggcccattttttcttccagtttattacactgaatattgacatgttattttccaatattgagacaatcaatgacaagactttaagagtaacaatg

SEQ ID NO: 934522 - DNA, 120 bp, Artificial Sequence
  ENSG00000225484_154 (sequence is synthesized)
taaaaatacagaagttgtctgagtttatcaacaatcccctggattagaaccccctaccagttctaggtcatctaatatatagacattgtgttcagtagaaataaatatatatatttttta

SEQ ID NO: 934523 - DNA, 120 bp, Artificial Sequence
  ENSG00000225484_155 (sequence is synthesized)
agtaagtttgatttcatttaatattttctttaaaccatcttagatcttctctttgacaagtatttcatctgttagtgttctcaaaatgtaaaatgggtaacttaatgagaacaaaaattg

SEQ ID NO: 934524 - DNA, 120 bp, Artificial Sequence
  ENSG00000225484_156 (sequence is synthesized)
atttgcaattaaatcttaacagatttaattgtaatagaatctaatggttttcctcttgaatttttttagacaccagaaattttcattactaataaataatgtttagcttcctagtcacaa

SEQ ID NO: 934525 - DNA, 120 bp, Artificial Sequence
  ENSG00000225484_157 (sequence is synthesized)
accaaacagaaagcaaatttcatcagagtttagaatggttaaaaccaacatagctgcaatatttttagttttgctttaaaattttttgaatcaatcagtaaatcaatcagagttgaccat

SEQ ID NO: 934526 - DNA, 120 bp, Artificial Sequence
  ENSG00000225484_158 (sequence is synthesized)
gctgatgataccaccaccaagaaatcatcaccattaatattttggcttttttgttttcagattttttccattatgaaattgttgatatttgatcctcttgacctataaaaatgttaatat

SEQ ID NO: 934527 - DNA, 120 bp, Artificial Sequence; identical to SEQ ID NO: 880255
  ENSG00000225484_159 (sequence is synthesized)

SEQ ID NO: 934528 - DNA, 120 bp, Artificial Sequence; identical to SEQ ID NO: 880256
  ENSG00000225484_160 (sequence is synthesized)

SEQ ID NO: 934529 - DNA, 120 bp, Artificial Sequence; identical to SEQ ID NO: 880257
  ENSG00000225484_161 (sequence is synthesized)

SEQ ID NO: 934530 - DNA, 120 bp, Artificial Sequence
  ENSG00000225484_162 (sequence is synthesized)
atattttcttggtttttttttttgttcatttgtttgtttgagatggagtctccctgtcacccagactggaatgcagtggcatgatcttggttcactgaaacctctgcctttctggttcaa

SEQ ID NO: 934531 - DNA, 120 bp, Artificial Sequence
  ENSG00000225484_163 (sequence is synthesized)
ttctcattgctcaattcccacctatgggaatacatttttaaatcatttttgaaggtgttattacattctgattgaacattttcagaaagaataaatcatttaatacaagaagtgggccac

SEQ ID NO: 934532 - DNA, 120 bp, Artificial Sequence
  ENSG00000225484_164 (sequence is synthesized)
gctttgcaacatcgtgacagactagcaagttaatgacatttgttatgccatagaaaatatttgttgaattgccactctaatgactttatatcagccaactcattatcaacactagaaaag

SEQ ID NO: 934533 - DNA, 120 bp, Artificial Sequence
  ENSG00000225484_165 (sequence is synthesized)
atgattaaaaaatacttcagtacgttcacgtgttggcttgttaacatttttaagagtctataagagaaaaatgcatccaatctcgacaaaaatatttttcaagtatcttgtaggtacgta

SEQ ID NO: 934534 - DNA, 120 bp, Artificial Sequence
  ENSG00000225484_166 (sequence is synthesized)
caactaactaccttgtgaacaaaagtcactatataattatataatttctgacacttaaaaaagattattgtgcaaaagaagatatatgttctaataccaaatccacatataaaataattg

SEQ ID NO: 934535 - DNA, 120 bp, Artificial Sequence
  ENSG00000225484_167 (sequence is synthesized)
aaataatttaagatgctcttttatatatttatattaaaaactttacagagaataaaaaaagcattatacaggctacttatggtttttgatgtttggatatacaatacatgtatcaaagat

SEQ ID NO: 934536 - DNA, 120 bp, Artificial Sequence
  ENSG00000225484_168 (sequence is synthesized)
tcaaagatggtggacataaatcaagcaatatattcaattggacttaattgcattattacatgccaagtgtcgtataccatctatttgcacataacactttttaatttaggtaaaattatt

SEQ ID NO: 934537 - DNA, 120 bp, Artificial Sequence
  ENSG00000225484_169 (sequence is synthesized)
agctatatgaatttattttattccatgttattttattattccatgttattatttatgtattgttaggaacatttgcttagaaatcatatttggacatagtatcagatactttacatcctt

SEQ ID NO: 934538 - DNA, 120 bp, Artificial Sequence
  ENSG00000225484_170 (sequence is synthesized)
acatcctttgaatcagttattttataacagtatatactaaacatcattactccttttcaaacataaataatgcaatacaaattggacaaaaaattcaggaaagatctgggatcaaaaagg

SEQ ID NO: 934539 - DNA, 120 bp, Artificial Sequence
  ENSG00000225484_171 (sequence is synthesized)
aggtattgaaacatcacatgtactccataattatatacaaatattttgtacccataatatttaaaatacagaaaattaaaaggtacattttcctcaaagtgcatgctgcttttgctatgc

SEQ ID NO: 934540 - DNA, 120 bp, Artificial Sequence
  ENSG00000225484_172 (sequence is synthesized)
aaaactgcaggatatggaaagaagtgtattaaaacactaaatcactttatgtggaagataaaagggatggtatccaatgtacgacttcatgtagtgcactgatacattcaatacaaatga

SEQ ID NO: 934541 - DNA, 120 bp, Artificial Sequence
  ENSG00000225484_173 (sequence is synthesized)
tgtattaacttcaagataacatgagaaagttaaattatctaacttatttcaaactaggggatagtatgttctcattattagaagccagaattctgcttatccatttctattattagaaaa

SEQ ID NO: 934542 - DNA, 120 bp, Artificial Sequence
  ENSG00000225484_174 (sequence is synthesized)
aaacataatttttattcttgtcttaaaaatagacaccttgatataattctctgtaaatgtagcatgatagtctgtttacagagtttatatcattccaagactgcacttctaaagtgagaa

SEQ ID NO: 934543 - DNA, 120 bp, Artificial Sequence
  ENSG00000267030_0 (sequence is synthesized)
gaagaggaggaaaaggatgcaggtaacagcagctcagccacacttggcctctagtcagagggaagaagcggcccagtgacgcgagggcagcagaccatctccgggtggaaggcacacctc

SEQ ID NO: 934544 - DNA, 120 bp, Artificial Sequence
  ENSG00000267030_1 (sequence is synthesized)
ggacaccccatggagcccacccctggtgccagcaggagccccacggaacccctcaccgtcccaccagccctggaagggcacaattaaccacagcggtggggaagccacagtgccggaaga

SEQ ID NO: 934545 - DNA, 120 bp, Artificial Sequence
  ENSG00000267030_2 (sequence is synthesized)
cggcgttggcgggcagcgtggacctccaggcctgcccccgatcctgagacccggggagtggggtgggaccctgcctcctccacatgttccccaaggaagccagggtgggaaacccctgat

SEQ ID NO: 934546 - DNA, 120 bp, Artificial Sequence
  ENSG00000267030_3 (sequence is synthesized)
tccttcaacaccttcattttgcacacgggtaaactgaggcccaaggaggcccagccctttgcctgaggcctctgggtggagctgcctcactctcggcctatgctccttcccaacccacct

SEQ ID NO: 934547 - DNA, 120 bp, Artificial Sequence
  ENSG00000267034_0 (sequence is synthesized)
agggggagccccaccgccccgcctgaaagctggttttctggccgccaggacttgagagtttctttaaaggtgcagctgcgcgcgtgcacacgtgcatctgtggcggctgtgaatggactt

SEQ ID NO: 934548 - DNA, 120 bp, Artificial Sequence
  ENSG00000267034_1 (sequence is synthesized)
gaattgcccggaggaagaatgaatgggatgtaaacgtgagaggaaaaggatttcctgcttcctagcggtcctggaaagggagagatcctgagcgctgagagtgacggacactccccgccg

SEQ ID NO: 934549 - DNA, 120 bp, Artificial Sequence
  ENSG00000267034_2 (sequence is synthesized)
cactccccgccggcacagcgcgggcgtgcccggagctcaggcagcagctgggcgcgatggggcaggtgcacggcgcgcgtgcgcgatcggagccgactcggagtggccgaggctgcggcg

SEQ ID NO: 934550 - DNA, 120 bp, Artificial Sequence
  ENSG00000267034_3 (sequence is synthesized)
tgggccctgttgcccatggccgggtgttgtctggagcagagcctagaagtctcatctcctggaagcttgtggttgttttattcacggtgttactgccaggaagtcttctgtaactagact

SEQ ID NO: 934551 - DNA, 120 bp, Artificial Sequence
  ENSG00000267034_4 (sequence is synthesized)
cagggagcttaaagagcctgttctcccttctctcaaaagtggcttacggttgcccccacctggaagatattgaaagctattcacacagaatataaactagattttctccttcccctcgcc

SEQ ID NO: 934552 - DNA, 120 bp, Artificial Sequence
  ENSG00000267034_5 (sequence is synthesized)
taagcagtgacattattcccatacctcgagtccaaatacatttcgaaattaggagcagaaaataaaagcctgttggtaattgattcaatattttatactgtgaaataactaatgactttt

SEQ ID NO: 934553 - DNA, 120 bp, Artificial Sequence
  ENSG00000267034_6 (sequence is synthesized)
aattatctgataaaatataaactagtgcccaaacatgaaatcaactaactgaaggtctttctgcctttggctacaaaagatatatatcgtatacacttattagaaagtattatatgattt

SEQ ID NO: 934554 - DNA, 120 bp, Artificial Sequence
  ENSG00000267034_7 (sequence is synthesized)
tgaatttagctgtttgatattgttggaattactgaaatgttcacatacagtcacatgagatgaaaaagaatatatatctatctgattttgtaactacaaagatgaattgccagtatatgt

SEQ ID NO: 934555 - DNA, 120 bp, Artificial Sequence
  ENSG00000267034_8 (sequence is synthesized)
tgcaagtgggttagatgcctttttttttaagaaggaaaactgttccaaatgtattttatatgaaaacattctttattccatcttttgaaatttggaataagacaaagttttcatgcttaa

SEQ ID NO: 934556 - DNA, 120 bp, Artificial Sequence
  ENSG00000267034_9 (sequence is synthesized)
aaatcacagaatctactgaaggtatgctattattcctcgagtatttatgcaagctgtctgcatgatatcctgacactattctattaattgaacttgaatcgagcatttgtatctatcata

SEQ ID NO: 934557 - DNA, 120 bp, Artificial Sequence
  ENSG00000267034_10 (sequence is synthesized)
ggagtgaagtaatttattggccattgataagtggtttggctgcaatgtagaaactacagtatgaagtgttttatgtctgcattgtcttaataataaaaacaagaggtatttatagaaata

SEQ ID NO: 934558 - DNA, 120 bp, Artificial Sequence
  ENSG00000267035_0 (sequence is synthesized)
gtgggaagatggcatgtgagcgtgccctgcttgtgcagttgccagtcacagaacccaggaggtctggaaagcaaacctctgtttggccaaaggagataaaagtcccacgtgaaagatgcc

SEQ ID NO: 934559 - DNA, 120 bp, Artificial Sequence
  ENSG00000267035_1 (sequence is synthesized)
gggggtcatacccaggataattctgtacaaacagaccttgctaaaataacccttatcttactttgccttcacacatactttaatgtaattacttttctgcagttgtactctttgctcacc

SEQ ID NO: 934560 - DNA, 120 bp, Artificial Sequence
  ENSG00000267035_2 (sequence is synthesized)
ctactatacaagcatttaggtttcggcacttctttaggtcttgaattttctataggggctcctatatgtaaaaatctgtatgtttttctcttgttaatctgtcataggtcaagttaattc

SEQ ID NO: 934561 - DNA, 120 bp, Artificial Sequence
  ENSG00000263720_0 (sequence is synthesized)
tcattcttagatatactgtatatgagtatacatatacagtatgtgcatgtatgcttgtgtgtgtgtctgtgcataaaagtttgggggatttgtcaaaatttaagtatggctactctttct

SEQ ID NO: 934562 - DNA, 120 bp, Artificial Sequence
  ENSG00000263720_1 (sequence is synthesized)
gctaaatttgaacatattgcttaagtagacaccaaatttggaatatctcttccacttctaaggatcaatttttttgtgccctatattttattcatttttttaagagttaccgcaagtctt

SEQ ID NO: 934563 - DNA, 120 bp, Artificial Sequence
  ENSG00000263720_2 (sequence is synthesized)
caaaaccgtaagtaaaacaaagtctgttgtactgaaatacaatttggaacaaggggcttctgcttgcagcttccatttctatagtgaccacacaataatcagtatcatcaaatgctacca

SEQ ID NO: 934564 - DNA, 120 bp, Artificial Sequence
  ENSG00000263720_3 (sequence is synthesized)
atactgttttagttttgtcgccactattatagactctggattttcacacagtaagtgctgaagccaatgagattaagtattcacagggggtgcatgtggggcccacagcctggcatgaaa

SEQ ID NO: 934565 - DNA, 120 bp, Artificial Sequence
  ENSG00000263720_4 (sequence is synthesized)
attgatttctagtacacaaataattcattctttatgacacctcagaaagtggtgtgaatctcgtttctaggcattaggtatcaggatttgtaactcaaaccttttaagacttctgaacaa

SEQ ID NO: 934566 - DNA, 120 bp, Artificial Sequence
  ENSG00000263720_5 (sequence is synthesized)
atattactggcaaaaagcaaggtgaggaggtggagatggggaataagaacttgaaaatcaagttcaattaagaatgaaactatagaagtacctggactttagactcttaaaaaaaaaaaa

SEQ ID NO: 934567 - DNA, 120 bp, Artificial Sequence
  ENSG00000229791_0 (sequence is synthesized)
agacaaaagtcaactactgctgaggcatgggcttaataaatgttgactaaaatatccaactcaacgaccaatcctgtataattttcaaactctgtcaataacttgctgggtccaacctgc

SEQ ID NO: 934568 - DNA, 120 bp, Artificial Sequence
  ENSG00000229791_1 (sequence is synthesized)
agaccctggctgcatgacagatgaagaaatgcactcagacacagatcccctacaaaagaccatgtttcttctcagcttgctcagtccagctgagccagctttccactggactcctgaatg

SEQ ID NO: 934569 - DNA, 120 bp, Artificial Sequence
  ENSG00000229791_2 (sequence is synthesized)
tgaggagaacacaggctcccaggaccatccagaagcatctctcatcaccataaagctctgaaacactggctgggtgcagaggctcacacaagtaatcccaacacattcagaggctgaggt

SEQ ID NO: 934570 - DNA, 120 bp, Artificial Sequence
  ENSG00000229791_3 (sequence is synthesized)
tgaggccaggaattcaagaccagcctaggcagcatagcaagaccccatctctacaaaaagtacaccccaaaattatctgggtgtggtggcacatgcctatagtctcaattaattgggatg

SEQ ID NO: 934571 - DNA, 67 bp, Artificial Sequence
  ENSG00000229791_4 (sequence is synthesized)
ggtatgatcgcaccaccacactccagcctgggagacagattgagaccatctctaaaacaacaacaac

SEQ ID NO: 934572 - DNA, 90 bp, Artificial Sequence
  ENSG00000229791_5 (sequence is synthesized)
ttgcagtgagctgagatcacgccattgccctccagtctgagcaacaagagcaaaactttgtctccaacaacaaaaaatgagacagaaaac

SEQ ID NO: 934573 - DNA, 120 bp, Artificial Sequence
  ENSG00000229791_6 (sequence is synthesized)
cagaaaactgaaatattttaagtttcattattgcttgttagttgattaaagtaattctgcttccactttatttttaaagacactaattgctacactgaataaaaccttaatggagtttca

SEQ ID NO: 934574 - DNA, 120 bp, Artificial Sequence
  ENSG00000263727_0 (sequence is synthesized)
tataatgcagcttttctacttgattaaaaaccgccagggcgtgagccactgcacccggccccttgtgttattttgaggctggtttatttgtttcacccaaataccagctaaatcacatct

SEQ ID NO: 934575 - DNA, 120 bp, Artificial Sequence
  ENSG00000263727_1 (sequence is synthesized)
gcttccacttctgctgccttccttgagtatcttggcttgatagtaaagacagaatggttcttttcaaagtagttactccataaatgttggttagaatgaatggttctctcagacaaattt

SEQ ID NO: 934576 - DNA, 120 bp, Artificial Sequence
  ENSG00000263724_0 (sequence is synthesized)
aggccaacatccagaagtttttcttagattttcttctagaatttttattctctcaggtctaacatgtaagcctttaagccatcttgagttaatttttgtatacagtgagaaataggggtc

SEQ ID NO: 934577 - DNA, 120 bp, Artificial Sequence
  ENSG00000263724_1 (sequence is synthesized)
tagttttcattctgcacatgactatccaattttcttagcaccatttatggaatagggtatcctttccccagtgtatgtttttgtttactttgtcaaagatcagttgtttctgggttttgt

SEQ ID NO: 934578 - DNA, 84 bp, Artificial Sequence
  ENSG00000263724_2 (sequence is synthesized)
acgggtaatatgatgcctgtagctttgttctttttgcttagtattgctttggcagtttaggctcttttttgattctgtatgaat

SEQ ID NO: 934579 - DNA, 120 bp, Artificial Sequence
  ENSG00000263724_3 (sequence is synthesized)
agctttgttctttttgcttagtattgctttggcagtttaggctcttttttgattctgtatgaattttcggattaaaaatatggaatgcttcatgaatttgcatgtcatccttgtgcaggg

SEQ ID NO: 934580 - DNA, 120 bp, Artificial Sequence
  ENSG00000263724_4 (sequence is synthesized)
ttcccagtttagcatatgtgttgctgaagtgagtactcctcttactttttcaaggccttccatttctacctctgatatgatctttgatgatactattcagatgttggccagattgtctga

SEQ ID NO: 934581 - DNA, 120 bp, Artificial Sequence
  ENSG00000263724_5 (sequence is synthesized)
gagctacagagttgacctccttgtttgtccctttcaactgctcttagatgttaagccactagcttatgtaagggaactatacgaaataggcatttatacttgctatggtttttactgtcg

SEQ ID NO: 934582 - DNA, 120 bp, Artificial Sequence
  ENSG00000263724_6 (sequence is synthesized)
agatgttgcctgtctcagcaaagagtgcagtgccatgtggtaaattcctctcaggtgtcagtattaacaaaactgtgtgcttaacagctgcctttaatcgtgcaggtgctattactcttg

SEQ ID NO: 934583 - DNA, 120 bp, Artificial Sequence
  ENSG00000263724_7 (sequence is synthesized)
taagatgagtatgtttccacttcgagcagtgcgtgctccaccagcttgaataccaggaaggttatcaggaaaagctatggcaaaatcatgatggttttagtacttttccatttttatcct

SEQ ID NO: 934584 - DNA, 84 bp, Artificial Sequence
  ENSG00000263724_8 (sequence is synthesized)
catcatcatcatcatcatctcataaaccactttaatctctcgtggaaacaaattgtagtagaggtagcaaatctacatccagat

SEQ ID NO: 934585 - DNA, 120 bp, Artificial Sequence
  ENSG00000263724_9 (sequence is synthesized)
gaaacaaattgtagtagaggtagcaaatctacatccagatacctctgtattatgtaaaatatgtcaatatgctttttccctcacttgatatcatccattgactgtgacaatggttctcaa

SEQ ID NO: 934586 - DNA, 120 bp, Artificial Sequence
  ENSG00000263724_10 (sequence is synthesized)
atgggaattttcctgctcggtaaacaagatattttcatgggaaaagtgtgacaatttataagtaaaatgactatttttgtactgggaataacgcattgttggtgccagcaccgtacagag

SEQ ID NO: 934587 - DNA, 120 bp, Artificial Sequence
  ENSG00000263724_11 (sequence is synthesized)
cagagccactgtgctgatggggaagtattggaccagcagttaatgaagactgctaaagcctgctttgctgtttcatccgcagcacacaggccgcatctgtcctggggctcatttgtcctt

SEQ ID NO: 934588 - DNA, 120 bp, Artificial Sequence
  ENSG00000263724_12 (sequence is synthesized)
cttcaacctcctccacagttagaggctcctgaactacaatggcaacgattgaagaaactgttgttgaaaagtccacgccaaattctcggtatgtcactgaagacaaggacattttgggta

SEQ ID NO: 934589 - DNA, 120 bp, Artificial Sequence
  ENSG00000263724_13 (sequence is synthesized)
gaaccaggctgctaatccactcttgccaggagggaagattttttctctttctgtagtgagcaacaacgccactcgatgaagaaactgaggttcatggaagttaaataacttgcccacagg

SEQ ID NO: 934590 - DNA, 120 bp, Artificial Sequence
  ENSG00000263724_14 (sequence is synthesized)
gcacaactagtaggcagctaagctaggacttcaactgaggtctgtaagacttaaagcacatgctattcctgctcctcaatagctttcctgctaagcaccaagagacgctaggctgccagg

SEQ ID NO: 934591 - DNA, 120 bp, Artificial Sequence
  ENSG00000263724_15 (sequence is synthesized)
aacatcacagcagagaccaccgtcaatcaatgcatctccaccgtcttttagacattcttttgaagaaagatttagctgctaaaagaaaagatgaatatacaaaaaggataatactaccat

SEQ ID NO: 934592 - DNA, 120 bp, Artificial Sequence
  ENSG00000263724_16 (sequence is synthesized)
atttcatcatattgtctcgttttaatacaagaagactcatccagcttaaacatttgatgtttaagaagctaaccagcaagctgccctctgggaatgcataccatcaggtatggatcagtg

SEQ ID NO: 934593 - DNA, 120 bp, Artificial Sequence
  ENSG00000263724_17 (sequence is synthesized)
gccctgagatcatgttcataactcagcagctttgtacaagctgtcaagactcagaacatggtaccccaaagtatggcaccttggtgtgctgagtactgtggactgaaggacatcggaaat

SEQ ID NO: 934594 - DNA, 120 bp, Artificial Sequence
  ENSG00000263724_18 (sequence is synthesized)
gtctcagaagctatgtctctttgaccttctcccagcctcctgtctcctacctgtctttctcccttgaagtgagtcatggcaaccataattcctctttcccaaggtgtgtcacagaaacta

SEQ ID NO: 934595 - DNA, 120 bp, Artificial Sequence
  ENSG00000263724_19 (sequence is synthesized)
gaacccctctcctccaagggaagccgtgaaacctagaaaggtcactctctgccttcccccttctcccttgaagaccctcattccagaggggccctgccccatattcaggagggttacaca

SEQ ID NO: 934596 - DNA, 120 bp, Artificial Sequence
  ENSG00000263724_20 (sequence is synthesized)
aagaggttaagaagaatttgaacattcaggccttgctgggttccctgctcagtctatcagcattagatcacaccctttagtccatcacatttctacaccgctgtccattcttcatcaaac

SEQ ID NO: 934597 - DNA, 120 bp, Artificial Sequence
  ENSG00000263724_21 (sequence is synthesized)
gatgaggctaccaggagagaacagagaagaaaagacactctgaaaaaggaaaagatgagagttcttatggaaaaatgtgccttgggaaaaattacaatactacagcaaggagcacacagg

SEQ ID NO: 934598 - DNA, 120 bp, Artificial Sequence
  ENSG00000263724_22 (sequence is synthesized)
agcaaaaaagatgaactcctcaaaggaagaatttttctttgcatttcttcttaaggtaacatctggtttcagtgaactggaggaaaacacaaggagacagtggcaggggaagagcagcct

SEQ ID NO: 934599 - DNA, 120 bp, Artificial Sequence
  ENSG00000263724_23 (sequence is synthesized)
accgtggctctccatgagacaagctcagagtgtgagatgcacagtttttccagagttccaacacctggagcagaattatcactgtccagatgatgaccaaaacaagaataatccagcact

SEQ ID NO: 934600 - DNA, 120 bp, Artificial Sequence
  ENSG00000263724_24 (sequence is synthesized)
gtaaaggaaattttcaagatgtgcctgggtgactatgctggccaatggaacataacttgaaacggcatgtgtgatttctggaaaacatctctaaagtgaggggcatacgcttctttaccc

SEQ ID NO: 934601 - DNA, 120 bp, Artificial Sequence
  ENSG00000263724_25 (sequence is synthesized)
cttctctggctggaacgcagctgtgggggctgggtgaatagtgatctttcccatgaggtggaagttacagtttgaggattagagaaacaaaagataaaggttctgacctacagcggagtg

SEQ ID NO: 934602 - DNA, 120 bp, Artificial Sequence
  ENSG00000263724_26 (sequence is synthesized)
ccatatccgccctggatgtgcacctctgcattttgtttagtcgagagaaaaatagacctttatcttgtttccttatcttatcaagtaaaggaagggcctgcgctggccccataggaagcc

SEQ ID NO: 934603 - DNA, 120 bp, Artificial Sequence
  ENSG00000263724_27 (sequence is synthesized)
agagtcccttgctattgaaccacgtgacaactttagccaagggctctgcagagggagtctgtgtggagagaggagacaaaatagctcgcggttattttgctttctgtaattttgtgtact

SEQ ID NO: 934604 - DNA, 120 bp, Artificial Sequence
  ENSG00000263724_28 (sequence is synthesized)
agacaggtagtcagggcaaaatcatgagacccttggtgaagctatgtcaggatgcagcactgtatttgcaggtggtggtaatccattagaggaatttaaacaagacagtggcatggtcac

SEQ ID NO: 934605 - DNA, 120 bp, Artificial Sequence
  ENSG00000263724_29 (sequence is synthesized)
acttgtgctaaagatttctctagctgtagttagagaatacatgtgggagtggggaggggcaaaaagatctcaaagaagcaatgatttcttgcaagagcagtttatgagagaagactggaa

SEQ ID NO: 934606 - DNA, 120 bp, Artificial Sequence
  ENSG00000263724_30 (sequence is synthesized)
gaaaagaaggagtataccaagagaggaggacaatgtcctggccagctacggcagtgtctcctgattcagacctccttgctcacacatgcatgctccaaccacagtctgaacacatacatg

SEQ ID NO: 934607 - DNA, 120 bp, Artificial Sequence
  ENSG00000263724_31 (sequence is synthesized)
acatttttttttagacagaacaaaattaattttcccgtttacttataataaatcccaattctacagagattgagaatgatgaatgcccaacaggctgatgattttaaattattacttttt

SEQ ID NO: 934608 - DNA, 120 bp, Artificial Sequence
  ENSG00000263724_32 (sequence is synthesized)
taaattattactttttaaaataagaaaatggttcttactactaaaaaatgaaaccatggcacttttgcgtaaaagtaaacagaaaacggccgggggcagtggctcatgcctgtgatccca

SEQ ID NO: 934609 - DNA, 120 bp, Artificial Sequence
  ENSG00000263724_33 (sequence is synthesized)
ctgtggtcatctgcagcagaaccaaggcaggcccacaaaagcttactcatccaagtaaaggggaccctcctgcccagtgggtaactgcaagcatacagaacctccaccactgtggtctac

SEQ ID NO: 934610 - DNA, 120 bp, Artificial Sequence
  ENSG00000263724_34 (sequence is synthesized)
atccaagtggggccaatgtgagtcagtctctgaagtggccccaacagaattggctaagttatcctcatacagctttatacccatttaagtatttattggcttggatacattatgcatgct

SEQ ID NO: 934611 - DNA, 120 bp, Artificial Sequence
  ENSG00000263724_35 (sequence is synthesized)
aattcagattatacattcactttttgaaaactatcatcagtgcctgcatgagagaggggtggtcagataccatgtaagaagtgagaaggacaatctctgcaatcggctgtttttgaaacc

SEQ ID NO: 934612 - DNA, 120 bp, Artificial Sequence
  ENSG00000263724_36 (sequence is synthesized)
ttacagagtatttttccttcagtgagtttggcctgccctgacctctgcaatagttgctgttaatgggaattagatttgtaattcctcaaacactgccccttccttctgcttctgtcttcc

SEQ ID NO: 934613 - DNA, 120 bp, Artificial Sequence
  ENSG00000263724_37 (sequence is synthesized)
catcatttttaaagtgccttattctgactcttcacacatctagcaatctgacccttttaacttttttcattttggaactggtttttattgtcttttagaattctacccccagtcttaaat

SEQ ID NO: 934614 - DNA, 120 bp, Artificial Sequence
  ENSG00000263724_38 (sequence is synthesized)
tttaaacaaacaaatccacatccagtcaactttctgaaatattttttgctgtgatagagaaggaagtatgatggcattcattgtttctggattaaagtatttttgtttgtattacatttt

SEQ ID NO: 934615 - DNA, 120 bp, Artificial Sequence
  ENSG00000263724_39 (sequence is synthesized)
atttttttagggacagggtcttgctgtatcacccaaggtggagtgcattggcataatcatggctcactgcagacttgaactcctgggcgcaagcaatcctctcatctcagcctcccaaag

SEQ ID NO: 934616 - DNA, 120 bp, Artificial Sequence
  ENSG00000229792_0 (sequence is synthesized)
aaacagacctggaatgaatccttctcgctcttcatacactgagacaggttgaaatctaagaccatggcagggagaagccgcacgcggagtcgcactgtcaggatccaggatcgatcttaa

SEQ ID NO: 934617 - DNA, 120 bp, Artificial Sequence
  ENSG00000229792_1 (sequence is synthesized)
tataaagggtccctggggaaaccccaaccggcctgcgccctgggagaatggggtggagccacggaagttcacgcgctttgcagaggggaggagcctggcctctcctgatcctggatagta

SEQ ID NO: 934618 - DNA, 120 bp, Artificial Sequence
  ENSG00000229792_2 (sequence is synthesized)
cctgagattcaatcgctgaggcgggaaaacccgctagcaggactgttgctttgctgagagtccctgtttccctttttttccttttggcccgataaattccatttttctcacccttcaaaa

SEQ ID NO: 934619 - DNA, 120 bp, Artificial Sequence
  ENSG00000286477_0 (sequence is synthesized)
gccttggacctgcttgcatggggaattgtgacagattactgggcccatcacctagtagatgttactgtctattttttacctggatcctgcctacagaaaggattgtgacaaatcagtggg

SEQ ID NO: 934620 - DNA, 120 bp, Artificial Sequence
  ENSG00000286477_1 (sequence is synthesized)
ccaagcatcccggtgacgtggctcttctgtcttagcaattcctatagttggaatagtgacataaacctgggtcaagcatctggggtaatttgtgacatactgctggacccagcacccagg

SEQ ID NO: 934621 - DNA, 120 bp, Artificial Sequence
  ENSG00000286477_2 (sequence is synthesized)
ctgccttggcccttcccacagagggcattgtgacattgagtgggctcagcagctaggtgatacgactttcctgccaggactcttccaacagaagggacattgacctactcaggctcagta

SEQ ID NO: 934622 - DNA, 120 bp, Artificial Sequence
  ENSG00000286477_3 (sequence is synthesized)
ttcagccaatagatgaaaaaagattcaaggaagacacatttgctttttattcactcatcacttcccatcactatgctgaccagagtcaatgtgagcagagttgagaatagcagttttctg

SEQ ID NO: 934623 - DNA, 120 bp, Artificial Sequence
  ENSG00000286477_4 (sequence is synthesized)
gcaggagagccacttctcagcaaaaaatgacacactcaaagtataaatctttcatggaaggctcacatattttcagcaaattaagcatatgcatgaataaaattcttgtggtgaaataaa

SEQ ID NO: 934624 - DNA, 120 bp, Artificial Sequence
  ENSG00000286476_0 (sequence is synthesized)
aaatactggcaccttggtcttggacttccagcctccagaactggtaatgtgctgacatcataacaaggttggagggaggcccatctcacaagaatgtggaaacccaatcatcatgcttat

SEQ ID NO: 934625 - DNA, 120 bp, Artificial Sequence
  ENSG00000286476_1 (sequence is synthesized)
gaaccacaaaaggatctagatactgatgttcctatacacttatttcttatgtcgaatagtgcaattcaaattctattcttgaagcttaaagataacattggagctggcccaaactagtaa

SEQ ID NO: 934626 - DNA, 120 bp, Artificial Sequence
  ENSG00000286476_2 (sequence is synthesized)
aatatatgattgtgaatggagtttatcaaaatgtagacacagtaaatatcctaaagctttaaatctacttctgaaacaatgacaagcaggcattttgccagtgctaatttgctttactct

SEQ ID NO: 934627 - DNA, 120 bp, Artificial Sequence
  ENSG00000286476_3 (sequence is synthesized)
ttgtctcttctagggaaggcatcagtggaatacagaacagtgaaggcttattcaagataatgttatactcatgaatcacgccacctaatacctgcactgcttagacatgcagaacataaa

SEQ ID NO: 934628 - DNA, 120 bp, Artificial Sequence
  ENSG00000286476_4 (sequence is synthesized)
gcgtcttctcaagatatctcagtaaaagatatctcttcttatatacaaaagtggaacttgttttgtgcaatcacttcttggtacagttacaatagaaaattctcagatgtactccactac

SEQ ID NO: 934629 - DNA, 120 bp, Artificial Sequence
  ENSG00000286476_5 (sequence is synthesized)
tttaaatagattcctgcatcattgaaaaaaattttccaagtcaacatagtcttaaaaactagtcaatcttttctttaacatcttgaatgaataaaagctcactccccttattactactta

SEQ ID NO: 934630 - DNA, 120 bp, Artificial Sequence
  ENSG00000286475_0 (sequence is synthesized)
aaacaaacaaacaaacaaacaaaaaacaggtctgtattggtaccagcaagccacaccaggatcatgaactgccagctgtatggactgctgggcaattggagatggttggcaggtaagatg

SEQ ID NO: 934631 - DNA, 120 bp, Artificial Sequence
  ENSG00000286475_1 (sequence is synthesized)
gttggcaggtaagatgtgcctttcacttttcaccatgattgtgaggcctccgcagccacgtggaactcatcaaacatggagagcccgtgttgagatggtggaactacaagatgaaagcag

SEQ ID NO: 934632 - DNA, 120 bp, Artificial Sequence
  ENSG00000286475_2 (sequence is synthesized)
cctgaatctctggttcaactgatagcagagagcctatgccaacccatgtctgtttttttcatgtgcaaaataaataaatatttattgttataagccattcagatttcaaattttctctgt

SEQ ID NO: 934633 - DNA, 120 bp, Artificial Sequence
  ENSG00000286475_3 (sequence is synthesized)
ttcatcagctaggaggaactacatgactgatccccagctaccatttctgttgttaggtttatttaaatattttaattataaaaataatattacaaagattctttctcaaaaaaatctaac

SEQ ID NO: 934634 - DNA, 120 bp, Artificial Sequence
  ENSG00000286475_4 (sequence is synthesized)
aatacagataaaccacattccacagtgtttcttcaaaattcaacacttttaaacacataaccatgattaacagtctgatgtttaagctgatcctacttgttttaacctatataaatgtgt

SEQ ID NO: 934635 - DNA, 120 bp, Artificial Sequence
  ENSG00000286475_5 (sequence is synthesized)
ctacttgttttaacctatataaatgtgtttaataaacatatattatgattttatgtgtgtatatatataaatataaatatttaaagtatacaatatggccaggtgcagtggctcatgcct

SEQ ID NO: 934636 - DNA, 120 bp, Artificial Sequence
  ENSG00000286475_6 (sequence is synthesized)
aaataaataaagtatacaatgtgacattttgataaacatgtataataaaatgattcctgtagtcaagcaaattaatgtattctgcctcacgtatttaccattttgtgtgtgataagagca

SEQ ID NO: 934637 - DNA, 120 bp, Artificial Sequence
  ENSG00000286475_7 (sequence is synthesized)
ctaaaaatctactcttgcgaaatttccattatacgataaaatattattgactatagtcatcatcctgtacattacatctctagatttattcatcccacataactgcaactttgtactgtt

SEQ ID NO: 934638 - DNA, 120 bp, Artificial Sequence
  ENSG00000286475_8 (sequence is synthesized)
taacctacatttccccagtcctctcattgcaatattttaaaacacacaatgagaagtgatgtacctattcttctcccatttgcctttaataagtattataaattaactaatagtaaatga

SEQ ID NO: 934639 - DNA, 120 bp, Artificial Sequence
  ENSG00000286475_9 (sequence is synthesized)
cataaatataaatttttgatttaattaataaactaaccttttgactaatgaatgaatgaatgaatgaatgatttttccataacaaggtcatacagatttacttttgtattactattggga

SEQ ID NO: 934640 - DNA, 75 bp, Artificial Sequence
  ENSG00000286473_0 (sequence is synthesized)
ggggtctttgaatacttcagctctaataatttcttttgtttcaacacctaattttctattttgatctatctgtat

SEQ ID NO: 934641 - DNA, 83 bp, Artificial Sequence
  ENSG00000286473_1 (sequence is synthesized)
tttactatttctctaggagatatgtagatgtaggtttatctccatcgtagcttgcttagcatgcatagaagttttgaatatgt

SEQ ID NO: 934642 - DNA, 67 bp, Artificial Sequence
  ENSG00000286473_2 (sequence is synthesized)
gactaatttacctctgattcttctttagactgaggatataaattttggttctagctttagggaagag

SEQ ID NO: 934643 - DNA, 62 bp, Artificial Sequence
  ENSG00000286473_3 (sequence is synthesized)
gaatgtgaaatgagactaatttacctctgattcttctttagactgaggatataaattttggt

SEQ ID NO: 934644 - DNA, 67 bp, Artificial Sequence
  ENSG00000286473_4 (sequence is synthesized)
atgtgatgtatgacagtaggaatctgcagtcattcattttgctacatgtccgtagggcaaaatcagt

SEQ ID NO: 934645 - DNA, 71 bp, Artificial Sequence
  ENSG00000286473_5 (sequence is synthesized)
tactctaattggttttttgctattctctgtttgtctatgtcttcaccacatagacacaattagggaatttt

SEQ ID NO: 934646 - DNA, 82 bp, Artificial Sequence
  ENSG00000286473_6 (sequence is synthesized)
ttgtatattcactgttaagttcaacattttctgtaatattaatatattgtgaaaatttcctttcttccttatttgtcccagg

SEQ ID NO: 934647 - DNA, 62 bp, Artificial Sequence
  ENSG00000286473_7 (sequence is synthesized)
gtgtaaatcaaaaagtctcaatgtcattataaagtatcttggcagaggttgatctccaagga

SEQ ID NO: 934648 - DNA, 61 bp, Artificial Sequence
  ENSG00000286473_8 (sequence is synthesized)
gatctccaaggaataatttctctcctaaattatgccaatccaaatttcactctaccgtaat

SEQ ID NO: 934649 - DNA, 89 bp, Artificial Sequence
  ENSG00000286473_9 (sequence is synthesized)
catgttctccttgtgaaataattgctttatattctctggatagaataatttaatctttaaaccttccattcactcttagaaacaaaata

SEQ ID NO: 934650 - DNA, 64 bp, Artificial Sequence
  ENSG00000286473_10 (sequence is synthesized)
tatagcatccaagctgattatcatagattacaagtccaactatcaactgtgttctgagagtcta

SEQ ID NO: 934651 - DNA, 69 bp, Artificial Sequence
  ENSG00000286473_11 (sequence is synthesized)
gaatggttttcttcccagcagctacagatgatcaagaaggtattcatttcatcagtttcaaggaaaata

SEQ ID NO: 934652 - DNA, 78 bp, Artificial Sequence
  ENSG00000286473_12 (sequence is synthesized)
atatgttcccacaacctagttttttgtgagtaactaaatatagtagaaaaatagactccatctctatgtcctgctttt

SEQ ID NO: 934653 - DNA, 70 bp, Artificial Sequence
  ENSG00000286473_13 (sequence is synthesized)
aatctagttgtatgcctatagaaagactgagatgtcatttatattgattgctgtatagcattctacaaac

SEQ ID NO: 934654 - DNA, 120 bp, Artificial Sequence
  ENSG00000286473_14 (sequence is synthesized)
aattaggaggtaaatgtggtcaaaactatagaaagactgagatgtcatttatattgattgctgtatagcattctacaaacagaaattgttaaataagtttatataaatattttgtagcat

SEQ ID NO: 934655 - DNA, 79 bp, Artificial Sequence
  ENSG00000286473_15 (sequence is synthesized)
aatatttgagtgcttgacgtttctcctcttctatatgtttttagtctcgttcgagtattatataaaagcaattttcagt

SEQ ID NO: 934656 - DNA, 67 bp, Artificial Sequence
  ENSG00000286473_16 (sequence is synthesized)
attccatttgtaaaataattaacaaatgatttgctctattttacagtgcggttataaactgagtcag

SEQ ID NO: 934657 - DNA, 61 bp, Artificial Sequence
  ENSG00000286473_17 (sequence is synthesized)
tccatgcctgtcacatctctattgctgttgcatcataaaaaagcacaataacctgctcaat

SEQ ID NO: 934658 - DNA, 65 bp, Artificial Sequence
  ENSG00000286473_18 (sequence is synthesized)
ttccagaagatgttctagttaatgaaatgtatacaacgaaaagcacaataacctgctcaatcttt

SEQ ID NO: 934659 - DNA, 83 bp, Artificial Sequence
  ENSG00000286473_19 (sequence is synthesized)
agttattggggagaaataatttttaagaattaatgactgagaaaatgttattttttacttagaaaattattttgtgcatgagc

SEQ ID NO: 934660 - DNA, 72 bp, Artificial Sequence
  ENSG00000286473_20 (sequence is synthesized)
ttccatgattgcggttttatttggtaaatctttaaatgcacaccatttaatgataataaatgaatcttggaa

SEQ ID NO: 934661 - DNA, 120 bp, Artificial Sequence
  ENSG00000286472_0 (sequence is synthesized)
agtaactgcagcgaggaagccacatcagaggcctcctgccttcagcatgggatagacaggattgcggagaagggaggagttcagatggccagataagaatagctccagtctgcagctccc

SEQ ID NO: 934662 - DNA, 120 bp, Artificial Sequence
  ENSG00000286472_1 (sequence is synthesized)
taacaaacttctctgagctaaaggaggaggatgtttgaaaccattacaaggaagctaaacaccttgaaaaaagattagacgaagggctaactagaataagcagtgtagagaagaccttaa

SEQ ID NO: 934663 - DNA, 88 bp, Artificial Sequence
  ENSG00000286472_2 (sequence is synthesized)
cgtgtgttgcatgcacaagtttcaatagccaattcgatcaagtggaacaaagggtatcagtgattgatgatcaaattaatgaaataaa

SEQ ID NO: 934664 - DNA, 74 bp, Artificial Sequence
  ENSG00000286472_3 (sequence is synthesized)
actaacgataataatattaaccttaaaagtaaatgggctaaatgcgcgaattaaaagacacagactggcaaatt

SEQ ID NO: 934665 - DNA, 120 bp, Artificial Sequence
  ENSG00000286470_0 (sequence is synthesized)
ctctctgctctggatgaaggattagaagagccaggcaaggaaccaggggtcttgttaggaagttattctagtggtccagcaagaaggatggaaggcaacatcaacaaatcaactgggggc

SEQ ID NO: 934666 - DNA, 120 bp, Artificial Sequence
  ENSG00000286470_1 (sequence is synthesized)
acagtatgtttgagatactctagaagatccaggtcctgggttgtcttggctcccagagacgtcgatcttagtgatcgctaagcagcatccagcaggaataatacgtgactttagcaactc

SEQ ID NO: 934667 - DNA, 120 bp, Artificial Sequence
  ENSG00000286470_2 (sequence is synthesized)
ctggggctttccaaaaaggcctagagggatcccaccctgcccaggattcaggagagaaaacaaccttccttcctcatacagttaataaatgttaagtatggtggtaagcattgaagataa

SEQ ID NO: 934668 - DNA, 120 bp, Artificial Sequence
  ENSG00000286470_3 (sequence is synthesized)
aaggaaaatttcaaaataaaagattatatgttaagaccaagaaacaaaatccagctatctgtagcatacataagacagatctgaaacataataataaaaaagagtcaaaagaacaagaaa

SEQ ID NO: 934669 - DNA, 120 bp, Artificial Sequence
  ENSG00000286470_4 (sequence is synthesized)
ttgctaatccaaattgaaaaacagaaatcacagtcttaatgctggggaaatttgaatttacagatgaaagcatcgtttgataagagaaagattgaaactgcctttgcaaaattatgaaag

SEQ ID NO: 934670 - DNA, 120 bp, Artificial Sequence
  ENSG00000286470_5 (sequence is synthesized)
taagggaaatctgacatagttgactctattttgcttctaactttcaagctatcatgggtcactcttgggtgtagactgagttggctttgggagaatttaatttatagtttaaccttaaag

SEQ ID NO: 934671 - DNA, 120 bp, Artificial Sequence
  ENSG00000286470_6 (sequence is synthesized)
caaagatgataatagcactttccaaaactattaataaaccacctttgcaagtaaaacgaatgaaaggccacatggttaggattatgagaggggcccgaattctgctaagatgtgggtata

SEQ ID NO: 934672 - DNA, 120 bp, Artificial Sequence
  ENSG00000286470_7 (sequence is synthesized)
cagaggtcacaagatctgtgacttccccaattactcctatagatagcatcactattataaaacataagatttttttttttttttttagatggaatctcactgtgtcgcccaggctggagt

SEQ ID NO: 934673 - DNA, 120 bp, Artificial Sequence
  ENSG00000286470_8 (sequence is synthesized)
acgcctggcggattggttgtttgagatatctttcagactgactccacctggactctggactcatgactcaactactcctgtggccccacccagaggctgactcagcacacaaggactgta

SEQ ID NO: 934674 - DNA, 120 bp, Artificial Sequence
  ENSG00000286470_9 (sequence is synthesized)
tcccatatccctatgatttgatttccaaccaatcaacattcaccattccctagtcccctgccgaccaaactatccttgaaaacccctaacctctgttagatatgagttctaaatttcttt

SEQ ID NO: 934675 - DNA, 81 bp, Artificial Sequence
  ENSG00000286470_10 (sequence is synthesized)
tgattacctgctccaccccaactctttccgattacctgctgtatcataaccatttttcccactcaccccatctctctcttt

SEQ ID NO: 934676 - DNA, 120 bp, Artificial Sequence
  ENSG00000286470_11 (sequence is synthesized)
gctgtatcataaccatttttcccactcaccccatctctctctttaaaccactcaccccatctctctctttaaattagccagtcagaattagtgtagcctgtgcagtctaaccctagccaa

SEQ ID NO: 934677 - DNA, 120 bp, Artificial Sequence
  ENSG00000286470_12 (sequence is synthesized)
ggaacgacacagcagtaggggccacatgcgtcagggataagtaccccttcccctcccttgtccaagtgtgcactcactgtggctcggtctgtaagggtgcacccttctatagaagtcact

SEQ ID NO: 934678 - DNA, 120 bp, Artificial Sequence
  ENSG00000286479_0 (sequence is synthesized)
agagagagtaatcctatcaaatgcaggtgcacagaaattaggagatcagaacagctccttgcatttcttgctacatttccagtattttcccattcccttgctcagtgccttgtcagcaca

SEQ ID NO: 934679 - DNA, 120 bp, Artificial Sequence
  ENSG00000286479_1 (sequence is synthesized)
cctagaattgagggtgtgataagagaggagcagaaaagtaagactgaaatattgtccaatacgactaagaattttgcagaatgcaataattgttttaaacacaacagcagtttatggtta

SEQ ID NO: 934680 - DNA, 120 bp, Artificial Sequence
  ENSG00000286479_2 (sequence is synthesized)
gagattggacagagcgtggctgaagctgacaggaaagagattatgcaggagtatgaagttaaacaaacaagagaagatgaaggaggaaaagaagaagatggaggaggacaaagttttcag

SEQ ID NO: 934681 - DNA, 120 bp, Artificial Sequence
  ENSG00000286479_3 (sequence is synthesized)
aagtgcttattagagctattacatgccaaatatctactctgtgggaaaagcaaatttcacatttttatcaactctgtattcacacatctgatcaagagatgttagaagccagttcttgag

SEQ ID NO: 934682 - DNA, 120 bp, Artificial Sequence
  ENSG00000286479_4 (sequence is synthesized)
aatggcaggaccaccttgtggacataacctgggtcggtgaatgactgcacggagcagagtcctacctgtcaagacgtcagattatgatgtgaataagcaataaacatatattttgttaac

SEQ ID NO: 934683 - DNA, 120 bp, Artificial Sequence
  ENSG00000286478_0 (sequence is synthesized)
tggttgaaaatggctgacgacagataccagacagccaccctctccagaaagaagagccaaaattaggaataaaaatacctcaaatagaagagaacactagagtccaagggtgaattcaca

SEQ ID NO: 934684 - DNA, 120 bp, Artificial Sequence
  ENSG00000286478_1 (sequence is synthesized)
gcaaacaccagaggcatagaaagagaagaaaggaagcagccagcttaaccaagatcaaccaagagccccgagggactccctattacaggaaaacggtcctgaattccagcagaatggctg

SEQ ID NO: 934685 - DNA, 120 bp, Artificial Sequence
  ENSG00000286478_2 (sequence is synthesized)
agtctcaagacctcaaccaaggaaccaaccaactctgcacaggaatgcggtttcttcatctccctgtcccaggaattcccccttgcttcttgaccaatcagcaatccccacattttagcc

SEQ ID NO: 934686 - DNA, 120 bp, Artificial Sequence
  ENSG00000286478_3 (sequence is synthesized)
ctacctgttcagaccctttacaagctccatccccaaaccctggagggaggaggatttgaaggttcctctgtctcatttgactgccctacaattattaaactctttctctactgcaactcc

SEQ ID NO: 934687 - DNA, 120 bp, Artificial Sequence
  ENSG00000241316_0 (sequence is synthesized)
gggggcacaggcgttcttaaggctgcagagccctgggtcccccacccggccccggttcactttgagcggtcccaaggcctgagggcctactgtccagtccccaggttatcgtcctgagca

SEQ ID NO: 934688 - DNA, 120 bp, Artificial Sequence
  ENSG00000241316_1 (sequence is synthesized)
aagacagaccccgagccctgcggtcttggggctcaaacagtccctggatggccaaacaagcaaatattcgccatggcagtgggtgctggaagggtggctcacggagctgacgccctccgc

SEQ ID NO: 934689 - DNA, 120 bp, Artificial Sequence
  ENSG00000241316_2 (sequence is synthesized)
agagaaccgtggtctagtcctgcggtcacgaggcctatctgggacagtggtgtttgagctgagactttaacgaatagagacaggtgaggttcctgcagcccagggcttcagcgtgaacaa

SEQ ID NO: 934690 - DNA, 120 bp, Artificial Sequence
  ENSG00000241316_3 (sequence is synthesized)
ccccagaaggaaaaagagtgctgttgttaaaggtatctggcatcatggacccaaccatcaccaggagtttctcacttcatctctgctttattgtagtataatttgcatacaataatggca

SEQ ID NO: 934691 - DNA, 120 bp, Artificial Sequence
  ENSG00000241316_4 (sequence is synthesized)
cacatttaatgtgcacagtgtgataaattttgacatatgtatacatccatgaagccggcaccacaatcaagataatgaacatctcgcttaccccagaagtttcctgtgccctgtcactcc

SEQ ID NO: 934692 - DNA, 120 bp, Artificial Sequence
  ENSG00000241316_5 (sequence is synthesized)
tccgtattcctccatcctcaggatttcatcaaatggtctgctgcactgtgctggaattttgaactccccagagtagtaaacaacatcttctcaagggtatacaagtcatcagatagagaa

SEQ ID NO: 934693 - DNA, 120 bp, Artificial Sequence
  ENSG00000241316_6 (sequence is synthesized)
aacacccattatagagctgtggagcccttacgatatagtgctatgctgcaacaaattagacagaagagtatttgttgaataataaaaggtatcaatgaacgaacaaataaattaatgagc

SEQ ID NO: 934694 - DNA, 120 bp, Artificial Sequence
  ENSG00000241316_7 (sequence is synthesized)
tgatgtattgattaaatgaatttacttctttcagatttacttttccaaactaaaaaaaaattgttttaaactttgttccaaagttatacagtttttacaaaaataaaactttatttttga

SEQ ID NO: 934695 - DNA, 120 bp, Artificial Sequence
  ENSG00000241316_8 (sequence is synthesized)
attgctttatatttacagaaaagttgcaaagatatggaaagttgcctcaccctataattagcttctgacattagtatggtacatttgtcacaattattgaaccagtattgatgatatgtt

SEQ ID NO: 934696 - DNA, 120 bp, Artificial Sequence
  ENSG00000241316_9 (sequence is synthesized)
aaattctatactttataaagatttcctcagtttttacctaatgccatttctctgttccaggaacccatcccagaaatcacatttcatattgatatcaagtttcctaagactcctcttcgt

SEQ ID NO: 934697 - DNA, 120 bp, Artificial Sequence
  ENSG00000241316_10 (sequence is synthesized)
aggtacagtttcagggccaaaattttaagggccttgagtgttttgagcagtactggacaggtgttttttaggatgtccctcgactgagctttgactgatgaattgctcatgattgaattg

SEQ ID NO: 934698 - DNA, 120 bp, Artificial Sequence
  ENSG00000241316_11 (sequence is synthesized)
ggactatgggtcttcagaagaaagatcatgagccctttttgtcacatcatgtcaaagataccatgccatcaatacaacttattactgatgatgttgacattgaccacttgactgagataa

SEQ ID NO: 934699 - DNA, 120 bp, Artificial Sequence
  ENSG00000241316_12 (sequence is synthesized)
catttgtcagatttctccactgtaaagttacttttccccactttccatactatactcttttgtaggaagtcactatgcacaggccatacttaaagagagctccatctccttgagggcaga

SEQ ID NO: 934700 - DNA, 120 bp, Artificial Sequence
  ENSG00000241316_13 (sequence is synthesized)
gtaactacattaaatatttgaaatctttctgcccaggagatttgtctatttttccaatttatttattcaatctattattattatgttagatatgagaccttgctatgttgcctagatggg

SEQ ID NO: 934701 - DNA, 120 bp, Artificial Sequence
  ENSG00000241316_14 (sequence is synthesized)
tctcaaactcctgagctcaagtaatccttctgtctcagcctcctgagcaggtgggactataggcatgcaccactgcacctgacaatcatttattgatggcagtatgaactcatggacatt

SEQ ID NO: 934702 - DNA, 120 bp, Artificial Sequence
  ENSG00000241316_15 (sequence is synthesized)
tgttttatccttaagttataacccaatattatattattttattgctaaattatttcagttttggccattgaagctcttttgtttaatgcccatgtcattttgacatacctctatcattgt

SEQ ID NO: 934703 - DNA, 120 bp, Artificial Sequence
  ENSG00000241316_16 (sequence is synthesized)
gggatttctttttacttttttgcagatatttctttagtttttggcactacaagaggctctagtttcatcatctatcctgccccagcccaagattcaaccatttcttcaagtagcccttgc

SEQ ID NO: 934704 - DNA, 120 bp, Artificial Sequence
  ENSG00000241316_17 (sequence is synthesized)
tcttttttactgtacattgtaattaataatcaagttcttggcactaggttcttcagaaatttttttttagtttatatgtttgttgataaggtattgataaagattctgctagtgattacc

SEQ ID NO: 934705 - DNA, 120 bp, Artificial Sequence
  ENSG00000241316_18 (sequence is synthesized)
aatgtaacttttggcaaattatctgaaacatggaaataataatttctacttcataggactgttgtacattttaaatggattcactaggatagtgcacggagtaaaaggaaacaaatagta

SEQ ID NO: 934706 - DNA, 120 bp, Artificial Sequence
  ENSG00000241316_19 (sequence is synthesized)
gcctcccgagtagctgggattacagttttccaataataacatagaaaaaaggaagaatttgagagtttctcagattaggcaattccttgaagaatctgagaacacagaagctcccctccc

SEQ ID NO: 934707 - DNA, 120 bp, Artificial Sequence
  ENSG00000241316_20 (sequence is synthesized)
cccctccctactttccatgattgaaatcagtgattcattggtttctttgtgtgggcttttgaaagatcattagaaaccaacctgaagatcatgagattcttgtggacacaggagcaatga

SEQ ID NO: 934708 - DNA, 120 bp, Artificial Sequence
  ENSG00000241316_21 (sequence is synthesized)
gtggcaatacagtgctttctaatgcaacctactttaaaagttgctggaaggcagttcaagtaactgccttagtatcaattgttattatttcgaattggttatgaagttgaataagtttgg

SEQ ID NO: 934709 - DNA, 120 bp, Artificial Sequence
  ENSG00000241316_22 (sequence is synthesized)
agtatccttaaccatactttttctaatccaacctggagatgttccatgaaggaaattctggaaattatggttctgacttctttgcaatgtagaggacaccacggaaggggatgacaagga

SEQ ID NO: 934710 - DNA, 120 bp, Artificial Sequence
  ENSG00000241316_23 (sequence is synthesized)
ctttgaggtgacaatagacagtttggcatatttactgcaatcgctcttatttctgcagttctctgaaataggcattatcttcactttttaggtgagaaaatggtcactcagagaggtgat

SEQ ID NO: 934711 - DNA, 120 bp, Artificial Sequence
  ENSG00000241316_24 (sequence is synthesized)
aaacagataaaagaaaataccgaagactgaaaatgcagaaaattcaaccatgcagcccattccaaattaaatatgtcttcctctctaattcctctcttctagcagagaaggggagatgag

SEQ ID NO: 934712 - DNA, 89 bp, Artificial Sequence
  ENSG00000241316_25 (sequence is synthesized)
taaaagtaattgcaatgttatctcctagaatttttatagtttcaggtcttaagtttaagtccttaatccatcttgagctgattttttgt

SEQ ID NO: 934713 - DNA, 120 bp, Artificial Sequence
  ENSG00000241316_26 (sequence is synthesized)
taagtttaagtccttaatccatcttgagctgattttttgtatagggctggacgttcgcttaggcaaggatttcatgaccaacaacctgaaaggaaatgcaataaaaacaaagataaatag

SEQ ID NO: 934714 - DNA, 120 bp, Artificial Sequence
  ENSG00000241316_27 (sequence is synthesized)
ctggaacctagttaaactaaagagcttttgcatggcaaaaagaagagtcagcagagcaaacagataacaaacagagtgggagaaaaccttcataatctgtacatctgacaaagtgctaat

SEQ ID NO: 934715 - DNA, 68 bp, Artificial Sequence
  ENSG00000241316_28 (sequence is synthesized)
tcaaacaaatcagtaagaaaaaaacaattccatcagaaagtggctaaggatataaacgctcaacatca

SEQ ID NO: 934716 - DNA, 72 bp, Artificial Sequence
  ENSG00000241316_29 (sequence is synthesized)
atggccataattaaaaaaaaaaatcaaaaaacagtagatgttagcatggatgcggtgaacagggaacacttc

SEQ ID NO: 934717 - DNA, 62 bp, Artificial Sequence
  ENSG00000241316_30 (sequence is synthesized)
atggccataattaaaaaaaaaaatcaaaaaacagtagatgttaaagccactatggaaaacag

SEQ ID NO: 934718 - DNA, 73 bp, Artificial Sequence
  ENSG00000241316_31 (sequence is synthesized)
aatgaattaacagcatttgcagtgacctgaatgagattggaaacttctcacagatatatgggaactaagttat

SEQ ID NO: 934719 - DNA, 74 bp, Artificial Sequence
  ENSG00000241316_32 (sequence is synthesized)
agaagtgggtgaggtataaaacactacaaatatgctgcggtgtatactgcgcaggtgatgggtgcacgaaaatc

SEQ ID NO: 934720 - DNA, 120 bp, Artificial Sequence
  ENSG00000241316_33 (sequence is synthesized)
agggtgagaagtgggtgaggtataaaacactacaaatatgctgcggtgtatactgcgcaggtgatgggtgcacgaaaatctcacaaatcatccctaaagaacttactcatgtaaccaaat

SEQ ID NO: 934721 - DNA, 120 bp, Artificial Sequence
  ENSG00000241316_34 (sequence is synthesized)
gcaaaaactgcaattacctttgcatgaaccaaaggcctactttggagagtcagaggaattcttaaccataattcaaccaagacatacggtatgtgccttctctttggtggaacagtgaat

SEQ ID NO: 934722 - DNA, 120 bp, Artificial Sequence
  ENSG00000241316_35 (sequence is synthesized)
atacaggctactagcctgtactgagtgtttcagccaaaacacattcttttaaaagtcacagttttaagtgacaatatcccaatgaaaatacaaattaaaaaatgcattggcatatctata

SEQ ID NO: 934723 - DNA, 120 bp, Artificial Sequence
  ENSG00000241316_36 (sequence is synthesized)
ttccctcccaaaataacacacatttggaatatataaagaactcttaaaagtcaatgagaaaaaaagcaatagctcagtagaaaagtgggaagaagacttggacacttcagaaaagagaat

SEQ ID NO: 934724 - DNA, 120 bp, Artificial Sequence
  ENSG00000241316_37 (sequence is synthesized)
atattaaaatagtccataaacagaaataaaaggtgctcaactttatgagtcatctgggatatgtagattaaaaccacagtgcaatattataccacccctaccagaataactaaaaagagt

SEQ ID NO: 934725 - DNA, 120 bp, Artificial Sequence
  ENSG00000241316_38 (sequence is synthesized)
aagttggaaaatactcagtgctgatgagaaagtggggtaattgaaactcttatacatcattctaggaacatccacttaggaaaacaacttggcagtgtctaataaagtccagtatatgca

SEQ ID NO: 934726 - DNA, 120 bp, Artificial Sequence
  ENSG00000241316_39 (sequence is synthesized)
ttccctataacccagaatttttactctcaggtgtatacccaacagaaatgcaggtgtgtgttcaccagaaatcatgttcaagaatgttcatggtatcactagtcatgaggcacaaaaact

SEQ ID NO: 934727 - DNA, 120 bp, Artificial Sequence
  ENSG00000241316_40 (sequence is synthesized)
ggaaatgttcatcaacaatgagtaggataaataagttgtgttaatatttatacaattgaaaattatacagcagaaagaataaataatctaaacctacacacaacagcatgaagaaatctc

SEQ ID NO: 934728 - DNA, 120 bp, Artificial Sequence
  ENSG00000241316_41 (sequence is synthesized)
atgagtggaatgttagatcataacctaaataaacttacctggagcaggtgccactgaagccataaaatggtaggatgaattgctggaggctgactatggactagcttgacagtaaaaaat

SEQ ID NO: 934729 - DNA, 120 bp, Artificial Sequence
  ENSG00000241316_42 (sequence is synthesized)
ttggggaggtccattctgaaggaggcccctcacactttcttggattttatcttcaggaagcccaccagattttcatggtgaagatcttagaaaacatctctcatatcttggtcagttggg

SEQ ID NO: 934730 - DNA, 120 bp, Artificial Sequence
  ENSG00000241316_43 (sequence is synthesized)
ggaaagtagcattttgaaataatcctagagcattctccatagccaaggtttactcctcaacggaaacaactttaccagagccttagttgaccatggagaagggcagttagccccctacat

SEQ ID NO: 934731 - DNA, 120 bp, Artificial Sequence
  ENSG00000241316_44 (sequence is synthesized)
ccctctctagctttcttgtgttacttagtggaaggaaaaaaaggataagaaacacttctgaagtccaattcagggacttgagcccactaaaagactgaaatatacttacctcctccacac

SEQ ID NO: 934732 - DNA, 120 bp, Artificial Sequence
  ENSG00000241316_45 (sequence is synthesized)
cttaccaccacatcaacacagctccagaataatcacaatgggttacaatggaaagagctgcaaaacatagactctatttaagaaggaattcttagggaaatccaatgtggagaaaacaaa

SEQ ID NO: 934733 - DNA, 120 bp, Artificial Sequence
  ENSG00000241316_46 (sequence is synthesized)
gacactgaggaaactaaagtctctggcatctatagctatggaaaacatgaagcacaacccatctgctaggcagattgacataaaacctcatactaaagacctattttcctcagttctcat

SEQ ID NO: 934734 - DNA, 120 bp, Artificial Sequence
  ENSG00000241316_47 (sequence is synthesized)
agttgaaatggattgccacgtttatacatacattgatttttacatgactgcattcagaaacaaaataccatcctctgtgattaatttataaagcttccctctcagttaaattaaaaacaa

SEQ ID NO: 934735 - DNA, 120 bp, Artificial Sequence
  ENSG00000241316_48 (sequence is synthesized)
agtgaatccatagcagcagatccccttttagttagagatctaacctctctcaagaagcaaacatggatttatacctccctcatttgatggtcagcttaggacaattgctgaattctctga

SEQ ID NO: 934736 - DNA, 120 bp, Artificial Sequence
  ENSG00000241316_49 (sequence is synthesized)
cactgttgggaatccgcacagtaaaatacatgtgatttctactgaaaattcagatataagtcaaactgctacattggagaggtaagagattctgattctgccacttaatcatcttctgaa

SEQ ID NO: 934737 - DNA, 120 bp, Artificial Sequence
  ENSG00000241316_50 (sequence is synthesized)
tattaggccaggaaagaggaagtataacatgacttaaatttttgagggtactgggaatctatgcacctctctccataattgtgaccttgacttagctagtgcggtcgtgcagcatgtcac

SEQ ID NO: 934738 - DNA, 120 bp, Artificial Sequence
  ENSG00000241316_51 (sequence is synthesized)
tcgtgcagcatgtcacacatattggctggtaaaatataagatgattaaataaaatacatgaaacaatgtatttttttttttctgagacggaggctggctctgtcacccaggctggagtgc

SEQ ID NO: 934739 - DNA, 120 bp, Artificial Sequence
  ENSG00000241316_52 (sequence is synthesized)
ctgactgcaagctccacctcccagtttcacgccattctcttgcttcagcctcccaaagtagctgggactacaggcgcccgcccccatgccaggctaattttgtttttgtatttttagtag

SEQ ID NO: 934740 - DNA, 120 bp, Artificial Sequence
  ENSG00000241316_53 (sequence is synthesized)
tgtactttatttagtggctacagattcatttttacatgtattaaaatattgctagaacctcaactctttggtttcatggatacaattctcaggacattgtgaaaataaaggccttaattt

SEQ ID NO: 934741 - DNA, 120 bp, Artificial Sequence
  ENSG00000241316_54 (sequence is synthesized)
gaaacaaactttaagacaattttagagaaaatactacaatggggtatgcaagatatgcatgaagaaagtgaaggactgaagtatgggaactaccactagggtagagttatttttcttcct

SEQ ID NO: 934742 - DNA, 120 bp, Artificial Sequence
  ENSG00000241316_55 (sequence is synthesized)
tggtgagccttgtctgtcttttctgaagtatttggagaaaagggagggaggacagagtgggaggaagagagaaaatggacctgaccagttagagaactatagttattcaaagtttatcaa

SEQ ID NO: 934743 - DNA, 120 bp, Artificial Sequence
  ENSG00000241316_56 (sequence is synthesized)
gtagaaaaagagaaacattcaaaaacatattttgaaatatattttgaaaaagcaaatacaaacatttagagaatagtgtcatgaaccccaatatagctatcacccaaattcaacaatgga

SEQ ID NO: 934744 - DNA, 120 bp, Artificial Sequence
  ENSG00000241316_57 (sequence is synthesized)
ttttgttgggttctcagatcaagtcatgaccaatcttgtttcagttgcatcccatccatttcctttcatcctcccagattattttgaagcaaattccaggtatcatatcttgtctatatg

SEQ ID NO: 934745 - DNA, 120 bp, Artificial Sequence
  ENSG00000241316_58 (sequence is synthesized)
tatctcagcagtcatcttagaaagataagaactttttttaaaaacagagatttctagttgcttttctggcaggtaagaaacatagaagttgccactctgtcctaacaagtacaaataaat

SEQ ID NO: 934746 - DNA, 120 bp, Artificial Sequence
  ENSG00000241316_59 (sequence is synthesized)
gaggtcatcagacccatcaaagaaatgaggtcacaggaaagactactgtccccaaaattggagagattgggagctacaatccaagatgagatttgggtggggatacaaccaaaccatatc

SEQ ID NO: 934747 - DNA, 120 bp, Artificial Sequence
  ENSG00000241316_60 (sequence is synthesized)
accatgctaacatcagtcaaaagaagtggaagtagctatactaatttcagacacagcagacctcagagccaggaaaattatcagaaataaagaggggatattacttaatgataaaagtgt

SEQ ID NO: 934748 - DNA, 120 bp, Artificial Sequence
  ENSG00000241316_61 (sequence is synthesized)
caatgctccaagaagacataacagtctttaagatgtgtatgcctaatgacagtgtcaaaatagttgaaacagaaactgagagaattgcaaggagaaacaggagaatccacccttatagtt

SEQ ID NO: 934749 - DNA, 120 bp, Artificial Sequence
  ENSG00000241316_62 (sequence is synthesized)
ggagactccaacactcctctattagaagaggacagatccaaaaggtggaggacatggttgaactcaagagcaccatcagtcaacttgtattgcacatattagaaaagaagaatctcaaat

SEQ ID NO: 934750 - DNA, 120 bp, Artificial Sequence
  ENSG00000241316_63 (sequence is synthesized)
caataatttaagccctcaccttaggaagctagaaaaggaagagcaaattaaatccaaagtaagcggaagaaaagaaataataaaagctagaatgcacatcaatacaattgagaaacaaaa

SEQ ID NO: 934751 - DNA, 120 bp, Artificial Sequence
  ENSG00000241316_64 (sequence is synthesized)
agtcaacaaagaaaataaatgaaatgaaaaactggttctttgaaaagatcaataaaacctctagctgggctaagagagagagatgacataaattactagtaccatacattaaagagggga

SEQ ID NO: 934752 - DNA, 120 bp, Artificial Sequence
  ENSG00000241316_65 (sequence is synthesized)
tattactacagaacccgttgatgttaaaatgataacaaaaggttattatgaacagttctatgctcacaacttgataatctagatgaaatggacacaatttcttgaggaatacaacgtgtc

SEQ ID NO: 934753 - DNA, 120 bp, Artificial Sequence
  ENSG00000241316_66 (sequence is synthesized)
aaatgttacacaacaagaaagaggcaatcataagccaatatctattaaagacattgaatcaataactaataacctttaacctttaaaaataaaagcaccagacccagaggggttcactgc

SEQ ID NO: 934754 - DNA, 120 bp, Artificial Sequence
  ENSG00000241316_67 (sequence is synthesized)
taaattataccaaacatttaaggaaaagaaatcataccaattctctacaatctcttccagaagattaaaacagtgaatagtttctaactcagtctaagaggccaacactgcttcagtaca

SEQ ID NO: 934755 - DNA, 120 bp, Artificial Sequence
  ENSG00000241316_68 (sequence is synthesized)
aaaattagacaaagatattacatggaaaaaccataaagagtaatacctcacacatacataggtacaaaaatccttaacaaaatattagtaagttcaatccaacaatgtataaaaataatt

SEQ ID NO: 934756 - DNA, 120 bp, Artificial Sequence
  ENSG00000241316_69 (sequence is synthesized)
atgcaccatgatcaagtgtggttatcaacaaactgattttaaagtttctatggagaagcaaaatacccagaatagccaacccaatatcaaaagagaagaacaaaactggaggcagtaaaa

SEQ ID NO: 934757 - DNA, 120 bp, Artificial Sequence
  ENSG00000241316_70 (sequence is synthesized)
agtgttgtggttgacagggcttagatgagagggacagatgaatagacagagagcatagaggatgtttagggcagttaaattattctgcatgatactttaatgtgaatacatgtcactata

SEQ ID NO: 934758 - DNA, 120 bp, Artificial Sequence
  ENSG00000241316_71 (sequence is synthesized)
catttgtccaaacccacagaatgtccaacactaagtgatccctaatgtaaactgtggactttgggtgaaaatggtgtgtcagtgtaggtttattggttgcattaaatatacactctagtg

SEQ ID NO: 934759 - DNA, 120 bp, Artificial Sequence
  ENSG00000241316_72 (sequence is synthesized)
tatgatgtagagagtagggtatgttgtgtgtgtggggtgggcgggaagcaggaggtagataggaactcactgcactttctgcactttttgctgtgaacctaaaactgctcaaaaaataaa

SEQ ID NO: 934760 - DNA, 120 bp, Artificial Sequence
  ENSG00000241316_73 (sequence is synthesized)
ttcctccatcctcagtgatatttcccaaaacatgttctccaagctgttaatattctatgtaaatgaaagaaaaaggaagaaagaaaaagaaaggaagaaaagaaggaggaagaaaaagaa

SEQ ID NO: 934761 - DNA, 120 bp, Artificial Sequence
  ENSG00000241316_74 (sequence is synthesized)
gggagggagaaaaaaggaaagaaaaagaaaagacaaactcgtgagtttggaaagcactttcattacagaaagatttatctgactattatgttaatatccatgtgacagtaataaagaaat

SEQ ID NO: 934762 - DNA, 120 bp, Artificial Sequence
  ENSG00000241316_75 (sequence is synthesized)
catctattggagataaatatagaatagtttcaaaacttgctttctctaaatcagagtgtctgggtttaagtgacctttcccaatgttctatgttctttgtcaaatgacttcgtctctctg

SEQ ID NO: 934763 - DNA, 120 bp, Artificial Sequence
  ENSG00000241316_76 (sequence is synthesized)
attttagttccctgatctgcaaaataagataatgattatgacctctgaaatggcctgcaattatcctctcacactgtgttcacacacttggtagtctcttcccccatgagaaaggaccga

SEQ ID NO: 934764 - DNA, 120 bp, Artificial Sequence
  ENSG00000241316_77 (sequence is synthesized)
ttccttgctctctcttggataacttgttctggaggaagccaactgccatgtcatgaggatcctcaaagagcccattagaatgcctacgtagagaaaaagccttcaactaataaccagcac

SEQ ID NO: 934765 - DNA, 120 bp, Artificial Sequence
  ENSG00000241316_78 (sequence is synthesized)
caacatggcagccatgtgagcaagccaactgggaagtgcaccctgaggacataatcaagctctcagagtacttcagctaaggctgatgacttgactgcaactaactgagacatgttgagc

SEQ ID NO: 934766 - DNA, 120 bp, Artificial Sequence
  ENSG00000241316_79 (sequence is synthesized)
ctgaactcccagtcaagatgctaccaaactcttggcccatagaaaagcatgagcccatagagaagccatccactttaccaggcatgagtggaagaaacagcaacgaatcctaatacttgc

SEQ ID NO: 934767 - DNA, 120 bp, Artificial Sequence
  ENSG00000241316_80 (sequence is synthesized)
atacttgcaggaaaactgagtgtgttggagttttttaaagaaaaaattctcagagttccacagttgcattgaaaactaatagaccacaggccgggcacagtggctcacgcgtgtaatccc

SEQ ID NO: 934768 - DNA, 89 bp, Artificial Sequence
  ENSG00000241316_81 (sequence is synthesized)
gtaatcttatgggtgaatagcgactgatatgaacagaatatctttgaaatttgtaagccaaacttgcaactttgagggagataaagaaa

SEQ ID NO: 934769 - DNA, 120 bp, Artificial Sequence
  ENSG00000241316_82 (sequence is synthesized)
tttgtaagccaaacttgcaactttgagggagataaagaaacaatttaccaaacaatatggaaaacactgaaatccccaaagaaagggaaaattaaatgtggcttttactaggaatttacc

SEQ ID NO: 934770 - DNA, 120 bp, Artificial Sequence
  ENSG00000241316_83 (sequence is synthesized)
atattaacatcctacctggcacatgataagtgcccaatgaatgataaccaaaagaaaaaaaccataatgttaagtgtggttactggctctattttacaaataaagatgttgaaactcaaa

SEQ ID NO: 934771 - DNA, 120 bp, Artificial Sequence
  ENSG00000226680_0 (sequence is synthesized)
agatatggctgctatgaaatctgcttctgatgtgaagaaagatctcagctctgcaaaaaattttgtttttggtattaaagttatgctggcctcagagaatgagttaggaagcactctctc

SEQ ID NO: 934772 - DNA, 120 bp, Artificial Sequence
  ENSG00000226680_1 (sequence is synthesized)
catttatcttgaaaggtcttgtctccttccaaaggagaatgaaggggtgtttacattttttaatccttatgttgcgctctgacatgaggtgtccttcctcactgaagctcaaacaaaaag

SEQ ID NO: 934773 - DNA, 120 bp, Artificial Sequence
  ENSG00000226680_2 (sequence is synthesized)
gctacacacttctgaaactggagtacagtttcaactctgtgcagggagggtgcatgagagcagaatatctgtgggacatctctctggaacatcaatattactacaggatttggaagaaaa

SEQ ID NO: 934774 - DNA, 120 bp, Artificial Sequence
  ENSG00000226680_3 (sequence is synthesized)
aattaaaaaaatttccaagagtgataaggggactctccaactgtaccacctgtcatctgagcatactccagcccatgaccatcagccccagcacctccagattggcaaagcatcagaact

SEQ ID NO: 934775 - DNA, 120 bp, Artificial Sequence
  ENSG00000226681_0 (sequence is synthesized)
gtcagttaaaatttcaccattttgcctcttagtgcacatgctttaactcattccccaactcctgagatcttatggggaagctgctgatcattactttcagttgtttctatctactgggag

SEQ ID NO: 934776 - DNA, 120 bp, Artificial Sequence
  ENSG00000226681_1 (sequence is synthesized)
acagcctcttcctggcaccagctatgaccaattattattatagggagacagcttaacaactgcctggccatcactggatggttgcctcacattcgtgaaggggtgtctctcttgcccggc

SEQ ID NO: 934777 - DNA, 120 bp, Artificial Sequence
  ENSG00000226681_2 (sequence is synthesized)
gagccatggggcttggaatctatttagatcaatacacaaggcagaaaggacaagacccagttgctgaactgaaacaactgattccattggtagtctctctatcagcaccaaacctggaaa

SEQ ID NO: 934778 - DNA, 120 bp, Artificial Sequence
  ENSG00000226681_3 (sequence is synthesized)
tgccactcctcaagaaaaagaccaccaatccaagcacctttctaaaatcacttagtggaggcctgaatcttgtaagaaaactaacttagagtttctgcatttacaaataaaatttctttt

SEQ ID NO: 934779 - DNA, 120 bp, Artificial Sequence
  ENSG00000226688_0 (sequence is synthesized)
tgccgcccctggcctgccaggacccagagggagcggagcacgcgcctttgggaatcttcggtgcgccaagtctgttcgccgccggggtctatcacccccgcccctcgcctctgcccgtga

SEQ ID NO: 934780 - DNA, 120 bp, Artificial Sequence
  ENSG00000226688_1 (sequence is synthesized)
gcgtgtgagttgtagcgtaccctggggtctgttctggaggaggcctgagagcggggttgcctggggcgtgggtctctcatccctctcgtcctggtgaagaagaagagtatacccagcgga

SEQ ID NO: 934781 - DNA, 120 bp, Artificial Sequence
  ENSG00000226688_2 (sequence is synthesized)
atggcctgtccagaagacagccaaatacatccttcaaacagacttcactgcaggagacagagtggattcatcctgtattctccatgtagacttccatcttcatgagtactccaagaagat

SEQ ID NO: 934782 - DNA, 75 bp, Artificial Sequence
  ENSG00000226688_3 (sequence is synthesized)
tccatgtagacttccatcttcatgagtactccaagaagatggttcagttgactattgcaataccagtagagtggg

SEQ ID NO: 934783 - DNA, 89 bp, Artificial Sequence
  ENSG00000226688_4 (sequence is synthesized)
gtgttgaaataatcggaaagtttggaacctcctagagactgtgaatggcattgacaaaaatactgatagtgatatgaacaataaggtcc

SEQ ID NO: 934784 - DNA, 120 bp, Artificial Sequence
  ENSG00000226688_5 (sequence is synthesized)
tgaggtggtctcagatggagatgaagaccttgttgggaactgaagtaaaggtgacccttgttatgttttagcaaggagactggcagcatttcacccttgccctagagatttgtggaactt

SEQ ID NO: 934785 - DNA, 76 bp, Artificial Sequence
  ENSG00000226688_6 (sequence is synthesized)
tagcaaggagactggcagcatttcacccttgccctagagatttgtggaacttagagcttgagagagatgacttagg

SEQ ID NO: 934786 - DNA, 77 bp, Artificial Sequence
  ENSG00000226688_7 (sequence is synthesized)
tgacttgggtgctgttaaaaacattctgttttaaaagggaaacaagagcataaatgtggaaaattaaggagaaattc

SEQ ID NO: 934787 - DNA, 85 bp, Artificial Sequence
  ENSG00000226688_8 (sequence is synthesized)
gccaacatagagcttgggctgtggcttcagagggtagaggccccaagcattggcagcttccatgtgatgttgagcctgtgggtgc

SEQ ID NO: 934788 - DNA, 86 bp, Artificial Sequence
  ENSG00000226688_9 (sequence is synthesized)
catagagcttgggctgtggcttcagagggtagaggccccaagcattggcagcttccatgtgatgttgagcctgtgggtgcagagat

SEQ ID NO: 934789 - DNA, 120 bp, Artificial Sequence
  ENSG00000226688_10 (sequence is synthesized)
agtttgctgcaggggcagagccctcatggggaacctctcctagggcagtgtggaagggaaatgtggggcagagcccccacacagagtccctgttggggcactgcctagtggagctgtgag

SEQ ID NO: 934790 - DNA, 120 bp, Artificial Sequence
  ENSG00000226688_11 (sequence is synthesized)
gcctggaaaagctacagacactcaacatcagcctgagaaagcagccaggagggaggctgtactctgcaaagccacaggggcggagctgcacaagaccatgggaacctatctcttgcatca

SEQ ID NO: 934791 - DNA, 80 bp, Artificial Sequence
  ENSG00000226688_12 (sequence is synthesized)
ttggccaatttctctattgtatctaggaggtaactagcttgcttttacaggcttgtaagtggaagggacttgccttgtct

SEQ ID NO: 934792 - DNA, 78 bp, Artificial Sequence
  ENSG00000226688_13 (sequence is synthesized)
taagactttggggaactgttgggaaggaatgattggttttgaaatgtgaggattatgaaatttggaggagcccaggga

SEQ ID NO: 934793 - DNA, 81 bp, Artificial Sequence
  ENSG00000226688_14 (sequence is synthesized)
cagtgggaggtaattgaatcatggaggccagtcttttctgtgctattctcgtgataataagtcccacaagatctggtgggt

SEQ ID NO: 934794 - DNA, 120 bp, Artificial Sequence
  ENSG00000226688_15 (sequence is synthesized)
gctattctcgtgataataagtcccacaagatctggtgggtttatgaagagtttctgcttttgcttcttcctcattttgctcttgatgccaccacgtaagaagtaccttttgcctcccacc

SEQ ID NO: 934795 - DNA, 120 bp, Artificial Sequence
  ENSG00000226688_16 (sequence is synthesized)
ccatgtggaactgtaagtccaattaaaccctttttgtttccagtctcagatatgtctttatcagcagcatggaaacgaactaatacaatcatagtttttaaaaaccaatctaaatgtaac

SEQ ID NO: 934796 - DNA, 120 bp, Artificial Sequence
  ENSG00000226688_17 (sequence is synthesized)
aaaaccaatctaaatgtaactattgaacatgattagctgtttcatccctagtagagtgacagaaggaaacatccatagacaggagtaataagaaaccagctaaacttctaaaccattttt

SEQ ID NO: 934797 - DNA, 120 bp, Artificial Sequence
  ENSG00000226688_18 (sequence is synthesized)
aaaggatgcgtgtgagctggcataacctacctactctttcctatgggcctctactgagagcatggaggtaatacatctaatacactgaagaccagggcaagagagctggaagaaatccct

SEQ ID NO: 934798 - DNA, 120 bp, Artificial Sequence
  ENSG00000226688_19 (sequence is synthesized)
cttaagcactccaggccttcactgagtatgaggtgctggtctccaaaggcagagggcaaggcaaggcagagagggatctcctggggcacagacaactgacaaaagaaacacttggattgt

SEQ ID NO: 934799 - DNA, 120 bp, Artificial Sequence
  ENSG00000226688_20 (sequence is synthesized)
tgtataagaggagtgagctttgtaaataccacgttagctggcctgctgtggaacagaatgcctgtgaatgacagtagtcaggtagtggatgaacactgatctgagagcctgtaaaagaaa

SEQ ID NO: 934800 - DNA, 120 bp, Artificial Sequence
  ENSG00000226688_21 (sequence is synthesized)
ctctttggaatgataatgtcatctagacctttgatacgcaaagtgtgattcctggacagatgtattggctttacctggcagcttgttggaaatgtaaaacctcaggcctcaccccagacc

SEQ ID NO: 934801 - DNA, 120 bp, Artificial Sequence
  ENSG00000226688_22 (sequence is synthesized)
ttgactattgcaaagattggtttagagtatatatttcaccaagttctggccagcaggatctgaaaagatgtcagttggcacttctgcaaaatgtgtgtgcaagagatgtgtgcaaggaaa

SEQ ID NO: 934802 - DNA, 120 bp, Artificial Sequence
  ENSG00000226688_23 (sequence is synthesized)
accttaaacatctttcctgctttggctttgcatgtgaaagaaaatatgatgcttggatgtctgattccaaaatggcggcatggaagcaagctggcttcatgccccccaaccacagacaac

SEQ ID NO: 934803 - DNA, 120 bp, Artificial Sequence
  ENSG00000226688_24 (sequence is synthesized)
cagaaacaaatgtacagcactgagattatcaccagcaatatcccagaaatcaaatatgaagatgagacagttcctggggccacaaagaagtgaaaaaactccaagcagacgggaagataa

SEQ ID NO: 934804 - DNA, 120 bp, Artificial Sequence
  ENSG00000226688_25 (sequence is synthesized)
tcaaacttccacatccatgtcacctctcccccgattctgcctgacaccaagcttgtggaaaatttcccccaaactcacaatttgtacactggaaaaagtgagatcaaggtggacaatcag

SEQ ID NO: 934805 - DNA, 120 bp, Artificial Sequence
  ENSG00000226688_26 (sequence is synthesized)
gcatcgtgacatcctgaagggagatatccctggggacaggcagagacaaggaagaggcagatttagcatccccagccctgggaagtctgctctgtcacttggccaaaggagatgccaaat

SEQ ID NO: 934806 - DNA, 120 bp, Artificial Sequence
  ENSG00000226688_27 (sequence is synthesized)
cagagtggctgttctatggctgtaggaggtctgtcccacaaggtcccctgggcacaaccccctagtcagttttcccacactgctggggctaacctctttgggacctcccccattccggaa

SEQ ID NO: 934807 - DNA, 120 bp, Artificial Sequence
  ENSG00000226688_28 (sequence is synthesized)
aggcagtactcttattgttgactagaaaggagatgaacctgggcttaaggtgctgcctagagccaaaaaggaggcagtgacctagtgatatggtgcttggagcagtaacataccttagca

SEQ ID NO: 934808 - DNA, 120 bp, Artificial Sequence
  ENSG00000226688_29 (sequence is synthesized)
caaaaagatcacaacgatagtggaaaaaactgatcccaagttctgacatagttgagctgaagaaccaacccctaatcatctacctcaagacattatgtaagagaaaaatgcatcctatta

SEQ ID NO: 934809 - DNA, 120 bp, Artificial Sequence
  ENSG00000226688_30 (sequence is synthesized)
tttaaatcttttgtaggcacatattctataacttgtaaacaagacatcctatacctcatcatttcacaaacttaccccaaaatccccctggagtggtggcaagaaaatcccattgaaggc

SEQ ID NO: 934810 - DNA, 120 bp, Artificial Sequence
  ENSG00000226688_31 (sequence is synthesized)
acactgggagtaagggcagtaactggtgttgaagagctccaggatgctttgatggcattgttgatagtttccaataccctggatttcaaactgctggaatggaagagtcatctcaaatct

SEQ ID NO: 934811 - DNA, 120 bp, Artificial Sequence
  ENSG00000226688_32 (sequence is synthesized)
cttggtgcagggggtcttgtaaaggtcacttacgttcactaccttcttatatccaggatgaaagcatgggtccctgagaatttcattacttgcaacctgaatggaaaaatcacttgaaag

SEQ ID NO: 934812 - DNA, 120 bp, Artificial Sequence
  ENSG00000226688_33 (sequence is synthesized)
catcatgtgtgaacgctttggatacaaaaggtacagtctgacttaatcaatatgtaggcactgtacaacatcccaccacttggtattggaatcaatatgtcctgccctgcctttttaccc

SEQ ID NO: 934813 - DNA, 120 bp, Artificial Sequence
  ENSG00000226688_34 (sequence is synthesized)
gcagctggcttggctttttcagaggaaacagagactctcagacatgaatactgtgacactgaccaccaggccaacttaacatcagcagatatcctgtctcagatgaagagatggagtctc

SEQ ID NO: 934814 - DNA, 120 bp, Artificial Sequence
  ENSG00000226688_35 (sequence is synthesized)
ttgactattgcaaaggtaaaaatccaagagatacagatacagaataggacagagagacatatttttaagctattgattacaattatggtatgcctatagattgcagaaccgaggagaaag

SEQ ID NO: 934815 - DNA, 120 bp, Artificial Sequence
  ENSG00000226688_36 (sequence is synthesized)
ggaacattatgatttaccatcaagaaaaacttagaattggtgctgagtagttcattctaagaattaccatttatctgtatttgcccccattttcattgttactaggccaaaagtcatttc

SEQ ID NO: 934816 - DNA, 120 bp, Artificial Sequence
  ENSG00000226688_37 (sequence is synthesized)
ttaataagttggatgtcaaaatcaacttgtgttattataaaattagcaatctacattatgtgtttctttacatttttataggagtatttataaatatacctaagaaaactgacaatgtgg

SEQ ID NO: 934817 - DNA, 120 bp, Artificial Sequence
  ENSG00000226688_38 (sequence is synthesized)
gtggagtacaaatgttgcattttcaaaactgggaatctgtttattgaggctctatttttagttatgtatgataatagactgcatttcaggtttcaaaccttgtaaaaataatttccttat

SEQ ID NO: 934818 - DNA, 120 bp, Artificial Sequence
  ENSG00000226688_39 (sequence is synthesized)
taatttccttatgatatgtttactcattttgcaaataattattgtgtcatatagcaagagattgtacttccattcagctggttaaagtacaaaatcattgatatggtttggctgtgtccc

SEQ ID NO: 934819 - DNA, 70 bp, Artificial Sequence
  ENSG00000226688_40 (sequence is synthesized)
cacccaaatctcaacttgaattgtaccttccagaattcccacaggacccagggggaggtaattgaatcaa

SEQ ID NO: 934820 - DNA, 76 bp, Artificial Sequence
  ENSG00000226688_41 (sequence is synthesized)
tggttttatcaggggtttctgcttttgctgcttcttcatttttctcttgctgctgccgtgtaagaagtggaactat

SEQ ID NO: 934821 - DNA, 120 bp, Artificial Sequence
  ENSG00000226688_42 (sequence is synthesized)
actgtcatggctgctgtcagtgagggcccgtaatggagatcgagtcaagggttgcccagggacacttaagagccttcggcttcaaggaggcctctcaaaggacaaaggatgagactgcct

SEQ ID NO: 934822 - DNA, 120 bp, Artificial Sequence
  ENSG00000226688_43 (sequence is synthesized)
ggcggcagagtgccccccacaatcgtaggaactgtgtcgccgcgcttcccgttaacttgccgctaagtttttctagaaaagtcgcccttcttgccaggggtgtcctatagactttgtcat

SEQ ID NO: 934823 - DNA, 120 bp, Artificial Sequence
  ENSG00000226688_44 (sequence is synthesized)
aatgtgagttaatcattaacatttcctagtggttaaaattactttttaagcgcttaactgtgtattttttagattgaagatttcaaatgaaattttgatttgactgaaatatttaatatg

SEQ ID NO: 934824 - DNA, 120 bp, Artificial Sequence
  ENSG00000226688_45 (sequence is synthesized)
tgatgagttgatattaaaatacagaagattactatttttatagaaacaataatgtagaaactaatatttgaagcaggtttactccacatactgtgttataatttaaattttcacttaaac

SEQ ID NO: 934825 - DNA, 120 bp, Artificial Sequence
  ENSG00000226688_46 (sequence is synthesized)
tctcaaaatcagaagagctgacctagtaaggcttaaacctctaaaacttgtggttttaacaaggcttaatatacgtagttataatagtttttaaaaaaattgttatcaagttcctcaggt

SEQ ID NO: 934826 - DNA, 120 bp, Artificial Sequence
  ENSG00000226688_47 (sequence is synthesized)
caatgtgttgggtgtttaggtcgccattccatcactttactcttcagagtcctttcgatcctaagatatgcatgactcttggccagtgattctcaacctcggctgcacattggcatcaac

SEQ ID NO: 934827 - DNA, 120 bp, Artificial Sequence
  ENSG00000226688_48 (sequence is synthesized)
tggggaaccttcaaagctcctggcatgtgggttccaccctcagagattgtgatgtaatgcactgacagtcaaattgggaacaactgtaaattggctcagttcattcatcttttactgctg

SEQ ID NO: 934828 - DNA, 120 bp, Artificial Sequence
  ENSG00000226688_49 (sequence is synthesized)
tacagaagatttcattgtataagtacttcacaactcatgtactgatttctagttgatgaactgtttcaaatttttgttatttcaagcaattctctaatgaatgttgttgtacttgtctcc

SEQ ID NO: 934829 - DNA, 120 bp, Artificial Sequence
  ENSG00000226688_50 (sequence is synthesized)
ccgtgaatgttcctctggggtatatactgagaagtttgaattggcacatcaaaggttgagcatcttcacctttaccaggtattatcaacatattgttttccaaagcatttacagaaatgt

SEQ ID NO: 934830 - DNA, 120 bp, Artificial Sequence
  ENSG00000226688_51 (sequence is synthesized)
gtgcttccaccacttctctgcctctttgacaacactcagtatgatcacacatttttttttgccaattttatgcatgtgaaataattttattgttttagttgtttatttatcttagagaaa

SEQ ID NO: 934831 - DNA, 120 bp, Artificial Sequence
  ENSG00000226688_52 (sequence is synthesized)
gtgcagtggtgcgatcatagctcactgtaacctcaacctcctgggctcaaacagtcctctcacctaagcgtcctgagtagctgggactacacttgcgcatcatcaccatgcccgggtagt

SEQ ID NO: 934832 - DNA, 88 bp, Artificial Sequence
  ENSG00000226688_53 (sequence is synthesized)
agtcctctcacctaagcgtcctgagtagctgggactacacttgcgcatcatcaccatgcccgggtagttcttttgtttttatttttat

SEQ ID NO: 934833 - DNA, 120 bp, Artificial Sequence
  ENSG00000226688_54 (sequence is synthesized)
gttgggattacaggcataagccaccatgtccagcaattgttttattgttttaaattgtatttacttgattatgagtgaggtttagcatgtaagttactgcttctatgaattgtcttttgc

SEQ ID NO: 934834 - DNA, 120 bp, Artificial Sequence
  ENSG00000226688_55 (sequence is synthesized)
tcttttgcctaatttttctattgttcttttgctctctcttatcctttctctctctctccctccctccctctgggctcctgtctcctcatttgtggactgtgcaattgctgacaccctgca

SEQ ID NO: 934835 - DNA, 120 bp, Artificial Sequence
  ENSG00000226688_56 (sequence is synthesized)
cagcttggccctcaatccagaaacagctgttgacatggtatttctagtgccttcccaaagtaatactgagtacatcacagatccattagccaacccatgtagtgattgagttacttcttg

SEQ ID NO: 934836 - DNA, 120 bp, Artificial Sequence
  ENSG00000226688_57 (sequence is synthesized)
atagctttccttcccatctcctttcaaaaacagggaagtaaagtagccccaccacagtccctgtctttaaaaagtgatgcttgctctggttctctggctttcatgaagcattttcagatc

SEQ ID NO: 934837 - DNA, 120 bp, Artificial Sequence
  ENSG00000226688_58 (sequence is synthesized)
ttgctgccatccctgctccagcctactcactgctagtgtttctgtcctgtttctattccgtgagacaactatcatggttgggagtccagaaagctttttgtcaatttttctacttgatcc

SEQ ID NO: 934838 - DNA, 120 bp, Artificial Sequence
  ENSG00000226688_59 (sequence is synthesized)
ttaccatagatatggcgcaggagggctaggtcagagttagaacttactacacatcttgaacattatatgttatgttttatggtgaaaaaattttaaattctattttagcatctaaatttg

SEQ ID NO: 934839 - DNA, 120 bp, Artificial Sequence
  ENSG00000226688_60 (sequence is synthesized)
catttaagatgtcactttcttctcaatttattttttctgcaagtaggggaaagagcctgtgagctggatggcagagaaaactagtttttaaattaatattgccaaatatttcagtaacca

SEQ ID NO: 934840 - DNA, 120 bp, Artificial Sequence
  ENSG00000226688_61 (sequence is synthesized)
accaactataaaacataataagagctgtcacaattagtaaagattagaagcaatggtaactctcatacagacacccctgggaaaatatgatttacctgtatgctttgtatttttgttcct

SEQ ID NO: 934841 - DNA, 120 bp, Artificial Sequence
  ENSG00000226688_62 (sequence is synthesized)
tgaacgttttttggaagcaactgcttccagaaactttcctttgaatagtcaaaaaatacagccattggtgtattattttgttgaatattaaaccagacctatgaaaacattaatataaca

SEQ ID NO: 934842 - DNA, 120 bp, Artificial Sequence
  ENSG00000226688_63 (sequence is synthesized)
ttagtgtaggtccataggaacacaaggcccattgttggtaaggaaggagcaaaattttacagtcttactactcaatgaagtggcagaatcccagcggggttctgaggcaggagataaaga

SEQ ID NO: 934843 - DNA, 120 bp, Artificial Sequence
  ENSG00000226688_64 (sequence is synthesized)
gattctagggtttcatgatcattagactacctcaacggttctcatccttgaaggcactacacaatcacctggaggagctttagtgataaaagattgccccggccccatgccctagggaat

SEQ ID NO: 934844 - DNA, 120 bp, Artificial Sequence
  ENSG00000226688_65 (sequence is synthesized)
ctgatagactatctatatttaaagttccccaggtgattctagtgtgtagccagggtgactctagaggagataactcaagattttttttccccatatacttacatttctatcatcaaacaa

SEQ ID NO: 934845 - DNA, 120 bp, Artificial Sequence
  ENSG00000226688_66 (sequence is synthesized)
acaatctacactttttaagggacaaaacgggtcaaactgcttataacattggccagttgatggattccaaagcaaatattcattagtttcttgagttactacataagccacatgcccctg

SEQ ID NO: 934846 - DNA, 120 bp, Artificial Sequence
  ENSG00000226688_67 (sequence is synthesized)
tatgagaaaaaagaaagtaatttttggtggatttaaataatttctatatatggaaattatactgtgatgattctaatttttaaagccttttttagtggagtgtggtggcttatacctgta

SEQ ID NO: 934847 - DNA, 82 bp, Artificial Sequence
  ENSG00000226688_68 (sequence is synthesized)
aaccctgtatctatcacaaaaaattttttttttaatttgctgggcacagcggcacacacacctgtagtcccagctacttggg

SEQ ID NO: 934848 - DNA, 120 bp, Artificial Sequence
  ENSG00000226688_69 (sequence is synthesized)
aggctaaggtgggaggatcgcttgagcctgaggagttgagactgcaataagctgtgataatgccactgccctatagcttgggtgacagagtgagatcctgtctcaataacaaacaaacaa

SEQ ID NO: 934849 - DNA, 120 bp, Artificial Sequence
  ENSG00000226688_70 (sequence is synthesized)
atagcttgggtgacagagtgagatcctgtctcaataacaaacaaacaacaaaaataaataaaagcctttttgagggcttttacattttctttgaaataaaaaaaaaaaaaagaaagaaaa

SEQ ID NO: 934850 - DNA, 120 bp, Artificial Sequence
  ENSG00000226688_71 (sequence is synthesized)
attttgttccttatttatgtattgagactgtgcttataaatgcattcacacgcattgaagtacataatttgatcgtcatgccagcctggaatcttgctttttgtatggtttcttgcaggt

SEQ ID NO: 934851 - DNA, 120 bp, Artificial Sequence
  ENSG00000226688_72 (sequence is synthesized)
aggtctattgggttcttggcatagtacctggacaaaacattgttaaggtggaaattttcattgtatttatcacttcaaacacttgaccagtttatttagttttcaagcgctttagacaac

SEQ ID NO: 934852 - DNA, 120 bp, Artificial Sequence
  ENSG00000226688_73 (sequence is synthesized)
tatatgtgggcttgacttagtgtataataaatgtaaagtttgatctcaagtagttgacatttatggagtatttaccatatgccaatctttgtgataattgctagacatattttatttaat

SEQ ID NO: 934853 - DNA, 120 bp, Artificial Sequence
  ENSG00000226688_74 (sequence is synthesized)
gcttacagcagtactgtgagttaggtttgttaaatccctgttttaatagatggagaaactgaggcaaggacggattaagttacaaatccgtctttgtaacttagagccatcttcttacct

SEQ ID NO: 934854 - DNA, 120 bp, Artificial Sequence
  ENSG00000226688_75 (sequence is synthesized)
acttgttttgtatgacacccttttcctccatataactgaacactggtagaagagtgaatgactgtagaaaacagacctggactctattctacctgtccagctttgtaaactagggcaagt

SEQ ID NO: 934855 - DNA, 120 bp, Artificial Sequence
  ENSG00000226688_76 (sequence is synthesized)
tgtgtgaccactctgaatttcattttcctcacctataataaatgaaaactttgaactattatgttttattgaatcttgaatcatcagaaatccttaaggctgggtgtggtgcttcacgcc

SEQ ID NO: 934856 - DNA, 72 bp, Artificial Sequence
  ENSG00000226688_77 (sequence is synthesized)
tgtaatcccaccactttgggaggccgtcagcatagcgatatcccatctctaccacaaaaaaaaaaaaaaaaa

SEQ ID NO: 934857 - DNA, 120 bp, Artificial Sequence
  ENSG00000226688_78 (sequence is synthesized)
tattaattaaaattaaataatttttatttcaacaaaatccctgggtaatttgtatgtacattaaattttgagatgcatgatcttttaaggttcattctaatccttaaaattctgttttaa

SEQ ID NO: 934858 - DNA, 120 bp, Artificial Sequence
  ENSG00000226688_79 (sequence is synthesized)
taatgtgtacaatgaagtgctgcatggcaaactacacagaaactaaaggcatgttccaaaaaggaaaagttccatgtggctaggggaataaaagcttcatcagggaaccaggagttgggc

SEQ ID NO: 934859 - DNA, 120 bp, Artificial Sequence
  ENSG00000226688_80 (sequence is synthesized)
tggttcttaaaacctggagaaagaagatggttacatcaagagataaatagagtgaagcagaactagtggtgcggaccagctcgccagcaacagaagggtttgtagtcggcctggcagtgg

SEQ ID NO: 934860 - DNA, 120 bp, Artificial Sequence
  ENSG00000226688_81 (sequence is synthesized)
acagggaggttggctagaactattaccttaggtccgtgataatatccctgaatccaacttttcagaaagaaataggtaacatatttttcaccaggaagcttcacccagacactgaacaga

SEQ ID NO: 934861 - DNA, 120 bp, Artificial Sequence
  ENSG00000226688_82 (sequence is synthesized)
atggtctcagtgcactaatggaggctcagttaaagggttgtggtagcacaaggaagagacattctgacttggaaatttggagaaggcttcacaaatgaaggggcatttgaaatgagcttt

SEQ ID NO: 934862 - DNA, 120 bp, Artificial Sequence
  ENSG00000226688_83 (sequence is synthesized)
gaaggtgcaagagtattccaagttgagaagacaacctgagtggtgttgggtgaacagtcattctacctggctgtagtgtagtatagtgtagtgtagtgtaggaaacatcagaggagtgga

SEQ ID NO: 934863 - DNA, 120 bp, Artificial Sequence
  ENSG00000226688_84 (sequence is synthesized)
gtgggatatgagcctggagagagctggcggccatggatcattgaaagccttgaatgtctgatggggaggttgactttattttgtaggcaatggaaagccaccagtggttttagttgagca

SEQ ID NO: 934864 - DNA, 120 bp, Artificial Sequence
  ENSG00000226688_85 (sequence is synthesized)
gcaatgaaattaagcctgtgctttgcaaagattaatctagcagcaacagattggaagcaacaccaccattcctggtatcagtccaggtaaaatatattacagctctttactggagcaata

SEQ ID NO: 934865 - DNA, 120 bp, Artificial Sequence
  ENSG00000226688_86 (sequence is synthesized)
ttgagcaactcttgatgaaggccctgaccacatttctttcatgttctagacaaaatacctggagagaatggcaagcttccaggctcttgctcagcctttcttcccccttgtcagtgcagt

SEQ ID NO: 934866 - DNA, 120 bp, Artificial Sequence
  ENSG00000226688_87 (sequence is synthesized)
cagggataagcatctatttttaattaatagtatttcttaagaatgaaaacaccattcacttttgcaactgtcaacttaagtacagctgctgttttgagctatgtcttttataatcggagt

SEQ ID NO: 934867 - DNA, 120 bp, Artificial Sequence
  ENSG00000226688_88 (sequence is synthesized)
ggattccatacctctcatccctggattttcatcttgtggcactggatgttgaatggctcagtgcctctgataagaaaaaaattgtgcttcaagtttatgaataagtaggagatatcttgg

SEQ ID NO: 934868 - DNA, 120 bp, Artificial Sequence
  ENSG00000226688_89 (sequence is synthesized)
acctgggaaatggagaggattttaccacaattgtgtctgtgtcagactctgcaaattgcctgctttcttgctaacagaactctgatttggggactgaaggaggagagtgggccacaatgt

SEQ ID NO: 934869 - DNA, 120 bp, Artificial Sequence
  ENSG00000226688_90 (sequence is synthesized)
ataggtctaagctctaagctggtcacaaaattctgcacctggttttcccagtcaatcctggccattgagatataaggggaagactgctgagtctgggatagcttttgctttcctgtaaaa

SEQ ID NO: 934870 - DNA, 120 bp, Artificial Sequence
  ENSG00000226688_91 (sequence is synthesized)
aggaacagatgtatctggttcgaccccttttctgacctttctgaacatggctgtgatgcctgaagccacagccaccatcttgtgtccatgaagaaacaggcacaacagcagagctgaaga

SEQ ID NO: 934871 - DNA, 120 bp, Artificial Sequence
  ENSG00000226688_92 (sequence is synthesized)
agcaatggctgagatagagcagagctgctgaccccatgccagcagctgcctactgccagactttgtattaggtgagaaaaaaataagatcttatttaagccactggatgtcaagttatca

SEQ ID NO: 934872 - DNA, 120 bp, Artificial Sequence
  ENSG00000226688_93 (sequence is synthesized)
aggaatgctgataaattcattcctgagtccaccatctggtcttctctaacacatttgctggatcttggtcaaaccagcaggagtttcagagcagactcacatcctctgcatcagcaacga

SEQ ID NO: 934873 - DNA, 120 bp, Artificial Sequence
  ENSG00000226688_94 (sequence is synthesized)
cacagggcactcatgctgttagagctgctgtgcctagtcacttacctcctcccaaggctgagcacagaactttttcatcatctcagtcaccttttcctgagagactttctctgatgtcaa

SEQ ID NO: 934874 - DNA, 120 bp, Artificial Sequence
  ENSG00000226688_95 (sequence is synthesized)
gtttaaaaacttcatcacaaagtaaaaagctgaaaatgcctacaagagaaaatcgcagttttaggctgtgttccacacagagggatgccaacttgctctcctaaaggccgcatcccttgt

SEQ ID NO: 934875 - DNA, 120 bp, Artificial Sequence
  ENSG00000226688_96 (sequence is synthesized)
gcaggtgcctggaaagttctgctgagtaaattaacacacaaagtgatattgcaggcccaagagctgtttccttcctggaagaggagccactttgctgctgacacacatttctaagccacc

SEQ ID NO: 934876 - DNA, 120 bp, Artificial Sequence
  ENSG00000226688_97 (sequence is synthesized)
tggcagttacttttctccataattgtaatagaagagtcagggagaaagaaaaatggggaaagagaataagaaaagagagagaaaggggttgcaaaaatcccatttaaaaatactatgtac

SEQ ID NO: 934877 - DNA, 120 bp, Artificial Sequence
  ENSG00000226688_98 (sequence is synthesized)
gctcgtaaatcaggaaactgcaaaactgtgagaacactccgacgtcaattgaggtgatatgggggctgaaatgtgattagaggaaacctaatcaattgtattttaacctctttggtggat

SEQ ID NO: 934878 - DNA, 120 bp, Artificial Sequence
  ENSG00000226688_99 (sequence is synthesized)
tatcacaaaagaggtggatggtaaccctaggacagtgagactgtccacttttctgagactggagatcaatctcttaatagtaaaacgtaaatatttttaaaacttcaccccttttacttt

SEQ ID NO: 934879 - DNA, 120 bp, Artificial Sequence
  ENSG00000226688_100 (sequence is synthesized)
gaatcctttgtccaaaaagatacatgatgataaagaactactacaaagtgataaatacattttatgtgattctgggtggcatcttcatttgaagatcatcagcagacatgtatatgagcc

SEQ ID NO: 934880 - DNA, 120 bp, Artificial Sequence
  ENSG00000226688_101 (sequence is synthesized)
tttacagtggaaacataatagaaagtaatgcaattaactggacttcatatacccctcatgatgtcatgagatgactgtttggattaatcatcttcagaccaagactcttcaggaaaccac

SEQ ID NO: 934881 - DNA, 120 bp, Artificial Sequence
  ENSG00000226688_102 (sequence is synthesized)
tattagaaggagaaataaaaaagaaaaatattgcacaggcagaatggggaggtcccagtgatggagctgatcttggttcattgaggcaggggtggcattaatcatgtaaaacacaggagg

SEQ ID NO: 934882 - DNA, 120 bp, Artificial Sequence
  ENSG00000226688_103 (sequence is synthesized)
aggaactgggttaggagtaatggtagagttcagtttaggtaattgcaaatacacactattccctgactagctcccaagactttttcttccctctcttcttagaacttcattagaagaggt

SEQ ID NO: 934883 - DNA, 120 bp, Artificial Sequence
  ENSG00000226688_104 (sequence is synthesized)
gatgttatttcttagatgagagtatcttacttaccattgactaatacatgttctctgatgaactttgctattcaacatacatgcaaaggggttataaaaacaagtcaactctagtgctga

SEQ ID NO: 934884 - DNA, 120 bp, Artificial Sequence
  ENSG00000226688_105 (sequence is synthesized)
tgagggtgatcatcatcactgatcatggtgtcagttgattatagtgtcaatttataacttaatttatgtaaaatagagcaatgcaaaagacatagcaatcttcacttcaaatgaagagtc

SEQ ID NO: 934885 - DNA, 120 bp, Artificial Sequence
  ENSG00000226688_106 (sequence is synthesized)
ttgaatgccacttttctaaagagaaggctcatggaggcacctcctcactattgaaaaatccattatacctgtgataaaactgattgtgttcagttgtattagatttgtatgcaaataaaa

SEQ ID NO: 934886 - DNA, 120 bp, Artificial Sequence
  ENSG00000226688_107 (sequence is synthesized)
caccttcacaagaaccaaaaatcaggtgagcaatcatagtgcctggttttaacatcatgtcaaggaaagaggcactgaagagagtaggaaagacgatcttgaattgcctataccacctct

SEQ ID NO: 934887 - DNA, 120 bp, Artificial Sequence
  ENSG00000226688_108 (sequence is synthesized)
ctctcatccccaggcagcatggcaggaagagagaatctgtgcacttggaggagggagagttaagtgattgggggactttgcattggaactcactgctcccctaacatagcggaaagcaac

SEQ ID NO: 934888 - DNA, 120 bp, Artificial Sequence
  ENSG00000226688_109 (sequence is synthesized)
acagggcagaatttggccagcgcccacagagggagcacttagacaagccctagccagacgggaactgtccatcccagcagtcagaacctgacttccagctagccccaccaccattggcta

SEQ ID NO: 934889 - DNA, 120 bp, Artificial Sequence
  ENSG00000226688_110 (sequence is synthesized)
aagcactctggggtcctaataaatttgaaaggcagtctagcccacaaggaccacaattcctggacaagtcctggtactgtgcagggctcacagccagtggactcagggtgacatgatcca

SEQ ID NO: 934890 - DNA, 120 bp, Artificial Sequence
  ENSG00000226688_111 (sequence is synthesized)
gtgagacaccagctggggcagccaagggagtgcttgcatcacccctcccccaacttcaggcagtacagctcacagctccaggaaaagagggaagagcaaagagtactttgtcttgcaact

SEQ ID NO: 934891 - DNA, 120 bp, Artificial Sequence
  ENSG00000226688_112 (sequence is synthesized)
tggataccagctcagccacagtaaaagcaccaagcagagtcctaaagcccccactcctggcactatctcccagataatatttttagacggacaccgggccagaagagaacccactgccct

SEQ ID NO: 934892 - DNA, 120 bp, Artificial Sequence
  ENSG00000226688_113 (sequence is synthesized)
gaaggaaaggttgcaatcctggcagaattcaccatctgctaactaaagaacccttgggccttgaataaacatcagtggtagccagtcagtagtcaccacgaccttgggcgagacccagta

SEQ ID NO: 934893 - DNA, 120 bp, Artificial Sequence
  ENSG00000226688_114 (sequence is synthesized)
ttgtgctggcttcaggtgtgacccagtatatttccacctgtggcggccacagtgagagacaccttctgcttgaggaaaggaggaggaagagtaaaatgactttgttttgcaacttggcga

SEQ ID NO: 934894 - DNA, 67 bp, Artificial Sequence
  ENSG00000226688_115 (sequence is synthesized)
ttgaattgtaatccccaggtgttgagggcgagaccgagtgggaggtgattcacaagatctgatggtt

SEQ ID NO: 934895 - DNA, 74 bp, Artificial Sequence
  ENSG00000226688_116 (sequence is synthesized)
agttttcacaagatctgatggttttacaagcgtctggtatttgcctggcttgcagccttccaccatgattctaa

SEQ ID NO: 934896 - DNA, 120 bp, Artificial Sequence
  ENSG00000226688_117 (sequence is synthesized)
attaaacctctttcctttataaattactttttaaagggtactatctttatagcagtgcgagaatggactacacacttgggtatccagctcagccacagtcaaataaagtgtatcaagcag

SEQ ID NO: 934897 - DNA, 120 bp, Artificial Sequence
  ENSG00000226688_118 (sequence is synthesized)
actcctgaagtctctgattccagaccttaggtcttggtgggcatttctagacccatcctgggccagaaaggaacctgcggctctggcgggagagaaccaggcttggtaggactcaccaac

SEQ ID NO: 934898 - DNA, 120 bp, Artificial Sequence
  ENSG00000226688_119 (sequence is synthesized)
tgctgactaaaaaccccttgggccttgaataaacatcagtggtagtcagggtatagtcaccactggcctggtgcagtggtgcccataagcagatagcccttctgcttgaggaaagaaaag

SEQ ID NO: 934899 - DNA, 120 bp, Artificial Sequence
  ENSG00000226688_120 (sequence is synthesized)
ggaaaagcagagaggacttagttttacaacctgggtgccagttcagccccagtaaaatgaagcaccaaacaaattcctaaaacccctgaccccaggccctcgcacttcaatggcatttct

SEQ ID NO: 934900 - DNA, 120 bp, Artificial Sequence
  ENSG00000226688_121 (sequence is synthesized)
aaacccaccctgggccagaagggaacctgcttcactggaaggaacctgcttcactgaaggggaagccctagtcctggcaggattcatcatttgctcactaaatagcccttggggcttgaa

SEQ ID NO: 934901 - DNA, 120 bp, Artificial Sequence
  ENSG00000226688_122 (sequence is synthesized)
taaacatcaagactctcaggactctcaccaacaggccttgggtgagacctagcactatgctggcttcaggtatgacccagcacagtcccagtggtggtggccatgggagtgtctgcatca

SEQ ID NO: 934902 - DNA, 120 bp, Artificial Sequence
  ENSG00000226688_123 (sequence is synthesized)
ctccttccccaactccaggcagctcagcatggagagagaaagacactttgtttggagaaaagggaatagaacaagaaaccctgcctggtaatccagggaattctccctgatctccttggt

SEQ ID NO: 934903 - DNA, 120 bp, Artificial Sequence
  ENSG00000226688_124 (sequence is synthesized)
cttctcccaagaccaccaaggcagtacctctacaagtctgcaagagtcagcacattactggacttggggtgccccttaatgcatttatggttgcatgaccaaataactggattacaacac

SEQ ID NO: 934904 - DNA, 120 bp, Artificial Sequence
  ENSG00000226688_125 (sequence is synthesized)
tcaaaattatctttgaatacttactaatccttctctagaaagttgggtacaaacaaacccagactgcaaatattagaataaatatctaactattcaatgccctgacattgatgaacaccc

SEQ ID NO: 934905 - DNA, 120 bp, Artificial Sequence
  ENSG00000226688_126 (sequence is synthesized)
acaagcttcaagaccatccaggaaaacatgacttctccaaataaactaaataaggcaccagtgaccaattctggagtaacagaaatatgtgatctttcaagcggtgaattcaaagtaact

SEQ ID NO: 934906 - DNA, 120 bp, Artificial Sequence
  ENSG00000226688_127 (sequence is synthesized)
ttcaaagtaactgttttgaagaagctcagtgaaatccaaggtaagacagagaaagaattcagaatgttatgagacaaatttaacaaagagatagaaataattaaaaagaatcaagcagaa

SEQ ID NO: 934907 - DNA, 120 bp, Artificial Sequence
  ENSG00000226688_128 (sequence is synthesized)
tctaggagttttatagtttcagcctcgtgaagtgccagctccctctttgccctccaccatgactgcaagtttcctgaggcctcccagaagtttcttgaggcctccccagaagccaagcag

SEQ ID NO: 934908 - DNA, 68 bp, Artificial Sequence
  ENSG00000226688_129 (sequence is synthesized)
agccaattatgagaatggactaatacagacagtgagaaaattagccatagagtacattatatgagggc

SEQ ID NO: 934909 - DNA, 120 bp, Artificial Sequence
  ENSG00000226688_130 (sequence is synthesized)
acagtgagaaaattagccatagagtacattatatgagggctcacatccagaaatcaacacatcaataagaaaaagcagacaatccaataagaaaaaaatgggtaaaagtcttaaccaagc

SEQ ID NO: 934910 - DNA, 120 bp, Artificial Sequence
  ENSG00000226688_131 (sequence is synthesized)
tttcataaaaaaggctgtcctaataaccaacagacatgaaaaggtgttcagtttcattagtcattagggaaatgcagattaaaacttcaatgaaatacaacttatgtacatcagaatggc

SEQ ID NO: 934911 - DNA, 120 bp, Artificial Sequence
  ENSG00000226688_132 (sequence is synthesized)
tatgatttaaaagacagataataccaaatgttgacaggaatataaagcagctgaaactctcacacacttcttagtttgtgtatagtttggtacaaccactttagaaaatcatttggcact

SEQ ID NO: 934912 - DNA, 120 bp, Artificial Sequence
  ENSG00000226688_133 (sequence is synthesized)
atatagtaaaactaaacatatacaaacctataacccagcatttctactctgagatatttaccaacagaaaatgcatacacacacagttatcagaagatgtgcaaattttcatggtagtgt

SEQ ID NO: 934913 - DNA, 120 bp, Artificial Sequence
  ENSG00000226688_134 (sequence is synthesized)
tattagtaatagtcaaaactggatgtaacttatatccatcaataaaagaatggttaataaataaaggtatttttcatactatggagttctatacagcaacagaaatgaacaagctattgc

SEQ ID NO: 934914 - DNA, 120 bp, Artificial Sequence
  ENSG00000226688_135 (sequence is synthesized)
acaatatagagtacctattctattattccatttatataaaataggtaaaactaacagacaagagtaacgtagtggtagaagttataatagtggctaccttgagtatcattcatttattca

SEQ ID NO: 934915 - DNA, 120 bp, Artificial Sequence
  ENSG00000226688_136 (sequence is synthesized)
ttatttttgtaaaattagcaccatacataattttgcattctgcttttttcacttcagattttattttgagcatttccccatatcattcaatattccttgaaactataattttaagggcta

SEQ ID NO: 934916 - DNA, 120 bp, Artificial Sequence
  ENSG00000226688_137 (sequence is synthesized)
tttaacatttcatcatgatttagacattatattagtagacttagtatctttaaaggataaatcaacaccacaaaaccaccagcgataattgatattacaagaattttaaccataattaca

SEQ ID NO: 934917 - DNA, 120 bp, Artificial Sequence
  ENSG00000226688_138 (sequence is synthesized)
aataaattgttgttggttaccttcctgtatatggtcttaagtaatggatttaaaggttccttccttacatttagtctgaaattccatgactgtttaataggtgtaggtaatgacattatt

SEQ ID NO: 934918 - DNA, 120 bp, Artificial Sequence
  ENSG00000226688_139 (sequence is synthesized)
tctccactttctccaaaccaacattttccctatcaaaaatatttaagtatagtaattaaatattttgctaaataagtcacatagtagccagtgttttaacttgttaggtggtgcacttgc

SEQ ID NO: 934919 - DNA, 120 bp, Artificial Sequence
  ENSG00000226688_140 (sequence is synthesized)
ctcttctagtttaagcaggcgattttccattttgttgcaggtctttttgtatatttctggctttctctgaatatagaatccttcatcttctagaatacgtggcatcatatcttttggcag

SEQ ID NO: 934920 - DNA, 120 bp, Artificial Sequence
  ENSG00000226688_141 (sequence is synthesized)
tttgcgctggttaaccactttataacaataaaacttagatattactttaaagtccaaaatattaaatggatattgaccaaataagtagtacaaacaactataattacaccctactactga

SEQ ID NO: 934921 - DNA, 120 bp, Artificial Sequence
  ENSG00000226688_142 (sequence is synthesized)
agtctagcagaaagcctctctctcactgtctcttactttctcgctcgctctctctctctatatataaatacatatgcctatatatgtacattttttaaatgaagaatgagttctcttaat

SEQ ID NO: 934922 - DNA, 120 bp, Artificial Sequence
  ENSG00000226688_143 (sequence is synthesized)
cagttcccttaattcagggaagtcatgaaaaacaaatatagaaaagttactataattttagatcagtattttttatttatccagcatacaataaagctattatcccataacataattcgt

SEQ ID NO: 934923 - DNA, 120 bp, Artificial Sequence
  ENSG00000226688_144 (sequence is synthesized)
taatgacttgaatattttactgggaaagaatgttacctggagaactacttggtacaaaaatatttgccttctgtttttttatttgttcttgatcatcttcatagtcagcagcttttactt

SEQ ID NO: 934924 - DNA, 120 bp, Artificial Sequence
  ENSG00000226688_145 (sequence is synthesized)
ccaagatgtcatgaggcttcaactgtgagtgaagttttgccaaggaaacaacatcagtcaacattaaaaggcaagcgacccttaacaatgagatagtatcagccttctgtcttgacaaag

SEQ ID NO: 934925 - DNA, 120 bp, Artificial Sequence
  ENSG00000226688_146 (sequence is synthesized)
gttgaacttgacaaaaagatgccagtgtgacacccacgcctctgctatacagtgatttgggtggatggcaaaagtttcagaggcctggcatacacaaccatccttccaggctcccagttc

SEQ ID NO: 934926 - DNA, 120 bp, Artificial Sequence
  ENSG00000226688_147 (sequence is synthesized)
aacatcttcaaatacaagagaatatacttctacacatgtattcccaggcctccatggtcaagttaacttctagatatattactgcccatgtgtacatacatgcatattagcatattggta

SEQ ID NO: 934927 - DNA, 120 bp, Artificial Sequence
  ENSG00000226688_148 (sequence is synthesized)
ggtatcatctgggcccttatatatttgtttactataatttcagtgaaagtttaaaatggtgtatttatagtataaatttttatttaccacatgctttttaattaacagattaaaaaatat

SEQ ID NO: 934928 - DNA, 120 bp, Artificial Sequence
  ENSG00000226688_149 (sequence is synthesized)
aaggccatgatttttagacaagggtcttaaaaatattccttatagatgtgctacaaaaaatatttttgacatacacaacccagtagtcctttcttctatcattcagtagtttttaaatct

SEQ ID NO: 934929 - DNA, 120 bp, Artificial Sequence
  ENSG00000226688_150 (sequence is synthesized)
gtatcactgaggtgagagcattagcagatcactgccctcagaaattgaagtgcaaggcaaggagaaaagtaaagcatggcaccctaaagggaaagaacaagagaaggaaggatataaaaa

SEQ ID NO: 934930 - DNA, 120 bp, Artificial Sequence
  ENSG00000226688_151 (sequence is synthesized)
ggtatagaaatcaaaagaaaagtcaggaaaagagaagtgctggaatagaaaaactggaatagaaaataaggccacagaagagagaaaaggttgaagggacacaaagaggtgtatagagaa

SEQ ID NO: 934931 - DNA, 120 bp, Artificial Sequence
  ENSG00000226688_152 (sequence is synthesized)
agtcattatgtgcctttccccgatttacaatatattttctccagttatctatgacattattctgtatatacctggttagatgttaactcctgcctgaacctagtgtgggttattttggta

SEQ ID NO: 934932 - DNA, 120 bp, Artificial Sequence
  ENSG00000226688_153 (sequence is synthesized)
tttctttagagactactcagtttttctctcataacttttctactaatatctcatctatcttcctcaccttcttcacttgacaggaatcttggtaccaataattgcagaggtagaagtcag

SEQ ID NO: 934933 - DNA, 120 bp, Artificial Sequence
  ENSG00000226688_154 (sequence is synthesized)
gtcctagatcccattcattctgtctcctctggggccttatttcatcatttaaccctccctttttatcttcagtataccctttccccacctccctcccctggctttatctgccctatccaa

SEQ ID NO: 934934 - DNA, 120 bp, Artificial Sequence
  ENSG00000226688_155 (sequence is synthesized)
gaatgcaagttgtaacaactgagagaaattgcccagacactgcaacgggagttgccaacaaagtaacagagtcagagaagagctgagtcttgggaatgaaaaagtgatgaggggatgact

SEQ ID NO: 934935 - DNA, 120 bp, Artificial Sequence
  ENSG00000226688_156 (sequence is synthesized)
tccacagtgggtatccggtcatttgggctgctgctctgccctcatcaaagtgatttccactctgtgagtctctgatatgcagctatagaacctgttgcctgtttcctaatttatccatgt

SEQ ID NO: 934936 - DNA, 120 bp, Artificial Sequence
  ENSG00000226688_157 (sequence is synthesized)
gggcctgtcaccctcatcacctcagcaaagaagcctttgctaatttcacaacaggaaagcatgcaagaaattcgagaacaaaacaaatctacacgcagagcccagcatcttcaagcaaac

SEQ ID NO: 934937 - DNA, 120 bp, Artificial Sequence
  ENSG00000226688_158 (sequence is synthesized)
accctgagaaatccctttttctcccttgaaaaagtcatctcagctgcaagcaaaaaaagctattccttactgcaattatgaagctagataataagaaagttgttaccttgaaacccgctc

SEQ ID NO: 934938 - DNA, 120 bp, Artificial Sequence
  ENSG00000226688_159 (sequence is synthesized)
gcaaagagcaacaggtgacccaagcgatgagtttcctgcaggagacgctgcgttattggttggaaggctgggtggaaccacagaggagctgctcaatgggaaccgctgcctggctatgaa

SEQ ID NO: 934939 - DNA, 120 bp, Artificial Sequence
  ENSG00000226688_160 (sequence is synthesized)
ttgatgaaagtcatccaccatttcccaactttgacttcctacctttgaagtctaatgagcatgaattaccacatccagaccgtcaagattaccccaatgtagatgagagcctgaccaaat

SEQ ID NO: 934940 - DNA, 120 bp, Artificial Sequence
  ENSG00000226688_161 (sequence is synthesized)
tatttttaaactgtgtaacaaaattattttgaaatcaaaacaagggctaatcctttgaaaggaagaatttctcttcgctcctcaccccatcctccattactaccaaacctggagttccag

SEQ ID NO: 934941 - DNA, 120 bp, Artificial Sequence
  ENSG00000226688_162 (sequence is synthesized)
atcctccattactaccaaacctggagttccagagagaatgttgcaggaagtcagggacccggaaaagagggactgactgaagccatggcaggagaacataaattgtgaagatttcatgga

SEQ ID NO: 934942 - DNA, 68 bp, Artificial Sequence
  ENSG00000226688_163 (sequence is synthesized)
atgcctgtctttactgcaatctgctcttgtgatttcctatacctgtctttaatctcttaatcccatca

SEQ ID NO: 934943 - DNA, 77 bp, Artificial Sequence
  ENSG00000226688_164 (sequence is synthesized)
aaaaagaacaggataacagtgatgttcatggaacaagggcgataaccattaggtctggctgcctgaaataggagaaa

SEQ ID NO: 934944 - DNA, 120 bp, Artificial Sequence
  ENSG00000226688_165 (sequence is synthesized)
aaagagaatgcattcccaggggtaggtctctaaactggccgctctgggaatgtctgtcttttatggttgaagataagggatgaaataagccctggtctccagtagcactcccaggcctat

SEQ ID NO: 934945 - DNA, 120 bp, Artificial Sequence
  ENSG00000226688_166 (sequence is synthesized)
ttatggttgaagataagggatgaaataagccctggtctccagtagcactcccaggcctattacggtgagtaaattctcacctagtaaatttttagtcagactggttgtctgctctcaaac

SEQ ID NO: 934946 - DNA, 120 bp, Artificial Sequence
  ENSG00000226688_167 (sequence is synthesized)
atgcagcagagctccacaaaagtgcgggaatgtctgacagggaagaatcagagaaaccttcaccagcagcccgacattcacctggacggacagtgcacttttcttacgtctgggcaggga

SEQ ID NO: 934947 - DNA, 120 bp, Artificial Sequence
  ENSG00000226688_168 (sequence is synthesized)
ccatctgtgctcgtaaatcaggaaactgcaaaactgtgagaacactccgacgtcaattgagtatctacatctaacgtaacactggctcatagtgggaaatcaataaatatcacctgaatg

SEQ ID NO: 934948 - DNA, 120 bp, Artificial Sequence
  ENSG00000226688_169 (sequence is synthesized)
aacaagagaatgattatacattaaacaaacaagagcctcatcttgaaatagattattctccccctaggaggcatcaatgctttggtcacagctttgggatgggcaaagcaagatatgcat

SEQ ID NO: 934949 - DNA, 120 bp, Artificial Sequence
  ENSG00000226688_170 (sequence is synthesized)
gatttccactctaagcctttgctaatttcacaacaggaaagcatgcaagaaattcgagaacaaaacaaatctacacgcagagcccagcatcttcaagcaaacaccctgaggtacagaccc

SEQ ID NO: 934950 - DNA, 120 bp, Artificial Sequence
  ENSG00000226688_171 (sequence is synthesized)
gaggctagatgagtccggactgcagatgaggcagctgcctcttaaactgcaaggggactgaaaaagtcatttgcctctaaaaaaaccaactctgaatacaaattgataatgaatattcat

SEQ ID NO: 934951 - DNA, 120 bp, Artificial Sequence
  ENSG00000226688_172 (sequence is synthesized)
gagcccctccagcttgctctagagccacccttgactgcaaccctggactctgcttcctaaaaagtttcccaaagctctttctctgcctcctctcagaaggaagagggtgggaaagttcat

SEQ ID NO: 934952 - DNA, 120 bp, Artificial Sequence
  ENSG00000226688_173 (sequence is synthesized)
tcagggctttttgcctccagctttcaagtacttgctttttggtctgggcttttatttttccttctattttttttttcttaaggattcagatcaaatcaattttggtcttaccctttgtat

SEQ ID NO: 934953 - DNA, 120 bp, Artificial Sequence
  ENSG00000226688_174 (sequence is synthesized)
cttccataagtagcagcttttgttttcctcctctttcctcgtctttcccccccccagcctctgcttgctgtggtccgtctccgtgagagaggtcctcaaggaaacagagatataacagac

SEQ ID NO: 934954 - DNA, 120 bp, Artificial Sequence
  ENSG00000226688_175 (sequence is synthesized)
ccttgggctcgtgggaggggctaaattagccggccccgtttcggaaggaacctcaaaccctgtctttttcattgactagaaaggacagattgactgaggagtccagcagctcattttcct

SEQ ID NO: 934955 - DNA, 120 bp, Artificial Sequence
  ENSG00000226688_176 (sequence is synthesized)
aaagttactcgaagccttttccaggttgtaattttttgcatccttgaagcaatgtatattcaaatctctctctctttctcccttcttccctctctcccttactccctccctcttcatctc

SEQ ID NO: 934956 - DNA, 120 bp, Artificial Sequence
  ENSG00000226688_177 (sequence is synthesized)
gaaggtaagtcctcaagtcccaaggcgacttggcagcttctccctccacaaggctgttgcaaaccttagcatttcaggtctgaaagatacctcagacattgagtctaaaagaggttagag

SEQ ID NO: 934957 - DNA, 120 bp, Artificial Sequence
  ENSG00000226688_178 (sequence is synthesized)
atgtggagaggttaagccacctgctcatgctcacatacatggtctctcttatttgctaccatgttccccagcacctaatacagtttctctcacagcatgggctctcaataaatatttgat

SEQ ID NO: 934958 - DNA, 120 bp, Artificial Sequence
  ENSG00000226688_179 (sequence is synthesized)
gaatggttgaaaaaaatgaatgaattgcagcaaagcagaaatgtagatctgttttcctgtttcctagttcttgatttttctacattgcttgtctggcatgtaaatttgtatctaaagcca

SEQ ID NO: 934959 - DNA, 120 bp, Artificial Sequence
  ENSG00000226688_180 (sequence is synthesized)
gttataccatataaatcattaaatttgtgagcccgaaggactgttttgactctatgtagaaactatattctccagcgagctttcagtcatactttaataaggacaaaggataacctttta

SEQ ID NO: 934960 - DNA, 120 bp, Artificial Sequence
  ENSG00000226688_181 (sequence is synthesized)
gtttaggcatctctgttactttgcacggtgccacatggtatatactcaatacattttttatactttaataaatttggagctgtttaacaatactttatttctgaaatgctttatagttat

SEQ ID NO: 934961 - DNA, 120 bp, Artificial Sequence
  ENSG00000226688_182 (sequence is synthesized)
aggattttgcatgtatgataacaactaattacactgaatgaaagactcaatggatgtcttctcccgagtcagtttagactacatctctaataatgaatattggtctgatattcatcctgt

SEQ ID NO: 934962 - DNA, 120 bp, Artificial Sequence
  ENSG00000226688_183 (sequence is synthesized)
tatgataaaactggtttttggtgatatgatgggattttttgtaaaaaccaacaattggtttatgactgcctttgtactattgttttggagagaaatttgaaaagagcatgtccacaaaat

SEQ ID NO: 934963 - DNA, 120 bp, Artificial Sequence
  ENSG00000226688_184 (sequence is synthesized)
agtgtgcgaattacagaatggaaaccaaaacatcaaagctagaaagagaaaagaatgatcaaagggaagatccagagtggctgaggggtaggcaggagaaacagacaaacaagtacctga

SEQ ID NO: 934964 - DNA, 120 bp, Artificial Sequence
  ENSG00000226688_185 (sequence is synthesized)
acaaacaagtacctgagcttgtcaatgagagacacactttggtgggtgctgtggcaacggttctctactttattacattaggatattaggttctttttttttttttttttttgagacaag

SEQ ID NO: 934965 - DNA, 73 bp, Artificial Sequence
  ENSG00000226688_186 (sequence is synthesized)
tagccacagttctctattttaaacaaaattaaaattcaaggtcacttcagtcatgttgtatcagacgttgtcg

SEQ ID NO: 934966 - DNA, 120 bp, Artificial Sequence
  ENSG00000226688_187 (sequence is synthesized)
attcaaggtcacttcagtcatgttgtatcagacgttgtcgacaaaaggttactttgacaattgtctcattctctttacatttcatcagggagagaaagagttagtaaaaagtaaattgtt

SEQ ID NO: 934967 - DNA, 120 bp, Artificial Sequence
  ENSG00000226688_188 (sequence is synthesized)
ctagtacccaacttctggtttaaccaggagaggtaaaatctcattatagtaactagcacttcataaatatttgaagttcatccaaactgaatatggagtaatagaaacatagttttaacc

SEQ ID NO: 934968 - DNA, 120 bp, Artificial Sequence
  ENSG00000226688_189 (sequence is synthesized)
cctaattcatattacatgagccttttgacaacatttaatgctttttatggtaatatgctctgtgctacaatttaatcacgttgtccaggttcgcaccctcctcagcatcatgaaaatact

SEQ ID NO: 934969 - DNA, 120 bp, Artificial Sequence
  ENSG00000226688_190 (sequence is synthesized)
atggttaagtatatattatcaccaattcatacaagaataattataaaagagatgggagtttgtgtgtatctttctaaaggcctcagaatttatcttaaaaaataaatcgtctttctcaac

SEQ ID NO: 934970 - DNA, 120 bp, Artificial Sequence
  ENSG00000260569_0 (sequence is synthesized)
gcgccttcctttgcatggggcagcccgccatgttgtggcgatgggagctatgtgtgggtgggagagtgaattggatcctaggagttgattgggtcgccaggatgaccctgggcctgtctg

SEQ ID NO: 934971 - DNA, 120 bp, Artificial Sequence
  ENSG00000260569_1 (sequence is synthesized)
ctgccctcccagctcggctgtgtcacggggccacctgtgcggggctcatttcccaggaaactccaaatgtgttagtttagacaacattgtacgttttttgttttttttttgtttttgaga

SEQ ID NO: 934972 - DNA, 90 bp, Artificial Sequence
  ENSG00000260569_2 (sequence is synthesized)
acaacattgtacgttttttgttttttttttgtttttgagacggagttttgctcttctttcctaacggcaaccttcgcctcctgggttcaa

SEQ ID NO: 934973 - DNA, 120 bp, Artificial Sequence
  ENSG00000260569_3 (sequence is synthesized)
ctctttatcagtaaaagctagctttgaatgaatatttatggaaaaagtcacaaaggacaaggaactgaatctgactatgagatggaatcacttcctgagttgaaatttaacttttgaaca

SEQ ID NO: 934974 - DNA, 120 bp, Artificial Sequence
  ENSG00000260569_4 (sequence is synthesized)
tttaatctcatctaattcttcattcttgtggcaagactatttttgccccctcagcttccaggtgaccacctgcccagggctgtcccccccatctggtggtcagtgtgagacacaggtcat

SEQ ID NO: 934975 - DNA, 120 bp, Artificial Sequence
  ENSG00000260569_5 (sequence is synthesized)
ttctgctgcctcccctctagacccagctcagctaattttacttcctggggtcttccccttgcttgaacacacaggtcctgtttccagcccctttcccctggctccttgtaggcaaatgct

SEQ ID NO: 934976 - DNA, 120 bp, Artificial Sequence
  ENSG00000260569_6 (sequence is synthesized)
actcctcttgcttcttttgacagtaacgttattatgactgtaagcaatgctactctgccttcactagggaatgatgtacgccttgaaccgaaccagtcagaagaaaaaggaggtggttga

SEQ ID NO: 934977 - DNA, 120 bp, Artificial Sequence
  ENSG00000260569_7 (sequence is synthesized)
ctttgagttgagttattttccaacctcaagccttcaacatcacttaccctgtctcataagggaaacctggctgtcctcaaaaccagcattcaagatttaaaataaatgttaaaaacaaaa

SEQ ID NO: 934978 - DNA, 120 bp, Artificial Sequence
  ENSG00000260569_8 (sequence is synthesized)
caggggaagaaaagtacttggtgatctcagcgaaagatgtctttaactgctaagctgctttttccaactggcagaagcccttgagaagagtttattaagaatgaaggaaaaaaataatcc

SEQ ID NO: 934979 - DNA, 120 bp, Artificial Sequence
  ENSG00000260569_9 (sequence is synthesized)
ctaaacaagtgcccaccgtcccggccctttggaagctgcattccacggggacatctgcagaccacagggaatgatgtacgccttgaaccgaaccagtcagaagaaaaaggaggtggttga

SEQ ID NO: 934980 - DNA, 120 bp, Artificial Sequence
  ENSG00000260568_0 (sequence is synthesized)
gcgatcacaggtgtggctgaatgaggcctgaatgaatgattgtctgcagcccttttcaggcagggctgactccctgtgctgggacctggggctgctccggacattgatttcataaccttc

SEQ ID NO: 934981 - DNA, 120 bp, Artificial Sequence
  ENSG00000260568_1 (sequence is synthesized)
atggcctctggtcccttgtggaggcagcatgagatttgaaaatggagggagtcctctaagtcagaaatgtccaataggaataaaattgagccgcatgtgtcatttacagtagcctagtgg

SEQ ID NO: 934982 - DNA, 120 bp, Artificial Sequence
  ENSG00000260568_2 (sequence is synthesized)
cagccccacgtgggcagtggcttccgcattgaagagcagatctgagggcacttgcgcgtctaacctcagggaaatcgagggcctggaccccctttcctgccagacgagagcgaacaccct

SEQ ID NO: 934983 - DNA, 120 bp, Artificial Sequence
  ENSG00000260568_3 (sequence is synthesized)
catcctgcccatctctttcctcatgcccaagggtgggagaggcagtgcccagtgagagagccagggctgcagtcaggaggtgtccacaggtcgaccactgctgcccacctgcttctgggc

SEQ ID NO: 934984 - DNA, 120 bp, Artificial Sequence
  ENSG00000254209_0 (sequence is synthesized)
agtgacattggaatctaggcagttgcacaacccttttaatgtcagtcttggaatgaagactttatgcatcactagctgtgtgcatgtatggtgaggtcgtgccagcaaatccgtgtgaat

SEQ ID NO: 934985 - DNA, 120 bp, Artificial Sequence
  ENSG00000254209_1 (sequence is synthesized)
gccactggattaaaagaaggaagtttagttgaatggttactaccctcattcacaggagcagttatcggcacttccactgaggcaatggcagtgggaaaaggaaggcaaatatttattcac

SEQ ID NO: 934986 - DNA, 120 bp, Artificial Sequence
  ENSG00000254209_2 (sequence is synthesized)
aaagagtgagctgatgaactgaacacaagttttggtgtaatcaacaagctgcctggaatatgcatgaactgccctaattttacagatgcctttacttctgaaagcatcttctgggagagc

SEQ ID NO: 934987 - DNA, 120 bp, Artificial Sequence
  ENSG00000254209_3 (sequence is synthesized)
ttagccttttccctaagtttggatttgaaagcaagcagaatggaaataagtccgtgttgttcacatgtgctttagtttttgtgcacttaaaagtttttaaagaacttttttaaaaaaaaa

SEQ ID NO: 934988 - DNA, 120 bp, Artificial Sequence
  ENSG00000254209_4 (sequence is synthesized)
cttgtctacctgggagctcttattcaagccttcacttaagctcttgaatcctccaacgaagtgctgctcaaaccttcttgtcccgaattacactgtgttcttggatacacttgcatccca

SEQ ID NO: 934989 - DNA, 120 bp, Artificial Sequence
  ENSG00000254209_5 (sequence is synthesized)
atgtcagtcttggaatgaagactttatgcatcactagctgtgtgcatgtatgttcccagtttttcttcaagggggatactgtttccctttctgagaagataatcaatgaccctccaagac

SEQ ID NO: 934990 - DNA, 120 bp, Artificial Sequence
  ENSG00000254208_0 (sequence is synthesized)
cagactgggttttgtttttcctcctttttatttaaactacaggaacatggttccaactggaatcgcctattaaaaccatccattcttaacagcaaaatcgatatccacggtgtctccggg

SEQ ID NO: 934991 - DNA, 120 bp, Artificial Sequence
  ENSG00000254208_1 (sequence is synthesized)
gcaaggcgcgtctacaccacgccgctagacccacgcggcgaggggctgggcttccccgggggccacgggttccgaagtccgcccccgtccccgcctccggagctcaccgctttgagatcc

SEQ ID NO: 934992 - DNA, 120 bp, Artificial Sequence
  ENSG00000254208_2 (sequence is synthesized)
agaacgccgtccttggcctcctgcagcagcgacacgaacttggtagtgagcagccccaggctcttctcgtgcctgctgctgccgcccccggcgcccccgagctgcggcggcgggggcggc

SEQ ID NO: 934993 - DNA, 120 bp, Artificial Sequence
  ENSG00000254203_0 (sequence is synthesized)
ggcctggtgaagccttcacagaacctctccctcacctgtgccatctctgcattctccatcacaaccagtgtttccttctggagctgcatccatcagcgcccccatgggaggtactggagt

SEQ ID NO: 934994 - DNA, 120 bp, Artificial Sequence
  ENSG00000254203_1 (sequence is synthesized)
ccctcttctcaagagtccagtcaccatctccagatccatgtccaaaaagtacttcttcttacaggtgaactatgtgagcaacaaacacatagccatgtattttagagcaaaagacacagt

SEQ ID NO: 934995 - DNA, 120 bp, Artificial Sequence
  ENSG00000254202_0 (sequence is synthesized)
gatcacgatggtcctctggtgtcccatctttctctctcaaactgtcctttcctcaatcctttgactccgccggactttgtcacccccacaacctggttttgggtctggccaccccaacat

SEQ ID NO: 934996 - DNA, 120 bp, Artificial Sequence
  ENSG00000254202_1 (sequence is synthesized)
tgggacaagatgtggaggtggaagacaatgatattcacgatcctggccctgggtataaagaaggaaaatatacaagtgttcatgtgatgagaggtactgaatcactgaaaataaactggc

SEQ ID NO: 934997 - DNA, 85 bp, Artificial Sequence
  ENSG00000254202_2 (sequence is synthesized)
ctaaatgctgtgtttttaagtttatgcacatgtggtcacattttatgtgagaatagtggttacttgtagggtgttaggggaaaca

SEQ ID NO: 934998 - DNA, 120 bp, Artificial Sequence
  ENSG00000254202_3 (sequence is synthesized)
ttcgagactgtttttccttccccttcagtgcctttttcagcaatatgaagttaaaaccaagtactctaatgacataatacctggcatataagactttcccagggaatttctactagaaat

SEQ ID NO: 934999 - DNA, 120 bp, Artificial Sequence
  ENSG00000254202_4 (sequence is synthesized)
actacagattgaaaaggatcaaaggaagacatcaagttccaccctgacctttccattttgaaatagtgaaatttctggaatacaagtggagcacattccacctgaactaaggtgatggct

SEQ ID NO: 935000 - DNA, 120 bp, Artificial Sequence
  ENSG00000254202_5 (sequence is synthesized)
tggtttatacgcacagtataaaatacaattctttcaaaacaacaaaaaaagttcaacttaataaattcctttactcatgacatctgagagtcctgtttgagtggtactctagtaaattaa

SEQ ID NO: 935001 - DNA, 120 bp, Artificial Sequence
  ENSG00000254202_6 (sequence is synthesized)
caccatcattggttgtttgatatggctctttgtggcttgaaacaagccctccaaaatcagaatgccagagcattaatttaaaatgaaaaatataattttactaggaattaggttatttag

SEQ ID NO: 935002 - DNA, 120 bp, Artificial Sequence
  ENSG00000254202_7 (sequence is synthesized)
ttcacacaatttattcatctacttctttatttatttaacaaatgtttgaaaagttccagttctgtatcaggcactagtctgctgctaggaatgtgtcagtgctgcatgaaaaataaagtc

SEQ ID NO: 935003 - DNA, 120 bp, Artificial Sequence
  ENSG00000254202_8 (sequence is synthesized)
tctgatttttgctgtttatattcttatagggagaggaaaatagtacaaaaactaaatattatatatgaagtggtgataagagatatgaagaacactaaatcgaagcaagaactcagtttt

SEQ ID NO: 935004 - DNA, 120 bp, Artificial Sequence
  ENSG00000254202_9 (sequence is synthesized)
gagaagaggttgctgtatagatagggtagacaggaaatgcttcttagagcagtgaattgaagagagaaaactgagtcacgtaaatatcttgggaaagatcacttgtgaaggacccaagtg

SEQ ID NO: 935005 - DNA, 120 bp, Artificial Sequence
  ENSG00000254202_10 (sequence is synthesized)
aaaatgacaaaataagacagatactaagtagaagaagatgagatcaggagtgggtcgtgggtcaggagatgtgcagatcatataacgtcttgaaaattctgataagaatgttggtcttta

SEQ ID NO: 935006 - DNA, 120 bp, Artificial Sequence
  ENSG00000254202_11 (sequence is synthesized)
ctctgagtgagaagaaaatatatggttactgccagtaggtcagtgtatttgaagaggatggttgtggggcagggggtgaaatgaagggtggtgagaagagattagagagaaagacaggac

SEQ ID NO: 935007 - DNA, 120 bp, Artificial Sequence
  ENSG00000254202_12 (sequence is synthesized)
tcagatcctcgtgtgtctttttagagaatgtggaatttatattgatgatccattggtgaactactgcatgccccgtaacatgccatgtgccacataacatttcacgcaacatcagaccac

SEQ ID NO: 935008 - DNA, 120 bp, Artificial Sequence
  ENSG00000254202_13 (sequence is synthesized)
ccacatatacagtggtcccataagattataatactgtgttcttaatgtaccttttgtatgttcagatatgtttagatacacaaatacttattattgtgttacaattgcctacagtattca

SEQ ID NO: 935009 - DNA, 120 bp, Artificial Sequence
  ENSG00000254202_14 (sequence is synthesized)
attaatatgctgaacaggtttgtagcctgggaaccattgattataccatgtggcctagatgtgttgtaggctgtgccattgagatttgtgttagtgcactccatcattttcacacaatga

SEQ ID NO: 935010 - DNA, 120 bp, Artificial Sequence
  ENSG00000254202_15 (sequence is synthesized)
caaaattgcctaacaatgaattctcagaacgtataaaatacagtgacacgactgaattttaaaaaggaaaatcatattattgatttgtatttccaaaagatcatttgagaaactgatgga

SEQ ID NO: 935011 - DNA, 120 bp, Artificial Sequence
  ENSG00000254202_16 (sequence is synthesized)
gtacagtttgtgggaaaatgacttggcagtaaagtagctgtcattataatatttcaatatttgctaactgagtaaatgagaggaagaataaattaacatctatgtttacttcttttcttc

SEQ ID NO: 935012 - DNA, 120 bp, Artificial Sequence
  ENSG00000254202_17 (sequence is synthesized)
tttcagtaaaatgagcccttcatcttgtctaatactcatcacttcacctatgtgctaaattccattctttccagtcatcttctgacaattttgattcacaaatattgccccctctctcct

SEQ ID NO: 935013 - DNA, 120 bp, Artificial Sequence
  ENSG00000254202_18 (sequence is synthesized)
tttattttgaacctgtctatgcagcagcaccatatttttaacatgtgaatattctcaaactagtgtttccaatcagaagcagcaacagcaggtacttcatcctatatcctaatctagaat

SEQ ID NO: 935014 - DNA, 120 bp, Artificial Sequence
  ENSG00000254202_19 (sequence is synthesized)
ttcaacttttttcttctctcctgaaccttcctctttgcaataagagttggcattcttatcttgactttgtcaccaacgtttttcatttttttcctcaactcttaggaacctggtctctca

SEQ ID NO: 935015 - DNA, 120 bp, Artificial Sequence
  ENSG00000254202_20 (sequence is synthesized)
ttttcttgtttgtttttttttttcttgtcaagagtactcatcacgttctatttgctaaatctgaaatatttgtcagtccttatcttattttgcctctttacttgacctttctactgactt

SEQ ID NO: 935016 - DNA, 120 bp, Artificial Sequence
  ENSG00000254202_21 (sequence is synthesized)
tttgcctctttacttgacctttctactgacttgacttctccatgtctaacgcttaacatacctgagtcagaggtaaaacccaattttcccttcattagttaagccaatcaatacagaaaa

SEQ ID NO: 935017 - DNA, 120 bp, Artificial Sequence
  ENSG00000254201_0 (sequence is synthesized)
ctacctcctggaaaggaatcaggacagctcacactgggaaagattcagagcatacatacaaaagccttgagactggaaagattatttggaagttgggcagaagagcaggtcacaaataga

SEQ ID NO: 935018 - DNA, 120 bp, Artificial Sequence
  ENSG00000254207_0 (sequence is synthesized)
atgaatgaacgaaggaggggagagaagaaggaaggaatcagcctcatggaacagggaggtttagagaatcctggcaaaggaagaggcgccgtgccagccaggtggctcatctgtaaagtg

SEQ ID NO: 935019 - DNA, 120 bp, Artificial Sequence
  ENSG00000254207_1 (sequence is synthesized)
ccgctggtcctgtccgctgggtgcagtagacacggaggtaggggacccttgtgcctgtgagaacagagcagacaggaagccggagaggacagcaggcacggaagccggaggggacagcag

SEQ ID NO: 935020 - DNA, 120 bp, Artificial Sequence
  ENSG00000260564_0 (sequence is synthesized)
ggtgattccagatgcctgcaggtgatcagatatctaagtaaccctcttgccaccaaataccacacacacttcagttactctttcaaaaaaaattatcaagcaactgctctgtgccagaga

SEQ ID NO: 935021 - DNA, 120 bp, Artificial Sequence
  ENSG00000260564_1 (sequence is synthesized)
ctcttctagtcctgaagatacagtgataaataagatagagacagttcctgctgccattcagcttggttctagtgagaaagacagatatattaaaaaataacttgacattacattttcaag

SEQ ID NO: 935022 - DNA, 120 bp, Artificial Sequence
  ENSG00000260564_2 (sequence is synthesized)
aatttaagtactttattggaaaatataactgtgtaagaagacagatattgacaaggacacttagttcttgtagcgaggaagtatagacttaactcttattagtaaaagagtgtttaagaa

SEQ ID NO: 935023 - DNA, 120 bp, Artificial Sequence
  ENSG00000260564_3 (sequence is synthesized)
taaaaatatatcaatacccctaactttggagacaaactgaagtactgaatgtacttctatttttgatttttcccttagcatggtgagttgtttgggaaatgattcaatagttatttgtag

SEQ ID NO: 935024 - DNA, 120 bp, Artificial Sequence
  ENSG00000260564_4 (sequence is synthesized)
tttctaaattctcagcagcagttgcctcctgatatgtgtcactatatattctgagttgacatctgttatctgaatcaccaaaatagtgccttgttttaaaatttatccactattggctta

SEQ ID NO: 935025 - DNA, 120 bp, Artificial Sequence
  ENSG00000260564_5 (sequence is synthesized)
tgttttatcttactctaggccatgttatcactacatgtgacatctctgtatatgtgtttgtgaaactgggataaagttggcaaaacttgagatagaggaaactatctatgaaacatgttt

SEQ ID NO: 935026 - DNA, 120 bp, Artificial Sequence
  ENSG00000260564_6 (sequence is synthesized)
tgcattagtagaacaggaggcataagcacatttggaatagaaagaacagagaaggcgatactggagaaataggatctcacaaaggaaagtagaatgcacgtagagaacttaaatgcaatt

SEQ ID NO: 935027 - DNA, 120 bp, Artificial Sequence
  ENSG00000260564_7 (sequence is synthesized)
taggcaataacctatgcaatttggacaactatagacctactatggcttatggtttctaccaactagacttaagcttcttttggaataaagcctttgcctcatggaggaagtcagttaatg

SEQ ID NO: 935028 - DNA, 120 bp, Artificial Sequence
  ENSG00000260564_8 (sequence is synthesized)
tttgttgattgtgattttgatgatgacattcatgatgatattctatttggggaatgtttttcaaagtggggctttgacctgacaaactgttataccgatagaaaaatcaacattctctca

SEQ ID NO: 935029 - DNA, 120 bp, Artificial Sequence
  ENSG00000260564_9 (sequence is synthesized)
ctgacaccttaggtatttgacagatatctgaaagaaaaataatttgatatgaccaagcaatagtgaagtgtaggatattgatctccagagatttgtgagactaaaaattgtgcaaacgaa

SEQ ID NO: 935030 - DNA, 120 bp, Artificial Sequence
  ENSG00000260564_10 (sequence is synthesized)
taaaaaaaaatcatagtctagattatcccaatgttgaacaatatacttatgtttacacataatgttggaaaagtcatcagtgcaatttctacaatgcactgatgataatgataatgaaat

SEQ ID NO: 935031 - DNA, 120 bp, Artificial Sequence
  ENSG00000260564_11 (sequence is synthesized)
tttagtgacaatgtgataatgaaattttagaagaaattataattagtttttcatctctcttaaatggatgtgttgttttttctgtcctcttccttctccatttatgcctgttctggttcc

SEQ ID NO: 935032 - DNA, 120 bp, Artificial Sequence
  ENSG00000260564_12 (sequence is synthesized)
cttggggaaatatacatgtgggtaataagggtgaacatttccgcagaaacaaagcaggtctactatgcttcagcaggcttaactctcatttgtttaatgagggtttggaaagatgggggg

SEQ ID NO: 935033 - DNA, 120 bp, Artificial Sequence
  ENSG00000260564_13 (sequence is synthesized)
gtttcctacatatagtcaatgcatacttaagaacacctactatgtgctggcttcattttagtctctaggaactgggagacatattgagccatctgtatctacatatattaaaattgttgt

SEQ ID NO: 935034 - DNA, 120 bp, Artificial Sequence
  ENSG00000260564_14 (sequence is synthesized)
accgaagagtatttcaaggtcttctatctgttttcttttggatagaagcagtcagtgcaaaccagcatggtgaatgagcttgattgtatttaagagaaaaaattctcacttttggggttt

SEQ ID NO: 935035 - DNA, 120 bp, Artificial Sequence
  ENSG00000260564_15 (sequence is synthesized)
ttgctaccaattttaagaatggggagctgttttcagaactaaaagtttgccagcgcactaataagatgtaaaatgaagaaaaattaaaaaatagctctatggtttcaaagaatgtggagc

SEQ ID NO: 935036 - DNA, 120 bp, Artificial Sequence
  ENSG00000260564_16 (sequence is synthesized)
tactttggcttcatcggcagagtaagtctgttaataaccccgaagctctccccttgttgaaataacacaaattagcgtttaacctgggaggaagacacgtgaagttatttaacatttaca

SEQ ID NO: 935037 - DNA, 120 bp, Artificial Sequence
  ENSG00000260564_17 (sequence is synthesized)
taaaattatggagtaaactccaaacaggtcgcctccaaaatgtataattacactcagcagtcctgtcagcatacatagaaacaattttatttccaatcatcttctgcttttattcactca

SEQ ID NO: 935038 - DNA, 120 bp, Artificial Sequence
  ENSG00000260564_18 (sequence is synthesized)
ggaatgtatcattaaaatttccacagaacaatgaaccttaataggcgctaatgcaattgtgaattatggtaattgttacctaaattaatctctgtactttccattccttattgccctgtg

SEQ ID NO: 935039 - DNA, 120 bp, Artificial Sequence
  ENSG00000260564_19 (sequence is synthesized)
tgtgcataaggagtgtgaaaaagataatgttgaaactgacatttgtataaatggtataaaaatttatcttatttaataaaaatttaatataagaacttgctactttgtaaagtagtttac

SEQ ID NO: 935040 - DNA, 120 bp, Artificial Sequence
  ENSG00000260564_20 (sequence is synthesized)
aaaaaaatgttagatttgttgcaagttgggtttataaaatctttaatttgtgaaatttgggagggaaactggcagttgactcattatggttatctttggggtatgtgtatgcaccgaggt

SEQ ID NO: 935041 - DNA, 120 bp, Artificial Sequence
  ENSG00000260564_21 (sequence is synthesized)
atcgggatggtacatgtatgttcctccgtgcacatattgccagggcagtgtatgcattcgtacccttatctgtgtgcctggcctctttctgtgtgtttatgtttactcatttacgtaaac

SEQ ID NO: 935042 - DNA, 120 bp, Artificial Sequence
  ENSG00000260564_22 (sequence is synthesized)
taccctcttggtgtaataaaatccaccattatgtgttgaattgtgttcctctcaaattcatatgctgaagtctcctagttcttcagaatgtgaccatatttgaagataggacctttaaag

SEQ ID NO: 935043 - DNA, 120 bp, Artificial Sequence
  ENSG00000260564_23 (sequence is synthesized)
aggtgattaagttaaaattaggccgtatgtttgggctctaatccagtgtgactggtgtccatctaagaagaaattaggacagagacatagagggaagaccattggaagacacagggataa

SEQ ID NO: 935044 - DNA, 120 bp, Artificial Sequence
  ENSG00000260564_24 (sequence is synthesized)
gatggctgtctacaagccaaggagagaggctcctgaagaaaccggccctgccaataccatcttgtcagatatatggcctccagaactgtgggaaaataaatttctgttgtttaagccaca

SEQ ID NO: 935045 - DNA, 120 bp, Artificial Sequence
  ENSG00000254205_0 (sequence is synthesized)
attcaggctgaatgcatggtaatgaacaaggacatggcaattccacagacaatagtttgggaaaccttcactgctaggctgagaattctgacgtctgcctctaggccagcaagggcatgc

SEQ ID NO: 935046 - DNA, 120 bp, Artificial Sequence
  ENSG00000254205_1 (sequence is synthesized)
gcagaagcaggtcagcagtggggcatggagtaggaagaaagccggaactgcaagcatgctcaggagcactactgaggtcctctgagcagaaaggcaccagctgacttgagacaaggacag

SEQ ID NO: 935047 - DNA, 120 bp, Artificial Sequence
  ENSG00000254205_2 (sequence is synthesized)
tgggtgggaggaaaggaggtgggagtaaagccaccatgtggacagatcctgggttcctgagtttccatttaatggagcactgccaagaagaaaaacccaaataaagacactgcaaatcag

SEQ ID NO: 935048 - DNA, 120 bp, Artificial Sequence
  ENSG00000260566_0 (sequence is synthesized)
atttttgaaatagtatgcaagtcataagcacagtttcaataaaacacgtattctggaggtgcgtggaactttgtattatttgtagttgagaaaggcaaactttgctgacaaaccagtacc

SEQ ID NO: 935049 - DNA, 120 bp, Artificial Sequence
  ENSG00000260566_1 (sequence is synthesized)
tatcacaaacgaacacaaaaagtagctgttactgtgcaggctgtctttaactttcatttcataaagggtacattattgttaaactctactacatggtttggggagaaatccagtggtttt

SEQ ID NO: 935050 - DNA, 120 bp, Artificial Sequence
  ENSG00000260566_2 (sequence is synthesized)
atttaaatgaacactctcacactgccttttgatcaactttcaaagtattttgcagatgcattttgagcatgaccatttttttccccaagtaaaaacaattgtgcgtggcctccatataac

SEQ ID NO: 935051 - DNA, 120 bp, Artificial Sequence
  ENSG00000260566_3 (sequence is synthesized)
tcagaaagcatgctcttactacctatgcaagcaaacaataaaacatatagacatgaaatgttaagtcttaaaaaaaaaaggcaacaattatggagctctatttttaaatttgtgattttc

SEQ ID NO: 935052 - DNA, 120 bp, Artificial Sequence
  ENSG00000260566_4 (sequence is synthesized)
aaaatatggcttactcatcattgtgtagaagagcatgaatgcgatttcttgttttgctctgcatatatttctctgctgtttttctgatcattggcgagattgtaaagtattttgcaagca

SEQ ID NO: 935053 - DNA, 120 bp, Artificial Sequence
  ENSG00000260566_5 (sequence is synthesized)
gaagtggaattggatatgttgaacacacatcattggtgtacatactgtatttagcctgaagactttcctaaagtgttttgttctaaaaataacctgccattttctatagattttaatttt

SEQ ID NO: 935054 - DNA, 120 bp, Artificial Sequence
  ENSG00000260566_6 (sequence is synthesized)
ttatatcttcaagggttctattttggtcacaaggaaagaatgtggcttctaatagtgctaagaattaaaagatgcttttatagagacttagagctattttgaaaagctttggggcttccc

SEQ ID NO: 935055 - DNA, 120 bp, Artificial Sequence
  ENSG00000260566_7 (sequence is synthesized)
agccactgatcacaattagactaagcccatggaatttctgggagtgttgtgcagtggattcggttctagatccatcttacatttgtttagtgtttcccaatttttgggagaaggggtgca

SEQ ID NO: 935056 - DNA, 120 bp, Artificial Sequence
  ENSG00000260566_8 (sequence is synthesized)
cagcaaatttgagagacttttttgaatctcacacatgtattttcctcaagattcttttaagcctcttctgaatgacttgtctgagatagtgaagacccacattaactagaatcagctggg

SEQ ID NO: 935057 - DNA, 120 bp, Artificial Sequence
  ENSG00000260566_9 (sequence is synthesized)
gaactttaaaaaatacagtgcctgggtcccagtccctagcttttgatctaattcatgtaggggtgggatccaggaattaccatgtattttaaaagcttctgggtgtttctaatttgcaga

SEQ ID NO: 935058 - DNA, 120 bp, Artificial Sequence
  ENSG00000260566_10 (sequence is synthesized)
cagattgagaaccactatgatacgtcatccctttactgagaattatggcgagaatcactgccatttgaattactcaggagtgactgattcctcagttgtgtaggagaagcagaaaaaata

SEQ ID NO: 935059 - DNA, 120 bp, Artificial Sequence; identical to SEQ ID NO: 137189
  ENSG00000260566_11 (sequence is synthesized)

SEQ ID NO: 935060 - DNA, 120 bp, Artificial Sequence; identical to SEQ ID NO: 137190
  ENSG00000260566_12 (sequence is synthesized)

SEQ ID NO: 935061 - DNA, 120 bp, Artificial Sequence; identical to SEQ ID NO: 137191
  ENSG00000260566_13 (sequence is synthesized)

SEQ ID NO: 935062 - DNA, 120 bp, Artificial Sequence; identical to SEQ ID NO: 137192
  ENSG00000260566_14 (sequence is synthesized)

SEQ ID NO: 935063 - DNA, 120 bp, Artificial Sequence; identical to SEQ ID NO: 137193
  ENSG00000260566_15 (sequence is synthesized)

SEQ ID NO: 935064 - DNA, 120 bp, Artificial Sequence; identical to SEQ ID NO: 137194
  ENSG00000260566_16 (sequence is synthesized)

SEQ ID NO: 935065 - DNA, 120 bp, Artificial Sequence; identical to SEQ ID NO: 137195
  ENSG00000260566_17 (sequence is synthesized)

SEQ ID NO: 935066 - DNA, 120 bp, Artificial Sequence; identical to SEQ ID NO: 137196
  ENSG00000260566_18 (sequence is synthesized)

SEQ ID NO: 935067 - DNA, 120 bp, Artificial Sequence; identical to SEQ ID NO: 137197
  ENSG00000260566_19 (sequence is synthesized)

SEQ ID NO: 935068 - DNA, 120 bp, Artificial Sequence; identical to SEQ ID NO: 137198
  ENSG00000260566_20 (sequence is synthesized)

SEQ ID NO: 935069 - DNA, 120 bp, Artificial Sequence; identical to SEQ ID NO: 137199
  ENSG00000260566_21 (sequence is synthesized)

SEQ ID NO: 935070 - DNA, 120 bp, Artificial Sequence; identical to SEQ ID NO: 137200
  ENSG00000260566_22 (sequence is synthesized)

SEQ ID NO: 935071 - DNA, 120 bp, Artificial Sequence
  ENSG00000259008_0 (sequence is synthesized)
tgctctgggaccttaaccctaagaaaagctatgaaactattgctacctctgcgcatgatcatcttcatgatactcatgctctaattgatcatgacactgtgtcccagatttgtccttaga

SEQ ID NO: 935072 - DNA, 120 bp, Artificial Sequence
  ENSG00000259008_1 (sequence is synthesized)
atccttttcatcatgctacatgtagccactaattttcagttgcatttgctacaagagaagcccattcagcatggtttgttcaaatgggggagggggctaggaggctgggaggaggcaggg

SEQ ID NO: 935073 - DNA, 120 bp, Artificial Sequence
  ENSG00000259008_2 (sequence is synthesized)
gtaagggaagggattcattaacaagaggggaccaggcacagaggaagagggagtcctacaggcataaagaatgctaaatttgaaaagagcaaagagttttcaacaccgtaagaaagaaaa

SEQ ID NO: 935074 - DNA, 120 bp, Artificial Sequence
  ENSG00000259008_3 (sequence is synthesized)
aaagtttaccaaatctgatggcctttttcctttcatagttacaccaatactatacgtgtcatacttaagaatatttgttcttataagaaaagaacacaatagacttgaagtctggagatc

SEQ ID NO: 935075 - DNA, 120 bp, Artificial Sequence
  ENSG00000259008_4 (sequence is synthesized)
aaatgttattcctgttttacttcaactaaccactctggttgacctggtactttcctttgaggttttcttttatgtatttgttttactgtatatttaaatacacacatgtgtgtatgtatg

SEQ ID NO: 935076 - DNA, 120 bp, Artificial Sequence
  ENSG00000259008_5 (sequence is synthesized)
tgtgtatctgttcctgctaacaaaagcaatttattcttattttgaaatttcaactattagtaagacatataatggaaaaaataagtaaagatcccccataatatctctcctagagaaaaa

SEQ ID NO: 935077 - DNA, 120 bp, Artificial Sequence
  ENSG00000259008_6 (sequence is synthesized)
ccactcagtgatttggtgtccattccttcattttttttttctattaacatttagtttagtctttttaacaactgcatagtattccactattagaatgcatcatattttatttaaccacta

SEQ ID NO: 935078 - DNA, 120 bp, Artificial Sequence
  ENSG00000259008_7 (sequence is synthesized)
ctgatggacttttgagttggggacagtattgtcttattacaagtagtgctttagtaaacatcctaatatatatgtttttgtgcatttgtgcaagtatttctccagagaaaatttctataa

SEQ ID NO: 935079 - DNA, 120 bp, Artificial Sequence
  ENSG00000259008_8 (sequence is synthesized)
gtgaaattgcaggattggagagtatgcacacttaaagttttaatagatctccaaatacgtcatatcaaggtagactctcagtagcagtgtattagactgcatatttctggtttgtttttt

SEQ ID NO: 935080 - DNA, 120 bp, Artificial Sequence
  ENSG00000259008_9 (sequence is synthesized)
aaggaacatgaaaacaatgagaaaaagtgtttaaagattaggctcctatattcttaggccacagtacttaataggcaaaaaataatcatgtctccaaggggagtaatatcacagctgtgg

SEQ ID NO: 935081 - DNA, 120 bp, Artificial Sequence
  ENSG00000259008_10 (sequence is synthesized)
gttgtcaggacgtcacaaccagtaacaaatctcacaatgtaccttcttgtacatttcattgatttctgagattcctcagcattattggaatggaagaatacgatagtatttatatggttt

SEQ ID NO: 935082 - DNA, 120 bp, Artificial Sequence
  ENSG00000259008_11 (sequence is synthesized)
cacattaaaaagtgagataaaaggaggaaagtaaaacttgtttatgttgtaatttttattccttgcttcatcttcagttctaacgctcagtctcaagatcaggacagcacattattggta

SEQ ID NO: 935083 - DNA, 120 bp, Artificial Sequence
  ENSG00000259008_12 (sequence is synthesized)
ataatgtaatataaaaatttaggttcctaaaagtgacaacctattttcttcaccaagtatcagtgtttaagaaaaaacaactaaacaacaaatttgggtagaaaaacatatgcctcttca

SEQ ID NO: 935084 - DNA, 120 bp, Artificial Sequence
  ENSG00000259008_13 (sequence is synthesized)
aaattacttattgtttttagtttaaacacttacaacactgcctagccttgtgtgacttttgtataaaatagtgagcaagtgtggcctagtggacaatatactaattaatagctaatacta

SEQ ID NO: 935085 - DNA, 120 bp, Artificial Sequence
  ENSG00000259008_14 (sequence is synthesized)
ataactactactatttttgagtactaacacaggcactgtgttaagtgttttacaagaattatctcatttaatcttcattataaccatatgacatgagagctattattatcccatctacag

SEQ ID NO: 935086 - DNA, 120 bp, Artificial Sequence
  ENSG00000259008_15 (sequence is synthesized)
atacaacatatagttttttcctgataagcactttaagcacagttacaaatacagatgctttggacagtgatttataatgctggaaagtgccttaaagctcatcttcctcttataactcat

SEQ ID NO: 935087 - DNA, 120 bp, Artificial Sequence
  ENSG00000259008_16 (sequence is synthesized)
ccttggaaggcgatactgattgattacatctttacttttcctaccttcggtattgtgaggattaaacattacacaaaaataggacatgcaattcgttctggatttatttgacaatgaagg

SEQ ID NO: 935088 - DNA, 120 bp, Artificial Sequence
  ENSG00000259008_17 (sequence is synthesized)
ggagaacggtggatcttctcagctgggattgagcagggatctgagccagcctcagaagctggaatcctgcccatagggtggccctgtttcacttccttgctaatgcccaggtgggcacaa

SEQ ID NO: 935089 - DNA, 120 bp, Artificial Sequence
  ENSG00000259008_18 (sequence is synthesized)
cgtggctctactcttcaaaagttctcttaacacaggagaggtctcaagctagccctaaacaagcaataggattagatccttgatgctcatggataaaccatcctgaggacaatttacctc

SEQ ID NO: 935090 - DNA, 120 bp, Artificial Sequence
  ENSG00000259008_19 (sequence is synthesized)
attgatgaattactgttgggcaatttatgagttgtactataatgtgaaagtgagggagaagaaagcctcaatgtacagtaaacacagaatttggcagaaagggatccatgtaggaaaaga

SEQ ID NO: 935091 - DNA, 120 bp, Artificial Sequence
  ENSG00000259008_20 (sequence is synthesized)
agcccgcgaatcttagtaggtacatgctgggcacagcatgggcaataaattttgaggtctgtagaagaaaaaattgtatcactgagataaagtaaaagaagagagaaaatgatgtgaatg

SEQ ID NO: 935092 - DNA, 120 bp, Artificial Sequence
  ENSG00000259008_21 (sequence is synthesized)
cacaaagagggattaacattcgttccgcttcaatacaaaagtatattgtgcttgtattgaaatatcaattttgaacaatacttcatctgcgccccaggctattcgtaataaagatgtcct

SEQ ID NO: 935093 - DNA, 120 bp, Artificial Sequence
  ENSG00000259008_22 (sequence is synthesized)
ccttggagcataatgaagaagtctcagaaagttagcagttagagggaagatgataatcaatcagccttgacgcaatttgatcaaaagtaatgaaagagatggagagtaggcgagtgttct

SEQ ID NO: 935094 - DNA, 120 bp, Artificial Sequence
  ENSG00000259008_23 (sequence is synthesized)
gagcagcaaacacttaaggaaagagcattcgtttttactggtgtaacctttggtatttaatgcatttacaaatgagaatctcatctctgcctgccattcttctttgtttaaatattggtt

SEQ ID NO: 935095 - DNA, 120 bp, Artificial Sequence
  ENSG00000259008_24 (sequence is synthesized)
gtttattaaactcaattccttaacaaagtattcagtatctagtcatgcttttatgtaagaaaagattctccaaaaaagatatattttagaaattgatttctgaactttaggtttcacact

SEQ ID NO: 935096 - DNA, 120 bp, Artificial Sequence
  ENSG00000259008_25 (sequence is synthesized)
atcatccctttcagggccagaaagcaattagctttctgtcaaactgggaagttaatctggaatgttttcaggatgctcaagttcctgcaagctttatacctaaagcagattcgcagctgt

SEQ ID NO: 935097 - DNA, 120 bp, Artificial Sequence
  ENSG00000259008_26 (sequence is synthesized)
tcagagaacaacctttgaagtaatcatgctttgctagcatctcagatgttttgctttgatctgcaggtaccatttttcctaaaaaaaaaactttcttatgattgttgtatttcttgtcac

SEQ ID NO: 935098 - DNA, 120 bp, Artificial Sequence
  ENSG00000259008_27 (sequence is synthesized)
caaacatttaagttctgcaatgtccatattcctgtaaaccaaggttgacatatatgggcaaatattttgccagttgtgttgtttttggtaatatacaagtaagagaaacaatatcactga

SEQ ID NO: 935099 - DNA, 120 bp, Artificial Sequence
  ENSG00000259008_28 (sequence is synthesized)
agctgtgttttcttttaaattctcattaaaattcattttgattatatagtaattttatattttcctttcatgttcacattctggaatttgaataagaaagatgaagtcatttatctgcaa

SEQ ID NO: 935100 - DNA, 120 bp, Artificial Sequence
  ENSG00000259008_29 (sequence is synthesized)
actttatgcaaaatgagaaaaagaacaaacaatttcttaatgagttttattcctatcattgttacagcataggttttaggaagttttgtataaaagtatttgataactaatatatgttta

SEQ ID NO: 935101 - DNA, 120 bp, Artificial Sequence
  ENSG00000259008_30 (sequence is synthesized)
acaattaatgaaatatttactaattatcttgcatatgaaatggtatttataaaatgtgatggagaaggaaaaaaagaaaagtgaaaaggaaacaagcaaggaagggagaaaaggaagaaa

SEQ ID NO: 935102 - DNA, 120 bp, Artificial Sequence
  ENSG00000259008_31 (sequence is synthesized)
cgctaacaagagaagatggaagtaaaagagaaaacagctaaagtcaggaaagaaaacaaaaagaaagaagatcaaagaaaaggagggagacaaaaagaaaaaaaggcaaaattgaagtga

SEQ ID NO: 935103 - DNA, 120 bp, Artificial Sequence
  ENSG00000259008_32 (sequence is synthesized)
gggagacaaaaagaaaaaaaggcaaaattgaagtgattattttctacaaatctcattgagttattgctattaatatatatttctgtatgtgtataaatgtatatatacacatatatacat

SEQ ID NO: 935104 - DNA, 120 bp, Artificial Sequence; identical to SEQ ID NO: 834254
  ENSG00000259002_0 (sequence is synthesized)

SEQ ID NO: 935105 - DNA, 120 bp, Artificial Sequence; identical to SEQ ID NO: 834255
  ENSG00000259002_1 (sequence is synthesized)

SEQ ID NO: 935106 - DNA, 120 bp, Artificial Sequence; identical to SEQ ID NO: 834256
  ENSG00000259002_2 (sequence is synthesized)

SEQ ID NO: 935107 - DNA, 120 bp, Artificial Sequence
  ENSG00000259002_3 (sequence is synthesized)
tccaggagaataaaaaggccaagccactttttgaagaaagtctttgtccctaccccctttttctacctggaagtcagactcaggcctggagtgtagcggccgccttggtacctggaagca

SEQ ID NO: 935108 - DNA, 120 bp, Artificial Sequence
  ENSG00000259002_4 (sequence is synthesized)
acaatcatggccgggagaccttacacctggcatggtagagcagacggaggaggggccgcctggtgaatagcctggccaacagccccaaactgctaccccttaaattctggatttcaggtg

SEQ ID NO: 935109 - DNA, 120 bp, Artificial Sequence
  ENSG00000259002_5 (sequence is synthesized)
actgctgtaacttgaagcaagaaaagtgaaactacagaaaagggaggaccactggacggctgctttcattctacgcccactttttagagtgcattcctacaataagcaccctaataatgt

SEQ ID NO: 935110 - DNA, 120 bp, Artificial Sequence
  ENSG00000259002_6 (sequence is synthesized)
aaaccaggggccaagggatgcaccttccactctacttccttccccagaaaagaccaccttggtaaatacagaatggcaaacggttaagtgaaacactgtatagcttctggccctatactt

SEQ ID NO: 935111 - DNA, 73 bp, Artificial Sequence
  ENSG00000259002_7 (sequence is synthesized)
ggcgtgagccaccacgcccagccaaaaagttgttttaaaattttttcgagagataggatctcgcttatttgga

SEQ ID NO: 935112 - DNA, 120 bp, Artificial Sequence
  ENSG00000259003_0 (sequence is synthesized)
tgccaggctgggaggggctgccggcccctcggtgacttgcaccgggcccgcaagcaggctggggaggtgctgctggccccaccgctgagccgcctccctcaccgcacctctgctgcccct

SEQ ID NO: 935113 - DNA, 120 bp, Artificial Sequence
  ENSG00000259003_1 (sequence is synthesized)
ccaaaccagccaagatcagaccttgatctcacctgattaagcgcttgcttagtacagggcagaccctcgagacttatgctcaggtgatggccctaatggacgccttgatggacacgtccg

SEQ ID NO: 935114 - DNA, 120 bp, Artificial Sequence
  ENSG00000259003_2 (sequence is synthesized)
ggacccagggacccggagaccaggaatctgctggtctcagggagccgcagaacctgaaacccaaaaataccaggcttgatcgcctgctcttcggtagtttaagaaccaggctttctttgg

SEQ ID NO: 935115 - DNA, 120 bp, Artificial Sequence
  ENSG00000259003_3 (sequence is synthesized)
ctatgactccatacagatgaagtccaagaacaggcaaaacgcatcacagaaggagcccctggagcccctggccgaacacatctgaaagcacggagccagacctctgcagcgccctccagc

SEQ ID NO: 935116 - DNA, 120 bp, Artificial Sequence
  ENSG00000259003_4 (sequence is synthesized)
gggcaggttctgcgggcagccatctcctcgcaggccagaacaccccacgtcactccaggacggttcgccacctttgagaagagaggactccagtgtctgttcgctctggaaatgtgggca

SEQ ID NO: 935117 - DNA, 120 bp, Artificial Sequence
  ENSG00000259003_5 (sequence is synthesized)
tgttcccattccaaaggtgataggatctgaggggaggatccttcccattttcaaagccttcctaaaatcccactgattagtggggaggagtgcaagtctaccctttccccgaaccaccca

SEQ ID NO: 935118 - DNA, 120 bp, Artificial Sequence
  ENSG00000259001_0 (sequence is synthesized)
ctcgccctgccgccgccggtgctccgtcgccgccgcgccgccatggaattcgaacgctgacgtcatcaacccgctccaaggaatcgcgggcccagtgtcactaggcgggaacacccagcg

SEQ ID NO: 935119 - DNA, 120 bp, Artificial Sequence
  ENSG00000259001_1 (sequence is synthesized)
cgcgtgcgccctggcaggaagatggctgtgagggacaggggagtggcgccctgcaatatttgcatgtcgctatgtgttctgggaaatcaccataaacgtgaaatgtctttggatttggga

SEQ ID NO: 935120 - DNA, 120 bp, Artificial Sequence
  ENSG00000259001_2 (sequence is synthesized)
ggcggagggaagctcatcagtggggccacgagctgagtgcgtcctgtcactccactcccatgtcccttgggaaggtctgagactagggccagaggcggccctaacagggctctccctgag

SEQ ID NO: 935121 - DNA, 120 bp, Artificial Sequence
  ENSG00000259001_3 (sequence is synthesized)
cttcggggaggtgagttcccagagaacggggctccgcgcgaggtcagactgggcaggagatgccgtggaccccgcccttcggggaggggcccggcggatgcctcctttgccggagcttgg

SEQ ID NO: 935122 - DNA, 120 bp, Artificial Sequence
  ENSG00000259001_4 (sequence is synthesized)
aacagactcacggccagcgaagtgagttcaatggctgaggtgaggtaccccgcaggggacctcataacccaattcagactactctcctccgcccatttttggaaaaaaaaaaaaaaaaaa

SEQ ID NO: 935123 - DNA, 120 bp, Artificial Sequence
  ENSG00000259007_0 (sequence is synthesized)
tgaaatgaatctgaaaattccatttattaaaacacatacattgtccatgtgggatgaaaatgtgcacatcacattcaggatttacttttacttgcagaatcaaagctatcatgtacacat

SEQ ID NO: 935124 - DNA, 120 bp, Artificial Sequence
  ENSG00000259007_1 (sequence is synthesized)
tgatagaccagtccagccttatctccacactactctaatggggaggggtggaaggaggggtagaggagaaggaagaaagaaaaagaaaggcacagtgactatacatcaatgccattaaac

SEQ ID NO: 935125 - DNA, 120 bp, Artificial Sequence
  ENSG00000259007_2 (sequence is synthesized)
cgaattgcatctacacgggacagctcagcttatcaaagggtattctaaagacaatattcattccaagaaggtcacacatatcttacctcagtacagctgtctgttttaattgttattttt

SEQ ID NO: 935126 - DNA, 120 bp, Artificial Sequence
  ENSG00000259004_0 (sequence is synthesized)
cccttccactcacagtctttttgagaagaagcttgtgcctgtgcctggaagcaaggagggctggaactggggccctgctgggaagccctgtatctgcagaactgtgtcccgtgggggcca

SEQ ID NO: 935127 - DNA, 120 bp, Artificial Sequence
  ENSG00000259004_1 (sequence is synthesized)
ggggacacagatttttgcagccctctgatgctgaagcctttctggggctgggatgacccaatgcccacctggaccgtgcacttcctggtgaccctctgagacaacttcctgggcagagtt

SEQ ID NO: 935128 - DNA, 120 bp, Artificial Sequence
  ENSG00000259004_2 (sequence is synthesized)
gatcatcatggagtcagtgcaagtctgggaacagtggcctgaaactgcgcagctccagtgtgtcggtggaggcccttcagtgaggagtcccccagtctgggtggagagccagcccgatcg

SEQ ID NO: 935129 - DNA, 120 bp, Artificial Sequence
  ENSG00000259004_3 (sequence is synthesized)
gcttgattcctccactcttgacaccgtgagcctcagattctgagagcttgggaggatggacagagactgcggtcagcaggagaatgggaagcagatgggagaggaagaagcttgcctttg

SEQ ID NO: 935130 - DNA, 120 bp, Artificial Sequence
  ENSG00000259004_4 (sequence is synthesized)
ggggaccaggaggctgggagcccaggcccattcactgtaacatgtgcagtaaatcccattatattcatgcaaagaattctacacagcaaggaaaaggaaagagctgttggcatgccacaa

SEQ ID NO: 935131 - DNA, 120 bp, Artificial Sequence
  ENSG00000259004_5 (sequence is synthesized)
cacaggtggatctcacagacctactgctgagctaaagaaggcaaccacgcacatgtacatgctgcatggggccgtttctatctgcccagaaccaggcaagaaccatctatgccaacagct

SEQ ID NO: 935132 - DNA, 120 bp, Artificial Sequence
  ENSG00000259004_6 (sequence is synthesized)
tcattgctgctgtttctggggttgttgactggaggggcgaggggaccctctcggatgtggaaatgttctgtgatgagatagaggtttcctgcatgtctgtgcctgtgagatgcatccagc

SEQ ID NO: 935133 - DNA, 120 bp, Artificial Sequence
  ENSG00000259004_7 (sequence is synthesized)
tgcacacttcagatgcgtgcattttattgcatatgttatgccttgatttttaaaagtctttaaatatttaatcctgaacatccctacgaaacaaataataaaacagccctaggctcctga

SEQ ID NO: 935134 - DNA, 120 bp, Artificial Sequence
  ENSG00000259005_0 (sequence is synthesized)
gtcttggatcagaccatttaaccctatagcagccttgtctccaaagggaagaaaagagtaacagtgggctaggtttcattctcctgaagaagggcacggcattgcctcatcctgagtggg

SEQ ID NO: 935135 - DNA, 120 bp, Artificial Sequence
  ENSG00000259005_1 (sequence is synthesized)
cagctccagagcagggccagggctcacatcttctagaagccagctgtcatctgtctgtaagattcattgacaccagcttgtctccagcctgaaggctccctggccctgggctcaggcaga

SEQ ID NO: 935136 - DNA, 120 bp, Artificial Sequence
  ENSG00000259005_2 (sequence is synthesized)
aagttgcatcaggttgcctctgggagaaagagagaaagcagacccggcttatgcaactctctctccccatacactgaatctctgaagttcctggccaaccccctcagcttcccaccagag

SEQ ID NO: 935137 - DNA, 120 bp, Artificial Sequence
  ENSG00000259005_3 (sequence is synthesized)
tttgccaaggcttggcttggcaggaacaaggcccaaagagctacacagagcatctcccagacagtggccactgagaaccatctcctgtcaagatcccattggcttgatgagctgtctggg

SEQ ID NO: 935138 - DNA, 120 bp, Artificial Sequence
  ENSG00000258751_0 (sequence is synthesized)
gcggagatatggcagttcaccaacacaatttgtggtccccctccccttctcttttctagaattttttctcttactttctagccattgtgttatctcaagtatctgtcctggtcttccaaa

SEQ ID NO: 935139 - DNA, 120 bp, Artificial Sequence
  ENSG00000258751_1 (sequence is synthesized)
ccaatctgctgggagtgggccagacttcccatgtccctgactgtcagcagcagatgttcctcctctagaccaccatcttgaatccagattcactccactctcttcttgctgcaatatctc

SEQ ID NO: 935140 - DNA, 120 bp, Artificial Sequence
  ENSG00000258751_2 (sequence is synthesized)
aagccgtaggggattgttctccagtcttgactttgagaacttggtagagctcctgaaggctcacctgataagagatgtatgtcacaatctgctcaccctggcatttctctaaatagaagg

SEQ ID NO: 935141 - DNA, 120 bp, Artificial Sequence
  ENSG00000258751_3 (sequence is synthesized)
ttcatctgtctgaatatagatatcaagaagtggcagagtatcagaggagaaagatatcaagaaatagaatattcaagctgtttcaacttctacccgttccacatttccgaagctacttcc

SEQ ID NO: 935142 - DNA, 120 bp, Artificial Sequence
  ENSG00000258751_4 (sequence is synthesized)
tcttttgttgaaaagctccaattcccctgtaaacgtctcattcagagtctaattgtaacccaattaagaaaattaagatgagtagaaacagctggaacagaaggcacttggggtgaagtg

SEQ ID NO: 935143 - DNA, 120 bp, Artificial Sequence
  ENSG00000258751_5 (sequence is synthesized)
taccctctgcagtcattatttgatggagatcattacccaactctacacacagcacatgatatttaatatgattggactaatttatatctgaaaagaataaaagtatgttatgtaaataaa

SEQ ID NO: 935144 - DNA, 120 bp, Artificial Sequence
  ENSG00000258753_0 (sequence is synthesized)
tttgttaagtaaactggctcacacaattgtggaggctggaaagtcccaagacaggctttctgcaagttggagaccctgggatgctgatagcgtggctccagccaagtctgaaggcctcag

SEQ ID NO: 935145 - DNA, 120 bp, Artificial Sequence
  ENSG00000258753_1 (sequence is synthesized)
ctcagtctgaggctgaaggcctgaaaacccaggaagccactggtggccccagcagattggatggtgcttacccacaccgagggtggatcttcctccactactccactcagatgccgtcta

SEQ ID NO: 935146 - DNA, 120 bp, Artificial Sequence
  ENSG00000258753_2 (sequence is synthesized)
aaattaaccatcacatttgtttaggcttattgcaaatgtagggaacagtgacagatgaaaccagaggtagcactgtagttaggcacttttgtacacaagtaaacagacatgcccaggtta

SEQ ID NO: 935147 - DNA, 120 bp, Artificial Sequence
  ENSG00000258752_0 (sequence is synthesized)
gacaaaagctgctacaaccttcccccccacacaccaaacctttcaaatcaactgtagttgctatgtaaggttatttgtttctaaggcaacagtgtatatctaagtactaatggcctgtcc

SEQ ID NO: 935148 - DNA, 120 bp, Artificial Sequence
  ENSG00000258752_1 (sequence is synthesized)
ttttgccaggcaacaaacagccttgtgatgcaactgcacctgtctcggctacgcgttactatggagacgctccagttgctatgggtaccatcacgctaatcgcctagcaaaggcagacat

SEQ ID NO: 935149 - DNA, 120 bp, Artificial Sequence
  ENSG00000258752_2 (sequence is synthesized)
acagcagtcttctcagagagcccagctgttcctccctgtctcttgctgaagactgattgtctagggcctgtgatggaatgcttctcaactgagatgcagaagaacttcattaatgctatt

SEQ ID NO: 935150 - DNA, 120 bp, Artificial Sequence
  ENSG00000258752_3 (sequence is synthesized)
tcagaagatcactttgtgctccctcctgcagaacaaacagcagactaggaaaagaatctgcaaagaagtggactgtaaaattcctgaagtctatgacatcatgccatccctaattaacct

SEQ ID NO: 935151 - DNA, 120 bp, Artificial Sequence
  ENSG00000258752_4 (sequence is synthesized)
caacttgcagtccaaggataattcctcttaactaggtggttacgatagaaacatttctatacatttttaaatatttttttgtagaactgaggaatgcacttcaaattcaagtactatgta

SEQ ID NO: 935152 - DNA, 120 bp, Artificial Sequence
  ENSG00000258752_5 (sequence is synthesized)
ttcataaaaattgatcttaaaaatttggttctgattatttggctctcttttggaatctaacattaagacactttttaaaaaagtgacaggctacttaccctcccttccaatgatatattt

SEQ ID NO: 935153 - DNA, 120 bp, Artificial Sequence
  ENSG00000258752_6 (sequence is synthesized)
gtaaaaatggtacccatgaccttactgtctcaaacaaatgggcatgtgaggaggataaaatgtctctattgtttctactgttctccttgaagaagcaaagaccaagtaaccacaacaaaa

SEQ ID NO: 935154 - DNA, 120 bp, Artificial Sequence
  ENSG00000258752_7 (sequence is synthesized)
tggtcacctgggagcaccgtctacatggagactgcgaaagacaacagtggggacaactgagtgagcctccactgaatgtctgcagagaccggccagatgaggggatgatggagttgcctg

SEQ ID NO: 935155 - DNA, 120 bp, Artificial Sequence
  ENSG00000258752_8 (sequence is synthesized)
cttgactcgttcctgtacttttatcccaacaaaacatgacacacaccgagatgtgaaagctgtcgacttttctttgtaaatgtttctacccaggaagacatgatttcacccaccatgaag

SEQ ID NO: 935156 - DNA, 120 bp, Artificial Sequence
  ENSG00000258752_9 (sequence is synthesized)
ccttctggaagcacattcctctgacgctgcagcagcgaaggaaagatggaaaagagaagttatcatttctttctcaagatcctggccccatgagcctcagtgtagccctagttcctggga

SEQ ID NO: 935157 - DNA, 120 bp, Artificial Sequence
  ENSG00000258752_10 (sequence is synthesized)
tcagcaccaacaggcagggaggagaggctctggcgccctgcagacagcaccaggttcttggcatcaggagctggatacagagtccctgataatcccagccacagaatatttcaaactcac

SEQ ID NO: 935158 - DNA, 120 bp, Artificial Sequence
  ENSG00000258752_11 (sequence is synthesized)
cacctgtcttgctattattttacagatgtgttctaaaagctataaagacggaaatcactattagtgtgtcacttatgtgatattcagacacctgagctctgtgatgattttaatgcccca

SEQ ID NO: 935159 - DNA, 120 bp, Artificial Sequence
  ENSG00000258752_12 (sequence is synthesized)
caggtctttcagaaatccacctcatatacctcagaacgcccctccatctgcaagggaacgcatgtggaacaggtggagaaggaattcttttaggcccatgggtagaattgtaaggactct

SEQ ID NO: 935160 - DNA, 120 bp, Artificial Sequence
  ENSG00000258752_13 (sequence is synthesized)
tgtaaatgcttcttctgtagtagagaagctggacggtatgtgtgtgtgcttatgcgtgtttgaatggacgcaggaaaaatcaataatctgcttgcatcaacacctaaataaaaccaaaat

SEQ ID NO: 935161 - DNA, 120 bp, Artificial Sequence
  ENSG00000258752_14 (sequence is synthesized)
aatcccatgatttgcctaaaaccaaattaatctctaggaaaagcctgctgtgacagagttgtgtgggggcgggaattacaaaagaaacgcagaatttccccgagcttccgctttgcagga

SEQ ID NO: 935162 - DNA, 120 bp, Artificial Sequence
  ENSG00000258752_15 (sequence is synthesized)
atctctgttccgttactcactattttgagagagccctgcttcttcctccttctccccaccacacgtcaatgtcattttcacaggggggaggctacaggaagcacacatctgcagtgtgtc

SEQ ID NO: 935163 - DNA, 120 bp, Artificial Sequence
  ENSG00000258752_16 (sequence is synthesized)
acctcccgaggctgacagatctactcagtatttgtttgggttgaaaatagttatttttttgtactctctacactattgtttcccaagtgccaaaagcagtcaagagctagcacgctaaca

SEQ ID NO: 935164 - DNA, 120 bp, Artificial Sequence
  ENSG00000258752_17 (sequence is synthesized)
acgatcaatcataaaatgatcatgaaaacatccaaattatattgactttgaaatactgtcaaactctacactgctaagttctaataaagaaaaggaaacagaaacacacccctcatactc

SEQ ID NO: 935165 - DNA, 120 bp, Artificial Sequence
  ENSG00000258752_18 (sequence is synthesized)
caagtcagaaggccaaagaggtggcatctttaaaatcactatctagctaaatcggttttatccaactaaatcttaggatcctcccaaattagttttaccactctgtcttgggagggcctt

SEQ ID NO: 935166 - DNA, 120 bp, Artificial Sequence
  ENSG00000258752_19 (sequence is synthesized)
tagcaaataagggtttaactcttcttctccatctgaaacctcatcgcatgacataggctgactaaaaagggtagaggcacagaagcatttaaaaaaacttcaaacacatgcaaaacacac

SEQ ID NO: 935167 - DNA, 120 bp, Artificial Sequence
  ENSG00000258752_20 (sequence is synthesized)
aggaagctaaaaagcggatcgttttatatacttctaatagctgccatgctatgccacttcaaagagtcaaactattactcaaatgaactcaatatattatgtggcatgaagccataaact

SEQ ID NO: 935168 - DNA, 120 bp, Artificial Sequence
  ENSG00000258752_21 (sequence is synthesized)
ctcacgtacacacaaagtacacatggagagattttaaaatttaacatgaaagttaaataattattacagagaaacataaagtaactagaataactaacataaagttattctgtaataact

SEQ ID NO: 935169 - DNA, 120 bp, Artificial Sequence
  ENSG00000258752_22 (sequence is synthesized)
cgagtgaagataaaatgatcatctatttgaatgcagtggtggtcctggctcaacaaattcactgggaagagctttttgacattctcagctccccctctattttcatcactccctgcatct

SEQ ID NO: 935170 - DNA, 120 bp, Artificial Sequence
  ENSG00000258752_23 (sequence is synthesized)
gctttctatgaaccccacaccccacactcactactgggacttctcccttgctagggaagctactatcactgactcatgactacctggctgctgaaagtcttttgcccaggtctctgcact

SEQ ID NO: 935171 - DNA, 120 bp, Artificial Sequence
  ENSG00000258752_24 (sequence is synthesized)
gaaagtcttttgcccaggtctctgcactgtcaacatcaagctgaggtttaattccatacttggtcagttcattgtggccatctcccaaaaaaaattttttttttgagacagtctcattct

SEQ ID NO: 935172 - DNA, 120 bp, Artificial Sequence
  ENSG00000258754_0 (sequence is synthesized)
atgtaagaagtgcctttcaccctccaccatgactgtgagaacttccccagccatgtggaactatggcagaagcaattcttcagtgaaggcttcaagcaacacctccaaacttctgacaca

SEQ ID NO: 935173 - DNA, 120 bp, Artificial Sequence
  ENSG00000258754_1 (sequence is synthesized)
tctgggaagcggtactgtagagctgacctaccttgaatgagacctttaaatgtgcccacagcagaatccacatgccgtccatctggtccagcctcacgcagagccacaactgtgctggcg

SEQ ID NO: 935174 - DNA, 120 bp, Artificial Sequence
  ENSG00000258754_2 (sequence is synthesized)
tggactgcatagggacccaccagtgagatggacgctgtctgtaaacgatgacttctaggaagaaaagaaaaaattctgattaaacagccatattcatgctggaagtctacactttgaatt

SEQ ID NO: 935175 - DNA, 120 bp, Artificial Sequence
  ENSG00000258754_3 (sequence is synthesized)
tcttgcactccaagattctaactgttgaccagttatcagctgacattctatatatgtttgatgagtagctgaatggctgaaaagattagtgcaaactaaagaattactaaagtcctgaat

SEQ ID NO: 935176 - DNA, 120 bp, Artificial Sequence
  ENSG00000258754_4 (sequence is synthesized)
tcctgaatgtgatgtttggttatgtctataatttatagaattttccctattattttaaatgctaacatttcatggaagtatatttgaatataaaagattataaaattactaatccagcat

SEQ ID NO: 935177 - DNA, 120 bp, Artificial Sequence
  ENSG00000258754_5 (sequence is synthesized)
acagcagaggcatctccgcttcctgtttccgccatttcaagggatggcgctcccatctctttaagctgccgctcttccaacttggcagggctgattaggaagacccagttcctgaccacc

SEQ ID NO: 935178 - DNA, 120 bp, Artificial Sequence
  ENSG00000258754_6 (sequence is synthesized)
gatgctttgctacgctaggctggaaaatgcctccctctgcccttgagaagggggtctgaatgttttgcgggactgacaccgcagcaacatgccggtgtgtttcacgctgctgcctcctgt

SEQ ID NO: 935179 - DNA, 120 bp, Artificial Sequence
  ENSG00000258754_7 (sequence is synthesized)
ttcccttgaagctttcaccagaccctggatttctttttcacttcctgttctgagccatcgccgggcactcattacccaccagctgtgtcccagctgccgcattctacactagaggtggcg

SEQ ID NO: 935180 - DNA, 120 bp, Artificial Sequence
  ENSG00000258754_8 (sequence is synthesized)
ccctgcacccggcggaaatgaagagaatcagactacccaccttggattctgatatgaaagatttaggataaaagagctactccatcagcctggaaagatgactcactggcaaactcttag

SEQ ID NO: 935181 - DNA, 120 bp, Artificial Sequence
  ENSG00000258754_9 (sequence is synthesized)
ataaagctaaacttcacaccaaactgcaagagagtctaagaatgaagagaaaactgctttggcaagcaactacctagtctctgacacagtccacctttttggtcagccaatatccagctc

SEQ ID NO: 935182 - DNA, 120 bp, Artificial Sequence
  ENSG00000258754_10 (sequence is synthesized)
gtcagctggcttatccaaccctgaaaggtctgtgatctctcagttctttttataaacaggcctctgcttgcaaatggccaattcttgcctgagctcatctctttcttgtaatactttatg

SEQ ID NO: 935183 - DNA, 120 bp, Artificial Sequence
  ENSG00000258754_11 (sequence is synthesized)
aaaggcagccagtagtaactaatgcataaatttttccaaccaactggcccaaaggtcagtagacctttttaccaaatgtttcgcaatgtatagcatgaatctccatctttctcctctctg

SEQ ID NO: 935184 - DNA, 120 bp, Artificial Sequence
  ENSG00000258754_12 (sequence is synthesized)
ttatcaggttcctcagtgcccaaccattatgtcaatgccttttaccttaatttttttcttatggcaacattttcttctggaattatttctgtactgtagcaaatgccctaaactgtgtaa

SEQ ID NO: 935185 - DNA, 120 bp, Artificial Sequence
  ENSG00000258754_13 (sequence is synthesized)
aacagtttgaagacactatttttttttctatttttatcatttgttcctcggtctactcaatacgctccctgcttaaaactcccctagtgattttctgttgggtttaaaatagagtctaaa

SEQ ID NO: 935186 - DNA, 120 bp, Artificial Sequence
  ENSG00000258754_14 (sequence is synthesized)
ctctttaccatggattacaagcttctctgttaactggttgtaacctgcatttccagcctcctttggcgccactcttgtcccaccaactatatcacatttcctttggaacattttctgctt

SEQ ID NO: 935187 - DNA, 120 bp, Artificial Sequence
  ENSG00000258754_15 (sequence is synthesized)
cttgaacttgcccaggtccttgctgttagctggtccctttgcctatgatgatcttccttcttagcatcacttgaactgcaaaaaataaaaaatgaaacaaaaaacaaactcctgtgtgtt

SEQ ID NO: 935188 - DNA, 120 bp, Artificial Sequence
  ENSG00000258754_16 (sequence is synthesized)
ctccagggaggctgctctgccaagtctggtatttcatgaatagatctgaaaacagacattatctcttctcccagtgaagagagagcgatgaagcctcaggacaaaaggaggcagtgggat

SEQ ID NO: 935189 - DNA, 120 bp, Artificial Sequence
  ENSG00000258754_17 (sequence is synthesized)
gatgccaccaagggaccattctgaagagccatcagcaaaaagcagccacacctgcttatgtggctctgggacaaatgatctgagccgtgacgtggaacttagatgcagtaaagtccattg

SEQ ID NO: 935190 - DNA, 120 bp, Artificial Sequence
  ENSG00000258754_18 (sequence is synthesized)
tattgagccttctctggcactcctcccaaaacagagagacaacagttctgttatgttttgtttggtttggtctccctcaactcatcaatgagcctttttaaaaagaataattcggtactt

SEQ ID NO: 935191 - DNA, 120 bp, Artificial Sequence
  ENSG00000258754_19 (sequence is synthesized)
tctttaaaggtggtagaattggctcttactctagtctgttttctccttcctaagggaggagcatccttcttgttaacacagaaccccaaactatctgatcagaaagaaaataattcaatc

SEQ ID NO: 935192 - DNA, 120 bp, Artificial Sequence
  ENSG00000258754_20 (sequence is synthesized)
ccccggcctaaaacaacctcaaactgtatgtcttccatactcctctcaccaccaccatcaccactgcccctacaaccactctaagcatagtacatatggtgaacataccatgatattgaa

SEQ ID NO: 935193 - DNA, 120 bp, Artificial Sequence
  ENSG00000258754_21 (sequence is synthesized)
tgctattctcactctgccttctcttaatctgatcttactcaggttctgacagttgacgctgaaaacattttttgttgttgttgtggttgagacagagtttcgcacttgttgcccaggctg

SEQ ID NO: 935194 - DNA, 120 bp, Artificial Sequence
  ENSG00000258754_22 (sequence is synthesized)
atgcccggccatgacactgaaaacattttaaaggagaaacagattaccaattatccataaagatgagaattatctggcaacattttggttagatgaaaactgtgactagagagctaacaa

SEQ ID NO: 935195 - DNA, 120 bp, Artificial Sequence
  ENSG00000258754_23 (sequence is synthesized)
aaacaaacacaatgagcactagatatctgccaggcattgttcacagccccttttttggtctcatctgatccttgctgtagatcaggaatcaacaaactaagctttcaccacttgtcaggg

SEQ ID NO: 935196 - DNA, 120 bp, Artificial Sequence
  ENSG00000258754_24 (sequence is synthesized)
gtaaagccatgtcagtctgagtcccaatgccacactgttagccactctcccacaccacctgctccaactatttgaagaaggagaatgtttttccagttaataaagttaatagttaaaaac

SEQ ID NO: 935197 - DNA, 120 bp, Artificial Sequence
  ENSG00000258754_25 (sequence is synthesized)
ggagtcacgcgaagtcggaagtaccagctgcgggaaggagctgcccactgtgcgtcttctcaacttgttgggacaaccttcctgcggaaaggagagacaaccttcctgcagaaaggagct

SEQ ID NO: 935198 - DNA, 120 bp, Artificial Sequence
  ENSG00000258754_26 (sequence is synthesized)
acctgcttcaggtctactgagagctgttctgccactcaataaagctcttctccatcttgctaagcctccatttgtccgcaatacctcatctccctggacgcaggacaagaactcaggacc

SEQ ID NO: 935199 - DNA, 120 bp, Artificial Sequence
  ENSG00000258754_27 (sequence is synthesized)
agacgtggagcaagttggactgcatagggacccaccagtgagatggacgctgtctgtaaacggggaaatttatggaaagatgtcctcctgcaactgctgaaaatgcaacatgctgcccag

SEQ ID NO: 935200 - DNA, 120 bp, Artificial Sequence
  ENSG00000258754_28 (sequence is synthesized)
ctcagagtggaaagcgtagcaaagtgtagtacatgagcaagcgtttcaagccagacggagttaatcatctctgtcactgaattggagctcacggtctgctggacaactgtgctgagtgga

SEQ ID NO: 935201 - DNA, 120 bp, Artificial Sequence
  ENSG00000258754_29 (sequence is synthesized)
aaggaagcctcgatggctaagtcacttgtccaacctcagacactggcagatccaggattcaaacagctagactccaaatgtgtttcctttaacctcttttctaccttttcaacttgattc

SEQ ID NO: 935202 - DNA, 120 bp, Artificial Sequence
  ENSG00000258754_30 (sequence is synthesized)
cacacatcaccactgggaaagcttaggtgagtaagtcatgtgggctttggttttttcatctgcacgatggatagactgagaccttcttccctcatgcctctgaggatgacataaaaaacc

SEQ ID NO: 935203 - DNA, 120 bp, Artificial Sequence
  ENSG00000258754_31 (sequence is synthesized)
cacaaaatccctagtccacttacttgctcacagatatttactgagtgagcatctgatttccatcccattgtcaccttctccctagctgtccagacaccctgcttgcctggccaatgccac

SEQ ID NO: 935204 - DNA, 120 bp, Artificial Sequence
  ENSG00000258754_32 (sequence is synthesized)
caaagaatggaacctgcttttgttccacactccgtagccagaaaaaagagacagttgttctggcatgttattgtttgattttattttacctcagggattaaaaaaaatgactatcaatta

SEQ ID NO: 935205 - DNA, 120 bp, Artificial Sequence
  ENSG00000258754_33 (sequence is synthesized)
gacctagggtctccctgagccagggctgtgacactccctttggggttctatggttcctggcatcttcaagcttccaggcgccaccaccttcgttcccttcatccaaacaggtgcccacag

SEQ ID NO: 935206 - DNA, 120 bp, Artificial Sequence
  ENSG00000258754_34 (sequence is synthesized)
atacctctatttagaatattagaatggatatttggtacttagccttctattttcctggatgagtaatattttgaggcctgtgcagttgtttaagatacagatcattctgtctcataccaa

SEQ ID NO: 935207 - DNA, 120 bp, Artificial Sequence
  ENSG00000258754_35 (sequence is synthesized)
gttgcccggtggaggtcgttaaggggaggatgttaagtgaaaatgctatataagctgcaggctgcttgcaagcagttgcagttttcctccccaacccgatactatgggggctgtgcgttt

SEQ ID NO: 935208 - DNA, 120 bp, Artificial Sequence
  ENSG00000258754_36 (sequence is synthesized)
atcttgttcagctcacgtcactggaccataggactgtggatatgttgtccagcctactgccacggggtcatttctccttctggaggtgagacccgggaacaccaggcagaaaaagcagga

SEQ ID NO: 935209 - DNA, 120 bp, Artificial Sequence
  ENSG00000258754_37 (sequence is synthesized)
actgccttaataaaatcaaatgaggtgaatactacaacacacaggaaagacccttggcctctgggcatgcagagcctaaaatttggagccagatgaacctacccactgtgtgattgctac

SEQ ID NO: 935210 - DNA, 120 bp, Artificial Sequence
  ENSG00000258754_38 (sequence is synthesized)
aagtcaatgagcccctctgagtttctcaattacttcatgtataaaatgtttctgcagttggagcgtaatctccctggaatgctctgaatcttatccttcacgtgaccttgtaagaaacca

SEQ ID NO: 935211 - DNA, 120 bp, Artificial Sequence
  ENSG00000258754_39 (sequence is synthesized)
agttacagtagcagttaaaatcgttgtaggaacagcaactacaaatacttgattgactaacactagtacaactaagatatttatagtacttaccatgcaccggagagttcacacacatta

SEQ ID NO: 935212 - DNA, 120 bp, Artificial Sequence
  ENSG00000258754_40 (sequence is synthesized)
ttctttgccttttgaccattttcctcctttgagataattgtctcctcatctgtctctcctctctctcctttaggcatttcatctgtgaaactatttatatcccttaagggatgcccctcc

SEQ ID NO: 935213 - DNA, 120 bp, Artificial Sequence
  ENSG00000258754_41 (sequence is synthesized)
atatctttatatctacttctccttcatcccagctccaatattgtgtcttaccatcattatgttttgtaaaaggaaaaaagaagccattccctactttaaacttctctgctttgtatctag

SEQ ID NO: 935214 - DNA, 120 bp, Artificial Sequence
  ENSG00000258754_42 (sequence is synthesized)
tcaccactgggaaagcttagctgtccagacaccctgcttgcctggccaatgccaccaaagaatggaacctgcttttgttccacactccgtagccagaaaaaagagacagttgttctggca

SEQ ID NO: 935215 - DNA, 120 bp, Artificial Sequence
  ENSG00000258754_43 (sequence is synthesized)
attcttcagggagcttgtgtgcctgcctgaaaagctggctaggcattcatcaattgacaggtttctgcagttggagcgtaatctccctggaatgctctgaatcttatccttcacgtgacc

SEQ ID NO: 935216 - DNA, 120 bp, Artificial Sequence
  ENSG00000258754_44 (sequence is synthesized)
ttgtaagaaaccagagtatgcacagattcaatatgggaagtgctcagcaacctgtttcaaagctctcggtaaaagtttgcagggatcaaaaggagtgggtgacttcaattaaatcaccct

SEQ ID NO: 935217 - DNA, 120 bp, Artificial Sequence
  ENSG00000258754_45 (sequence is synthesized)
tggaacctggtgttatgttccttaaggatcaagacatctcagctgttttattttaaaaaaatgtatttggcatctaactaacaagagataaaacctgagcaaggagactcgctctctgtc

SEQ ID NO: 935218 - DNA, 120 bp, Artificial Sequence
  ENSG00000258754_46 (sequence is synthesized)
ccaaccttgaggcgtggagcccagtctttcagattatgttcatctagggccatgctgcatggatttttaccccagttgtgagatcttggtgcagttactatctcaattcttcagtttcca

SEQ ID NO: 935219 - DNA, 120 bp, Artificial Sequence
  ENSG00000258754_47 (sequence is synthesized)
cgttgtaaaatggggttgatagcagcattcacctgggagcactgtcaggagaaaagaagaggattcacatagtgagcctgcgctgagtccacagaggctgctgcccggagctgagctggc

SEQ ID NO: 935220 - DNA, 120 bp, Artificial Sequence
  ENSG00000258754_48 (sequence is synthesized)
tgtgcaccagcaaacctccaggaaggatccttcaccaagactaggatatgaatagcacccccaagaattgtgggaaaagacaaccctattacctgtgctcattgccccagaacaaacagt

SEQ ID NO: 935221 - DNA, 120 bp, Artificial Sequence
  ENSG00000258754_49 (sequence is synthesized)
gaaattattacaaaatgtattattacatcatccatgtcctgctttatacggtgagtgacacaaacaaacctggacacacatggaacaattctcagggcaattgttctgaaaaacaggata

SEQ ID NO: 935222 - DNA, 120 bp, Artificial Sequence
  ENSG00000258754_50 (sequence is synthesized)
ctttttccattgatcaaatggaaacagtgaggagcaacgtgattcattttgaggataatcctcataccttttatttctttcaaaggttacacataaagtcgggcactgcttaatgacagg

SEQ ID NO: 935223 - DNA, 120 bp, Artificial Sequence
  ENSG00000258754_51 (sequence is synthesized)
caaaggttacacataaagtcgggcactgcttaatgacagggatgtgttctttgaaatgcatcactacatgattttgtccttgtgggaacatcttagagtgtacttacacaaacctagatg

SEQ ID NO: 935224 - DNA, 120 bp, Artificial Sequence
  ENSG00000258754_52 (sequence is synthesized)
tggctgcccagctaaaaacccgtacaacatgctactttgctgaatacggtagatgattgtcacacagtggtatttgtgtatatctaagatagaaaatgtacagtaaaaatatggtactaa

SEQ ID NO: 935225 - DNA, 120 bp, Artificial Sequence
  ENSG00000258754_53 (sequence is synthesized)
atagaaaatgtacagtaaaaatatggtactaaaaaaatggtccacctttttagggcacttactatgaatggagcttgaaggaccggaagttactctgggtgagtcagtgagtgagtggtg

SEQ ID NO: 935226 - DNA, 120 bp, Artificial Sequence
  ENSG00000258754_54 (sequence is synthesized)
actactgtagactataaacactgaacatatagaccacaccaaacttatttaaaaataaagtaattgcactgaccatgtcactaggccacaggaattttccagctccattataatcttata

SEQ ID NO: 935227 - DNA, 120 bp, Artificial Sequence
  ENSG00000258754_55 (sequence is synthesized)
gagtcaccatgatatatgtagttcatcatcgacaaaaatatcattatgcagtgtgtgactgtatttcaaatgaatcttctcagactgctttcaggattcctatgtagaagttacagaatg

SEQ ID NO: 935228 - DNA, 120 bp, Artificial Sequence
  ENSG00000258754_56 (sequence is synthesized)
actatatctcttgttaattcaccactgctgtaaaaagagaatcacctagcttgccacaaaaattctttggcgattgttacaaaacagactttcctgaaatcatgtggtattcaagaagct

SEQ ID NO: 935229 - DNA, 120 bp, Artificial Sequence
  ENSG00000258754_57 (sequence is synthesized)
ctttgtagcaaaggaatagataagacaaaagcacatgtggaaggcagatacacctcgctaatggaacaggcatcttgctggactgtggggggaggagtgtgttactgaaggaggagcttt

SEQ ID NO: 935230 - DNA, 120 bp, Artificial Sequence
  ENSG00000258754_58 (sequence is synthesized)
catcaggaagtagtcgtccctcattatccataagggattggttccaggaaccccagggataccaaaatcctcagatgctcaagtccctgatataaaagggggcagtatttgcatagaatc

SEQ ID NO: 935231 - DNA, 120 bp, Artificial Sequence
  ENSG00000258754_59 (sequence is synthesized)
ggcagtatttgcatagaatctatgcatatcttcctgtatactttaaatcatttctacattacttataatatcaaatataatgtaaatgttatgcaaatagttaacttatattgtttaggg

SEQ ID NO: 935232 - DNA, 120 bp, Artificial Sequence
  ENSG00000258754_60 (sequence is synthesized)
tttcaacaaggaaaaaagtatgtacatatgtactacagatgcattttttttcaccgaatattttcaatccttggttggttgaatctacagatgcagaacccatggatacaaagtgttgac

SEQ ID NO: 935233 - DNA, 120 bp, Artificial Sequence
  ENSG00000258754_61 (sequence is synthesized)
tgtatggcattcaaagggatacagagaaaagagagaagtagaacatactgatagaggttagaagattattttaaagaaagaccagaagagtggacaactagcaacttctttaggaagagc

SEQ ID NO: 935234 - DNA, 120 bp, Artificial Sequence
  ENSG00000258754_62 (sequence is synthesized)
cagactgcctgtgaaggtataaatttaacctgaagccaactggaatcttgagactcaggaagaaaagaacctgtgttcttaatcacatgcaagacagacaggttccaagtcattactaga

SEQ ID NO: 935235 - DNA, 120 bp, Artificial Sequence
  ENSG00000258754_63 (sequence is synthesized)
aggctattgggcaggcagggaggctggaagacctggcttgcaagatgaacttgaaggctgtacatcagatgcagagtcaagaccacagaagcagagtggctagaatgatgtcaccagcac

SEQ ID NO: 935236 - DNA, 120 bp, Artificial Sequence
  ENSG00000258754_64 (sequence is synthesized)
cagtggcctgctcgctcagtgctgcttgggctgtgctcttggtgtccccatttctactgggcgtattagggcccaatacctgtgttttgtgcgagttgcttaagaatcactatcccagaa

SEQ ID NO: 935237 - DNA, 120 bp, Artificial Sequence
  ENSG00000258754_65 (sequence is synthesized)
gaaaacatccaatgggctaaccacagactatgagaacatgttctagcttccaggggacagcaaaagagagaaatggagtctttgggcatcggtacagagaggtaggcctctgccttctgc

SEQ ID NO: 935238 - DNA, 120 bp, Artificial Sequence
  ENSG00000258754_66 (sequence is synthesized)
caagactttcaatcaagaatctcccagagaaggagaggtgtttggttgctggatgtcctcaacaaacaaatgagcaacaaaccaatacccataaagacctgcactattttgtagaaaaat

SEQ ID NO: 935239 - DNA, 120 bp, Artificial Sequence
  ENSG00000258754_67 (sequence is synthesized)
aggagacgtgagcaacttatcaatgtcaaagagtgtatatgtagaccatggccttgaatgtccatgatctctgtatagcagcacaggacaattaacaatgagataattaacaagagacaa

SEQ ID NO: 935240 - DNA, 120 bp, Artificial Sequence
  ENSG00000258754_68 (sequence is synthesized)
atttccgatgagcttagatttctctcaaattctcatacttttaagatttatttttaaatgtgagcattgaaacttaaccaatcctttagactcttactcaacaagggattctaaagaaca

SEQ ID NO: 935241 - DNA, 120 bp, Artificial Sequence
  ENSG00000258754_69 (sequence is synthesized)
gactttcactgaatgtgctaagaagagaaacccctctgcagacacacacagacgttctgcagtttcccaatctctggtgcagttctggccttttggggctttaagggctttggctaaggt

SEQ ID NO: 935242 - DNA, 120 bp, Artificial Sequence
  ENSG00000258754_70 (sequence is synthesized)
aaggcttcaagcaacacctccaaacttctgacacatctgggaagcggtactgtagagctgacctaccttgaatgagacctttaaatgttgattctctaactgcaggtcaacgcttcttga

SEQ ID NO: 935243 - DNA, 120 bp, Artificial Sequence
  ENSG00000258754_71 (sequence is synthesized)
ctccctggttttccttcttgactcactgctcaggagactgcccttttagtgataattctgctccacttctgctttcaacctgcatattcttcatgaggaatctactggatccttgatcct

SEQ ID NO: 935244 - DNA, 120 bp, Artificial Sequence
  ENSG00000258754_72 (sequence is synthesized)
atacccaccacttctccactgggtttcccttttcttagattcatccgtttccattagcagccacattcctccagacactgccatcgctgtgacactaatttggcttgccttctggcaact

SEQ ID NO: 935245 - DNA, 120 bp, Artificial Sequence
  ENSG00000258754_73 (sequence is synthesized)
cggggaaatttatggaaagatgtcctcctgcaactgctgaaaatgcaacatgctgcccaggtcctgctcagaccactgacaactcagaagttaatactcagagtggaaaggtgagtaaag

SEQ ID NO: 935246 - DNA, 120 bp, Artificial Sequence
  ENSG00000258754_74 (sequence is synthesized)
gctgtttaatgaccaccccatgaaaagagtcagaattacatccctcttgattcctgtttctttctgaacaacataaatgtaatgtaagccaagctaatacatgctgttttgtggtatata

SEQ ID NO: 935247 - DNA, 120 bp, Artificial Sequence
  ENSG00000258754_75 (sequence is synthesized)
attcaacacaatgtagtcaggataagaatgaatgagaagaggcccagtccttaggaggaattgtaaccaagtttcatctgtagatctcccagtgatcctccagccttgaatttgttttaa

SEQ ID NO: 935248 - DNA, 120 bp, Artificial Sequence
  ENSG00000258757_0 (sequence is synthesized)
aatgaatgttttaagacacacacaggtgtctctgggacaaccaagaaaagtgcaacaggcagatggattgaggagtctggctaaagataaggatttaggaactgctgaattaaaattacc

SEQ ID NO: 935249 - DNA, 120 bp, Artificial Sequence
  ENSG00000258757_1 (sequence is synthesized)
caagcgtgagaagtggtgttgtgattaagagagaaaaaaaaaatggaggtctgaggaataacatttaaggaataaatgaagaggccaaaaggtggggggtggttcaggagtgagcaaaat

SEQ ID NO: 935250 - DNA, 120 bp, Artificial Sequence
  ENSG00000258757_2 (sequence is synthesized)
gaattaagattttagactttacaggaagggactgttaaccagagagccaaatggcagattttagttaaggagccagtagaaggtgacaaagtagaggtaagaatattccttcaaaaagat

SEQ ID NO: 935251 - DNA, 120 bp, Artificial Sequence
  ENSG00000282572_0 (sequence is synthesized)
gcagcagcagcagcagcagcagcagcaactggatttgctttttcaccagaggatccagatttccctgtggccttgcaaacaaaaaagaaggaagacggagcagcacagtcatccctttgt

SEQ ID NO: 935252 - DNA, 120 bp, Artificial Sequence
  ENSG00000282572_1 (sequence is synthesized)
cagcacagtcatccctttgtgaaaaaagcattcaggccttgctcctccctgctgatgaacgcccactctgctcccagatgcacacctgtcctgaagacacccggttctcatgctcttctc

SEQ ID NO: 935253 - DNA, 60 bp, Artificial Sequence
  ENSG00000282572_2 (sequence is synthesized)
cctgtcctgaagacacccggttctcatgctcttctctgcagcacctgaattgggcattcc

SEQ ID NO: 935254 - DNA, 120 bp, Artificial Sequence
  ENSG00000282572_3 (sequence is synthesized)
gccaccgcgcccggcctcagctggtttttcaaaagtcatggcgtgtaattgtcagaacagtgaacttcggagatccaccggaggggcgaggccacagctcgaccgcgagcacctgagcat

SEQ ID NO: 935255 - DNA, 120 bp, Artificial Sequence
  ENSG00000282572_4 (sequence is synthesized)
ctcgggagacgccgctggctctctaggaacacctggggaccgtggccagggacgacccagcctccttctcctcagctcctcaggaacgactggggaagctgtggcttcatggtccccgag

SEQ ID NO: 935256 - DNA, 66 bp, Artificial Sequence
  ENSG00000282572_5 (sequence is synthesized)
caggaacgactggggaagctgtggcttcatggtccccgaggctgcccgaggaaagacagagtctca

SEQ ID NO: 935257 - DNA, 120 bp, Artificial Sequence
  ENSG00000282572_6 (sequence is synthesized)
gtattacaggtatttcaggacagccaggagggggcgcacatccgccgagaaactgtgagcaagagcgtctgtgctgaaccatggcgccaccagagggcgcgcgatcccgccccaaccaac

SEQ ID NO: 935258 - DNA, 120 bp, Artificial Sequence
  ENSG00000282572_7 (sequence is synthesized)
ttcccgctgaagtgccagaagcagcgaggagcttcaacttcctcagggcagcacgggggtcgtgttaatttggtgttcttcattggttgttggaacgtaataagagttaatgtgtggtct

SEQ ID NO: 935259 - DNA, 120 bp, Artificial Sequence
  ENSG00000282572_8 (sequence is synthesized)
ctgctgcagtgtcctgaaacagagcgctaagccttgggaatgtacgaagtaatgtgtctttcgtacgctaatgaaatgattgatggctgggggcacctggacagcctcagtggggctggc

SEQ ID NO: 935260 - DNA, 120 bp, Artificial Sequence
  ENSG00000282572_9 (sequence is synthesized)
cgtcagggggcgcgatgccgcctcacagaacctcaagcggcgcccgggttccggcacagacggcctgcggctccagggggcggagccgagccgtctcctcaggacctacgcaagaggcgc

SEQ ID NO: 935261 - DNA, 120 bp, Artificial Sequence
  ENSG00000282572_10 (sequence is synthesized)
tcccacaaaatactccggtatattgtactgaaagcatggacactctcccaggtaactaccacataacccctagatcaggaaatcagcgttgttcctacatgataattcggtccacaaact

SEQ ID NO: 935262 - DNA, 120 bp, Artificial Sequence
  ENSG00000282572_11 (sequence is synthesized)
cacttcagttttacctcatgccacacttgggagtataatgtgttttttttttttttttttattaggatccagttttcttttcctggaactgttccccagactttcctgcatatttatgac

SEQ ID NO: 935263 - DNA, 120 bp, Artificial Sequence
  ENSG00000251586_0 (sequence is synthesized)
ttgctccacattctcaccagcacttggtttcatcagtgttctgacttcagccattctaacaggtttgaactgcatggactgcttatatgtgaattttcttccacttctgccacccctgga

SEQ ID NO: 935264 - DNA, 120 bp, Artificial Sequence
  ENSG00000251586_1 (sequence is synthesized)
aacaaaggatgaagatctttatgatgatctacttccatttaataaatagtactatattgtacattccactgtaaatgagcaaacattacactggcagcagggaccagcatcctttatcaa

SEQ ID NO: 935265 - DNA, 120 bp, Artificial Sequence
  ENSG00000251586_2 (sequence is synthesized)
gaggcagttgtagctcaagagttgcatcttggtagcatcaatacagaatttaaggattacagaagatatctcaaaagttctctatacttggaagaaaaataaagaacgatttgcacttca

SEQ ID NO: 935266 - DNA, 87 bp, Artificial Sequence
  ENSG00000251584_0 (sequence is synthesized)
agttccagctacttgggaagctgagacaggatatctgcttgagcccaggagttcgtggctgcagagagctgtgatcacaccaccact

SEQ ID NO: 935267 - DNA, 120 bp, Artificial Sequence
  ENSG00000251584_1 (sequence is synthesized)
ccaaaagcaaaaacaaaagagcaaaaacgagattccaatgtatactcccaccaattaatttgaaggtgaccatatccctcctatcaaatactgtcactcatttacatctttgccaaatgt

SEQ ID NO: 935268 - DNA, 120 bp, Artificial Sequence
  ENSG00000251584_2 (sequence is synthesized)
gggaaaacataaagtttggcaaccctatattgactccaccatgccttgggaaaggcagcccgcatcagtggcaggaaatattggtggagcgagctgggacttgcaggtgaccaagaaggg

SEQ ID NO: 935269 - DNA, 120 bp, Artificial Sequence
  ENSG00000251584_3 (sequence is synthesized)
ccctcagacttgcctctttgcagtaggaagaaggcctccccacataccttcccacactcatcaccttaagccagactcggtgtccagtgaatatgaccatctcttgcccattttctaatg

SEQ ID NO: 935270 - DNA, 120 bp, Artificial Sequence
  ENSG00000251584_4 (sequence is synthesized)
agtgttttcattaatgagttataagaatgtggtgggtaaatctatgggctttgaactagtgaatcaacttggtttcagaatctggcactgctacttactagtgaatttaagcaagttatt

SEQ ID NO: 935271 - DNA, 120 bp, Artificial Sequence
  ENSG00000251584_5 (sequence is synthesized)
tcacctttcagagtgtcagttccctcatgcatacaaggaagataaaaaataatgtatacaaaagtattggagtaattaatacatggagaactacatgtaaagcgtttagcatgatgtctg

SEQ ID NO: 935272 - DNA, 120 bp, Artificial Sequence
  ENSG00000251584_6 (sequence is synthesized)
gtgtcacctgccccctgagcgttctggagcgccaagcttcgcgatctttgccttccggactcgcagaccggctcaaagcctcccctcagcctctggctccgtgattggcaggcagctgac

SEQ ID NO: 935273 - DNA, 120 bp, Artificial Sequence
  ENSG00000251584_7 (sequence is synthesized)
agaagaaaagttaaaaggttatttctgaagaagagtttccttcagtgccctaaagaccaactggatagaaggagagcggagcagaggcttggaagcttggatccctcctcctgcactccc

SEQ ID NO: 935274 - DNA, 120 bp, Artificial Sequence
  ENSG00000251584_8 (sequence is synthesized)
tcccggccccgactccggaacaaaacaagcaaacaataaagcaaacttgttgctcttttgtctcaaagttttgtgatctaggatgttgggaaggaacaaagaaattcaggcatctctcct

SEQ ID NO: 935275 - DNA, 120 bp, Artificial Sequence
  ENSG00000251584_9 (sequence is synthesized)
ttgcttgcagaattattagtaaaagagattgcttctgaaagccattccaattcttaaattttataatgccacatttgaggtcacctgaagtacgtgtataacatgtgtacatttttgcga

SEQ ID NO: 935276 - DNA, 120 bp, Artificial Sequence
  ENSG00000251584_10 (sequence is synthesized)
tttattttttcaattcccagattagaggcatagagatatcctagcaaggactccaagtgtgtagatctgtcaaagatatgaacatgaaagaacagcttatttcaataaacccactttaca

SEQ ID NO: 935277 - DNA, 120 bp, Artificial Sequence
  ENSG00000251580_0 (sequence is synthesized)
atgcgcaccccatgtccccgcccgctgtagcgccacagctctttgggcgttgattctagggtcagggccctcactcacactgctggaaggttaaagtcgacttcacgctagtttaaggaa

SEQ ID NO: 935278 - DNA, 85 bp, Artificial Sequence
  ENSG00000251580_1 (sequence is synthesized)
tgctggaaggttaaagtcgacttcacgctagtttaaggaaatatctgacgctgataaccatgtcccaagcactgctctaagttcc

SEQ ID NO: 935279 - DNA, 120 bp, Artificial Sequence
  ENSG00000251580_2 (sequence is synthesized)
cactgatcaacaatcctgggcatgggctgaccgacagttttcacccagagagtgaagatcatggaggagccatcttaaattctgcccagcgcaggctcccaggaatcctaatgtcacgat

SEQ ID NO: 935280 - DNA, 120 bp, Artificial Sequence
  ENSG00000251580_3 (sequence is synthesized)
ctcactgcagccaatgtgacaaacacagcagtaattaagtctagagagctaaacacacctcaaaaagaattgtctcttggtatgagtggaatggaataaaatacatggaaacccacaaaa

SEQ ID NO: 935281 - DNA, 120 bp, Artificial Sequence
  ENSG00000251580_4 (sequence is synthesized)
gcctcagcctcctgagtagctgggatacagacggtgactcaatctgcccaggctggagtgcggtgacctgaacacagctcactgaagccttgacttcccgggttcaagcaattctcctgc

SEQ ID NO: 935282 - DNA, 120 bp, Artificial Sequence
  ENSG00000251580_5 (sequence is synthesized)
ccgcggtgggcccatgctgactgttttatccattctttctgggttgctgtgtaacgtgtgtcaggccttgtatgaaatgtgcctcagaggttgccccctccaggggctttgcagtttctg

SEQ ID NO: 935283 - DNA, 120 bp, Artificial Sequence
  ENSG00000251580_6 (sequence is synthesized)
aagccttcttcatgctggtgcaggtgctggggctcagcacttccttcaggggctgaacaaccccaagttttagcagactcaccttggaatttctttggccatatatttccttcaaaacct

SEQ ID NO: 935284 - DNA, 90 bp, Artificial Sequence
  ENSG00000251580_7 (sequence is synthesized)
aaggctggctaattgttttttatttttggtagagagaggtctcactatgttgtcaaggctgatgtcgaactcctgagctcaagtgatcct

SEQ ID NO: 935285 - DNA, 120 bp, Artificial Sequence
  ENSG00000251580_8 (sequence is synthesized)
aaagtgctgggattacaggcatgagacacagcgcccgactcacacacttttaaattttgttctccgcctgatatttagctttacggcatagaagaaatggtttaacccccttagcgacat

SEQ ID NO: 935286 - DNA, 120 bp, Artificial Sequence
  ENSG00000251580_9 (sequence is synthesized)
tttaacccccttagcgacatggcagctctatgccctttattgttctactgctaaaggtctttgggtttctgtttctccttttttttttctttttaagaaatgaaattattttcttttacc

SEQ ID NO: 935287 - DNA, 120 bp, Artificial Sequence
  ENSG00000251580_10 (sequence is synthesized)
tacgtaaaaagagtataccttggcggagagcgtggcacggctctacgcacccctccctgcctgcccagcgccttccacgcgggaaactccccgccggtctcagctccaccccgcgctgcc

SEQ ID NO: 935288 - DNA, 120 bp, Artificial Sequence
  ENSG00000251580_11 (sequence is synthesized)
ctggtgcagctccacgatccgcctgcccatccgcgccgcctccgcggccttcctctccgcctcggcgcacagcctggccaccagatcctccgcctccgcgcgcgggctgggtgctggggc

SEQ ID NO: 935289 - DNA, 120 bp, Artificial Sequence
  ENSG00000251580_12 (sequence is synthesized)
ctcctccgcctccatctcgctcttgatggcgtcgagcaggctctggatctccagcagctccctgcgggcccgctagtgcgcccgggcacgctcgcactccagggaggccaggtcctcgcc

SEQ ID NO: 935290 - DNA, 120 bp, Artificial Sequence
  ENSG00000251580_13 (sequence is synthesized)
gcccacgcggggcgccgggccacctgggtctttgcgggctctcgcctggtccgtgtccacgtcaggcaggagaacagggtctggaggtagggaacttaaggcagattcctgctgacttcc

SEQ ID NO: 935291 - DNA, 120 bp, Artificial Sequence
  ENSG00000251580_14 (sequence is synthesized)
taaagctgaatcaagggaaaacaccaaggtctggggcagagaatctgaggctgattaactcaaacttcccaaaccaaaaggaaaagcaccatctccccattgggagtagtaaagcatcaa

SEQ ID NO: 935292 - DNA, 120 bp, Artificial Sequence
  ENSG00000251580_15 (sequence is synthesized)
aggctactctccctacaagcctcctcccagatggaaagggagcgtgccttggagtggccaagagccatgcagggaccgtcccttcatccgcatagggcgccagttcaccccagcctttag

SEQ ID NO: 935293 - DNA, 120 bp, Artificial Sequence
  ENSG00000251580_16 (sequence is synthesized)
ccacaaaccaaaaccttcatccacataagaggtagctggtaagaacctcaaatgaagtacttaaagcccagaaaactttctaactggcccttgagctgcttgctcgggcccgctcccacc

SEQ ID NO: 935294 - DNA, 120 bp, Artificial Sequence
  ENSG00000251580_17 (sequence is synthesized)
ctgtgggtgctttctcgctttaagaaattgctgctttccctgcttctgttcctgcgtttcattcctttgttactttgtttgtgcgttttgttcaatgctttgttcaaaaggccaaggacc

SEQ ID NO: 935295 - DNA, 120 bp, Artificial Sequence
  ENSG00000251580_18 (sequence is synthesized)
caagcgacagttcaaagtgtcaaaggacttctagactcccaatctttccaccggcagaaagcaggctcagtagcccaaactggcgcattttaaaatgcccttttcagaagtgtgatggaa

SEQ ID NO: 935296 - DNA, 120 bp, Artificial Sequence
  ENSG00000251580_19 (sequence is synthesized)
aaagaaggatgtgtcagtgcaggccagtgtgtggggaccaatggcaaactgcagctcctgaactaagaaagactttcatatctttaaaaaagaaaaggagaaataggaatatgtgataga

SEQ ID NO: 935297 - DNA, 120 bp, Artificial Sequence
  ENSG00000251580_20 (sequence is synthesized)
tagatctttacagaaaatgtttgccaactcctgtgctgctgagccacttccaggttgcagaaccaaagccttacattccctagctttaaagtagaggacctggcaatgtttactccaccg

SEQ ID NO: 935298 - DNA, 120 bp, Artificial Sequence
  ENSG00000251580_21 (sequence is synthesized)
agtttcaaaatagctatgtgactgctatttcaccccttcattcttcccttaccaatgggccttatcctgtccctgtctcatcactgaatgttgggtctaagtggacaataacttgtcttt

SEQ ID NO: 935299 - DNA, 120 bp, Artificial Sequence
  ENSG00000251580_22 (sequence is synthesized)
tcaaaaagtgcataagcttctagaccaataaaagccatattaggacctgatgtggctcacaagatgctagacttcttgcttgaggccatgattggaagaaagtaggaagggggtccttag

SEQ ID NO: 935300 - DNA, 120 bp, Artificial Sequence
  ENSG00000251580_23 (sequence is synthesized)
atgggggtgggcaatttttccatgaataatgggggcagtgggcacagatgatggtaggtagtataaatgaccccaattccccaccccttcattcatccatgttctctgcctcatgtcttg

SEQ ID NO: 935301 - DNA, 120 bp, Artificial Sequence
  ENSG00000251580_24 (sequence is synthesized)
ctttggccaatgagaggttcacagagaggacacaagcacaggtttgaaagaggctttcgcggttggactcgctttcctctgcgtctctgccttcgctatgagaagaacgggcaccggtct

SEQ ID NO: 935302 - DNA, 120 bp, Artificial Sequence
  ENSG00000251580_25 (sequence is synthesized)
tgggaagatggtgagagaaacacagaaccaagctgctctagacaggcctagcctagaccaggtggcccgcagaccattactgagcccagcctggatcatccaactcccagccaaactgca

SEQ ID NO: 935303 - DNA, 120 bp, Artificial Sequence
  ENSG00000251580_26 (sequence is synthesized)
gaccatgaggaatgtttattgttgtcacggagatttagggtggctcatgcagcaaaagccagttgatggccgtaggtgggattataatcccggatacattaaaatgccagtctcttcttt

SEQ ID NO: 935304 - DNA, 120 bp, Artificial Sequence
  ENSG00000266801_0 (sequence is synthesized)
gggcattgatgcagtaatgcccttcttcacgttgatgtgttctgtttacctcccagaggcaaggttgtcagtgagcacaaaggatcatctaattggacctggcatggaaatttggaatgc

SEQ ID NO: 935305 - DNA, 120 bp, Artificial Sequence
  ENSG00000266801_1 (sequence is synthesized)
agtcctgcgaagtttatcatctccatttatgtcctggaaaagggaagatttcttttacatcctgacctggtttctgtaccacttacttaacaaataagcatttagagaatgtctctcata

SEQ ID NO: 935306 - DNA, 120 bp, Artificial Sequence
  ENSG00000266801_2 (sequence is synthesized)
gacattatctccatttttaaaacttcttatttgagatgtaatttacatacctaaaattcacccaattaaaacatgcaagtcagtggtttctagtgtctttaaagagttgtgcaaccatca

SEQ ID NO: 935307 - DNA, 120 bp, Artificial Sequence
  ENSG00000266801_3 (sequence is synthesized)
ccactatctaattttaaaacatttttatcatttcatacccatcaaaagtcacttccccttgctcactcccccaacccctggcaaccactgatctattttttaatctctatggatttgcct

SEQ ID NO: 935308 - DNA, 120 bp, Artificial Sequence
  ENSG00000266801_4 (sequence is synthesized)
atgctggacatttcatataaatggaattatacaatatgcggtcttttttgtctggctcctttcactttagcataatgtttttgaggtttgaggtttcctttttatgacttcattcctttt

SEQ ID NO: 935309 - DNA, 120 bp, Artificial Sequence
  ENSG00000266803_0 (sequence is synthesized)
tttaatttacatttttgagtatgcaaaaacagtaacatggctgagaactcaaaaactatatagaaaggtatacatttcctttccttctgctctcttcccacctactccctataggtaacc

SEQ ID NO: 935310 - DNA, 120 bp, Artificial Sequence
  ENSG00000266803_1 (sequence is synthesized)
atgatcattggtttctgatgtatccttcccatgtttctctttgcaaaaataaattattaatatattatcttcttttgtatatgaaagaagtatactatgtatattcttgcatcttgcttt

SEQ ID NO: 935311 - DNA, 120 bp, Artificial Sequence
  ENSG00000266803_2 (sequence is synthesized)
cactgggtgacagagtaagactgtctcaaagaaaaaaaaaaagatatgctaccttagagtgaattgtttcacttttttaaaaaactaactttggtcattaggtattttaagggtcataaa

SEQ ID NO: 935312 - DNA, 120 bp, Artificial Sequence
  ENSG00000266803_3 (sequence is synthesized)
ctttaaaagctaattcttctctataatttatggccttatatgccttagttggcaaaatacaaaatacacctacagcacactaaattctctggggaacaaattctgcacactctaggcact

SEQ ID NO: 935313 - DNA, 120 bp, Artificial Sequence
  ENSG00000266803_4 (sequence is synthesized)
gagaaaacatacatagtgtaatggaaataagcctggattagagccaggatagtcttctgggagatacttgcagtctgaagtcactttaacttctcaacatgaggagttttttagatcatc

SEQ ID NO: 935314 - DNA, 120 bp, Artificial Sequence
  ENSG00000228824_0 (sequence is synthesized)
tttctaatccagctgtaatgaagacagacaacagtcaaattaacaactgatcaggaggagaagttcatactccttgagctggatctatctgcacatgcacctggcccaggaagctgaaat

SEQ ID NO: 935315 - DNA, 120 bp, Artificial Sequence
  ENSG00000228824_1 (sequence is synthesized)
gggagatctgatgagcagtggaggactgaaccaaagcccttggcttttgctccataccagtcagccgttctggacatacacatgggcagaagatgtagccgccttgtgtgaaaatttgag

SEQ ID NO: 935316 - DNA, 120 bp, Artificial Sequence
  ENSG00000228824_2 (sequence is synthesized)
atgcacaacggccttcagaccatatgaaaagtctacagggtgagaatctgaaaatccagcaatgaggagaaaaaagttatctcccattaagaacactttccagaagctacacaattccag

SEQ ID NO: 935317 - DNA, 120 bp, Artificial Sequence
  ENSG00000228824_3 (sequence is synthesized)
ttattgattcatcccatttactagaacctgttcatctggctatgcccaaaaccaagggaaactgaaatagtggttaccatattctgtaactcagcctagcctagcttcagaagttttaat

SEQ ID NO: 935318 - DNA, 120 bp, Artificial Sequence
  ENSG00000228824_4 (sequence is synthesized)
gtaggaagagagagaagtcttggaccatgtgtgtaattcgagcgtgggactgtgcaattctcggattgggaaagggaggagtggaaataaccccggcagtgccaggcttgctggtggtca

SEQ ID NO: 935319 - DNA, 120 bp, Artificial Sequence
  ENSG00000228824_5 (sequence is synthesized)
ggaacagatgattccagccctgtgctgatcgcctgccttcctcctgccattcagaatgctgctgtctcgtgtacttactgttaaggatcctggaaaagggagtggttcctcctagctgca

SEQ ID NO: 935320 - DNA, 120 bp, Artificial Sequence
  ENSG00000228824_6 (sequence is synthesized)
aacaagggcgctacttttcttttctctttaatagaattacgttttataggtgtgtctaggcaacacaagggaatgtgaaagactttcagagggaatgtttgtgaatacatctggtgtgta

SEQ ID NO: 935321 - DNA, 120 bp, Artificial Sequence
  ENSG00000228824_7 (sequence is synthesized)
ctaaaaagctggaaaacccctaagtaaatgcaatatcgatagaaagcgagtttcttgaagagtcatctgctaaactccactagagtcatctctacaggtgtggttaagagaaaaaaaaat

SEQ ID NO: 935322 - DNA, 120 bp, Artificial Sequence
  ENSG00000228824_8 (sequence is synthesized)
tgccattaaggaatcagcaaataggatgtctgaagtgaggatatagcacctatctctgagattaaagtcatctgatcaaaaatgatgcctctgagactataacaaaggaatgaataatga

SEQ ID NO: 935323 - DNA, 120 bp, Artificial Sequence
  ENSG00000228824_9 (sequence is synthesized)
aatataagaatggggattctgcactaactctatggggaagaaaacaatgctctgatatagcaagaccaaaccatcatctttctcctccttctcaactcaacgtgaagacaacaagaatga

SEQ ID NO: 935324 - DNA, 120 bp, Artificial Sequence
  ENSG00000228824_10 (sequence is synthesized)
gtaagaatatagcatataatacacatgacatacaaaatatgtgttaacagaatgtttatgttgtcaggtcagctgtaggctattagaagttaagctttgcggcagcctaagttatccatg

SEQ ID NO: 935325 - DNA, 120 bp, Artificial Sequence
  ENSG00000228824_11 (sequence is synthesized)
aatttttgacttcatggaggttgatacccttacctccaacattgttcaagtatcaactgtatgcaatacatatacccccctcacccttccaaaactcacattctgcaaaattggcagggt

SEQ ID NO: 935326 - DNA, 120 bp, Artificial Sequence
  ENSG00000228824_12 (sequence is synthesized)
gtatgggcaggctggaaacttatactggatttctatgttgcaatcctgaggcagtttcttttttttccaggaaacctcaaatgtttttgctcgtaacttcttcatcttattggaacaggc

SEQ ID NO: 935327 - DNA, 120 bp, Artificial Sequence
  ENSG00000228824_13 (sequence is synthesized)
aggcccactcaaattattgaagttaattcaaatttttgaaaagtttaaattttatttatgacttattttaaaaattgtttgataactaaaaaaagtatttgtggtgtaaaacatgatgtt

SEQ ID NO: 935328 - DNA, 120 bp, Artificial Sequence
  ENSG00000228824_14 (sequence is synthesized)
agtatatatacaatatgggatggttaaatatagctaaataataaatgctttatctcacatagttattattttcaccataagaacatataacatccaccctctttacattttcaagaatac

SEQ ID NO: 935329 - DNA, 120 bp, Artificial Sequence
  ENSG00000228824_15 (sequence is synthesized)
aatatattaacttttattatagtcaccttgctgtacaacagactccttgaaattgatttttcccgtctaactatatttacatatactttggccaatgtctccccaaatcccaaatcctcc

SEQ ID NO: 935330 - DNA, 120 bp, Artificial Sequence
  ENSG00000228824_16 (sequence is synthesized)
taaccaccccagtttctagtaatcaccattttgctttttacctctatgtgattaatgattaatgattctagatgccatattagtcagagttctccagagggacagaactcataggatata

SEQ ID NO: 935331 - DNA, 120 bp, Artificial Sequence
  ENSG00000228824_17 (sequence is synthesized)
tctctacaataacaatatcaactgaatataaaatattaatgccatggatgatctcagaaatgatttcctacaaagtcccaacctatcctggaacatttcttatgtgtgcttgggagattg

SEQ ID NO: 935332 - DNA, 120 bp, Artificial Sequence
  ENSG00000228824_18 (sequence is synthesized)
agcagtggaggactgaaccaaagcccttggcttttgctccataccagtcagagtctcatcaggatatcatgttgcattgagtagtcatgtctccacaggcttttcttggctgcgactctt

SEQ ID NO: 935333 - DNA, 120 bp, Artificial Sequence
  ENSG00000228824_19 (sequence is synthesized)
actcacgttttccttggttttgcccaccttacagtttacagtagtggtcaggtattttgtagtatgtccctcacttgggctttgcttgatgcttatctcctgagaaaactagggatatgt

SEQ ID NO: 935334 - DNA, 120 bp, Artificial Sequence
  ENSG00000228824_20 (sequence is synthesized)
atattctttttcaggattttgactttaaagttaccctttatgcttttccttctcataaagtgctctttgaaatgaagtcactctgtgcagcagacatttaaaaagcaggaaattatggtg

SEQ ID NO: 935335 - DNA, 120 bp, Artificial Sequence
  ENSG00000228824_21 (sequence is synthesized)
acagagtatctgtataaattatttgcagttcttttattttcagagtttggaattatagcactcctataaatcttattactaatggtgccacaaattgtgtactactgatatgtattagtg

SEQ ID NO: 935336 - DNA, 120 bp, Artificial Sequence
  ENSG00000228824_22 (sequence is synthesized)
cacaacttaaagcatgtggacatgagctgtatttgaaaaaacattcagatggaagagctacctgatttgaagtgaatcttaattggaacttaatgatgcctcctagtaatttactatttt

SEQ ID NO: 935337 - DNA, 120 bp, Artificial Sequence
  ENSG00000228824_23 (sequence is synthesized)
agctgaacctacagtatcagctgtagcccagaaaatataagagctacaattcgtacaattcaacatcagctgccaaggcccacctggactgcacctgcaaaaccagctgtggtttctttg

SEQ ID NO: 935338 - DNA, 120 bp, Artificial Sequence
  ENSG00000228824_24 (sequence is synthesized)
ctctcacaattcatgtcagtgtttttcagccaatgcatcactggtttcgaattttatactgttcctctctcagtcctccacccctctagtttctaaatgatagagaataattaggtgagg

SEQ ID NO: 935339 - DNA, 120 bp, Artificial Sequence
  ENSG00000228824_25 (sequence is synthesized)
tttaaactctcaggattattcagggtttgtggagagtaggaaggtttcttccaggttacagcacaatttaaggagcctggcaagaagcatccaatattagcaagtagaaaagcagcataa

SEQ ID NO: 935340 - DNA, 120 bp, Artificial Sequence
  ENSG00000228824_26 (sequence is synthesized)
gtatgaggttggaacttcccacgatacttagtacatggaaaaaaatgtagaacataccaaaaaaaaagcaaattgtaaaaaaatttcacaaataaaaatactgttatgaaaattataatt

SEQ ID NO: 935341 - DNA, 120 bp, Artificial Sequence
  ENSG00000228824_27 (sequence is synthesized)
gattaataatttagacatatcagctgtaaattcataagaaccatatggatgtccaagtggaggtggaggaggtgattaagatggaaaaaggcaaccatgaatgaagacacacagatcctc

SEQ ID NO: 935342 - DNA, 120 bp, Artificial Sequence
  ENSG00000228824_28 (sequence is synthesized)
aacctttaaaacagatgcaactgactcacttaaaatagctgtgtggatatagaacttttatcaactactatttactaaattatattggtgtgtttgtcctcatcttagaatagcatatca

SEQ ID NO: 935343 - DNA, 120 bp, Artificial Sequence
  ENSG00000228824_29 (sequence is synthesized)
tcagcgactgcagacataaagagaaagctttcaattaaagtttcaatgatgggataggaactgagaagtctgtggagttttctgcctaggagtacccttggaaaagccactgctatgccc

SEQ ID NO: 935344 - DNA, 120 bp, Artificial Sequence
  ENSG00000228824_30 (sequence is synthesized)
tgttgtgcaaagcaaagggatgaatgatgcccaactctctaacatgggcctcggtttccacatcgaggttggaaatgagctaggaagcagatccaccataaatggagaaagaagagaaac

SEQ ID NO: 935345 - DNA, 120 bp, Artificial Sequence
  ENSG00000228824_31 (sequence is synthesized)
aagttgagcttttaatgaccccgtagcctgactctttggtatggaaatggaaagagatcctcatggaaacataaataaaatatatcacatgtaacttataccaataattattttctcccc

SEQ ID NO: 935346 - DNA, 120 bp, Artificial Sequence
  ENSG00000228824_32 (sequence is synthesized)
cagtacctcaattttgcccagattggactctattttatttccttatttttccacagtaatttacttaagtaaaaccaggatttattttattcatctccatgtcagttgctaagtccaagg

SEQ ID NO: 935347 - DNA, 120 bp, Artificial Sequence
  ENSG00000228824_33 (sequence is synthesized)
gatgtatatagtttaaaaaatatcacaaaggatgatatggtgaaattgaacaacacattattacctgatgtacagtcattgattttgtatactagcctttacccctggctactgataatt

SEQ ID NO: 935348 - DNA, 120 bp, Artificial Sequence
  ENSG00000228824_34 (sequence is synthesized)
ttggattttgaagattcaaagacagagacttgtaaatactttagtttttacacttctttatcatactcatacctgggatggaaaagtatcatttaatatattaagaacattgttatagta

SEQ ID NO: 935349 - DNA, 120 bp, Artificial Sequence
  ENSG00000228824_35 (sequence is synthesized)
catgtatttaaataactcacaagagcaagtaatcttacctcatgtcatctatttttgaaaaaatattttgtgtatttccacatgcttcttccagatgacctttagcaaaactttgtgaag

SEQ ID NO: 935350 - DNA, 120 bp, Artificial Sequence
  ENSG00000228824_36 (sequence is synthesized)
tttcattgtggctgttgtcttagaaagatggtcttgttaataaggtcagtgttttagccttgcaatataagattatgtgcatttgtttagagggagactttaggatacagcgaagtgttt

SEQ ID NO: 935351 - DNA, 120 bp, Artificial Sequence
  ENSG00000228824_37 (sequence is synthesized)
tacaaatgtttaccatttttattcttattagatttttgaaagtatttggtttaaaattttcttctttttattcaaccagctctttaaattacccatcaattcttgttaagagtgtgtatt

SEQ ID NO: 935352 - DNA, 120 bp, Artificial Sequence
  ENSG00000228824_38 (sequence is synthesized)
gtatatctctctatacatttcatgtatttttgtatgaattgtgctatttttataatttttctatttagcctctgtatccaatatgattcaatgtatacatggatgccatacgtaggtact

SEQ ID NO: 935353 - DNA, 120 bp, Artificial Sequence
  ENSG00000228824_39 (sequence is synthesized)
ggggcgggcagcaaccgcgtcgttctatgcctgtggcttgtcctggcagcccggtggctctaaaaaaaactccgagaaagttgcgtcttcctcccgggcgccgaggaggtggcaacgcga

SEQ ID NO: 935354 - DNA, 77 bp, Artificial Sequence
  ENSG00000228824_40 (sequence is synthesized)
acaaaggaatgaataatgaaatataagaatggggattctgcactaactctatggggaagaaaacaatgcagagacga

SEQ ID NO: 935355 - DNA, 120 bp, Artificial Sequence
  ENSG00000228824_41 (sequence is synthesized)
aggtgtgagccactgagcctggccccagttttaattgttaatacagtaatatcaatagatacaacctgcataaactaaagctctttggggccttccatgacattaagaacgtaagcggtc

SEQ ID NO: 935356 - DNA, 120 bp, Artificial Sequence
  ENSG00000228824_42 (sequence is synthesized)
agagaggagagctgacatctatctgcattcacttttcttctggaggatgtgttaactttgagcaagaatacatgtttcagaactgggcttttgtattacagaactagcggcaatgaagag

SEQ ID NO: 935357 - DNA, 120 bp, Artificial Sequence
  ENSG00000228824_43 (sequence is synthesized)
caagttttggtgggaacttgagaaccagcatgccggctatacgccattctgaaattttacagataacaatatcaactgaatataaaatattaatgccatggatgatctcagaaatgattt

SEQ ID NO: 935358 - DNA, 120 bp, Artificial Sequence
  ENSG00000228824_44 (sequence is synthesized)
cctacaaagtcccaacctatcctggaacatttcttatgtgtgcttggccttctataggaagaagatgccatctaggaccttcatagctagagaagagaagtcaatgcctggcttcaaagc

SEQ ID NO: 935359 - DNA, 120 bp, Artificial Sequence
  ENSG00000228824_45 (sequence is synthesized)
gaaaatcctcaggcctttgagaattatgttaaatctattctgcctatgcactataaatggaacaagaaagcctgaatgacaggacatctgtttataccatggtttactgaatattttagg

SEQ ID NO: 935360 - DNA, 120 bp, Artificial Sequence
  ENSG00000228824_46 (sequence is synthesized)
cctattgttgaaacctacagttcaaaaaatatgtcttttcattttcacaatattacttgtcattgacaataatattgacaatattacttacattgtcatgcacttggttacccaagagct

SEQ ID NO: 935361 - DNA, 120 bp, Artificial Sequence
  ENSG00000228824_47 (sequence is synthesized)
ctgatggagatgtacaaggagatttgtgttgttttcatgcctgcaaacgtaacattctgccacccatggatcaaggattagttgtgactttcaagtctccctatttaagaaatacatttt

SEQ ID NO: 935362 - DNA, 120 bp, Artificial Sequence
  ENSG00000228824_48 (sequence is synthesized)
gtaaggctatagcttctatagatagtgattcttctgatggatctgggcaaagtgaactgaaagctgtgtggaaagaactcaccattccagatgtgattaagaacattcgtgattcatggg

SEQ ID NO: 935363 - DNA, 120 bp, Artificial Sequence
  ENSG00000228824_49 (sequence is synthesized)
aggaggtcaaagtaaaattaacagaaatttgcaagaagtgtacttcagcactcttggatgactttgaggaattcagtccttcagtggaggaaatgactgcagatgtggtggcaatagtga

SEQ ID NO: 935364 - DNA, 120 bp, Artificial Sequence
  ENSG00000228824_50 (sequence is synthesized)
gaactagaattagaagtggagactgaaaatgctactgtattgctgcaatctcatgataaaattagaatggatgagaagttgccttttatggacgaaaaaagaaagtgatttattaagatg

SEQ ID NO: 935365 - DNA, 120 bp, Artificial Sequence
  ENSG00000228824_51 (sequence is synthesized)
aaattgtaactcctggtgacaatgccgtgaacattgttggaacgacaaataacttagaatattacataatcttagttgataaaacagcagcagagtttgagaggattaattccaattttg

SEQ ID NO: 935366 - DNA, 120 bp, Artificial Sequence
  ENSG00000228824_52 (sequence is synthesized)
aatgaagttgtactgtgggtaaaatgctatcaaacaacatggcatgccacagggaaatctttagtgaaagaaagagccaatcaatgaggcaaacttcatggttgtatcattagaaaaatt

SEQ ID NO: 935367 - DNA, 120 bp, Artificial Sequence
  ENSG00000228824_53 (sequence is synthesized)
tcccacagcttctccaaccttcagcaaccaccatgctgatcaatcagcagccatcaacactgagtcaagcccttccaccagcaaaaagattacgactctctgaaggctcagatgattgtt

SEQ ID NO: 935368 - DNA, 120 bp, Artificial Sequence
  ENSG00000228824_54 (sequence is synthesized)
gcgtcgttctatgcctgtggcttgtcctggcagcccggtggctctaaaaaaaactccgagaaagttgcgtcttcctcccgggcgccgaggaggtggcaacgcggtgtgtctaggcaacac

SEQ ID NO: 935369 - DNA, 120 bp, Artificial Sequence
  ENSG00000228824_55 (sequence is synthesized)
aacagcagcaactcctgtttccatcgatttgtttataagatgccgtctacattattccaaaatatcccagcctttttctcccctgtcaagcttccctgtctctaaaagagatcttgctct

SEQ ID NO: 935370 - DNA, 120 bp, Artificial Sequence
  ENSG00000228824_56 (sequence is synthesized)
tcctgcacagaaagaaataataatatatcactgaaatattattattacatttaaagttacttacactctttcccattcctataatttcctagttggaagccctcgcacttgggaaattat

SEQ ID NO: 935371 - DNA, 120 bp, Artificial Sequence
  ENSG00000228824_57 (sequence is synthesized)
ttaatgtgattttttctccctgacatataaattgtcacatcaccttaaatgttgggacttcaggttgggaagtgggtggataatattcttgaggaagctgccttccttttatagataatg

SEQ ID NO: 935372 - DNA, 120 bp, Artificial Sequence
  ENSG00000228824_58 (sequence is synthesized)
ttacctccttgtaaaggttgctttctatgtattattctactttttttctaagaatataccatataatgaaaactttacaggcttgacatcctattactaagattataattgttgaggtct

SEQ ID NO: 935373 - DNA, 120 bp, Artificial Sequence
  ENSG00000228824_59 (sequence is synthesized)
tcaatagaatttcaagtcaaatatgttgtgctatatgcctacttacatttcactctttgattcacctagttaggatctcagaattgaactttaattgcagatttattacttctttactct

SEQ ID NO: 935374 - DNA, 120 bp, Artificial Sequence
  ENSG00000228824_60 (sequence is synthesized)
cttcatgtattaatttaaaatttactttttcctaccttcatcttggtttgagaaggttatttccctttcatttgatttatttgttttaatttacatgtgcatatttattacctgtatata

SEQ ID NO: 935375 - DNA, 120 bp, Artificial Sequence
  ENSG00000228824_61 (sequence is synthesized)
agcaaaatttatagaagaggatagtatgagttaataaataagtatattatcaggatattttctttatatttaatatatgttgtaattaaaatgcactgtttagctgaactgtgcctcctg

SEQ ID NO: 935376 - DNA, 120 bp, Artificial Sequence
  ENSG00000228824_62 (sequence is synthesized)
gaaactgtagcatttaaagacagcactatgtgaaatataaaattatgttttttttctctgtgtctatgatttattgaagtaatgttcttcaggaaaatttttttaattttcaaatttata

SEQ ID NO: 935377 - DNA, 120 bp, Artificial Sequence
  ENSG00000228824_63 (sequence is synthesized)
attgacataataattgtacatatttatagggtacaatgtgatgtttcaatgcatgtcgataatataacgatcaaattggaataattaccatatctatcactttaaacatttgtcattttt

SEQ ID NO: 935378 - DNA, 120 bp, Artificial Sequence
  ENSG00000228824_64 (sequence is synthesized)
atgtgacaggtgacagcatttaaaatattctgttctagctatcttgaaatatacagcaaattgtagtttgctgtaatcatccttctgaaattaattttttctgagtttagattttcagaa

SEQ ID NO: 935379 - DNA, 120 bp, Artificial Sequence
  ENSG00000228824_65 (sequence is synthesized)
caaattattaatcaaattgacagaaaattttattcttgttaataaaaataccaatttatatttacatttgtaactgctatgtctattgtgagctgtaatccctttatagaggtaaatatg

SEQ ID NO: 935380 - DNA, 120 bp, Artificial Sequence
  ENSG00000228824_66 (sequence is synthesized)
caaataaaataagcaaatggtgaaaaagcagcctttcaggctgactactttctaaatagatctaaacttcaatccaaataagaaaatgcaatattgaaattttaaggatgctaagtcatt

SEQ ID NO: 935381 - DNA, 120 bp, Artificial Sequence
  ENSG00000228824_67 (sequence is synthesized)
ttgtgggggtaaaggattaatattaaatttcaggagttagattaggacagtgactaaaatgaataagattaggaattcaagattttttcttaaatgtattgagctgtgatgacccatgtc

SEQ ID NO: 935382 - DNA, 120 bp, Artificial Sequence
  ENSG00000228824_68 (sequence is synthesized)
aattaaaattttccaggttacgtgacaaacactataacctttacaacataaattgtggagatttgtattttgaataaggttcaactaagtagaaatgataacctccataatgttatttac

SEQ ID NO: 935383 - DNA, 120 bp, Artificial Sequence
  ENSG00000228824_69 (sequence is synthesized)
tactcctggaaattttttttgataaaaaataaaaatgttatcgtaattacagtagtgagtcatatgtaatgcctcaatggcaattttagtttattgtcccccaaaataacattactattc

SEQ ID NO: 935384 - DNA, 120 bp, Artificial Sequence
  ENSG00000228824_70 (sequence is synthesized)
tacatagctaagtttattggtttcagcatgacataaataggcctacgtttgaaaaataatttaacctctcttattgaggttatcctttctatttacttgaaccttattcatctttctagg

SEQ ID NO: 935385 - DNA, 120 bp, Artificial Sequence
  ENSG00000228824_71 (sequence is synthesized)
cattatcatatagtgaaaaatactgaaatatacagataaatattaattataaatatcacagccaccaattactgagccatcaccatgtgtcagacatgttaaggatgtatcacacgtcat

SEQ ID NO: 935386 - DNA, 120 bp, Artificial Sequence
  ENSG00000228824_72 (sequence is synthesized)
ttccaacactcttaacagcacgcagtgtaaattttttcagctccattgaaatttcctccattgcttataaacaaactgagcttaaaagatgctaaagtagccaagtgcatagaatgagtg

SEQ ID NO: 935387 - DNA, 120 bp, Artificial Sequence
  ENSG00000228824_73 (sequence is synthesized)
attgacatggattcaaacccaggcttgaaaactcaatctctttctaccaacaaaacttccttagaaaaagaataaacctacacaaaacaattggggatagtccctacctttcaatggcca

SEQ ID NO: 935388 - DNA, 120 bp, Artificial Sequence
  ENSG00000228824_74 (sequence is synthesized)
caacattttgtttgatttttatagatttcatgttctttattttccagctaggaacaatttgtctaactcacaaggttaatgtggatactccctctcaaaaatgtttgtttattttaattc

SEQ ID NO: 935389 - DNA, 120 bp, Artificial Sequence
  ENSG00000228824_75 (sequence is synthesized)
ccagttccatgaagtattttacgtttatttataatttgttctgaaattaaacctgcatgtttatgggtgtcacaatgtgatctgaggcacgttggatgaccccaagacccttttagtgtg

SEQ ID NO: 935390 - DNA, 120 bp, Artificial Sequence
  ENSG00000228824_76 (sequence is synthesized)
tccaagagtgcctcagtttgttttcaagtacttatctgtacatagctggatcttctttatatacttcaaccagaacaacataccataacccactgagttcagaaaagtggaatattcagt

SEQ ID NO: 935391 - DNA, 120 bp, Artificial Sequence
  ENSG00000228824_77 (sequence is synthesized)
gatctactaagccaatcattaaagaatttcacaaaaatacaaagcaacacagatctcactaaacctacttttgctttgcaaaataaccatttgtcatcaaaatgttacttttgttaatat

SEQ ID NO: 935392 - DNA, 120 bp, Artificial Sequence
  ENSG00000228824_78 (sequence is synthesized)
atgttattactattttaaaaatttagtgaattgctaggaaaattagtgagtatttaaaatttttttcagttttaatttttgttttgttttgttttgttttgatatggagtctttatctgt

SEQ ID NO: 935393 - DNA, 120 bp, Artificial Sequence
  ENSG00000228824_79 (sequence is synthesized)
agtttcccttttctgttttttttttaattttttaacataatatttattcaacctgcaatgtttattaaatcaagtattttgccatgtgatggaggtatcaaatggaacatgccatcacta

SEQ ID NO: 935394 - DNA, 120 bp, Artificial Sequence
  ENSG00000228824_80 (sequence is synthesized)
ttctaaaggattttgctctttggggaccggggagaatcttatattaagtatcagggcttgaattgattatatcaaattctcctaaaattggttaaattgttaaatctctgctcattattt

SEQ ID NO: 935395 - DNA, 120 bp, Artificial Sequence
  ENSG00000228824_81 (sequence is synthesized)
atttcaatgtgttatctctgtaatacataatattctagacaatattgactccattttttatgttttagaattcctaaattataattgcacataaattaatattttaattgtcttgatgga

SEQ ID NO: 935396 - DNA, 120 bp, Artificial Sequence
  ENSG00000228824_82 (sequence is synthesized)
taattgtcttgatggacacagtgttcttttactatgcattgtaatatttatcatccaagctatactttcaaatgtgttttattctcctccattttatatctcagtgaaggtgtccctcct

SEQ ID NO: 935397 - DNA, 120 bp, Artificial Sequence
  ENSG00000228824_83 (sequence is synthesized)
aaacttagctattaaatgaaataaataaactatgaatcattccacactctctttctccattaagccatgctgattttcctcctcaatggttcttaaattcagtctttatttttctttccc

SEQ ID NO: 935398 - DNA, 120 bp, Artificial Sequence
  ENSG00000228824_84 (sequence is synthesized)
acacttttgttcagggcagatgcttatcattgtctttcctggattgctggcttaatctcttgattctttttcttctctcatgtcctgccagactcatacctgtcctctagcctgtggcca

SEQ ID NO: 935399 - DNA, 120 bp, Artificial Sequence
  ENSG00000228824_85 (sequence is synthesized)
gagtgcctcaactgaacatgctactcaatttctgagaaatattttttaaaacctatctatcaatgactctccctttcttgattcaacattcttcacaaaggggtgacaagtgtgattaga

SEQ ID NO: 935400 - DNA, 120 bp, Artificial Sequence
  ENSG00000228824_86 (sequence is synthesized)
tattgatgtcctcccctctcagggccacagcaagggtcccatggttgctgtagtgcctcagctaagaaaagcttagtgcttaccttagtgcattatgcaagcttcctaactttctgaaga

SEQ ID NO: 935401 - DNA, 120 bp, Artificial Sequence
  ENSG00000228824_87 (sequence is synthesized)
ttgcttgacatggataaatgtggaaagcattaaattagaacattaaaagtccttttaatgacatagaaatctttctagactaggaagcgcagctaaactatataatatccttgtgcaaat

SEQ ID NO: 935402 - DNA, 120 bp, Artificial Sequence
  ENSG00000228824_88 (sequence is synthesized)
gtgcaaatctgtaaaaaggtatcatttagcctcaacagatgatttttaaaagatgccacaagtagacatcggtatatttgatagtacctttttggaaagaaagaaagaaagaaagaaaga

SEQ ID NO: 935403 - DNA, 120 bp, Artificial Sequence
  ENSG00000228824_89 (sequence is synthesized)
aagagagaaagaagaaagagagaaagaaaggaaggaaggaaggaaagaaagagaaagaaaaagaaagagaaagaaagaaaagaaaggaaagaaaaagaagaaaggaaagtaaaagaaaaa

SEQ ID NO: 935404 - DNA, 120 bp, Artificial Sequence
  ENSG00000228824_90 (sequence is synthesized)
gcgggcagcaaccgcgtcgttctatgcctgtggcttgtcctggcagcccggtggctctaaaaaaaactccgagaaagttgcgtcttcctcccgggcgccgaggaggtggcaacgcggtaa

SEQ ID NO: 935405 - DNA, 120 bp, Artificial Sequence
  ENSG00000228824_91 (sequence is synthesized)
gcaacaccgggtctctgagacagctgctccggagcgggtgcagggcccagtccagtgcacttgtttattgtcgcgcctctggtgcgagccaagctgcagcagacatgatgggcccggggc

SEQ ID NO: 935406 - DNA, 120 bp, Artificial Sequence
  ENSG00000228824_92 (sequence is synthesized)
tgtattgctaatttatctttatatagttgctattttataagatgtaaactccttgataataaaaatgttatttatttgccatgtcatttaaatgccatgatttgcataattggcatgtaa

SEQ ID NO: 935407 - DNA, 120 bp, Artificial Sequence
  ENSG00000228824_93 (sequence is synthesized)
caaatatttggagattgttgattggcagagattaattaatttaccctcatcattacataggtagttaaactcagagcagaaattaaaactgagatttctagtagtattgtgagtcacagc

SEQ ID NO: 935408 - DNA, 120 bp, Artificial Sequence
  ENSG00000228824_94 (sequence is synthesized)
tagaaaataaaatctgtctctaaagtgggaggatttcatattttagcatggaaaattatttccccttgttcaaatatttcaacttcctcctggtaagtgtcccattcattttgcagccca

SEQ ID NO: 935409 - DNA, 120 bp, Artificial Sequence
  ENSG00000228824_95 (sequence is synthesized)
ggcttagggaataaaattggtatgaatttgtttactgtagaagtgaaatttactttcaaaatataagtttttaaatatccacaattaggtattggctgaaaaaaatgtatgtataaagat

SEQ ID NO: 935410 - DNA, 120 bp, Artificial Sequence
  ENSG00000228824_96 (sequence is synthesized)
gaactttatttaaggaagtgtatttagacttctcaatagctggaaagccatctcagtctttctcttaatatcttgtcttcttatatttctttgtgtgcctatgtttgcatctcatttctc

SEQ ID NO: 935411 - DNA, 120 bp, Artificial Sequence
  ENSG00000228824_97 (sequence is synthesized)
ttagtccattctcacactgctataaagacatacttgagactgggtaatttatggagaaaagaggtttaattgagttacggtgtcacagagcatataggtaacatggatggggaggcctca

SEQ ID NO: 935412 - DNA, 120 bp, Artificial Sequence
  ENSG00000228824_98 (sequence is synthesized)
tgaagagggaagtgctacacatttttaaccaaccagatctcctgagaacttgttcactatcacaagaacagcaaggggtaaatcgtccccgtgatccaatcatctctcatcaggtccctc

SEQ ID NO: 935413 - DNA, 120 bp, Artificial Sequence
  ENSG00000228824_99 (sequence is synthesized)
ggggacacagagtcaaaccatatcagttgcctgatattattaattacatgtggctcgtcaaagcatcccccccaatgcaaatcgaatcccaaatacagacagtgggtacacagctttaca

SEQ ID NO: 935414 - DNA, 120 bp, Artificial Sequence
  ENSG00000228824_100 (sequence is synthesized)
atcgaatcccaaatacagacagtgggtacacagctttacaggtcaatcatgcatagctaagctacacggcattgccttgtctccattccaaagtccccagagaaaaatccaatggatccc

SEQ ID NO: 935415 - DNA, 120 bp, Artificial Sequence
  ENSG00000228824_101 (sequence is synthesized)
gtgtaagtgagttatctattctctctataccgttctctgagcctagggtggcagcatgtttaggttgagagggggagtgttgttttacataaagtgttaagctaagtgtatgttctttat

SEQ ID NO: 935416 - DNA, 120 bp, Artificial Sequence
  ENSG00000228824_102 (sequence is synthesized)
gaaggaatacagagaagtagatatatgggaaagatctgtacctttaggactccaaattatcaaatccttcaaaagatgtatagggaatccttactgatctatgaaacactaatccccaaa

SEQ ID NO: 935417 - DNA, 120 bp, Artificial Sequence
  ENSG00000228824_103 (sequence is synthesized)
ttatataaacttttgcttagtagttttaatactacttgccataaggcctctggaagatttgattaaaaataaaaacggtatcgtaactacagcagtgagtcatatataatgcctaaatgg

SEQ ID NO: 935418 - DNA, 120 bp, Artificial Sequence
  ENSG00000228824_104 (sequence is synthesized)
cagttttagttggttgtcctaaaaaataacattactattctacaaaactaagttttctggtttcagcatgacataaataggcctatgttggaaaataatttaaatgtaactgtacacata

SEQ ID NO: 935419 - DNA, 120 bp, Artificial Sequence
  ENSG00000228824_105 (sequence is synthesized)
catattgaaacttttcaggatacatttttactatgaatttgctgtatctgaaatgtaaagaaatatacaatgcagatttttatataaagcataatgtaggggaaattatgaaatttcaaa

SEQ ID NO: 935420 - DNA, 120 bp, Artificial Sequence
  ENSG00000228824_106 (sequence is synthesized)
ataagctttcagtagcattgtaatatgcttttgtagaaaccaagttatccagaaggcacaaggagttgcagtgtgtcctaagtcagcaatgcacaacgcctaatttattttccattaagt

SEQ ID NO: 935421 - DNA, 120 bp, Artificial Sequence
  ENSG00000228824_107 (sequence is synthesized)
tttgtgtctagaagttacataatatctaagaaggagcttagaggaaagctttagaacaaatgaaactaagagctataggttgtcattacaatattctttaagagcttatctattgtcctg

SEQ ID NO: 935422 - DNA, 120 bp, Artificial Sequence
  ENSG00000228824_108 (sequence is synthesized)
cctgcaataaatatattgctaaaaaatttgttcaataagcaaaccttacaataaagtgacactgatgtacataatcatatacttttaatactgttttcaaaaaatattcatgaaataaaa

SEQ ID NO: 935423 - DNA, 120 bp, Artificial Sequence
  ENSG00000228824_109 (sequence is synthesized)
gaagtcctttctacattccagtaataactggactacagttgttgactacagaacatatattgcacgttggttctgttcactattaagaatccagcttaatacgaaaaatgaatatagaat

SEQ ID NO: 935424 - DNA, 120 bp, Artificial Sequence
  ENSG00000228824_110 (sequence is synthesized)
ctacatacaatatagtaatcattacaatttgtgtatgtagctctccttgcatcttcttgtcgaagtaagtggtaatgattctgtatgatatatttttatattatagactgctagtgggaa

SEQ ID NO: 935425 - DNA, 120 bp, Artificial Sequence
  ENSG00000228824_111 (sequence is synthesized)
gacttaggcatgtcaacttttcctttgtgggagaggttaggaggctgagtggatgatcaaaagtgctgcaacacagagatcagctgagtctgaaaggggaagacaatccattgtgctgat

SEQ ID NO: 935426 - DNA, 120 bp, Artificial Sequence
  ENSG00000228824_112 (sequence is synthesized)
tataagtatccttccgttctagataggtataagttttaattttacactgggttggagaactctaaggaatttagacatataagttatttttcttattcaactttcattaaagaaaacagt

SEQ ID NO: 935427 - DNA, 120 bp, Artificial Sequence
  ENSG00000228824_113 (sequence is synthesized)
gaaaggtgggaggaagaactgtaagcgacttaggtcagttgtttaatatccgaatttcatctcccacaggaatcaatatgaccccctcccccttttttttcttgctctctttttgtcccc

SEQ ID NO: 935428 - DNA, 120 bp, Artificial Sequence
  ENSG00000228824_114 (sequence is synthesized)
ttttcttgctctctttttgtccccttgaaggcttccttccacttcctacttctgatcaacagcagcactcttaaaggaaggacataaatggaatgagcgtgtgtgtgtgtgtgtgtgtgt

SEQ ID NO: 935429 - DNA, 120 bp, Artificial Sequence
  ENSG00000228824_115 (sequence is synthesized)
gcgcgcgcatgctgcgttggttaatggggtggaggacatttgatagaaatgctggactctaggaacctatgccttttctctggtcaaccttgcctttgcctcactaccgaagtctaatat

SEQ ID NO: 935430 - DNA, 120 bp, Artificial Sequence
  ENSG00000228824_116 (sequence is synthesized)
cgaattgcaactccaaactaaagccaagatgtttccgagacagcgggttcaagcctggagaccttgctcctgatccccaagtcgactccagcccgcgttattaaacgcccctgcattcaa

SEQ ID NO: 935431 - DNA, 120 bp, Artificial Sequence
  ENSG00000228824_117 (sequence is synthesized)
acgcacatgtatcagtgtgcctgcgaatcattcacgtgtggccacccagacgtgtcgagatgaattggaaccacagtgcataaacctcgcaagtatccccgacctcccaacgcaacggta

SEQ ID NO: 935432 - DNA, 120 bp, Artificial Sequence
  ENSG00000228824_118 (sequence is synthesized)
aacgtctcccggcttaaaagcggcaaaaacatccccaccccagtgaaagcaaaacgtttaccttgaaatttcagttctccgctggatcaaatccgcacatccattcagcgagggtgtggt

SEQ ID NO: 935433 - DNA, 120 bp, Artificial Sequence
  ENSG00000228824_119 (sequence is synthesized)
gatgatctcagaaatgatttcctacaaagtcccaacctatcctggaacatttcttatgtgtgcttgggagctggattgcagtgtcatgacctgggctcagtgtaacttccatctgccagg

SEQ ID NO: 935434 - DNA, 120 bp, Artificial Sequence
  ENSG00000228824_120 (sequence is synthesized)
ggactacaggaacgtgccaccaggcctggctaattttttattttttttgtgaagacggggtttcactatgtggctcaggctggtctcaaactccaggaatcaagggacccacctgcctag

SEQ ID NO: 935435 - DNA, 120 bp, Artificial Sequence
  ENSG00000228824_121 (sequence is synthesized)
ggattacaggcatgagctaccgcaccagggctgtatgtaattatttaatattgtttgtcttagccatatatcaggttgtttataaacaacagaaatttatttcacacagttctgtaagct

SEQ ID NO: 935436 - DNA, 120 bp, Artificial Sequence
  ENSG00000228824_122 (sequence is synthesized)
cacagttctgtaagctagaaaatccacaattaaggcgtcatcagatttgatgtccagggagggcccactttcccataatgacaccctctcactctgtcctcacagggtgaaaggggttag

SEQ ID NO: 935437 - DNA, 120 bp, Artificial Sequence
  ENSG00000228824_123 (sequence is synthesized)
ttagctttttgaggtctctttgtaagggcagtaatcctattcacagaggctctgccctcctgatctagtcacctcccaaaggccccacctcctaatagcatcacattgaggattaggttt

SEQ ID NO: 935438 - DNA, 120 bp, Artificial Sequence
  ENSG00000228824_124 (sequence is synthesized)
taatgtataatttttggagggacacaaacattcaaaccattgcataggtataggatatgtaagactacatttgtaatatttttcttgcccccataaatattgtcacataccaaaatatga

SEQ ID NO: 935439 - DNA, 120 bp, Artificial Sequence
  ENSG00000228824_125 (sequence is synthesized)
cagattatttttctattagtttataagttgtcaggatataggatctgtgactgaacctaatagagagggatgcccattaaccacagattctgagatttgtgatggaagaggtaataggat

SEQ ID NO: 935440 - DNA, 120 bp, Artificial Sequence
  ENSG00000228824_126 (sequence is synthesized)
aggaccttgggctttgtcctttggcggaagaatgagttcactttgttggaagcagagtgtgcaccaataaatggttgccataggatggactctggcagcctaccagttattcccttcaaa

SEQ ID NO: 935441 - DNA, 120 bp, Artificial Sequence
  ENSG00000228824_127 (sequence is synthesized)
tcttttcccctctttttttctgggcacatggctacaaagctgtgaacaatttctgttgtcctcacacgtattagccatgtgaagctctgtaataagttctcaccaatggaatatgaacaa

SEQ ID NO: 935442 - DNA, 120 bp, Artificial Sequence
  ENSG00000228826_0 (sequence is synthesized)
ctactgggtgattggcctgctccattctctgtcctgtctgaaccaccaagaaaaggtcaagctcgctgacttcaagaatgaagctgcgggcctcacagtgagtgttacagctcttaaagg

SEQ ID NO: 935443 - DNA, 120 bp, Artificial Sequence
  ENSG00000228826_1 (sequence is synthesized)
ttacagctcttaaaggtggtgcatccgcagtttgttccttccagtgggttcatggtcacgcagacttcaggaatgaagccgcagacactcgcagtttgaggatacatgtgaaattcctgt

SEQ ID NO: 935444 - DNA, 120 bp, Artificial Sequence
  ENSG00000228826_2 (sequence is synthesized)
tcacacagcacaggtatgcacaacagagttgaagagcttgaaatgcagagagtacatcttggatctgagagtacccttgagctccgtgttcagcaagaaagcagtgagcgccatgggctc

SEQ ID NO: 935445 - DNA, 120 bp, Artificial Sequence
  ENSG00000228826_3 (sequence is synthesized)
tgtggtactggcatcaggttactcacctgtcttggagcttatcaacgatctactttacatctcatatttgataccagaaactgctaaaaataaaatcagatcaagtaaaacaggaataaa

SEQ ID NO: 935446 - DNA, 120 bp, Artificial Sequence
  ENSG00000228826_4 (sequence is synthesized)
ctactgggtgattggcctgctccattctctgtcctgtctgaaccaccaagaaaaggtcaagctcgctgacttcaagaatgaagctgcgggcctcacagtttgaggatacatgtgaaattc

SEQ ID NO: 935447 - DNA, 120 bp, Artificial Sequence
  ENSG00000281903_0 (sequence is synthesized)
agcataaactttacttaaactgtcaaatacatggttttaaagttattttattaatctatcactaataattatttttcttatcaacagagaaagtgaagtttcctaagccatcactagaat

SEQ ID NO: 935448 - DNA, 120 bp, Artificial Sequence
  ENSG00000281903_1 (sequence is synthesized)
tggaaacactagattttataaattaatttcttttcattgacctaaactccacatttctgctgtgttcatctgaggtcatgtccatatagtcaaatagctgaaggaaaggtgatattttta

SEQ ID NO: 935449 - DNA, 120 bp, Artificial Sequence
  ENSG00000281903_2 (sequence is synthesized)
tgaccacagtgtcttctgttgaatttctcctcaaggtaggattccaaaatacctggaaaatgtgaaacagtgttcctcgtatgggtaatgtagcatcttcacaaaaattctgtcatgatt

SEQ ID NO: 935450 - DNA, 120 bp, Artificial Sequence
  ENSG00000281903_3 (sequence is synthesized)
catttgaaaaataataccttctcatgtctaaaatagtttttcatgagaaatacattctataagaaaaaaacaattggcctatcttagaggaaaatgctattaaaaattgtgttatggaaa

SEQ ID NO: 935451 - DNA, 120 bp, Artificial Sequence
  ENSG00000281903_4 (sequence is synthesized)
aaggtatgatccatggatcaggaaaccagccttccctagacatggaatctgctggcaccttgattttgaacttcccagactccagaactactcctgcccctgccacgagaacacaccctt

SEQ ID NO: 935452 - DNA, 120 bp, Artificial Sequence
  ENSG00000281903_5 (sequence is synthesized)
tccagtttgctggagaaatataagagaagtccagtgaaagagagctgagtttccccaatgatgccatcaagatgaactaactacagttaaccagccagctgatagcagatgcatgagtga

SEQ ID NO: 935453 - DNA, 120 bp, Artificial Sequence
  ENSG00000281903_6 (sequence is synthesized)
actcgtagagtgagaactcattcactaccatgaagacaacaccaagccattcctgaggtatcagctcccatgacctgaacatctcccactaggcccacctccaacactgggggtcaaact

SEQ ID NO: 935454 - DNA, 120 bp, Artificial Sequence
  ENSG00000281903_7 (sequence is synthesized)
tcaacatgaaatttggaggggacaaacatccacgtcatatcagatatcattatttaacctaccatatccttggaattaggggttgatgtgttactgcagcatagtttaatgtatgctgag

SEQ ID NO: 935455 - DNA, 120 bp, Artificial Sequence
  ENSG00000281903_8 (sequence is synthesized)
gaatatggaagccatagtaagttaatactaaaatctcactggacattaactatagaagtatgcccaaggtaactatttagtagacataatcagcctcaactttttgttgtcttcatgagg

SEQ ID NO: 935456 - DNA, 120 bp, Artificial Sequence
  ENSG00000281903_9 (sequence is synthesized)
gtatctgaggtccagtaaccctgagaaatttaatttgagaagacaccatgaatgaaatattaatattttaaaatcaagtacaaagagaagattgcctgtgagtggttattctcttcagtt

SEQ ID NO: 935457 - DNA, 120 bp, Artificial Sequence
  ENSG00000281903_10 (sequence is synthesized)
gtccaatagctgttatttatcaaattaacaccaaaacgttcaaactctctaaaaatgaatagctttgctttataaggagagttgtgaaaacttattaagaactcctgcacatattattta

SEQ ID NO: 935458 - DNA, 120 bp, Artificial Sequence
  ENSG00000281903_11 (sequence is synthesized)
aagataccatttacacgtgagagtaattataaatgaaatatattaaatgtccgaaagtagcaccatgtggcagaattttcaggaaaagaaatcgaattagtactggaagaagacattcaa

SEQ ID NO: 935459 - DNA, 120 bp, Artificial Sequence
  ENSG00000281903_12 (sequence is synthesized)
acagttgagttgcctctgattggaaaagcagtgttttggtttttcagtttgtacaagaggaagaagacgcatgatatgtgtttggctcatgtgcctgaatatggctccacagggaagact

SEQ ID NO: 935460 - DNA, 120 bp, Artificial Sequence
  ENSG00000281903_13 (sequence is synthesized)
tctttaactgaagggcagccatggaccataaatacatagaagataaaaatatattgagcttaggagtttggtctgttcaatggatgagaactttatattttcccttataaacacaatttt

SEQ ID NO: 935461 - DNA, 120 bp, Artificial Sequence
  ENSG00000281903_14 (sequence is synthesized)
caaagaatagcctgtaatagtcgtgaaaatggaaaccaatactggggaaatgtggactgcaactctgaaaagttgaagactattcaccccggtggactcatcatgttggggactttcaat

SEQ ID NO: 935462 - DNA, 85 bp, Artificial Sequence
  ENSG00000281903_15 (sequence is synthesized)
actttaaaaagaacgcttcactgaaataggtctcatcccatcaggaacatagaaaaacaagcagcaggccgggcgcggcggcaca

SEQ ID NO: 935463 - DNA, 120 bp, Artificial Sequence
  ENSG00000281903_16 (sequence is synthesized)
atgctataattgagtctatgtttgtgctcctgttttagttagtactttttttgggttagatcgtctccacacttctgcactaatttatatttgaagtcctgtcctctgttgctttagatt

SEQ ID NO: 935464 - DNA, 120 bp, Artificial Sequence
  ENSG00000281903_17 (sequence is synthesized)
gtattaggccagaaaggtttccatgtttcagttgaaaataagatgtgatgtgattcagagggaacagagtaaacaacttaagcaactggagatgtggatatcaaaccatcttaatttttg

SEQ ID NO: 935465 - DNA, 120 bp, Artificial Sequence
  ENSG00000281903_18 (sequence is synthesized)
ctgtgcttatccagctgatgggaccagcctctcctactgactttggaagcagctttggagctccaagttgaacaactatccacacagaaaaccaccctcataagaaccaaaaatcagcgt

SEQ ID NO: 935466 - DNA, 120 bp, Artificial Sequence
  ENSG00000281903_19 (sequence is synthesized)
gttcctggtatgtagaaggtatacaataaatattggcggagtgaaggaacaaatgggatttgcttgattctgctgcagaagactaagaaaaagacataaatgaataaataactagtagaa

SEQ ID NO: 935467 - DNA, 120 bp, Artificial Sequence
  ENSG00000281903_20 (sequence is synthesized)
tttcatttggatgtctcaaatctatttgttgtttttgttgttgttgtttttctggctgggcttgaaatgtaggcatgcagccaggaggctccatgctgactaatgagatagaggtaccca

SEQ ID NO: 935468 - DNA, 120 bp, Artificial Sequence
  ENSG00000281903_21 (sequence is synthesized)
tttagcccagcaatattcatacattgtatatgcattcatttttctctagtgactttttaatatattttggtgaagatattcccaagataatgaagatatgttgagtgggcattaaaagtg

SEQ ID NO: 935469 - DNA, 120 bp, Artificial Sequence
  ENSG00000281903_22 (sequence is synthesized)
atgagtctttttttccattatcaaagacaaatacaggtgtgtgatgtatgcagagaattagaagtagggaaaaaaatgagggaatccaaaataatgaaaagaaattaaagctctccaata

SEQ ID NO: 935470 - DNA, 120 bp, Artificial Sequence
  ENSG00000281903_23 (sequence is synthesized)
atcgaaagaaaggccaaactgaaaacataaatctccagactctgcaaggatttatactgatgtggggcatgtggaccaatggctttcaggatgtgattcattttgaaaaaagtgtcattt

SEQ ID NO: 935471 - DNA, 120 bp, Artificial Sequence
  ENSG00000281904_0 (sequence is synthesized)
gaacagaataatatttctaaaatttttagtttctaagcttatctgaaattttaattttgttttcttatgtaataccagagttattaggaaggtattatctactaacactattttcagtga

SEQ ID NO: 935472 - DNA, 120 bp, Artificial Sequence
  ENSG00000281904_1 (sequence is synthesized)
aaaataaacttgaatggattgtaatattttattcatgctgtaattcaatgtatttgaattctttaagaatgttacatttacagttaacagatactgacctataaattttctgtcatataa

SEQ ID NO: 935473 - DNA, 81 bp, Artificial Sequence
  ENSG00000281904_2 (sequence is synthesized)
gtttatccttccaatttagttcattatttcctgcacctttgatttcatatatataaacaggaaataacacatggtggccgt

SEQ ID NO: 935474 - DNA, 75 bp, Artificial Sequence
  ENSG00000281904_3 (sequence is synthesized)
gcaaaacatgatatatacatacaatggtaaatcattcagccttaaacatgagggaaatattcagacatatgttgc

SEQ ID NO: 935475 - DNA, 81 bp, Artificial Sequence
  ENSG00000281904_4 (sequence is synthesized)
gatatgcaaaacatgatatatacatacaatggtaaatcattcagccttaaacatgagggaaatattcagacatatgttgca

SEQ ID NO: 935476 - DNA, 120 bp, Artificial Sequence
  ENSG00000281904_5 (sequence is synthesized)
tataagagacttaaactggacagaatcatagagatagtacaatgatgaatgccagaagctggggggaggaagacatgggaaagtactgtttaatgggtatagagtttcagtttcacaaga

SEQ ID NO: 935477 - DNA, 65 bp, Artificial Sequence
  ENSG00000281904_6 (sequence is synthesized)
aaactactaattaatgtcacatctatttattttctgctttataccaagcttgtgggattctctta

SEQ ID NO: 935478 - DNA, 120 bp, Artificial Sequence
  ENSG00000281904_7 (sequence is synthesized)
caacatttttatacttacacctatgaaatacccattaacatcgccttcctaaatcagtggaaattgagtctctgtaaggtgcagtaacttactaagatacaaaactcagcatttaagtct

SEQ ID NO: 935479 - DNA, 61 bp, Artificial Sequence
  ENSG00000281904_8 (sequence is synthesized)
atcagtggaaattgagtctctgtaaggtgcagtaacttactaagatacaaaactcagcatt

SEQ ID NO: 935480 - DNA, 120 bp, Artificial Sequence
  ENSG00000245571_0 (sequence is synthesized)
aggaagcggaggtggaagttggggcgcaggaatgtggctgtccccgcctgtaaatcatggttggggaggagtcgcggaggcaccaggctggggtctgcagcgcgccatctgctgcagcac

SEQ ID NO: 935481 - DNA, 70 bp, Artificial Sequence
  ENSG00000245571_1 (sequence is synthesized)
caccaggctggggtctgcagcgcgccatctgctgcagcacacaggaggcgctgaggctagttggagacta

SEQ ID NO: 935482 - DNA, 88 bp, Artificial Sequence
  ENSG00000245571_2 (sequence is synthesized)
gttcaagcgattctcatgcctcagccacttgagtagctgggactacaggatttcgccatgttcagcccgcctaccttggcctcccaaa

SEQ ID NO: 935483 - DNA, 120 bp, Artificial Sequence
  ENSG00000245571_3 (sequence is synthesized)
atgaccctccaagaccctctggaggcacccgcagtgctccttaatttgcagctctacagaatgagaccagcgtggcagccccctttcaggacagctcccgagacgagacgcgagagcagc

SEQ ID NO: 935484 - DNA, 120 bp, Artificial Sequence
  ENSG00000245571_4 (sequence is synthesized)
ccctaaatctcacccagcaaagccgtttcttcctaaccgggctggggagtgccgcgcgctgccagcagatggcgacagaggattagcctgcggaaaccggcctttttatagccaacaaga

SEQ ID NO: 935485 - DNA, 120 bp, Artificial Sequence
  ENSG00000245571_5 (sequence is synthesized)
gcaaaagcacactgcaatgtccaaacgaattgcaggcgttttctgctccctgaagcctgggaattaatttatatactcagtcccttttcccttggctggccattgaagtagttgaaccac

SEQ ID NO: 935486 - DNA, 120 bp, Artificial Sequence
  ENSG00000245571_6 (sequence is synthesized)
aggattggactgtccagaatcattagccagagttcactgtgagtggacgtcttttagttctgcttcaacgctataaccaacctttaccaaaagcaacaacaaaacaaaaaactgcagaaa

SEQ ID NO: 935487 - DNA, 120 bp, Artificial Sequence
  ENSG00000245571_7 (sequence is synthesized)
ccaatgagttctgttcacaaaggatggctcctcatgtcatcacaccggcaaggaatggacgagcctctgatttttctcttcttggctgactttacaaggttggatgcagtccatgaggat

SEQ ID NO: 935488 - DNA, 120 bp, Artificial Sequence
  ENSG00000245571_8 (sequence is synthesized)
tggagaagcccaacctgcagggcctcacctttagctggtttgtgtggttccacttcatgtagctgttggaacaccagtctctctaatgtgctctatgggatagctgttaccttccactaa

SEQ ID NO: 935489 - DNA, 120 bp, Artificial Sequence
  ENSG00000245571_9 (sequence is synthesized)
tttatgtctaatacctataaacctaaagtatctttttaaaaattttattccgtctttttggaggaaatttttgtgcatgccagatatagtgtcaagcattgggattgctaagatgaacgt

SEQ ID NO: 935490 - DNA, 120 bp, Artificial Sequence
  ENSG00000245571_10 (sequence is synthesized)
aacattgtcctcaccacccattaagtcacaatctagtagatgagtaaaagtaaaaaaaaaaattaaaaaaagagttataaccataatacagaagtgaacaggttgcagtggtagcacaga

SEQ ID NO: 935491 - DNA, 120 bp, Artificial Sequence
  ENSG00000245571_11 (sequence is synthesized)
gagggcttcagggatgctgtcacagaggtggtaacatttgagatatagattccaaattcagatgtgtttgctgttgcaaaattccagggtctatgtgcccagttcctgaacattccagtg

SEQ ID NO: 935492 - DNA, 120 bp, Artificial Sequence
  ENSG00000245571_12 (sequence is synthesized)
ataatttttacctaaaatttaggtggcaaatgaatcttactataaccacttggaaccactgtgtttctggtccatcttgtgaggcccatctttggttcagagggatggaggcagaagtca

SEQ ID NO: 935493 - DNA, 120 bp, Artificial Sequence
  ENSG00000245571_13 (sequence is synthesized)
tacggcaggtaagctcaagcagtgatacatgacagggctttcagaactggggccatgaagagcaggctttatttgcatgctgtttaaaaacaagattttacaactgatttaccctattaa

SEQ ID NO: 935494 - DNA, 120 bp, Artificial Sequence
  ENSG00000245571_14 (sequence is synthesized)
acacttccatgaataactcagtggagatttatttgcaatagtaggatcaggtgatttgaaatctttagtgtgtgtggttgtagcaggaggagtactgggttccagcatttaataagagga

SEQ ID NO: 935495 - DNA, 120 bp, Artificial Sequence
  ENSG00000245571_15 (sequence is synthesized)
cccatggttttatgaaaatgtccagagatataattttggttaaggttatacctcatctttggttgtacagttgtttcttttagtttcagtacaatctaaaacaggaaatgtcaattcaca

SEQ ID NO: 935496 - DNA, 120 bp, Artificial Sequence
  ENSG00000245571_16 (sequence is synthesized)
tggtctggtagagaaagaatgactctaatgctctactattcaggtagaaatgaagaaagaagggtgatcacttccatgagcactgtaagcccttgaatgggcttataggcaaatacttat

SEQ ID NO: 935497 - DNA, 120 bp, Artificial Sequence
  ENSG00000245571_17 (sequence is synthesized)
cagagcttgagccttctgggaaactgcttttccctggctgagtgattagcgggggtgttaagttgggaagctggacgttcacttccatgtgctcctctgagaaccatctgttggtctgat

SEQ ID NO: 935498 - DNA, 120 bp, Artificial Sequence
  ENSG00000245571_18 (sequence is synthesized)
ggtgctagatctgaagctggtgagcctcttggggcggcctcaagggctaacaagatctcaaatgcccttctctccatcatttgtggtatcctggattattgtgaaaatgtatagggattc

SEQ ID NO: 935499 - DNA, 120 bp, Artificial Sequence
  ENSG00000245571_19 (sequence is synthesized)
agggattcctggggaagagttaaggattaaaatataaaggtttaaatataaataactttatatatatatgttttttcttgtaaaccaatatgttatatagtaggaagtttaattccttaa

SEQ ID NO: 935500 - DNA, 120 bp, Artificial Sequence
  ENSG00000245571_20 (sequence is synthesized)
acacggttaggtggaaaagacaagttgtatgtagagatcattatcagaaattgctaaactctgtcatcaaaaactctgttggaatggattttaaaatttcttaataaaagatgaaacatg

SEQ ID NO: 935501 - DNA, 120 bp, Artificial Sequence
  ENSG00000245571_21 (sequence is synthesized)
atgaaccaccgcgcccggccagtttcttaattcttagactaaatctacgggggacacacttttgccaacattagctgcaaagggttttttcctccacacttaagtcacggtcagtaagta

SEQ ID NO: 935502 - DNA, 120 bp, Artificial Sequence
  ENSG00000245571_22 (sequence is synthesized)
gtttttttttttttcctgtgtttttgtttccttgtttgtttttatttgggaaaatgcctcttttgatagtaatgaattattttttacacgcaaggtcaaaaacagcatggagtgaatttt

SEQ ID NO: 935503 - DNA, 120 bp, Artificial Sequence
  ENSG00000245571_23 (sequence is synthesized)
acagcgctcctccttgacgccgcgagcaggaccctgtctcactgaccccgtgcccacggcggtccttgcctgcttctattctcccggtttccccagtcccgagtattggaaagcgagagc

SEQ ID NO: 935504 - DNA, 120 bp, Artificial Sequence
  ENSG00000251044_0 (sequence is synthesized)
acaacagctcatatcatggacaagtttaatgaaaagagatggaatttccaggagggtagaaaatagatccaacagtttctgggaaacttctctcttggctctgagcctaaccaccaggct

SEQ ID NO: 935505 - DNA, 120 bp, Artificial Sequence
  ENSG00000251044_1 (sequence is synthesized)
ccccctctttttgcagttaccccaatattacaagaaattgcccaattctaaggactttcaaaactttaatgcccagtctagttccatgtgccttaggtttaaaaaaacaaaaggacaaat

SEQ ID NO: 935506 - DNA, 120 bp, Artificial Sequence
  ENSG00000251044_2 (sequence is synthesized)
ccttagaagaataacttgtctcccatgagtaatacaaaaaaaattgatgtaacatttatggttaagactatgtgcataaaagtcagaaaagctttatttatgtcctgcacagctaagtat

SEQ ID NO: 935507 - DNA, 120 bp, Artificial Sequence
  ENSG00000250186_0 (sequence is synthesized)
gacagcagtttatacacatttgtttccttcccagtgcaggcatagagcccgtgagaagggcagtctctgaatgagggggccaggaacgtaggtcggacacgtctttggcaggcatgttca

SEQ ID NO: 935508 - DNA, 120 bp, Artificial Sequence
  ENSG00000250186_1 (sequence is synthesized)
gccccagcaggatgcaatccttcaagttggaattccactgggtatctgagagggaccaaggtggggggtagagaggaagtcttcaacaggactcacatctcggtccaggcctcctctctc

SEQ ID NO: 935509 - DNA, 120 bp, Artificial Sequence
  ENSG00000250186_2 (sequence is synthesized)
actatacaagtccatccaagttttaggaccctggggggcaacagtcaggcccacccacctcaacaggggcagattcttcaatctgtgcccagttcacacacacctgtttccgctggtcac

SEQ ID NO: 935510 - DNA, 120 bp, Artificial Sequence
  ENSG00000250186_3 (sequence is synthesized)
acagttaaagagaatcagacttatggtaacagacagaccacttcctctctgcccctccccggcacctctcttcagcagcatctgcacaggaaccgctgggaagacggaggcctgccttct

SEQ ID NO: 935511 - DNA, 120 bp, Artificial Sequence
  ENSG00000250186_4 (sequence is synthesized)
ttcagccgcacatgccctcatccgcaaaccttccatcagtgacaggacggaggccacacgtggataaaaaagtagatggatgtgagaagaatgaaagagtttcatttgatagactaatta

SEQ ID NO: 935512 - DNA, 120 bp, Artificial Sequence
  ENSG00000250186_5 (sequence is synthesized)
gagatctgaagtgattttacctttatttccttcactttaagccaatcatgaaatttcacagtgatttctggggtgggagcagaaggaaggctgtgttaagaatcatcggggctgtggccc

SEQ ID NO: 935513 - DNA, 120 bp, Artificial Sequence
  ENSG00000250186_6 (sequence is synthesized)
agtcagcccgcggaggtgcaggcagggtgggccctcactggggcagctggaggagcacggactgccccgctggcaggtaggtgatgttccgagagcgtgagagctggtacgcgatgtcct

SEQ ID NO: 935514 - DNA, 120 bp, Artificial Sequence
  ENSG00000250186_7 (sequence is synthesized)
ctgcagcttccagcttgcgcagctcgatcaggccatcccctgcagtggccagtgagttggcaatcagctcagctgccttggagtcgccctcagcagagatgatggccgcctttttctgtt

SEQ ID NO: 935515 - DNA, 120 bp, Artificial Sequence
  ENSG00000250180_0 (sequence is synthesized)
gaacattgctcgttgctgccctccagagaagttcagagagggaacaatgaaaagcagaaggctgatgaagaaaggtcaggctgtatgccaacaaaggcttcttttttacagactgagata

SEQ ID NO: 935516 - DNA, 120 bp, Artificial Sequence
  ENSG00000250180_1 (sequence is synthesized)
atgtttcgctcaaagatgctgctggatgaggcagaccattttaatcacagtgaagcttcccccccaggctttcgctgcctctcccaccttgtggggacctgcctgggagaagtttcacac

SEQ ID NO: 935517 - DNA, 120 bp, Artificial Sequence
  ENSG00000250180_2 (sequence is synthesized)
tttcctcatttctaaacttccgaggacaagcttggagtgcagctaagcctttggagatgctgcagctactgttctgatcctgggaggtgcatttctgaggcggacagtcagcactgacaa

SEQ ID NO: 935518 - DNA, 120 bp, Artificial Sequence
  ENSG00000250180_3 (sequence is synthesized)
gacaagttggagggaacgagctggctgagggctggggagcagcccctctccttggaagaactctgatgggaaacagatgctaagaagggatttatggtttattccaaggacagatgagat

SEQ ID NO: 935519 - DNA, 120 bp, Artificial Sequence
  ENSG00000255644_0 (sequence is synthesized)
gcaaaaggtcaagacatacaaactcagagtttttaaaatcaagaattgaaagtggtccactagcttctgttcataggacattgagccccagatttggcacatgaccgtcacccactcgga

SEQ ID NO: 935520 - DNA, 120 bp, Artificial Sequence
  ENSG00000255644_1 (sequence is synthesized)
aaatgcagcctaacatgactgcattgatgatcaaacccacaatattctggagaatcaaaaccgtgatggccaaagggcattcctctgtcatcatcctccctccaaacccaatggtaactt

SEQ ID NO: 935521 - DNA, 120 bp, Artificial Sequence
  ENSG00000255644_2 (sequence is synthesized)
gaacttcaatggagaagagaaaagcagaagtgaaagacctgtgaggaatgatatcagaaaagaacaccatcaggtcacattttgaataatgaaatatgccaagctgagcttttcattttc

SEQ ID NO: 935522 - DNA, 120 bp, Artificial Sequence
  ENSG00000255647_0 (sequence is synthesized)
gaatcctttgcgggtccggcctccgatccctgtgtggctgtttggcgggtgggcgctgtgttcctctctcgtaaagccgtgcggtctgtgggccgccattcagaaactggatggacagct

SEQ ID NO: 935523 - DNA, 120 bp, Artificial Sequence
  ENSG00000255647_1 (sequence is synthesized)
tcggcggtgggaagggaagggacatgctgcaggccaccctccggctagaaggagggagtacttgaggaacaaggtctgcgaaaattggctgtgctctgttctaaaacttggaatggcctc

SEQ ID NO: 935524 - DNA, 120 bp, Artificial Sequence
  ENSG00000255647_2 (sequence is synthesized)
atgaatctgcgtttttactcctcacaagccttccaagtgattctgaggcaggtgctgtggctgtacttggattatcacagggttagattatcaggctatttatgatttagctgtatctaa

SEQ ID NO: 935525 - DNA, 120 bp, Artificial Sequence
  ENSG00000255647_3 (sequence is synthesized)
accacctttccctctctttcctcctttgaactgtttgaaacggatttgttcccttctgtctcttatttttcagtgctgtaagctgttaacacacatgagactgtcttcactaccaaacca

SEQ ID NO: 935526 - DNA, 120 bp, Artificial Sequence
  ENSG00000255647_4 (sequence is synthesized)
agtctcctaaagctcacttgaatgtctgcttattcgtgtctcttactaggttcaatttcttggaggccgtgattatatctatttaacgcttttccttgtacctaataaaatgtctggtgc

SEQ ID NO: 935527 - DNA, 120 bp, Artificial Sequence
  ENSG00000255648_0 (sequence is synthesized)
acaatgctgccaaacattctgcaatgcacaggacagcccccaacaacaaagaattatctgacttaaaaaatgaaaagtttgagaaaccctgctatggggtctctgtcacccacactaaag

SEQ ID NO: 935528 - DNA, 120 bp, Artificial Sequence
  ENSG00000255648_1 (sequence is synthesized)
tgcagcctcgaagtcctagacgcaagtcatcatcccacttcagcctcaaaactagctgggactacagtcacatgctaccacatttggggagaaagcagagaacacacagtggtttttttt

SEQ ID NO: 935529 - DNA, 120 bp, Artificial Sequence
  ENSG00000255648_2 (sequence is synthesized)
ttcttacgttctgaccacctccaaacccacaatatttgaaaacacagctttccctgatgtctggcatttttccatgaactgccattgtatctccttttattttttactactttgtttaaa

SEQ ID NO: 935530 - DNA, 120 bp, Artificial Sequence
  ENSG00000255648_3 (sequence is synthesized)
cccctcaaacctttcatcataatatgcttccagtgggtttgggcagctactctgagagcctgagtataaatcaacaccattgtgattcctgaagttgcaaagtgctgtcactcttgaaac

SEQ ID NO: 935531 - DNA, 120 bp, Artificial Sequence
  ENSG00000255649_0 (sequence is synthesized)
cttttggatggcttcgtctggagccaggggtcttgccatgaaggacattcaagcagttctgaggagaggcccaagtgaagaggaaccagttgccagcaccaccctgtcagctatgttagg

SEQ ID NO: 935532 - DNA, 120 bp, Artificial Sequence
  ENSG00000255649_1 (sequence is synthesized)
cccctgcctatataaacaatttgattaaaaacatatatttaaaaattcatcagtacatgtgagatatgatgatttatcattgaagatttaggatgatgggcagagaaaggcaatctgttt

SEQ ID NO: 935533 - DNA, 120 bp, Artificial Sequence
  ENSG00000255649_2 (sequence is synthesized)
tgtctattgtccaatcagtgcacgtgaagatttgttacagtatccagttaacactgaatcactaaggttttatccaggaatagtactcaaagtgctcagatgttcctttaaattcattta

SEQ ID NO: 935534 - DNA, 120 bp, Artificial Sequence
  ENSG00000255649_3 (sequence is synthesized)
tcccagtgtttatatatcctgagcatggctgcatacgtgtaccagcttgagtgagcaaaaaggatgttctcaaatccaggaagaacctacagccagaatcatagtggattacacagatgt

SEQ ID NO: 935535 - DNA, 120 bp, Artificial Sequence
  ENSG00000255649_4 (sequence is synthesized)
acatagctaactgactgcaattgtcttaagtgtaagaggcatacagggattgtgccatttcagggttatgattcttctttcacagcttcttctgtgctgtatctagaacaaaagcataag

SEQ ID NO: 935536 - DNA, 120 bp, Artificial Sequence
  ENSG00000255649_5 (sequence is synthesized)
tgtgatagtgacctaactgtgatacaagacctaaacatgtcaaggagagactatccaaatgcattttgtgtaaaaccacaatgtttcacaaagtcaataaaggccgagcacgatggttca

SEQ ID NO: 935537 - DNA, 120 bp, Artificial Sequence
  ENSG00000255649_6 (sequence is synthesized)
aacaaggaagccatccagctttgttctggactcagcagctaagatggcatgagcttcatcgtaaagcatagttctatgtcatgtctactggatgaatccaatgtggctggtcccttaata

SEQ ID NO: 935538 - DNA, 120 bp, Artificial Sequence
  ENSG00000283221_0 (sequence is synthesized)
aaatatcgatgagaacctagatgttctatcaaaccaaacccttgccaggaagaggaacacattagcacttgaggtcagttggcatgtttgggcaactgtggaacagggaacacaattcag

SEQ ID NO: 935539 - DNA, 120 bp, Artificial Sequence
  ENSG00000250237_0 (sequence is synthesized)
ggatttgagtcttcaatgtgggagcagagttacctgaatatatggagttgatggagacattccttgatgagaagcagaaattccccagggaccttgtaaatctgaagcagataaagggaa

SEQ ID NO: 935540 - DNA, 120 bp, Artificial Sequence
  ENSG00000250237_1 (sequence is synthesized)
aggaagcaaagtgtattggacttggctatgatatgaaggaattcatttaataaatcaaaacgaaaacaaaaacaacaaaaacaaagaagcgaagcatgaatctcctaatcagcagaaaag

SEQ ID NO: 935541 - DNA, 120 bp, Artificial Sequence
  ENSG00000250237_2 (sequence is synthesized)
tctcctaatcagcagaaaagggaggacagccggagacaatcgtattcctgatcgatactgatgtaaacttgtgctggaacaatgggaccatctcgttgcaggaaaacaagctcagggctc

SEQ ID NO: 935542 - DNA, 120 bp, Artificial Sequence
  ENSG00000250234_0 (sequence is synthesized)
cccccaccccccaccaggcaggggtcgcgggagatggcgggcgcctttctggtggctccacgtcctccttactcccgaagtcccggcggccccgagtctgccccaactccagcatccgtt

SEQ ID NO: 935543 - DNA, 120 bp, Artificial Sequence
  ENSG00000250234_1 (sequence is synthesized)
cggcggtggaccagggagaggtggcgggaccccggctgcagcccgctcagccgctccgcccgggcgccgtccccagcgcctcccgcgcccgagctccagacacaaaggcggggacacgag

SEQ ID NO: 935544 - DNA, 120 bp, Artificial Sequence
  ENSG00000250234_2 (sequence is synthesized)
cacaaaggcggggacacgagcccgggaccccgcgccgggagcctcccaactccgtgccgcgcactcaccccatcgaggcggcggcggcgctccccggacccagctggctgctccaccccg

SEQ ID NO: 935545 - DNA, 120 bp, Artificial Sequence
  ENSG00000250230_0 (sequence is synthesized)
gatggagtctgccccaggatgacttttgacttcctcgtcttgcccagtgccctgccttcagctaaaaactgagtttctccctatgggtttccacctttcaaagcccatcttcactgtcac

SEQ ID NO: 935546 - DNA, 120 bp, Artificial Sequence
  ENSG00000250230_1 (sequence is synthesized)
tttgtccagggagccatccctgattctcccaggtggagaaactgaggctcagataaatgactaagaagtaaagtgaggtcccatagccagtgaatggcagagcagggattcgaacccagg

SEQ ID NO: 935547 - DNA, 120 bp, Artificial Sequence
  ENSG00000250230_2 (sequence is synthesized)
tctctcatctgggaagtgggatgatagcgccaacctagctggattgctgtgactgccagcacaatgccttctaagggttcaagatgagattacttagtcccagatgggttaagtaactgg

SEQ ID NO: 935548 - DNA, 120 bp, Artificial Sequence
  ENSG00000250230_3 (sequence is synthesized)
cccaaggtcacagcgctggtaagcaactgggcttcaatccaaccatcctgactccagaagcctctttgaactaccaccttctgcacctgccccagggcttcttcgcctgagccggtgcct

SEQ ID NO: 935549 - DNA, 120 bp, Artificial Sequence
  ENSG00000250230_4 (sequence is synthesized)
agatgcctctcatcttgccagtcctcaagccagaagcctccggtgctgccctagggctccctgaataggcatccctaaggcatccctcctggtgttcaaaccacatccttcctggctaag

SEQ ID NO: 935550 - DNA, 120 bp, Artificial Sequence
  ENSG00000250230_5 (sequence is synthesized)
cttccattccccagggtagccctccacactttggagcctcagctcacctctcactctcacacttcagtttcacacttcccttctgaatggtcccacctctgtgcttttgcttaagctgtg

SEQ ID NO: 935551 - DNA, 120 bp, Artificial Sequence
  ENSG00000250230_6 (sequence is synthesized)
cacacttcccagagtgctctttcccctatgtctgcctgtgctccaataccctatgcctgagctgacccatgacatacaagcacctacagaggcctgggggaaggaggcagtggtatgtgt

SEQ ID NO: 935552 - DNA, 120 bp, Artificial Sequence
  ENSG00000250230_7 (sequence is synthesized)
gtcagtgtggggagtcagtgaagaggtttggggctttagggtcagttatgtgacttcagggcaagtccccatctccctgaaccccagtttctgcaaaatgaagatatccatcccagcttc

SEQ ID NO: 935553 - DNA, 120 bp, Artificial Sequence
  ENSG00000250230_8 (sequence is synthesized)
caaccaggtctagaacccaaaccttcaacccctgagctttcctgccttcgagtcctcggagctctcctggaggctgagcaggcaacagagcctgctcctcagctggatgtggcccgtggg

SEQ ID NO: 935554 - DNA, 120 bp, Artificial Sequence
  ENSG00000250230_9 (sequence is synthesized)
cccaaggtttataatggtaatctgtgaggttctggcacatgatgaatccataactacccgttgtgacaagttccccacttgtgaagtcaaatgaagaccccctggtgttgacagtgcagg

SEQ ID NO: 935555 - DNA, 120 bp, Artificial Sequence
  ENSG00000250230_10 (sequence is synthesized)
caggaaggggtcactgtatagcagttggtccctagtgaccagtcctggcagagggcctttatcccacttccagtagcccagcaccaaccatccccagctctgggagggggtgggcagcac

SEQ ID NO: 935556 - DNA, 120 bp, Artificial Sequence
  ENSG00000250230_11 (sequence is synthesized)
cctccttcctccacattgttgccacctcagagagtcagaatccagggagacagtctcctggcagcggagctcctgctgcccgccatgggtgtctgtgatgctgccgtgcccactgggggc

SEQ ID NO: 935557 - DNA, 120 bp, Artificial Sequence
  ENSG00000250230_12 (sequence is synthesized)
tgcaggcactccagcatcaggatggactaaatctcgggagtgggaaggggactccagccaggggcactggagacagggccagcctgagtgcctgcttctcccaggggcaggtgccagcat

SEQ ID NO: 935558 - DNA, 120 bp, Artificial Sequence
  ENSG00000250230_13 (sequence is synthesized)
ggtgcacccctcaaggagtgtggcaggtaagattgaggtcctggctgccccaggctcctgtgccatcgagagggaaagcacctggaacaggtatacagtagatgcttagtgatgaggaga

SEQ ID NO: 935559 - DNA, 120 bp, Artificial Sequence
  ENSG00000250230_14 (sequence is synthesized)
atcttcacttggtggaattctgaacactttgggtaccaccagagtcagaattcccagaggaggaggcaggcatttgataacggatgtctggaggatatagcatgttcaaccttcccctct

SEQ ID NO: 935560 - DNA, 120 bp, Artificial Sequence
  ENSG00000250230_15 (sequence is synthesized)
ccatgagaggaagtggtgacctcaaccccagcaccctcctctgcccattcacacccacccactcccacctctctgccagcctcagttggatgtggagcagaatgtaatgaggacttacct

SEQ ID NO: 935561 - DNA, 120 bp, Artificial Sequence
  ENSG00000250230_16 (sequence is synthesized)
gtccacaaggacttcacaactgttccaaggcgatggatgggcaggtgctaacgcagcccctcagtgtcccccttcccttgcttttggggtgggcttggggcccccggggggtcctaactc

SEQ ID NO: 935562 - DNA, 120 bp, Artificial Sequence
  ENSG00000250230_17 (sequence is synthesized)
actgaagataccagggcccagcttctgagtattcctagaggccatttctacccctagaaactttacatggagccaaaagcccatttgaagctcagtctgggccaggagaggctaatcata

SEQ ID NO: 935563 - DNA, 120 bp, Artificial Sequence
  ENSG00000250230_18 (sequence is synthesized)
aaagggatattttttaagtgtacagaaataagaatttatttttgaagacatgatttatattttgaatggctaatgcactcacatgattcaaaattcaaaattccaaaagaaccgacagtg

SEQ ID NO: 935564 - DNA, 120 bp, Artificial Sequence
  ENSG00000250230_19 (sequence is synthesized)
caaagtcgctcctcctttggtccccaccacccagtttccctctgcagagggaaccttgttgccagttcttgtgtattcttccagagatcttctatgtataaaccgtcatcctcctaggaa

SEQ ID NO: 935565 - DNA, 120 bp, Artificial Sequence
  ENSG00000256172_0 (sequence is synthesized)
gcagtttctccctccactcaccggctccaggctggcaaagctgacaccagtgccacagaaaatgcaacccgctgccctctccccaaaatgtggggagagcacggttttgctatgaagatg

SEQ ID NO: 935566 - DNA, 120 bp, Artificial Sequence
  ENSG00000256172_1 (sequence is synthesized)
tcggctttgacctgaggctgacttgagagcccagctgtcatgtctcttccaaataagctgctgaacttggaattatcttggctgaataattaatcaggactaaaaataacctcaaactgc

SEQ ID NO: 935567 - DNA, 120 bp, Artificial Sequence
  ENSG00000256172_2 (sequence is synthesized)
ctgggctttgcttaaatcctacacaggcacagcatcaccttacatcgaagacagattcaacgaatctgcctctcatcctaggtggccactaggcaactcctctgggaccatttcttcctg

SEQ ID NO: 935568 - DNA, 120 bp, Artificial Sequence
  ENSG00000256172_3 (sequence is synthesized)
attcatactccctcttcccctgctggaaacctacttcttttacctcctcaaaggtaaaaggaccagctggtgaacaaaagaatacatttgctctatctaaagagaagcattagagcaagg

SEQ ID NO: 935569 - DNA, 120 bp, Artificial Sequence
  ENSG00000256172_4 (sequence is synthesized)
gaggaaaaactgatgcaagacaaatgacttgggctcatcataaaatactgagcagtcagcagaacattaagaagagacttctactccccaccacacacataaccatctgcacacctgaat

SEQ ID NO: 935570 - DNA, 120 bp, Artificial Sequence
  ENSG00000256172_5 (sequence is synthesized)
gccgagactaagcctcaccagacgccagcagcataaatgagaggagtcacttacccctctgaggctcaggcttctcgactggaaaaaaaaaaagataataaaaatatcagttcagttggg

SEQ ID NO: 935571 - DNA, 120 bp, Artificial Sequence
  ENSG00000262528_0 (sequence is synthesized)
gtcccaggctccacacggctgcaagatgcagctccctcgaggccaccactcttaggctaggcgggacccaggctgaggggcttcacacactacccacgtcccaccgggcccttccgtgag

SEQ ID NO: 935572 - DNA, 120 bp, Artificial Sequence
  ENSG00000262528_1 (sequence is synthesized)
gctgccccgcgggccgccctggcatcagccgccccagggctctggatatgccacttggccccgtggcaccctgtgcagccaggagccagggcggctgacagcagagccccggggactggg

SEQ ID NO: 935573 - DNA, 120 bp, Artificial Sequence
  ENSG00000262528_2 (sequence is synthesized)
ccttccccgccccagcatccaggcgaggctctcccggagttgggagagcgtgcccacagcatcacctgcctccaggagcaccgaggagaagtccaggggccagagccgcaagaagccgtc

SEQ ID NO: 935574 - DNA, 120 bp, Artificial Sequence
  ENSG00000262528_3 (sequence is synthesized)
ctcagagcccacagcacacatggccggggagacgctgaggctgctgatggcaatgccggggcctgggggcagggaggcgtcagtgcctcggtgtccctgccaccctggccacgtggtggg

SEQ ID NO: 935575 - DNA, 120 bp, Artificial Sequence
  ENSG00000262528_4 (sequence is synthesized)
cgccctcttacctgagctgaaggtctgcttctgtgggtggggaccgcctggagtccgtgtggggagcaggcggcgggcatgccgcacgaccatgcgctgacagtcaatctccaagatgtg

SEQ ID NO: 935576 - DNA, 120 bp, Artificial Sequence
  ENSG00000262528_5 (sequence is synthesized)
ctgccctgcccgcacgacgccatcctgcaaggaatgaggactgagcactgccgcagctcgcagcgccctgacccaccgggagacgcagagacgcacagccaagccagggggaggtgctcg

SEQ ID NO: 935577 - DNA, 120 bp, Artificial Sequence
  ENSG00000262528_6 (sequence is synthesized)
ggcctcggcccccactccgggcccagaccctctcccaacatcgtggatgggcggctgcatcacctggtttcatcaaaaaaggtgacccggaaggcctggacgtcaaagtcagtgtgcgcc

SEQ ID NO: 935578 - DNA, 120 bp, Artificial Sequence
  ENSG00000262528_7 (sequence is synthesized)
tttgccagaacgaccacctcgccaccgaggcccacctggccggtgccccaggccaccaccatctgcaacaagcccaggctgagcccgcacggcagggccagtcggggccacctcgattct

SEQ ID NO: 935579 - DNA, 120 bp, Artificial Sequence
  ENSG00000262528_8 (sequence is synthesized)
gcaaggcccagccgagccccacccggaggtggcttttctctcatgcggagaccagcctctgagcgtgcggccgtggagagtggaaggaaaccagcccctccatcttctcatcctgaagct

SEQ ID NO: 935580 - DNA, 120 bp, Artificial Sequence
  ENSG00000262528_9 (sequence is synthesized)
ttgggacttctacagagacccgcaatgctgagcactgcaacccattcgcagagaagtacaaacccccccgcaagccggaaggtggataaaaagcagctcgtggctgggcacagtggctca

SEQ ID NO: 935581 - DNA, 66 bp, Artificial Sequence
  ENSG00000262528_10 (sequence is synthesized)
ggagtttgagaccagcctgagcaatgtaatgaaaccctatctctacaaaaagttaaaaaaacaaaa

SEQ ID NO: 935582 - DNA, 120 bp, Artificial Sequence
  ENSG00000253523_0 (sequence is synthesized)
aataaaccaagtgcataggtgtgccagtggcccccaactcatagacatcattattcagattaacaaacgccaagaacaaaaataagtcacaatatttaccagaaattatgaagtcatctt

SEQ ID NO: 935583 - DNA, 120 bp, Artificial Sequence
  ENSG00000253523_1 (sequence is synthesized)
taccccaatactttcactcatagggttaaggcatttaatacagactgaacacctgaacattagtatgtgcatggagaaaaaataattaaagaatgtgcacctaaatctaaccaatatttt

SEQ ID NO: 935584 - DNA, 120 bp, Artificial Sequence
  ENSG00000253523_2 (sequence is synthesized)
ctctggagagtggcttttgagtagaaagttgcattctatgctacctatctgtaacatttatttgtttgcaatatttacattatgttaataattaaaaatatatatactaggtcccatgtc

SEQ ID NO: 935585 - DNA, 120 bp, Artificial Sequence
  ENSG00000253523_3 (sequence is synthesized)
gtacactgtttctgttttacttatccccatgagtgattataattctaacagtcccaattggggaagttaaatgtccactgagtgttcagaattctcaggtaaaaaagccactgcaagtga

SEQ ID NO: 935586 - DNA, 120 bp, Artificial Sequence
  ENSG00000253523_4 (sequence is synthesized)
acacccaggacttacagagcttgatagtttctaattcaagacgtagacagaacaagaatgctgctctggatgtccaatttggagatttctaaaaggaaaaagacgcagattaaaaattat

SEQ ID NO: 935587 - DNA, 120 bp, Artificial Sequence
  ENSG00000253523_5 (sequence is synthesized)
gctggagaataaaagtgattaaaaggtatcattcaaaagaaattgtttttccttgaatcacagacattgtatttatctaaggataaactaggttcaaagcctgtttctaattcagctgct

SEQ ID NO: 935588 - DNA, 120 bp, Artificial Sequence
  ENSG00000253523_6 (sequence is synthesized)
ccaggaaactaaaactgattccaaaaggaaacaaaaatcaaagtatgaggccaacttcatgtattcaatggaaaacaaactaaatgagagcctgtgtatttccatgagcctggggaaccc

SEQ ID NO: 935589 - DNA, 120 bp, Artificial Sequence
  ENSG00000253522_0 (sequence is synthesized)
cgctcttcctttcctggatggcaccagcagggccgattggagtggtaaaccctgggccggaaggcatgccaaagggtggacaggatggacaggagacagtagcacaacgaggagggggag

SEQ ID NO: 935590 - DNA, 120 bp, Artificial Sequence
  ENSG00000253522_1 (sequence is synthesized)
aacagcggctgaattggaaatgataaaataaaatgaaattttaggagctcgctggctgggacaggcctggactgcaaggaggggtctttgcaccatctctgaaaagccgatgtgtatcct

SEQ ID NO: 935591 - DNA, 120 bp, Artificial Sequence
  ENSG00000253522_2 (sequence is synthesized)
cagctttgagaactgaattccatgggttgtgtcagtgtcagacctctgaaattcagttcttcagctgggatatctctgtcatcgtgggcttgaggacctggagagagtagatcctgaaga

SEQ ID NO: 935592 - DNA, 120 bp, Artificial Sequence
  ENSG00000253522_3 (sequence is synthesized)
actttttcagtctgctgaagagcttggaagactggagacagaaggcagagtctcaggctctgaaggtataaggagtgtgagttcctgtgagaaacactcatttgattgtgaaaagacttg

SEQ ID NO: 935593 - DNA, 120 bp, Artificial Sequence
  ENSG00000253522_4 (sequence is synthesized)
aattctatgctaagcagggttccaagtagctaaatgaatgatctcagcaagtctctcttgctgctgctgctactcgtttacatttattgattacttacgatgattcaggtactgttgtaa

SEQ ID NO: 935594 - DNA, 120 bp, Artificial Sequence
  ENSG00000253522_5 (sequence is synthesized)
gtgctttacatgctgttatacgagactcttgggagaaatcactttaatgaagcttgagacacatggcattgccatgcaatgatttttcccccctcttcacgggatcagagggaactaata

SEQ ID NO: 935595 - DNA, 120 bp, Artificial Sequence
  ENSG00000253522_6 (sequence is synthesized)
gaatgtgacaatgattctttagcagggactgctgaggcttctggttcctttttaagatctgcagtgaaagaagatgagaaacatggatatgcccttcttttggtccccctcttcctttat

SEQ ID NO: 935596 - DNA, 120 bp, Artificial Sequence
  ENSG00000253522_7 (sequence is synthesized)
ttgatctctacttccttctataaatatattagggctacattgtccctttgtatttcaaacaaggcaaaaagaggttgtaattacactttactgcaatcctcagtttctccagggaacagg

SEQ ID NO: 935597 - DNA, 120 bp, Artificial Sequence
  ENSG00000253522_8 (sequence is synthesized)
aatgcaaaggctttgaaggcctctctatttgctgacatggtcagctgggtgccatgggccaagtccttctgttgccctcctctgtcaccaagtaagctaggtcctttctgaggctcaggt

SEQ ID NO: 935598 - DNA, 120 bp, Artificial Sequence
  ENSG00000253522_9 (sequence is synthesized)
ttaggcagaaggttagaggcctcatgagtgctatatggactttattaggctttagatttgatggggaataagggatgtgatttgtcttttgggaactcatctttgattcatcattgtctc

SEQ ID NO: 935599 - DNA, 120 bp, Artificial Sequence
  ENSG00000253522_10 (sequence is synthesized)
ttggtatcttggaatttccatgtcattacagtctacagaatgaaagagtaacctgtcccagaggagaggcaggtgaaagactccacagcatgctcattctcattctgtcttctcagtgac

SEQ ID NO: 935600 - DNA, 120 bp, Artificial Sequence
  ENSG00000253522_11 (sequence is synthesized)
accgaggtttactgagtgcccactatgtgccaagcactgtgctcagggctttctttgtatgcatgatctcagtgaatctcaccaagcctcatctggaaaacggggacaaattaacaacag

SEQ ID NO: 935601 - DNA, 120 bp, Artificial Sequence
  ENSG00000253522_12 (sequence is synthesized)
gatggcaaattgaaaaacacgtaaccatgttctacagatggaaaggggtgcttggttattatgaaggccccctcgcaagcgtgtgggacatgggtgtgttctctgggttgtactgatcag

SEQ ID NO: 935602 - DNA, 120 bp, Artificial Sequence
  ENSG00000253522_13 (sequence is synthesized)
atcaaggacctcccccacccttctcacactctgcccacttccgccctttgcttatcagacccttagccagtgactcattccagaaccagaaccttggtgaaatctcaaccgacaccagag

SEQ ID NO: 935603 - DNA, 120 bp, Artificial Sequence
  ENSG00000253522_14 (sequence is synthesized)
atcggtgtcttcagtcctagactgatggagaaaatccagaatatatactagaagctccaaatgctctgggtttcagctcctctgtgctgtggacactgactttggctcagaactccgatt

SEQ ID NO: 935604 - DNA, 120 bp, Artificial Sequence
  ENSG00000253522_15 (sequence is synthesized)
tagtacaaaaggctcatttttatttcaggggcactcttcctaaagcaaacctaataaatgaaatatggaattcacagatacacacacacattaaaaaattaacctagtgtatctgtgagg

SEQ ID NO: 935605 - DNA, 120 bp, Artificial Sequence
  ENSG00000253522_16 (sequence is synthesized)
agtaggcagaaattcactgtataaaagaatgcttcatttcatagagaatttgtgttaagattccattagatagtacatttctcaaagatttttgaggttgtatttgctttaccaaaactt

SEQ ID NO: 935606 - DNA, 120 bp, Artificial Sequence
  ENSG00000253522_17 (sequence is synthesized)
ggtttatgtaagtggaaaaagcatgttgcaaaataacttggtgtctatgattcagtttatgtaaaataataaatgtatgtaggaatacgtgtgttgaaagatgtacatcaatttgctaac

SEQ ID NO: 935607 - DNA, 120 bp, Artificial Sequence
  ENSG00000253522_18 (sequence is synthesized)
aatggttatctctgacgtggtgggatttgagatgtgtttttctttttggttgtatttttctctattgtttgacttaacacagaacatgtttggttacaacaataaagttattgaagacaa

SEQ ID NO: 935608 - DNA, 120 bp, Artificial Sequence
  ENSG00000253522_19 (sequence is synthesized)
ggaaatgatctttcagctgagatgggtggtacgttggggttcgatgtctttaggattcctcagcttgatggatgtgggctgggacaggcctggactgcaaggaggggtctttgcaccatc

SEQ ID NO: 935609 - DNA, 120 bp, Artificial Sequence
  ENSG00000253521_0 (sequence is synthesized)
tggcctgcaaatgtccaggggagaccactgacagtgaccactgaggagatgtgagtctggctcaagccccccgggcttgagtggccatgtcctccttcgttgctcatgggaagactgccc

SEQ ID NO: 935610 - DNA, 120 bp, Artificial Sequence
  ENSG00000253521_1 (sequence is synthesized)
cccatgtgacagctgacttgcagcatgtggtgtgtgtctgtcaccctttgcagcctgtcacagctttcctgatgcatttggatggaaagtgctaccccatctgcaactgacgcatgtcag

SEQ ID NO: 935611 - DNA, 120 bp, Artificial Sequence
  ENSG00000253521_2 (sequence is synthesized)
gccaatgtatctaccactctgtggcagacccaagctaaattagcggttcgcttctacgtctgctccctaattattgctgtttgcatttggtctggtgttttccttgtattcgagatcagc

SEQ ID NO: 935612 - DNA, 120 bp, Artificial Sequence
  ENSG00000253521_3 (sequence is synthesized)
tgcagcttgtccagctgcttgggctctccactcagcacacatttaccaagcacctaggaggcacgaggaaccatatcaggtgccagggaagattcgcttcaaaggtcccatgattccagt

SEQ ID NO: 935613 - DNA, 120 bp, Artificial Sequence
  ENSG00000253521_4 (sequence is synthesized)
tctaatgttccttccacagaggactctgctccctccagtcatcacatgaaggctggtcactgagggtcgcctctcccctccaccctctactccatgtgcacccactcccagggcccagtc

SEQ ID NO: 935614 - DNA, 120 bp, Artificial Sequence
  ENSG00000253521_5 (sequence is synthesized)
tcatggcttctgccaccagctctgggtggatgcctctgaaatctctattttaggccttgagtttgtgcctaaacttcctctctcttctcctggatgtcttatacgtgattccatataaag

SEQ ID NO: 935615 - DNA, 120 bp, Artificial Sequence
  ENSG00000253521_6 (sequence is synthesized)
ttcagtgtcttcctcctcattttttctgccacttcatcttattctgcctcttctggcttttgttttatggattcacttcccaatcacccagattagaaaaccctgtcactgcttcctata

SEQ ID NO: 935616 - DNA, 120 bp, Artificial Sequence
  ENSG00000253521_7 (sequence is synthesized)
ttcaacattcaattggaaactaactcctgtacacgttacctcaactaaagcagctccaatcctctccaaaccctgtctgcatttaatccccatcatctgctgtgccaatgtggccccaac

SEQ ID NO: 935617 - DNA, 120 bp, Artificial Sequence
  ENSG00000253521_8 (sequence is synthesized)
actcaccctgcccacagcaccaaggttgtcaccatccctgacagccagtgtgacatatcccctgaccccctgctggtggtgtgcctggactgaggctggtggtgtgttggatctgagggg

SEQ ID NO: 935618 - DNA, 120 bp, Artificial Sequence
  ENSG00000253521_9 (sequence is synthesized)
cccaggggagctcctttcaggcttgggcaggagtggggagtgctgccagggcccagggacacagtgaaggtcctgctggtggaggggaaggcaagacaaagtgcacaagacatctcttcc

SEQ ID NO: 935619 - DNA, 120 bp, Artificial Sequence
  ENSG00000253521_10 (sequence is synthesized)
ttgacaagaacgtccattgttggaatcattataaaccagtggagcttttgtcagagagacatgaagtctgatataatgagctatcatcttgcttcagctgcactgggaccccagctgtcc

SEQ ID NO: 935620 - DNA, 120 bp, Artificial Sequence
  ENSG00000253521_11 (sequence is synthesized)
cgttttcttggaagtaccagacctctctataaaagtgatcaaaactaagccttctgctgtgtcttaaaaacgttgtcaattgcatcattctgggagccgcagagagaaagaagtcccttt

SEQ ID NO: 935621 - DNA, 88 bp, Artificial Sequence
  ENSG00000253521_12 (sequence is synthesized)
ttcatcttctgccatgattgtgaggcctcaccagccatgtgaaactcctactcagtgtgaagatgacaaggagcaaatagcaggtagg

SEQ ID NO: 935622 - DNA, 120 bp, Artificial Sequence
  ENSG00000253521_13 (sequence is synthesized)
caggtaggggtctcatcctgaacccaagcctggcacctttgcctaatgggtgagaacacaactttgaaatcaagcttggctcaaatccggttctgtcgtttaccaccatcttttcaactt

SEQ ID NO: 935623 - DNA, 120 bp, Artificial Sequence
  ENSG00000253521_14 (sequence is synthesized)
tgggcagtatacctggtatctccaggctcgtttcttgcttctgaagctgggccaataatactgatccaccggggctgctataaatacgagaccactaataagaaacgctgaccacagtga

SEQ ID NO: 935624 - DNA, 120 bp, Artificial Sequence
  ENSG00000253521_15 (sequence is synthesized)
ccacacacaacggaaactcaaaaaacgctggatgcttcctgcccatgaacatcggactccaagttcttccactttgggattcttggccttctaccacagactgaaggctgcactgctggc

SEQ ID NO: 935625 - DNA, 120 bp, Artificial Sequence
  ENSG00000253521_16 (sequence is synthesized)
aggctgcactgctggcttccctacttttgaggtttttggactcggattggcttcgttgctcctcagcttgaggtcagcctattgtgggaccttaccttgtgatcgtgtgagtcaatactc

SEQ ID NO: 935626 - DNA, 120 bp, Artificial Sequence
  ENSG00000253521_17 (sequence is synthesized)
tcattctgggagccgcagagagaaaggtaggatcttgttttgctgcaggctgaccttgtgaggtttaggtttaggtggggccatctggaagagtaagctctaccccttagaacagggcag

SEQ ID NO: 935627 - DNA, 120 bp, Artificial Sequence
  ENSG00000253521_18 (sequence is synthesized)
gaggaggggaggactcttccattctgagatacaaataaaacccaccttataccatgaacattattttccaaaaaaccctgatttggactccatatggcagtcatatatattctttctggt

SEQ ID NO: 935628 - DNA, 120 bp, Artificial Sequence
  ENSG00000253521_19 (sequence is synthesized)
aacataactttgcttggcctcatttcttgtgaacagtcgtggtcttattttgtttagagattgttcatgcaatagctgccttgggtaaccaacagagctgtaggacgttgtcagacaatg

SEQ ID NO: 935629 - DNA, 120 bp, Artificial Sequence
  ENSG00000253521_20 (sequence is synthesized)
acgcattctgtgcccaatctcttctcctgaattcccaggattcacctccaagttaggaaggcagtggtatttttatttaagtagctaccctatgcaaagccatatctctccttaggactc

SEQ ID NO: 935630 - DNA, 120 bp, Artificial Sequence
  ENSG00000253521_21 (sequence is synthesized)
taaaggcgtattttggaattgtcaccacactatcctctgagccaccactcttctcgggaggttaaagtctgttcctggtacagctcttgaagccaacccctgcactcatcaggttgagtt

SEQ ID NO: 935631 - DNA, 120 bp, Artificial Sequence
  ENSG00000253521_22 (sequence is synthesized)
ctcccccaaaaatgagttaacagagcaggtctgaggctgctatgcttagaaagacctgcaggcatggccgtcatctgggaacttggacttggggagggtttccaccttccccagaattga

SEQ ID NO: 935632 - DNA, 120 bp, Artificial Sequence
  ENSG00000253521_23 (sequence is synthesized)
taagcgtggctcacagtacctaaacagacgatgtggtatatgttgaacttctgctttcccttctgggagtctggaattttggtatgtgccaggtagaggcagacaataaaagccttgggc

SEQ ID NO: 935633 - DNA, 120 bp, Artificial Sequence
  ENSG00000253521_24 (sequence is synthesized)
cctgagtctctaagaagtattcctggtagacagcatttaacacatggcatgacttgttgctggaagaattgaatatatgccatgtgaccccatggggaaaagactcttgggagctttcct

SEQ ID NO: 935634 - DNA, 120 bp, Artificial Sequence
  ENSG00000253527_0 (sequence is synthesized)
aagggtctccgggaagccttggcttctcctcccataataccgtgcttttgtctaccaggtcatttctctatggaaacagcaggagagagacagcggatgaagaggtctaggcaaggatgg

SEQ ID NO: 935635 - DNA, 120 bp, Artificial Sequence
  ENSG00000253527_1 (sequence is synthesized)
gtgaggacgcagtaaggagctgaaagctgcaccaggcagagaatggcccaccccatcacttaacaaggctggcatccccgcatctatctgttaaagctgcctgtgaacaagaagctgtga

SEQ ID NO: 935636 - DNA, 120 bp, Artificial Sequence
  ENSG00000253527_2 (sequence is synthesized)
ttctagttgttgtttttttttttaagattctttccccttacagaaaaggggctctgatacgcctgaattaaatcacctttcaaaagccaagaaacaaatcatcgtcccctaaggatgact

SEQ ID NO: 935637 - DNA, 120 bp, Artificial Sequence
  ENSG00000253527_3 (sequence is synthesized)
gaggagcaagaagccagtacttactgtgtgtctcaagcaagctgatagaagctagagaagaccatctggtttgagataaagtacaacagtgccggacccactgctctgctccagaaagca

SEQ ID NO: 935638 - DNA, 120 bp, Artificial Sequence
  ENSG00000253526_0 (sequence is synthesized)
cacactcacaaaaatatacaaatgaatgaaaatggttatgacccacccatgactgcagtgggttcactgtcatctgatgtgatctataccacctgttcctatgtgactgagaggaccact

SEQ ID NO: 935639 - DNA, 120 bp, Artificial Sequence
  ENSG00000253526_1 (sequence is synthesized)
aaaacttcctagcagttggagatgcccaacaatgagtgatcacattgttttaaaagtgagactcccattgctgatcaccctggagatttctgcatgggggcaccctgaacttgaaaatct

SEQ ID NO: 935640 - DNA, 120 bp, Artificial Sequence
  ENSG00000253526_2 (sequence is synthesized)
ctgaagtgcctcgcaagattcagggcactaaggtccaaaggagtgaagattggcaaactgataataactccccaaatctattacactgacatgtatcatcaaattaataaattccataaa

SEQ ID NO: 935641 - DNA, 120 bp, Artificial Sequence
  ENSG00000253524_0 (sequence is synthesized)
ccttgaaggaagtcaaagaagtatatttcaggctctataggtcagaagtctgcagcgagtctcatgaggctaaaatcaaggtgtccacagcagtcattattctacccaccagagacacag

SEQ ID NO: 935642 - DNA, 120 bp, Artificial Sequence
  ENSG00000253524_1 (sequence is synthesized)
gtaagctctacagaactagcatttcctcaatttccatctgccaagatgctaacagagaacacatcaagtaggtggaacacacaagggactgaccttgacttaaagcaagtatggcaatct

SEQ ID NO: 935643 - DNA, 120 bp, Artificial Sequence
  ENSG00000253524_2 (sequence is synthesized)
aagatctctgccatgacatgactatagtttatgaaccatttacaatggtagtaatatcacattattcattgtctgtataccatgtgccccagatattaaagccaattgatgcatactgtc

SEQ ID NO: 935644 - DNA, 120 bp, Artificial Sequence
  ENSG00000230074_0 (sequence is synthesized)
gggctccgaacgtctcctggggagcggcatgattgaatcagggattccctagccccaggtccccttctccgtcattctcaggacgaggctgcccagttctcagaaaaatgtgaaaagaga

SEQ ID NO: 935645 - DNA, 120 bp, Artificial Sequence
  ENSG00000230074_1 (sequence is synthesized)
tagcctcccagcctacatctttctcccatcctggatgtttcctgcccttgaatgttggactccaagttcttcagttttggaactcggactgtctctccttgctcctcagcctgcagacgg

SEQ ID NO: 935646 - DNA, 120 bp, Artificial Sequence
  ENSG00000230074_2 (sequence is synthesized)
attctggttttacttctcatcttgggagttaccatcaagacgttaggtatggctgtgtgacccactttggccaatgaaatgtgaacagaaatggcatatgtcacttgtggacaaaaacat

SEQ ID NO: 935647 - DNA, 120 bp, Artificial Sequence
  ENSG00000230074_3 (sequence is synthesized)
ttaagcaagaatttcccttgctgtcttccttgactggagcgaccatggaagcctgtgttgagatgaagaggctgccaacagatcaaaacacttgaaaacttgagcagccacatggactac

SEQ ID NO: 935648 - DNA, 120 bp, Artificial Sequence
  ENSG00000230074_4 (sequence is synthesized)
aactgtgctggagacttgcctggacccacagcaggcttggtatgcatggggaatagaattttgttgtattacactcctcagatttggatgtcatttgttattacagcattacctagccta

SEQ ID NO: 935649 - DNA, 120 bp, Artificial Sequence
  ENSG00000230074_5 (sequence is synthesized)
gatacaaggagaagtaatgcctggatgtgagaaagaaaaagaacttcacaaaggataccagctgaagcttaagacatatttcacaggtgactacatgcaaaaatgcagctggacctttag

SEQ ID NO: 935650 - DNA, 120 bp, Artificial Sequence
  ENSG00000230074_6 (sequence is synthesized)
cttataccatacacagaaattaactcaaaatgagtcagagacctaaatgtagagctaaataagactcttggcagaaaacatcagggaaaaattttatgacattggatttggcaatgattt

SEQ ID NO: 935651 - DNA, 120 bp, Artificial Sequence
  ENSG00000230074_7 (sequence is synthesized)
aaagataaagatgtaacttaaacttcatcaaaatcaaaaacttttgtgcatcgaaagacactatcaacagagtgaaaagtcaacccacagaatgggataaaatacttgcaaatcatatat

SEQ ID NO: 935652 - DNA, 120 bp, Artificial Sequence
  ENSG00000230074_8 (sequence is synthesized)
ctgatgagggattgctatccagaatatatgaagaactcctacaacacacaacaaaaacaaaaaaaacaaacaatccaatgtgaacatgggaaaaagacttgagaaggcatttctttaaag

SEQ ID NO: 935653 - DNA, 120 bp, Artificial Sequence
  ENSG00000230074_9 (sequence is synthesized)
actcactcctcctccgcctccagcgccacctcgtatctcctcattcccgacatgtcctgggctccgaacgtctcctggggagcggcatgattgaatcagggattccctagccccaggtcc

SEQ ID NO: 935654 - DNA, 120 bp, Artificial Sequence
  ENSG00000230074_10 (sequence is synthesized)
aacatgtcaccccaatatcttggatttagaagcagatgttgctatggaatgaattgtgtccccccccaaattcgtatgtttagtcctaaccctaaatgtgactgtatctgaagatggggt

SEQ ID NO: 935655 - DNA, 82 bp, Artificial Sequence
  ENSG00000230074_11 (sequence is synthesized)
tagtcctaaccctaaatgtgactgtatctgaagatggggtctttaggaggtaattaaagttaaacctctgggagaccgaggt

SEQ ID NO: 935656 - DNA, 82 bp, Artificial Sequence
  ENSG00000230074_12 (sequence is synthesized)
gaagaagaaaaaaaaaggttaaatgaggtcataatccgataggagtatagacttagaagaagaggaagggacctctctttgt

SEQ ID NO: 935657 - DNA, 120 bp, Artificial Sequence
  ENSG00000230074_13 (sequence is synthesized)
gagtatagacttagaagaagaggaagggacctctctttgtctctctctgtcacatagtaagaaggtggctggctggttgcaagccacaaaaaaagccctcaccagaaagtgactatcttg

SEQ ID NO: 935658 - DNA, 86 bp, Artificial Sequence
  ENSG00000254991_0 (sequence is synthesized)
cgaggctgcctgccctggtgtttggcttcaggcagctctgacatcaatctgtcattccagaggacacttttagataaaccacgatc

SEQ ID NO: 935659 - DNA, 120 bp, Artificial Sequence
  ENSG00000254991_1 (sequence is synthesized)
accaaccttcaaatgtcaatgtcttaatatcttactttcgtatcaaaatacaaagtgagtcagcagggagactgttccagtgtcattcagggaccctgacttcttccatcctgtggttct

SEQ ID NO: 935660 - DNA, 120 bp, Artificial Sequence
  ENSG00000254991_2 (sequence is synthesized)
accttaccctgggtactcttcactcaacttatggatgggcaaagggaagcgttcatctgaggtggtcgtgtgagtctgtgtgagcctgcaagcactgcccatctcttacacccacacccc

SEQ ID NO: 935661 - DNA, 120 bp, Artificial Sequence
  ENSG00000254991_3 (sequence is synthesized)
attggccagaactctgttctctgataaacagtggcatcgttgttgtgcttgaccacaagaaaaggaattgtgtgtccaggaaagagagaagatgcatgtagctgaggagtggcagtttcg

SEQ ID NO: 935662 - DNA, 120 bp, Artificial Sequence
  ENSG00000254991_4 (sequence is synthesized)
gctgtaaatatataacctcacccaagggggtgcttcacctaaaaacttgcagtaggcagaatgatggtgtccccagtgacgtccacgtcctcatcccagaatctgtgactatgtcacctt

SEQ ID NO: 935663 - DNA, 120 bp, Artificial Sequence
  ENSG00000254990_0 (sequence is synthesized)
ctattcagtgtcatttgattgaatgattgatcaggtggtagaagaggcttgagcaggccgacttgcccttcaggaatactgcctggccttcagattcaaccttattgcttgacactactt

SEQ ID NO: 935664 - DNA, 71 bp, Artificial Sequence
  ENSG00000254990_1 (sequence is synthesized)
gcctggccttcagattcaaccttattgcttgacactacttggcctgctcagtggcgctatctcggctcacc

SEQ ID NO: 935665 - DNA, 87 bp, Artificial Sequence
  ENSG00000254990_2 (sequence is synthesized)
atggggttttgctatgctgcccatggctggtcttgaacccgtgagctcaagtgatccatcatgtgcaccactgccccaggtgacttt

SEQ ID NO: 935666 - DNA, 120 bp, Artificial Sequence
  ENSG00000254990_3 (sequence is synthesized)
attcctcctctcaatgcctacaggaatcccctctgatcttctaactggtaaagtactaagttaaaaaaacctcttagccctctgtctctccaagttgggtagtattaaatatatgaatcc

SEQ ID NO: 935667 - DNA, 74 bp, Artificial Sequence
  ENSG00000254990_4 (sequence is synthesized)
tctgtctctccaagttgggtagtattaaatatatgaatccatttttagcctgggcagcatggtgagactctgtc

SEQ ID NO: 935668 - DNA, 120 bp, Artificial Sequence
  ENSG00000285108_0 (sequence is synthesized)
agtggtgcttacactgaaatgggaatggcacagaaaaatagaatgtggctgagaatatggcagagcttgttttggttctttccatctgatcacttcatccttccaggcactgggcatcca

SEQ ID NO: 935669 - DNA, 120 bp, Artificial Sequence
  ENSG00000285108_1 (sequence is synthesized)
gagttaaatagatgcaacccctgctgtggagaagcttacagtgccgtgagaggaagtgacagatatacactgaatgcctgctaagtgcctggctccatttttggactggaaatgtgagtg

SEQ ID NO: 935670 - DNA, 120 bp, Artificial Sequence
  ENSG00000285108_2 (sequence is synthesized)
aattctcatgagatctgatgcttggcacttctcctgctgctgccatgtgaagaaggaagaaggacgtgtttgcttccccttctggcatgattcagacacccctggcctacttccaagaca

SEQ ID NO: 935671 - DNA, 120 bp, Artificial Sequence
  ENSG00000285108_3 (sequence is synthesized)
ctgtgatggatacgcctcttcctgaagcatggtgcagcatggagaggttcttgtgaggattaaatgaaatgatgtgcatgctggcagtgtctttgctttgccggtaacctttgcaaagat

SEQ ID NO: 935672 - DNA, 120 bp, Artificial Sequence
  ENSG00000285108_4 (sequence is synthesized)
ggaaaagtgcacttcattaccaggatgaaaaccatactatttcatgaccatgcacggagacagagtttagaggaagggtgagagggagctctccttctcacgcagatggagatgttacta

SEQ ID NO: 935673 - DNA, 120 bp, Artificial Sequence
  ENSG00000285108_5 (sequence is synthesized)
catgtaagagagttttagacagtgacttgaagtgccacacctccctttccaaaaaaaaaagtaagttttttcttgttccttctttgaaaaatggggcaagagctttctaaatggatgtat

SEQ ID NO: 935674 - DNA, 120 bp, Artificial Sequence
  ENSG00000285108_6 (sequence is synthesized)
atgtccaagctttaggtaagatttaaaatgaatttgaaagaaaccatatcctcttctcatacctttcccttctgctgggttcagcaatatctatgatccttttctccttccttccctccc

SEQ ID NO: 935675 - DNA, 87 bp, Artificial Sequence
  ENSG00000285108_7 (sequence is synthesized)
tttctccttccttcctccttccttccctccctccctctctcccacctccctccaatccttctttccttccttccttccttcgttcct

SEQ ID NO: 935676 - DNA, 120 bp, Artificial Sequence
  ENSG00000285108_8 (sequence is synthesized)
cgtatttgtaccactttatttatttaacacatggaattttagaacaatttaatataaattgagaaaggtgacatttgtacttgttaatagcacatataatttcatttcaaaaagtgtata

SEQ ID NO: 935677 - DNA, 120 bp, Artificial Sequence
  ENSG00000285108_9 (sequence is synthesized)
atagaaaagactagaaggaaatctgccaaagtattgacagtggtttcctccactggtaagtaggttcataaagaacttcttttggtattttattaattttattttttaaaactattgtac

SEQ ID NO: 935678 - DNA, 120 bp, Artificial Sequence
  ENSG00000285108_10 (sequence is synthesized)
aaaaatttgacttattttggtgtacagttctatgaatttcaacatatgaatttgcataactgccatatggctgctttctctcctccttttaccctcacccggccctctcagtctttccta

SEQ ID NO: 935679 - DNA, 120 bp, Artificial Sequence
  ENSG00000285108_11 (sequence is synthesized)
cttcttctcccctctctctgtccattccttcctgctttccttggctggcttgtctttctctaaatgccagtgtttcagcttttttacttttattttttaaagtagggactctatcctaat

SEQ ID NO: 935680 - DNA, 120 bp, Artificial Sequence
  ENSG00000285108_12 (sequence is synthesized)
ggtgttcttattcactcatatattatcttattaccttcatgccaaatggcccccaaactatatctccaatccagatgtctcggttccactccagatccacttgctgcacaccttttggac

SEQ ID NO: 935681 - DNA, 120 bp, Artificial Sequence
  ENSG00000285108_13 (sequence is synthesized)
atcaccgggatgtcccataaataactcaaacactacatgtcaccaactaaattcattgtttcttcctgttgtgggtgtgtctctggcattccaaatctctcttaacagggacactggaaa

SEQ ID NO: 935682 - DNA, 120 bp, Artificial Sequence
  ENSG00000285108_14 (sequence is synthesized)
cctcacctcccgagctggaaacctcaggagcatttttatgctctttctattgcctcctgcataaatcaattgccaagtcccgtgtgtggtgttggtgttttaggtgtgactcttgatcca

SEQ ID NO: 935683 - DNA, 120 bp, Artificial Sequence
  ENSG00000285108_15 (sequence is synthesized)
ttgccatatgtctatcctcattgtcttttgccttagtctgggctctctgccttgccatggttgtgagcgttcactttaaaaacctcctaattggtgtctttgtctctagcttctcttgtc

SEQ ID NO: 935684 - DNA, 120 bp, Artificial Sequence
  ENSG00000285108_16 (sequence is synthesized)
tcctatccatccttcccatggccagcatgggattcatcttcatcaaacacagatgtgatattacactcttgtgcttaaactccttccatagccatgggagggcgttccaggtgctagcta

SEQ ID NO: 935685 - DNA, 120 bp, Artificial Sequence
  ENSG00000285108_17 (sequence is synthesized)
gagcttccatgatggccctgtgaaactttgtgagtctcatcttcctctgcccagctccatggcccaactcctctctcaagatccactacgtaaatggggcaccccaacactatgctcaga

SEQ ID NO: 935686 - DNA, 120 bp, Artificial Sequence
  ENSG00000285108_18 (sequence is synthesized)
gagcccttgcatgttcctcaaaccagaaaccttccactctattgtcaagaatgagttaaaaattccctgttctcaactcttccaggaaattctaattgtgctttattttggactctcctg

SEQ ID NO: 935687 - DNA, 120 bp, Artificial Sequence
  ENSG00000285108_19 (sequence is synthesized)
catgctgaccacagggaggtgggaagttactctccagaggagatgatctgaacctaaaggaccttcacaatatgagaaatgtccaaaaaataacagaatgagataaggaccaagagaaag

SEQ ID NO: 935688 - DNA, 120 bp, Artificial Sequence
  ENSG00000285108_20 (sequence is synthesized)
atggagtaagaaatagagaaggaaaatgaaggttaaaaaaccagaggatgatgggagatcagttctggaactaccttttaataagagagtttcacagcatgtgctccaaaaggaattgca

SEQ ID NO: 935689 - DNA, 120 bp, Artificial Sequence
  ENSG00000285108_21 (sequence is synthesized)
gagcgaggctccaggccgtaggcaagccgcaagcagcagttttaccacgatgacatgaggagagctgcataaataccaccgatgtcaaggtccccaagatctggggggagagggaggtct

SEQ ID NO: 935690 - DNA, 120 bp, Artificial Sequence
  ENSG00000285108_22 (sequence is synthesized)
ccgtcaagggtctagggggccatgtgcaggagctgccaataacaaagaggcttctgttctcactggcctgtcctccaccctggcccagaggcacagtcattcatttgaccttccttctgc

SEQ ID NO: 935691 - DNA, 120 bp, Artificial Sequence
  ENSG00000285108_23 (sequence is synthesized)
tgtgtctgtgtgaagacccccactccaaactacttcaatggcaagaggcgactgggaacagctgggaactgttgttagcttctggcaacatcctggaatttcttccttgtggatcctgtg

SEQ ID NO: 935692 - DNA, 120 bp, Artificial Sequence
  ENSG00000285108_24 (sequence is synthesized)
cccctgagctgctgggggcccctgacttgacctggagttgaacttagctgaagggtccagggctaggggttgcctccttgtcagccctgatagtagcatgaaattacacagtctttccaa

SEQ ID NO: 935693 - DNA, 120 bp, Artificial Sequence
  ENSG00000285108_25 (sequence is synthesized)
gaaagccgaggctgcctttctagccattcctggggtggaaagactatcagaggctatgttttcggcaaatccattcatgttttccaagggcaggatagtgcaggagagagtgaccagata

SEQ ID NO: 935694 - DNA, 120 bp, Artificial Sequence
  ENSG00000285108_26 (sequence is synthesized)
agacactcgcttttgttcacaaacaccctgaggaggtcccttaagagatagcaaagcttctggtggggatgaggcagagaaggtttgcttcagataagatgctagtcgagggacaattgt

SEQ ID NO: 935695 - DNA, 120 bp, Artificial Sequence
  ENSG00000285108_27 (sequence is synthesized)
tgttttcaagggaggagatacaaaacatccgttaatggggtttgtccaaggatgaacttttcattcacagaattagagaatggggagttgcagcaattctactctaactctttcttttaa

SEQ ID NO: 935696 - DNA, 120 bp, Artificial Sequence
  ENSG00000285108_28 (sequence is synthesized)
aacacaagcaaaaagaggccaagagaggggaggtgactttatctagatcccacagcaagtcaggagtaaagctctgtgtagggttggatgctctgacataaagtccactgcttttaacta

SEQ ID NO: 935697 - DNA, 120 bp, Artificial Sequence
  ENSG00000285108_29 (sequence is synthesized)
ctaagtcccaatatttcacctctccatcttgtcatttctctatgtctttatttattaacgagtccatccacccattcatgcattcctttatgtgtttgctcatcaatgtttattcagagt

SEQ ID NO: 935698 - DNA, 120 bp, Artificial Sequence
  ENSG00000285108_30 (sequence is synthesized)
acagagatgactgacagttcctcaaggaatggatgatgtcatggaggagccgcccatgaatgtatagcagagggactagtcaagcagcgtgggagaggcagagacagggcattatcacgg

SEQ ID NO: 935699 - DNA, 120 bp, Artificial Sequence
  ENSG00000285108_31 (sequence is synthesized)
tgagattgaagaaggcttcatagggaggatggctctggagctgagtcttaaggtggaaaaggattgcatttgttgaataagaggagaaacgctttagcaccgtacttttagaagtggcat

SEQ ID NO: 935700 - DNA, 120 bp, Artificial Sequence
  ENSG00000285108_32 (sequence is synthesized)
gaagaatgaattgaagaagtgagacgttggcaccaaagagatgagttatagcagttggttcattccacaaatcagcgatacatgcttcatgtcttcagaggccatccatggtgttggcca

SEQ ID NO: 935701 - DNA, 120 bp, Artificial Sequence
  ENSG00000285108_33 (sequence is synthesized)
ctgtggggatgtcaagttgtaaagacctggaccctttccttaaggagctgaacttgccaaaacacaaatgtgctcaaataacataatgaaacgcaaaatgaacacaggactagaaactgt

SEQ ID NO: 935702 - DNA, 120 bp, Artificial Sequence
  ENSG00000285108_34 (sequence is synthesized)
gagctctggattttagtctcgctctggtattgatctccatggtgttttggggccttgaatatttccttacctgtgagatggtgaggttaggtctgccttcctgtcccagggaaaaggcaa

SEQ ID NO: 935703 - DNA, 120 bp, Artificial Sequence
  ENSG00000285108_35 (sequence is synthesized)
aggcagtgtccatctctagcctattccttcttggttgtatgatcatgagaagtcatttcatcacactggagctcaagtcctcatttttaatgtggggggagtaaaagcttgtcccacgga

SEQ ID NO: 935704 - DNA, 120 bp, Artificial Sequence
  ENSG00000285108_36 (sequence is synthesized)
gtgtgaggatgatctaaaacagctgcaggagagtacagagcatgctacctggaagagagtcagcctctaacaaatgctcattctttgtcccacactcccatggctctgttttttcttgga

SEQ ID NO: 935705 - DNA, 120 bp, Artificial Sequence
  ENSG00000285108_37 (sequence is synthesized)
aggggtgaatggaatcaaggatggtaatacatatgaaatctcgttaaaataggaagtgccctccataaatgccaggggaatcccatgtagatttctacataggagagtctgggggggctc

SEQ ID NO: 935706 - DNA, 120 bp, Artificial Sequence
  ENSG00000285108_38 (sequence is synthesized)
ttaaggctgatctctgggaggatctgtgcctctcctagtgtcctgtctttcttctggttctaagtctctggacaggccttccccaggagggctccttggtcaaaggaactcctttcccag

SEQ ID NO: 935707 - DNA, 120 bp, Artificial Sequence
  ENSG00000285108_39 (sequence is synthesized)
aagcatgcagaaggtgacaggcacaaacacaaagacagactgtccttggctttctggagcagagatagcttcagacattctgcctcactcttatggggacctgtcagcccagttcttggg

SEQ ID NO: 935708 - DNA, 120 bp, Artificial Sequence
  ENSG00000285108_40 (sequence is synthesized)
tcagaaaatgggttcatggtaggttaacctaagccacaaccagtaacgactacttttctctaatggttcatcaaagccttttgacccttccttctccattgctctaccatccacctccac

SEQ ID NO: 935709 - DNA, 120 bp, Artificial Sequence
  ENSG00000285108_41 (sequence is synthesized)
tgttccagccttcctgcagctcccacgtactgcatgccttcgtcacttcctgctttgcctctggcgctagcgtccgactgttcttcccttcttccagtccacctttctcaccacaactaa

SEQ ID NO: 935710 - DNA, 120 bp, Artificial Sequence
  ENSG00000285108_42 (sequence is synthesized)
aagaacgtttctgctttgatcacatgattgccgtggaagtgaaacatgcagagaaccccaaggggtgaggaggctgcagccctttatttggctggactttgtcttgagagcttctctgcc

SEQ ID NO: 935711 - DNA, 120 bp, Artificial Sequence
  ENSG00000285108_43 (sequence is synthesized)
cttgctttgctttgtttatatagaaacaggtatttcgttataattcctttttttttctgcagaaagattaagtgcaaacacttggcattcaaggcaacccctcagggaatccagcttttc

SEQ ID NO: 935712 - DNA, 120 bp, Artificial Sequence
  ENSG00000285108_44 (sequence is synthesized)
atggactttcaatcctgactatgttcaagtcttacctctgctgcctatcagctatgtgatcttgggcaagttacttaacctctctatgctttgacttccttatccatactttgggaataa

SEQ ID NO: 935713 - DNA, 120 bp, Artificial Sequence
  ENSG00000285108_45 (sequence is synthesized)
taatactccatacctcacagggttattgtgagggttaaatgagattatctatataaagttcttagaactttgcttagcacagtaagtactcaataagttctatccattccagaaacctcc

SEQ ID NO: 935714 - DNA, 120 bp, Artificial Sequence
  ENSG00000285108_46 (sequence is synthesized)
accctagctaaattcatctctgttaacagccgcacatgtgcttttgactttcctgcctctgtgatttcagctgctcctttcacctgcctgcaatgatccctctctttccttttggcttta

SEQ ID NO: 935715 - DNA, 120 bp, Artificial Sequence
  ENSG00000285108_47 (sequence is synthesized)
tccaagctctccttgtcctctattgctaaggaaactcaagcaatttctcaggacctctatggctaaggaaactcaggtaattgttcaggagaacgagacagaactcaccctggttcctac

SEQ ID NO: 935716 - DNA, 120 bp, Artificial Sequence
  ENSG00000285108_48 (sequence is synthesized)
agctgagttactgtgggaggtcacctggcttctccacatttcagccttccccttggtgaagtgcagatacttaacacagaccttgtgaagtcattgaaagaaaaattctcaaattctggc

SEQ ID NO: 935717 - DNA, 120 bp, Artificial Sequence
  ENSG00000285108_49 (sequence is synthesized)
agatagtaggtatttaatgaatgatagatattattaagccaagctagtccttcctacctgaacttttccctctgaactcttctagtaattattgattccatcatttatctggtcattcat

SEQ ID NO: 935718 - DNA, 120 bp, Artificial Sequence
  ENSG00000285108_50 (sequence is synthesized)
tgaccatgtagtactttgtatcacctcatcttttctttctttttgtcctgcttggaatgattactgtaatcttatgactgcttagttttttaaacatgcatagtatcctcctcactgcat

SEQ ID NO: 935719 - DNA, 120 bp, Artificial Sequence
  ENSG00000285108_51 (sequence is synthesized)
tggggtttcctggcgggaagaccctgcacagacatttgtaacgtgaccagagttttaatgtgcaatccctccatgctagcagcttggtgaggtgcttacattttgtaggacttcataggc

SEQ ID NO: 935720 - DNA, 120 bp, Artificial Sequence
  ENSG00000285108_52 (sequence is synthesized)
tttttgctgtggtatgtcggcctggtacagcccagggctttgaggctgcagctctctcttaagtgtttattttttgcacctttgcctttgggcgatggactcccccacctaaagctttgg

SEQ ID NO: 935721 - DNA, 120 bp, Artificial Sequence
  ENSG00000285108_53 (sequence is synthesized)
acttttcctggctgcctcattgaccagttgtgaggctgacaccagcctgtgagtccagagctgggtcagagcagataagggcttgttctcagaaccagcatggtgatcactgtgtgtctt

SEQ ID NO: 935722 - DNA, 120 bp, Artificial Sequence
  ENSG00000285108_54 (sequence is synthesized)
ctccttattttcttctctgtgaaaacatgtgcctcgtaatttgtgttctgagaaatatctcaacggtcctgtgccctaaacatttcctcatctgagataaggcctggatgttggctctaa

SEQ ID NO: 935723 - DNA, 120 bp, Artificial Sequence
  ENSG00000285108_55 (sequence is synthesized)
ggagggaaaaaggtacagtggagaggaagttctgatcagcaggaagatttcccaagcaacgacaccgcctctggcagcaatggcctagaaactgggctgccttggtgcagaccgagacca

SEQ ID NO: 935724 - DNA, 120 bp, Artificial Sequence
  ENSG00000285108_56 (sequence is synthesized)
aggccattcccaaaggagaggctgacagcattgcccaggcatcctcttccctgccaggcatggaccttctgagggatgtgggggctactgcacctagagagaggcactggagcctgagaa

SEQ ID NO: 935725 - DNA, 120 bp, Artificial Sequence
  ENSG00000285108_57 (sequence is synthesized)
atcagtgctttgaggcctcagtggtggggctggtggctgaggctgctactggtggagttgacgggccctggataagacccagagttcaagattctggtcttggccatcagttcctcactg

SEQ ID NO: 935726 - DNA, 120 bp, Artificial Sequence
  ENSG00000285108_58 (sequence is synthesized)
tgtgatcctgggcatgtcacttaatctctttggaacccagtttcttgcctagaaaataagtatgtcttatcagtggttttaaatttttaattatttaaaaaatcatcagaatgctttaga

SEQ ID NO: 935727 - DNA, 120 bp, Artificial Sequence
  ENSG00000285108_59 (sequence is synthesized)
acttttttttccaaaaagaattgtatgcatattcccagttgatacaacagataaaaagaacagtcctgtatggaggagtttgggccaccaggggcctgtgcccaggtccttcctgtcatt

SEQ ID NO: 935728 - DNA, 120 bp, Artificial Sequence
  ENSG00000285108_60 (sequence is synthesized)
ccatgctgccatgcctgttctgttccccgggacatgttcatgcaaacctggcttccccaacacattttaagccctctggactagctttgtccccagctttgtgttctgggcctaccagtc

SEQ ID NO: 935729 - DNA, 120 bp, Artificial Sequence
  ENSG00000285108_61 (sequence is synthesized)
agcttggctgattttccccaggtcagtggtgatgggagagcagtgctggtgtgcggagagagggcaaatatttcaccaaaggaccaagtcccagacaaatcagagaggatgctggtcagt

SEQ ID NO: 935730 - DNA, 120 bp, Artificial Sequence
  ENSG00000285108_62 (sequence is synthesized)
gtgcattggttgaatatcagtaccagttttgtgtcagaatgagctgtgaaatttttaacaaatacacccttcagggtctatccagcttcacttgaatcaaaatttggggctattattttg

SEQ ID NO: 935731 - DNA, 120 bp, Artificial Sequence
  ENSG00000285108_63 (sequence is synthesized)
aaaaataggaaataggtatgtgcagcccctcctcctaacaaataggcaaccccaaatcaaaatactaaaaccttgattctggagctttggatgggtgggtggtctccaggaggtatcgtc

SEQ ID NO: 935732 - DNA, 120 bp, Artificial Sequence
  ENSG00000285108_64 (sequence is synthesized)
agaataaaaggggtcttaagttaacttggagcatggcaagggcaagaataacaccaataatatgatgaagtacttactctggaataggttccatgcttaacataccatgaaataggtgga

SEQ ID NO: 935733 - DNA, 120 bp, Artificial Sequence
  ENSG00000285108_65 (sequence is synthesized)
tactagtttcctagggctgttttaacaaatgaccacaaagcttcatggcttaaaaaatcccccagaaatttttttgcttagagtcctggaggccagagtacaaactcaaggtgctggcag

SEQ ID NO: 935734 - DNA, 120 bp, Artificial Sequence
  ENSG00000285108_66 (sequence is synthesized)
ggccacactcactctgatggctctagaggggactttgtcttagcctctttcagcttagggaggttccaggcattctgtggcttgtggctggataactcctacctctaccttcatctttct

SEQ ID NO: 935735 - DNA, 120 bp, Artificial Sequence
  ENSG00000285108_67 (sequence is synthesized)
ttgcgtggacttttcttcttctcctggtgtctgtctttctgcggtcataaggacatttgtcactggatttagagacaacctagataatataggatgatctcatctcaagaacctttacat

SEQ ID NO: 935736 - DNA, 120 bp, Artificial Sequence
  ENSG00000285108_68 (sequence is synthesized)
aattacatctgccaagacctttttatcaaatatggtcacgttcagaggtcctaaggattaagatgtggacacaggtattgagtgagggacagcatttaaccccaacttgttattaacacc

SEQ ID NO: 935737 - DNA, 120 bp, Artificial Sequence
  ENSG00000285108_69 (sequence is synthesized)
aacttaaagatgagaaagcccaggtctagtccatggaggtaacctgcccatggccacaccgctggtgagtggcagagctgggctgggactcaccctcaggtctgctttatgcttgtcttc

SEQ ID NO: 935738 - DNA, 120 bp, Artificial Sequence
  ENSG00000285108_70 (sequence is synthesized)
tacagagcctgtcacacagacgtccagggagtatgtggaccaggcagatgcaggacaatcattggtgccagcttgcaagactctgccttgcctacagagggtgctcaatgcctgtctgtt

SEQ ID NO: 935739 - DNA, 120 bp, Artificial Sequence
  ENSG00000285108_71 (sequence is synthesized)
agagaggtagttcttgattctgagaccttgaccaggacttctagggcatagtgaattaatctacctgcctctatatctttaggatagtgcaggaaatgtcggataaatgaaactgaatgc

SEQ ID NO: 935740 - DNA, 120 bp, Artificial Sequence
  ENSG00000285108_72 (sequence is synthesized)
ctggaagaagataatgttctcatatgtccgtggacctttatagggtcgatagcttatagttagtgcatagatgctatggaaaaaggctgtatgggaagacagggattcctctgagagacc

SEQ ID NO: 935741 - DNA, 120 bp, Artificial Sequence
  ENSG00000285108_73 (sequence is synthesized)
caggtccatgcttcccttcttgctctagccacaatctgcttgagggacttcagatccatcaccctgcctcgatttcctagtatataaagtgaggctactaatggatttcacagggtgttt

SEQ ID NO: 935742 - DNA, 120 bp, Artificial Sequence
  ENSG00000285108_74 (sequence is synthesized)
tcatgttttgttgacatacagggatcggtctgaaggcaaggggaagtaaaagatagaatttccaagctcctcctagccctagggttttagaaaaaaaaagttaatcatattttgcaccag

SEQ ID NO: 935743 - DNA, 120 bp, Artificial Sequence
  ENSG00000285108_75 (sequence is synthesized)
cagatgtaagcacatattgtaactgtgagaataacatgaaatagaggacaatcatgctcttttacttggattaggtcaagaaacattttgcttaaacttcaattagagagatggaagtta

SEQ ID NO: 935744 - DNA, 120 bp, Artificial Sequence
  ENSG00000285108_76 (sequence is synthesized)
gacaagaatccctttgtgatgtcagcagatgtatttcatgggaatgggggatgagacagacttctcagaggagagtttgggaaggaagaggactgtggggtgcagagggcgggaacgaag

SEQ ID NO: 935745 - DNA, 120 bp, Artificial Sequence
  ENSG00000285108_77 (sequence is synthesized)
cctgttgaaacattttgacataaggaagacttttcaaaccattaaagctgtgaaacccagcaataggtgacttggaaatatgacagggccttgcaatcaacaaaacagaggccagattct

SEQ ID NO: 935746 - DNA, 120 bp, Artificial Sequence
  ENSG00000285108_78 (sequence is synthesized)
ccttgcaatcaacaaaacagaggccagattctgaaaccattgtgtattatttgaaagtcattctgcctcatatatacctatttttttactgagatggagtttcgcttttgtcgcccaggc

SEQ ID NO: 935747 - DNA, 120 bp, Artificial Sequence
  ENSG00000285108_79 (sequence is synthesized)
gctagtcttgaactcctgacctcaggttagccactcgcctcggccttccaaggtgctgggattacaggcgtgagctactacatgtggcctctgcctcatatttatccagccagtgtagac

SEQ ID NO: 935748 - DNA, 120 bp, Artificial Sequence
  ENSG00000285108_80 (sequence is synthesized)
gccagtgtagacctgggatttggagtcagacagatctgtgttaagttcgtgcattgtcatttgccaatttttgaccttgtacaagttacttaaccatcctgagccccaggttccttggct

SEQ ID NO: 935749 - DNA, 120 bp, Artificial Sequence
  ENSG00000285108_81 (sequence is synthesized)
gtggtagtgatatagagcacctctctcctgaggttgtctgtaaggattagatgagccaaggcatggtatataatggtacttggcatataagaagcatttagaagttctgatatatgtgta

SEQ ID NO: 935750 - DNA, 120 bp, Artificial Sequence
  ENSG00000285108_82 (sequence is synthesized)
ggaaaccccatcatccttgtttatgccatgtgagcagtttgacaaagctctgagttgaggcaggagagtcatcatgctatttaatgacaaatgctttcagtgtttcaaaatggaggtaaa

SEQ ID NO: 935751 - DNA, 120 bp, Artificial Sequence
  ENSG00000285108_83 (sequence is synthesized)
tggaaacttgatgtttttctcaaacaccattaagttgaggcaaggcttggaggagcctcaggaagttctcctttcctgtgactgcgggtctcgggaacggtgttggaatgcccctgcccg

SEQ ID NO: 935752 - DNA, 120 bp, Artificial Sequence
  ENSG00000285108_84 (sequence is synthesized)
ctggcttccttctgctgctttggggcctgtctgcagacaggccagatcccagtcatctgaaacaccactcagaaggcaggaatgtgcaatccgttccaagctggaagtgactttcatgtg

SEQ ID NO: 935753 - DNA, 120 bp, Artificial Sequence
  ENSG00000285108_85 (sequence is synthesized)
acaggccgcaccactctgtgactctgtaactaattttccctgccctggaagctctccagattcctgggatgtgatcaattgaggaaaccacttcaggtcacattcaggagagtgctgtat

SEQ ID NO: 935754 - DNA, 120 bp, Artificial Sequence
  ENSG00000285108_86 (sequence is synthesized)
ctggaattgggtgtgagagctcccagcatgtggaaaattcagactccaagtttctttatgtttttttctactcttttcaggctggtcttgttaggtaaggaacatgcaaagaaaccctca

SEQ ID NO: 935755 - DNA, 120 bp, Artificial Sequence
  ENSG00000285108_87 (sequence is synthesized)
aagttgaaagaagttaagacaaaaacaagagctggaattccttgactgaagaggtcattgtacatggcaaacaaatgctcagcttatctttacttaactgaaataaacggaactaaactg

SEQ ID NO: 935756 - DNA, 120 bp, Artificial Sequence
  ENSG00000285106_0 (sequence is synthesized)
gctcccgggcggctctggaggagctcggtgtttgcctctagcccttcgctaccggaggatcaggttcctcccctcctccccctccagctccggccgccgccgccgccgccgccgcctcct

SEQ ID NO: 935757 - DNA, 120 bp, Artificial Sequence
  ENSG00000285106_1 (sequence is synthesized)
tcttgcatgacacagcagaaccgcagctgctgcagcaatttcaagccatccgcccaggaagcgccgcaaccgggactcgggaggggtggagggggcgaggcagaggccgcggccccaggg

SEQ ID NO: 935758 - DNA, 120 bp, Artificial Sequence
  ENSG00000285106_2 (sequence is synthesized)
gatccttggccccactgtgcaccacacactcctttcccagcccaggggcacgcgaacaaaatgaggctcaagctgaccaggccgagccggaggaacgctggggcttggcagcagaaggga

SEQ ID NO: 935759 - DNA, 120 bp, Artificial Sequence
  ENSG00000285106_3 (sequence is synthesized)
tgggaccagagagaagggtgtggaggagaccccagtgagggccaggacatttcaggtaaagagaggtcatatctccgtacctcacttcctgacacaaacaagttttcactgttgtcagca

SEQ ID NO: 935760 - DNA, 120 bp, Artificial Sequence
  ENSG00000285106_4 (sequence is synthesized)
acaaagccctaatatagctgcggaagagaaaaactgcattgcattttgcctcctgcaagcatcatcaacagttactggaggaacgtaattccagaaagcttgaaagccgtggtgatggta

SEQ ID NO: 935761 - DNA, 120 bp, Artificial Sequence
  ENSG00000285106_5 (sequence is synthesized)
attatgtatcaaatgcctggttctatttctgttattattgttttgtcatttctgttttcccagcgatctgactgaactcgcagagggacaaatccagtttttctttttgacttttgtcaa

SEQ ID NO: 935762 - DNA, 120 bp, Artificial Sequence
  ENSG00000285106_6 (sequence is synthesized)
actaaatcaggcctgatagaaaactcattgctctccggggaaacaaagtaggagccacgaaatgtcattttaacagagcgtgggtttggtgactgtaggaaaggatttgaggacgctcct

SEQ ID NO: 935763 - DNA, 120 bp, Artificial Sequence
  ENSG00000285106_7 (sequence is synthesized)
tctgttcggcttcctatgtcatgagcacaggctccacgcacgcacagacaccacggctcccggatgctgtggctccccgatcggggctcctgcagcgccagaagcccctccgggatgctt

SEQ ID NO: 935764 - DNA, 120 bp, Artificial Sequence
  ENSG00000285106_8 (sequence is synthesized)
cgaggggctcccggtgggtggaggtacggacgccgctgcggccgccgccgccagtcctgctgctgttgttgctgctgcagtcacgtgggagcccctttaagtttccatagagaggcctct

SEQ ID NO: 935765 - DNA, 120 bp, Artificial Sequence
  ENSG00000285106_9 (sequence is synthesized)
ctggtgtcacatgatggacatgatataatgaaacaacattgtggagaggaaagcattaggggagcccacggctacaaaaacaagtgagtgagaagaggtgggaggaagagaaactacgcc

SEQ ID NO: 935766 - DNA, 120 bp, Artificial Sequence
  ENSG00000285106_10 (sequence is synthesized)
cccctgcagccgagtgcacgcagcagcctggcgtgacaagtgggcgacgccggggggcagggagccggggtccttggccctggccggggaccccaccgcccaccgcgcggaggacaactt

SEQ ID NO: 935767 - DNA, 120 bp, Artificial Sequence
  ENSG00000285106_11 (sequence is synthesized)
acttttagccggcagcccagaccagcgcggcacctgtctccggagtctccaccgctcctcccgattcatcccagggaaattctcaagaatacgctctacaaatctacgtgcgcatcattt

SEQ ID NO: 935768 - DNA, 120 bp, Artificial Sequence
  ENSG00000285106_12 (sequence is synthesized)
tcacctcgcgtcgcgcccgggaggaaggaacgaggcaaggagctaaagcagcgtgcgttcagccctggggcattttattaatgcttttacgagttagaagagttgggataatttgccatc

SEQ ID NO: 935769 - DNA, 120 bp, Artificial Sequence
  ENSG00000285106_13 (sequence is synthesized)
tggagtttctctgccttgctgatctgagctcagacctgccaatttaccagagataattgataacaccctgtaacagctgagaggaaaatggaagaaacggagatacttttagtgaagcag

SEQ ID NO: 935770 - DNA, 120 bp, Artificial Sequence
  ENSG00000285106_14 (sequence is synthesized)
aataaaccactgaacagctaccatactgggaactgcccaatggagaggcccacattccacaaggaactgatgtcttcagccaatacctcgccaggacctgaggcctgctgagagtcacga

SEQ ID NO: 935771 - DNA, 120 bp, Artificial Sequence
  ENSG00000285106_15 (sequence is synthesized)
gtggccttcgtgggtcctctctcaacgagcttgcaggtgaccactgcgccagccaaaaccttgatggcagcctatgaatgctggtgggatggagctgcagtttgtgtctctgaagcagat

SEQ ID NO: 935772 - DNA, 120 bp, Artificial Sequence
  ENSG00000285106_16 (sequence is synthesized)
taaacactgtctgccccagcctgtcttaactatcttctcactggttaacagtccttggaagaataaacaatccacacaagctctcagaaagcagaagttccatgattcgtgaccagagtc

SEQ ID NO: 935773 - DNA, 120 bp, Artificial Sequence
  ENSG00000285106_17 (sequence is synthesized)
tcatagcacagaattcatctctaaaaacagagacagagtcttgctctggcacccagattggagtacagcggtgcaaccacgactcactgcagccttgacctcccagcctcagatgatcct

SEQ ID NO: 935774 - DNA, 120 bp, Artificial Sequence
  ENSG00000285106_18 (sequence is synthesized)
tcccagcctcagatgatcctcccacctcagtctcccaagtagtcaggactacaggtgtgcaccaccacacctggataattattttttaaaacttttgtagagatggagtcttactatgtt

SEQ ID NO: 935775 - DNA, 120 bp, Artificial Sequence
  ENSG00000285106_19 (sequence is synthesized)
taatttatgtatcatagttgtacatatttttggggtatgtgtgatattttgatatatgtatacaatgtgtaatgatcaaatcaggttaattgggatatgtgtcatcttaaatacttacct

SEQ ID NO: 935776 - DNA, 120 bp, Artificial Sequence
  ENSG00000285106_20 (sequence is synthesized)
ttttgtgttgggaacattacagttcttctagctattttgaaacatacaataaattattgttaactatgattttcttactgtactgttgaatactagaacttcttccttctaattttattt

SEQ ID NO: 935777 - DNA, 120 bp, Artificial Sequence
  ENSG00000285106_21 (sequence is synthesized)
ctgtacccattaaccaacttctcttcattccccctgcccccactccgtacctctcctctgataaacaccattctactctccactactggccacttccatgagatccactttttaaactca

SEQ ID NO: 935778 - DNA, 120 bp, Artificial Sequence
  ENSG00000285106_22 (sequence is synthesized)
cacacataaatgaaaatatgtgacattggtgctcaataacatgtagttccatccatgttgctacaaatgacaggatttcattatgtttgtggtgaaaaaatatttcactgtgaatatata

SEQ ID NO: 935779 - DNA, 120 bp, Artificial Sequence
  ENSG00000285106_23 (sequence is synthesized)
tatccattcatctgttgatggacacaggttgattccataatcttggctattgtgaatagttctacagtaaacattggagtgcagatacctcttcgatatattgacttcttttggatatac

SEQ ID NO: 935780 - DNA, 120 bp, Artificial Sequence
  ENSG00000285106_24 (sequence is synthesized)
ttttggatatacacccagcagtgagattcctggatcatatggtagttttatttttagtttattgagaagcctccatactgttttcatagtggctattgtacttacattcccaccaacact

SEQ ID NO: 935781 - DNA, 120 bp, Artificial Sequence
  ENSG00000285106_25 (sequence is synthesized)
ataccagggttcctctttctctgcatccttgccagcatttgttatttttttctctttttgataatagatttctaactgaagtgagttgataactcattgtggttttgatttgcatttccc

SEQ ID NO: 935782 - DNA, 120 bp, Artificial Sequence
  ENSG00000285106_26 (sequence is synthesized)
tgatgattagtgatgttgagcattttgtaatctacctgtggccatttgtatgtcttgagaaatttttacccagctcttttgcccattaaaaaaaaatcagattgttattttgctattgaa

SEQ ID NO: 935783 - DNA, 120 bp, Artificial Sequence
  ENSG00000285106_27 (sequence is synthesized)
ttgtttacatttcttacatattctatgtattaattcattgttagatggatagtttgcagatatgttcttccattctgaaggctgtctctacactttgttccttcctttgctgtctagaag

SEQ ID NO: 935784 - DNA, 120 bp, Artificial Sequence
  ENSG00000285106_28 (sequence is synthesized)
cttcttagcttgatgtaatcccatttttctattttttgctttgacttcctattcttttgcggtcctaccctaaaaaatctttgcccaaaccaatgtcctgtagcatttcttcagtgtttt

SEQ ID NO: 935785 - DNA, 120 bp, Artificial Sequence
  ENSG00000285106_29 (sequence is synthesized)
gttctagcagattcatagttttaggtcttacatttaagtcttgaattcattttgagttgatacttgtatatgatgaaagatggggatccggttttatttttctgcaaacagatatacagt

SEQ ID NO: 935786 - DNA, 120 bp, Artificial Sequence
  ENSG00000285106_30 (sequence is synthesized)
tttcccagcaccatttattaaggagactcttttcccccccagtatgtgttcttagtgcctttgttgaaaatgagttggctctaagtacaaagacttatttctgagttcttcattctgttc

SEQ ID NO: 935787 - DNA, 120 bp, Artificial Sequence
  ENSG00000285106_31 (sequence is synthesized)
ggtctatgtgtctgtttttataccagtactatgcttttttggctactatacctctgtagtttaatttgtttgttttctgagacagggtctctctctgctgcccaggctggagtgcagtga

SEQ ID NO: 935788 - DNA, 82 bp, Artificial Sequence
  ENSG00000285106_32 (sequence is synthesized)
tctcgaactcctggcttcaaagaagcatgagccactgcatctggcctgtagtataatttgaagtcagataatgtgatgcttc

SEQ ID NO: 935789 - DNA, 120 bp, Artificial Sequence
  ENSG00000285106_33 (sequence is synthesized)
ggcctgtagtataatttgaagtcagataatgtgatgcttccagctttgttcattttgttcaggattgctttggctatttggggtctttcgtgttttcatataaattttaggatttttttt

SEQ ID NO: 935790 - DNA, 120 bp, Artificial Sequence
  ENSG00000285106_34 (sequence is synthesized)
ttctatttctgtgaagaactgtcattggtatttttataggaattgcatcaaatctgtagattgctttgggtagtattgtcattttaacaatattaattcttctgaaaagtgagcatggga

SEQ ID NO: 935791 - DNA, 120 bp, Artificial Sequence
  ENSG00000285106_35 (sequence is synthesized)
tgtcttgccctttttatcctcttcaatttctttaatcaatgttttgtagttttccttgtagaagtcttccacctcctaaatttattcctaggcattttatttgtagatgttgtaagattg

SEQ ID NO: 935792 - DNA, 120 bp, Artificial Sequence
  ENSG00000285106_36 (sequence is synthesized)
ctttgttggtttctttttcagattgttggctgctggcatatagaaattttactgatttttgtatgttgatcttatatcctgtaactttgctgaatctgtcacttctaataggtttttttg

SEQ ID NO: 935793 - DNA, 120 bp, Artificial Sequence
  ENSG00000285106_37 (sequence is synthesized)
gtggactctttaggtttttctaaatataagatcgcgttgtttgcaaacaaggataagtcaacttcttcctttccaatttgcatgccctttatttctttctcttgactaattgctttggct

SEQ ID NO: 935794 - DNA, 120 bp, Artificial Sequence
  ENSG00000285106_38 (sequence is synthesized)
ggctggaacttgccctgtctcctcgcagatgaggtgcaggtcttctgaacaaatgcctcctgaggatttctgtgcctggaaaatatctgttaacagactgcttttacacctacctacctg

SEQ ID NO: 935795 - DNA, 120 bp, Artificial Sequence
  ENSG00000285106_39 (sequence is synthesized)
taagaagaatcaagataaagaattcatgaatgataaaaacactttgaaaagactggtggttccataaaagctgactttgtgcctggaacattggaagtgacccgtcagtgcttactgaat

SEQ ID NO: 935796 - DNA, 120 bp, Artificial Sequence
  ENSG00000285106_40 (sequence is synthesized)
tccctgagtactgaccctaggcccagattcagagatttctccaaaaaaagagcttctttcaaagacatcattcctattgtcaaccctgttggcatagacacaaaatgtaaacgttggaca

SEQ ID NO: 935797 - DNA, 120 bp, Artificial Sequence
  ENSG00000285106_41 (sequence is synthesized)
aaggcaatacttgctgtgacaaaggcgatatttgttgtaacaaaacacaaatgtctgtccatcagtggggaacgagaatgctgggatttgaagaggccaaaaaaataatactgctctctc

SEQ ID NO: 935798 - DNA, 120 bp, Artificial Sequence
  ENSG00000285106_42 (sequence is synthesized)
ttttgagaaagagaggggattttttttttttttttgaaaagccataagcttaggacagatgaaattcaaaatccacactaaacttcactggagaatgtaagcaaaatatgaggccacagg

SEQ ID NO: 935799 - DNA, 120 bp, Artificial Sequence
  ENSG00000285106_43 (sequence is synthesized)
tgagctttctatttccttcctccactctccaagatggcccattgatatttggctgtgtccccaaatctcatcttgaattgtagttcctgtaatccccatgtgtcatgggagggatccagt

SEQ ID NO: 935800 - DNA, 120 bp, Artificial Sequence
  ENSG00000285106_44 (sequence is synthesized)
gggaggtaattgaatcatgggagcagttactcccttgctgttctgtgatagtgaatgagatctcatgagatctgatggttttataagggcctttttcccctttgcttggcacttctccgt

SEQ ID NO: 935801 - DNA, 120 bp, Artificial Sequence
  ENSG00000285106_45 (sequence is synthesized)
cctcgcagatgaggacaagtcctgcgcttggggatcctctgtacgcccgttcactggtgcaggtcttctgaacaaatgcctcctgaggatttctgtgcctggaaaatatctgttaacaga

SEQ ID NO: 935802 - DNA, 120 bp, Artificial Sequence
  ENSG00000285106_46 (sequence is synthesized)
ctgcttttacacctacgtaagtagaggcttctgcttataagtcaacctcaagggagttttattttgtccctggatgattcctcagtacatttttctttttcttttttgaggtagggtttt

SEQ ID NO: 935803 - DNA, 120 bp, Artificial Sequence
  ENSG00000285106_47 (sequence is synthesized)
cacccacgcctggctagttttttaaaatttcttttgtagaggcagagtctccctgtgttgccctggtttcaaacttgggccaagtgattctctgccccagcctctcaaagtgctgggatt

SEQ ID NO: 935804 - DNA, 120 bp, Artificial Sequence
  ENSG00000285106_48 (sequence is synthesized)
acaggtgtgagccaccgtgcctgacaagcctgatatgtttttttaaatgatcattagtatttgatctctactctttttctctcaaccacccaactcccggtttacggtcaggaagaatct

SEQ ID NO: 935805 - DNA, 120 bp, Artificial Sequence
  ENSG00000285106_49 (sequence is synthesized)
ataacatgaactcctgcttaaaaacaagggtatagatcccatattcaggtcttagactgggaagaagagaaggcagtcaaaaatattaaatatatgaatttcagtaaattcagttgggga

SEQ ID NO: 935806 - DNA, 120 bp, Artificial Sequence
  ENSG00000285106_50 (sequence is synthesized)
atgtcaatgtatggcaaagcatgtgacagcaggatctctgcaccctctccatttaccagctgtggtggatctcttagccacatctctgtttataatgtgcttattgaaaactaatgtatt

SEQ ID NO: 935807 - DNA, 120 bp, Artificial Sequence
  ENSG00000285106_51 (sequence is synthesized)
acttttattatcatagctaccatttactgaatatttacattgtgctaacactggttcagatggcttcatcatatttacctgatttaatcctcacaacaaccttatgtgctaggtccagtt

SEQ ID NO: 935808 - DNA, 67 bp, Artificial Sequence
  ENSG00000285106_52 (sequence is synthesized)
cacgcccagctaatttttgtatttttatagagacgagatcacagcctccaaaagtgctgggattaca

SEQ ID NO: 935809 - DNA, 120 bp, Artificial Sequence
  ENSG00000285106_53 (sequence is synthesized)
ggcgtgagccaccgcacccggcctattaccctcattttacagatgaggagactgaggcacagagagttaaagtgatttgtgcagggttgtgtgaggagctggtggcagagcttggcattc

SEQ ID NO: 935810 - DNA, 120 bp, Artificial Sequence
  ENSG00000285106_54 (sequence is synthesized)
gcagggttgtgtgaggagctggtggcagagcttggcattctggctctggagtctgcatttggccatctcaccgtacagtgtcatagaaacaggaaactcgagaagataaactgccaggct

SEQ ID NO: 935811 - DNA, 120 bp, Artificial Sequence
  ENSG00000285106_55 (sequence is synthesized)
gtattttggagtcagtattttaacactgtcaccatctcaagcatgatctgtgggactcatcactgtgctctttgacttgaacttctttaaggttagtgggaaaatgaagctttagagaag

SEQ ID NO: 935812 - DNA, 120 bp, Artificial Sequence
  ENSG00000285106_56 (sequence is synthesized)
atgggactggcctaaggtcacactgcatgtcagaagtgtggtggagggtccaggtcttctgaccattcagtgcaagccaaattgtgctaatttccaatttttctccctttctcttggtga

SEQ ID NO: 935813 - DNA, 120 bp, Artificial Sequence
  ENSG00000285106_57 (sequence is synthesized)
gctatttggtgctacttctactcctcatgaccaaagctggctttcatggtttactcatgtacttactgatgaaaccctgagacttggggccagtgactgttcagaggtccatgtgaagat

SEQ ID NO: 935814 - DNA, 120 bp, Artificial Sequence
  ENSG00000285106_58 (sequence is synthesized)
gcgctgaatggtataaaggacagagcagtaaagagtgctggctgaatgcctgggctggcaatcaggcatgttggagtttgagtcccagtctgccactccagctctgtgaccaagaggaag

SEQ ID NO: 935815 - DNA, 120 bp, Artificial Sequence
  ENSG00000285106_59 (sequence is synthesized)
tgaagtcatgtaccctttctaagtctctagcccctcttctgaaagacgaagatgccaccaccaaccatgttagtggttgtgaatgccaagaaagtccatgtgaagcacatagcatagtgt

SEQ ID NO: 935816 - DNA, 120 bp, Artificial Sequence
  ENSG00000285106_60 (sequence is synthesized)
ctgccatgcgttaagtgttccaaaaatggaagctatgactatttcacagagtacacttcccatcacttttcagttcattttggccttctccctcaaaagcactccagtgttctgatccag

SEQ ID NO: 935817 - DNA, 120 bp, Artificial Sequence
  ENSG00000285106_61 (sequence is synthesized)
ctgataaaacaccaaacattcacatagtgctttaaaagtgacccactgtttttacagactgcattacatatgaccctaacaaccactgcaatatagaaattcgcatctccattctccaga

SEQ ID NO: 935818 - DNA, 120 bp, Artificial Sequence
  ENSG00000285106_62 (sequence is synthesized)
tcaggataccgaagctcagaaaaattaaatgatttgcccaggatcacatagttagtaagcagcccagccagatcctgtgttaacttgttcatccgcttcctataagaaaacatccattca

SEQ ID NO: 935819 - DNA, 120 bp, Artificial Sequence
  ENSG00000285106_63 (sequence is synthesized)
aggcacatggggcaacaaagaaggacttagagctgtgtggcccctcgtcagggcagtaccagttgcacccatagtccggcctgaatactcagcttaggactattgtgtccaatgtcccaa

SEQ ID NO: 935820 - DNA, 120 bp, Artificial Sequence
  ENSG00000285106_64 (sequence is synthesized)
acattttgaagctacatcttaaagaagtgtcctgctcagatgcagttctccttgtgaaatccgcaggccccaaggaaagtgactttaatccagtttgctcatgcaagaacagactggcat

SEQ ID NO: 935821 - DNA, 120 bp, Artificial Sequence
  ENSG00000285106_65 (sequence is synthesized)
ttcacatccaggaaaacaatggatttgtactgttcagcttttgccatgcaaggagttcctggtgtggtttattaatttacatctcaggctccagcttcactatcaatcagatttggaaga

SEQ ID NO: 935822 - DNA, 120 bp, Artificial Sequence
  ENSG00000285106_66 (sequence is synthesized)
aaaaagttacaaagaaaggcagcttgctgagaaacagcggaagcatgacggtacagactgggttttgaaatggagacacattctcatggcttgtgggctgagagacactgagaaaggatt

SEQ ID NO: 935823 - DNA, 120 bp, Artificial Sequence
  ENSG00000285106_67 (sequence is synthesized)
ttgttcttgaaagatgattgttttaatgctggagatggagagttttgacaattttaagtgcatgttctgtgtgtaagaaagagtcattacgttttttttttctttcagatgttgccatgc

SEQ ID NO: 935824 - DNA, 120 bp, Artificial Sequence
  ENSG00000285106_68 (sequence is synthesized)
cttaaaattgctgatgattaaaatagaacatcctgagttacagaaattcagccctagtgtatcctggcctaaaaatacagaacaatcaagttgattgttggaaatgagaggctaggcagg

SEQ ID NO: 935825 - DNA, 120 bp, Artificial Sequence
  ENSG00000285106_69 (sequence is synthesized)
gttggaaacatgctaatgtttactgagtgaaatctttccttctcagtagagttgcccttgcagctgaaagtcactgaaagactcaacaaaataagcagatcccacttgtctcactctgtt

SEQ ID NO: 935826 - DNA, 120 bp, Artificial Sequence
  ENSG00000285106_70 (sequence is synthesized)
ctcctatgcatgccctggaaagagaatgaatgagccctttttaatttatcaactggttttcttccatctctttactagtgagccatgggggttttttgccgttaactgggtagccagtct

SEQ ID NO: 935827 - DNA, 120 bp, Artificial Sequence
  ENSG00000285106_71 (sequence is synthesized)
caaatgattcaaaaacaagtaattttaagatacctttaagtgtacttacaaaacataccttttgggcatgtgtacaaaatataatttttagagtaacaaatgtacaaaaataacaggtag

SEQ ID NO: 935828 - DNA, 120 bp, Artificial Sequence
  ENSG00000285106_72 (sequence is synthesized)
ggcataacaaagtcggagggtagaagataattttatcaaatataattctgtgtttcattcattaggcattaattactgacaagtttatttttagctttttattgaaatataatacgcaca

SEQ ID NO: 935829 - DNA, 120 bp, Artificial Sequence
  ENSG00000285106_73 (sequence is synthesized)
tataaagtgtagagctcattgaattttcacaaaatgaatacgcgtacttgaaaaaaccgcagagatcaagaaacaaaaaacatgattcacatctgaggaagataaatatatttttgaaaa

SEQ ID NO: 935830 - DNA, 120 bp, Artificial Sequence
  ENSG00000285106_74 (sequence is synthesized)
ttaaaagttccactagaacaaaattaaaaaaaaaaataccccaccaaaactgtaacattaatgaaactgcaattctcttaagtcaacagcagagggtgcccttgaactgtgaaatatagt

SEQ ID NO: 935831 - DNA, 120 bp, Artificial Sequence
  ENSG00000285106_75 (sequence is synthesized)
ctgccaactaaaatctttacccttgccagatattgctggtccaggaaaaagatgggacatttccagatgaatgggaaagggtagacaacatccaaatgaagtctctgtataaagggaatg

SEQ ID NO: 935832 - DNA, 120 bp, Artificial Sequence
  ENSG00000285106_76 (sequence is synthesized)
taaaataaaaatcaaacacctcaactaataaaaattccctttcacaaaatgaagaagaaactgatggacgctaccaacctgaatgtaacattttttaccatttgcagatctgaaagaaac

SEQ ID NO: 935833 - DNA, 120 bp, Artificial Sequence
  ENSG00000285106_77 (sequence is synthesized)
acctagaatgatacattaaaaaacccagaacaggaacagacaaaacaaaacaaaaaaaaaacagcaaacaaaaccccaggaagaaataaaatgagagtcttgcagtaatagtggaagagc

SEQ ID NO: 935834 - DNA, 120 bp, Artificial Sequence
  ENSG00000285106_78 (sequence is synthesized)
tgctttgggccaattctcttgcaaataatgaccatcattccattccaaatataaaaacgaactacttgatggccctggagaacaaccaaaaggaagcagaaagggagagaggattggcac

SEQ ID NO: 935835 - DNA, 120 bp, Artificial Sequence
  ENSG00000285106_79 (sequence is synthesized)
ttggcagaagataagaatagcactgtgtaaactttccatgttaatggcttttagcctgagcgcaggcagcccacagttctcctcagagagtttactaaatcttgggtagaaacccacagc

SEQ ID NO: 935836 - DNA, 120 bp, Artificial Sequence
  ENSG00000285106_80 (sequence is synthesized)
cttagaagcttaaggaatcaaaagacagggtttgaggcaaccatgatggatataaagatggaggcagttacgtgttgaatggtgtccccccaacattcatatgctgaagtcccaacctgc

SEQ ID NO: 935837 - DNA, 120 bp, Artificial Sequence
  ENSG00000285106_81 (sequence is synthesized)
agcacctcaggatgtgaccttacttggaaataaggtcatgcagatatagttagttgagacgagaccatactgggctagagtggtccctaatccaatatgactaatgtcctttggggaaac

SEQ ID NO: 935838 - DNA, 120 bp, Artificial Sequence
  ENSG00000285106_82 (sequence is synthesized)
ctggacacagacatgcacacagtgagaatgacatgtgaagactggaaggtgactgcaagaacacatgttcaaatgtttctaaacatcaaaacaaaatgtttaaagagcaacgaaaacaga

SEQ ID NO: 935839 - DNA, 120 bp, Artificial Sequence
  ENSG00000285106_83 (sequence is synthesized)
cctcctgagtagctgggactacaggaggaaaatggaagaaacggagatacttttagtgaagcagaataaaccactgaacagcgttggctgaaaaacataagggaaaaatgaggaagctgt

SEQ ID NO: 935840 - DNA, 120 bp, Artificial Sequence
  ENSG00000285106_84 (sequence is synthesized)
tagtcaactgttttgaagccaccctgttttgaagaggcgttttccactcaggtggccttgcaccgaatggccaaccctgcccactgtacggaaacaatagatgctgccttagaagggagc

SEQ ID NO: 935841 - DNA, 79 bp, Artificial Sequence
  ENSG00000285106_85 (sequence is synthesized)
gggtctcacctcactcccccagcctcgacttcccaggctcaggtgatcctctcaccacagcctcccaagtgggtgggac

SEQ ID NO: 935842 - DNA, 86 bp, Artificial Sequence
  ENSG00000285106_86 (sequence is synthesized)
ggtgtgatcacagctcactccagcctcgacttcccaggctcaggtgatcctctcaccacagcctcccaagtggggttttttgtatt

SEQ ID NO: 935843 - DNA, 120 bp, Artificial Sequence
  ENSG00000285106_87 (sequence is synthesized)
catcagaaggaagaacagctttccttggtcagtgaggatgggaagaagctctagtgtttcctctcctccattccttctgggtataatggccacccattgcagtgggctttgatttttttc

SEQ ID NO: 935844 - DNA, 120 bp, Artificial Sequence
  ENSG00000285106_88 (sequence is synthesized)
caagaatggagcttggaaccccatagaaattgtgttttgttaataagctgacggaaggatttttggcatcgattttaaattcccatagtctgcttctagcgaagctccacacctctcatt

SEQ ID NO: 935845 - DNA, 120 bp, Artificial Sequence
  ENSG00000285106_89 (sequence is synthesized)
ctttctacagccagagtggagacgaagggcaggaggcacacagcccttcctcctggagatgaaaggggtctgtaggtggatgaggaccttgttcaccaaaagtcacaggaggaagtcaaa

SEQ ID NO: 935846 - DNA, 120 bp, Artificial Sequence
  ENSG00000285106_90 (sequence is synthesized)
gaggaggaggatagaaacatagtggtgcttctatcacctataaattctgcattcatgaaaaaaaaagtccacaaaattatggccctgaaccaatctgtatcaaccctgaacatgctggat

SEQ ID NO: 935847 - DNA, 120 bp, Artificial Sequence
  ENSG00000285106_91 (sequence is synthesized)
gccacccactgtgggttgggcagaagatggtgcaggcctgacagaagttggtaaccaatactgtgccagaggcttggtgtggcaggaggtgacaggacaaaggtaccagaggatgccagc

SEQ ID NO: 935848 - DNA, 120 bp, Artificial Sequence
  ENSG00000285106_92 (sequence is synthesized)
tgggtgtcagccttcttagctgtcagaactggtcttggaaaaaaggacagccgttgggtatgcttttgtaagaggcatttttgctcttgcagatagctgcctctctcttccttcctgtga

SEQ ID NO: 935849 - DNA, 120 bp, Artificial Sequence
  ENSG00000285106_93 (sequence is synthesized)
ctgaacaggccagagaggaaggtcaaaggcaggcaagagaacaaggacaaaggcacaaagtgtggattgtacatggactcctgttctaatccagctcacttaccagctttctatgtcaaa

SEQ ID NO: 935850 - DNA, 120 bp, Artificial Sequence
  ENSG00000285106_94 (sequence is synthesized)
aaacaaaaaattagaaacttggatgggaaagaggctggcacaaatgtaaattatgaactgagttccaaaggaaaagaggcaacagataagagattcttgtgggtaccttacctgcgaatt

SEQ ID NO: 935851 - DNA, 120 bp, Artificial Sequence
  ENSG00000285106_95 (sequence is synthesized)
ctcgaaatgtctgggaagtgaaagtgacagagaaaaagaggacttgtggacatatgtgttggccttttttatctgaaggtgctatggctggtgaagatgggctgcgttctgggtccctgg

SEQ ID NO: 935852 - DNA, 120 bp, Artificial Sequence
  ENSG00000285106_96 (sequence is synthesized)
gagagctgatcctgagctcatgtctctgtcccagcagcaggagcccctcagtgctatagaatgtgaggtctgctgtgagtccaaaagaccagacatgtgacacattcctctgctttctgg

SEQ ID NO: 935853 - DNA, 120 bp, Artificial Sequence
  ENSG00000285106_97 (sequence is synthesized)
agcatagtatcagcccttagaagcagctgttcacctctcctttagtagctcagcaagaattcagttcagtaaaaatttatttagcacctaccctgctccaggtactctctaggcactgag

SEQ ID NO: 935854 - DNA, 120 bp, Artificial Sequence
  ENSG00000285106_98 (sequence is synthesized)
aggggttttcctgtactgtgcccagaactctgctcctcaggcctttctcagctcaggatactggcttaagcagctaaactgatcgcaagtgccacccttccatgctgctaaaaacccatg

SEQ ID NO: 935855 - DNA, 120 bp, Artificial Sequence
  ENSG00000285106_99 (sequence is synthesized)
ctgttctcctagacaaagttaatgtctggctcaacataccacaccttctctcttaagtccttaagttctgagaaagggatcccaggaggtatgcaggactcttgatgttgaatgagaggc

SEQ ID NO: 935856 - DNA, 120 bp, Artificial Sequence
  ENSG00000285106_100 (sequence is synthesized)
aagaccctccactcctgttgctcgaccctctcccaggtcccctagaggaaaggctcatcctgtggcttctccctcctaaaccaatccctgtgcatccctttctttgtttgtgccacgtcc

SEQ ID NO: 935857 - DNA, 120 bp, Artificial Sequence
  ENSG00000285103_0 (sequence is synthesized)
tgggacatgaccagtctaagggggcttccagccttgcagaaaagacactgggccagggcagtgaagaaggtgtcagatcagaaaggatgatctctgggtccacaacggccacttccaagg

SEQ ID NO: 935858 - DNA, 120 bp, Artificial Sequence
  ENSG00000285103_1 (sequence is synthesized)
cacctagagagggggaaacagtttgccttccccaggattttctgattgttgaaaaataccatgaactgcctgacacagagcggagcataaatcattggaaaatactcagattctagtgga

SEQ ID NO: 935859 - DNA, 120 bp, Artificial Sequence
  ENSG00000285103_2 (sequence is synthesized)
tttactagaacacactgggagtcatggatgaacctggattttaaagctcaacccacagcccgccactctctacttgtgtggtcttggtctatctacaaccttaaagcctcagtattctcc

SEQ ID NO: 935860 - DNA, 120 bp, Artificial Sequence
  ENSG00000285103_3 (sequence is synthesized)
tccgtaaattggcggggagcaatatcacccttgcagggtgatggttacggcacaatgaagatcttgaagggcacacagagagagggaaggcaacagaggcaggctttgttggacaccaaa

SEQ ID NO: 935861 - DNA, 120 bp, Artificial Sequence
  ENSG00000285103_4 (sequence is synthesized)
tgaatgtactgagccattgttccaagacagctctgtattttaaagctcagcatgggccaaattcaacctctggatgaaatatgtgattcttgtggcattgtcagaagtggcaaatggatt

SEQ ID NO: 935862 - DNA, 120 bp, Artificial Sequence
  ENSG00000285103_5 (sequence is synthesized)
ctctcctcctaaatgtggtgtgactctcccatcaaccacaggtagcaagtaacggcacacttgccacgacctctactgtctgctttctgtatcactgcctcaatcatgcccctcctcttg

SEQ ID NO: 935863 - DNA, 120 bp, Artificial Sequence
  ENSG00000285103_6 (sequence is synthesized)
ccttgtcttggtgaagagtgcctggccagcagccctgcctacctctctcttctggccctagcgccttgctccagcccatgtggttccagcaagctccacttcaaggggcccaccctccag

SEQ ID NO: 935864 - DNA, 120 bp, Artificial Sequence
  ENSG00000285103_7 (sequence is synthesized)
ggcatgttccaagcatcaccaaccagagggcttcttctctgagaatttatacatggaccttgaggtcagcaagcaaggatgatataagccagagttctctgcagccatccccttttcacc

SEQ ID NO: 935865 - DNA, 120 bp, Artificial Sequence
  ENSG00000285103_8 (sequence is synthesized)
tctctcagttacggatgaacttatctgtaaaatgggaaaaagaaacgacaagagaagcacagctgagagaaacaccaaaagaaagagttgaagacattgtttgaattcctgcatccagta

SEQ ID NO: 935866 - DNA, 120 bp, Artificial Sequence
  ENSG00000285103_9 (sequence is synthesized)
gtgcccaaagccagtgccaaccctggaattcctagctacaagagccaatgaagtcccttttgctttagtttgaggtgggctcctgtcacttgccacagaaactaggagaaagcacagtgt

SEQ ID NO: 935867 - DNA, 120 bp, Artificial Sequence
  ENSG00000285103_10 (sequence is synthesized)
ctgtgctgcagtgagagagggctaaagtcctcagggacaaccaataaagcacgagagccaatgaataaatacttgaggtgagcaattacaggaggcattctttacatttcttagagagcc

SEQ ID NO: 935868 - DNA, 120 bp, Artificial Sequence
  ENSG00000285103_11 (sequence is synthesized)
aagcaaaatttagccccagttgcctgaagtggccatatatattattattaataatgaatatagtcaataacctgtaggcagctcagaaaaaatctcagtcattaagtgttaaagtacatt

SEQ ID NO: 935869 - DNA, 120 bp, Artificial Sequence
  ENSG00000285103_12 (sequence is synthesized)
tgagaccatttgcctcagcatctagtgcagctccggatacacacaacgtggagggcagggaactaacatttggtgagcacctactatgggttaggacctgtgctggacattttcacatac

SEQ ID NO: 935870 - DNA, 120 bp, Artificial Sequence
  ENSG00000285103_13 (sequence is synthesized)
attagttcatctattcctcccgaagatcttggatggtgggtattattaccttcattttggagattaggaaacttgcctaaggttcatacagagcttcttcggtgctctcaatcatgactg

SEQ ID NO: 935871 - DNA, 120 bp, Artificial Sequence
  ENSG00000285103_14 (sequence is synthesized)
ttcccttgcatccatcccctctgtaagaactgagattagcgtttagggagttatagctggtgcagtagacacctcagatgccctgtgtcacatctcttgacacatctctgatttcagtgc

SEQ ID NO: 935872 - DNA, 120 bp, Artificial Sequence
  ENSG00000285103_15 (sequence is synthesized)
acttatgatgtggcctctttcccagatctcaagcacgcagcagtcattatttcactatctgccccgggacggtttccacagatgcaggagcttgctcagcctaggagaaagcacagtgtc

SEQ ID NO: 935873 - DNA, 120 bp, Artificial Sequence
  ENSG00000285103_16 (sequence is synthesized)
tgtgctgcagcgagggagggctaaagttctcatggacaaccaatggagcatgagagccaatgaataaatacttgaggtgagcaattacgggaggcattctttacatttcttagagagcca

SEQ ID NO: 935874 - DNA, 120 bp, Artificial Sequence
  ENSG00000285103_17 (sequence is synthesized)
agcaaaatttagccccagttgcatgaaacggccaattgccaaattcatccttatattgacttttcctccttcgtgttgcaggctgactgatctctcattcccacttcctggaatcacctc

SEQ ID NO: 935875 - DNA, 120 bp, Artificial Sequence
  ENSG00000285103_18 (sequence is synthesized)
ccaaacaaactaactgcatactagtccttgtctcaggctctgatagtgtgggattccaaactggaaatgaagaccatcttgtgtactgactagtgaaggaaaacgttattgttgtgaagt

SEQ ID NO: 935876 - DNA, 120 bp, Artificial Sequence
  ENSG00000285103_19 (sequence is synthesized)
ctgtaataaaataagctcagcttaaaccagcaagagcaattccaagctaggaactatattaagaaatagtctcttacatagaaccccctttgagaaaatatactcaaagtctataactta

SEQ ID NO: 935877 - DNA, 120 bp, Artificial Sequence
  ENSG00000285103_20 (sequence is synthesized)
aacatgcctggaaggaaatacatcaaaatattatttattataattcaatatatcatattattatattaattattcttctcttctgagtaaattttcaatggacattccccagatgttcct

SEQ ID NO: 935878 - DNA, 120 bp, Artificial Sequence
  ENSG00000285103_21 (sequence is synthesized)
cacttctcttatctatcagtcttgatctgccccctggggaatcacaattcttgtcactgcagttaataaccttttttttttttttctgtgactcaaattaggtagaagatacttagccat

SEQ ID NO: 935879 - DNA, 120 bp, Artificial Sequence
  ENSG00000285103_22 (sequence is synthesized)
cattctccacttggaaggcagcacagcatgttagttcagagtatggtgtgggcaacaaaagaaggtcaaattctagtcatctgggtcacttggtctgtcacccaggttttgctgtggaaa

SEQ ID NO: 935880 - DNA, 120 bp, Artificial Sequence
  ENSG00000285103_23 (sequence is synthesized)
caaacaactgcttgtgatcattaatttttaaatatggactaggctaagggataccgagatagctggtaaaacattatttctggatgtgtctgtgaagatgtttctggaagaaattagcag

SEQ ID NO: 935881 - DNA, 120 bp, Artificial Sequence
  ENSG00000285103_24 (sequence is synthesized)
actgagtatagaagatccacccttaccaatgtgggagggcatcatccaatccattgagggcccagagaggacaaaaaggcagaagaaaagcgaatttgctctctcttctggtgctgaaac

SEQ ID NO: 935882 - DNA, 120 bp, Artificial Sequence
  ENSG00000285103_25 (sequence is synthesized)
atccaccttctggctggcctttgaacttcaggacttatcctaccctagcacacccaccctcccaattcccccatcccatttctcaggccttcaggcttgggctgaattataccactggct

SEQ ID NO: 935883 - DNA, 120 bp, Artificial Sequence
  ENSG00000285103_26 (sequence is synthesized)
cctctagttctccagctcaaaaacagcagactgggggactactcagcttccataatcatgtaagccaattcccataatgaataccactcccccactctgtttctcttgagaaccatgatt

SEQ ID NO: 935884 - DNA, 120 bp, Artificial Sequence
  ENSG00000285103_27 (sequence is synthesized)
aatgattaatataactccaaaacttagtggcttaaaactgcaaagattaatgcatggcttatgcagcatgcacatcttgatgggggtgggaaagggggctctgcccatagctcccactat

SEQ ID NO: 935885 - DNA, 120 bp, Artificial Sequence
  ENSG00000285103_28 (sequence is synthesized)
aggacctagcctgcagagcgccactatctggaatgttagtggccactgtggcagagtgaaaaggaggcaaagctcatgcaaagccttccatctgaaagtgataaacgctgcttgttcatg

SEQ ID NO: 935886 - DNA, 120 bp, Artificial Sequence
  ENSG00000285103_29 (sequence is synthesized)
tttcattggccaaagagagtcatgtggtcatgcacaagtttcactgaaagggaaagggcaatctgccttgcagataagaaaggagaaaaaaagggggagattttgaaaatgattgtccga

SEQ ID NO: 935887 - DNA, 120 bp, Artificial Sequence
  ENSG00000285103_30 (sequence is synthesized)
tttggacaatcatttaacctaagcttcagtgttctcatcatgtactgaggggatatccactttacaaggttattatgagggttaaatgtgaaactgtaaagtacctggcacacagccatt

SEQ ID NO: 935888 - DNA, 120 bp, Artificial Sequence
  ENSG00000285103_31 (sequence is synthesized)
actcaataaatgctgctattttgacagtgatcctttgtttacctgaaatataatattaagatttactccaatctttcctacatctctgggagtaaaaaactcttgaatctttttctggag

SEQ ID NO: 935889 - DNA, 120 bp, Artificial Sequence
  ENSG00000285103_32 (sequence is synthesized)
gttgcattttctagtctttaaaaatgagtccagtgccttttccctgaatttctccaaattctgaccattctaagatatgggttctagctcagtgctcctcacacagaaaggttctagtaa

SEQ ID NO: 935890 - DNA, 120 bp, Artificial Sequence
  ENSG00000285103_33 (sequence is synthesized)
ggaatgagaaaatactttctgctttaaagaagagctacgcaaatattaaatgagaataattatatctattatttatggcgaatattattctagtactcagaaaaactcagcataagttca

SEQ ID NO: 935891 - DNA, 120 bp, Artificial Sequence
  ENSG00000285103_34 (sequence is synthesized)
ttagaacagtatgggccacattagaaagaacatattatcattatgtttgaaaagctaggactgggtacaaagttactacgatcgtatgggcttagttggccaagtatgttattacagttt

SEQ ID NO: 935892 - DNA, 120 bp, Artificial Sequence
  ENSG00000285103_35 (sequence is synthesized)
tctcgctttccctagggaaggcaggggcctggtagggtctgagcaagagcctgaggcatagactgtgcccaccctccccttctccctccactcatgccagtttttggtttagaaagccag

SEQ ID NO: 935893 - DNA, 120 bp, Artificial Sequence
  ENSG00000285103_36 (sequence is synthesized)
cattttgaatatcaagtctcaagactttctcattgtcctcagggtgggttgctgccccccacaccctccttgttcccatatgaaggtcattgacccctagttttgtaaggtgtttattct

SEQ ID NO: 935894 - DNA, 120 bp, Artificial Sequence
  ENSG00000285103_37 (sequence is synthesized)
tgcagaatttggaccagggactttctgttcagcaaatgattcagtgcatgtagaccctgaggttgtttacattttcaggaactgctattgcgaaactaaaaaggtttattttacgtagtg

SEQ ID NO: 935895 - DNA, 120 bp, Artificial Sequence
  ENSG00000285103_38 (sequence is synthesized)
gggttgcttttgccagatgaattcatttgctcaagttatttttaaaatgtgctttcccttagctccttagagaagctctggtctcttgcctgtgtgggtctaggccagaaaaaaaaaaaa

SEQ ID NO: 935896 - DNA, 120 bp, Artificial Sequence
  ENSG00000285103_39 (sequence is synthesized)
tgttgaggctattaatggaagccagagaaaatgtctggccaaggtggatcaaagaaggttctcagttttgaccccaaattttaactttctgaatgccgggctagcatactagctggtcct

SEQ ID NO: 935897 - DNA, 120 bp, Artificial Sequence
  ENSG00000285103_40 (sequence is synthesized)
ggctccagcagcttaaatgactcatgtgcctagaaccaggaagaccatgcatatgagtttcaaactgctcctacaggtatgtgtggaagggggacccctatgacagaatattcatccaga

SEQ ID NO: 935898 - DNA, 120 bp, Artificial Sequence
  ENSG00000285103_41 (sequence is synthesized)
agaaacttgccctgctgccaattggaagtgccacagtccagcagcagtgagactgctggaagcagtcagattgcagagcacaaactctctaactcatcggggtcaagtggcctgaaatga

SEQ ID NO: 935899 - DNA, 120 bp, Artificial Sequence
  ENSG00000285103_42 (sequence is synthesized)
ttcatcaggctgctttgcaaacattttatttaacaattgatatttagaaataattttttatgacagtttcttatcttttgggggaatcagagacccctttgagaatctgaggaaggctat

SEQ ID NO: 935900 - DNA, 120 bp, Artificial Sequence
  ENSG00000285103_43 (sequence is synthesized)
ggagaaatatctgatgaagcctgtgggaaaaaaaactgccatccagaaaaatgtatatatgcaagctgtcccttaaaatgttagtggtatcattgggatgacatccaaaaattgtcaggg

SEQ ID NO: 935901 - DNA, 120 bp, Artificial Sequence
  ENSG00000285103_44 (sequence is synthesized)
aagtccgtaaatccccttgcttcagaatttggggaaactttaaacctcagattaatggtatgtagatactattcattcattcagagcttactgacttcctgtgtcatggcaagcactatg

SEQ ID NO: 935902 - DNA, 120 bp, Artificial Sequence
  ENSG00000285103_45 (sequence is synthesized)
ttggaagctggaaatacaatgatgtataagacaaggacacagccttgtggagctcacagtctaatgggagacaaaacaaacccataataatgatgcatgataatgagttaagtgctatgc

SEQ ID NO: 935903 - DNA, 120 bp, Artificial Sequence
  ENSG00000285103_46 (sequence is synthesized)
tagaactgtaagtgtagaagcaaacaagagccccaagtagggtaatcaattcaatatatatttaataaatgcattacgtgccaggcagttgggaataagctggtgcatagacaagatccc

SEQ ID NO: 935904 - DNA, 120 bp, Artificial Sequence
  ENSG00000285103_47 (sequence is synthesized)
tatcccatggagccttaagtctggaatactctcaactaaaagttagaggaggggcctggaagaacatgatgcccacctaaggtgaatcctaagtaaagttcacccaggtgaagtgggtaa

SEQ ID NO: 935905 - DNA, 120 bp, Artificial Sequence
  ENSG00000285103_48 (sequence is synthesized)
gcgtattgcaggtagtgggagcaacacgcacacaggcccagtaacagcaaggtgagtcaggggaaactacaaatagttcatcagggctctccatgaaggcaggagcagtgagagacaagg

SEQ ID NO: 935906 - DNA, 120 bp, Artificial Sequence
  ENSG00000285103_49 (sequence is synthesized)
tgagagacaagggtggagaggtgtgctgggggcagatccccaaggctcctgtgcttcaccatggattgtgggttgaaggttgtcaatgagggctttttttttttgagacggagtctcact

SEQ ID NO: 935907 - DNA, 120 bp, Artificial Sequence
  ENSG00000285103_50 (sequence is synthesized)
accacgtccggcctcaatgagggctttttaaggcaagtcaggagtttcctattagaaagatcactctaccataaatggagaaaattgggcaaaggggaggggatggctagtgggtgaaat

SEQ ID NO: 935908 - DNA, 120 bp, Artificial Sequence
  ENSG00000285103_51 (sequence is synthesized)
catggagactagaaggaaggaagctgttgaattaatctagacaagaaatgataaggtcctaatagtggcagtggagatggagtaaagtggacgatgggaaaatgggatgaggcctctgga

SEQ ID NO: 935909 - DNA, 120 bp, Artificial Sequence
  ENSG00000285103_52 (sequence is synthesized)
gagcagctcacaggcaatttttttttcattccctacaatgacatttgcctacggcaacacactctgccacatgcaatgaggtagtgactggctcaagctaaggaaataatcttgttactg

SEQ ID NO: 935910 - DNA, 120 bp, Artificial Sequence
  ENSG00000285103_53 (sequence is synthesized)
acgtggtatcaccgggaatcatggctgtataactgtagtttcataatcaaattttggaactctacatttaattgcttaatggtgatgatgattatgacaggaataatactgataatagct

SEQ ID NO: 935911 - DNA, 120 bp, Artificial Sequence
  ENSG00000285103_54 (sequence is synthesized)
gcaacccaattttattggacacttattctgtgctagttactgttccaagcattctgaatttactaacccacttaatcttcaagtgactctatcgggtaggttctattcttactcttaaag

SEQ ID NO: 935912 - DNA, 120 bp, Artificial Sequence
  ENSG00000285103_55 (sequence is synthesized)
aatagatgaggacactgaggcagcacagacaggtttaataccttgtctaaggtcacacagctaggaagtgagaaaataaggatctgagccttggaaatctggttctaggacgcaaacttc

SEQ ID NO: 935913 - DNA, 120 bp, Artificial Sequence
  ENSG00000285103_56 (sequence is synthesized)
caaaaattctcctatcaatttacaatgacaaacataaattatggtctttctccataaaactcaatttgagcactaaaactgactttttaccatttgttatgaacattctgaacaatcaca

SEQ ID NO: 935914 - DNA, 120 bp, Artificial Sequence
  ENSG00000285103_57 (sequence is synthesized)
ataaaaagtagtgcggagacactattcaagtctctaaaaacatcttaggagtggtacatgaagcaaaatgctgggtgtgagtgtttttgcagattcaggctccaaagaacaaaaaagcag

SEQ ID NO: 935915 - DNA, 120 bp, Artificial Sequence
  ENSG00000285103_58 (sequence is synthesized)
aaaaaacaaacaatggtgtttttaaacaatgaatgttgttttcctttagccataagggaattttaaaacttgacaaactcattcagctttcaaagcattccacattccccacccacaagc

SEQ ID NO: 935916 - DNA, 120 bp, Artificial Sequence
  ENSG00000285103_59 (sequence is synthesized)
aaatgccagaaggtgccagtttgagccaactcagctcaggaatgactttctaaatactggatcagatttcttgaatgtccgcgctccacagatggatacttactattgtcctaattggtc

SEQ ID NO: 935917 - DNA, 120 bp, Artificial Sequence
  ENSG00000285103_60 (sequence is synthesized)
tgatgaaaagtacttagcaatttatcaagcaattaatttaacaaaaacatttcagcaagagatgagatggtgtggcacaaatgcagaaacagaaatttgaaaagattcaaatgtattact

SEQ ID NO: 935918 - DNA, 120 bp, Artificial Sequence
  ENSG00000285103_61 (sequence is synthesized)
tcaaaaagattgaaaaattgctgcctaaaatctttgaaactttagagctaggttgtgcataggcttaatttttaatgaagaatcttctgggaaaataagtttttgattatataaagaaag

SEQ ID NO: 935919 - DNA, 120 bp, Artificial Sequence
  ENSG00000285103_62 (sequence is synthesized)
caatttccttgatttgcaggaaataattctttttggggaaaaacaaataaattaatatttaatatactcattacatccatccagctaacatttactggaagcatgctgtgtgcctggcac

SEQ ID NO: 935920 - DNA, 120 bp, Artificial Sequence
  ENSG00000285103_63 (sequence is synthesized)
catgctaggcactgagacacaaaaatgaaaaagacaagaatcttgttctttagcctaggtggggagatagataagcaaaggaatagtgtaataaatgcaataaaagaaatacgtactagc

SEQ ID NO: 935921 - DNA, 120 bp, Artificial Sequence
  ENSG00000285103_64 (sequence is synthesized)
tagacctgtgggaagaaaggttagaaagatgaacagaaactgtgctagaattttggacctaattctgtaagtgttggagagccattaagcagaagtgatcgttagatttaattttagaag

SEQ ID NO: 935922 - DNA, 120 bp, Artificial Sequence
  ENSG00000285103_65 (sequence is synthesized)
gatcatgctgttatcaatgtgaagaatgggctgtagtggggaaacgccaaaggcagattctgttccactcttcataaaaatcgtaccacagcactctgataccctttttgctctctaatc

SEQ ID NO: 935923 - DNA, 120 bp, Artificial Sequence
  ENSG00000285103_66 (sequence is synthesized)
catttctcttttccccccaacacagataatttagaaattatttagtcttttaaaagcgctggtgtccaagtttttgaggttttcccagatatttgttattggttaataatttaattccat

SEQ ID NO: 935924 - DNA, 120 bp, Artificial Sequence
  ENSG00000285103_67 (sequence is synthesized)
tgtggtcagagaacatattttctatgacttgaatccttttaaatttatcaagatttgtttcatggctcaaaatacggtctatcttggtacatgtttcatgtactcttggaaagaatgtgt

SEQ ID NO: 935925 - DNA, 120 bp, Artificial Sequence
  ENSG00000285103_68 (sequence is synthesized)
gatttattgttgttggggactgctgtgctctacaaatgtcatttaagtcaaattgtttgatagtcttgttctaatcttctatatccttactgattttgtgtattcttgttctactaaaca

SEQ ID NO: 935926 - DNA, 120 bp, Artificial Sequence
  ENSG00000285103_69 (sequence is synthesized)
gactcctccctcaggatcaggacgcccaagcgttgtcccccagcccaggcgcacttttgtaaaagtttgtcttcccgccacccacagcccaacacgcaccctgcaggcgtccgcggctgg

SEQ ID NO: 935927 - DNA, 120 bp, Artificial Sequence
  ENSG00000285103_70 (sequence is synthesized)
ggatgggctcggagtcttgcaccccgaaagaaggacgatcttattgatttatatcttttcaaatcaaggacaaatcaagatcccggggtggaaagtgggcgacccttgttcctgccggga

SEQ ID NO: 935928 - DNA, 120 bp, Artificial Sequence
  ENSG00000285103_71 (sequence is synthesized)
agtgcacacgaggagccggccagaaacccaggcgccggcaggggtctgaagaggactccagccccggaagcccgtggccggcgggcagaagaccggtccgccgcctcccgcaccttcttg

SEQ ID NO: 935929 - DNA, 120 bp, Artificial Sequence
  ENSG00000285103_72 (sequence is synthesized)
cacccgcgcccaggtgcgccccaaacctcgccgcccgcccgggcgagatcgggagcgagcagccaccgggctgcgccgcctcccctagcttggagcgggttcttactcaccgtggggttt

SEQ ID NO: 935930 - DNA, 120 bp, Artificial Sequence
  ENSG00000285103_73 (sequence is synthesized)
tacctccagcccagggcccggtcggctcccttcgccgggtcagctgcagccagcgcgaaagaaaatggtgagctcggggcaggtggggcgtcgcttgccaatccacgcaagggactctgc

SEQ ID NO: 935931 - DNA, 120 bp, Artificial Sequence
  ENSG00000285103_74 (sequence is synthesized)
aagggactctgccgccggtgcgcgaggtcccggcgagccaaccggcggacgggcgagcgcctggctccagctgcagccgccgtcgctccggagcagccccctcatgcacccagcgcgccg

SEQ ID NO: 935932 - DNA, 120 bp, Artificial Sequence
  ENSG00000285103_75 (sequence is synthesized)
tttgaaacgtttttatagtttatagtaacagaaatcaaatatgagcttcctgccttctggagaaaaagaattggatctttcacatttttctattacccatatgatcacatcttaatgcat

SEQ ID NO: 935933 - DNA, 120 bp, Artificial Sequence
  ENSG00000285103_76 (sequence is synthesized)
attgattgaactgtaccaaatgacgaagtactgcattttaccattcttactacacacttcaaagaggtgtggaaatatattaagtagaaattaggatatatagagaaaacatccctcctc

SEQ ID NO: 935934 - DNA, 120 bp, Artificial Sequence
  ENSG00000285103_77 (sequence is synthesized)
caaaagaggtttctgcaactaactacgaagtgagaacttctaaaatcacttacatcttttgcaatatcatctcagatattgtaagaaacatttaataaatagtcatgacttaatgatatc

SEQ ID NO: 935935 - DNA, 120 bp, Artificial Sequence
  ENSG00000285100_0 (sequence is synthesized)
ggcctgtggcaggagagcatgttggaggcagaaaaaagccagagagtgatggggacagggacacaagaggaggtgggaggcatgggcaaggctccgtagaccagagagtttgaattttct

SEQ ID NO: 935936 - DNA, 120 bp, Artificial Sequence
  ENSG00000285100_1 (sequence is synthesized)
ccttagagccatgaaaacccatgggaaggaattcaggagggagtaatattatcagattaggtttttcttgaccacccccccgccggctgactcccttcaaaaggttcctccagtgcctgg

SEQ ID NO: 935937 - DNA, 120 bp, Artificial Sequence
  ENSG00000285100_2 (sequence is synthesized)
gtggaggagaccgtgggagggggcaggggctacagggagacccaccagcaagggggctgacatggggtgctggagaagagttgggctccaagggtggtggaagccaaaagccagggctct

SEQ ID NO: 935938 - DNA, 120 bp, Artificial Sequence
  ENSG00000285100_3 (sequence is synthesized)
ggggggacttggggctggatactccaagtcaggggacatagagggctgtgtagctccccccagcacatccctgagcctctggagaagtccttcatctctggagtttctctttcccttcca

SEQ ID NO: 935939 - DNA, 120 bp, Artificial Sequence
  ENSG00000285100_4 (sequence is synthesized)
gtccagccctttcttgttattgtaggacagactccatcgatgactcattcaggacttgggtttcttgttccagcagtctcccttcccctgattactttgggctcctctgggcctgcaggc

SEQ ID NO: 935940 - DNA, 120 bp, Artificial Sequence
  ENSG00000285100_5 (sequence is synthesized)
ctcgcccctcatcatctggggaggcagccaagaaccttgctggctgggtgagctctacggaggaaggagccgggaccctcctagcttcaggccccacccatgctttcctgcctctggttt

SEQ ID NO: 935941 - DNA, 120 bp, Artificial Sequence
  ENSG00000285100_6 (sequence is synthesized)
tgctctcctctttcccccgccaggggacccctgttctgcaagtcctgctcctccttccaggaccacctcccctgggaagccctgctaggtggccccgcacaatcttctccaccctgctca

SEQ ID NO: 935942 - DNA, 120 bp, Artificial Sequence
  ENSG00000285100_7 (sequence is synthesized)
gtggcacctgtctttttattcaacccccaggagcccaccttctggtgagtgaggcaggggtgtattgatggaactacagacacaaatatggtaggaacctagaggagggaaccaataaca

SEQ ID NO: 935943 - DNA, 120 bp, Artificial Sequence
  ENSG00000285100_8 (sequence is synthesized)
ccccctagagattgggtcagatgaggtttcccagagaaagggacatttacacctgggttttgaaggaggaatagaagttcatcatggggagaaaaataagaaggcattccaagccaaaga

SEQ ID NO: 935944 - DNA, 120 bp, Artificial Sequence
  ENSG00000285100_9 (sequence is synthesized)
aacagtgtgtgcaagttatttctgtaatgcatgaaaggggcccagtgcatgtaaatgtttgttgaatgaatcaatgtttgggggaacattgagaaatttggtgtggctgcatcagagctt

SEQ ID NO: 935945 - DNA, 120 bp, Artificial Sequence
  ENSG00000285100_10 (sequence is synthesized)
gcaaactgtcagtggataggccaaatcaggcaaagagaaggttaaaaaaaaaagtgaaaatggaattaattctcaacatctaaaaattgggaggcttcacagacactccggagctgggca

SEQ ID NO: 935946 - DNA, 120 bp, Artificial Sequence
  ENSG00000285100_11 (sequence is synthesized)
gcatcctctgcctttaggcgcatgctatccagctcaccagagtccccacctggctcagtttactcattcatgctactccttgggccctgtggacatttgaatttgcacccctacctactt

SEQ ID NO: 935947 - DNA, 120 bp, Artificial Sequence
  ENSG00000285100_12 (sequence is synthesized)
gttatactcctcaaggttctggactgtgagctactcacagggccaggcacacagcaggtgcctaatacatctttgttggctaagtggatagatggtgtgatgattttaaaatatgtcccc

SEQ ID NO: 935948 - DNA, 120 bp, Artificial Sequence
  ENSG00000285100_13 (sequence is synthesized)
tttcttaacactctggagcccccttcagtgtgggctgaacttagagactcccctgtagacagccaaatgtagaagaagtaatagcttgtgatttcagaaactaggtcacaaaagacactg

SEQ ID NO: 935949 - DNA, 120 bp, Artificial Sequence
  ENSG00000285100_14 (sequence is synthesized)
tggcttctgcctggctgtttcttggattgcttgctatggggaaagccagctgccattttgttaggatactcaaacagccctgtggaaacacccaggtggcgaggaactgaggcttcttct

SEQ ID NO: 935950 - DNA, 120 bp, Artificial Sequence
  ENSG00000285100_15 (sequence is synthesized)
tgccaatggccggcaccaacttgccagccatgtgagtgagtcaccttggaagcagcttctccagcccagtctagccttagatgattgcagcccaagctgacagcttgactgcaacctcat

SEQ ID NO: 935951 - DNA, 120 bp, Artificial Sequence
  ENSG00000285100_16 (sequence is synthesized)
gagagaccctgagttacaaccacccagtgaggctgcttccaaacacctgatctacagaaactgtgtgaaacaataaatgtttattgttgtctcagatgctgagttatgaaataatttgtt

SEQ ID NO: 935952 - DNA, 120 bp, Artificial Sequence
  ENSG00000285100_17 (sequence is synthesized)
atgttacgcatcaatagataactaatatggatggatggctgggtatctggatggctggatagatttatatagagcgcattaggtaatggaggaagtcccattgggaaagagggtcagagc

SEQ ID NO: 935953 - DNA, 120 bp, Artificial Sequence
  ENSG00000285100_18 (sequence is synthesized)
ctggagagccagaagaagtttgtaatccctggtcatctctaagctttagggaggttattcaggcagccagaggaggagagagttagtgagttttgaagccaagaggtcatcagaggctag

SEQ ID NO: 935954 - DNA, 120 bp, Artificial Sequence
  ENSG00000285100_19 (sequence is synthesized)
accactcatcctggggagacagcctgccctgtgtctccaaatccagcttcctcaagcagcagttcatactagtccttcctaccctgaggtcctggctccatcattcctcggccccagctg

SEQ ID NO: 935955 - DNA, 120 bp, Artificial Sequence
  ENSG00000285100_20 (sequence is synthesized)
gccctcagaattgtggaggaggtcaagacttcagcatttttcagaagccaagtcatcctcctcactcagagtcttctttgtgtggaggaagcagtttctcgactggtgggggactcaggg

SEQ ID NO: 935956 - DNA, 120 bp, Artificial Sequence
  ENSG00000285100_21 (sequence is synthesized)
cagggtcagtagccttcaggaaccagaggagggtattgagaagctgggaccctctgtggagaccctgctggccccaaaggcatggtggagagccacagccaccaaacatccataggatta

SEQ ID NO: 935957 - DNA, 120 bp, Artificial Sequence
  ENSG00000285100_22 (sequence is synthesized)
ggtcagccctaagatccagtatattggtattgtttgaaatgacccaacacatgtcctcgggaaacatatgtacaatgggcctggcacatatgagaattttttaagtaaatcaaaactgca

SEQ ID NO: 935958 - DNA, 120 bp, Artificial Sequence
  ENSG00000285100_23 (sequence is synthesized)
ctgaaatgccatttttcatctatcacattggcaaaatttcaaaagcttgacaatacctgctggtgaggctttgagcaaatagctactcttataaattgtcaataatgcctgttggcaata

SEQ ID NO: 935959 - DNA, 120 bp, Artificial Sequence
  ENSG00000285100_24 (sequence is synthesized)
aaacttctaggaaggaatttgtaatatagaacaaaacaggatatgcatttactctttgatccaggatatttacttctaggatttatcctaaagatataattccacaaatatgaaaaatgt

SEQ ID NO: 935960 - DNA, 120 bp, Artificial Sequence
  ENSG00000285100_25 (sequence is synthesized)
gtatgcaaggttatttattgaggaattatttataatacaaaatgttgaaaatacacaaatgcccatctgtagaaaactggatgaataaactatggtaccacatgagagaatgttatgcag

SEQ ID NO: 935961 - DNA, 120 bp, Artificial Sequence
  ENSG00000285100_26 (sequence is synthesized)
ccatgaaggcaagaaggaagatctctgtaaacctacagggagtgatttccagcatatattgttaaacaacaaaataaggtaaaagcaaaataaaggactacctatactatgcaaactttt

SEQ ID NO: 935962 - DNA, 120 bp, Artificial Sequence
  ENSG00000243620_0 (sequence is synthesized)
cacaaaccacacaaactttaagccttgtgaagctgcccaggtggtgtgtaggaaattttggtagagaaagaaatagtttgaaagttggtttctgacaagaggaaagaaaaggctgcaaca

SEQ ID NO: 935963 - DNA, 120 bp, Artificial Sequence
  ENSG00000243620_1 (sequence is synthesized)
ctaaaggaagactcaaagtgttaaaaggacgctcaaaatgtagtattgtggcaggtcgggaatcccatcatctttattgagagacattcctttggaaagaatacttccaatcattctatc

SEQ ID NO: 935964 - DNA, 120 bp, Artificial Sequence
  ENSG00000243620_2 (sequence is synthesized)
aaaaatcttatacttgaagagaagccctgctggaatgcttcatctgtttagaatcaaaagtgcggaagacctgggaattatgtaataaggatagcagaataatcctcgtcactgacaggt

SEQ ID NO: 935965 - DNA, 120 bp, Artificial Sequence
  ENSG00000243620_3 (sequence is synthesized)
ggtgagctgtaaagtgttcttttgttgcagtggcagagatttcagcaatggagggaaatccagtggccaagatgcttacctgtctcggtgtccagcatgtgtcctggaggagtgccccta

SEQ ID NO: 935966 - DNA, 120 bp, Artificial Sequence
  ENSG00000243620_4 (sequence is synthesized)
aagcaccttcagctgtttatttaaacacttgactccaggctctgatgcattttaatttttcaacatttaaatttagctgttttaatgaggttttagttttaataagtaacaaaagatttt

SEQ ID NO: 935967 - DNA, 120 bp, Artificial Sequence
  ENSG00000243620_5 (sequence is synthesized)
taaaactcagagagaacctgtcttgagtagtttaaatctctaattaaatcagtatttctacctagcaacagagtagcaaaagtattaattcagtggttctcaataggggtaggggagcag

SEQ ID NO: 935968 - DNA, 120 bp, Artificial Sequence
  ENSG00000243620_6 (sequence is synthesized)
attttgaccgccagcccagggcacatttggcaatgtcaagatgtttttcgctgtcataacttacggaggggataggtgctactggcatctagtgggtagaggtcacggatgctgctgaat

SEQ ID NO: 935969 - DNA, 120 bp, Artificial Sequence
  ENSG00000243620_7 (sequence is synthesized)
atcctgcagagctcaggacagcccctatctccataaaaacttttctggcccagaatgtcaatagtgcaactgttgagaaaccttctataaaatgattggtgtgggtaagagaatatacta

SEQ ID NO: 935970 - DNA, 120 bp, Artificial Sequence
  ENSG00000243620_8 (sequence is synthesized)
aaatgctaaaatagcaggcttgaaattatttgcatatcaggagagtggagtttataactgactgactaaaaactctggtgtaggacctatcctccagaggcgatgctaaatctgcggata

SEQ ID NO: 935971 - DNA, 120 bp, Artificial Sequence
  ENSG00000243620_9 (sequence is synthesized)
ggacactaaatcagcatctgtaaaatttgaaacatatctccacggtggggtcagaccaaagaatggtaaatgttgctttgattttaaaaagttggaaatgatgtttctcagaggaaatac

SEQ ID NO: 935972 - DNA, 120 bp, Artificial Sequence
  ENSG00000243620_10 (sequence is synthesized)
taggtctcagttgagctgtgagagggggcaggttgctatgtttttttctctacaatagtgcacagtgtcttttgaatgggagaagttctgaataccctactgaagtagcccctgctgcag

SEQ ID NO: 935973 - DNA, 120 bp, Artificial Sequence
  ENSG00000243620_11 (sequence is synthesized)
aaaaaatcaatgaatgaccttctatttgggtgcgatcatcagtgtgggaagacggcggcagtatacccagaactagcacaagcgaacaaatggagattcttgctctgttccccaggctgg

SEQ ID NO: 935974 - DNA, 120 bp, Artificial Sequence
  ENSG00000243620_12 (sequence is synthesized)
acgcagtgaaaatgcactgtggggagtttttctgttgtttttaagaaatgaaataatactccaagctccctcctaggatgacttcctcctgcgactttgctctgtttttgtgggtgttct

SEQ ID NO: 935975 - DNA, 120 bp, Artificial Sequence
  ENSG00000243620_13 (sequence is synthesized)
acagagaggcgctttctcctagagccctgtcatcatagacccagaggccctcaaattctgagtggccagggtttggagagccgctttcgggtcgcagaggcaacaagtcgtggactctct

SEQ ID NO: 935976 - DNA, 120 bp, Artificial Sequence
  ENSG00000243620_14 (sequence is synthesized)
agccccaggcaagcgccgcaccgcgccgcagctgagcctgtggctcgcctgactcaggaatgaattttgcacgtgtaaactacttgcctgtggatgcgcacagctgcgactctggggttt

SEQ ID NO: 935977 - DNA, 120 bp, Artificial Sequence
  ENSG00000243620_15 (sequence is synthesized)
atcaagggaaaaaaactattcctttaaatggacgatttgcaaaaactcagccattggttcttgccaaatgactattgatgcagagtaaaccctaccggttggtgcgtgcgcacgtttgtt

SEQ ID NO: 935978 - DNA, 120 bp, Artificial Sequence
  ENSG00000243620_16 (sequence is synthesized)
taaccctaaaaatattccacttccgagttgctcaagttgacatccacttgaaatcatttgtatttttttttaggggctggaaaaataactggcattatctgtgggagacggtgtagatat

SEQ ID NO: 935979 - DNA, 120 bp, Artificial Sequence
  ENSG00000243620_17 (sequence is synthesized)
attggtgggggaggcatatttcactggaaagtgatgccctgtattcgctgaacgtagggaagtgtcccaaagaaacgcggctcccagtgcgcgcgcataccacatttccacaaacgtgtg

SEQ ID NO: 935980 - DNA, 120 bp, Artificial Sequence
  ENSG00000243620_18 (sequence is synthesized)
ttacaaatgcactttcctgccactaacctgcagctttgagattcgattctgaggtttaaataatattgtttttctgcatggcatggatattcagacgccagcaatgagcaatccttcatt

SEQ ID NO: 935981 - DNA, 120 bp, Artificial Sequence
  ENSG00000243620_19 (sequence is synthesized)
tgagtacctgcaagcgtctgcagcaagctagattttatttattattattagctttctgctaccagaaacgtggaataaacatgtgctgccccagaaattgggcggagctgatccagatgt

SEQ ID NO: 935982 - DNA, 120 bp, Artificial Sequence
  ENSG00000243620_20 (sequence is synthesized)
tggcaaacacgtctttaccagttgtatttctgaggaagcccagagaaatggatcagagagccgaagagaaattgacaagggagctgatcagaggcgattttgttcattagcaggagcgac

SEQ ID NO: 935983 - DNA, 120 bp, Artificial Sequence
  ENSG00000243620_21 (sequence is synthesized)
tcctgctttgggtctggcgggggcgagcatataaaatgcaacttttgccccattggttcgctaggtgaattagcacatactgggactgaacagtccttgacctttgcctttatgtttgcg

SEQ ID NO: 935984 - DNA, 120 bp, Artificial Sequence
  ENSG00000243620_22 (sequence is synthesized)
aaatagcttaggtatttgcacaaactgtataaattaatgtcggatgattgctagttgctggttaaataggagagagatgatttagatgaggaatacatgtatctctctggcatttttttt

SEQ ID NO: 935985 - DNA, 120 bp, Artificial Sequence
  ENSG00000243620_23 (sequence is synthesized)
cttgccaaaaaagtcggtaagataactgatagcgaaggaaagtttatgtttgtgggagtcaaaaggttcttgtttgatcaaagggcacatgaatgtagttttcttacaaatggcttttcc

SEQ ID NO: 935986 - DNA, 120 bp, Artificial Sequence
  ENSG00000243620_24 (sequence is synthesized)
acaaagatggggagtggatgaaggaagaggagagatggagagtggagaaagctgtgagaaactaataattaggataactggtaatggggaggtttagaatatgattctggaggatttatt

SEQ ID NO: 935987 - DNA, 120 bp, Artificial Sequence
  ENSG00000243620_25 (sequence is synthesized)
gttcctaaaggagccatggccagccagcagcctctcagtgctctggaaaccccatgaaacttggggggaagttatcccgattactgagctttatggctttgaactcttccttcagtaaaa

SEQ ID NO: 935988 - DNA, 120 bp, Artificial Sequence
  ENSG00000243620_26 (sequence is synthesized)
ccaaatactttagcaggaggagaaaagcaccttttagaatctaaaattggtttaagtcttttaaacctctcactatagatgtgaaattatttagataactgggctgccttttcccgaact

SEQ ID NO: 935989 - DNA, 120 bp, Artificial Sequence
  ENSG00000243620_27 (sequence is synthesized)
ttgacataggagcaaaatgaactttccttaactgtggtttctagctgagatcagaattttccacattcctttcattatctgcaacatggtaaaacctcaccaatttccatggctcaattc

SEQ ID NO: 935990 - DNA, 120 bp, Artificial Sequence
  ENSG00000243620_28 (sequence is synthesized)
tgttggcaggactaccaagacagggagagcaaattaagaaaaatgaggatattttcaatattctttcagggaggttcattcccttgaaagagaggagtatttacttctttcagtccaagg

SEQ ID NO: 935991 - DNA, 120 bp, Artificial Sequence
  ENSG00000243620_29 (sequence is synthesized)
gatgcagtagacgagggtagcaccaactcatgccacagtctgggaatgcagatttgaatgtctgaaagccactgtgatttctccaaacatttgcaaggtatttttcagatttccatgaac

SEQ ID NO: 935992 - DNA, 120 bp, Artificial Sequence
  ENSG00000243620_30 (sequence is synthesized)
tgtattcaggtggagaagagggagggttcaccagttctcccttggaaatcctttctcttgatccctgggcaaaatttgccttctctctgttgggctatggagactttcagggtaggagaa

SEQ ID NO: 935993 - DNA, 120 bp, Artificial Sequence
  ENSG00000243620_31 (sequence is synthesized)
agtttgtttaaaagccatgttccacattgactttaggtacagcacaaaagtagcagaaaggtaaaaacatcaatcttagaatgaaaaaaataatacgtttatgaacaagcacctagaata

SEQ ID NO: 935994 - DNA, 120 bp, Artificial Sequence
  ENSG00000243620_32 (sequence is synthesized)
aaattaaggggactctctccatttttcaataatctccataataatttcttaactaacagaaataatttgttaagttattcttatttcttacttacttaacaatgtaataagtatgaacta

SEQ ID NO: 935995 - DNA, 120 bp, Artificial Sequence
  ENSG00000243620_33 (sequence is synthesized)
cttcaaaacacttttttaaggtagatgcaaaacgtctaccttaaatgtctgtgcattttggctttaggttcagcaatatgggcaactaaatatacataaaaatcatatttcaattctcag

SEQ ID NO: 935996 - DNA, 120 bp, Artificial Sequence
  ENSG00000243629_0 (sequence is synthesized)
atgtgaagaacagtgtttctctcctacagaggatgcagtgtccagggcatcatctatgaatggagacaacctttaccggacaccaaacctaccagcaccatgaccttgaactttccagcc

SEQ ID NO: 935997 - DNA, 120 bp, Artificial Sequence
  ENSG00000243629_1 (sequence is synthesized)
ttctgaactatggcgtactgctctgttgcccaggttagagtgcagtggcttgatcatagctcactgcagccttgagctcctaggctcaagcagtcctcttgcctcagcctcctgaatagc

SEQ ID NO: 935998 - DNA, 120 bp, Artificial Sequence
  ENSG00000243629_2 (sequence is synthesized)
tgggactacaggttctattctgaggtactaaggttaagacctcaacatatgaattctggaggacaaaattcaacccagaagtctaccttgtattgggtcctcacggcaaggctgcaaaac

SEQ ID NO: 935999 - DNA, 120 bp, Artificial Sequence
  ENSG00000243629_3 (sequence is synthesized)
ccggggggttggtggcccagtcccacctcccatgagctaatgaatgtggggctcagggaggactgacaggactagagttgacaaccattcatccaacaaacatttactgcacgaggaaga

SEQ ID NO: 936000 - DNA, 120 bp, Artificial Sequence
  ENSG00000243629_4 (sequence is synthesized)
gaggtgatcaaggcactgcccttgtccccaggaagctcgccagtgcatgggactgtgcaggtgtcttcacctctgcattaggcattcgatgtcaggccatggctgagcatccatcctctc

SEQ ID NO: 936001 - DNA, 120 bp, Artificial Sequence
  ENSG00000243629_5 (sequence is synthesized)
tatgctaattttttccaaaagtcaagagtttggaagaacactaatgtgtttttcttccagcctttcctatacaaatgacaacatcattaccctcagcttttaaagtgcaagtctgtacag

SEQ ID NO: 936002 - DNA, 120 bp, Artificial Sequence
  ENSG00000243629_6 (sequence is synthesized)
agatcccagagtcaaggagggcgcctgagtcatttgaaataattaccttttttttttcctgcctgagtcttgcatatctgtgaatcagcaatgtggaaactgggcttcaaaaaaattaag

SEQ ID NO: 936003 - DNA, 120 bp, Artificial Sequence
  ENSG00000243629_7 (sequence is synthesized)
ggaggcttaaagtgagcaaagcagagaagagcattggcaagagctgagcgctgccacagcaggaacatcatgccgatcgtcatctaagggagctcatggtgctgtctgcctcctcttagc

SEQ ID NO: 936004 - DNA, 120 bp, Artificial Sequence
  ENSG00000243629_8 (sequence is synthesized)
tagaggtgtgtggtgtcaggacagcctgtgcggcctcatttatttacctgagtcatctgaacaaagcggtgactggctttgcctggctctggcaaggactcgcaacaaagccaaagcctc

SEQ ID NO: 936005 - DNA, 120 bp, Artificial Sequence
  ENSG00000243629_9 (sequence is synthesized)
ttcctccacggcctttgctcctgcagcacagcactggcatctttttagcatcatagacactgtcacgtggcaatcaatgacagatgaactgtcccttccctgggccacaagctcttcaag

SEQ ID NO: 936006 - DNA, 120 bp, Artificial Sequence
  ENSG00000243629_10 (sequence is synthesized)
gcgggagcctcagcccagtttcttccatgtctccagcgcccagcacagggcctggcttctagctggtttctgatgaataaacgaatggctatagagatgtactcttcaaaacacaagggg

SEQ ID NO: 936007 - DNA, 120 bp, Artificial Sequence
  ENSG00000243629_11 (sequence is synthesized)
cttctatagtggcaacatgttcagtagcacagtgctgtattggttctttacagcttgcaggacccaaagaaggaatgatttttgtttcccgggaaaggtgtacctcgtgggggcactgct

SEQ ID NO: 936008 - DNA, 120 bp, Artificial Sequence
  ENSG00000243629_12 (sequence is synthesized)
caagggaaggtgcccacaagttggggatcaagggaggcacaggttgatcaaagcccctggaattgaaatggaggtgttcatcctgcggaggctccgaacatctgaggcagagcctcgatt

SEQ ID NO: 936009 - DNA, 120 bp, Artificial Sequence
  ENSG00000243629_13 (sequence is synthesized)
ctccaggaaattgactttgccggagaacaaggctggggaaggcaggctgtcctaggggaggagtcgtatttcagccccactgagaccccaaaggcgcactcccatgctttaccccagctg

SEQ ID NO: 936010 - DNA, 120 bp, Artificial Sequence
  ENSG00000243629_14 (sequence is synthesized)
tccaccagggggcaggcagaggcaagagaagaggaaagcgggcggctggtcaggcccagcacatccagcctggcatcccacacgctgggctgcctgactcagacaaagccaggccgctcc

SEQ ID NO: 936011 - DNA, 120 bp, Artificial Sequence
  ENSG00000243629_15 (sequence is synthesized)
tcctgcctgttgtggcctctgtgattttatatggtttggcctgtgacatcagacaccacgcgaccatggtaaccaaagtatacagcctggagtgaatgttaataaacaggaaagaaatga

SEQ ID NO: 936012 - DNA, 120 bp, Artificial Sequence
  ENSG00000243629_16 (sequence is synthesized)
ctgagacctgctcttctgagagtctgaggctccagggagatcacagggagtcgatgctgactcgagaagagggctgtgagagcctggccatgactcagtccactggggcttccctggacc

SEQ ID NO: 936013 - DNA, 120 bp, Artificial Sequence
  ENSG00000243629_17 (sequence is synthesized)
actctgttatctctgagttcgcagccacttctgtgattctggctggcacaattgcccaaggccttcagtgaggatgcagtgtccagggcatcatctatgaatggagacaacctttaccgg

SEQ ID NO: 936014 - DNA, 60 bp, Artificial Sequence
  ENSG00000277144_0 (sequence is synthesized)
tttcctcccaaactctgtacttttcttgcttcaactctcattattaaaaatctaccacgg

SEQ ID NO: 936015 - DNA, 82 bp, Artificial Sequence
  ENSG00000277144_1 (sequence is synthesized)
tgagcaacatggcaaaaccccatctctataaaaaaatcaaaaacttagctgggcgtggtatagaaggattgattgaacccag

SEQ ID NO: 936016 - DNA, 120 bp, Artificial Sequence
  ENSG00000277144_2 (sequence is synthesized)
tgcactccagcgtgggcaacaacagaataaaaccctgtctcaaaaaaataaaaaataaagaaacctacctaaaatactgttgtgctttcctgcccaaagaggaatgcatgctacctggga

SEQ ID NO: 936017 - DNA, 120 bp, Artificial Sequence
  ENSG00000277144_3 (sequence is synthesized)
ttttgtagtatctcagggtcattattgtaaagtaatttttattacattgtttggacagaatttgtgcctgacctaaacccctatcctgaatgttgactttaaataaataaaaccttatct

SEQ ID NO: 936018 - DNA, 120 bp, Artificial Sequence
  ENSG00000277142_0 (sequence is synthesized)
gtcacagacgcgtggggctcgcggggagccgggctggggccgtccgtgtcccgcggggctctgggcggccgctcgaccgaggacccacgactccgccccgaccccgccgtgttcgcgaga

SEQ ID NO: 936019 - DNA, 120 bp, Artificial Sequence
  ENSG00000277142_1 (sequence is synthesized)
cccggagaccccttcgcgccttccaggaccgcccctttcgcgacgctgcgtgctgtgcttggtcctggcggccaagagcggcggtggcaaggggaccgccctggcccgagacgcggcctg

SEQ ID NO: 936020 - DNA, 120 bp, Artificial Sequence
  ENSG00000277142_2 (sequence is synthesized)
gcctcgcagcgtcgcttgggcacagcctctctaggccccttcgtcctcggtcgcggagggacgccattaaacggccacgccgggctcaactgggacgcggcccacggcgcccaaccaggg

SEQ ID NO: 936021 - DNA, 120 bp, Artificial Sequence
  ENSG00000277142_3 (sequence is synthesized)
cctgggggagggaagccggggcgactcctgggtccttccaggacccttgcgcaggcctcattctctccccggaggtccccttcccgctgccctgaggccactctcctgccagcagctgct

SEQ ID NO: 936022 - DNA, 120 bp, Artificial Sequence
  ENSG00000277142_4 (sequence is synthesized)
gggccggctctcgggagaatgccttggcgtcaagcttatcaggctgcagggcgggacgcgagtgctgagggcagccagactcccgctcttaggtgcacttgaggagcctgagaaggcagt

SEQ ID NO: 936023 - DNA, 120 bp, Artificial Sequence
  ENSG00000277142_5 (sequence is synthesized)
ggctctgcgggagagggagacacaggagcagggctggtccgccgagattccggagagacggttgtgggccgattctgtggcgagatttacaagtgggaggttgggtgacgattgctcctg

SEQ ID NO: 936024 - DNA, 120 bp, Artificial Sequence
  ENSG00000277142_6 (sequence is synthesized)
ggccagaaaatctaagccagtctcagcaagacctacaaggccagggccagtgctcctcagaggatattcatgctccaggaaagccaaggatgggcctccgtcatgctgagatgccgcagc

SEQ ID NO: 936025 - DNA, 120 bp, Artificial Sequence
  ENSG00000277142_7 (sequence is synthesized)
agggacacctgtgtcccacgtggagctcggcttctagctgcagtcagtgcagaagctggcaggaggggtttatttctgtcctcggaagcttttggtaaggacacttcattcctgtgtctt

SEQ ID NO: 936026 - DNA, 120 bp, Artificial Sequence
  ENSG00000277142_8 (sequence is synthesized)
ggacacctccccctaggtctgctgccccctctgtggagacaggcagggcagctggatgtgccgtttgttcccagactatatccatgccaaagcatcccaagggcaggaaatgtgtccccg

SEQ ID NO: 936027 - DNA, 120 bp, Artificial Sequence
  ENSG00000277142_9 (sequence is synthesized)
cccagcttcctcacctgcatggcaggatactggccaagtgtggctttcgaaccacaggagagggtgcagtcaaggcctcactcagggaccgcaggttctcttcccttcccagtccttccc

SEQ ID NO: 936028 - DNA, 120 bp, Artificial Sequence
  ENSG00000277142_10 (sequence is synthesized)
tggcactgcctaggtggctccctggccaggggccagtggtctagccagcaggccttataacctccccaccagagaggcagctgcagttgaacctgttgatctgatgctgagggccctgcc

SEQ ID NO: 936029 - DNA, 120 bp, Artificial Sequence
  ENSG00000277142_11 (sequence is synthesized)
agctcactgcagagtggccagttctggccagttttgctaggccaggcccatttggggtgaggagagggtgggagcaccccagctctccccagtagcctgtcatggtgaaggaggaagccc

SEQ ID NO: 936030 - DNA, 120 bp, Artificial Sequence
  ENSG00000277142_12 (sequence is synthesized)
attcacccagaagagggcctcaggaggcgtcttcaaggtgactgaggtttccccgcacaaggagagtgctggagggaatgggtgcgatgagagaaatgagtcactcgtgcctccgtgagg

SEQ ID NO: 936031 - DNA, 120 bp, Artificial Sequence
  ENSG00000277142_13 (sequence is synthesized)
ccagcctgtgattgtcttgaagattctgagtcacaagacatcaggcacacaggcgtgaattgtaaatgactgcacagcagaaggtaagtgactctggattatccagaccattgaccgagc

SEQ ID NO: 936032 - DNA, 120 bp, Artificial Sequence
  ENSG00000277142_14 (sequence is synthesized)
cctgctccgtgccagtgcttcctggcctgaggacacgactctcacatccagacagacctgagcagctaacgcaagtgcgcagaagctcgccaagtgcccagaagagccaagaggcgagcc

SEQ ID NO: 936033 - DNA, 120 bp, Artificial Sequence
  ENSG00000277142_15 (sequence is synthesized)
atgaatcccccctggaggagaagaggatggggagggccaaacagaaagaactgaaactggaggcatctgttcaggcacccagagaaagcctcacgcgcacaaagcagcaaacagaacaaa

SEQ ID NO: 936034 - DNA, 120 bp, Artificial Sequence
  ENSG00000277142_16 (sequence is synthesized)
ccccagtgccatcatggagcccagacttgagcacacagggaccctggcgtggagcacgagggtgccaaggcccgcaggtggctgacttgtgtgctctggtgccatgctcagatttgatgg

SEQ ID NO: 936035 - DNA, 120 bp, Artificial Sequence
  ENSG00000277142_17 (sequence is synthesized)
gatgaccctgcaattgcctgctttgtgagccacacaggcctgggtcaaaaagacgacggaccaccagcctgggcaacacacaaagcgaaacctgtctccacttaaaagataattagggtg

SEQ ID NO: 936036 - DNA, 120 bp, Artificial Sequence
  ENSG00000272312_0 (sequence is synthesized)
ccatgaacttggagctgctgatttttttttttaatttgcagggtttttacataacaaattatcagaaaccaaagcacccagatatcagactatgaatagaaaacatctttcctgaacaag

SEQ ID NO: 936037 - DNA, 120 bp, Artificial Sequence
  ENSG00000272312_1 (sequence is synthesized)
tattgaaattgtatcttccttgaaaaacttggcacaaagtgcctagtttgtatcccagttcattatattattattttactatattctgtgctgttatgtagttttatatgggctcactag

SEQ ID NO: 936038 - DNA, 120 bp, Artificial Sequence
  ENSG00000272312_2 (sequence is synthesized)
ttgagtgttcaaaattgcttttctaaactatagaatattaacttccagtatttaccaaaaaaacttatttattaaaaaaatcccaataaaagggcataaaataaatataaatactcaaca

SEQ ID NO: 936039 - DNA, 120 bp, Artificial Sequence
  ENSG00000259985_0 (sequence is synthesized)
tgctgggggttgagggacgcgttgcgagccccggatacattgtaccctgggggtacataatgaaggatgctgtacctgaaaggaaaagggcatctccaaaaggggacttcgcgggtggaa

SEQ ID NO: 936040 - DNA, 120 bp, Artificial Sequence
  ENSG00000259985_1 (sequence is synthesized)
tttccttccaaaatcctcgaggaacaaggtgtatttccgacctggattaatgaatcccccctcctatcccgcacttcctgtggaaacagtgtcaggatgtggcgcggacctatgtgcgtc

SEQ ID NO: 936041 - DNA, 120 bp, Artificial Sequence
  ENSG00000259985_2 (sequence is synthesized)
ccttataccaggacttgccttcaacgctgaaggtgaaccctgggtcatcctcgctgtattcaggcggcgctgcaaaggcttctgggcagccaataggcccttgagcgcctcagccccatc

SEQ ID NO: 936042 - DNA, 120 bp, Artificial Sequence
  ENSG00000259985_3 (sequence is synthesized)
ttgcttcagtaggcaaacggacgggtgtcttcatccacctcctaggccgtggtctacccttcgttcaaatgtttcttcctgctagctgactgtccaggtccttagctgtatcacattgtt

SEQ ID NO: 936043 - DNA, 120 bp, Artificial Sequence
  ENSG00000259985_4 (sequence is synthesized)
gatggaactgtagttgatagccaataaatttggtacgtttttatcgggatgcgcatgccatagatcgtccctgagataatgctttgcaatgtggaacctgaaacacctatgtataagccc

SEQ ID NO: 936044 - DNA, 120 bp, Artificial Sequence
  ENSG00000259985_5 (sequence is synthesized)
aagcctttcattaatattaactgtgagacccctggaagctactactttgtgtgagcctgttttctccgccctcaaacagtggatataatacccccttgcaaggctgtgagattaaatgga

SEQ ID NO: 936045 - DNA, 120 bp, Artificial Sequence
  ENSG00000259985_6 (sequence is synthesized)
taactgtgcataatgctaagcatggtgtctgggacgtaagaggttccttatatcccattagttcactaggtgggatcaccaagttgaaattcattttttaatattttgcttgttggagta

SEQ ID NO: 936046 - DNA, 120 bp, Artificial Sequence
  ENSG00000259985_7 (sequence is synthesized)
ctcacaactcaacttctctggctaatttgatgtttaatttgaaaggtaatgacactattttgtaacatttttagatgcttaagggaaatttgaaatgcaaagtggaacaacattaaaagg

SEQ ID NO: 936047 - DNA, 120 bp, Artificial Sequence
  ENSG00000259985_8 (sequence is synthesized)
aaactcatttgtaaaataaagaaaaacaaaatctatgcaagccaaagaagtcatgaatgctgaggaagcaaaaattgtgattttcccctctccaatcccactgttcatttatctttattt

SEQ ID NO: 936048 - DNA, 120 bp, Artificial Sequence
  ENSG00000266901_0 (sequence is synthesized)
cgcagctgctcggaacagacctccaccaacatcacgtgctgacagtgttttcctgagctactgaataaaggaaatcaacattcccggtaaaaagtccagcagctgtccaggcttcgggag

SEQ ID NO: 936049 - DNA, 120 bp, Artificial Sequence
  ENSG00000266901_1 (sequence is synthesized)
tgaggaggcagaggacagaccgttcatgcttagacccccctccccactacatcaggacactgtcaccttccagaccacacaactgagaaacagccacattataactagactccactgtct

SEQ ID NO: 936050 - DNA, 120 bp, Artificial Sequence
  ENSG00000266901_2 (sequence is synthesized)
tcagcaggcctatcctggagatactgagaatcacatgaattttttggtttcccagtgaatataatccatgctgacactctactgcagcttattaaacattcaatagcattatatctaaaa

SEQ ID NO: 936051 - DNA, 120 bp, Artificial Sequence
  ENSG00000285817_0 (sequence is synthesized)
gatagcagcgagagcaacatgttgacggcagcctgaagagactctgaatcagacgaccgaggaataatgtttccagatgacagaagtcttcggatacttcaactcagatcaatctgtaaa

SEQ ID NO: 936052 - DNA, 120 bp, Artificial Sequence
  ENSG00000285817_1 (sequence is synthesized)
tccatagaatgtgaccttgccactctggagaccactcactaaataaaggcttgaattagaccatgtgggcatatcctggctccgccatcaattagttctgggacacaggaagacttttac

SEQ ID NO: 936053 - DNA, 120 bp, Artificial Sequence
  ENSG00000285817_2 (sequence is synthesized)
tctccctgggcttgatttctccatcatgaaatggtctcccccagcaacaacagtcggactctcactaccacttccgtgcatatggcacactgcagaatgtgtctttggaaccctgagatg

SEQ ID NO: 936054 - DNA, 120 bp, Artificial Sequence
  ENSG00000285817_3 (sequence is synthesized)
ccgtaccggaagtccagctacctgaagccaccatgctggggagtccacaaagcgaatgatactggagacattgtgccagctgttctcacccccagagccagctgaagccaaatggagcag

SEQ ID NO: 936055 - DNA, 120 bp, Artificial Sequence
  ENSG00000285817_4 (sequence is synthesized)
taatgacctactgccaattcctgtccaaatagtacattcataattaaaataaatattgctacagctgtatgtaagtaaatatcagtgaggtttgttacatcaataacaacaatacaatga

SEQ ID NO: 936056 - DNA, 120 bp, Artificial Sequence
  ENSG00000285817_5 (sequence is synthesized)
atcttcatggagcagggggatatatgatgaaaaggagaaatatattttaagatcctgtagtttgaaattaaaacaaatattctttactgtaacaaacccagttttttccatttccaagat

SEQ ID NO: 936057 - DNA, 120 bp, Artificial Sequence
  ENSG00000285817_6 (sequence is synthesized)
ttatttagccccacatgcctcctgagccacctcctcaatggagagctccaacagttctgtctcctggtcttctacaactactgtctttttgtctttttcagtattcctccaggggaggat

SEQ ID NO: 936058 - DNA, 120 bp, Artificial Sequence
  ENSG00000285817_7 (sequence is synthesized)
cagccctcagcagggactctattgtacccactacagggagccagctacaacagctgcagtgctgtataatccaagtgtctacagagtccctggtccctcttggcaataattaaaccaaaa

SEQ ID NO: 936059 - DNA, 120 bp, Artificial Sequence
  ENSG00000285817_8 (sequence is synthesized)
atgttatttttgctactcagcatctattaacccaccatctggtaactttaacttaattttgtttattgttttccaacttggaacgtagggcttattaaatgtgacctctccactgatttg

SEQ ID NO: 936060 - DNA, 120 bp, Artificial Sequence
  ENSG00000285817_9 (sequence is synthesized)
caaatgttggatgcgagggaaaatacaagatttccttgttgacacataccactaaatgtaaaagcctagatccataaagccagtttccaaggcttaagggtaaatgttttatactagaat

SEQ ID NO: 936061 - DNA, 120 bp, Artificial Sequence
  ENSG00000285817_10 (sequence is synthesized)
atgctatgagcctacaagaagaatctaaattaaacacaaccacatttttcttgctaatgcacctactactttatcttaaggcattggattattgttatggtgtttaatctgattctagtg

SEQ ID NO: 936062 - DNA, 120 bp, Artificial Sequence
  ENSG00000285817_11 (sequence is synthesized)
cagcaaaagtagggttgtaattaggaacaactttagaaagcttaaatgtttataggacagattatttgattagttgttacattatgtaaacattcaacaaagtcataaccgagagagaga

SEQ ID NO: 936063 - DNA, 120 bp, Artificial Sequence
  ENSG00000285817_12 (sequence is synthesized)
gaaagggcaagagatagagtgaagagagttatgattgtattaaaagttcagcttttcagtctgttcagggattaacttgactgataggcctatgatctgaactgtaatttaggtttttca

SEQ ID NO: 936064 - DNA, 120 bp, Artificial Sequence
  ENSG00000285817_13 (sequence is synthesized)
aggataacatgttctctggagtagtaagaaaatcttgttgcagtatttttcctatacttcccttatacctgcagaacataattttgtgtgcatggggaggatatgatcactgtacctgaa

SEQ ID NO: 936065 - DNA, 120 bp, Artificial Sequence
  ENSG00000285817_14 (sequence is synthesized)
gactgctctttattgtagtaatggggccatgtgtcactgttttcacggaaagtgtccagtttccaggaccaaaaaaaggacccattgtgcaagggaaagtcattattaatttagatacaa

SEQ ID NO: 936066 - DNA, 120 bp, Artificial Sequence
  ENSG00000285817_15 (sequence is synthesized)
ttttatttccgaacacttgtcctagtagttccatctcctcaagacctcttgttaagccaaccaaacaataatgaaggtcccaaccccatacacactttctgacatgcaatcaaaaatcaa

SEQ ID NO: 936067 - DNA, 120 bp, Artificial Sequence
  ENSG00000285810_0 (sequence is synthesized)
aagcttcaacttgagagcctgattctttctggatttggcagtgggggcagaccctaaaattgagtgccaggaacctacaacaagctttcatgcgaagaagctgaaagtcacaaagcctga

SEQ ID NO: 936068 - DNA, 120 bp, Artificial Sequence
  ENSG00000285810_1 (sequence is synthesized)
gtgacttgcccaaggccacacagaaaccagtgttcagtccagacactgtggacccagagcagatgcttggccgctccacctatctccacaaaaaggagcaaggaaaagagtgagcttcat

SEQ ID NO: 936069 - DNA, 120 bp, Artificial Sequence
  ENSG00000285810_2 (sequence is synthesized)
cttagaggctggcaagatctcaaatcagggctgctctatcaccctgggtcctagagtaaagtggccgggagcgcagcagagctggcccaccatggactgcattgtgagtgagaaagaatc

SEQ ID NO: 936070 - DNA, 120 bp, Artificial Sequence
  ENSG00000285810_3 (sequence is synthesized)
attgctgtggccggccaccaagatgttgggctccaagcaaggtgtccagtaaagggttactggctgactgaatgaatgaatgaactctctgagctgtgacttgtccatttgtaaaatggg

SEQ ID NO: 936071 - DNA, 120 bp, Artificial Sequence
  ENSG00000285810_4 (sequence is synthesized)
aataatatttgtaaaatggttcctcctttatagggttgttgaggagtctaaatgatgcctagcacaaggcatgacacctaccacctaagaattcaatacaacttaactattattattata

SEQ ID NO: 936072 - DNA, 120 bp, Artificial Sequence
  ENSG00000285810_5 (sequence is synthesized)
agccataggaaaggtaaatacagtatataatatacagagaaaaagcttacttctcactatggggattggaggaagctagcttcatggcagaagtgacttgaatggactttgaagaatgca

SEQ ID NO: 936073 - DNA, 120 bp, Artificial Sequence
  ENSG00000285810_6 (sequence is synthesized)
taggatctggacttggacatgaggtgcagggaaagacattttagacaaagggaacagcatggataaagatacagagacagtttaagtcttaaaatcttaatctttcctcagttgtaccat

SEQ ID NO: 936074 - DNA, 120 bp, Artificial Sequence
  ENSG00000285810_7 (sequence is synthesized)
ttctagggtcagatctaaggaaataattctaaatatagaaaaaacattatgtgtaaagatgtccactgcagtgttgtttataaaagtgaaaacataaaaataactgatatgcccaacaat

SEQ ID NO: 936075 - DNA, 120 bp, Artificial Sequence
  ENSG00000285810_8 (sequence is synthesized)
aaggaagtagttaaatgaatgctcttctgttcatctgatatattgtcatgtctattataattaaatatataagaagtaataaaagaaaatgtttatgaatgatgctatgtgagaaataag

SEQ ID NO: 936076 - DNA, 120 bp, Artificial Sequence
  ENSG00000285810_9 (sequence is synthesized)
gtaatattcggaaagtctaggaggaaatataccacaatattaataggagtatctttgaagtaatggcctttggtgactgctttgggatattgaaagcaatctttcttacatttatcattt

SEQ ID NO: 936077 - DNA, 120 bp, Artificial Sequence
  ENSG00000285810_10 (sequence is synthesized)
ttttattatcatagctaaactttactgagcacttcctatgtactaggcagtgcactattttacacacattacccaacttaatccatacagccctgtgaggaaggttatcttattagcctc

SEQ ID NO: 936078 - DNA, 120 bp, Artificial Sequence
  ENSG00000285810_11 (sequence is synthesized)
atccatacagccctgtgaggaaggttatcttattagcctcttaccaatagggaaaccgagacttctctatttacacaatgagcatatgttactttttttttttgagacagggtctcactc

SEQ ID NO: 936079 - DNA, 120 bp, Artificial Sequence
  ENSG00000285810_12 (sequence is synthesized)
ctgtagccatgacctcctggactcaagtgatccgcccacctcagccccccaagtagctgggactataggtacatgccaccaagcccagaaaatttttaaaaatttttggtagagatggtg

SEQ ID NO: 936080 - DNA, 87 bp, Artificial Sequence
  ENSG00000285810_13 (sequence is synthesized)
acagggttacaggggtgagccatcatgcccggcctattactttcattataggaaatatttactacatttatttaatattttgttatt

SEQ ID NO: 936081 - DNA, 120 bp, Artificial Sequence
  ENSG00000285810_14 (sequence is synthesized)
ataggaaatatttactacatttatttaatattttgttattaaaagactagagatgtcagtccctcctttttttttttgctacttcaaacagtgttataataagcatcgctgcacatattt

SEQ ID NO: 936082 - DNA, 120 bp, Artificial Sequence
  ENSG00000285810_15 (sequence is synthesized)
tctcattattgctactcttatttctgtaaattacatttcttaaagtgatattttgggtcaaaatatatgtgtgccttttttattctgaactaattttagacttacagaaacgtgcaaata

SEQ ID NO: 936083 - DNA, 120 bp, Artificial Sequence
  ENSG00000285810_16 (sequence is synthesized)
tcacacagagattggcaataaaaaggaatcaaatactgatacaagtacaatttggatgaacctggaaaacattatacaaagtaaaagaaagccaggaacatattataacattccatttat

SEQ ID NO: 936084 - DNA, 120 bp, Artificial Sequence
  ENSG00000285810_17 (sequence is synthesized)
acagaatgtctgggaatcagtaaatctataaaaacagaaagtagattggtggttgccagggcctgagaggcaggtagggaatggggagtgactgtttagtgggttcagggtttccttttg

SEQ ID NO: 936085 - DNA, 120 bp, Artificial Sequence
  ENSG00000285810_18 (sequence is synthesized)
aggtgacaaaaatattctgaaattagagagtggtgatgtttgcacaactctgtaaatataacaaaagctctgaattgtatactttaaaagggtgaactttatggtctatgaattatttct

SEQ ID NO: 936086 - DNA, 120 bp, Artificial Sequence
  ENSG00000285811_0 (sequence is synthesized)
aaagttgttgagccaagaattcctagttcattatttccaaatttatcagtcaagtatgtcagaaacttggctcatcttacaatcactgaaggctaggtaggatgttgaatttgttgtcat

SEQ ID NO: 936087 - DNA, 120 bp, Artificial Sequence
  ENSG00000285811_1 (sequence is synthesized)
tgtgtttccatgagcatcaaactttcaggatgggctttagcagctgggaggaaaattctgagataacaattcttaaaattgttattttgagaaatgtggcaaatcaagcctcttgatttc

SEQ ID NO: 936088 - DNA, 120 bp, Artificial Sequence
  ENSG00000285811_2 (sequence is synthesized)
tcagaggttgatattgtatgaagaaatatgaacattgatgactctgagtacaaacacatttcaaacagtcattagaccatttatttaatttgttttccttcctcatgtatacacatgaat

SEQ ID NO: 936089 - DNA, 120 bp, Artificial Sequence
  ENSG00000285811_3 (sequence is synthesized)
gatacataataaatatctaggtctaattaaacttgaaagacttctttctgtaaatataaaataaaaaggcaacacaatcagaaatctttccgtaattggatttgtaaatttttctattaa

SEQ ID NO: 936090 - DNA, 120 bp, Artificial Sequence
  ENSG00000285811_4 (sequence is synthesized)
ttagtgttaacagaaaataatggtgtgccttgtaattgatggcatcttatgttaaaggaagtaagatagttcattgaaatacacttgtaattaacaagtccatatccagtgggagtagta

SEQ ID NO: 936091 - DNA, 120 bp, Artificial Sequence
  ENSG00000285811_5 (sequence is synthesized)
cttacttagtatttcaaagttaaccacagaacaggctcttgctcctttggacaattgactatggatattaatttaattcaaataatctaagttagtaagtaataaagaaaatgctatttg

SEQ ID NO: 936092 - DNA, 120 bp, Artificial Sequence
  ENSG00000285811_6 (sequence is synthesized)
aagcaagattcctgtgaaacatgctgaacacttggatggtaatagcttaacagttacttatctttttttaattaaattctggcccccaaaacctacttctgccttctagaatgagaaagt

SEQ ID NO: 936093 - DNA, 120 bp, Artificial Sequence
  ENSG00000285811_7 (sequence is synthesized)
gtgacgatacattttatttctattccccttttgctgtgaagaaataaaatgtcattagactaggcaagttccttgcaataatcttggctattgtattcatgttctcttcatagatctttt

SEQ ID NO: 936094 - DNA, 120 bp, Artificial Sequence
  ENSG00000285811_8 (sequence is synthesized)
tcttatcagataagatttagatattctcttttctagctaatataatttcaagcccttgtttcattttccttaatttttggtattcggtgtgaatatcttggccataagctgtcctctttg

SEQ ID NO: 936095 - DNA, 120 bp, Artificial Sequence
  ENSG00000285811_9 (sequence is synthesized)
gcttccaggtctctcgattttactcttatattcatgtaatggatctgtattttctaccatagggccttctttttattacagctcagcctttaccttgggtgaaaattcttcactgagatc

SEQ ID NO: 936096 - DNA, 120 bp, Artificial Sequence
  ENSG00000285811_10 (sequence is synthesized)
ctggactccacaagtcctagagagattcctctgtcttcctggcagacagcagagttcattgggcatgacccgccagtgtttgtgctttaataaatctcccatctctcactgatctgggac

SEQ ID NO: 936097 - DNA, 84 bp, Artificial Sequence
  ENSG00000285811_11 (sequence is synthesized)
tgtgctttaataaatctcccatctctcactgatctgggacacttcctcaactaacttgtccagttttccaaccacctctatttt

SEQ ID NO: 936098 - DNA, 120 bp, Artificial Sequence
  ENSG00000285811_12 (sequence is synthesized)
acttttacaattttgaataattttctgtgcttttttttgctaatttatgtacattagttataatatgtttggtatttattgactgcccttttttataccctttattcttttatcacattt

SEQ ID NO: 936099 - DNA, 120 bp, Artificial Sequence
  ENSG00000285811_13 (sequence is synthesized)
atcttttttcttatttgtctgcatatcatgcagtttgctcaggctttctctattaactcattttcatttttcctttgggtaaattctatacattgttatatgtcacatgtatttatatta

SEQ ID NO: 936100 - DNA, 120 bp, Artificial Sequence
  ENSG00000285811_14 (sequence is synthesized)
tttatattatttacacttctaatgtttacaatacattttctgctttttaaaattctggttttattgtggatttatagaggagagaattttcagattacccttatcacagattttgttacc

SEQ ID NO: 936101 - DNA, 120 bp, Artificial Sequence
  ENSG00000285811_15 (sequence is synthesized)
cctattaaaatataaaatatgtgttcttaaatatataatattttcggtgtctctcttttaaatcttcatacctgtttttttctataaattttctttttaaaaaccttttcaaacactcgc

SEQ ID NO: 936102 - DNA, 120 bp, Artificial Sequence
  ENSG00000285811_16 (sequence is synthesized)
tcgcttttcccttaaaaaatattagctacttgtccattttcctagtaacgaacatttagattacatccaaatatcttccacgagaaacatcgctattgtaaaagtataatcataaatgct

SEQ ID NO: 936103 - DNA, 120 bp, Artificial Sequence
  ENSG00000285811_17 (sequence is synthesized)
atggttttgatgttttccctcaaaacacatgtggaaatttaatcctaacgttggaggtggggtttatgggaggtattttggtcatgggaaaacattcttcataaataaacaccttctctg

SEQ ID NO: 936104 - DNA, 120 bp, Artificial Sequence
  ENSG00000285811_18 (sequence is synthesized)
aagagtagaggagagtgagtgattttttttctctattagttttcctgagaactagttgtttaaaaaaaagtctggcacctcccctctctcttgcttcctctctccacatgtgatctctgc

SEQ ID NO: 936105 - DNA, 120 bp, Artificial Sequence
  ENSG00000285811_19 (sequence is synthesized)
acatctggctcctcagccttccaccatagtggaagcaacctgaggccctcatcagatgcagatgctggtgtaatgaaactcatacagtcttcagaactgtgagccaaagaagcctttttt

SEQ ID NO: 936106 - DNA, 120 bp, Artificial Sequence
  ENSG00000285811_20 (sequence is synthesized)
gtttatcaattacccaatctctgttatttctttatggcaacaaaaaacagactaagacaataaaatttttgaaaatttgtttggaatataaatcaatagatgaaattgcagtcttcaagt

SEQ ID NO: 936107 - DNA, 120 bp, Artificial Sequence
  ENSG00000285811_21 (sequence is synthesized)
atacacatactgatttcactgaataaaaccagattattttccacaagacagatgttccttgatttatgatgggtttgtgtcccatcatatgttgacaatatcataggttgaaaatgcatt

SEQ ID NO: 936108 - DNA, 120 bp, Artificial Sequence
  ENSG00000285811_22 (sequence is synthesized)
taatatgctaacatattgaacatcctgtcttagcctggcctaccttaaacgtgctaagaacacttatagtagcctagagttggccagagtcttataacttaatgtctattttataacttg

SEQ ID NO: 936109 - DNA, 120 bp, Artificial Sequence
  ENSG00000285811_23 (sequence is synthesized)
aacacaggacattggagagtacagtactcatgagagcagtattgcttggctgactgggagctggggctcactgctgcttcccagcataacaaaatagcattgtattgcctattacttgcc

SEQ ID NO: 936110 - DNA, 120 bp, Artificial Sequence
  ENSG00000285811_24 (sequence is synthesized)
tagaaaagaacaaaattcaaatttggagtatgtttctactgaatatgtttcatctgcacaccattgtaaagtcaaaaaactgtaagtcaaaccatggcaaatcagggaactgtttgtgta

SEQ ID NO: 936111 - DNA, 120 bp, Artificial Sequence
  ENSG00000285811_25 (sequence is synthesized)
tttaccagttcaaatgctcagcagcattggaaaatagtactaatctcccaaaataggatgttattcaacgttcaaagttttacaagttgacagctttgaggtactatcatgttgtttcaa

SEQ ID NO: 936112 - DNA, 120 bp, Artificial Sequence
  ENSG00000285811_26 (sequence is synthesized)
ttttcattaatcaacttatgagcggcaacacaaaacatagtcatatatagcatttagttatcttacttttcctttctattcctatttattacttgtgctcatttccataatgtatttcac

SEQ ID NO: 936113 - DNA, 120 bp, Artificial Sequence
  ENSG00000285811_27 (sequence is synthesized)
ttctttttcttgtcaatttctagttctttgtacattccagatattagtaattgttttaaaaattaagacattgtaatcatgttctcatattatggtgacacttttatttcatatcaagtt

SEQ ID NO: 936114 - DNA, 120 bp, Artificial Sequence
  ENSG00000285811_28 (sequence is synthesized)
tcccatacgcatgtgtctatttctgagctgtccagctgttccattggtgagtgtgttggttttggccctagtccctatatatattttactcttgccttgccattattatttaatatttga

SEQ ID NO: 936115 - DNA, 120 bp, Artificial Sequence
  ENSG00000285811_29 (sequence is synthesized)
tacgctgagtatcactcttttgggatttttgaagtacatttgctatttagaaagatttattcttttgcatgcattatactattttaatagtttaactctatggcatacacatgtatacat

SEQ ID NO: 936116 - DNA, 82 bp, Artificial Sequence
  ENSG00000285812_0 (sequence is synthesized)
tttttttttttgtagagatggggtctccttctgattcccaggctggtcttaaactcctgggttcaagcagtcctcccaccta

SEQ ID NO: 936117 - DNA, 120 bp, Artificial Sequence
  ENSG00000285812_1 (sequence is synthesized)
gaaccacccacctcacctggctctttcttctttcttaaaattgaccattcttagtagaggtttgtcaatctttccaatcttttagggaaaaaatcagcttttgatattgttaagtttctc

SEQ ID NO: 936118 - DNA, 120 bp, Artificial Sequence
  ENSG00000285812_2 (sequence is synthesized)
catttttctcatgctttctatgccactgatttctgtatttgtctttatttcccttttttggctttgttcttttttccctggcttctgggagtgaatcttaggtctctgctttcatgcctt

SEQ ID NO: 936119 - DNA, 120 bp, Artificial Sequence
  ENSG00000285812_3 (sequence is synthesized)
tacacgcacttagttacagagttctaagtattgctttagctacaccaacaattttgatgttatattttcattattattcagttggaaatattttttcttcttctgttattttttccccac

SEQ ID NO: 936120 - DNA, 73 bp, Artificial Sequence
  ENSG00000285812_4 (sequence is synthesized)
aagcctctgcctcccaggctcacgcgattctcctgcctcggcctcacgagtagctgggattacaggcacctgc

SEQ ID NO: 936121 - DNA, 120 bp, Artificial Sequence
  ENSG00000285812_5 (sequence is synthesized)
tcacaggcgtgagccactgcacccggcccagacagtggactttctatcagtgcgttagtcaccccacactatcatgtggggactgtggctgccctcagggcaaagatgcaaaaacaggaa

SEQ ID NO: 936122 - DNA, 120 bp, Artificial Sequence
  ENSG00000285812_6 (sequence is synthesized)
caaagatgcaaaaacaggaaactgtgctggttgcttcctccaagtcaaaacttccctccaaaatctgccactctccagagccctcagggagctgtttttcatactctgtccatggttata

SEQ ID NO: 936123 - DNA, 120 bp, Artificial Sequence
  ENSG00000285812_7 (sequence is synthesized)
gttgtgctatggcagggtcactctgttagaagtttactctttcccactgaagtagaaccccatcatacggctttctgtgtccagaaaccaaggcgattttagtttctagacggtgggcgc

SEQ ID NO: 936124 - DNA, 120 bp, Artificial Sequence
  ENSG00000285813_0 (sequence is synthesized)
gggggccttagaattttaatcctggtttgcagcagtctttcatatcaaaagtgatagtattttagtagcacacttgaagtaaactggaaaatatttagaggcatctatataggacttggt

SEQ ID NO: 936125 - DNA, 120 bp, Artificial Sequence
  ENSG00000285813_1 (sequence is synthesized)
gcatctatataggacttggtggaaatagttaactccattttctctatattacataatggtaataagaaataaaaataaaaattactattgaataaatttgttcataacttccaaataaaa

SEQ ID NO: 936126 - DNA, 120 bp, Artificial Sequence
  ENSG00000285813_2 (sequence is synthesized)
tgagaaacttaagcttgtttctgtagccataacttttttgaaatcagattgtatacttaaatgactacccacgattcaagacaaaaaagagataatctcttgaaattcttgatagatgac

SEQ ID NO: 936127 - DNA, 120 bp, Artificial Sequence
  ENSG00000285813_3 (sequence is synthesized)
atcaatcagaaatactatctgcacaagtaggatataaacatttaagtcatttttacagccattttaaattatacaacagctgaaattatatttaaaggatatagtacagcttactttttg

SEQ ID NO: 936128 - DNA, 120 bp, Artificial Sequence
  ENSG00000285813_4 (sequence is synthesized)
ttgatgaatgtactattaaaaatccttggcaaaatgtgaatggatttgaatcccatcaaattttttcataccaagtattttaaaataatgatactctattttggagaagacacatgctgc

SEQ ID NO: 936129 - DNA, 120 bp, Artificial Sequence
  ENSG00000285813_5 (sequence is synthesized)
attggagcagtcactctgaagctggcatgaatgccattaaaaagcacatgcaccacaaaggttcagaggactgatacatgaggacagagattctttgctgctgctgaggtatgctttgta

SEQ ID NO: 936130 - DNA, 120 bp, Artificial Sequence
  ENSG00000285813_6 (sequence is synthesized)
gagctgccctctcccattcccatttgccacccacatataccatggcaagaccttgggctgggtgcagtgatccttgggcatctcctccagcagcttctcaggcttcttgtccacagtggg

SEQ ID NO: 936131 - DNA, 120 bp, Artificial Sequence
  ENSG00000285813_7 (sequence is synthesized)
cagtgagattctctgcagctagctactgaatagataatcaatgggtggctgattagctcagttggttacagcatggtgctagtaacgctgagtagatattcaaacctccttggtctcatt

SEQ ID NO: 936132 - DNA, 120 bp, Artificial Sequence
  ENSG00000285813_8 (sequence is synthesized)
cctaccacttggcagagcagcaggtgccaggtgaatcagaagaaactatgggacttacctttacgtcatgtccctgacaaggcatcttctagtttgaagactttcattgccatttctagg

SEQ ID NO: 936133 - DNA, 120 bp, Artificial Sequence
  ENSG00000285813_9 (sequence is synthesized)
gctgaagcacatttggaatctattcataaacacctattaggaagcactgccatgaaagtgcaaattgcaaaattcccacttccggcctattgttggtaacaatgtggtgaatatgttgta

SEQ ID NO: 936134 - DNA, 120 bp, Artificial Sequence
  ENSG00000285813_10 (sequence is synthesized)
tagtcaggcaacccatctgtacctctcttagctttcactcccgatttcatgttactttcttcaggcaggaggctgctgagatctgtgagtgattgggtgtggtaagacttctgcctccat

SEQ ID NO: 936135 - DNA, 120 bp, Artificial Sequence
  ENSG00000285813_11 (sequence is synthesized)
tggggttcctttagaaaaaacagggtggtccactggagaacagctagaatcccaggagtgattccagaaggtaggaaatcccaagaagagcttggactttggggttctgtgaactggaag

SEQ ID NO: 936136 - DNA, 120 bp, Artificial Sequence
  ENSG00000285813_12 (sequence is synthesized)
gagaaatttaccagtaaccttatgaatgtgttagatggcagtgactccaaaagatagagtataacctgaacaggtggcctgagtctttccaaacttgaagccgggaaagtccagggcagc

SEQ ID NO: 936137 - DNA, 120 bp, Artificial Sequence
  ENSG00000285813_13 (sequence is synthesized)
agcatcttccaggtgatttgggcaggactgacagcctatccttatcacacagaaccccttttaagtattcctgcattaggaatatattagcagcagacaggtacagcagctcacacctgt

SEQ ID NO: 936138 - DNA, 120 bp, Artificial Sequence
  ENSG00000285813_14 (sequence is synthesized)
aatcccagcactttgggaggctcagaagggaagatcacttgagacaaggagatcaagaccagcctaagcaagatagcaagactttgtctctatataacaaaactttaaaaattagccaga

SEQ ID NO: 936139 - DNA, 89 bp, Artificial Sequence
  ENSG00000285813_15 (sequence is synthesized)
atgagaccctgtccctttaaaaaaaggaggagcaggagaaggagaaggaggaggaggaggagaagcagaagcagaagaagaggaggagg

SEQ ID NO: 936140 - DNA, 120 bp, Artificial Sequence
  ENSG00000285813_16 (sequence is synthesized)
ggaggaggaggagaagcagaagcagaagaagaggaggagggggaaggggaagaggaaaaggaaggggaagaggaggaggaaggtgaggaggaagaaggagaagaagaagacaacaagagg

SEQ ID NO: 936141 - DNA, 120 bp, Artificial Sequence
  ENSG00000285813_17 (sequence is synthesized)
aagaggaagaggaaggaggaggagaagaaggaggaggaggaggaggagaaggagaagaaataaaactagaaacaaggtcagagcgtcactgaatcatcagagaaaaaaacaactgcctat

SEQ ID NO: 936142 - DNA, 120 bp, Artificial Sequence
  ENSG00000285813_18 (sequence is synthesized)
ctgaggagttccagaaggcagagaatcagattgaacaatcataacacgtcttgtcaaatagaactactggaggagaaaaagaaacacatgtatttcttaaagtttttttttaaaaaaatg

SEQ ID NO: 936143 - DNA, 120 bp, Artificial Sequence
  ENSG00000285813_19 (sequence is synthesized)
ttgagatccaagtgaaataaaatattgttagatggaagctacttaactcatttattcaataaatgagttaataatgtatgatgggccaggcactcttttcagcgcttgagataaagcaat

SEQ ID NO: 936144 - DNA, 120 bp, Artificial Sequence
  ENSG00000285813_20 (sequence is synthesized)
gaacaacacaattaaagatccttatttttgtgaagcttatagtatagcaagagaagacagacaatacatggtaatataatacataagtaaattacgtgacacattagaattgacaatgtt

SEQ ID NO: 936145 - DNA, 120 bp, Artificial Sequence
  ENSG00000285813_21 (sequence is synthesized)
ctggaataaaaagaagagcaagataaaagggattgggactggtggggagagggacagtttgaaatattaaatagagtggtcaaaatcagcctcattgagagggtgacattttaacaaaga

SEQ ID NO: 936146 - DNA, 120 bp, Artificial Sequence
  ENSG00000285813_22 (sequence is synthesized)
cttgaaagaagtgtagaagtaaatcatacagatacatgagagaaagtgtcttgcaggcagagtgaatggttagtgccaacacctaaggacagggcatgtccaacatgtccaaggagtgag

SEQ ID NO: 936147 - DNA, 120 bp, Artificial Sequence
  ENSG00000285813_23 (sequence is synthesized)
aaagacaccagaggggctgccttgttgtgaggggaaagaatagtaagatacgaagtcagaaacgaggtgggggaccggatcacacatgattgcatacatttttaaaccatttttatgatg

SEQ ID NO: 936148 - DNA, 120 bp, Artificial Sequence
  ENSG00000285813_24 (sequence is synthesized)
attgcatacatttttaaaccatttttatgatgaaaatttccataaaaagttatgagaaatgagagaagtgaatatacatagtattttggaaacagatagttaatatacctaatatacttt

SEQ ID NO: 936149 - DNA, 120 bp, Artificial Sequence
  ENSG00000285813_25 (sequence is synthesized)
aaattatagtcaatttatacatgcaaatatgctcagcatcactaattatcaaagaaatgcagttgacaccaaaatgagatacatataagattttcagtactagcaaggatgaaaataagt

SEQ ID NO: 936150 - DNA, 120 bp, Artificial Sequence
  ENSG00000285813_26 (sequence is synthesized)
ttctaacactattgttgggagttccatatttgcatgtaacttgacgatataaattaaaagttaaaatacatatactctacgatccagaaataccacttctagaaatttaaccaactgttc

SEQ ID NO: 936151 - DNA, 120 bp, Artificial Sequence
  ENSG00000285813_27 (sequence is synthesized)
atatttccaaggctgtagatatgtatatatataattttataaacatagctttgctatttcaatgttcattttacactagctctactgtaaagtatcaatcctcctaatcatcatcatgta

SEQ ID NO: 936152 - DNA, 120 bp, Artificial Sequence
  ENSG00000285813_28 (sequence is synthesized)
aatgtccagccataggaaaagagcttaattctgtaattaatattcataaaattgaattgtacagtcattaaaaataatgaggtacatatctacatgtactgacctggaaagatgtccaca

SEQ ID NO: 936153 - DNA, 120 bp, Artificial Sequence
  ENSG00000285813_29 (sequence is synthesized)
atatccttcttttacagatgagaaaactaaagctcaaagaggttaagtaacatacacaaggccactctaatagaaaacaatggctctgggatctaagctgagttcttactccatggttta

SEQ ID NO: 936154 - DNA, 120 bp, Artificial Sequence
  ENSG00000285813_30 (sequence is synthesized)
tacacttgtctctagtatgcactgccttaaattaaaaaataaaaagtcttagacgagatcaagctcctttaataagtataacatattcattacataaatcatctgtgctaggcactgtgc

SEQ ID NO: 936155 - DNA, 120 bp, Artificial Sequence
  ENSG00000277491_0 (sequence is synthesized)
tgactgcagcctctgagaaaagcaactctgggcaaagcataggtgtccagatgtgcctggagctcacgctgggtgcccaccggctggcccttcggttcctgcttcggggcagagagcgtt

SEQ ID NO: 936156 - DNA, 120 bp, Artificial Sequence
  ENSG00000277491_1 (sequence is synthesized)
gaaatcactctcccctcgccccagccgctggctcctggctgggagcctggtcattaaggtccagaggagaaacagacctctggggacctgccgttcacctgggaccttccgctgcttgcc

SEQ ID NO: 936157 - DNA, 120 bp, Artificial Sequence
  ENSG00000277491_2 (sequence is synthesized)
acagcaaccccagatgtccgcaccagccacgctgggccacacttagccccacttttgccattctaccacgcacagccctcacacacactccccatccaaggttccagggctctgggctga

SEQ ID NO: 936158 - DNA, 120 bp, Artificial Sequence
  ENSG00000277491_3 (sequence is synthesized)
aaatcaccagctgtactgcagggcctggggctgccctcttgaccaagctacctctccctcaggagcagagctgacaggctcacctgtttttaagaaaacatgttgccaccttaaaaattc

SEQ ID NO: 936159 - DNA, 120 bp, Artificial Sequence
  ENSG00000249478_0 (sequence is synthesized)
aacaacacttgtgatggttcaacccaacagccattacctgtgacttttgagatgccctgtccctgtttctgcccgttcctgtctcctggccctcaggatcataaaggacagtgaggaaga

SEQ ID NO: 936160 - DNA, 120 bp, Artificial Sequence
  ENSG00000249478_1 (sequence is synthesized)
cagttatgagatgaagggctcagagaagtccaacagctcacccgaagctgctctggatttgctggaggcagagaagcagtgcctccctccctgcgtgagtcaaggctgacgtggacagtg

SEQ ID NO: 936161 - DNA, 120 bp, Artificial Sequence
  ENSG00000249478_2 (sequence is synthesized)
ctagggagcctcacccagctgttgctggctgcttggtggggactcaggctgcaagctgctgagaatattatttagcagcagcaggaataataatacaataataatattaatgatagtaac

SEQ ID NO: 936162 - DNA, 120 bp, Artificial Sequence
  ENSG00000249478_3 (sequence is synthesized)
aatagtaatgatgacagtgataatagcatttatagaacaccatacgtgaagagccttacatgcatattgtcatttagtccttactggaaccctatgaggctggtaccattatttatcccc

SEQ ID NO: 936163 - DNA, 120 bp, Artificial Sequence
  ENSG00000249478_4 (sequence is synthesized)
acttcaccctccgagtggccgctgtgcaggctgggtggtcagagaagcagagggctgaggcccagaatgggtttgcatgttctgtttctgcagaaagtgaggcagcaccccatccttccc

SEQ ID NO: 936164 - DNA, 120 bp, Artificial Sequence
  ENSG00000249478_5 (sequence is synthesized)
aaccccaatacctagaatgggggccagagtagggagggaatgtgtggatctgcttctgagatgggtctcaccccagcccccaaagcctggacctgagtccccaggagacaggggctacag

SEQ ID NO: 936165 - DNA, 120 bp, Artificial Sequence
  ENSG00000249478_6 (sequence is synthesized)
gggaatctcaccagggaatggccccttgtgggggccccacagcaggggctgggggcaaagtctccccttctaccagacacaagcacaggcacactcctgggggccgcctggcccaggccc

SEQ ID NO: 936166 - DNA, 120 bp, Artificial Sequence
  ENSG00000249478_7 (sequence is synthesized)
aggtcatgccgagcacagggtgctgctggtggccacgcctctgcttagcttctgaggtgggggcagtgggctgtgcctcctcaaggactgaggtgagtggggacacagggccaggtcaga

SEQ ID NO: 936167 - DNA, 120 bp, Artificial Sequence
  ENSG00000249478_8 (sequence is synthesized)
agcacatccagacacacagctgcttcagtaacgaaacccacagtcagccaggaagtaaacaaattacaggctgcactttgttagctctggggaacatgaacgtgagcagacactactgat

SEQ ID NO: 936168 - DNA, 120 bp, Artificial Sequence
  ENSG00000249478_9 (sequence is synthesized)
ttctcatcaaacaaacagaaggcggcgtcataatccagagacccactgccaggaggggctgcagcatgtgccctgggctgctgatctgctggggtgcacctgtctttgggggccttacac

SEQ ID NO: 936169 - DNA, 120 bp, Artificial Sequence
  ENSG00000249478_10 (sequence is synthesized)
cattcgtccataattctagcctctgctcagtggtggatttgttttccctcttacaagctgggctgggtaaggctaaagcctcctgcaaggcagtggctcaggtgtccttaggagacatac

SEQ ID NO: 936170 - DNA, 120 bp, Artificial Sequence
  ENSG00000249478_11 (sequence is synthesized)
gagcagtcaaggttactagactagtaactttccaaggttctagttagtaagtggcagaccccaggctcatgcccttccctaggaagctgtgccgcctccttccctcaggtaggggaggtg

SEQ ID NO: 936171 - DNA, 120 bp, Artificial Sequence
  ENSG00000249478_12 (sequence is synthesized)
tgcgtgtgttttgtgtgtttgtacacatcgggcttggacccctgcggggctggtgctgccctgctccctcgtgtagggggttctgagaagcactgggccctgcctatttgcgggctactg

SEQ ID NO: 936172 - DNA, 120 bp, Artificial Sequence
  ENSG00000249478_13 (sequence is synthesized)
tttcctgggagataatgaggggccattcatctctggttgcacccacaattacccaaattgctaaccttattgtgaaaagtagaaatgcaattgagttggtgctggaggcatgtttgaggg

SEQ ID NO: 936173 - DNA, 120 bp, Artificial Sequence
  ENSG00000249478_14 (sequence is synthesized)
agaggaagaccactcaaagtaatttaattaactgatggcaagtacattaagtggagttttgcctctgcttttatttctgatgtctttcagtggagcgccaagtaatgcacatgaaatgct

SEQ ID NO: 936174 - DNA, 120 bp, Artificial Sequence
  ENSG00000249478_15 (sequence is synthesized)
cccacagacacaggtggagctgtcccagtactgatcaatctttcctggccaaacatgtttaaaagctggcactgcaccttgtgagcaggtacagtagaggacatcacactcacaaacatg

SEQ ID NO: 936175 - DNA, 120 bp, Artificial Sequence
  ENSG00000249478_16 (sequence is synthesized)
caccccaacacagtccagtctttacagataggacactgctctttcttgctaagttctcagacaagccctggccatcgcaggcccagaaaatgaagggttctgcccatccagcatctgtcc

SEQ ID NO: 936176 - DNA, 120 bp, Artificial Sequence
  ENSG00000249478_17 (sequence is synthesized)
agcaagcacccaccaggattgtgctgcattgacattcaaaattgtataggatactggctatgttcaccatggtgggaaatcacaagaaaacaatcctgtccagtgtgacaaggctagggg

SEQ ID NO: 936177 - DNA, 120 bp, Artificial Sequence
  ENSG00000249478_18 (sequence is synthesized)
aagggcactccttggcagctctgcccagggtagaacctccagagtggccccctctttccatctgcttcccccatgacccccagggtgtagctgaaggggcctagagagtaggagaggact

SEQ ID NO: 936178 - DNA, 120 bp, Artificial Sequence
  ENSG00000249478_19 (sequence is synthesized)
aactttggtggttcctgcagcatttcatgctgggtctctctccccacaagtctcagagttggaagggacctccaaggtcactgggtttagctgccctcttgtggctagcagcattgctga

SEQ ID NO: 936179 - DNA, 120 bp, Artificial Sequence
  ENSG00000249478_20 (sequence is synthesized)
ccacagtccctgcctgagcttgcatatgccccttgggataaggagctcagcgcctcctgtggcggctctgtctccatggtggggcaggtttgatggctggaatggggttccatctaagga

SEQ ID NO: 936180 - DNA, 120 bp, Artificial Sequence
  ENSG00000249478_21 (sequence is synthesized)
gcccaaattgatctccttttgaggtgcaccttgtgctagtccaactcagggggtcacacagcccaggtcagctccctttgccccagcccctaccccaccaccttcgagatgttagcagga

SEQ ID NO: 936181 - DNA, 120 bp, Artificial Sequence
  ENSG00000249478_22 (sequence is synthesized)
actgaccattcatcccatgggtctttcttttctgggcaagcatcccactgtggaccagctgtcctgtcctgagccaacaaggctaaggctgccctctcttctgcatgaaaattatattcc

SEQ ID NO: 936182 - DNA, 120 bp, Artificial Sequence
  ENSG00000249478_23 (sequence is synthesized)
agttactgtaacctaagacccgtcagctgtcctggcagctcactacatgggtgacatcactctgtcttctcacatgaacttctgggaagccacatcacctcttgtgccaaacctggacca

SEQ ID NO: 936183 - DNA, 120 bp, Artificial Sequence
  ENSG00000249478_24 (sequence is synthesized)
ataaatatccttgaattatgccacttctttaagtctaatagaagggaagtattgctaacgtttttcttatagattaattcattgaggatcggcaggttaagaaattactcaaagtcacaa

SEQ ID NO: 936184 - DNA, 120 bp, Artificial Sequence
  ENSG00000249478_25 (sequence is synthesized)
agctgacgtgggtgatgctgggaccccaacggaggctgcctggttcctcagggcacagacgtaccccctgatggccacactaggctgcatgagctcagttgctttcttcttccacacagc

SEQ ID NO: 936185 - DNA, 120 bp, Artificial Sequence
  ENSG00000277496_0 (sequence is synthesized)
agcagccgagtccagcaatgtggacagccagacgcatgcttggtggaggcagccagcgcccccatcctggtctcggtcatcagttccatcaatgacaaatgctgctggggcccatgagga

SEQ ID NO: 936186 - DNA, 120 bp, Artificial Sequence
  ENSG00000277496_1 (sequence is synthesized)
ccacccgcgccactcacatgttgctttccttctgcgatctgctagcttccgagatggccaaggcagatgcactcatggctcagtgagaaggtgaacgtcacctctgcgttcactgctaat

SEQ ID NO: 936187 - DNA, 120 bp, Artificial Sequence
  ENSG00000277496_2 (sequence is synthesized)
ggagactggagtaatgatgtctggtccgcgttaaggcgggcagctcggcagcccacacctttggttttctggtctcaggcccattatggataagctggtgtggggtggggcaggggagtt

SEQ ID NO: 936188 - DNA, 120 bp, Artificial Sequence
  ENSG00000277496_3 (sequence is synthesized)
tcaggggctggaagggcctcatggcagccccacgtagaggctgcctagcccctggactggccccaccaaggggaacaggacattgcagctgggcttggggaagaagggaggcctgtcctt

SEQ ID NO: 936189 - DNA, 120 bp, Artificial Sequence
  ENSG00000277496_4 (sequence is synthesized)
ttgattcttctttctggcatcctgtgtgtgcacgtctgtgtaggtgtgtgtacacatgcacacctgcctatagtttctttccacttggaattggttttgacaaaaaggtgcgtcagcttc

SEQ ID NO: 936190 - DNA, 120 bp, Artificial Sequence
  ENSG00000277496_5 (sequence is synthesized)
ccaagctggtccctgtaacagtgaaggatggagcctcatcctcatcccagagccacaccctcagcttcccctggaaaaggcagcggcttcttccgatccacaccctcagcttcccccgga

SEQ ID NO: 936191 - DNA, 120 bp, Artificial Sequence
  ENSG00000277496_6 (sequence is synthesized)
aaaggcagcagcttcttctgatgcatggatacagcccccactacggagctggggagggagctgcaggcagccttgaccccagaccaaattcaaaggacctgcctcttccaaaggcctccc

SEQ ID NO: 936192 - DNA, 120 bp, Artificial Sequence
  ENSG00000277496_7 (sequence is synthesized)
gccacggggaccccatgaccgtcctctcatcccaagctggctgcatggggtgggctggtttatacgcagataagactgcacctgctgatgaggccagatgcaggtgaaccccggtgctgc

SEQ ID NO: 936193 - DNA, 120 bp, Artificial Sequence
  ENSG00000277496_8 (sequence is synthesized)
aaatgaggagtctgcagatggggtgaggctgaaaggcagttgtggaaggccgggcagtggcagccacgtggcagaggagggggtgggagacccggggcagggatgggacagccatggggt

SEQ ID NO: 936194 - DNA, 120 bp, Artificial Sequence
  ENSG00000277496_9 (sequence is synthesized)
gcaggagactgcaccccctgtgaaggacaggccagcggccagcccccaggccaccctggctcctgtcagcatcccaggtcgagtccactgtcatcctcatctgaacaccctgactgcatc

SEQ ID NO: 936195 - DNA, 120 bp, Artificial Sequence
  ENSG00000277496_10 (sequence is synthesized)
taacaccagggcatctgcttcctggcctctgcagggcccactctacagcctctgacgctatgtgcgatggtctcagggtcagggccaagagcactgtgatagcgaatttcatgtgtcaac

SEQ ID NO: 936196 - DNA, 120 bp, Artificial Sequence
  ENSG00000277496_11 (sequence is synthesized)
ctgagtgggccttgggtgcctagacatttagccaagcatcgttctgggtgtgctgtgggtgtttccaggtgagattagcatgtgaagggtggccctccccagggtggtgggcctcgtcca

SEQ ID NO: 936197 - DNA, 120 bp, Artificial Sequence
  ENSG00000277496_12 (sequence is synthesized)
atcagttgggggcctacatagatccaaaggctgagtgagagggcctcctcctgtgacagctgcagctgggacctcggtcttttcctgcctttgggcttggactgaaatgccagctcttct

SEQ ID NO: 936198 - DNA, 120 bp, Artificial Sequence
  ENSG00000277496_13 (sequence is synthesized)
tgggtcttcagccttcaggctggaacctgcagcagcatttctctggttcttgggccttcagactcagactggaccgaaaccatcagctctcctgggcctccagcttgccaacgacaggtc

SEQ ID NO: 936199 - DNA, 120 bp, Artificial Sequence
  ENSG00000277496_14 (sequence is synthesized)
tcgggacttgccccttccataagtgcttgagccaggtcttcaggataaatctctttccacctatcctgttggttgtgtttctctggataactcagactaatacaagccagtccttccata

SEQ ID NO: 936200 - DNA, 120 bp, Artificial Sequence
  ENSG00000205634_0 (sequence is synthesized)
gttggtactcctggttctcagggattcagactctgactggcgtccactccattggatcccggccctcaggtcttggaacttgcactgccagcattcctgggtgtccggcttgcggacagc

SEQ ID NO: 936201 - DNA, 120 bp, Artificial Sequence
  ENSG00000205634_1 (sequence is synthesized)
agatcgtgggacttctcagcctccagaattgcacgaagtgtctccttacgaatctcttcctatgtacgtgtatcctattggctctgtttctctgcagaaccctgactaatgcaaaccctc

SEQ ID NO: 936202 - DNA, 120 bp, Artificial Sequence
  ENSG00000205634_2 (sequence is synthesized)
tcatctcacagcagtgcatgtacaaacccactcacatcttcccctcccctgccttccctaccgcaagttccctccgaccagaggccaatcccgctgcggtgccccggacccaccctctgc

SEQ ID NO: 936203 - DNA, 120 bp, Artificial Sequence
  ENSG00000205634_3 (sequence is synthesized)
accagccttccttcttgttttctaaaagctcgcgttttctgtgggcttccaaggctgctcttcagtatctttacgtcagagcctcccagctccttcccctctctcaaaagcgttttcaca

SEQ ID NO: 936204 - DNA, 120 bp, Artificial Sequence
  ENSG00000205634_4 (sequence is synthesized)
gggactgtaggctccttccctccccttgataaccaagtactatgccccaggttcttacctcacagcccaaagttgtcctaagtcgggccctgacctgagtgtctccaaatccagcaggcc

SEQ ID NO: 936205 - DNA, 120 bp, Artificial Sequence
  ENSG00000205634_5 (sequence is synthesized)
gtctgctctcctgtgacatgcagcatcccacggcttttcctaaaagaccccctctgtcagctttgctgtcacccaccctccagggctctctcttacaggtctgccctttgctagcatctt

SEQ ID NO: 936206 - DNA, 120 bp, Artificial Sequence
  ENSG00000205634_6 (sequence is synthesized)
agcctctccacctcccggtggtcctgtctgcgatggaccccctccatgtgtcccaaggccctccaaaggaacaggtctgtatcaggtgcaattagattgaggtgcaatgcaagggcttga

SEQ ID NO: 936207 - DNA, 120 bp, Artificial Sequence
  ENSG00000205634_7 (sequence is synthesized)
attgcagagaggttcatttttctttttgtagaaaagtctgggaccagctgtcagagactgatttggccactccatggtcaccaggaccaggctgtgtccatcttttctgttctgaccttt

SEQ ID NO: 936208 - DNA, 120 bp, Artificial Sequence
  ENSG00000205634_8 (sequence is synthesized)
ttcacatgggccattgtccatgtcaccgctggtcaccagctgcagcagtcgcattcttgctccgggcagcaggaagaaggtgagaccagaaggcagagggggctggtcctgcctggtcag

SEQ ID NO: 936209 - DNA, 120 bp, Artificial Sequence
  ENSG00000205634_9 (sequence is synthesized)
cccccagggggctttgcccagacaccccttccccacccatggctctgctgatttctctatagctgccaccctctgaaaagggagctggcagagtagttcttagacatggcacctggccac

SEQ ID NO: 936210 - DNA, 120 bp, Artificial Sequence
  ENSG00000205634_10 (sequence is synthesized)
ctctgtggctgaagaagaagggggttgaggattggggtacacacctgtcagtctccatgcaatgccccaaagtggaccactgaccccacaccacgctgttctcctctgagttttctcacc

SEQ ID NO: 936211 - DNA, 120 bp, Artificial Sequence
  ENSG00000205634_11 (sequence is synthesized)
tctgtccaaatggctgcagaagccaaaagccccagagcccagctccccttccctcctttctcttccatccttccatccttccatgagcctgcccctcatcctcctcagggctggaactgg

SEQ ID NO: 936212 - DNA, 120 bp, Artificial Sequence
  ENSG00000205634_12 (sequence is synthesized)
ctgccggattcctccctggctccgtgggggctggctcagcaatctgagctgccgatggctctgtggtccagctgggaggattcatgccccattggggctgagaggaatgaggtgagggct

SEQ ID NO: 936213 - DNA, 120 bp, Artificial Sequence
  ENSG00000205634_13 (sequence is synthesized)
gtggggtttgcccagaatctcctgaaatatcgggcccaggaactacagcaggactctcattccgccttctggccactgttgggggtgacactggcaggatccaggggctctggaaagctc

SEQ ID NO: 936214 - DNA, 120 bp, Artificial Sequence
  ENSG00000205634_14 (sequence is synthesized)
caggggaaatttgaggcataacccagcttctctgagacggaactcagggaggatccagctcaatcctacagaggcgaccccaaggaaggacctgcccagggtcacttggagagctgggcg

SEQ ID NO: 936215 - DNA, 120 bp, Artificial Sequence
  ENSG00000205634_15 (sequence is synthesized)
ggaggagggagaaacctcccccgttcagagtgacaaagccccccttgcctcagggatggctgagatccaagtcctcaaaacacgccgccatctggagggtgtgagagcgaggtccgtcct

SEQ ID NO: 936216 - DNA, 120 bp, Artificial Sequence
  ENSG00000205634_16 (sequence is synthesized)
cagcatggacgctgcagtgcacactgttccgtgccaggtgctggctgaccctgccctgtgggaggtgatggacaggcacacagggggagccccgcaaacaaggggccctgttacagcaga

SEQ ID NO: 936217 - DNA, 120 bp, Artificial Sequence
  ENSG00000205634_17 (sequence is synthesized)
ttgcaggtttcaccaagcaagagcggagaagacacaggctggacaaaggaaggtggacgggacagccagccgtgcagcagcctcacaggacacagctaccagacagagagcaccagctga

SEQ ID NO: 936218 - DNA, 120 bp, Artificial Sequence
  ENSG00000205634_18 (sequence is synthesized)
cactcattcctccagcaccaggaaatgccacagcagaagagagtcttcaagatgggccagacccacttctgcagcatggttgctgggagcctgcacaggccaggcatttctctacaggtg

SEQ ID NO: 936219 - DNA, 120 bp, Artificial Sequence
  ENSG00000205634_19 (sequence is synthesized)
caattgagaactcactgaggcaaaagggcctttgtcaacccacagaagtgacaagtccaagtgcagaccaggcttcaggtccagttgctcttcagaactcaaaatcccatctctgcaggt

SEQ ID NO: 936220 - DNA, 120 bp, Artificial Sequence
  ENSG00000205634_20 (sequence is synthesized)
ctcagccaatcctgctcccgcctgtttttatttcctgcccagagcaagtacagaaccgagggccatcgatgggcgagaaatcactgtgcctccaagctgtatttttcaccgtaacaagtc

SEQ ID NO: 936221 - DNA, 120 bp, Artificial Sequence
  ENSG00000205634_21 (sequence is synthesized)
attacttctgtgcccggagtcatttctcaggatcttaatgcattcgtttatcaatcaatacttaactgatgtctataaagcatgttcaaaatcagaggtgagagcagctcaccaggtacc

SEQ ID NO: 936222 - DNA, 120 bp, Artificial Sequence
  ENSG00000205634_22 (sequence is synthesized)
gacttcgtgtctggagccaccttgttaaggagcaacccttggcacgggtcccgtgtctgcaccctcgggagctctgggtgggtgcactggggtcctcacagcccttcccaccaccgcaga

SEQ ID NO: 936223 - DNA, 120 bp, Artificial Sequence
  ENSG00000205634_23 (sequence is synthesized)
tggaaatctctacctggcagaggggctcagtcgtccccacctgggagtctggggcctaccggcagcagaaggtgcagtggccaaacacagagacatttctatcatcagacctggtcccca

SEQ ID NO: 936224 - DNA, 120 bp, Artificial Sequence
  ENSG00000205634_24 (sequence is synthesized)
gcctgactctgctgcccacttacccctggccagggcgagttcatcgactgtgccgagcctggctgcttctccagcctaacaggagtccccgtctcgacaggactgagtggggtgaatgca

SEQ ID NO: 936225 - DNA, 120 bp, Artificial Sequence
  ENSG00000205634_25 (sequence is synthesized)
gccaagtgctcagcagagactgtcccaccgggaagtgttcacaaatatgggctgttgaacctgctgttgttagatctagatccagttctgcgaccacgttcatgacttagatcataactg

SEQ ID NO: 936226 - DNA, 120 bp, Artificial Sequence
  ENSG00000205634_26 (sequence is synthesized)
aagtgcgggccagccgaggccgggccgtttaggggtttggctgctaattcaagaaggacacctgggtttggatcccagagttccctccagacccagatgtggcctcaggcaggtgatgag

SEQ ID NO: 936227 - DNA, 120 bp, Artificial Sequence
  ENSG00000205634_27 (sequence is synthesized)
cctggagatgcggtttcattttctgcagggtggtcaaaggagatctcaggcttgtaggagacaaagcacatcgccccgaactgctcaggaggcgcagattacagccaccctccttatcca

SEQ ID NO: 936228 - DNA, 120 bp, Artificial Sequence
  ENSG00000205634_28 (sequence is synthesized)
ccccgtctcccatcacagccctcatgagtgctcaagcaaggctcagggcctgatggacgtggctgcctcctcctagaggacaggcatgtctcggctgcctgcaccagccagcggcccttc

SEQ ID NO: 936229 - DNA, 120 bp, Artificial Sequence
  ENSG00000205634_29 (sequence is synthesized)
tccccggccaggagatcctccaaggaaggccaagggccaagcagctgctggagcagatgaccacaaactcagtgactgcagagtgcacgcgctcatcaccttacagttgtgtaggctggg

SEQ ID NO: 936230 - DNA, 120 bp, Artificial Sequence
  ENSG00000205634_30 (sequence is synthesized)
atcccactgggctaagaccaaggtgttgggaggctgcgtttcttgctggatgctgtaagggagaagtcgtttcctcgtgtttttttaacttccttggcccacggaccttcctccaccttc

SEQ ID NO: 936231 - DNA, 120 bp, Artificial Sequence
  ENSG00000205634_31 (sequence is synthesized)
aaagccagcagcctcgcgtcttctgaccttccattgtcacatcgtcatctgacccacgtaaggacccgtgtgattagggtgggcgcacccgggtaatcttcccatctcaaagtccttgac

SEQ ID NO: 936232 - DNA, 120 bp, Artificial Sequence
  ENSG00000205634_32 (sequence is synthesized)
tgaatcacatctgcaaagtcccctttgctacgtaaggtcacatgttcacaagatccagggattaggacttggacatttttggaagcccattgtcctgccaacagcacaagacctccaggt

SEQ ID NO: 936233 - DNA, 120 bp, Artificial Sequence
  ENSG00000205634_33 (sequence is synthesized)
gatcctgatgtgtaacgcacagtgagagacaaatgctctgatggaccatcaacagcagaacagacataaatggaagaaaatgtacataaaagagagtccacttaaacatgtgatcctctc

SEQ ID NO: 936234 - DNA, 120 bp, Artificial Sequence
  ENSG00000205634_34 (sequence is synthesized)
caagatcccaggtcctgacccaaggcagtcctgacccatggtctatccccaccggcccttccctggagctgtgcctcagctggggaggtacttctggaaggcaggtggaggaggtccagt

SEQ ID NO: 936235 - DNA, 120 bp, Artificial Sequence
  ENSG00000205634_35 (sequence is synthesized)
cagtgagagacaaatgctctgatggaccatcaacagcagaacgtaagcagggagagggaccccgccttcctccccaatctggccctgtgcctagcaaattatagaacttttgtaagcaaa

SEQ ID NO: 936236 - DNA, 120 bp, Artificial Sequence
  ENSG00000205634_36 (sequence is synthesized)
tggactggtgcctggcccatggtggatgcccaggacacgcatgcggactgtttgaagggggaaggagtgagtagcccccagccctggagctggcttcattccacctgcacggttcctgga

SEQ ID NO: 936237 - DNA, 120 bp, Artificial Sequence
  ENSG00000205634_37 (sequence is synthesized)
atgcaccaaaccctctcctcctgcctctttctacctgctgtgcctggagacagcaagagctccctcttctccaagactcccccgtcccacagctgtctgccgctccttgtcggacccgca

SEQ ID NO: 936238 - DNA, 120 bp, Artificial Sequence
  ENSG00000205634_38 (sequence is synthesized)
ctccagggtcacgtgttcggaggaggctctgggcttctctaagagcaccctcgtcaccgctactcaattctcctgtttgatttttgcagggcagcgctgtccaatggaaacaatgcagac

SEQ ID NO: 936239 - DNA, 120 bp, Artificial Sequence
  ENSG00000266905_0 (sequence is synthesized)
ctgttgagtgcctctgggacctgtatttttcttgctggggtgggatttattccgcttctcccgtactcctgcatctccaaggccagtggaggacaccaggggacagctggctgagatcaa

SEQ ID NO: 936240 - DNA, 120 bp, Artificial Sequence
  ENSG00000266905_1 (sequence is synthesized)
gccatttactcaaaaaatgcagccggcagagattccacagctgggaagctgactggtaagcaccctgtgtaagtgaacgcgctcagtgggatggaaggaagagtactgaggggacgcggg

SEQ ID NO: 936241 - DNA, 120 bp, Artificial Sequence
  ENSG00000205636_0 (sequence is synthesized)
tctcaaaaggccacatgtagaatattcaaaaagtgttgaagtttcaaaaatcttctaatattttaaatgcctaatagacataaaacaaaagaccaaactctcctgcctgctcagcagtac

SEQ ID NO: 936242 - DNA, 120 bp, Artificial Sequence
  ENSG00000205636_1 (sequence is synthesized)
atgacagcccctgttccccagttcaaactttctgagactgcaagcctactttgcaagaggaaaatctccacagctatgtcatctacctgcttatagggtgtaaaattcaatctatgacta

SEQ ID NO: 936243 - DNA, 120 bp, Artificial Sequence
  ENSG00000205636_2 (sequence is synthesized)
acaaatcaatattgtaaattatattacttggatactcatttgtcttacatttatttatttagcctgctctgtgggtcaaataagaggagaatcttaataaacagtcttactactattgaa

SEQ ID NO: 936244 - DNA, 120 bp, Artificial Sequence
  ENSG00000205632_0 (sequence is synthesized)
atcgagttttccctgatcaagtaagacagaccctaagctggagccaagtggctgcttctggactgcgctctgtcttccgtgagaaactgcaagaccccgagccaccgagagggagaccta

SEQ ID NO: 936245 - DNA, 120 bp, Artificial Sequence
  ENSG00000205632_1 (sequence is synthesized)
acaggagccccgagaagggccccctgcgtcgctggcacctgcctggcacagagcccttgctgtctgtttgatgaggatcacttgtcctgcagccagagacagtggggtttgggtccagcc

SEQ ID NO: 936246 - DNA, 120 bp, Artificial Sequence
  ENSG00000205632_2 (sequence is synthesized)
ctgccacctcctggcaacctaatttgtgagagccgttgagggggagaatgtggagattcctgcgggatgctcccggccatgtctacaggaagtgcttactgttcaatggcatgctttgtt

SEQ ID NO: 936247 - DNA, 120 bp, Artificial Sequence
  ENSG00000205632_3 (sequence is synthesized)
ttggatagaatcggactccctccccagcagagagcgggaggcaggcattgtgatccctgtgcactacagtagctggtgttctaaagatgccctgcgtggcatggcctcatattctggagc

SEQ ID NO: 936248 - DNA, 120 bp, Artificial Sequence
  ENSG00000205632_4 (sequence is synthesized)
caaacagacttctggggggatggtgtctccgtttccccaaccccaggggcccagctgggaggagacagcaggcaagggtgtcccctgctgatctttccacaagacctgcactcagtcccc

SEQ ID NO: 936249 - DNA, 120 bp, Artificial Sequence
  ENSG00000205632_5 (sequence is synthesized)
acatcaatgggcactgcccacccagacagcacctactcctgtgggcagcacccagaaccggtgctcacgatggggaagtcaggactttggagaagcgggaaactggagcccgagggcagg

SEQ ID NO: 936250 - DNA, 120 bp, Artificial Sequence
  ENSG00000205632_6 (sequence is synthesized)
gtgctcaggagagacccatccagacagcaatgctcaaggccaagtgagaccaacgacctggaatccagggagaaaacagtgccagtcctgtttctctgggcctcatcctctcctccatca

SEQ ID NO: 936251 - DNA, 120 bp, Artificial Sequence
  ENSG00000205632_7 (sequence is synthesized)
aaatgaggaaccgtggactgcaggagcattgaggaagccacgtggagtccccgctctgtgttgagccccgtagggtgcccttcctgtgggcggccattctgggcgtggcgccccctgtct

SEQ ID NO: 936252 - DNA, 120 bp, Artificial Sequence
  ENSG00000205632_8 (sequence is synthesized)
gaaatcagcagcacaccagctccctgtgctccgtgtgacaagctgccagggacaaagagagactcccctgggaccacagcagtaggcacggcattcctgtgacagaaatcaatgccacag

SEQ ID NO: 936253 - DNA, 120 bp, Artificial Sequence
  ENSG00000205632_9 (sequence is synthesized)
atcgagggatggagccaccggctccccaggctgagtccccttccggtaacacggccacactccttcctccctccaagaagatcccagggagggcgatcccgcctggatgcgttcctcact

SEQ ID NO: 936254 - DNA, 120 bp, Artificial Sequence
  ENSG00000205632_10 (sequence is synthesized)
ccctttcaggtggccccagacgctgggcattgggaggtggccacatggggacatggacatgaaggctgggtaagtgtggggaccaggcgagctggctgctggacacccacccaccctgtg

SEQ ID NO: 936255 - DNA, 120 bp, Artificial Sequence
  ENSG00000205632_11 (sequence is synthesized)
agctgcaccagaccctactctctgtgctctggaccccaggaagcagtcaggattgggggggtcccactcacaggccccggcgccttccacctgggcagctgccatgtgcaccctcaggct

SEQ ID NO: 936256 - DNA, 120 bp, Artificial Sequence
  ENSG00000205632_12 (sequence is synthesized)
tcagactcctggccacgggggcggtggtgtggaccccaggccgtgtgtgcagatgcagcaaggtgacatcagccatacattcactgcgtcactcctcacccagctccttctcagagcctc

SEQ ID NO: 936257 - DNA, 120 bp, Artificial Sequence
  ENSG00000205632_13 (sequence is synthesized)
actcggaacagcacatctcccatctcagctgccctggccacttctgtgtaggaggcaggagggatactcccaccaccccgacccttacagataacaggctcagaaaggcacctgacccca

SEQ ID NO: 936258 - DNA, 120 bp, Artificial Sequence
  ENSG00000205632_14 (sequence is synthesized)
cagcccttcagttgggtttgaacctgggttgcttggtttcaaagcacaggggtttgtcctgcccagtcacacccctcaaagtgtggatgtgggaaacaccgctgaggagcctggacatcc

SEQ ID NO: 936259 - DNA, 120 bp, Artificial Sequence
  ENSG00000205632_15 (sequence is synthesized)
aggagggctcaggagacccttcctgactgcaccccggacaggcccacgacaggcagatgggacacaggtcaggatgtggcaggcacacggcctggcttctagacacttctcagacctggg

SEQ ID NO: 936260 - DNA, 120 bp, Artificial Sequence
  ENSG00000205632_16 (sequence is synthesized)
tgttggttatcacgggcaatgtggacacacggccaggacaggggtccacagtatttcaggaacctcccacaagacgaaacttctagacagacttccctccctgtgagataccttaggctg

SEQ ID NO: 936261 - DNA, 120 bp, Artificial Sequence
  ENSG00000205632_17 (sequence is synthesized)
tagtggagaggtcgctgaaagaatcgatatttctagaaattagctttgggatcagtttgcgaagctgcatctatgctgacaagtgaatgaagcccgtgggcagggaatacactgaggcct

SEQ ID NO: 936262 - DNA, 120 bp, Artificial Sequence
  ENSG00000205632_18 (sequence is synthesized)
taggcctgcagaagagcacaggtgcacctgcgccacatgggccagaatcaacccaggtgaattccagcccatgccattgatgccaaccatggacgaggaatccagctggggctgaagttc

SEQ ID NO: 936263 - DNA, 120 bp, Artificial Sequence
  ENSG00000205632_19 (sequence is synthesized)
cgctacgctgtcagttccactggggatgtgtgttgctccttcagcctctgccagacacacaggcccggttccagcacccgggtgtttgaggccagtgtgtgagtcagccagggagcctca

SEQ ID NO: 936264 - DNA, 120 bp, Artificial Sequence
  ENSG00000205632_20 (sequence is synthesized)
gcctttcccactggcttcaaaaagatgtggaggctgatggggaggaggaaggttccccagagcaggaggccatctgatgtaatgaacatgccttcctaagacgctgcctgggccgcagcc

SEQ ID NO: 936265 - DNA, 120 bp, Artificial Sequence
  ENSG00000205632_21 (sequence is synthesized)
aagtgtggtcgctctctgagcaatcgatgctgccacaaaaggtcctggcagcagcggcacgacccctgcaccccgcctgctgcatccaggacagcgccggcctcccacggcggctcccgg

SEQ ID NO: 936266 - DNA, 120 bp, Artificial Sequence
  ENSG00000205632_22 (sequence is synthesized)
gagaagaggagacgccactttggctgctgtcccggggagaggggggacagtccttcgacttcatgcaggggcttgtcaaccccaaagcttcctccgccgccatctgggtctgacgctctc

SEQ ID NO: 936267 - DNA, 120 bp, Artificial Sequence
  ENSG00000205632_23 (sequence is synthesized)
cgctggaaggtgttcaggagctggcaccccacgtccaccagcgctggcttcaaatcaaacaataaacagcatttaaaaaaaattagtcccacaggtgaagccagagtcccctgcagatgc

SEQ ID NO: 936268 - DNA, 120 bp, Artificial Sequence
  ENSG00000205632_24 (sequence is synthesized)
ctgttccttcacactccgcgccttccactgccttccagtggttgcactctcaggcctgtggacgcacctcggccagagcaaacctgtagcctcttccccagcacgaaaggcagaaggtga

SEQ ID NO: 936269 - DNA, 120 bp, Artificial Sequence
  ENSG00000205632_25 (sequence is synthesized)
aaatcaccaggtccctgtaccatcaggaaggacctgaacagcctctgtcaccgtgtataacaagtctcactgactccttctccggagcagggctcccgggtctgaggcaaggcttcagga

SEQ ID NO: 936270 - DNA, 120 bp, Artificial Sequence
  ENSG00000205632_26 (sequence is synthesized)
tgctttcccggctcagccgtggccctccattacctgccctgcccggcttctgccccacagggctgcctggggtcctggccactttgggtgaggagaggatggctccagcctcctgacctt

SEQ ID NO: 936271 - DNA, 120 bp, Artificial Sequence
  ENSG00000205632_27 (sequence is synthesized)
ggaggctccacagacagaagacgccgccccgggacatgagggccctgcctggctttgaccctcctctgataacaggggacagccgatgccctgctgggcccacggggaacagaagccagt

SEQ ID NO: 936272 - DNA, 120 bp, Artificial Sequence
  ENSG00000205632_28 (sequence is synthesized)
ctgggctgggccatcccctgcaagtggtccactccccccaccggctgatggtggagtctaggctggcctggtgacatgtgggcctccagaggtgacagaagggatattcaaacttccaag

SEQ ID NO: 936273 - DNA, 120 bp, Artificial Sequence
  ENSG00000205632_29 (sequence is synthesized)
gccccagaggcctccacccctgcccaagcacagttcaaaccttcaagctcttgggggtacttttgtgatggctgggttggggctggtgcttcatcttctcttccagtcagtggagtgaaa

SEQ ID NO: 936274 - DNA, 120 bp, Artificial Sequence
  ENSG00000205632_30 (sequence is synthesized)
cagcaggtccatcttgcatgtctgtgtctgcagacggatggtccagggccatccctacaccctcctgtgctgggcccgcagggaagccagttctaccagcagtctgcaggtaacagggtc

SEQ ID NO: 936275 - DNA, 120 bp, Artificial Sequence
  ENSG00000205632_31 (sequence is synthesized)
ccaggccaggcgctccccttgaccccctgtgggtttgttcctgccacccgctctgcccctccctgggtgccccccacccccagatctcctgcaagatggacgtcagggtcctgggagaaa

SEQ ID NO: 936276 - DNA, 120 bp, Artificial Sequence
  ENSG00000205632_32 (sequence is synthesized)
acagttctgtgctggggccgctttgactcccaaggaccccgtgtccagaagaacggcagcttgtaaccccatccctgtaatgagaatgaaaattaattcaatttgtatcatttcctataa

SEQ ID NO: 936277 - DNA, 120 bp, Artificial Sequence
  ENSG00000205632_33 (sequence is synthesized)
agggacgaggaaactgaccacacacagggtgagggtgctgaccacacacaggacgagggcactgagcatgtacacaggatcaggtatcataggagggagtgaagaactcccagcaaaatc

SEQ ID NO: 936278 - DNA, 120 bp, Artificial Sequence
  ENSG00000205632_34 (sequence is synthesized)
caggaaggagcacggcagagagacctgggtgtggacggagagacccgggtgtggacagagcactgcagagagacccaggtgtggacagagagacccgggtgtggacagagagacccgggt

SEQ ID NO: 936279 - DNA, 120 bp, Artificial Sequence
  ENSG00000205632_35 (sequence is synthesized)
gtggacagagacctgggtgtggacatgttcttctgtcatggggaggaagagaagggagagcaagaaggcagaggagaggaaacaggagggagcgagggagggcgagagggagaacacccc

SEQ ID NO: 936280 - DNA, 120 bp, Artificial Sequence
  ENSG00000205632_36 (sequence is synthesized)
tctgtagtaagagatgcatctcgggcaagctgcgtccttcctctgctggaggcccccattgctctactgtgctgggtggtgtcggcagggtggcagatagaggggtctcctgggccagcc

SEQ ID NO: 936281 - DNA, 120 bp, Artificial Sequence
  ENSG00000205632_37 (sequence is synthesized)
catgtgtcccaggagtgaggtccactcccgctgggccagcccatgtgtcccaggagtgaggtccacccccgctgggccagcccatgtgtcccaggagtgaggtccacccccgctgggcca

SEQ ID NO: 936282 - DNA, 120 bp, Artificial Sequence
  ENSG00000205632_38 (sequence is synthesized)
gcccatgtgtcccaggagtgaggtccactcctgctggcgacatgagcagtgctttctctagagggtatggggaggcagaggaagcccctgctcttccaagcagcaaggaagggtgatagc

SEQ ID NO: 936283 - DNA, 120 bp, Artificial Sequence
  ENSG00000205632_39 (sequence is synthesized)
ctgcacccttcaggccttcaccatggctgcactctcttctgagtgtaagaagcttctactgtaacagaccctggcaagcaggagctgcgatggggcagcccagacccaaggcacagggag

SEQ ID NO: 936284 - DNA, 120 bp, Artificial Sequence
  ENSG00000205632_40 (sequence is synthesized)
ctgagcccggggcaggccagggctgggaccctgcaggggccgatgtagggctgtagtcattacaggtgctcggtggcctccctacgagggcagagcccatcctcaggaacggtcaccacc

SEQ ID NO: 936285 - DNA, 120 bp, Artificial Sequence
  ENSG00000205632_41 (sequence is synthesized)
ggcctggcctccgcttcttccctgggcagtgtctccctcacaccatctctgagcctcagccctgtctgttcagtgaggggctgaaccgctgctcccagaggcccctctgcctgggcagcg

SEQ ID NO: 936286 - DNA, 120 bp, Artificial Sequence
  ENSG00000205632_42 (sequence is synthesized)
tccggcctcaggccctgactgcaggacgtttgcaggacgatgcctcctgcctccctccggggacaatctctcacatcctccctgttcctttccatgtggcctctggccgcctcgcatctg

SEQ ID NO: 936287 - DNA, 120 bp, Artificial Sequence
  ENSG00000266904_0 (sequence is synthesized)
aggggcagacacttaacctgtgtctaaagcactgctggccgccgattctacgccgcccggtcgccagggagagtgaatacagctagggacgtgaaaggcaggtctgggctgggcattgag

SEQ ID NO: 936288 - DNA, 120 bp, Artificial Sequence
  ENSG00000266904_1 (sequence is synthesized)
gagggtattaagctaggaagtatgccttacctttatctaaatcgggcgggtcgtcctcccctcattggccttgtgcagctcggattcctctctcacccgcacccaggggtcttcccagag

SEQ ID NO: 936289 - DNA, 120 bp, Artificial Sequence
  ENSG00000266904_2 (sequence is synthesized)
cattgcgtcgtctccagcccagggagccgccttctttcctaaactgctatagacactgtcctgatgtctaagacaatgtactttgtgccgcaggcctctgccttccctagccagagcgcg

SEQ ID NO: 936290 - DNA, 120 bp, Artificial Sequence
  ENSG00000266904_3 (sequence is synthesized)
agctcagccgcttttgagagaaatctgccacctggcctacctgtgcacaacttcagagctttgcagggggtgacaagggctgtggcttcagggaaatgtcacgcgcactggcaccttttt

SEQ ID NO: 936291 - DNA, 120 bp, Artificial Sequence
  ENSG00000266904_4 (sequence is synthesized)
cgcgaatgtgaaaattgagaaatcaagaaggttaattatagggttgcccaggatctgccaagagcaaagaagaaaaccccatttcccaggcatgtgtcttgtgagccattttttatcaac

SEQ ID NO: 936292 - DNA, 120 bp, Artificial Sequence
  ENSG00000266904_5 (sequence is synthesized)
ccacttaagtggacaagctccaaaacacaacatgaagctgatgataatttaggcaatttacgtttgaaatcatcggcctcatctcaaggcagtgtcttagagacacaggtgggacctgat

SEQ ID NO: 936293 - DNA, 120 bp, Artificial Sequence
  ENSG00000266904_6 (sequence is synthesized)
ccctcaggaacagatagcgttccagctttgtgggattgacttttgagatatggagcacttcggggtcaattgaaacccgtcaggtttcacatctctgctttggatagaaagcccatcacc

SEQ ID NO: 936294 - DNA, 120 bp, Artificial Sequence
  ENSG00000266904_7 (sequence is synthesized)
cacagctgtcagagatgttccttgactcactggggctcatctgttgaatttttctatctagataatggaaacatctaggagcacttctgcttccatgtaaactcttaataattgatgtcc

SEQ ID NO: 936295 - DNA, 120 bp, Artificial Sequence
  ENSG00000266904_8 (sequence is synthesized)
ctaaaattctgtgttctcagggacagttcctttggttcccagatggtaccagctttcatgttgttacatctaatatgtaaaaacctggatgttaacctccaagacattgttcacgtcaca

SEQ ID NO: 936296 - DNA, 120 bp, Artificial Sequence
  ENSG00000266904_9 (sequence is synthesized)
cattccagtatttttcatttgtgatttctgaatgtaggacaatatcaaagaactgaaaacctggtcataaaaattggaccctattactgcacttagtgaataatttaccccttagggtta

SEQ ID NO: 936297 - DNA, 70 bp, Artificial Sequence
  ENSG00000266904_10 (sequence is synthesized)
accccttagggttaattacacctgagttcatcagcacctgtgtaaagaaagaaaaaaaaattgtggcatc

SEQ ID NO: 936298 - DNA, 83 bp, Artificial Sequence
  ENSG00000266904_11 (sequence is synthesized)
cagcctgggcgaaaggcacgtggcacctatgcatgtggcaagatgaggaagtatagggagaccacagcacatttctagggctc

SEQ ID NO: 936299 - DNA, 120 bp, Artificial Sequence
  ENSG00000266904_12 (sequence is synthesized)
tgaggaagtatagggagaccacagcacatttctagggctcttcttttgttttaaatagtgcctgtggggaaagtctatgtgatccagagcacacatcccttccctagccctctgttttca

SEQ ID NO: 936300 - DNA, 120 bp, Artificial Sequence
  ENSG00000266904_13 (sequence is synthesized)
tcctcctccttcctgtgccctctttaggtgagggtgtctgattaccctcgcccacaagtgttgtatggggatgttgtaacataaccatatccatcttctcaaaatgaggattaatagaga

SEQ ID NO: 936301 - DNA, 120 bp, Artificial Sequence
  ENSG00000266904_14 (sequence is synthesized)
ggagtgtcttgggacttgtgttcagatgcactgctgtttggtgtgtggctgctctcagcagtcccacggcagctgtctgaaaagattggtacagatgtagccacagctggtgttcacagg

SEQ ID NO: 936302 - DNA, 120 bp, Artificial Sequence
  ENSG00000266904_15 (sequence is synthesized)
gctgggtgcttcttgtggtttggtgtcttttgtttagattttgtggctctgaccctcttctgcttatccattcctggtagtatctgcgaggttgcctcgtttgttccacttgtttcctgg

SEQ ID NO: 936303 - DNA, 120 bp, Artificial Sequence
  ENSG00000266904_16 (sequence is synthesized)
aagcttgttgtgtaattttatttcccaggatctttgggattctattctcactagaccagtcactgtccactggccctgtacttatcttgcgggagcccccatgttcatcctttccagtgg

SEQ ID NO: 936304 - DNA, 120 bp, Artificial Sequence
  ENSG00000266904_17 (sequence is synthesized)
agctaggaagaattctagttacttctaaatcttctaattctgatgctgttgggccatttattaagctgggaattttgtctttgggctcatggacattattccaaaggttgtcttgtcttt

SEQ ID NO: 936305 - DNA, 72 bp, Artificial Sequence
  ENSG00000266904_18 (sequence is synthesized)
ttgggctcatggacattattccaaaggttgtcttgtctttgggctcatgaacattattctacaagagcgaga

SEQ ID NO: 936306 - DNA, 120 bp, Artificial Sequence
  ENSG00000266904_19 (sequence is synthesized)
taaaattatgatttcagtttcttcctagtgtagggcaattcaaaaatatcagttttttaattgggtaattataataatttatgttttgagtgattaaatcatttcatctaagctgttaaa

SEQ ID NO: 936307 - DNA, 120 bp, Artificial Sequence
  ENSG00000266904_20 (sequence is synthesized)
ctacgccgcccggtcgccagggagagtgaatacagctagggacgtgaaaggcagaacggggaagataaccgaagggtggtttgagaaacccaccaggccaactgggaattagaattgatt

SEQ ID NO: 936308 - DNA, 120 bp, Artificial Sequence
  ENSG00000266904_21 (sequence is synthesized)
caaaactccattgatcgcctgacctccataagctcctactctgctgcagttgagtgctgccacttaaatcctgcagtcccgagatccggttataaccaatgcatttagatttttcatttc

SEQ ID NO: 936309 - DNA, 120 bp, Artificial Sequence
  ENSG00000266904_22 (sequence is synthesized)
ggtggcaacaatcttcattatgcttcttagagacaaggcctcactccattgcccctaggccaggcctggtgagtgacagcagccctggtgccccagcctgctagggcaatgtgtcaccca

SEQ ID NO: 936310 - DNA, 120 bp, Artificial Sequence
  ENSG00000266904_23 (sequence is synthesized)
gaggcttcaaggcccttctcaccatggtacccacctcctcgaagctgcctcccaaagccctctagctgctgctgcagccacaacaagtgccaccaccaggggccttccagctgccagtgc

SEQ ID NO: 936311 - DNA, 120 bp, Artificial Sequence
  ENSG00000266904_24 (sequence is synthesized)
caggccagccagggcagcgatgatgaccgtaatgaaaagtgggatgacagctccacactggtggatgagttgagaacaccaggcagaggcatgtacctggtctttgatggttcagtggac

SEQ ID NO: 936312 - DNA, 120 bp, Artificial Sequence
  ENSG00000266904_25 (sequence is synthesized)
ctgcactaccattgcagtgcaaagtgcaagagttgaagcttggaaaccttcacctagatttaggaagattcatggaaaagtctggatgtccacgcagaagcctgctgcacgagtggaacc

SEQ ID NO: 936313 - DNA, 90 bp, Artificial Sequence
  ENSG00000266904_26 (sequence is synthesized)
ctggaggacttcctagtggagctatgagaagagaaccactgtcctcctgacatcataatggtagatccactggcagcttgcactctcagc

SEQ ID NO: 936314 - DNA, 120 bp, Artificial Sequence
  ENSG00000266904_27 (sequence is synthesized)
catcataatggtagatccactggcagcttgcactctcagcctgaaaaagctacaagtactcaaggccagcccttgagagcatctacaggtgctaaaccctggaaagccacaagtgtggtg

SEQ ID NO: 936315 - DNA, 120 bp, Artificial Sequence
  ENSG00000266904_28 (sequence is synthesized)
acttaacctgtgtctaaagcactgctggccgccgattctacgccgcccggtcgccagggagagtgaatacagctagggacgtgaaagaacggggaagataaccgaagggtggtttgagaa

SEQ ID NO: 936316 - DNA, 120 bp, Artificial Sequence
  ENSG00000266904_29 (sequence is synthesized)
attttggagctttaagatttaatgactgctctgcttggttttggacttgtgtaggcttgtagcccctttcttttggccaatttcttccttttagaatgggaatgttgatccaatgcctat

SEQ ID NO: 936317 - DNA, 120 bp, Artificial Sequence
  ENSG00000266904_30 (sequence is synthesized)
tgggaatgttgatccaatgcctatacccccattgtatcttggaagtaacaaacttgtttcttattttacagggtcataggcagaagggactagccttgtctcagataagactttggactg

SEQ ID NO: 936318 - DNA, 120 bp, Artificial Sequence
  ENSG00000266904_31 (sequence is synthesized)
actgggactcctctcacaaatgtatgtctcacagttatgatgaatggtgtatctcctggatcttcctcagttgagtatgttttaaaggaaaaatacactttatcattcaaatctttcaaa

SEQ ID NO: 936319 - DNA, 120 bp, Artificial Sequence
  ENSG00000266904_32 (sequence is synthesized)
cactgctggccgccgattctacgccgcccggtcgccagggagagtgaatacagctagggacgtgaaaggcagggacttccccttcaagcttgcaagagttggagatgtttgcattgtctt

SEQ ID NO: 936320 - DNA, 120 bp, Artificial Sequence
  ENSG00000266904_33 (sequence is synthesized)
aaaatttgttgaagtttgtttcatggcctaggagatggtctatcttactttatgttccatgagcccttgaagagaatgcatatgctgctgctgttgattaaattactctacaaatgtcaa

SEQ ID NO: 936321 - DNA, 120 bp, Artificial Sequence
  ENSG00000241669_0 (sequence is synthesized)
taggtggatgttaatgctattaactgatttgacatgttgaatttgagatgttagacatcgaagtgaatgggtactctgaaagagcatcaagaaaatctgactgaaaaaagattgactgag

SEQ ID NO: 936322 - DNA, 120 bp, Artificial Sequence
  ENSG00000241669_1 (sequence is synthesized)
tgagatgggcgctggagtataagccagagtttcacaggaaaggggtgcagacccagacctcaagaaagggctcttggatctcgtgtaagaaggaattcagggcgagtccatagagtaaag

SEQ ID NO: 936323 - DNA, 120 bp, Artificial Sequence
  ENSG00000241669_2 (sequence is synthesized)
gactccattttccagactcctttgcagctgtctctggaatgtgacctagttatcaccaagggaatatgaatggaaatgataagcgcaatttctgcttcatcggtttaaaagcaaattgct

SEQ ID NO: 936324 - DNA, 120 bp, Artificial Sequence
  ENSG00000241669_3 (sequence is synthesized)
tgccctcaacatctgttcttttcccctgctgtaagccagaacatgcacatgcttgcaattcaacttttgatcatgcagatgaaaacatttgctaagaaattaaagatcttttaaaacgac

SEQ ID NO: 936325 - DNA, 120 bp, Artificial Sequence
  ENSG00000241667_0 (sequence is synthesized)
gagattagaggacacattattcgtgggtcgggaggaattcaatgaatcatgaagaaaagataatttataaagaatatgtattaagcatctaccacgtgccatgggaagtgctggtgtaac

SEQ ID NO: 936326 - DNA, 120 bp, Artificial Sequence
  ENSG00000241667_1 (sequence is synthesized)
caggaagatgaagaaaaaaatgcacatggtaaccaaccccaggggtttacagtccaatgagggagaccgacaaaacaccaagcaaatgtagaagtggtggtcagtgacttcaagtaaaag

SEQ ID NO: 936327 - DNA, 120 bp, Artificial Sequence
  ENSG00000241667_2 (sequence is synthesized)
taaaggagatggatgtgatgaaagacagtaacagaagttatatttcagacaggttgttcagggagggcctctgaggaagtgatatttcagtggaagcctggagggtgagaagatgatggg

SEQ ID NO: 936328 - DNA, 120 bp, Artificial Sequence
  ENSG00000241667_3 (sequence is synthesized)
aagccaaaggaacagcgtgggcacgcctgaggctgaagagcacccgcatggagaaacccaaaaggctgatgtgcccactggatagtgaaggagggagaagaaggtgtgagatgaaattgg

SEQ ID NO: 936329 - DNA, 120 bp, Artificial Sequence
  ENSG00000241667_4 (sequence is synthesized)
agaatggggaaaggcagtaacctaaaggactgcccacagtttgtacttgaaaacttcacattgatttcaatcctgaacgtcttgtgatctggagttcccattggatttttggttataatg

SEQ ID NO: 936330 - DNA, 120 bp, Artificial Sequence
  ENSG00000241667_5 (sequence is synthesized)
agtcagtgcatcaagagtaccttgaggccgttactggggtgggccttaaatgagcacacagagatgctatacacatagtgagtatgtatgtatagagacgggatctcattctgttgtcca

SEQ ID NO: 936331 - DNA, 120 bp, Artificial Sequence
  ENSG00000241666_0 (sequence is synthesized)
tttctctccctctgagatctttccttaccaaccccagcctcccaacccgggtgtcctaggtgggaccagggacgatccttcggagttggtcaaggaggcgtcggaacagcaggcatttgc

SEQ ID NO: 936332 - DNA, 120 bp, Artificial Sequence
  ENSG00000241666_1 (sequence is synthesized)
ccttctagttggcagcagcgatgagccgcgtgctccatgctcagggcaggggcagccgcccggggaaggggcgcccgatacaccgctcaccgctcagccccgcgtctccctccggggtcc

SEQ ID NO: 936333 - DNA, 120 bp, Artificial Sequence
  ENSG00000241666_2 (sequence is synthesized)
tttacctccatgtccttcaggaaaccactatctatccatctatccatctatcttctgtatacgagtagaaggaggaggaggaggaggaaaatcaggaatccacgcaaagttttccaagct

SEQ ID NO: 936334 - DNA, 120 bp, Artificial Sequence
  ENSG00000241666_3 (sequence is synthesized)
ccctgaagtggtaaatcttttcttcaaaccttgctttgactgatgcattcggttttgtgggaattttggctcccacaagctgcttgctaaagggcctcgtctccattcctgttaaatata

SEQ ID NO: 936335 - DNA, 120 bp, Artificial Sequence
  ENSG00000241666_4 (sequence is synthesized)
gcaaagggcaagatgctcaacatctgattcccatagggcccagcatagcaaccttcctttagggccatcccggctgggcagcagagaccgcatgggagggattcggggactggaatctgc

SEQ ID NO: 936336 - DNA, 120 bp, Artificial Sequence
  ENSG00000241666_5 (sequence is synthesized)
accagggtcactccctgctacccggatcccggcccccttcagacccttcggcagagagaaacaggaaaatgccttgagagacctgtgagtgccagggtattggctgggtatatgacgcct

SEQ ID NO: 936337 - DNA, 120 bp, Artificial Sequence
  ENSG00000241666_6 (sequence is synthesized)
ctgggttatcccacagcattctcacccgcccaaccccagctcaaccaggggaggggagccccatcagaggtgggcaatgggacaggtgatggtgagcactgtgaagagacatgtggagaa

SEQ ID NO: 936338 - DNA, 120 bp, Artificial Sequence
  ENSG00000241666_7 (sequence is synthesized)
acagtagagaaaaaaggctgagagtctgctcctgctacaaagactaccctgattctggttatcccggcaccatctttgcactttcaggcacttagattgctgctttgggtaccagtctta

SEQ ID NO: 936339 - DNA, 120 bp, Artificial Sequence
  ENSG00000241666_8 (sequence is synthesized)
gaaatatggcctccttcctgtcctagaactttctaaggcccaactttctaaaacactggcagccctaatgccagagtggcttctagttctttagcttagctaagcatagaggaagacgcc

SEQ ID NO: 936340 - DNA, 120 bp, Artificial Sequence
  ENSG00000241666_9 (sequence is synthesized)
tggttttaggaacagacagattgagggctgaattccagctctgctactttctagttgtattttttagacaagtcacttaactgctctgattctcattttcctcacctatacaatgtagta

SEQ ID NO: 936341 - DNA, 120 bp, Artificial Sequence
  ENSG00000241666_10 (sequence is synthesized)
actctgcaaaaagtggctgtttttatcatgcttagccccatgtacaagcttcagatgaataagagcctgatatttcttttatttagagacaggcactcggggacccagtgaaaagagccc

SEQ ID NO: 936342 - DNA, 120 bp, Artificial Sequence
  ENSG00000241666_11 (sequence is synthesized)
tcactcccaggaattaatagtgaggcccctcccagtccagccacatggctgctcaggtgaagactcgagagcagagtcggcagtaaggaagggtatttactggtaacctgcaaggcacac

SEQ ID NO: 936343 - DNA, 120 bp, Artificial Sequence
  ENSG00000241666_12 (sequence is synthesized)
ttttgctcgtgcttctttcctttctttttaaaggtgcaggacgtagtgatgactgcatagtctactatcaggtcttctaactctgctccacagggccttttcctttctccctctacctag

SEQ ID NO: 936344 - DNA, 120 bp, Artificial Sequence
  ENSG00000241666_13 (sequence is synthesized)
tcctcctttgtgctcagaatggggctgccccagcacaggtttctggcttcacaaacaggagggcggaagtgcttacccagaggaaaccgttaggcctagataacatcagtcacccaaggt

SEQ ID NO: 936345 - DNA, 120 bp, Artificial Sequence
  ENSG00000241666_14 (sequence is synthesized)
gacttgcagctgctccccacgccctgcttaggcctctcttggctgagaacagatgaccacaaagcaaacaagcttggcctccaccatgctcctgggtccccagtgcagagtttaatgctg

SEQ ID NO: 936346 - DNA, 120 bp, Artificial Sequence
  ENSG00000241666_15 (sequence is synthesized)
ctccagagctatttgggccccagactgggacttctcctgagggagggggtggaaaacggggagggagggaccaagaggtagccccgagctgtgtttaggcagccatgagtaggtgtggtg

SEQ ID NO: 936347 - DNA, 120 bp, Artificial Sequence
  ENSG00000241666_16 (sequence is synthesized)
tgtgtactccccttatcttcttcttctgtccctacagaagatctccaggagccagaatagcagtaactctgctgataaacacccaggtttgctgggttatctgggattgtaactggctgc

SEQ ID NO: 936348 - DNA, 120 bp, Artificial Sequence
  ENSG00000241666_17 (sequence is synthesized)
tctgggggctgggaggaaacaacagcccaaggggaagggaaagtgactttccgaggagttggttcccctctctctctggaggtctggctggctaacacggaaccacttccttcagtctac

SEQ ID NO: 936349 - DNA, 120 bp, Artificial Sequence
  ENSG00000241666_18 (sequence is synthesized)
cctgggccttccccttcatatatcctgatagccagaaccagccacgcaataagtagaggtcatcaggtaactaacaataaaaacaccaggctgggctcatgcctgtaatcccagaacttt

SEQ ID NO: 936350 - DNA, 69 bp, Artificial Sequence; identical to SEQ ID NO: 835735
  ENSG00000268955_0 (sequence is synthesized)

SEQ ID NO: 936351 - DNA, 120 bp, Artificial Sequence
  ENSG00000268955_1 (sequence is synthesized)
aagattttaaaaaatacgtatgcctggacaccactctaaaccaactaaatgagaatcagatatcgtgaagtcactaatcattttgctcctgggtctttatgacagttttgctcctgggaa

SEQ ID NO: 936352 - DNA, 120 bp, Artificial Sequence; identical to SEQ ID NO: 835737
  ENSG00000268955_2 (sequence is synthesized)

SEQ ID NO: 936353 - DNA, 120 bp, Artificial Sequence; identical to SEQ ID NO: 835738
  ENSG00000268955_3 (sequence is synthesized)

SEQ ID NO: 936354 - DNA, 120 bp, Artificial Sequence
  ENSG00000268955_4 (sequence is synthesized)
ctcttctatctcatggtaaaggaaacctggcgtgtagcaggagatggtgtgataacaataatatatcgcatgatcagtatttgtattcttcttatcaatattaaactttttgacctcctc

SEQ ID NO: 936355 - DNA, 120 bp, Artificial Sequence
  ENSG00000176124_0 (sequence is synthesized)
attccaagaaccaggaggttgtttgctgtactctcccttgtacagttagctgtctctagtgcctgaatgcactaattgtcctttgggtatggatgaggtaatgaaggaaagggatgctgg

SEQ ID NO: 936356 - DNA, 120 bp, Artificial Sequence
  ENSG00000176124_1 (sequence is synthesized)
gaagagaggccacatgagaaggctgcagcaaactaagtgttgcttgctaaagaaaaatgaaagctggaatttcagcagggaagaaagtatatgccccaccgtgatgagtacaaacacaca

SEQ ID NO: 936357 - DNA, 120 bp, Artificial Sequence
  ENSG00000176124_2 (sequence is synthesized)
gcatcagggaagccacacagaatgaagctctgagaagactgttagcattttccctccacgccccaggggaaaaggttggttctctaacttgatgtatacaaattttctgagaagattatt

SEQ ID NO: 936358 - DNA, 120 bp, Artificial Sequence
  ENSG00000176124_3 (sequence is synthesized)
taaaaagtagtttccacccaatccaaggattccgattcagcagggctgaggtactccgaagcagggtatggattctgctttcatctttcaatgcaagcctgtttccacagggttgagatc

SEQ ID NO: 936359 - DNA, 120 bp, Artificial Sequence
  ENSG00000176124_4 (sequence is synthesized)
tggcatggacaatttcagcctgaaacgattacttttggaaatttgcagatattgttaacttcttagtcctttgaagaaaaatcaaattttttcttaagaagagacttttgaaactcacaa

SEQ ID NO: 936360 - DNA, 120 bp, Artificial Sequence
  ENSG00000176124_5 (sequence is synthesized)
tatgaattcaagaagcaaaaaagaaaatcgaatttcacaaatgggataccaatagcttggaaaaatccattgcttttgcagggtttgttattgagggaaccctgcctttcccagcatcct

SEQ ID NO: 936361 - DNA, 120 bp, Artificial Sequence
  ENSG00000176124_6 (sequence is synthesized)
ttttgttaattctgggcatttcaaccactgcttctgataacatcctgctttactgtgctaggcattccttggacccaggactggggagtggggtttaatctggactgaattggaggaaag

SEQ ID NO: 936362 - DNA, 120 bp, Artificial Sequence
  ENSG00000176124_7 (sequence is synthesized)
gaactggcaccagagtggaggctggaaggatggtggaactgacactgggacagaacacagaaaacagaatctaatgctattgctctggctatatcaaataaaagtgtcaagagtgagcat

SEQ ID NO: 936363 - DNA, 120 bp, Artificial Sequence
  ENSG00000176124_8 (sequence is synthesized)
ccttgccttgtgctgaatcacaaaggaatacctttcagtttttctccattgattatgatagcagtgggcttttcacagtgggctttactgtgttgaggtaccctaatgacaagttcaccc

SEQ ID NO: 936364 - DNA, 120 bp, Artificial Sequence
  ENSG00000176124_9 (sequence is synthesized)
cagtgttttctgaggagtctacctggaaatgagaaccatctgtccttcctatagtagttcttctcagaatgccgactctatgctaatggtgtagttattattcaatttataatttggcat

SEQ ID NO: 936365 - DNA, 120 bp, Artificial Sequence
  ENSG00000176124_10 (sequence is synthesized)
cctaccatatatataatttaacatctactcttttaaccagcttaggacttgtcaacccactgcttgttctgtgttccacactggtattcaaagatgtgaaagcaagaagaaggctaggat

SEQ ID NO: 936366 - DNA, 120 bp, Artificial Sequence
  ENSG00000176124_11 (sequence is synthesized)
gagcaacacaacagaataactcaagcaacagagcaattctgaaacacaaggaaaaaggacttactcatacttccctcatggattatctgagaattgaatgaaaacaatcagtaatgtatt

SEQ ID NO: 936367 - DNA, 120 bp, Artificial Sequence
  ENSG00000176124_12 (sequence is synthesized)
caattcataacaaatgtcaccagtgaaaagaacagagaactgacaaaagctaaaactacacaaagtgagatttgctcatgcattaatgtaaacaggaaaaaataaaatcctggagaattt

SEQ ID NO: 936368 - DNA, 120 bp, Artificial Sequence
  ENSG00000176124_13 (sequence is synthesized)
gtattctccactggttgaatgcaaatggaagccagaggaaaagggaacccttgacacagttttcatatagattggcctccagggcagacagcaggagtggggtttaatctggactgaatt

SEQ ID NO: 936369 - DNA, 120 bp, Artificial Sequence
  ENSG00000176124_14 (sequence is synthesized)
ttcctctcctggacctgtcctaaactggaagctgggggaggatggagtgctggaatgctgcagaagtctcatgggagggcgcctggtgttcaccacatgtgtacactgttgcacgaccag

SEQ ID NO: 936370 - DNA, 120 bp, Artificial Sequence
  ENSG00000176124_15 (sequence is synthesized)
gtggaagggtggggaaatagaggaaatggaagagaagaaagagagtgattttcttcatcctgtcctggatctggatcccttttaataggatctctcctggacagttctgagcacttcgaa

SEQ ID NO: 936371 - DNA, 120 bp, Artificial Sequence
  ENSG00000176124_16 (sequence is synthesized)
ggacttcagaccctggagacacaaaggtattctccactggttgaatgcaaatggaagccagaggaaaagggaacccttgacacagttttcatatagattggcctccagggcagacagcag

SEQ ID NO: 936372 - DNA, 120 bp, Artificial Sequence
  ENSG00000176124_17 (sequence is synthesized)
gcacatgcgcagaatcatcgtggtgcacggctctccctttgcttcttcggttgcagtcctcttgcttcttgcgcgtgcgtgtagcgcttttgcaaagccgcggaggtgaagtgaacttag

SEQ ID NO: 936373 - DNA, 120 bp, Artificial Sequence
  ENSG00000176124_18 (sequence is synthesized)
aggttgtggggccgaggggtcgtcttatagctaccagcccacaggcatttagtctacgttggaggtaaacaaatacgggtcctgcttaggagaaaagaaaaacgtcttacagccagtgtc

SEQ ID NO: 936374 - DNA, 120 bp, Artificial Sequence
  ENSG00000176124_19 (sequence is synthesized)
taaactccaaacaacggaatgtatcaatgagaccttgtatatggatacacgtgcatttaaaaccgccctgccggcttgtagagcttttgccgttctccagcgctttacaggggttatcgc

SEQ ID NO: 936375 - DNA, 120 bp, Artificial Sequence
  ENSG00000176124_20 (sequence is synthesized)
taatgatggaaatttgaatgctggggctcagtggaacacctgaaggaagctggtgaggcagatgtcccgctatgccttccaagtgtcatgcaaccagttcatgcctgtcagcatctctgc

SEQ ID NO: 936376 - DNA, 120 bp, Artificial Sequence
  ENSG00000176124_21 (sequence is synthesized)
cggtggactctgtgagtcagcaaatctacagagcagagagccacaagtggggacagatgtggtcaaatgccatttaaatcagtgattctcaacccaggagttgtcatggcactggccttg

SEQ ID NO: 936377 - DNA, 120 bp, Artificial Sequence
  ENSG00000176124_22 (sequence is synthesized)
agtgagctggaccaagggaagtggtagaattccccatgaaggaccaagtgagcagatagaagtttctccattttaactttttctgagtcaatttaaaaaacacctagtgcctttttctgt

SEQ ID NO: 936378 - DNA, 120 bp, Artificial Sequence
  ENSG00000176124_23 (sequence is synthesized)
tctttaggtaccctaatgacaagttcaccccagtgttttctgaggagtctacctggaaatgagaaccatctgtccttcctatagtagttcttctcagaatgccgactctatgctaatgga

SEQ ID NO: 936379 - DNA, 120 bp, Artificial Sequence
  ENSG00000176124_24 (sequence is synthesized)
gggggacctgcaggctggggaggcagcttctctctgcaatttggccgctcctggacttgttgcagccaggcttcaaagagaaaccaccgcttcctccccgagccccacgccagcctcaga

SEQ ID NO: 936380 - DNA, 120 bp, Artificial Sequence
  ENSG00000176124_25 (sequence is synthesized)
ggcagctgggcctattgaaacattcaagtttcacttcaggctactttaaacatttgctttattccaaaacagctaaacttggagttattttcaaatataggccatttttatgccccagta

SEQ ID NO: 936381 - DNA, 120 bp, Artificial Sequence
  ENSG00000176124_26 (sequence is synthesized)
gttttcaagatttatccacgtcatggcatataccagaacttcatttcttttatgattgaataatattacatggttttaatatactatattttgtttatctgttcatcaattaataaatct

SEQ ID NO: 936382 - DNA, 120 bp, Artificial Sequence
  ENSG00000176124_27 (sequence is synthesized)
ttgggttgttttcacttttaggctataataattaacgctgttaggaatatttacttgtaagtttttgttatatgtttttaattctcctgggtagatacttagggataaaattgctgaatt

SEQ ID NO: 936383 - DNA, 120 bp, Artificial Sequence
  ENSG00000176124_28 (sequence is synthesized)
agattgtaactttatgtttagaaactgcccaactgttttccaaagtaactatcattttaatatttcaccagcattgtatgacagttctggtctttccttatttaaactaatacttaattg

SEQ ID NO: 936384 - DNA, 120 bp, Artificial Sequence
  ENSG00000176124_29 (sequence is synthesized)
ttgccttttattgtagctatcctagtagatatgaagtgttatctcattatggttttgatttgcattctctaatgactaataatatcaagcatcttttcatgtgtatacaagatatttgta

SEQ ID NO: 936385 - DNA, 120 bp, Artificial Sequence
  ENSG00000176124_30 (sequence is synthesized)
tatcttctttagagaaatgtctactcaaatcctgtgcctatgttttaattggataatttatgtttttattgttgagttgtaatagtttttaaatatattctggatcctagacctttaaca

SEQ ID NO: 936386 - DNA, 120 bp, Artificial Sequence
  ENSG00000176124_31 (sequence is synthesized)
gatggaggaggggaagtcatagctggaggagacgtgtgttaggaagctacaatggcagctccctagtggaggtgtttcggaaaaactccgaagattccacttgagaaaatcatcggcctt

SEQ ID NO: 936387 - DNA, 120 bp, Artificial Sequence
  ENSG00000176124_32 (sequence is synthesized)
cagacaacgtctatgccagataatgctaccaaatcacaaccttgcctttcctccctactgctgttctgatgtgggaggacccaaaggcagcagaagagccaaagaagagtagcagaaagg

SEQ ID NO: 936388 - DNA, 120 bp, Artificial Sequence
  ENSG00000176124_33 (sequence is synthesized)
catatccacagctcttcaaataagcaatgtgatgttagcaaaagtgcaggggctccttgagaactttccagggctaaccagctgctgaggagtggcctccaggaaagagagaagcactct

SEQ ID NO: 936389 - DNA, 120 bp, Artificial Sequence
  ENSG00000176124_34 (sequence is synthesized)
aactccatcatatcttcagaacaattcttctagaccttgcatctaaatatggagtcattaactaacaacgaacaaaacctctggatggccgaaggacctaggctatacagaaagctgtga

SEQ ID NO: 936390 - DNA, 120 bp, Artificial Sequence
  ENSG00000176124_35 (sequence is synthesized)
attaccaatgagaacgcagcactgctgctgtactgagaatacagctgtgaacaacatccctgtcgctttcgttctagagaggaaaaacaggtatgttcatttcttatggctgctgcaaca

SEQ ID NO: 936391 - DNA, 120 bp, Artificial Sequence
  ENSG00000176124_36 (sequence is synthesized)
gattacggcaaactgggtggcttctaacaatggaaatgtattctcttatggttctgaagaccagaagccccaaatcaagatggccccagtgcagcactccctctgaaggcgctagagaat

SEQ ID NO: 936392 - DNA, 120 bp, Artificial Sequence
  ENSG00000176124_37 (sequence is synthesized)
ttgcttctggcctctttcagcttctggtagctgtcagcattccctgactgtgggcccgtcactgtactctgttcccatgggcacattgcttcctcctcttatgcctgtgttctctccctt

SEQ ID NO: 936393 - DNA, 120 bp, Artificial Sequence
  ENSG00000176124_38 (sequence is synthesized)
gtgggagtgacccgattttccaggtgctgcgttgccatctttaaagtcatcccactggaccacatcagtattgcaagctgcttgggtatcattaatgaagacaaagtgggattattattt

SEQ ID NO: 936394 - DNA, 120 bp, Artificial Sequence
  ENSG00000176124_39 (sequence is synthesized)
tattattttctatgatttgggcttttgtattctccactggttgaatgcaaatggaagccagaggaaaagggaacccttgacacagttttcatatagattggcctccagggcagacagcag

SEQ ID NO: 936395 - DNA, 120 bp, Artificial Sequence
  ENSG00000176124_40 (sequence is synthesized)
gagtggggtttaatctggactgaattggaggaaaggaactggcaccagagtggaggctggaaggatggtggaactgacactgggacagaacacagaaaacagaatctaatgctagaggag

SEQ ID NO: 936396 - DNA, 120 bp, Artificial Sequence
  ENSG00000176124_41 (sequence is synthesized)
cagcatcatgtaagatgtgcctgctcccccttccgccatgattgtaagtttcccgaggcctcctcagccatgtggaactatgagaaaactgaagataagaaaaattctgcagcttgccta

SEQ ID NO: 936397 - DNA, 120 bp, Artificial Sequence
  ENSG00000176124_42 (sequence is synthesized)
gaatatggctgctagcaaatgttgtaaaggaactcagatctgcccattcccagagcctgaggtcttaatctattctgctgacttaaattctgtatcatgagtttcacaacctgaagcttg

SEQ ID NO: 936398 - DNA, 120 bp, Artificial Sequence
  ENSG00000176124_43 (sequence is synthesized)
ggaactcctgtggagccctggagtgatgtttaaggaatacttcagtgagctgtacacactacaactcccatattgcattttagtttttaaaaatagtttctttaaaataaatgcaagagg

SEQ ID NO: 936399 - DNA, 120 bp, Artificial Sequence
  ENSG00000176124_44 (sequence is synthesized)
tagcatttggattttaacagaagcagagcaaagttgggatgaccacacccttcctgggcttcaaggactttaaaaatgtcctggctgccccagaagttggagagctctacatttcagcgt

SEQ ID NO: 936400 - DNA, 120 bp, Artificial Sequence
  ENSG00000176124_45 (sequence is synthesized)
ggaacaactttaccaggtaggaactattactgttctcgttttgaagaccaggaaacctaggctcagagacgttaagtaatttgcccaagacagcacaggtggcacagaagtggatgaatc

SEQ ID NO: 936401 - DNA, 120 bp, Artificial Sequence
  ENSG00000176124_46 (sequence is synthesized)
cacatctgtcagattcagcagccctggagttctctaccacgctgtacgattcaacctgagcccacacaggaggcgtggtctccttcttcaacggtgtgtgtgtgtgtgcgcgcgcgcctg

SEQ ID NO: 936402 - DNA, 120 bp, Artificial Sequence
  ENSG00000176124_47 (sequence is synthesized)
cctagagttaatgattaagtttgctgaagcccttcttcccggtcctaagctgcctgttgcgaaggcgctttcattgaattcagtttctcttaccgtcttaacttgttcataaactttttg

SEQ ID NO: 936403 - DNA, 120 bp, Artificial Sequence
  ENSG00000176124_48 (sequence is synthesized)
atactgacagctaccacgtattgactgtgtactgtgtgctgggcactgtgctaaataaatgatttacgaattaatcgtgtttattgctcacaacagccttatgaagtaggtattatcttc

SEQ ID NO: 936404 - DNA, 120 bp, Artificial Sequence
  ENSG00000176124_49 (sequence is synthesized)
actttacagatgaggacacctgaggttcagattaagaaatctgccccaaagtcttagaactgtgattctaccagaaaggaatgaagaacagaaccttcaggaattgagtcacaatgcaga

SEQ ID NO: 936405 - DNA, 120 bp, Artificial Sequence
  ENSG00000176124_50 (sequence is synthesized)
caaatatcaaatgggagattgttgcaaggaagagattgatgatagtattttctactagccattgggaagataaaaggagacagaagattgaagcctttgccagccattctttcccttttt

SEQ ID NO: 936406 - DNA, 120 bp, Artificial Sequence
  ENSG00000176124_51 (sequence is synthesized)
gcttccaaactcctcaactgggaaccttcatatgtgcagtatttatattggatcatactggtgattataaaagttcctaggaggctagaagagccaaccaacagagaagggaaagcagtc

SEQ ID NO: 936407 - DNA, 120 bp, Artificial Sequence
  ENSG00000176124_52 (sequence is synthesized)
tgttctgaacatagggacataagttcattcatgccaagtatctttccagcatgtttctcccatttagaatatctagcatgtaaggcctttcaatattaatataagcccaatatcagctct

SEQ ID NO: 936408 - DNA, 120 bp, Artificial Sequence
  ENSG00000176124_53 (sequence is synthesized)
ttctctttgtatttcatctctttctactctcctatttgtattttgtgttcctatcaaagtgtcgtatctgggagatgacctgccttatcctgttctataacagttttgtttgctgctgtg

SEQ ID NO: 936409 - DNA, 85 bp, Artificial Sequence
  ENSG00000176124_54 (sequence is synthesized)
ctgtttacaacctccgcctcccaggttcagattatttggaaatttccagctttgtgcactagacagaagacctttgacctctggg

SEQ ID NO: 936410 - DNA, 120 bp, Artificial Sequence
  ENSG00000176124_55 (sequence is synthesized)
tggtcaccaggaatttgtgtggattgctgataaagaagtcattctgcactaacttcatctcttctttggcattatggctcatctgataaataaatgcaatagacatatctttggatttca

SEQ ID NO: 936411 - DNA, 120 bp, Artificial Sequence
  ENSG00000176124_56 (sequence is synthesized)
gagactccaattttccatctacagccaaggaggagaaagcagggaccctttaaactttagcagcctgggggttatgtgtggtgtcagccatctggctgatgtcattggtgactcctcagc

SEQ ID NO: 936412 - DNA, 120 bp, Artificial Sequence
  ENSG00000176124_57 (sequence is synthesized)
cagccagagggcagaggagactcacgaggccttgaaagagaatccaggattgttggctggtctttgcttcctttaatgagtggctacatagacaatgtcataaaccaaatgacggtttat

SEQ ID NO: 936413 - DNA, 120 bp, Artificial Sequence
  ENSG00000176124_58 (sequence is synthesized)
tcttcagagaagcatcgttgcagtggaagagtttggatgagaacaaggcgctacaaatcaatcagggatttgttctgtaggcctgtcaggtctataaatagctagactcctgcttaccaa

SEQ ID NO: 936414 - DNA, 120 bp, Artificial Sequence
  ENSG00000176124_59 (sequence is synthesized)
gtagtggatggatgtacatctccaggcacatttggatttactatttcacttgaacagttggtgtttactggcagcaacaagaacaaaatttatagcagcaaatggaagctgaactcgcat

SEQ ID NO: 936415 - DNA, 120 bp, Artificial Sequence
  ENSG00000176124_60 (sequence is synthesized)
gctggctttgcactgaagaactttgtgtttgccatttcctaattgtgaaaacaatatgtccaagattttgcagtcatcagcattctgatgtaacgacttccatctggtcaaaggaagaaa

SEQ ID NO: 936416 - DNA, 120 bp, Artificial Sequence
  ENSG00000176124_61 (sequence is synthesized)
ttcagaacctctatctccttttgaattctacttcagtgcaaaggtaactggcttaggagaatgttggaagacaagaaattcagacaatacattctgaaaagcgactataacatccacttt

SEQ ID NO: 936417 - DNA, 120 bp, Artificial Sequence
  ENSG00000176124_62 (sequence is synthesized)
tccaggggataattttcctgaagagcaaacaggggtagggaatttgtcacgatcttcttaatggaagcggctctaattggagcaagatgacaggattacttggaggtgagagaggataaa

SEQ ID NO: 936418 - DNA, 120 bp, Artificial Sequence
  ENSG00000176124_63 (sequence is synthesized)
gaaagcaggatgatttgtggcgcgttccaatcggaggtaataagaagtcagagatccacagagaccatgcaattggagaccaatacgaaggcaatggaggccaacaacgtggtaataaga

SEQ ID NO: 936419 - DNA, 120 bp, Artificial Sequence
  ENSG00000176124_64 (sequence is synthesized)
agtggtttaacatcccatctcatcccatctggcattcagaatttggcactggttattgaaatatgaagctcctgatggtcctcacactcctacagtgaccttcttcactcattagccagg

SEQ ID NO: 936420 - DNA, 120 bp, Artificial Sequence
  ENSG00000176124_65 (sequence is synthesized)
agttgaagctgaaagaaatgtagcataatatctcaaatgcttgctttgcattttttatattcattgattcaacaattatttactgagcactatattgcattttaggaatggcattaggta

SEQ ID NO: 936421 - DNA, 120 bp, Artificial Sequence
  ENSG00000176124_66 (sequence is synthesized)
ctggagatatgggctaacacacatttcttggctacccattatagataattacatgagaaacacaaaatatgcatagaaggaccctaatttcgagtcaaacaacccaggaagaagacttct

SEQ ID NO: 936422 - DNA, 120 bp, Artificial Sequence
  ENSG00000176124_67 (sequence is synthesized)
ctatagctatctttatactttatattaatctttttctttgtattttatgttcatcttcttcttcctgaaatgagaagggaaggaaaatagaattctagaaataaccttacagctgccctt

SEQ ID NO: 936423 - DNA, 120 bp, Artificial Sequence
  ENSG00000176124_68 (sequence is synthesized)
cactctatggaaaaagtgagctcttgacaggaaaggggttctatccatgatcttacaattcctaaacagcaacagcatcatggacgtatttgttcctggcgtcataagcctgcatacggt

SEQ ID NO: 936424 - DNA, 120 bp, Artificial Sequence
  ENSG00000176124_69 (sequence is synthesized)
aggcattcagttaataggtactgattggtctaacagaggaagctgggcttgattataaaataaactaggctatgaaatcatgcctcctaaaagctcattaaaggcagcaacacgggatgg

SEQ ID NO: 936425 - DNA, 120 bp, Artificial Sequence
  ENSG00000176124_70 (sequence is synthesized)
ggactgtaaggaagttgtctcccacctgcctccctcctcagacacacatcattccgcagatgtgaaaacgacccagactctgcccgcatgtggcctcccggaccgggcagtagggccttg

SEQ ID NO: 936426 - DNA, 120 bp, Artificial Sequence
  ENSG00000176124_71 (sequence is synthesized)
cccctaccctcatgaagactgtcggctgtgttacagaactgctgctctgtctctgactcccctcactcccatgctctgttggaaactcaagttgtgaaaccacaaaacacagaaaggaag

SEQ ID NO: 936427 - DNA, 120 bp, Artificial Sequence
  ENSG00000176124_72 (sequence is synthesized)
tggtcaactattgcacatactcaagctatgtagtctcagtttattccattcttgcaggatcattgtaggaaggcataagagtcctgcttactggtgagccactgaacacaaactcccttc

SEQ ID NO: 936428 - DNA, 120 bp, Artificial Sequence
  ENSG00000176124_73 (sequence is synthesized)
tcacctctgccttggatcccgccatgcctgaggtctagggctagaagcgttgtttcatccacattaattccggtcttgggcaacgtggctattttctgacctgtctgtcttcccacccta

SEQ ID NO: 936429 - DNA, 120 bp, Artificial Sequence
  ENSG00000176124_74 (sequence is synthesized)
gtggtgaattctctttctgggatctcaactccttctcctgtcacccagctttttccgagcaaccccagtccatctggcatatcattagaatgttaaacctaaaacggtaagccattctgt

SEQ ID NO: 936430 - DNA, 120 bp, Artificial Sequence
  ENSG00000176124_75 (sequence is synthesized)
gaatacctttaagtaacaggatattaaaatgagacttttcctgttttctcagtgctagctgacatctttgagctgagaaaaaaaaatattgttaaaaatgctcatctattctcaggagat

SEQ ID NO: 936431 - DNA, 120 bp, Artificial Sequence
  ENSG00000176124_76 (sequence is synthesized)
gtcatctgctaaggagtgaccaaaaaaatggtccaataaccctgaaaccatcgctcaaatcttagctacgcaaggggagacttgtaaattaatgaggacggcaaggatttcatgagacag

SEQ ID NO: 936432 - DNA, 120 bp, Artificial Sequence
  ENSG00000176124_77 (sequence is synthesized)
aggacccctaggctttggggaacatagaatgtattagtgtctattgctgctgaaacaaattagcacacatttaacagcttaaaaatagcaaaattactacctcacagttctgtaggttag

SEQ ID NO: 936433 - DNA, 120 bp, Artificial Sequence
  ENSG00000176124_78 (sequence is synthesized)
aagtccagtgggcgcggctggtgtgtgggcttcaagcctcacagggctgaaatcaaggtgttggccaggctgtactccctcctagaggctctaatgaagcatctgtttccaggcctctgc

SEQ ID NO: 936434 - DNA, 120 bp, Artificial Sequence
  ENSG00000176124_79 (sequence is synthesized)
gccttgttggcggaattcagttcaatttgcctgatggactgaggtccctgcttccctgcgggctgtcggcgggaactgccactggctccttgcagcctctctctgattcttgcacaaggg

SEQ ID NO: 936435 - DNA, 120 bp, Artificial Sequence
  ENSG00000176124_80 (sequence is synthesized)
cacctacatctcagagccagcgagagtgtgagtgtgtggaatccttctcacgaggcctcatctctctgactttcgtcgggaaatgttctctgcttttaaaggatcatgtaattattttga

SEQ ID NO: 936436 - DNA, 120 bp, Artificial Sequence
  ENSG00000176124_81 (sequence is synthesized)
gcctacccgataatccaggataatcccctcatctaaaaatctgttaccttaaccacatctgcaaagtccctgttgccgtgtaatgtaagctattcacaggttctggggattaggaaaagg

SEQ ID NO: 936437 - DNA, 120 bp, Artificial Sequence
  ENSG00000176124_82 (sequence is synthesized)
acatctttggtgggggccttattcagcctaccacatagagattagtacctgaaaagccagcaggtgagaagctagacagagcagccggtggcagctaaaggagaaagggggcgagagctg

SEQ ID NO: 936438 - DNA, 120 bp, Artificial Sequence
  ENSG00000176124_83 (sequence is synthesized)
gagaagtcgcacttccgccgatggcgcagcaaaggggatgttgccctggaggactcagggaacggaactgggctatcagccgagaatggggctccactcaaaaggaggaaccaacaggag

SEQ ID NO: 936439 - DNA, 120 bp, Artificial Sequence
  ENSG00000176124_84 (sequence is synthesized)
tgttgccaaaggagattaacatctgagtcagtggactgggagaggctgacccagctgcaatgtgagtgggcacaatctaatcagctgccagtacggccagactaaagcaggcagaagaag

SEQ ID NO: 936440 - DNA, 120 bp, Artificial Sequence
  ENSG00000176124_85 (sequence is synthesized)
ctaatcagctgccagtacggccagactaaagcaggcagaagaaggtgggagaagccgacttgctgagtcttacggctttcatcttttctcccctcctggatgcttcctgccctcgaacat

SEQ ID NO: 936441 - DNA, 120 bp, Artificial Sequence
  ENSG00000176124_86 (sequence is synthesized)
gtggtttgccaggggctctcgggccttcggccacagactgaaggatacactgtcagcttccctacttttggggttttgggactgggactggtttccttcctcctcagcttgcagacagcc

SEQ ID NO: 936442 - DNA, 76 bp, Artificial Sequence
  ENSG00000176124_87 (sequence is synthesized)
gttttgggactgggactggtttccttcctcctcagcttgcagacagcctatcatgggatcttcacatatacatcta

SEQ ID NO: 936443 - DNA, 120 bp, Artificial Sequence
  ENSG00000176124_88 (sequence is synthesized)
agcattaaaaaaaaatgcaagtgataaactgggaaataatattcataatatatatgacagattaaatgtttgttattttttgttatattatttatgttactaccaaaatggcaaaaaaat

SEQ ID NO: 936444 - DNA, 120 bp, Artificial Sequence
  ENSG00000176124_89 (sequence is synthesized)
gaataaaaataatacaaaattataaacagaagaagagacaatggacaaaggaaataaaatttttgaaagatggagaacaggtaaaaagatcaacagaactgaaaactcaagcatcaagta

SEQ ID NO: 936445 - DNA, 120 bp, Artificial Sequence
  ENSG00000176124_90 (sequence is synthesized)
actgtgaaggaaatgccagtgagaagcaagccaacccttgcaaggcagcactagaaagtctaggcatgggaagtactagctagtgtggaaggcagtgcatttcacaacaggaacaacgta

SEQ ID NO: 936446 - DNA, 120 bp, Artificial Sequence
  ENSG00000176124_91 (sequence is synthesized)
acatccaataagtatgaccaataccttcaaaatcactagaaaagaaatgcaaattttaaagagatttatatcaggctgcaaaggctgaaaatataatattcagcatttttttttcattca

SEQ ID NO: 936447 - DNA, 120 bp, Artificial Sequence
  ENSG00000176124_92 (sequence is synthesized)
ttcttcaaatatatgccagaagccagacaacccttttgaagagcttttctgcaaaggcccatttacatttccttcacagagaaaggtgagagcaagtagagaagagcatggggttgtgtg

SEQ ID NO: 936448 - DNA, 120 bp, Artificial Sequence
  ENSG00000176124_93 (sequence is synthesized)
gattgtgagaatggccccgtttcttcactcatctatataaagaagccctttgccacgtaactttgcagtgtcctcccaacatggctggagtgacctgccccatccttgactctcagcttg

SEQ ID NO: 936449 - DNA, 120 bp, Artificial Sequence
  ENSG00000176124_94 (sequence is synthesized)
ccatgtgacatgctttggtgtaaagaataaggtggaagggatgatgtcctggttttaagcccagaggtaggcctgggctcctgtgtttctgtatcattatgagagcatggctgggttcac

SEQ ID NO: 936450 - DNA, 120 bp, Artificial Sequence
  ENSG00000176124_95 (sequence is synthesized)
ctgcttttccaggaggaggaaccagtgggaacactaagatagccataaacttcttctctattacactatacccttttctaatctgtattttgactttgttaacaaatcctcaagtcaata

SEQ ID NO: 936451 - DNA, 78 bp, Artificial Sequence
  ENSG00000176124_96 (sequence is synthesized)
gaggaaagaacaactctagatgcgcggccttaagagctgtaatactcacctggaaggtctgcagcttcactcctgagc

SEQ ID NO: 936452 - DNA, 120 bp, Artificial Sequence
  ENSG00000176124_97 (sequence is synthesized)
agaacccaccaattccggacacaatgtgactagttcttgccaatgcaatgtgagcaaagcagtgtgtcatttctaggccaaggcaggagtggggtttaatctggactgaattggaggaaa

SEQ ID NO: 936453 - DNA, 120 bp, Artificial Sequence
  ENSG00000176124_98 (sequence is synthesized)
gtggggtttaatctggactgaattggaggaaaggaactggcaccagagtggaggctggaaggatggtggaactgacactgggacagaacacagaaaacagaatctaatgctagaactgtc

SEQ ID NO: 936454 - DNA, 120 bp, Artificial Sequence
  ENSG00000176124_99 (sequence is synthesized)
actgcactggctattgagagatcaaatgatatgcaccttcaggaactcttccagcaagagctactcagtgaggagacattcatcattagcacattcagaaattatagctctgatatgttt

SEQ ID NO: 936455 - DNA, 120 bp, Artificial Sequence
  ENSG00000176124_100 (sequence is synthesized)
tctgggtggccggatgcaaaggatcatccatagttatgaaaactcaagaacagggaagtcaattagtatatttataaatctgtattcctctcctgtcaaggaatctccctgtatatgaat

SEQ ID NO: 936456 - DNA, 120 bp, Artificial Sequence
  ENSG00000176124_101 (sequence is synthesized)
gatagctgtgtccttgatttgagtaactctttttcctaatcaaaagaaactcaaatgaacaggcccatatgtcttatcagaacaaactatcctgtaataaaatggaaagaggttttgaaa

SEQ ID NO: 936457 - DNA, 120 bp, Artificial Sequence
  ENSG00000176124_102 (sequence is synthesized)
agtcatcttggatttgagtcgtgcttgtgaattttcatgtgttacaacaaccagcatcatttgtatgcagctaagcattatgtcaggcctcaaggatacaaagatcaatgcagtgtgatt

SEQ ID NO: 936458 - DNA, 120 bp, Artificial Sequence
  ENSG00000176124_103 (sequence is synthesized)
cctgccttcaagggacctatcactgtcttggagaagtaacggtgaaaattatagtcaacaaactacatgactgctttccctacttctgccctgtggccttaggacacttagcttctaccc

SEQ ID NO: 936459 - DNA, 120 bp, Artificial Sequence
  ENSG00000176124_104 (sequence is synthesized)
aaatccccctgggaaccagcctgcaacagccacctgactttcccgcctcctcctttcacggaacacaggcttccatttaaccagaaatacatgttttttaacttaaatttccctcgaaaa

SEQ ID NO: 936460 - DNA, 120 bp, Artificial Sequence
  ENSG00000176124_105 (sequence is synthesized)
cttaagcctcggaacaactttaccaggtattctccactggttgaatgcaaatggaagccagaggaaaagggaacccttgacacagttttcatatagattggcctccagggcagacagcag

SEQ ID NO: 936461 - DNA, 120 bp, Artificial Sequence
  ENSG00000176124_106 (sequence is synthesized)
acttaagcctcggaacaactttaccagattcagctggctaccccacttggctacagagtactaaagaagagactgaacttgatcctgctgcccttgcatacacaacactcccattgacgc

SEQ ID NO: 936462 - DNA, 120 bp, Artificial Sequence
  ENSG00000176124_107 (sequence is synthesized)
tagtgaagacttaagcgcatgaaaggattccaggatcaaaaggttagctctatggggagctgtgtctggctcaagcaatccatttttttctattgacagtgaaaacgttttatagttctt

SEQ ID NO: 936463 - DNA, 120 bp, Artificial Sequence
  ENSG00000176124_108 (sequence is synthesized)
tttcaaagttttcccaaacttttacaataacaggcaacttgtgaaaaagtgagaaggcatctaattgaactatatccagaggagatcatggcagagaccaacaggaagaaaaacatttcc

SEQ ID NO: 936464 - DNA, 120 bp, Artificial Sequence
  ENSG00000176124_109 (sequence is synthesized)
aaaccacagcgatattggtcaaatcaattgtatttgaagaataaagcatttgaggcgtcggctgagaaaaattttcattatgaaacttggttggactatgaagcagaatgtgagataaaa

SEQ ID NO: 936465 - DNA, 120 bp, Artificial Sequence
  ENSG00000176124_110 (sequence is synthesized)
taaaacacagagctcatgagtttttatctttgtctgctaatgacttatgctagcaggattatactttttttttgcattttatgagatgtatgaactaggaagaaaatacatgctatatct

SEQ ID NO: 936466 - DNA, 120 bp, Artificial Sequence
  ENSG00000176124_111 (sequence is synthesized)
aaatggattagacgtgcagattcttaactaacatttaattcattgctagtaaaacaaatgccttaaaacatttaaaaaagtgaaattatcttaaggagataattaacaagcagagtagaa

SEQ ID NO: 936467 - DNA, 120 bp, Artificial Sequence
  ENSG00000176124_112 (sequence is synthesized)
tagcatttttgaagaaagtgtaatatggttctacactggcattttctgcatttattgaagatacttagtctatccaacaattcactcattcattctttcatgaaaccctgtctctactaa

SEQ ID NO: 936468 - DNA, 120 bp, Artificial Sequence
  ENSG00000176124_113 (sequence is synthesized)
caacaacaacaacaacaacaacaacaaatttctttgtgcacttactatatgcccaatgctaatctaatagttttacaagacctcaattgaacaagtgtctgaggaaatggattgcatcta

SEQ ID NO: 936469 - DNA, 120 bp, Artificial Sequence
  ENSG00000176124_114 (sequence is synthesized)
gaggaaatggattgcatctaataaagcaagacacaccaactgtggatgggtggtgtgtctagagtattttgcattcctaaatcactcttctggagaaaatttgtatcaataattttgtct

SEQ ID NO: 936470 - DNA, 120 bp, Artificial Sequence
  ENSG00000176124_115 (sequence is synthesized)
ccaaagaaaaattatccttatcagtgatgtctgcctggtggctggtgaatggtaaaaactggcaggagagaccaatccgatgggaaatcaagttcaggtattctccactggttgaatgca

SEQ ID NO: 936471 - DNA, 120 bp, Artificial Sequence
  ENSG00000176124_116 (sequence is synthesized)
ccctggcacaccttgctgctaccctgcagctccctgccacctggccatgcactgcttcccctccacaccctgctgaggcaggtctgggctggggacacaggaagctttgatgttagactg

SEQ ID NO: 936472 - DNA, 120 bp, Artificial Sequence
  ENSG00000176124_117 (sequence is synthesized)
aactggaccttcaagatctcaaaacacaaagtatttgttagtaactgaaaggtggcataaatgttagatcaacctaggattttatcaccaaataaggaaacaagttcactgggcagttct

SEQ ID NO: 936473 - DNA, 120 bp, Artificial Sequence
  ENSG00000176124_118 (sequence is synthesized)
aagaaagaatagaattgcttcctgcttggtcttttttgtttaatagaccagattcacaaatgccccaacccttctctagcaatgtgtaggttctgatcaccaagggctatctcaagagaa

SEQ ID NO: 936474 - DNA, 120 bp, Artificial Sequence
  ENSG00000176124_119 (sequence is synthesized)
gggccaaacatctccattaacaggaactcaagcccttgtttcattgaaatgtttggttacagcttaatgaccacagttgcaaagccagaatattgagtttttatatgctatattatttac

SEQ ID NO: 936475 - DNA, 120 bp, Artificial Sequence
  ENSG00000176124_120 (sequence is synthesized)
atggaataatgccctcttggtaccatattgaacatagtaaattctctgttaattgacactatacagaaagagtactttgactgatcgaggaaggctaatgttttttgatctctaatcctt

SEQ ID NO: 936476 - DNA, 120 bp, Artificial Sequence
  ENSG00000176124_121 (sequence is synthesized)
gggctaccttttccgtgatgtcacggaaagagcattagactagttattgttctagaactgggactctcactaactatatacacgtgggcagatcattttacatttttgagcattggtttc

SEQ ID NO: 936477 - DNA, 120 bp, Artificial Sequence
  ENSG00000176124_122 (sequence is synthesized)
ttcatgtgtaaggtggtaacaacaatgtctcccctgccttgttcataggattgtagggagaatcaaatgacataatggtcatgaaaatatatttctaagttgtaatctgtatatgtaata

SEQ ID NO: 936478 - DNA, 120 bp, Artificial Sequence
  ENSG00000176124_123 (sequence is synthesized)
aggtgttactagtaattgaacatttatatatattctgtaacaggttgtaaacttttaaaagagatctagtacaccaggcttaatggactattttttgaaagacacatcaaaaactgttga

SEQ ID NO: 936479 - DNA, 120 bp, Artificial Sequence
  ENSG00000176124_124 (sequence is synthesized)
caataattgcctctaggtagagacatgagagtgatgggaaggaggcagacttatttttcactcaatttccttttgtatctcttgaattaatactatatatacacatgacgcatttaattt

SEQ ID NO: 936480 - DNA, 120 bp, Artificial Sequence
  ENSG00000176124_125 (sequence is synthesized)
aaacagtcatgtagagctgtggatcttgctacctggatcaataacttcttctagttaagcttcttgccaaggaaaagcaaggaatatcaaatttcatagacctaatgaaccactggaaac

SEQ ID NO: 936481 - DNA, 120 bp, Artificial Sequence
  ENSG00000176124_126 (sequence is synthesized)
tgcttgcacccatgtgtgcaaggatcgctttttatgatttatacaaaccaaagcactcattggaataagaataatagctaacgtttatttatcatttattatcctggccactgtgccaag

SEQ ID NO: 936482 - DNA, 120 bp, Artificial Sequence
  ENSG00000176124_127 (sequence is synthesized)
ttacagagtgggatcaatgtgttgctcgcttagaaaatgagtcaagttccatatgtgtgagtaaatgtgaacattcccacttccttgtcacttggttttctttctcaagtttggtgtgtt

SEQ ID NO: 936483 - DNA, 120 bp, Artificial Sequence
  ENSG00000176124_128 (sequence is synthesized)
aatgcaaccaactgactcattttctaagtgaatgacatatttactctactctttaagtttaaactctaaccaattccccaatccttagttcccatgaaatgtaatgttctcttcctaaaa

SEQ ID NO: 936484 - DNA, 120 bp, Artificial Sequence
  ENSG00000176124_129 (sequence is synthesized)
tgtttggccaagttggggaaggtgggcatggcagtgtgagcctgtagccaggttccaaggttcgcttgaggttaggaggttgagactagcctgggcaatatggcaagactctgtatccac

SEQ ID NO: 936485 - DNA, 64 bp, Artificial Sequence
  ENSG00000176124_130 (sequence is synthesized)
tggttatcttttctctctggcaatccaaattcaccactccttaaaaattctacataagatttgc

SEQ ID NO: 936486 - DNA, 84 bp, Artificial Sequence
  ENSG00000176124_131 (sequence is synthesized)
gggcaagatttgcctattccagcagacttctacccaatatcaatctagatttaaatcacttgattttccacatccctttagcaa

SEQ ID NO: 936487 - DNA, 120 bp, Artificial Sequence
  ENSG00000176124_132 (sequence is synthesized)
tatgttacttctcacatacacccatatctcttctgtattttcaatcaaaagataatgcctcaaatgttatatatattgtatgtgccactcaacagtgcctcatatgctgcaaaaaaaaaa

SEQ ID NO: 936488 - DNA, 120 bp, Artificial Sequence
  ENSG00000176124_133 (sequence is synthesized)
gacagtaaacaatcggggtacctttttgtcttttaagccatattttctgggtcagtgtggtctttcaagggagtttagacaggctctattttttgttacttcactcctatagtatgtgac

SEQ ID NO: 936489 - DNA, 120 bp, Artificial Sequence
  ENSG00000176124_134 (sequence is synthesized)
tgtaaattgttccttcagtgttcaatttaagtacaaactaaagagaaacagtttcctaaagaaaaacattttaaagttacagagacacctatgtgttcgtaacatttctccagaaatatt

SEQ ID NO: 936490 - DNA, 120 bp, Artificial Sequence
  ENSG00000176124_135 (sequence is synthesized)
tgaagtaacgtaaaacttctggactggtcagtttaaatattttcttggaatttctatagaaatttctgtggaatggtgttatattggaaatattaattaactataagaagactcctactt

SEQ ID NO: 936491 - DNA, 120 bp, Artificial Sequence
  ENSG00000176124_136 (sequence is synthesized)
cttcacagagaacaagcagggatatcctggattttcacagtatttaggccactccttaattgtctcatgaaggaattaaggtagtggaacacattcaagaattgcttaggtgtcaaaata

SEQ ID NO: 936492 - DNA, 120 bp, Artificial Sequence
  ENSG00000176124_137 (sequence is synthesized)
agacaaagtgtaacagtttttttctgtagtagatttttaaatagttaaaagactctgccctctttatctatactgtattctggcaataataaagttgggcagcctatacataaaagcaat

SEQ ID NO: 936493 - DNA, 120 bp, Artificial Sequence
  ENSG00000176124_138 (sequence is synthesized)
ttctaacaatgccaaattaacagcagtttcttggccctttcctttccctccatgaaagttacaatattaggttatttcacaggtttcctccatgccccccatacccaacctaaaactgtg

SEQ ID NO: 936494 - DNA, 120 bp, Artificial Sequence
  ENSG00000176124_139 (sequence is synthesized)
ttaggctgtcaaagaaaacaaatcaggtaagattagtgtttgcctttacgcagtcattctaagtacacataaaatcatacataatatgaaaatacagcaggaagagaaacatcaaaccat

SEQ ID NO: 936495 - DNA, 120 bp, Artificial Sequence
  ENSG00000176124_140 (sequence is synthesized)
agaactgagttttagttttactgacatttatatggcatacttcctgtttttgatttcagaagtgcaaccatgcagtgcttctatgaaaaactgaatagttgagtacagtttgaggattat

SEQ ID NO: 936496 - DNA, 120 bp, Artificial Sequence
  ENSG00000176124_141 (sequence is synthesized)
aacaacttatccaaaggaaacaaacagacctaacttactgctgttttcatttgtggaactgctatctttgttgtaaaaagttgagtatttttcaaacatcatttaataatagggtagccc

SEQ ID NO: 936497 - DNA, 120 bp, Artificial Sequence
  ENSG00000176124_142 (sequence is synthesized)
ctaaaacaagtaaggagctataagtctgagttgtgaatttgactagtaatggaataagaaaaccaagccaaactccatctaaatatgtatgtaaaggtaatgcttgtaaaaatttgcttt

SEQ ID NO: 936498 - DNA, 120 bp, Artificial Sequence
  ENSG00000176124_143 (sequence is synthesized)
ttcctcattttgagatttcagttgccagttgactattggtatgcaaaattaacaattctgcctaaaggaggtaaacgatagaggttaattcttaaataaaagtccctttgtttcactatt

SEQ ID NO: 936499 - DNA, 120 bp, Artificial Sequence
  ENSG00000176124_144 (sequence is synthesized)
cctgtcatctgcgccatgggctttagttcaagtgagtcttcctcctaccttccgtggagcaatcaactggtaagagaagagtgcttcaagtaagcatgtgtacaactccagtaaacacac

SEQ ID NO: 936500 - DNA, 89 bp, Artificial Sequence
  ENSG00000176124_145 (sequence is synthesized)
cacacaagtggtggggacccaagaccctgtatatacccagtaatgggatcgctgagtcaaatggtatttccagctctaaatctttgagg

SEQ ID NO: 936501 - DNA, 120 bp, Artificial Sequence
  ENSG00000176124_146 (sequence is synthesized)
ctggtgctgcgttgccatctttaaagtcatcccactggaccacatcagtattgcaagctgcttgggtatcattaatgaagacaaagtgggattattattttctatgatttgggcttttag

SEQ ID NO: 936502 - DNA, 120 bp, Artificial Sequence
  ENSG00000176124_147 (sequence is synthesized)
ggttataatccattaccatgaataatttcttctagaaagtgcctatatagtaaaccagactatcaggactctagccagctttatgttacgtttttggtgatttaaggaattctgttacaa

SEQ ID NO: 936503 - DNA, 120 bp, Artificial Sequence
  ENSG00000176124_148 (sequence is synthesized)
caggtgacatttttgagagtggaaatatacttatatggaacaaaagtcttaactccatgagtaatttttagttggcagaggtgcaaattcttcttcagtatttcagcatggagattttta

SEQ ID NO: 936504 - DNA, 120 bp, Artificial Sequence
  ENSG00000176124_149 (sequence is synthesized)
gtaaggttttcaattaattaaaaaatttaaaaactcttcctcataaaaactccgtacctcaaaggtaactttaataggtgcctaaactagctaaaagattgagctctgtgttgacatttt

SEQ ID NO: 936505 - DNA, 120 bp, Artificial Sequence
  ENSG00000176124_150 (sequence is synthesized)
tggagaataatgcggcagctgttatgtttgaatgtgtatttgggtcccaccttgaacagacgggaaacaactgttttaaaatctcttttctctgtgtaggtttaggtgcagtcatcttgg

SEQ ID NO: 936506 - DNA, 120 bp, Artificial Sequence
  ENSG00000176124_151 (sequence is synthesized)
atttgagtcgtgcttgtgaattttcatgtgttacaacaaccagattaaatttcttcaagtggaaatattaagtcaaagaaattacctatttctaataattcttactgaagaagtgaaacc

SEQ ID NO: 936507 - DNA, 120 bp, Artificial Sequence
  ENSG00000176124_152 (sequence is synthesized)
tagcaggaagaattgtatttggtaactagactttcaattgtattttataattagccatcaattttatttgataattaatgtatattcttcccaatatacaataacatcccctagtttaaa

SEQ ID NO: 936508 - DNA, 120 bp, Artificial Sequence
  ENSG00000176124_153 (sequence is synthesized)
catcccctagtttaaagaaacaacaaacattatggacctctatatctattagctaccatcgcataatattcttcggtagttttaaacaataattgtacacacacacacacacacacacac

SEQ ID NO: 936509 - DNA, 120 bp, Artificial Sequence
  ENSG00000176124_154 (sequence is synthesized)
tctcaggcttccataactaaataccataggcggggtggcttaaacaacagaaatttgtttttcagggttctggaggttggaagtctgagaccagggtgtgactgtggttgggttctggtg

SEQ ID NO: 936510 - DNA, 120 bp, Artificial Sequence
  ENSG00000176124_155 (sequence is synthesized)
tctttggtttgttgacagtcaccttcttgctgtgtcctcatgtgaggggaagtagagggagaaaaagctctctggtgtctttttttataagggcactaatcacatcatgaaagccccacc

SEQ ID NO: 936511 - DNA, 120 bp, Artificial Sequence
  ENSG00000176124_156 (sequence is synthesized)
ctcaaaacctcgtctaagcctatttatctcccaaaggccccatctccaaattccatcacattggagcttagggcttccacctatgaatctttctggggtgcagtatggttcagtctatag

SEQ ID NO: 936512 - DNA, 120 bp, Artificial Sequence
  ENSG00000176124_157 (sequence is synthesized)
ataaaaaaaatatatatatgtacacacacacatatatatatataatttatattcatgtatacttgtatagttgaaagtctccaagataatgaacaaaatgctgaatggttatttctgggt

SEQ ID NO: 936513 - DNA, 120 bp, Artificial Sequence
  ENSG00000176124_158 (sequence is synthesized)
ttatttctgggtcatagaaggagagcaaattctagaacttttttctttttgtttctctgtgttttccaagttttattcactgagcatgtactaccattgtgtttataaaatattaaattt

SEQ ID NO: 936514 - DNA, 120 bp, Artificial Sequence
  ENSG00000176124_159 (sequence is synthesized)
ttaaaagaaaaagatgttttaaattatgaggtacagatggtcaatacatttaataataaaagttggaatggcacatagcccatcactaattgaagaaaaagctttagaatatgcagtcct

SEQ ID NO: 936515 - DNA, 120 bp, Artificial Sequence
  ENSG00000176124_160 (sequence is synthesized)
ttaagcaaactaacctaaaactaatgaaatccccttgttcgtgatgatagttgctatcactctcctcttaactgtctttcaaaataatgatcacaggctgaatctcttttctaccagtgt

SEQ ID NO: 936516 - DNA, 120 bp, Artificial Sequence
  ENSG00000176124_161 (sequence is synthesized)
tctatttattaacttatattataaaattacttttttcttttgtgaatgcacaccatacttcttcatcttttatccctggggctcccaggcaacatcagagtgagatatttttgtgagtct

SEQ ID NO: 936517 - DNA, 120 bp, Artificial Sequence
  ENSG00000176124_162 (sequence is synthesized)
cagatattattaaaaagatgctgtgggagggttgatggaagcacacaatatcacagctcctcttcctcttttcctacggatgaaatctggcaggcaaaaaaaaagcaacaaaaacaaaaa

SEQ ID NO: 936518 - DNA, 120 bp, Artificial Sequence
  ENSG00000176124_163 (sequence is synthesized)
atccagggccataaataactgccaaagaagagaagccttctctcttctctgctgttgcttcattttatagtctcaggaaatctcatcatagaagtgcctttcaccttctgccatgattgt

SEQ ID NO: 936519 - DNA, 68 bp, Artificial Sequence
  ENSG00000176124_164 (sequence is synthesized)
tcgtgatccgaccaaggcaatgatttttaatggtttttgggaagcagattttataatatattaaagga

SEQ ID NO: 936520 - DNA, 120 bp, Artificial Sequence
  ENSG00000176124_165 (sequence is synthesized)
aatggtttttgggaagcagattttataatatattaaaggaaggtgtgtgtgtgtgtgtgtgtgggtacgtaatacatacaaatatatccattcatcttttaataaactaggttcagcatc

SEQ ID NO: 936521 - DNA, 120 bp, Artificial Sequence
  ENSG00000176124_166 (sequence is synthesized)
ccactacttactagctgtgccttgttgggtaaattatctgttggaccttttgtaaaacaagtactattaatacctcattggactgttgtaaggatgtaaatgagctaacatattaaagga

SEQ ID NO: 936522 - DNA, 120 bp, Artificial Sequence
  ENSG00000176124_167 (sequence is synthesized)
atcagcatgtgcaaagatgaagaggcataaggactgaccagtgggtcacggcaatgagacatttactgctgacctccaagagaagacttccattgaatgagaggaagatctacactacta

SEQ ID NO: 936523 - DNA, 120 bp, Artificial Sequence
  ENSG00000176124_168 (sequence is synthesized)
atgatcaaacttacctggagcagtatctgacacagatatgtgttgagtgaatggatgaataaatagatagaaggaagatcctccaactatgaagtttcttcttttcttctgctgctgttg

SEQ ID NO: 936524 - DNA, 120 bp, Artificial Sequence
  ENSG00000176124_169 (sequence is synthesized)
agtagatgagggtgccaagaaataagacagcaacaccaggaagaagaacaaatttggggcactgctgctgtactgagaatacagctgtgaacaacatccctgtcgctttcgttctagaga

SEQ ID NO: 936525 - DNA, 120 bp, Artificial Sequence
  ENSG00000176124_170 (sequence is synthesized)
ggaaaaacaggatctctaatgcctgtcatctgcgccatgggctttagttcaagtgagtcttcctcctaccttccgtgctttggtggatgatttcaagtttaagagtgacggaatgccatg

SEQ ID NO: 936526 - DNA, 120 bp, Artificial Sequence
  ENSG00000176124_171 (sequence is synthesized)
aattttcatgctgcctacatttcagtaagacaaccttgctggatttccccctccattttggattataaaatctaacccctgcggaacatcctttcacttggagagaaaaatttacttgga

SEQ ID NO: 936527 - DNA, 120 bp, Artificial Sequence
  ENSG00000176124_172 (sequence is synthesized)
aaaatttcacttggagagaaaaccaagaaagcttcttggtttcctgaactattttgattatctgtgtagatatggcttatagtattgaaatgaggtggcagaaagagtagtagtgataaa

SEQ ID NO: 936528 - DNA, 120 bp, Artificial Sequence
  ENSG00000176124_173 (sequence is synthesized)
aatggagaagagaaaggtcaagtgagtttcagtgattttgccaactaaattctaggatccttaatgaaaaaaatgtgaccacctttatcactttccaggatcatcctgtattttcaagtt

SEQ ID NO: 936529 - DNA, 120 bp, Artificial Sequence
  ENSG00000176124_174 (sequence is synthesized)
ctttccaggatcatcctgtattttcaagtttcagtaggtacccttttactgtgatggaaagaaatgcttgacttgggtctatatatttaaatttatttttattttttatttttatttatt

SEQ ID NO: 936530 - DNA, 69 bp, Artificial Sequence
  ENSG00000176124_175 (sequence is synthesized)
gtgcagtggcacaatctcagctcatatagctgggattatggatatgtaccaccacacccagctaatttt

SEQ ID NO: 936531 - DNA, 73 bp, Artificial Sequence
  ENSG00000176124_176 (sequence is synthesized)
ctaatttttgtatttttaatagaggtgggtcctgcccatgcccaccttagcctcccaaagtgttgagattaca

SEQ ID NO: 936532 - DNA, 120 bp, Artificial Sequence
  ENSG00000176124_177 (sequence is synthesized)
ggtgtgagccaccacacccggtgttatatttaaattttttaaaaaatcttctctgtacctttccttacattcatcctcattcccttacacacttcttttcctctaaggaattttctcctc

SEQ ID NO: 936533 - DNA, 120 bp, Artificial Sequence
  ENSG00000176124_178 (sequence is synthesized)
ttgttctccaagttcttttctggcaggctttatggccgagcagacattggagttttatctactctttcatctgctcctctcttccgtctgtttttccaaagcttcctttcctatggtaat

SEQ ID NO: 936534 - DNA, 120 bp, Artificial Sequence
  ENSG00000176124_179 (sequence is synthesized)
taccatgaaaaaagggggcaaggagagggggttgaggggccacatggttcttttgcttagcttttgttacaagatcactatgggtatattcatgaagtcaaaacttcatctggggaggtt

SEQ ID NO: 936535 - DNA, 120 bp, Artificial Sequence
  ENSG00000176124_180 (sequence is synthesized)
caatgtaatctccaactcttaaaccctgagtgcagcaagggagaactaaactagttttgaaaactggactagagccttcccacattgtctgtctgtgctaggaaaacaagagaagccaac

SEQ ID NO: 936536 - DNA, 120 bp, Artificial Sequence
  ENSG00000176124_181 (sequence is synthesized)
agatgtgtttattttatttgtttgatcattttgatcacttttgtttcaaaatattgttaagaatggtcagaagagttgacataggtaaaatatgtttttaaaataaatacttgaacatga

SEQ ID NO: 936537 - DNA, 120 bp, Artificial Sequence
  ENSG00000176124_182 (sequence is synthesized)
atgaacttatgatctggtggaaggacatgataactaatcaaataatcacaaatatgtatttcagagaaatgaggggcaaatgcactagctgccctatgtaagctctaagtctcatcattt

SEQ ID NO: 936538 - DNA, 120 bp, Artificial Sequence
  ENSG00000176124_183 (sequence is synthesized)
cggggatcctctcctgtgatgcagctttgctagaaagaactaatatttgtatttttttgcaccatctgttctgctgtatcgtggtagaagtcatgtaggttcatatgagatctttcttcc

SEQ ID NO: 936539 - DNA, 120 bp, Artificial Sequence
  ENSG00000176124_184 (sequence is synthesized)
aagcaccttaatgttttgaagagataaaagcaagaagcaagctttcttacaattcatgaaaaagcccaatcaatatgcctcaagaaacaaagctgatgtataataaaaattattatccca

SEQ ID NO: 936540 - DNA, 120 bp, Artificial Sequence
  ENSG00000176124_185 (sequence is synthesized)
cacaacatcagctgagctgatataagaatttcctaactcatgaggaggtctgatggccgggaggacaggaagaaggaacccacaatgaagcaaaagttgcgtttaactctgtcctcacca

SEQ ID NO: 936541 - DNA, 120 bp, Artificial Sequence
  ENSG00000278782_0 (sequence is synthesized)
caggttcagctgttgcagcctggggctgaggtgaagaagcctgggtcctcagtgaaggtctcctgccaggcctctggatacaccttcaccagctacgatattcactgtgtgcgacaggcc

SEQ ID NO: 936542 - DNA, 120 bp, Artificial Sequence
  ENSG00000278782_1 (sequence is synthesized)
aagacaggctatgcacagaagtttcagggcagagtcaccatgaccagggacatgtccacgagcacagcctacatggagctgagcagtcagagatctgaggacatagatgtgtactactgt

SEQ ID NO: 936543 - DNA, 84 bp, Artificial Sequence
  ENSG00000278784_0 (sequence is synthesized)
aaccatagaagacagccacacccaaaggggccatttcagagacccaccctcaggcacgtattctctttcccagggatgttcctt

SEQ ID NO: 936544 - DNA, 78 bp, Artificial Sequence
  ENSG00000278784_1 (sequence is synthesized)
aatctcatggtcagttgtaatctgcaggtgggtttctgatgaatgtgtagcaccaccctcttgccgtgagttatgaga

SEQ ID NO: 936545 - DNA, 120 bp, Artificial Sequence
  ENSG00000278784_2 (sequence is synthesized)
atgaatgtgtagcaccaccctcttgccgtgagttatgagatgtggtcattttaaaaagtgtgtagcacctccccctttgccctcttgctcctgctcccaccatgtgagatacttgctccc

SEQ ID NO: 936546 - DNA, 71 bp, Artificial Sequence
  ENSG00000278784_3 (sequence is synthesized)
agatgccagcattatgcttcctgtacagcctgcagaaccacagccaattaaagctcttttcttataaatta

SEQ ID NO: 936547 - DNA, 120 bp, Artificial Sequence
  ENSG00000241084_0 (sequence is synthesized)
aggggacctcgcctgcatccattcgcctatccatcctacagcagcgactgcacccctgattgtgatgacgaatgcacccccatccttgggctccgtgcccactgctgggctgggctgctc

SEQ ID NO: 936548 - DNA, 120 bp, Artificial Sequence
  ENSG00000241084_1 (sequence is synthesized)
aggatatgcggcaggaggttcatttttgaaagtataagaagggccgccgggaatgagtgtctcacggggacagagtgtgcgtttgggaagatgagacggttgtggagatggatggtgggg

SEQ ID NO: 936549 - DNA, 120 bp, Artificial Sequence
  ENSG00000241084_2 (sequence is synthesized)
atggttacacaacaacgtgaatatgcttaaagccacgttcacggaacacgtacaaatgactaaaatggtaactttctggtatggatattttaccacaataaaaaaaaaatgctaaaaaaa

SEQ ID NO: 936550 - DNA, 120 bp, Artificial Sequence
  ENSG00000233756_0 (sequence is synthesized)
gcttccaggaaagctgatggggtctacatgcacttttcctatatcccccactgacaagtacagtgaaggccgaatgctcagtgaacagtaactctctgccctaaatccagctgtgacttt

SEQ ID NO: 936551 - DNA, 120 bp, Artificial Sequence
  ENSG00000233756_1 (sequence is synthesized)
catggtccttactcatggaccttccacactgagggagcatgctgcatctggggaattttggatatcaggagcactgagaaaaagagaacacaaatgaaatctcacctcatgtgatagtag

SEQ ID NO: 936552 - DNA, 120 bp, Artificial Sequence
  ENSG00000233756_2 (sequence is synthesized)
tcatgaaacccaaagacacaatgtggagaggagttcacgagaatgcctggtatgaggagagcaccccaaatcactctttatgagctcatctcaaatctcgggctccacttatcccacggc

SEQ ID NO: 936553 - DNA, 120 bp, Artificial Sequence
  ENSG00000233756_3 (sequence is synthesized)
gctgctcctgcctgagttctgcagccaagtgccctgtgattgctataagaaggaggaatgaggactggggggcggcgatgcagcaaactgaccagctgccacctctccattctcccagtc

SEQ ID NO: 936554 - DNA, 120 bp, Artificial Sequence
  ENSG00000233756_4 (sequence is synthesized)
aatctctctgatcattgtctctgcgctagctcacagtctggaagcttggagagcctcttttgtttctccacttttttttttttctcagagttctctgtaaaagcatgttttgggttgtgc

SEQ ID NO: 936555 - DNA, 120 bp, Artificial Sequence
  ENSG00000233756_5 (sequence is synthesized)
tctcctgtttcaattaatttatatctaccctctgacttttaggaacttattatattatttgacaaagcacaaatgtgcagaaaaatcctaggcctaataaacccagatgttctggatgca

SEQ ID NO: 936556 - DNA, 120 bp, Artificial Sequence
  ENSG00000233754_0 (sequence is synthesized)
acggcctgaggaccagccaggctcagaaactcctgacccagtgcagctgctcctgggactaacagaggaaaagctcaagggtttcgcaggagtggccatggcggtatctgggctcaaatc

SEQ ID NO: 936557 - DNA, 120 bp, Artificial Sequence
  ENSG00000233754_1 (sequence is synthesized)
tggctgcctccggctcgcggaaaacagtgtctgctgtctggggagcctgttcctggtgaagacaggaggataatgggatgcgctgttccattgccaacagtgtttttcttcgagaagggg

SEQ ID NO: 936558 - DNA, 120 bp, Artificial Sequence
  ENSG00000233754_2 (sequence is synthesized)
aaaggacatggtactgattgagaacttctgggaacctcggggcaggtgagcagagtgggaggagcttgctggcagcagcgcctgtttcccacccggctggccgcagacctggcgctcagt

SEQ ID NO: 936559 - DNA, 120 bp, Artificial Sequence
  ENSG00000233754_3 (sequence is synthesized)
cgcagccgcgcgtgcatgagattcagggtccggcccccgcagaattacaccggcgtgaacccggctcatcgtgagcttctgaggcaacacttgtgtttagtattttccatgatatgatgt

SEQ ID NO: 936560 - DNA, 120 bp, Artificial Sequence
  ENSG00000233754_4 (sequence is synthesized)
ctgcaaatacattcccatgagagggagcgtcggactgtcccgtccccatgtcgagcaggaaggaaccagaattaagaggagggtgtccaaggcggcagctcaccttgttttccagcttct

SEQ ID NO: 936561 - DNA, 120 bp, Artificial Sequence
  ENSG00000233754_5 (sequence is synthesized)
cagaaacgctgagaaaaaacgaacatctctttgcagcggatggaagattgtatagtcttgctgtcccaaattctttggctaaaccaccagattttaaatatctgctagcaaaatatatta

SEQ ID NO: 936562 - DNA, 120 bp, Artificial Sequence
  ENSG00000233755_0 (sequence is synthesized)
tagacatgaaggagaaagaaaaggataagggagaagaaagaaaggacagagagaaaaaaatgaacaatcagagtaaaggcagcaagcattctctaactcctgaccgcgagtgatcctcct

SEQ ID NO: 936563 - DNA, 120 bp, Artificial Sequence
  ENSG00000233755_1 (sequence is synthesized)
gcctcaacctcccaaagggctgggactacaggcgtgagccactgcgcagggcctcaaccagcgttctctagagcggtggatcccaaatgccatctgaggaccagcaacagcagcagcatc

SEQ ID NO: 936564 - DNA, 120 bp, Artificial Sequence
  ENSG00000233755_2 (sequence is synthesized)
atggtgacactgaaaattcttcctgtgttggcatctgacagaggatttgaaaccgaatgctgaactcatgttaggaaagtgaagcagcaggttctctggagagagatggtctctgcatag

SEQ ID NO: 936565 - DNA, 120 bp, Artificial Sequence
  ENSG00000233755_3 (sequence is synthesized)
cagaaatggagttcccccaagtgaagcgagtctggccgctggggcgctggcttcctcactgagacaccagagagggagccttcttccacattgtcatctgaagatttctcatcattagac

SEQ ID NO: 936566 - DNA, 120 bp, Artificial Sequence
  ENSG00000233755_4 (sequence is synthesized)
tctctcagcgcacccagaatgggacatggtgggtctgcagaaaaggaaacagtgtttccagatccttctagacacacgcttagtgcattaaaggaaaatcattcgcagtctaaatgggtt

SEQ ID NO: 936567 - DNA, 120 bp, Artificial Sequence
  ENSG00000233755_5 (sequence is synthesized)
ggataatgtgttggagggctctgaaccccagaagcttcacacctagagctcttcagatctacccttggtcattgacatcccagcatgaatcagtgactcagtccttccagatggatgcag

SEQ ID NO: 936568 - DNA, 120 bp, Artificial Sequence
  ENSG00000233755_6 (sequence is synthesized)
gaggagtcggagctggaggaaaaggcgatgtgatgacagaagcagaaattggagcgatgcactttgagatggaggaagaggccacaagccaaggaatgcaggtgcctctagaatctgata

SEQ ID NO: 936569 - DNA, 80 bp, Artificial Sequence
  ENSG00000279784_0 (sequence is synthesized)
taatttccgttgtatttttaatacactgatgctattcttacacaaagtaaaaaggctgggtaagttgtggttacaggcat

SEQ ID NO: 936570 - DNA, 120 bp, Artificial Sequence
  ENSG00000279784_1 (sequence is synthesized)
tttttacagtacgcattgcatttataattggagatacaaaaaaaggtgactgttactgtttgacagcaaggcagtagtattatcttcatcaatatttgcaacttaattcgcaggaacctg

SEQ ID NO: 936571 - DNA, 120 bp, Artificial Sequence
  ENSG00000224532_0 (sequence is synthesized)
gttgctagccctccttagagagggcgagggagaggaggatgctgtgcctggaaagcggctcttgaggagagctggaatctcggcaaagcgtccactccctcccctcccctttcctctcac

SEQ ID NO: 936572 - DNA, 120 bp, Artificial Sequence
  ENSG00000224532_1 (sequence is synthesized)
ctctagtgttcccaccagccccggggaggagacaaaggacgtgggagggcagcagcatgcagggggcctgcctttgacgcccaggagttgaacaccagacagaaaatgaaatctaaacat

SEQ ID NO: 936573 - DNA, 120 bp, Artificial Sequence
  ENSG00000224532_2 (sequence is synthesized)
gggctagaaatgggccaacctgaccctggaaaacaaacaacccgcgtcaccgccacacctgctgcaggccccagatgccacagatgaggttttgctctgttgcccaggctggtctcaaac

SEQ ID NO: 936574 - DNA, 120 bp, Artificial Sequence
  ENSG00000224532_3 (sequence is synthesized)
aatctgcctgccctggccttccaaaagtcctaagatttcaggtgtgactcaccgcgcccagcctcaggttgccttaaagaaaagtttctgtatattaaatataaactatatgatgcacaa

SEQ ID NO: 936575 - DNA, 120 bp, Artificial Sequence
  ENSG00000224533_0 (sequence is synthesized)
caaatggtggttcctgaaacagaggccaaaacaaggaagtgatctgttccagtccaagcttccaagaaataaagaactaggtggggcacactaaacaagcccccagactcaaccacccca

SEQ ID NO: 936576 - DNA, 120 bp, Artificial Sequence
  ENSG00000224533_1 (sequence is synthesized)
tgttgctgtcgctttagtgactcttctctgccacacgcttcctgtgcctttgccttcctctggtgtgattcggcaggaagaccaaagaggggaaaaagaagtcacgggcacccctttggg

SEQ ID NO: 936577 - DNA, 120 bp, Artificial Sequence
  ENSG00000224533_2 (sequence is synthesized)
acctacaatcagagaggaaggttactttccttcagagctttaatcacctgaaggccctggcggctgccactgtcactgtcactgcctctgtcaccaccactgctgccacaggattgcctg

SEQ ID NO: 936578 - DNA, 120 bp, Artificial Sequence
  ENSG00000224533_3 (sequence is synthesized)
tgggctagaacatgaaagtacaaagaaaagaagaaagaaaaactggggattcccttaactatcgctgagggctcagaagtggaaaaatatgaagatccattgctgatgggaatcctgccc

SEQ ID NO: 936579 - DNA, 120 bp, Artificial Sequence
  ENSG00000224533_4 (sequence is synthesized)
taagcaaacggtgtgtactaaagggagcacattgttgagaaggaccggttgcaaatttccaaaaaggagagtaaaataattaatgagtcaaggtctcaggagagacagaaggatgactta

SEQ ID NO: 936580 - DNA, 120 bp, Artificial Sequence
  ENSG00000224533_5 (sequence is synthesized)
caacttaagtgtctccctttgtgggaggaatcccagctatagcctagtggaccattcacccagggatcttcaatcattcgttcaaccctaacatttatatgcgcaccagctacatgctag

SEQ ID NO: 936581 - DNA, 120 bp, Artificial Sequence
  ENSG00000224533_6 (sequence is synthesized)
gcagtgcgtcaggcattaaagatacaaggacgaatacagcagacacgacctcagtctttggacagagtttaccttctattgaggaagatagatgataaacaagtaataaatacataaaca

SEQ ID NO: 936582 - DNA, 120 bp, Artificial Sequence
  ENSG00000224533_7 (sequence is synthesized)
aagtaatttcagctagctataaatgctatgaaaaaataatagtgttatataataaagagcgactgggaaatctatttcacatggagtgttaagtgaaggactttttgaagaagcgacatt

SEQ ID NO: 936583 - DNA, 120 bp, Artificial Sequence
  ENSG00000224533_8 (sequence is synthesized)
gagaccaacaatgtaacaagctgaggggagagcattccaggcaaagggaaaagcaaaaacacagccttggagtggaatggagttttattctgtttgccgaccagtaagaaggtcacgtgg

SEQ ID NO: 936584 - DNA, 120 bp, Artificial Sequence
  ENSG00000224533_9 (sequence is synthesized)
ctggagctgagtaagcaaggggaataatggtgggagaaattacgtggaggaggtagtcaggggctagatcatgtatatattgccatgcaggccatggtaaggactttggattttattctg

SEQ ID NO: 936585 - DNA, 120 bp, Artificial Sequence
  ENSG00000224533_10 (sequence is synthesized)
agtaccatgggaagccactgaaaaaccttgcctaagataatgggtttctgttttgcctaaggcaaattaactttttactgaagtatactatacattacggaaaaagtacacaaatcgtaa

SEQ ID NO: 936586 - DNA, 120 bp, Artificial Sequence
  ENSG00000224533_11 (sequence is synthesized)
gcttgatgaattttcatgatgtaatcgcatccatatcactagcacccaggtcaataaacagatcattaccagaaccccagaaccctcccttatgcccctttccagtaacgcccatccccc

SEQ ID NO: 936587 - DNA, 120 bp, Artificial Sequence
  ENSG00000224533_12 (sequence is synthesized)
aacccacgggtaactaccatcctgacttctatcaccaaagattagttttgcctgtttatataaaactttatataattgcaatcacaatatgtattcattttgtgtctggcttctttcatt

SEQ ID NO: 936588 - DNA, 120 bp, Artificial Sequence
  ENSG00000224533_13 (sequence is synthesized)
taatattatgtttaggagtttcatcattgcttagcaatagtttattggtgctatatggaagttgagtgcgtgatcacaccacagtttatccattctactgttgatggacatatgagtaat

SEQ ID NO: 936589 - DNA, 120 bp, Artificial Sequence
  ENSG00000224533_14 (sequence is synthesized)
ttccggtttggaactactacaaacagtgctgttatgaacattctattacatgtcttttggtgaacaaatatattcactcctatttgaaataaacttaagaatggaacttatggatcataa

SEQ ID NO: 936590 - DNA, 120 bp, Artificial Sequence
  ENSG00000224536_0 (sequence is synthesized)
gcggtgctgccctcctaggccccgggaaggccggccggcaggggcgggggcaggagtcgccgactctgggggtgctccgagctcgtgctgcggtcccactgtgcgccctgtcgccgccac

SEQ ID NO: 936591 - DNA, 120 bp, Artificial Sequence
  ENSG00000224536_1 (sequence is synthesized)
gctcgtgctgcggtcccactgtgcgccctgtcgccgccaccgcggaaaacgtcttgcacgtgcgaggggcatttcaggagtttcctgtctgtcaggctggagtgcaatggcacaatcatg

SEQ ID NO: 936592 - DNA, 120 bp, Artificial Sequence
  ENSG00000224536_2 (sequence is synthesized)
cctcctatctcagcctcctgagtagttgagacaacaggcatgtgccaccatgtctggctaatattttaataaaattttttgtagagacaggttctccatatgttgcccaggctttgattc

SEQ ID NO: 936593 - DNA, 120 bp, Artificial Sequence
  ENSG00000224536_3 (sequence is synthesized)
ttctaatgctcggtattaagactctatgactgtgtattatacatagagtttacatgtgagtaagttctgggtggagagacactattccttgctagggccttaagagtctggctgcagctc

SEQ ID NO: 936594 - DNA, 120 bp, Artificial Sequence
  ENSG00000224536_4 (sequence is synthesized)
tgctatcacatgggcaaaaccagctacataatttacaagatccagtgcaaaataaaaatgtgacatttcttgttaaaaatcattgtgaatttcaagatggcaacaacaaagcattaaacc

SEQ ID NO: 936595 - DNA, 120 bp, Artificial Sequence
  ENSG00000224536_5 (sequence is synthesized)
aagcagggggcctttctaagcttgagcccccgtgtgactgcacaggtcatatgcccatgaagctggctctgcagagactagctgaccgttggactggctgtgtcctggattcttttagtt

SEQ ID NO: 936596 - DNA, 120 bp, Artificial Sequence
  ENSG00000224536_6 (sequence is synthesized)
aacattcctcagccacattccctgctccaaagccagagctctatgtattccagcacaagcaaagtcccagggtccatgcctgccagtcagcattgctctggaggcacccacaaagatggc

SEQ ID NO: 936597 - DNA, 120 bp, Artificial Sequence
  ENSG00000224536_7 (sequence is synthesized)
aaagatggggggtgaagggggtattggacaatgatattcctgtgcctcgagtggaaagtctctcaggagataagagaggactgaagtaccaaccaagaaacccgggtttcattcccagct

SEQ ID NO: 936598 - DNA, 120 bp, Artificial Sequence
  ENSG00000224536_8 (sequence is synthesized)
ctgccactaaatttactgtgtccttaattggcaagttgcttaacatcttggcactgttatctctttatctgttaaaggagagagtttgattagattgtctttaagaccattcccacttcc

SEQ ID NO: 936599 - DNA, 120 bp, Artificial Sequence
  ENSG00000224536_9 (sequence is synthesized)
agctctaaaagtctgtatttaagtgactctaagagactgtaataataatagataacatttgttgaccattaccttatgccatttacatgttgatttaatgctcataacaaccgtatgagg

SEQ ID NO: 936600 - DNA, 120 bp, Artificial Sequence
  ENSG00000224536_10 (sequence is synthesized)
caggcactgttattcccattttacagttgagaaaattgagactcagtttaaaacatgcatggggaacaaggtagctttttggggtggtggaaatgttctaaaacttggttctggtcatgg

SEQ ID NO: 936601 - DNA, 120 bp, Artificial Sequence
  ENSG00000224536_11 (sequence is synthesized)
ctgcagaactctgtagatttagagttgtatatttcgagtgggtgaattttataatatgtaaattgtacctcaataaagctgttgaaaagaaataaagaaatgtgctgaactagtacatga

SEQ ID NO: 936602 - DNA, 120 bp, Artificial Sequence
  ENSG00000224535_0 (sequence is synthesized)
aggcagccccagagtggccataggtctgagagccccacagggcccctcctggttgattccccaaatccacttctccatcaccctcactgaccttctcccactgtgaggcctcctgccttc

SEQ ID NO: 936603 - DNA, 120 bp, Artificial Sequence
  ENSG00000224535_1 (sequence is synthesized)
cacaggacctgcctgctgtctcacctcttcatagctcacctctcttctctaccccaaggctggctttgagggaccctggctccacagtccttgccacagtatgaacaaggtcacttcctg

SEQ ID NO: 936604 - DNA, 120 bp, Artificial Sequence
  ENSG00000224535_2 (sequence is synthesized)
actgatggatttaggctcatttaatccaaactcgactccatttcagccagaaccaggcacctctagaaaggtcaccctaactgccacatccagttcctgatctgccatctgcttcttttc

SEQ ID NO: 936605 - DNA, 120 bp, Artificial Sequence
  ENSG00000224535_3 (sequence is synthesized)
catcacttgtggggtatttcccagcctaccactaatgtgagccctcctgagtcaaaagttcccctcttccaggcctcctgctcagctgacgtcctggaccaggcaggccacccttgttcc

SEQ ID NO: 936606 - DNA, 120 bp, Artificial Sequence
  ENSG00000224535_4 (sequence is synthesized)
acttcccctgggaagacacctgggtcttgtgcctgccctggattagggtgggcaaattagttcatccaggactagaagaatggaaataaacagacttgtgtcttggggctgactctgaaa

SEQ ID NO: 936607 - DNA, 120 bp, Artificial Sequence
  ENSG00000224535_5 (sequence is synthesized)
gcaaggaggagagggatggagggctggctggaggagcacatggggagcactcctcaaatgcttcctagaggtcatggagtcacttcctgctgcagagtcctcactccagctttctcacca

SEQ ID NO: 936608 - DNA, 120 bp, Artificial Sequence
  ENSG00000232085_0 (sequence is synthesized)
tcgtggccttggaagggtggttgatttactagatgaaccagataccaccggagaagtcttagatttcgttactttacttccttccagtttggaatgtacatgctcatcagctgagaaatt

SEQ ID NO: 936609 - DNA, 120 bp, Artificial Sequence
  ENSG00000232085_1 (sequence is synthesized)
aaatccaagctggtgtctgtccacctgtccttaggaagtctcaacttacgaagtccacaaaatttctcaaaaaagagttttatcactttgaatttgtcccctgcttaaaatccctcaaaa

SEQ ID NO: 936610 - DNA, 120 bp, Artificial Sequence
  ENSG00000232085_2 (sequence is synthesized)
gtcgtgctctgcgcaagagggaagtcctgatttttggggtgccacaagcctgagacaaaacaaatttccattttcaaccggaatgaaattaagaaaacagataaaagccacatacaaaat

SEQ ID NO: 936611 - DNA, 120 bp, Artificial Sequence
  ENSG00000232084_0 (sequence is synthesized)
atagttcaagcctgaatttcaatgagatgggaacactttttagtataaacgcaagattttcatgtctcccttttaggaaaaatagggattatggcgttcatctgtttcatccagaactag

SEQ ID NO: 936612 - DNA, 120 bp, Artificial Sequence
  ENSG00000232084_1 (sequence is synthesized)
aagcaaaaccctaaacctcagactcttccagcatgtctgatccaatcaaacaagggaagatgctgcgggtgctttgtatgctaaggaagtgctacgatgccatcgtctgtccaggaaaag

SEQ ID NO: 936613 - DNA, 120 bp, Artificial Sequence
  ENSG00000232084_2 (sequence is synthesized)
aaaggaacacccatccatgtggttaagccatcagaaaactggagcattgggaataaaggaattatttccacgagacaagcacgccagccattggctcataatgagctgaaagaccaatga

SEQ ID NO: 936614 - DNA, 120 bp, Artificial Sequence
  ENSG00000232084_3 (sequence is synthesized)
ctgcttctcagagactccctagggcccagtgtcctgggggcagacctgtggctgagtcagcatggtgcacagcagaaagtggggggagagtggccagcgctgccccggcgggctctgtct

SEQ ID NO: 936615 - DNA, 120 bp, Artificial Sequence
  ENSG00000232084_4 (sequence is synthesized)
gcatcacctggagcggcacagacccttcagtctccattctctcttcaggaaagaggcctactcgcagatgaacgcaccaaggctcagagacaaagcaaatccgtgggatgccgagggcac

SEQ ID NO: 936616 - DNA, 120 bp, Artificial Sequence
  ENSG00000232084_5 (sequence is synthesized)
ttggataacttccgctcgggagagaagcccaaactccgcgtcccggagacctgaagtgtggccgccagtggacacccagctgagggatgagcagcaatgaatgagagttcctattgctcc

SEQ ID NO: 936617 - DNA, 120 bp, Artificial Sequence
  ENSG00000232084_6 (sequence is synthesized)
acgtcctcaccgcatttgctgctatctgtgccctggatttgggccatcctgataggtgtgtggtatccggtaggtgtgtctcattgttgttttaatttgcatttctctgatgacatatga

SEQ ID NO: 936618 - DNA, 120 bp, Artificial Sequence
  ENSG00000232084_7 (sequence is synthesized)
tgtggattatcttttcatctgctcatttgccatctatatatcttctttgaggcatctgctcagatctttgcctttggccttttgttatctctaaaacacagaaggcggtgcagggtgcgt

SEQ ID NO: 936619 - DNA, 120 bp, Artificial Sequence
  ENSG00000232084_8 (sequence is synthesized)
taagaaggcatgtctgggcaagtgggtgcctttgcctctccctgctgcccccgcacagggtttctccaggctgtcttgtcacccacctctatttggttggggccacatttaccagggatc

SEQ ID NO: 936620 - DNA, 120 bp, Artificial Sequence
  ENSG00000232084_9 (sequence is synthesized)
cccactatcccaaaactcctcttgaacacattgtctgtccaggaggggcctgtcgagctgcagtttatgttctataggttcaggcagctgctgctaaagtgacaaggtgactctctgacc

SEQ ID NO: 936621 - DNA, 120 bp, Artificial Sequence
  ENSG00000232084_10 (sequence is synthesized)
tggtttgctgagatagtcgcggatgacacctcttttcctggcttaatggttacaactcccaccccaccaaagtgtctcagtttggacaataaccacagttattatccttgggaaaggaca

SEQ ID NO: 936622 - DNA, 120 bp, Artificial Sequence
  ENSG00000232084_11 (sequence is synthesized)
tttgggctctgacatctggcctggctgaatcacctcctccctgttggagggggtcaggggtcagggttgcttccctggagctctggaaagaccagtgaaggtgagggaggtgtgacagta

SEQ ID NO: 936623 - DNA, 120 bp, Artificial Sequence
  ENSG00000232084_12 (sequence is synthesized)
tttcttcctgcatttctccaaccagagcaattctctttctttgagtcctcaagtccacactgagcttctttctcctcccttagtacattccttctcctgagagacaggttaacatgcagc

SEQ ID NO: 936624 - DNA, 120 bp, Artificial Sequence
  ENSG00000232084_13 (sequence is synthesized)
agctctgtgaccttgggcctcagtttccccatctgcaaaatgaggagggtcatagtgcctgtctcatagagtcatgaagaggataaagtgaatgaatacatgtgatgtgctgggagcagc

SEQ ID NO: 936625 - DNA, 120 bp, Artificial Sequence
  ENSG00000232084_14 (sequence is synthesized)
ttcggacacatggaaatgttcgctatcattttaagcactgaatcttagattgtaagcatctttcctttaaaagagcaaagttcaaagttatatgttgagtaatgaccatatgccaggtgc

SEQ ID NO: 936626 - DNA, 120 bp, Artificial Sequence
  ENSG00000232084_15 (sequence is synthesized)
tttcacacccacatcaatgctccagactccaagagctggcggtcattggatccagttcatagggtggagaagaggaggttcagagtggtgaactaacgggcccaggtcacacagcagaac

SEQ ID NO: 936627 - DNA, 120 bp, Artificial Sequence
  ENSG00000232084_16 (sequence is synthesized)
gtggtgaactaacgggcccaggtcacacagcagaacagtgaaaaggtcatggatggcttaaaataccagcccttccttcaccctccttcagcctctttctctctctctctctctctctct

SEQ ID NO: 936628 - DNA, 120 bp, Artificial Sequence
  ENSG00000232084_17 (sequence is synthesized)
atctcacaatggcaagtgtcttatatgagacacacagaggagaagatcctgtgaagagggaggcagagattggagaatcacagccacaagtcaaggaaggccgacaaccaccagaagctg

SEQ ID NO: 936629 - DNA, 120 bp, Artificial Sequence
  ENSG00000232084_18 (sequence is synthesized)
gaaggggtaagagcagcttccccgcgctgtttctagagggtgcatggccctgccagtaccttgattttggacttctggcttccacagttgtgagataatacactttccttgttttacgtc

SEQ ID NO: 936630 - DNA, 120 bp, Artificial Sequence
  ENSG00000232084_19 (sequence is synthesized)
aacattttgtgtaatttgtctcggctgccacagaaagtgaatagaaatagttttccctcagcgcaacctggtgatgcacgtgttcactttgaaaacacgtcatttccacctgcaaaggtt

SEQ ID NO: 936631 - DNA, 120 bp, Artificial Sequence
  ENSG00000232084_20 (sequence is synthesized)
ttaggttcctcaaagggactgtgcagagggatcgctgcaagtgaagtcaacatttggcctcattctgttagaacacctgcaagaggaggctcaggtgctgactgaacaaatcccctggct

SEQ ID NO: 936632 - DNA, 120 bp, Artificial Sequence
  ENSG00000232084_21 (sequence is synthesized)
cttggggtggtccatgcctttaccgaatgcctcctttgttggggtcattctgctgggaagacattcccattggaagatactggacctttcctttaccatgtcaggcatgacactcctacg

SEQ ID NO: 936633 - DNA, 120 bp, Artificial Sequence
  ENSG00000232084_22 (sequence is synthesized)
ttaaaaaactgtccataccaagggcatgacaggcaattcatagaagaaagcaggatgatcaatggcctatgaaaggatcctcagctgtggctaggcgcagtggctcacctctgtaatccc

SEQ ID NO: 936634 - DNA, 120 bp, Artificial Sequence
  ENSG00000232084_23 (sequence is synthesized)
aaggcaagaggatcacttgagcccaggcgttcgagactggcatgggaaacatggcaaaaccccatctctataaaaacttagctgggtgtggtggcatgtgcctggagtcccagctactca

SEQ ID NO: 936635 - DNA, 77 bp, Artificial Sequence
  ENSG00000232084_24 (sequence is synthesized)
ggcatgtgctaagcccagaaggttgagactgcagtgagccaccatcgtaccactgcactccagcctggatgacagag

SEQ ID NO: 936636 - DNA, 120 bp, Artificial Sequence
  ENSG00000232084_25 (sequence is synthesized)
gagatgaggcagctgtccaaggtgggtgatgtgtgctcagacctccaggaaccggcgaatgaggcctcatggaaagaacgtgaggtggcggtggaggggaacaagagtggggaaatccct

SEQ ID NO: 936637 - DNA, 120 bp, Artificial Sequence
  ENSG00000232084_26 (sequence is synthesized)
ccaggcggcctcctgcacccccaggctctggagacagccttcactggacgctggaatatcagatggggtgaagacagaaaatgctgtgctggcctggccctcccacaaacactccagttt

SEQ ID NO: 936638 - DNA, 120 bp, Artificial Sequence
  ENSG00000278431_0 (sequence is synthesized)
ggcgcaagcgtgcatgagcgccgtgcgccctaatcggtctgcgatattggggtccgcgccttgctccaggaggccctctcctcctttggcctctctgtaggggctccctcaacacggtcc

SEQ ID NO: 936639 - DNA, 120 bp, Artificial Sequence
  ENSG00000232081_0 (sequence is synthesized)
atttccttcacaactctgatcactgcctgatgcctccactgtatttgctggctgttgagactgtctcttttctatgttctcccgctggactgtaaactccctgagggcaggagaacagca

SEQ ID NO: 936640 - DNA, 120 bp, Artificial Sequence
  ENSG00000232081_1 (sequence is synthesized)
aaaatgcattcctttgctgacacttctctacctgtggttgtcttccactctgcgtcatgtgccgtatccgcctgtcaccccggcacactgtcagccacgcagcctctcgttccctgtgtt

SEQ ID NO: 936641 - DNA, 120 bp, Artificial Sequence
  ENSG00000232081_2 (sequence is synthesized)
ccctgttggcacttccctattcacactctcctctccaccaagcttcctttgacgcttcctctttcaagctgtgcagccttcttcagctgacagttcagcatcgttccatttctgaagcag

SEQ ID NO: 936642 - DNA, 120 bp, Artificial Sequence
  ENSG00000232081_3 (sequence is synthesized)
ggaattggtttggtgggcactagctccaagtttgcctttgtggtatttctagcctccttcattctctttcctgttttggctgcaaccaaaggctgggctcagtgatgaatcgcaattggg

SEQ ID NO: 936643 - DNA, 120 bp, Artificial Sequence
  ENSG00000232080_0 (sequence is synthesized)
tttttacttaaacattatcagagaggttatgaagccttcctgaatgctcattcaaggttgtacaagaagcatggcaccagcatctgcatctgatgaggacctcagggtgcttccacttgt

SEQ ID NO: 936644 - DNA, 120 bp, Artificial Sequence
  ENSG00000232080_1 (sequence is synthesized)
aggaggaaggttccaggctctttttaacaatcagacctcacaggaactaatagtgtgagaagatgtttaacatattctaataagatattcctaataaactgccatgagataactgctgta

SEQ ID NO: 936645 - DNA, 120 bp, Artificial Sequence
  ENSG00000232080_2 (sequence is synthesized)
accgggctctgaactaggggagtgtggattctcaaagaattcatgaaaatgttcacaatggagtcttcttatgcatctgttttccctagagcattcaattcaagctcatgaaatatcagg

SEQ ID NO: 936646 - DNA, 120 bp, Artificial Sequence
  ENSG00000232080_3 (sequence is synthesized)
caagtaaaaactgtcctcttctgctctccatgcctcaactcgcaggggtctgaaactatatcaggtagaagaaatagaagcacaagctgtagaaacaaaagaagctaattttgcaccttc

SEQ ID NO: 936647 - DNA, 120 bp, Artificial Sequence
  ENSG00000232080_4 (sequence is synthesized)
accgggctctgaactaggggagtgtggattctcaaagaattcatgaaaatgttcacaatggagtcttcttatgcatctgttttccctagagcattcaattcaagctcatgaaatatcaga

SEQ ID NO: 936648 - DNA, 120 bp, Artificial Sequence
  ENSG00000232080_5 (sequence is synthesized)
ggaggcctcacaatcatggtgggaggcaaaggagaagcaaaagtatatcttacatgacagcaggcaagagagagcttgttcaggggaactcccatttacaaaaccatcagatcttgtgag

SEQ ID NO: 936649 - DNA, 120 bp, Artificial Sequence
  ENSG00000232080_6 (sequence is synthesized)
actattacaagaacagcatgggaaagtcccactcccctgattcaattacttctgactggaaccctcccaagtcacgtgggaattatgggaactgcagttcaagatgagatttgggtgcgg

SEQ ID NO: 936650 - DNA, 120 bp, Artificial Sequence
  ENSG00000278434_0 (sequence is synthesized)
acgatccggtggtagatctgggatatggtccaagtccagactcttccctgtcacccttgactgttagatgagatagtggatctgagggcctttgaaccatggagttagtaggacttgctg

SEQ ID NO: 936651 - DNA, 120 bp, Artificial Sequence
  ENSG00000278434_1 (sequence is synthesized)
actggtcatggtttaaggagacgagaaaggtctggagcgcctctcagccatccagtttggcaatgggagtgaagtgaacagaagggtcctctggctggagagcagagttcctgcctagag

SEQ ID NO: 936652 - DNA, 120 bp, Artificial Sequence
  ENSG00000278434_2 (sequence is synthesized)
cagcagccaagctgcagcccatccacccactaacccatgtttcacaggctgcccggtgccctggagaaactggccccaaggtctgaccctgccctgcaggagctatgggtctgactggga

SEQ ID NO: 936653 - DNA, 120 bp, Artificial Sequence
  ENSG00000278434_3 (sequence is synthesized)
gatggccttgatcacaactttctaattctgcatgttatgagtgactccattgccctagacccagaattccctggccacctccctgcagggctgtgaagcccatgacaggcctcacctttt

SEQ ID NO: 936654 - DNA, 120 bp, Artificial Sequence
  ENSG00000278434_4 (sequence is synthesized)
ctctgctggagcacctgctgtcacagaggcgacagctcctgctgggcttgcctgtgtattttttataagttcttctcaagtgtcacttgtcttgccaggtagatctgcagctccctgagg

SEQ ID NO: 936655 - DNA, 120 bp, Artificial Sequence
  ENSG00000278434_5 (sequence is synthesized)
gcagggaccatgaggtgagtgacctccatggagggtctgatgagtcttttcaaacaggtagtcacttaaacaaaaaagagaggaacttggatggtgatggctctgctgagtgaaacggcc

SEQ ID NO: 936656 - DNA, 120 bp, Artificial Sequence
  ENSG00000278434_6 (sequence is synthesized)
aagagtcctgccctgttcaggggagaaggcctcaagtgagcacttctcagatctcagattccccaggcattttgtgtcacctgacctcaggccttagtttctgtccccagcatggtcaag

SEQ ID NO: 936657 - DNA, 120 bp, Artificial Sequence
  ENSG00000278434_7 (sequence is synthesized)
ctcaggttctgtggtgtgtgtttagctgctttgcagggacagtggccacaccatgacgcatttctctgtggccccagtaaaattggccaaaaaggaactatacctgctggaggtggtagc

SEQ ID NO: 936658 - DNA, 120 bp, Artificial Sequence
  ENSG00000278434_8 (sequence is synthesized)
cgagtgctctcaggctccccagctctaggagccacctacttgatgtcagaactttggagaactggattagcatggcaggtgagtgcggaaaatggagagtcgtggggcgaaatgatttcc

SEQ ID NO: 936659 - DNA, 120 bp, Artificial Sequence
  ENSG00000278434_9 (sequence is synthesized)
caagctctctgcaagcctctcggcttatcagggtaaaagtgggcatcctgctgtggccagaggacccggctcacccatcctccaacacggagtgttccctgctcagtggagctatccctg

SEQ ID NO: 936660 - DNA, 120 bp, Artificial Sequence
  ENSG00000278434_10 (sequence is synthesized)
gtgacaactgcagccctgtggcaaccacttccttgttcttccttcttccatgccacgctttgttctgtgccaggcccgatgttttatttctgtattttatgccctctactcagcccccca

SEQ ID NO: 936661 - DNA, 120 bp, Artificial Sequence
  ENSG00000278434_11 (sequence is synthesized)
ctgaagctgcctgccattaagacagacgttgatctgccatcttcagtgcctaggaaatgcctcacgcatagtgtgtggtccatacttattggttgaataaaatgatacaccatgcctgca

SEQ ID NO: 936662 - DNA, 120 bp, Artificial Sequence
  ENSG00000232082_0 (sequence is synthesized)
caggcaagccatcaacccattcttcagaaagcaggggctaaaatgcaagatgtttaaagccctgcggccacactgtgtcattctgacatcctgggacaaatgagatgattttaaatgtgc

SEQ ID NO: 936663 - DNA, 120 bp, Artificial Sequence
  ENSG00000232082_1 (sequence is synthesized)
ctggcgaatttgatcatgagactgcattttctctcgtcggtttcggcatgaattgtcccagagtctcagaaaggggggatccagggcagaattgccagtgtctgtctcgttaagctcaga

SEQ ID NO: 936664 - DNA, 120 bp, Artificial Sequence
  ENSG00000232082_2 (sequence is synthesized)
gcggcccgcacagaacctcactgcctggcccagaccagagtgagaacgcagcagcctccagcagagctgcacggccatgagggtccctgagtccagaactgagctctagatggtcacaca

SEQ ID NO: 936665 - DNA, 120 bp, Artificial Sequence
  ENSG00000232082_3 (sequence is synthesized)
caagtgcccaggacaggactccaggctggatgttttctgcgaacaccgtggggaccctccctaggcaggattaaggaaaccccatgctcagtggggggcaagaccccagcctggccctgc

SEQ ID NO: 936666 - DNA, 120 bp, Artificial Sequence
  ENSG00000268375_0 (sequence is synthesized)
gccggatctggatctggctgggaaatcatgatgtggataacagtgtttttttgttgttgttttttgttttgaaacggagccttgctccatcacctaggctggagtgcagtagcgcaatct

SEQ ID NO: 936667 - DNA, 120 bp, Artificial Sequence
  ENSG00000268375_1 (sequence is synthesized)
gtagcgcaatcttggctgtctgcaacccttgcctctcgggttcaggagaattcctatagccagggagatggaggctgcagtgagctatgataatgccattgcactccagcctgggtgaca

SEQ ID NO: 936668 - DNA, 120 bp, Artificial Sequence
  ENSG00000235366_0 (sequence is synthesized)
ggtgtgcaggccccctgcactgatcctgagtggccacctagaccagggtgtccagaggctcgactatagggttccttcttctccaccatggcacttcaggctcccttggcacttctcttt

SEQ ID NO: 936669 - DNA, 86 bp, Artificial Sequence
  ENSG00000235366_1 (sequence is synthesized)
ctccaccatggcacttcaggctcccttggcacttctcttttgggaaaataaattgcttctggattagacatctttctgttgctgtt

SEQ ID NO: 936670 - DNA, 120 bp, Artificial Sequence
  ENSG00000235366_2 (sequence is synthesized)
ggagtgcaatggcacaatcatgattcactgcagcctcgacttactggactcaagtgatcttcccgccgcagcccccgaggtagctgggactacagggtcttactctgtcacccaggctgg

SEQ ID NO: 936671 - DNA, 120 bp, Artificial Sequence
  ENSG00000235366_3 (sequence is synthesized)
ctcagcctcctaagtagctgggaccacagaaacccaaactgcagaacatgttcagtgaagcaaccagagctaaatcatttgaaatgcattagccagtactcgccgcaaattaatttaaca

SEQ ID NO: 936672 - DNA, 120 bp, Artificial Sequence
  ENSG00000235366_4 (sequence is synthesized)
tactcgccgcaaattaatttaacaccagtcacatgtgtctgggtgattttcccctgaaaggtggcgtgagttgattggaccccaggaggaacgctgcgctgaatggctcaagatttacta

SEQ ID NO: 936673 - DNA, 120 bp, Artificial Sequence
  ENSG00000235366_5 (sequence is synthesized)
ctaaccacacactgcacagagaaggctgcgtgttaccaaggcctccatggaattagggggaactgccaacaaaccagtgcagagcctgcaaatgtcagatagaaggaggatgagacatga

SEQ ID NO: 936674 - DNA, 120 bp, Artificial Sequence
  ENSG00000235366_6 (sequence is synthesized)
tttggatatttttccaagaaggaaagactcagttcatttagaagagtttccttaaggataaaggaagtatccagaacctactctaagaaagggaaatggcttcatgctttcctctcccat

SEQ ID NO: 936675 - DNA, 120 bp, Artificial Sequence
  ENSG00000235366_7 (sequence is synthesized)
cgttttctcaggcctgagaggagggacacttcaccaccgcccccctccccacccccgccccaatctcagtgggtttagcaagacaagaagcagactccagctttggagagatgggtagga

SEQ ID NO: 936676 - DNA, 120 bp, Artificial Sequence
  ENSG00000235366_8 (sequence is synthesized)
gacgcatttggcctggttcagctactactttagatgtagatcttgaacaagtttcaaaaatgaatgaaagtagctttttatgaatctgggcccgatctcccgattgcccctccagagcag

SEQ ID NO: 936677 - DNA, 120 bp, Artificial Sequence
  ENSG00000235366_9 (sequence is synthesized)
ctccctgcccttccctgcccctgaaggctgacctgtgagcccctttgggctgctgatggacctgtgctcccaccctggctcaaaaagcaaagaaaagggagtggctatcagaaaatggaa

SEQ ID NO: 936678 - DNA, 120 bp, Artificial Sequence
  ENSG00000235366_10 (sequence is synthesized)
gaagagagtaaagaagacagtgctggcttgagagaagcagtggcttcaggtaaaaggctactgccagcgatatggacgggagacagagaaatgctagaagagggcggttccccaacaaag

SEQ ID NO: 936679 - DNA, 120 bp, Artificial Sequence
  ENSG00000235366_11 (sequence is synthesized)
gccccacccacaagcctggacacctgtggccctaaatgagaacaggcattcctgtttttgcacccaaaaagtggtcttttggtatgccacaccccctatcctatacccatataaaccctg

SEQ ID NO: 936680 - DNA, 120 bp, Artificial Sequence
  ENSG00000235366_12 (sequence is synthesized)
aaccccaggctccagctcagaccagcagaggaggagacgagacaagcagacaatgcagaacagtgcagcagagagaactcgagaggaattcagccagggtggtcagagaggagtttggct

SEQ ID NO: 936681 - DNA, 120 bp, Artificial Sequence
  ENSG00000235366_13 (sequence is synthesized)
gctggacagcccactccaagggaagatcatcttcctactccatctcccctccttccagctccctatccatcctgccgagagccacctccaccgtgcattaaaacctcgcattcatccttc

SEQ ID NO: 936682 - DNA, 120 bp, Artificial Sequence
  ENSG00000235361_0 (sequence is synthesized)
tggctaactagcagatggcgatgcttggaaatgaaccaagtctgaatccagggttcccgtgtgtaatctctgcattgagcggcaattagtgaatgaatgaataaacagaatgaagttaaa

SEQ ID NO: 936683 - DNA, 120 bp, Artificial Sequence
  ENSG00000206552_0 (sequence is synthesized)
atccgggtcaaagacaagggggctggagcgaccgaggggcatgttctgttgatagaagattctggagtgtggacagttaaaactttttgtgggcttcgaagttaacatgcgaatgtgtgt

SEQ ID NO: 936684 - DNA, 120 bp, Artificial Sequence
  ENSG00000206552_1 (sequence is synthesized)
cagtatccgactctgagtgggccacaggctgccctgggtacagggaaacgaggggggtgggagcctgcggccagcgttccaggcctctgccagcgccgcatctcgacgctacagagccaa

SEQ ID NO: 936685 - DNA, 120 bp, Artificial Sequence
  ENSG00000206552_2 (sequence is synthesized)
gctcggggatcggcatgaggaccccagtaccagcagtagccacacccgcctccctcggggctgtttcccgtcctcctcagacccgctcaccgtgggctcctggcggcctctgcagctttt

SEQ ID NO: 936686 - DNA, 120 bp, Artificial Sequence
  ENSG00000206552_3 (sequence is synthesized)
cagcaagcagagatggtgggcgccactcgccgatcctcacaaaccaaaacctcgcgcgacaaaaacgaaggcggccccggaagtgcgtcatcacactgactggtgaacccatacactctc

SEQ ID NO: 936687 - DNA, 120 bp, Artificial Sequence
  ENSG00000206552_4 (sequence is synthesized)
tggatttctctctaggactcgtggaggaccccacatcttggtgcttccctcctaattcccgtgaggaaaagggcacgctggcgagataggctcttggcgttcctccagagcccagttctg

SEQ ID NO: 936688 - DNA, 120 bp, Artificial Sequence
  ENSG00000206552_5 (sequence is synthesized)
agttgaggcaccttgctcatgacgctgcatcatcgtaccaaccttgaatactggcttccagtgcctttattactgtgctacaataactgcaactacaagtcttacccagaatatgcaaga

SEQ ID NO: 936689 - DNA, 120 bp, Artificial Sequence
  ENSG00000206552_6 (sequence is synthesized)
aaatgtgaatggttatacgttttattgatcttgttaaatttagcatttggattgttatagcataatgaacgaatcacacattatacaaccaggacttctcttgaattgctgtaatgattg

SEQ ID NO: 936690 - DNA, 120 bp, Artificial Sequence
  ENSG00000206552_7 (sequence is synthesized)
cactcctagaatgtgatgtctttcaatgttgctgacgcctctcacttccatacattaccactagcagagaggattagcaatggaccatgggcaaagtgagagcagtcagtttacccaaga

SEQ ID NO: 936691 - DNA, 120 bp, Artificial Sequence
  ENSG00000206552_8 (sequence is synthesized)
gaaaaatcaagaaattcaccttctcacgatgtagaaaactgaaaagtgcatggcctcacccttacaacaacaaaaaacagccagataatctaaaattttctcttgaacacatcagaaagc

SEQ ID NO: 936692 - DNA, 120 bp, Artificial Sequence
  ENSG00000206552_9 (sequence is synthesized)
taagatctgggggcaaacgacttaatctaaaatctgatgtaagacaggcactttcaagaagagatggttgtaagcacttgtttacataggacagatgccattggatgccatgtaagctgt

SEQ ID NO: 936693 - DNA, 120 bp, Artificial Sequence
  ENSG00000206552_10 (sequence is synthesized)
taaggagaaatcagctaaaatgtttaatgagttgctgaggtccaagtgttggctagcctgagaatatagagactacagaactcctgtgaaccacagacacaagcagaatttccacccact

SEQ ID NO: 936694 - DNA, 120 bp, Artificial Sequence
  ENSG00000206552_11 (sequence is synthesized)
tgtatattcttctctatggacatcatcaaatgtgtgcacacacacatacacacatacaattgaaggtaaggcaagaagaatcttatgaaaaccttcccgctagaaaagacatgaatcccc

SEQ ID NO: 936695 - DNA, 120 bp, Artificial Sequence
  ENSG00000206552_12 (sequence is synthesized)
atccaggtccttctctcctatttcccctacagaacaaaagccctaagcctctgaggatgaaaaagcaaatcttgtcacccttagggactggttaagatccagtggaactgaagggaataa

SEQ ID NO: 936696 - DNA, 120 bp, Artificial Sequence
  ENSG00000206552_13 (sequence is synthesized)
agagaacaaaaagctctccattcacgaaatagcggtagaattgcatcctggttccagaccatggaggtgtcctacagctgaggatagggcaacatcacttaatagaccccacccttaagt

SEQ ID NO: 936697 - DNA, 120 bp, Artificial Sequence
  ENSG00000206552_14 (sequence is synthesized)
ctcagagacacagtgcctacctaagattaaagctgaatcacaacagaaaatgccatcccttctaccaccaccaaaatatcaaatgctgagtcaataagaacagcaatctactgctaaaag

SEQ ID NO: 936698 - DNA, 120 bp, Artificial Sequence
  ENSG00000206552_15 (sequence is synthesized)
aaggataaaaacatggagaaagacccctctctgaggtacaggaatgaagggaaggcctaaaggtaagagtggtgcaaacattgagaaaatctcctttagcaaaccatcccacacactaaa

SEQ ID NO: 936699 - DNA, 120 bp, Artificial Sequence
  ENSG00000206552_16 (sequence is synthesized)
cttaaggtaatactagaagaatttgaagcctgtggataaccatagcaacaaaaacacctaaacacagtttaactcctgattagatcaactcaagccttcacaataaagatctaccgaaag

SEQ ID NO: 936700 - DNA, 120 bp, Artificial Sequence
  ENSG00000270207_0 (sequence is synthesized)
gtaaaccagtattctgcaaattgtatggaagcagtaatattcatttctgctcatggggaacattttcaagattcaagacagagtctcactctgtcaccaaagctgcagtgcagtggcatg

SEQ ID NO: 936701 - DNA, 120 bp, Artificial Sequence
  ENSG00000270207_1 (sequence is synthesized)
ctgcctcacgggttcaagcaattctccagcctcggcctcctgagtagctgcgattacagttggtcagcccaggatggccaaagtaatgttttcgctaaccacatcctgttggttgtagtt

SEQ ID NO: 936702 - DNA, 120 bp, Artificial Sequence
  ENSG00000270207_2 (sequence is synthesized)
acatcctgttggttgtagtttttcactccagtgcatagtgtgatgactacgggaaaaccaaaactaaaaacaaacatctttcacctctaagaacatgtggccttgggtactatcgggagg

SEQ ID NO: 936703 - DNA, 120 bp, Artificial Sequence
  ENSG00000270207_3 (sequence is synthesized)
ccgtggaagcctaaaatttggatataatgccctggatcatgaaaataagaaacaaaatcccaagatgcttcctttggatatacctcatacctaatccattttgccacctttgcaatagct

SEQ ID NO: 936704 - DNA, 120 bp, Artificial Sequence
  ENSG00000270207_4 (sequence is synthesized)
gatgtttttcctggtgtacttctttttgttaggtgaattatccatggaaaactaaaaattccctccaaaattgttaaattctaagtagtgatttcagggccatagctacgtattttaata

SEQ ID NO: 936705 - DNA, 120 bp, Artificial Sequence
  ENSG00000270207_5 (sequence is synthesized)
gaaatgaaaacataaatgaaaaataccttatgacaccacagcaattaaaaaatcctatctatctggttgtttcatcgaaagagtaattaattactttgtttaactagtctggaaccaatg

SEQ ID NO: 936706 - DNA, 120 bp, Artificial Sequence
  ENSG00000270207_6 (sequence is synthesized)
acagcagggctgctggcaatgcctggtaatgagctgtcacatcaattagtgttggggggtccaattactttaaaaagcatctctattatggctaattctttactcagcagacaattcatg

SEQ ID NO: 936707 - DNA, 120 bp, Artificial Sequence
  ENSG00000270207_7 (sequence is synthesized)
agtggctttgcacatttttaaagaattgattccaagagataactggaccgctaaggattaaagtcctatgctgctgtagacttaaagtttaagtgccttttagtccaaggcagttaacca

SEQ ID NO: 936708 - DNA, 120 bp, Artificial Sequence
  ENSG00000270207_8 (sequence is synthesized)
agaattcttccaagcgccctaccttcaataagacagatgctcaaaagtacttgttgaatgaccacccctctttccaaaatggaaaataagaaagttaaaatgtaaacatccagcatagga

SEQ ID NO: 936709 - DNA, 120 bp, Artificial Sequence
  ENSG00000270207_9 (sequence is synthesized)
aggcactcaagtctgtttaagtaaaaccacgtcaaccaagaaccagcagcaaaaccttgggaatctatttgtcagaagtacccagctatgaatgggatggctatatccagaacttaattc

SEQ ID NO: 936710 - DNA, 120 bp, Artificial Sequence
  ENSG00000270207_10 (sequence is synthesized)
tgtctggtgtcacttaattctgtctggtgtcacttgttttatttttccttctttaaaggagtggttgtcaaagtaggtttctaatgttggctggttttactttaaatttaccactcactc

SEQ ID NO: 936711 - DNA, 120 bp, Artificial Sequence
  ENSG00000270207_11 (sequence is synthesized)
caagtgggcttctgatgtcactccatgatcatactatatttctagccctgcatgcttttattctctaggtgatgatttcatccatcatccactgtcccctctcctcaaaagctcaacatc

SEQ ID NO: 936712 - DNA, 120 bp, Artificial Sequence
  ENSG00000270207_12 (sequence is synthesized)
tccttccctggccttcatttactccatttatatctcatagaacagaagtttctccaccagcttctaaccccacattcacccacctacccatacctgtgcctgctctgttttttcctcctg

SEQ ID NO: 936713 - DNA, 120 bp, Artificial Sequence
  ENSG00000270207_13 (sequence is synthesized)
ctaatgtggaggaaaggctcatcttctgttccacgagctctgcaagtttcacttgtggtctagagctcctctactctgccctgttcaagaatatcgttccagcaatctccaagcccaccc

SEQ ID NO: 936714 - DNA, 120 bp, Artificial Sequence
  ENSG00000270207_14 (sequence is synthesized)
tgcagcaacatttgtccctctctactggatatccctatctatatactaatgtgctgttatttctcccagcattgaatttcatttatggaccccactttcctcatgatctaaaatgtgact

SEQ ID NO: 936715 - DNA, 120 bp, Artificial Sequence
  ENSG00000270207_15 (sequence is synthesized)
tccctgcttctctgtagtgttggatgtctacatcatttctaagaacagtgaattactgacttaagtgcttttgttcctcatttagaggctctatctttggtccctgtaaatgttctttct

SEQ ID NO: 936716 - DNA, 120 bp, Artificial Sequence
  ENSG00000270207_16 (sequence is synthesized)
tgccactttgaggagttgtatgagggatgcatgcagcagtagaaagttaagtgtataaaatgctacagtaactaaaacagcatgatactggtacaaaaacaggcacatagaccaatgaaa

SEQ ID NO: 936717 - DNA, 120 bp, Artificial Sequence
  ENSG00000270207_17 (sequence is synthesized)
agcccagaaataaggctgcacatgtatgaccatctaatctttgacaaagctgacaaaaacaaggaatgggaaaaagacttcctatttaataaatggtgctggaataactggctagccacg

SEQ ID NO: 936718 - DNA, 120 bp, Artificial Sequence
  ENSG00000270207_18 (sequence is synthesized)
tagccacgtgcagaaaattgaagctggacccctttcttacatcatacagaaaaatcaactcaagatagattaatgacttaaatgtaaaactccaaactataaaaaccctggaagacaacc

SEQ ID NO: 936719 - DNA, 120 bp, Artificial Sequence
  ENSG00000270207_19 (sequence is synthesized)
actatcccggacataggaactggcaaagatttaatgacaaagactccgaaagcaatcacgacaaaagcaaaaactgacaattgggacctaattaaactgaaaagcttctacacagcaaaa

SEQ ID NO: 936720 - DNA, 120 bp, Artificial Sequence
  ENSG00000270207_20 (sequence is synthesized)
aaaagaaactatcaacagagtaaagagaaaacctacaaaatggaagaaaatatttgcaaaccatgaatgtgacaaaagtctaatatccagctcctacaaggaacttaaatttacaagaaa

SEQ ID NO: 936721 - DNA, 85 bp, Artificial Sequence
  ENSG00000270207_21 (sequence is synthesized)
ttattacaggaataaaggaatgcttatatactgttggtgggagtgtaaattagctcaaccttagtggaaagcgattcctcaaaaa

SEQ ID NO: 936722 - DNA, 120 bp, Artificial Sequence
  ENSG00000270207_22 (sequence is synthesized)
taaattagctcaaccttagtggaaagcgattcctcaaaaagctaaaagtggaattactacttgacccagcaatctcattactgggtttatacatggaggaatataaatcattttaccata

SEQ ID NO: 936723 - DNA, 71 bp, Artificial Sequence
  ENSG00000270207_23 (sequence is synthesized)
ctgggtttatacatggaggaatataaatcattttaccataaagacacatgtacgtggaatgcccatcagtg

SEQ ID NO: 936724 - DNA, 120 bp, Artificial Sequence
  ENSG00000270207_24 (sequence is synthesized)
aatactgtacagccataaaaaagcatgagtcatgtcttttgcaggaacatagatggagctggaggctgttatccttagcaaactgatgctgaaacagaaaacagaatatggtgtgttctc

SEQ ID NO: 936725 - DNA, 120 bp, Artificial Sequence
  ENSG00000270207_25 (sequence is synthesized)
acttataagtggaagctaaataataagaacttatgaacacaaaaaagggaacaaaagacactggggcctacttgggggagggtgagaggaaggagaggagcaggaaaggtaactattggt

SEQ ID NO: 936726 - DNA, 120 bp, Artificial Sequence
  ENSG00000270207_26 (sequence is synthesized)
tactgggcttaatacttgggtgatgaaataacacacacagcaaagccctgtaacacttgtttatgtatgtacaaaagtttcacatatacccccaaacctaaaaaaaaaaaaaaaaaaaaa

SEQ ID NO: 936727 - DNA, 120 bp, Artificial Sequence
  ENSG00000270207_27 (sequence is synthesized)
ggaaagtgtgcttacgagctctgtgagtctgctgaaatgatggtagacgacaagctgtcctcaatcattcgccccccgctccccagccaattttctctgtgcaacagtggctatttactt

SEQ ID NO: 936728 - DNA, 120 bp, Artificial Sequence
  ENSG00000270207_28 (sequence is synthesized)
tggttacaagataaaatttatgtaagtggttgagcctagacttaggggcactagtttcagaaaaaaatgaaactatatatatttccatgttttttccaaggccaagagtagttttgtcct

SEQ ID NO: 936729 - DNA, 120 bp, Artificial Sequence
  ENSG00000270207_29 (sequence is synthesized)
aagacaacagtaatcagtattttttgcttttgttttgttttggttttctttatactctttaactactttttacttttcacataccttactctcttgtactatgaaaacttattgaagact

SEQ ID NO: 936730 - DNA, 120 bp, Artificial Sequence
  ENSG00000270207_30 (sequence is synthesized)
ccaaagaggttttacttctaggttgtaaatgtcagtactcactgttggaaactgaaacagaaccactacaatgcttattgaaactgaaacagaaccactacaatgcttatttaatgatgc

SEQ ID NO: 936731 - DNA, 120 bp, Artificial Sequence
  ENSG00000270207_31 (sequence is synthesized)
caaggaagatagcaaagataaaagcattgcatattaataacatctcggtaataggatgaagttatttctggcctcagaaacagccctgagacctgtccgaaaatcaagtgtcattttgtt

SEQ ID NO: 936732 - DNA, 120 bp, Artificial Sequence
  ENSG00000270207_32 (sequence is synthesized)
ccacatatgaaagagcagaaccacagacacaacttggaaagtaaaactcatctgccttggtttttataatgcctgaatctggaaatctataaaacctgttaagatactagcaaagctttc

SEQ ID NO: 936733 - DNA, 120 bp, Artificial Sequence
  ENSG00000270207_33 (sequence is synthesized)
tcaattttgatgagcttattttctttgtttactgactaatatcttcatctgcaatataaagtgttaccatttttgttgtgtgtaatctgtctagataataaagattttcttttcaccaga

SEQ ID NO: 936734 - DNA, 87 bp, Artificial Sequence
  ENSG00000270207_34 (sequence is synthesized)
tggcaaccccagccagcagcagcaacccgcttgggtcctgttttaggttgtggaaggtttgttctttgctcatccatgccatcttta

SEQ ID NO: 936735 - DNA, 88 bp, Artificial Sequence
  ENSG00000270207_35 (sequence is synthesized)
tcaacagactccagacacaatggcacaatgtgactctaggagatagagttctctgcctgccatttataggagaggtaccacctccagg

SEQ ID NO: 936736 - DNA, 120 bp, Artificial Sequence
  ENSG00000270207_36 (sequence is synthesized)
ttctctgcctgccatttataggagaggtaccacctccagggtctattagaattgggctgagatgtaccctaggcatcgcaatttttaaaagctgctcagaaacttcaaatgggaagctaa

SEQ ID NO: 936737 - DNA, 120 bp, Artificial Sequence
  ENSG00000281809_0 (sequence is synthesized)
tgggcacagaggttgccaaaagggccagtaggaggagaaggcttcatggaggacgggggcaagagcgggccgaccatgctggcttcctcgccttgtgtctggctgactgcacaggcctga

SEQ ID NO: 936738 - DNA, 120 bp, Artificial Sequence
  ENSG00000281809_1 (sequence is synthesized)
ccacccatcttaataacgtcgaacagatacagtgcagaaactattgcacaaccaccagcatttcattacatcagaatccttgccaatttgaaagaggtccttgaatccagggagagttac

SEQ ID NO: 936739 - DNA, 120 bp, Artificial Sequence
  ENSG00000281809_2 (sequence is synthesized)
atctttacgtttttgatcacgatcctcttggaagatacttattagggccatttgttgatgacaatattaagaattagcaaatatcttcttaaatataacaaaaattgaattgtttcatta

SEQ ID NO: 936740 - DNA, 120 bp, Artificial Sequence
  ENSG00000277969_0 (sequence is synthesized)
tttggtcgtctctgccccagtcccttcgccgcgggacgcgcgagacgggagaaggtgcgggaagcgggaagcaggagcgggagcgcgcggccctggcacgcatagggcggcggagagggc

SEQ ID NO: 936741 - DNA, 120 bp, Artificial Sequence
  ENSG00000277969_1 (sequence is synthesized)
acgagcagggattgagcacctactgtgtgccttcacgctttacaaaaggattttcgttcgatgttcactacagcccctgcccgggggtactgatgccccatttacagagggacaagccgg

SEQ ID NO: 936742 - DNA, 120 bp, Artificial Sequence
  ENSG00000277969_2 (sequence is synthesized)
atttcggagaggtgaagtcactcgccgaaagtcgcaccgccagggtctgcgtgacaccctaaagcagtgttcagttaccccggggagagcgcgatgaacttgaaccacttgttggctggt

SEQ ID NO: 936743 - DNA, 120 bp, Artificial Sequence
  ENSG00000277969_3 (sequence is synthesized)
tcctgctcttgctcgttttttgcggatcgacacatagtgggcgctcaggaaaataaatgttggaagcttgagattgaacttgacagctcgaccctaggtacccgccacgaatccagccca

SEQ ID NO: 936744 - DNA, 120 bp, Artificial Sequence
  ENSG00000277969_4 (sequence is synthesized)
gcccgcggggcaccgggtttctccagacctcgcagggaacatttgcggatgggctggtagaggaggctcggacatcccagttccgcacccgcactcgaccaacgcgtggtagcggaaccc

SEQ ID NO: 936745 - DNA, 120 bp, Artificial Sequence
  ENSG00000277969_5 (sequence is synthesized)
ctgtcgtagcgaggcacagactgggttcaagtcccgactctgccgatttcagcctgagtgactttgagcgagtcactttttcccgtcgaaacctcagttgctccatccacaaaatgggaa

SEQ ID NO: 936746 - DNA, 120 bp, Artificial Sequence
  ENSG00000277969_6 (sequence is synthesized)
atatgaacagccaccctaaaacggtgtggggaggattaaacgaaacaacgttcccaaaactctaaacttacaaatgttgtctcccgtccatcccataaacttaggcgacaaacctggcgc

SEQ ID NO: 936747 - DNA, 120 bp, Artificial Sequence
  ENSG00000277969_7 (sequence is synthesized)
agggtgacctgagacaaaggcttcccggcccctgtctccaagtcgtccatccctggggcgtaggcacgttttagtgagccctgtccggcgaaacccgaaactgcggccaccttggcagcg

SEQ ID NO: 936748 - DNA, 120 bp, Artificial Sequence
  ENSG00000277969_8 (sequence is synthesized)
gtgggccccaaaaggaaatattcaaatattctgaaactcgtgcatgatttaggactgacatttttacgtttaattttcttgcagttttattcttgctagtaaaggtaattcgttagaaac

SEQ ID NO: 936749 - DNA, 120 bp, Artificial Sequence
  ENSG00000277969_9 (sequence is synthesized)
tcctctgtgtcttgtttaacttttcgtgttagcgaaattcacaaatttgaccaaggaaccggagcgcggccgtcctcgccgggattccggtcatcgcaataatctggctctcggccccta

SEQ ID NO: 936750 - DNA, 120 bp, Artificial Sequence
  ENSG00000277969_10 (sequence is synthesized)
ctcccaggcacggaggtcgaagagacgggcttcccctacaccgccctgtgtagatgtagcctcttcgtcccggcagccctccgagattccctgtgtccaccggagcgaggagaggtgtgg

SEQ ID NO: 936751 - DNA, 120 bp, Artificial Sequence
  ENSG00000277969_11 (sequence is synthesized)
ggctgcagcccagaactcagcttcctggacctccccaaactcccgcctctccgggattaagggagtaaatccctgacgccaaagaccaggtcaaggacaagttctcccccgccctactcc

SEQ ID NO: 936752 - DNA, 120 bp, Artificial Sequence
  ENSG00000277969_12 (sequence is synthesized)
cccctcctgggcggggattcatctcccttccggatgaaaggtactaaagagccgacggggggccgcggcgggccccaggcccttgatgttccggttgaacaggtgctggtgaaaaggagg

SEQ ID NO: 936753 - DNA, 120 bp, Artificial Sequence
  ENSG00000277969_13 (sequence is synthesized)
cggacccggcggaagagtctgccagggggcagtgcgccgaaggggaggcggcctcctccacccccagtcccccggcccgtcttcccttctcctctctgtttgcccctcccccgcaggaag

SEQ ID NO: 936754 - DNA, 120 bp, Artificial Sequence
  ENSG00000277969_14 (sequence is synthesized)
cgttcccggccgcgaggtctttgaagtgtcgttgaagcccccagggctgccttctcccctacgccacccgaactcccgctgtggggggcgggtgacctttagtccccacgagtcgtcccc

SEQ ID NO: 936755 - DNA, 120 bp, Artificial Sequence
  ENSG00000277969_15 (sequence is synthesized)
ctttaggaagtttttgggggtcagatctcacccccccttgcccacacaggttgggaagaagactttgggccgacgcccctcacttctcccccagacccaattgcagggactttagtcctc

SEQ ID NO: 936756 - DNA, 120 bp, Artificial Sequence
  ENSG00000277969_16 (sequence is synthesized)
tggagtgctgcgtgtgagttaccttgtgtgtctgtgtgcgtgcctagaggtcaagtgtaactggtgttcgtgagcacctcgtggttgcgggtctctaactctcgtgggtctctaagcgca

SEQ ID NO: 936757 - DNA, 120 bp, Artificial Sequence
  ENSG00000277969_17 (sequence is synthesized)
cccgcggggctggagcggaggttcgtgtctctgggagggtcagtggtgtgactgaagctgggagttagctcgtgtctgtgggtgcctcggtgtgtgtctctggggctctgagtccctgtg

SEQ ID NO: 936758 - DNA, 120 bp, Artificial Sequence
  ENSG00000277969_18 (sequence is synthesized)
cgtgcgtgtgtgtctgtgaacccgacaggaagctccccgagggcaggaatatgttttgctctctactcgatcccagcgactggcaacgagcgtttaataaatatctgttgaatgaataaa

SEQ ID NO: 936759 - DNA, 120 bp, Artificial Sequence
  ENSG00000251169_0 (sequence is synthesized)
tggggtcattgggctgccttagattcccccccccacctctcagcctgctgcctctggacaaagctctgcagaggagccccatctccttcagccccctcctgcctttggggtgcaagtttc

SEQ ID NO: 936760 - DNA, 120 bp, Artificial Sequence
  ENSG00000251169_1 (sequence is synthesized)
ctgaaggacttgagtgagatgtcaccaagcaacaggctgtcaggctcttggcagcaagtactggcccagcgactcgcggcagagtctctccttggggcgtctgtccttatcaggggtgga

SEQ ID NO: 936761 - DNA, 87 bp, Artificial Sequence
  ENSG00000251169_2 (sequence is synthesized)
agagtctctccttggggcgtctgtccttatcaggggtggatgctgtcagacttgctaatggtggaatttctggcatgtggcagggcc

SEQ ID NO: 936762 - DNA, 120 bp, Artificial Sequence
  ENSG00000251169_3 (sequence is synthesized)
tttgggaggctgaggcacgaggattgcttgagcccaggagttcatcaccagcctgggcaatatagccagacccggtctccacaaaaaaatttttaaaaattagctgggcatggtggcctg

SEQ ID NO: 936763 - DNA, 120 bp, Artificial Sequence
  ENSG00000251169_4 (sequence is synthesized)
tgcagtaagccatggtcatgccagcggagttgagcctggaccacagagcaagacactatagggaagacagccaggtgaaaatgaaggcagagaccagagttatgcatccgaaaggcaagg

SEQ ID NO: 936764 - DNA, 120 bp, Artificial Sequence
  ENSG00000251169_5 (sequence is synthesized)
aatgccgggggctgccagaagctggaagaggcaaggcaggatcccccactaaaggccttggagggagcatggctttagcagcacctcaatttgggatgtctattttccggaacagcggga

SEQ ID NO: 936765 - DNA, 120 bp, Artificial Sequence
  ENSG00000251169_6 (sequence is synthesized)
ataagtgtctgctgctgtaagccaccctgcctgtggcactttgttacagcagcccaggaacctgacccagccaggctgctcctgctgcccagtgtgcccttctctcatccctccagctgg

SEQ ID NO: 936766 - DNA, 120 bp, Artificial Sequence
  ENSG00000251169_7 (sequence is synthesized)
tctctcactgccttcgagccccatcacctgctcgggctccccctctgtgtgtccccagttctggacacttattcagcagacctgtaagttttgctggccagcctatctccctggctagac

SEQ ID NO: 936767 - DNA, 120 bp, Artificial Sequence
  ENSG00000251169_8 (sequence is synthesized)
tgaaggctccttcagggcaggcctaacctgtgctagggcagcatgatgcctggtacagaataggggctccttagatgtggggtaaataaaggaatgctcgaagggtgatgggcccctgtg

SEQ ID NO: 936768 - DNA, 120 bp, Artificial Sequence
  ENSG00000234015_0 (sequence is synthesized)
gtgatcgattcccagtgccatcctgaaccacaagattggaatatcgcacctttcaactgcctgggctgataaacaatacagcatgtactcagcttcataaacactctgccttgttacaaa

SEQ ID NO: 936769 - DNA, 120 bp, Artificial Sequence
  ENSG00000234015_1 (sequence is synthesized)
gggcattgcaaactcgccgtgataggacttgaccttaaaagctatagacaatctagcggagcacagacggtttcataaagtacaatcacttcctggaattcttgggccagtgcagtcgga

SEQ ID NO: 936770 - DNA, 120 bp, Artificial Sequence
  ENSG00000234015_2 (sequence is synthesized)
cagtcggagccgtgcaaatcctgttttccttgcattgtttcctgcatgtgaatatcatcagtctagcagtctctctctgtcaccaggctggagtacagtggggcaatctcggctcactgc

SEQ ID NO: 936771 - DNA, 120 bp, Artificial Sequence
  ENSG00000234015_3 (sequence is synthesized)
gtgctgggactatagccgtgagccaccatgccaggcccatctaacttttaatatagattgtatgatgttttcataaaacaagcagggctcagaaaggccgtataaagccacagagccagc

SEQ ID NO: 936772 - DNA, 120 bp, Artificial Sequence
  ENSG00000234015_4 (sequence is synthesized)
aagcagcagagtctgcattttaatccatatgttcatggcttcaaagcaatgttatttaactctaacaatgcaattgaactaacaactgacatcagacacaaatattctgaagaacctgga

SEQ ID NO: 936773 - DNA, 120 bp, Artificial Sequence
  ENSG00000234015_5 (sequence is synthesized)
gaaatagaaaagaattggatagaactgatggctcatgggcagaagctgtgcatcaggaagaggaaataaatggcattgttcagccatgaagccatataatttcaacctgactttccttct

SEQ ID NO: 936774 - DNA, 120 bp, Artificial Sequence
  ENSG00000231064_0 (sequence is synthesized)
ccttactagagagctgccagatgagggtggataacagcctcagttttcagatgaggaagctgaggctcagaaaagttaaataacctgctaaagagctagcaagaggcaaaccagtattcc

SEQ ID NO: 936775 - DNA, 120 bp, Artificial Sequence
  ENSG00000231064_1 (sequence is synthesized)
aaaccaagtccatgtgaacacctaatctgtgtagtgccctggggaggaggaaaggcagcaggaaatttgaagacctgaaggggcagactttgggtggaaccagacctatggtgggtctcc

SEQ ID NO: 936776 - DNA, 120 bp, Artificial Sequence
  ENSG00000231064_2 (sequence is synthesized)
tcagatacagcagaggacactggacaggcctcacagtggaagccgggcatggtgttgatgcagctggagcccgggaaacaggggtcagcgtgagcacactggggaccagatgagaaggca

SEQ ID NO: 936777 - DNA, 120 bp, Artificial Sequence
  ENSG00000231064_3 (sequence is synthesized)
acatttccttcacctggagaaggatggggaggagtcagcacttgacatctgccaccctaccccagaatcagtgccacccttcgccagcccacccaaacctggtctcgtatatcatcccgc

SEQ ID NO: 936778 - DNA, 120 bp, Artificial Sequence
  ENSG00000231064_4 (sequence is synthesized)
agctccaccaggatctggttgaagaggaactcagaggctcctcccggctcacctgcatcctcaaatacgccttctgtccagtcctaatctccagcccatcgacctccgctggaggaatgg

SEQ ID NO: 936779 - DNA, 120 bp, Artificial Sequence
  ENSG00000231064_5 (sequence is synthesized)
gggccagtgctggaaggcctgcatgttggtcacccagtttgcagtccacgtagagatgtagggcagggctgggtctggagggacctcggagtcgcaggagaactgtgtgtgtgcgcccat

SEQ ID NO: 936780 - DNA, 120 bp, Artificial Sequence
  ENSG00000231064_6 (sequence is synthesized)
cagccaggcccgcttgctgtaggttcacggcgtggactttgccatcctcccgctggtatcgcaccagtactgcccaggaggggagatcagtatgggcgctatcccccaccccctgcctcc

SEQ ID NO: 936781 - DNA, 120 bp, Artificial Sequence
  ENSG00000231064_7 (sequence is synthesized)
agggggtcgaccacagcatcattgtcaaagtcatcctcacacacatcaccaacgccattgcctgggcagagtgaggctgggtgctcaggaaggccctggccactgccattaggcaacaat

SEQ ID NO: 936782 - DNA, 120 bp, Artificial Sequence
  ENSG00000231064_8 (sequence is synthesized)
accatctgttgggcctgcattcctgacatctttccccaccttgcccttcctcacttcccaacagggcttgctgcctccacctgggcaaaggcaacaccagtctaacgtgctctgggtccg

SEQ ID NO: 936783 - DNA, 120 bp, Artificial Sequence
  ENSG00000231064_9 (sequence is synthesized)
ccatcattgtcatcatccccatcacactcatctccaagtccatcgttatcagagtccagctgggagctatttggcagctgtgggcagttgtccttggtgtcctgatgcccatccccatcg

SEQ ID NO: 936784 - DNA, 120 bp, Artificial Sequence
  ENSG00000231064_10 (sequence is synthesized)
ctaatcagaagaacaggttggtgaaagtcccgaactttgtctccccacccagaggacaactggccaggaaatctgcctgtttcttgtctcaccctctagtccacactctgcctaacacta

SEQ ID NO: 936785 - DNA, 120 bp, Artificial Sequence
  ENSG00000231064_11 (sequence is synthesized)
ccaacgtccacaagcctgcctccctatttcacagagacttcctagcttccctgcttcatccccacctgatccaaattctcacaggtcccccagccaccccttcagccccaggcctgcacc

SEQ ID NO: 936786 - DNA, 120 bp, Artificial Sequence
  ENSG00000231064_12 (sequence is synthesized)
atccccatccacgtcgttgtcacaggcatctccttccccattgccatctgtgtccttctggtcattgttgggaacgttggggcaattgtcacaggcatcaccaaatgaatctgtatctga

SEQ ID NO: 936787 - DNA, 120 bp, Artificial Sequence
  ENSG00000231064_13 (sequence is synthesized)
ggaaagcggccttctgggactccgcaaactcccgttctccctcccccctcccccttgccattccctttgccttccgggcgccaagtctctctggcctccaaggtgaacccaactccccag

SEQ ID NO: 936788 - DNA, 120 bp, Artificial Sequence
  ENSG00000231064_14 (sequence is synthesized)
cgcgccccgggttcccgggtcgggccggcttcaggcggtggggagcgggatcccgggccccgggcgggcgggagggacgggacgcggtgcagtgttgttttttcccccgccaatattgca

SEQ ID NO: 936789 - DNA, 120 bp, Artificial Sequence
  ENSG00000231064_15 (sequence is synthesized)
ctcgtcccggcctccggcccccccggccccccggcctccccgctacccctagcggggcagcccccgccctcctggctctccatcccggcggatctttgatagactggagtgtcgccgctg

SEQ ID NO: 936790 - DNA, 120 bp, Artificial Sequence
  ENSG00000231064_16 (sequence is synthesized)
gagagaagtggctgcagttcccacccatggagaggtcactggtgaatcccagctaaagaggaaggacaggcccggcctgagtcccacaggcttaccatctgagtccttctgattgggatt

SEQ ID NO: 936791 - DNA, 120 bp, Artificial Sequence
  ENSG00000231064_17 (sequence is synthesized)
ccttggatcaactctgctagataccacatctctagggcccctatccctaattctactatgtggctctcaacaccttgtatttaataggtacacaataaatgtttttgaaattgctttaga

SEQ ID NO: 936792 - DNA, 120 bp, Artificial Sequence
  ENSG00000231062_0 (sequence is synthesized)
aacagtctcctggatctggtgtggaaggtaagactctccactatcacccagcatcacattcgtctcagcttgaggtttcggctgacttgagatggagtcctcaaagacccctccaatgaa

SEQ ID NO: 936793 - DNA, 120 bp, Artificial Sequence
  ENSG00000231062_1 (sequence is synthesized)
agcatctcaggcagacggatgcagttgataccgtgagttgaaaggtgtgactttacatcgaacgccgtgcagatttccccttggtggttttatctgggcacatctgccagctgagaacac

SEQ ID NO: 936794 - DNA, 120 bp, Artificial Sequence
  ENSG00000231062_2 (sequence is synthesized)
tcctacaagggaatactatacagtaatgagaacaaacaacccacatctacacccagccacttgggtgagtctcacaaacacaagggtgagagaaagaagccacacatgagtacccactgt

SEQ ID NO: 936795 - DNA, 120 bp, Artificial Sequence
  ENSG00000231062_3 (sequence is synthesized)
ataattccacttatatgaagttcaaaggcaggcaaaactgaacatggtgctagaaatcagaattgggtggtggtgggggtgcacagtgatggggacaggacttgaggggatttctgggag

SEQ ID NO: 936796 - DNA, 89 bp, Artificial Sequence
  ENSG00000231061_0 (sequence is synthesized)
cattgtatgtgtcagagagagaaaagatggcaggatgagagaagtccttcaaatgtaattgcaaagtcagagacctacagggaaatggg

SEQ ID NO: 936797 - DNA, 120 bp, Artificial Sequence
  ENSG00000231061_1 (sequence is synthesized)
tcactccagatgctacaaagccttcccttccagatgctaccgattttactccccagagcacagaagaaaagttcgtcattgatgactgctgtcatactgaaatcatgaagctaaaggcta

SEQ ID NO: 936798 - DNA, 120 bp, Artificial Sequence
  ENSG00000231061_2 (sequence is synthesized)
cagagggctactagaagcctgagtttctgaagactgtgtggaaccatcaaagcagccctgaatatttcccttgagacttttccattataggaagggcaaataaatagatgatgtatgatg

SEQ ID NO: 936799 - DNA, 120 bp, Artificial Sequence
  ENSG00000231061_3 (sequence is synthesized)
ctcttttctaagaagacattcatctcttttctgagaaggcatttctgcaaaggcattcatcatcatcagcctcctgagtagctggaattacagaacttccaagatggtggtgagccgctt

SEQ ID NO: 936800 - DNA, 120 bp, Artificial Sequence
  ENSG00000234019_0 (sequence is synthesized)
ttcttttcagtcaagatagtcattatttattgaaaattttctaaggaccgggtgcagggcaaagtaatgcacatgcattgtctcaggtacacattatcagacccccatttggcagatgag

SEQ ID NO: 936801 - DNA, 120 bp, Artificial Sequence
  ENSG00000234019_1 (sequence is synthesized)
gaaactgaggcccaggctggtgaaggagatagctcaaggtttcatagctagtttaaactggtcaggattcagcatcttatatctactacgtctcaaaaagtgggacagagacagagatgg

SEQ ID NO: 936802 - DNA, 120 bp, Artificial Sequence
  ENSG00000234019_2 (sequence is synthesized)
gacagacacgcacgcagacgatcacgtgagcggcagacctgcatggaaccgtttcgaaagacactgagggtgggaggtggggccgcgggagggcagcaacgggcaccgaccgctccgcag

SEQ ID NO: 936803 - DNA, 120 bp, Artificial Sequence
  ENSG00000234019_3 (sequence is synthesized)
ggtactcacctggttgcagtctgggagccgcaggagcactcggcttccctttgcgacccgcacgatcctccgcaacccgctgacctagggttgagaggccgccccagtaaaagctcgcgc

SEQ ID NO: 936804 - DNA, 120 bp, Artificial Sequence
  ENSG00000234019_4 (sequence is synthesized)
aggccccacccctcgcgcgcttcggccggcctcttcccgctgccactccccccaccgccccgtctttatggcttctcaccttccacacccacctgcagagattcctaagccaggtttctc

SEQ ID NO: 936805 - DNA, 120 bp, Artificial Sequence
  ENSG00000277675_0 (sequence is synthesized)
tacaggcgtgagccactgcgcccagctacaactgacttttttgatccctgggagatgagtcaacaccaagggacgaccagtcctaagccctggacatggacctgggggtgaggacagaag

SEQ ID NO: 936806 - DNA, 120 bp, Artificial Sequence
  ENSG00000277675_1 (sequence is synthesized)
cctgggggtgaggacagaaggggatcaggaccagccctctcatcctgcacactgaggcatgggtgatcccaggaagccactcaccaggcaccagggtggcttcctggaggagaggatgct

SEQ ID NO: 936807 - DNA, 120 bp, Artificial Sequence
  ENSG00000277675_2 (sequence is synthesized)
gaagccgacctcaagaagtgtctgtgttaggtttaaggactcacaagacttctctggctggactaaagctgtgcgaccttgccattgtacttctccaaagctagtgtcttcaccgctctg

SEQ ID NO: 936808 - DNA, 120 bp, Artificial Sequence
  ENSG00000277675_3 (sequence is synthesized)
agaggaaggggcaaggtatctctgcatcccttggacccagccacaccccaacacagagtgaatgtttcctaatgccattccctttccacaactccactccacgagagagaagtgacttaa

SEQ ID NO: 936809 - DNA, 120 bp, Artificial Sequence
  ENSG00000277675_4 (sequence is synthesized)
gcctgctaaggagcggagggaaaagttcaggaaggtttcagcatgctatcattagcgctatcattagctcttgaggactgaataggaatttactaggggtgggtgggggagaatattcca

SEQ ID NO: 936810 - DNA, 120 bp, Artificial Sequence
  ENSG00000277675_5 (sequence is synthesized)
ggcaaatggaagagaggtagatacaaaggcacagaggtatgtagggaacaataagggaaattgtgtatttgctgggggagggctaaagatgaggattcaaggccaggagcagtaatccca

SEQ ID NO: 936811 - DNA, 120 bp, Artificial Sequence
  ENSG00000235168_0 (sequence is synthesized)
gaaatccactgaaggcagaggaaagacaccctacactctgcttctgcttccaagtggaggcttctttcatttctaaaggggtctttcaaaaagttcaaaaatatgtagatgactaactct

SEQ ID NO: 936812 - DNA, 120 bp, Artificial Sequence
  ENSG00000235168_1 (sequence is synthesized)
ctgtgttgtaatagaagtgcagtgactcactcactcccagaaactggaaacagatacaaatcaggtcccagatttccttttggcatcaagcctgctttaaattgcagaaaaagatggact

SEQ ID NO: 936813 - DNA, 120 bp, Artificial Sequence
  ENSG00000235168_2 (sequence is synthesized)
caaattttgattgtgggaatgatgaaaatgacaatgaaatcggctactgaaaaaggaaatatatcaaggtttggaatcaaaaggtattatctggtgaaagaataaagacattttaatata

SEQ ID NO: 936814 - DNA, 120 bp, Artificial Sequence
  ENSG00000232710_0 (sequence is synthesized)
ggcaggactcagcctggaggcccatatttcaggcctaactcagcccaccccacatcagggacagcagtcctgccagcaccatcacaacagtcacctcccttcatatatgacaccccaaaa

SEQ ID NO: 936815 - DNA, 120 bp, Artificial Sequence
  ENSG00000232710_1 (sequence is synthesized)
tggaagacaaatcatgtcagggagctatatgccagggctacctcccagggctcagtcggcaggtgccagaacattccctgggaaggccccaggaaaacccaggaccgagccaccgccctc

SEQ ID NO: 936816 - DNA, 120 bp, Artificial Sequence
  ENSG00000232710_2 (sequence is synthesized)
accctcacggactggccacctctctgggccctcagggatgctgctgtctggacccctgaccagtgacgagttcgcactcagggccaggctggcgctggaggaggacacttgtttggctcc

SEQ ID NO: 936817 - DNA, 120 bp, Artificial Sequence
  ENSG00000232710_3 (sequence is synthesized)
aaccctaggaagaagagggatccagcagtgagatcaggcaggttctgtgttgcacagacagggaaacaggctctgtccacacaaagtcggtggggccaggatgaggcccagtctgttcac

SEQ ID NO: 936818 - DNA, 120 bp, Artificial Sequence
  ENSG00000232710_4 (sequence is synthesized)
acatggctgctgcctctcagctctgcacagacgtcctcgctcccctgggatggcagcttggcctgctggtcttggggttgagccagcctccagcactgcctccctgccctgctgcctccc

SEQ ID NO: 936819 - DNA, 120 bp, Artificial Sequence
  ENSG00000263520_0 (sequence is synthesized)
aaccaggataagttgatcaccctccctgagagtttgggattctatgaggactcctgtctagagtgcagcgccactgcgagggtggtcctttattgtcagaaacctcattcccagaaggag

SEQ ID NO: 936820 - DNA, 120 bp, Artificial Sequence
  ENSG00000263520_1 (sequence is synthesized)
gcccagctccattcaagaaagcacacctgtggatgagaggcgcaattaacgttatcagtcgtgaaggatcagaaggaaaacccagtggccgttgggaatttagagatggtgtttcgccat

SEQ ID NO: 936821 - DNA, 120 bp, Artificial Sequence
  ENSG00000240731_0 (sequence is synthesized)
tttatcttttttgttgtgaaactttaatttttttttttttttgacagtgtctcactttgttacccagagcgagacgcgagactccggctcaaaaaaaaaaaatttatttgcctgcaaatg

SEQ ID NO: 936822 - DNA, 120 bp, Artificial Sequence
  ENSG00000240731_1 (sequence is synthesized)
gactttttttcccttaggtgtgtaagattttaggttgacagtattttgtctctgcactttgcaaacaacgttctgtctctgggcatgggcagccgtagggtctgagcaggagccttggtt

SEQ ID NO: 936823 - DNA, 120 bp, Artificial Sequence
  ENSG00000240731_2 (sequence is synthesized)
tttggtgcttgtgctctgatgggctgacatgtatcctcagcctgtttagagtttgaggcctcttggatctgtggcttgaggccttcatcatgtttcttccagtgttgtttctgccccgtt

SEQ ID NO: 936824 - DNA, 120 bp, Artificial Sequence
  ENSG00000263293_0 (sequence is synthesized)
ccactcttccctaatcgctgttcattctccggtgcgctgtcccgccatggtctgaccccacttcaatcttaccttcgaacttcagattgaaaagcatgtacttgagtagctgtatttaag

SEQ ID NO: 936825 - DNA, 120 bp, Artificial Sequence
  ENSG00000263293_1 (sequence is synthesized)
gaattacacccaagaagtctcatcttccctggacttacgtagaggataagattctgaactttgaattgatgctataatgggataagactttggggccttagaaggggagaacaaaggcca

SEQ ID NO: 936826 - DNA, 120 bp, Artificial Sequence
  ENSG00000263293_2 (sequence is synthesized)
ggctggtctgtgtatgatgggatggattcctcctgctcccagaaggcactgtactttcagtgttcagggcagccttgccttagtgcctcaaacctatccctacatcctgcagtaaacttg

SEQ ID NO: 936827 - DNA, 120 bp, Artificial Sequence
  ENSG00000263293_3 (sequence is synthesized)
gaaaggtaacacctctaaccatcaggccttcctctgaagcacagtcaagttgctcttggcaaccatctcaattttaatagtgcagatgccatgtgctgtaaagtcctaaaatttaaattc

SEQ ID NO: 936828 - DNA, 120 bp, Artificial Sequence
  ENSG00000263293_4 (sequence is synthesized)
atattttgggttctttcccaaaatacttagtcatctaaaatcataaccctattgaaagctgccttcctgttcaaccccagtcaacaactaaaacagaggcatgtcacccctctgggggtc

SEQ ID NO: 936829 - DNA, 120 bp, Artificial Sequence
  ENSG00000281333_0 (sequence is synthesized)
tccttcccttccggagcccggggtaggcgagaagcaggcaagggcgcggagggaagaatcgggagggcggccagagcacgatggaatctcgctctgtctcccaggctgaagtgcaatgac

SEQ ID NO: 936830 - DNA, 120 bp, Artificial Sequence
  ENSG00000281333_1 (sequence is synthesized)
tctgtctcccaggctgaagtgcaatgacgcaatctcggctcaatgcagcctccgcctcccaggtttaagcgattatcccgcctcagtctcacaagtagctgggattacaggtgcccacca

SEQ ID NO: 936831 - DNA, 120 bp, Artificial Sequence
  ENSG00000281333_2 (sequence is synthesized)
attaaacctctttttcttcccagtctgaggtatgtctttatcagcatcatgaaaacggactaatatactattcttaattgatatgcccgcacaaatatagagacacatagcaacatatat

SEQ ID NO: 936832 - DNA, 120 bp, Artificial Sequence
  ENSG00000281333_3 (sequence is synthesized)
gcacaaatatagagacacatagcaacatatatacacaaaatgcaaacaaaattgcttgcagctttaagtagatctaagtatacttttccttcttcagtgggaacaaaggtgttgtaattg

SEQ ID NO: 936833 - DNA, 120 bp, Artificial Sequence
  ENSG00000281333_4 (sequence is synthesized)
tatagagaaatgctttagaaacctcagctgttccgtctttcagctatttgagtcttcctaggccaagggccagatatataaacaaagaagacttgatggtgactccagccttagtcaacg

SEQ ID NO: 936834 - DNA, 120 bp, Artificial Sequence
  ENSG00000281333_5 (sequence is synthesized)
tctaactgcaaccacgtgagagactttcaaccagaactatgcagtggagctgcttctgaactcctgacccatagaaaccatgaatgataataaatgattgctgttttccttaaatgtttg

SEQ ID NO: 936835 - DNA, 120 bp, Artificial Sequence
  ENSG00000281333_6 (sequence is synthesized)
gtcgcatttctcagtgaaatcatctgtgcctagaattttctttctagaaaagtttcaaactccaaattcaattcttaattgaattttatatctgtatatctatagacatatacaaatatc

SEQ ID NO: 936836 - DNA, 120 bp, Artificial Sequence
  ENSG00000248464_0 (sequence is synthesized)
tggaagggtaagacccgatgcaaggcaaggagagagctcgaggtggtggctgctggttagctccctctgggcgcggatctggccagaagtgaatgcaccaacatccataactcctcggaa

SEQ ID NO: 936837 - DNA, 120 bp, Artificial Sequence
  ENSG00000248464_1 (sequence is synthesized)
aagccggctgactcccctcgctcctttctcggatccgctgcctacgcctctggagcctcccgtgcctgcacctttgtaactggttactttattaaagtctcttcacttaaatcaactggg

SEQ ID NO: 936838 - DNA, 120 bp, Artificial Sequence
  ENSG00000248464_2 (sequence is synthesized)
aagaattctgtcctactcaggacactaacttcaaactgcagtatataccatcacagcttctttggtttgacagaacatttggacacatttctgcaaacggacccttggcatctcttcttg

SEQ ID NO: 936839 - DNA, 120 bp, Artificial Sequence
  ENSG00000248464_3 (sequence is synthesized)
gaacaaaattttgtatttggactctggcaccatgcaccacagatgcaagcaagaagcacttctaccttctgaggcggcccctcaaactcaagccagctaggctaggcctgtccagctttc

SEQ ID NO: 936840 - DNA, 120 bp, Artificial Sequence
  ENSG00000248464_4 (sequence is synthesized)
cttcacaaagaaggattggagagttgccgcttactggctttctcaaatgtcattacttagccagtcttctgaagattgagattcatgaacattggactcttgcctgtaattacaattctt

SEQ ID NO: 936841 - DNA, 120 bp, Artificial Sequence
  ENSG00000248464_5 (sequence is synthesized)
aagtatattaaccttattttcagctgtatttttagttgctttctgacttcatcttgaaaatacctatactctttctgcatttattctaatcttacttctgatcttgattttaaaaagatc

SEQ ID NO: 936842 - DNA, 120 bp, Artificial Sequence
  ENSG00000248464_6 (sequence is synthesized)
tttatcaatgaaatcacctccaagaactatttttgaactttaagatgtattcttaaatttttagtaaaataggatttagaatcaactttgtgaagattactaacagaaaaatgaatagct

SEQ ID NO: 936843 - DNA, 120 bp, Artificial Sequence
  ENSG00000248464_7 (sequence is synthesized)
atatatttaatgaataaatgaatgtatgatgaatgaattcctgtcagtctttagcgaagtcttatctcttatttggaattctttctttatcccctatgtcttcataaattccaaccaata

SEQ ID NO: 936844 - DNA, 120 bp, Artificial Sequence
  ENSG00000248464_8 (sequence is synthesized)
tccaggattaattcaaattccttacaaggatctgagaagggttggagctgtggtatgggtatgattggtagatagttttgagcaacactatcaccagaaaatctctatttttctcccagt

SEQ ID NO: 936845 - DNA, 120 bp, Artificial Sequence
  ENSG00000248464_9 (sequence is synthesized)
gactttttgttgagggttgaagagtttccttgaaggcaaaaaaaaaaaaactgtactcatccaaaatgttacagatgtaacttatggttcaatagaagcctctgcaagccaggatacaga

SEQ ID NO: 936846 - DNA, 120 bp, Artificial Sequence
  ENSG00000248464_10 (sequence is synthesized)
aagaaacttgaacctttgcagaagcttgcagattcagcaacagagactgagataagaatgaaatggtaattctgggtatggtgtggtgccaagtcctgaaaccagtcccaatatacctac

SEQ ID NO: 936847 - DNA, 120 bp, Artificial Sequence
  ENSG00000248464_11 (sequence is synthesized)
cctagaagcatgtggacatcctgaggacatgaagggctctatgtgtgatccggaaaaggtgttccactatattctaaagtatttatgggctgtggtaggcagagaaaattatccagcaaa

SEQ ID NO: 936848 - DNA, 120 bp, Artificial Sequence
  ENSG00000248464_12 (sequence is synthesized)
aattcatgaattgttactgaaaagtgacttctcagataagtattacatttctcagctctcgtcgtcattaagcattaccatggtgactcagatctatccagtggaatattgtaagaagtg

SEQ ID NO: 936849 - DNA, 120 bp, Artificial Sequence
  ENSG00000248464_13 (sequence is synthesized)
atgttgctattcaagatctggctcatggaagtgctcctctgtgatcttctctcttttttttctgctgcctataataaaaacttctcccagggaactttggaagtctcatgcagaagacag

SEQ ID NO: 936850 - DNA, 120 bp, Artificial Sequence
  ENSG00000248464_14 (sequence is synthesized)
cagaaacttcaccaatctgggtctctgtgtgactgaaagtataagagatggcagacccatctacctgttctctcaccttttagtgtcacatgatcaagaaatacacttctattgtcgaga

SEQ ID NO: 936851 - DNA, 120 bp, Artificial Sequence
  ENSG00000278532_0 (sequence is synthesized)
tgatttcattcagccctctttgcaaccacatatgttaaatgtggttgccagttactagaggaaattgaggctcacagacattcagttgcagagccacacgtttcaagattgatttgaggt

SEQ ID NO: 936852 - DNA, 120 bp, Artificial Sequence
  ENSG00000278532_1 (sequence is synthesized)
ctacagtgatttctatgaccactgactccttctcctatttatataatcatctgtttcacaagtcaattatcagttctttgaagtcagggattagttttgtctcagcaacaatcttagtgc

SEQ ID NO: 936853 - DNA, 120 bp, Artificial Sequence
  ENSG00000278532_2 (sequence is synthesized)
ttatgtatgtgatcactgtgcctacattcatgtttatcaacgtctttgtaacaccctagcatgacttcaatattctcatttatcttttatttttaaatttgtgatacagcaatttttatg

SEQ ID NO: 936854 - DNA, 120 bp, Artificial Sequence
  ENSG00000278532_3 (sequence is synthesized)
tatgtgtgtccctctttttatgatctttatttgcttcttgaaagcagtaggttatctgtcatgtaaattttcccagttctggatttggttgcatagcatcaattaaatatgttcacccaa

SEQ ID NO: 936855 - DNA, 120 bp, Artificial Sequence
  ENSG00000248461_0 (sequence is synthesized)
gtgatgagagcattcagtgagagcctggtgttctgctcagtaccaagtgcagcactttcacatgcttgatgctcaatgaatgttgaaggagagagtgaatggatacagagctgaatgagt

SEQ ID NO: 936856 - DNA, 120 bp, Artificial Sequence
  ENSG00000248461_1 (sequence is synthesized)
aggttcacccttgtgactctctcagaggactgccccattgtctgcaagcctgaaaaccagaagtgcctaaggggttgcatcctccctgcacagccattagccaatgactggcaaaggaga

SEQ ID NO: 936857 - DNA, 120 bp, Artificial Sequence
  ENSG00000248461_2 (sequence is synthesized)
gggaaagctcggatccattgcctcgtttgggaaaaactcggagacatgattcgcactctggagttttcctgcaggatcaggcctacatcccctttctgaaatttctcataaaccacggtc

SEQ ID NO: 936858 - DNA, 120 bp, Artificial Sequence
  ENSG00000248461_3 (sequence is synthesized)
ccctgcttggctttttccccttccctgcccatcatccatcttcctctacttctctccttcatttcagaatctgcatctgagaaaactgccctaagataaggaatatgcttatcttccaat

SEQ ID NO: 936859 - DNA, 120 bp, Artificial Sequence
  ENSG00000248461_4 (sequence is synthesized)
ttgagttctgtaaacaacagccaagagagcaggggtgacgatacagctgagccacaatcaagtttcttattattttccaggcacagaagattccagtccacatcctttcttcctttcatt

SEQ ID NO: 936860 - DNA, 120 bp, Artificial Sequence
  ENSG00000248461_5 (sequence is synthesized)
cccaagatatagcaatagaagtctgaagacggtaaactctaataactgttccctgaatagaaaataacaagccttcccctccatacctaacagtccccaatacaattggtgttcataata

SEQ ID NO: 936861 - DNA, 120 bp, Artificial Sequence
  ENSG00000248461_6 (sequence is synthesized)
tgcagtttgaagacaatgatgaccaatgaccaaaggcataatctgaatcacagccctatatcagtgctctggacccacatatcctcttgcttacccagtgatgtttaccaggaggcatct

SEQ ID NO: 936862 - DNA, 120 bp, Artificial Sequence
  ENSG00000248461_7 (sequence is synthesized)
tgccagaaaggaaatcagctgtgggggctatacagttccaggagccagcccatcaagaaggcatttgtgagtttcagggcgtggggatacagtggaacaaaagtggtgtctgtttgcttg

SEQ ID NO: 936863 - DNA, 120 bp, Artificial Sequence
  ENSG00000248461_8 (sequence is synthesized)
catcatggaagcagcattggaagaaatcactcctgaccaaccgatgccagttggtggagcccagatttttaaaactagctgattgcccatcaagaaggatgtccaagggatgaacccacc

SEQ ID NO: 936864 - DNA, 120 bp, Artificial Sequence
  ENSG00000248461_9 (sequence is synthesized)
agcctgactctctccctccctctgtttgattttttcaggagtgctactctgtgataggctgcactcatgtgatgattactgtattgtgcatttgctgattcttatgatgtacagactttc

SEQ ID NO: 936865 - DNA, 120 bp, Artificial Sequence
  ENSG00000248461_10 (sequence is synthesized)
agaggaagggaactactgtgacatatggaccaaatctgatgattcacataaaactcatcatcattattttacctcctttgtccccttctagtcctttaagaaataagaatcaatcattgt

SEQ ID NO: 936866 - DNA, 120 bp, Artificial Sequence
  ENSG00000248461_11 (sequence is synthesized)
cacattgtctagttatttatgctgtacttacccaaaaaggtaagtttacatctcatgaattttgacttattgagaagaaatccaatctcagtcctggattgagactgttcttgttgttaa

SEQ ID NO: 936867 - DNA, 120 bp, Artificial Sequence
  ENSG00000248461_12 (sequence is synthesized)
ttaatgaaaactgaattatagattgttttgtacaaaaagtgttattgaaagaaatgtcacactaaaaggtatatcaaaagccttgaaaaaattcagattcattgtgtttagcattagtct

SEQ ID NO: 936868 - DNA, 120 bp, Artificial Sequence
  ENSG00000248461_13 (sequence is synthesized)
catccatcattctgggagaaggcatattcaaatcaacaaggttattttgacataatgtactcttagtgattcttcacaattcctccaggatgacagataggacttggtaatcatagctga

SEQ ID NO: 936869 - DNA, 120 bp, Artificial Sequence
  ENSG00000248461_14 (sequence is synthesized)
agagggttcatcaattcatagttaaattaatgaatgaacaaaatataatgtcattcatccatccatttattcatcatcctacttagtaactcactttttaacaatgcttcctaaaatgct

SEQ ID NO: 936870 - DNA, 120 bp, Artificial Sequence
  ENSG00000248461_15 (sequence is synthesized)
atgcacactgtgaattggttttacaagattcttttaatcaaagatgaaatttataacatagaaacagaaaaccaaatactgcttattctcacttacaagtgggagctaaacactgggtac

SEQ ID NO: 936871 - DNA, 120 bp, Artificial Sequence
  ENSG00000248461_16 (sequence is synthesized)
acactggcacaaagatgggaaaaacagacactggggactacaggagagggtaggagggggacaaggtttgaaaaacttcctattgggaagtttactctcagtaagctcaatacctgggtg

SEQ ID NO: 936872 - DNA, 120 bp, Artificial Sequence
  ENSG00000248461_17 (sequence is synthesized)
atgggttcaattgtactccaaacctcagcatcacacaatataccctttaacaaacctgcacatataccccaagtctaaaataaaagttgagaaaaaagatgaaatttagttcagccacag

SEQ ID NO: 936873 - DNA, 120 bp, Artificial Sequence
  ENSG00000248461_18 (sequence is synthesized)
tcttacagacaatatcgaattaataaagtctaaagttatgaagttatgagatttgacagttttatagtagttgacatccatagaatagacagtctggactttacgtgatctatgggacat

SEQ ID NO: 936874 - DNA, 120 bp, Artificial Sequence
  ENSG00000248461_19 (sequence is synthesized)
ctagaggatgtccaacagaagagaggctgccttttctgtgtacctcttttaataagtaaggacagcttcttagaaccccccaaacaggcttctttctgaaccaatcactgacatgagaaa

SEQ ID NO: 936875 - DNA, 120 bp, Artificial Sequence
  ENSG00000248461_20 (sequence is synthesized)
tgaaacagctacttaagattaatgaagatttgctctctgagtcatgtaaaggaggggcaaagacctgaacaaaaagtaaaggaagagagaaatgactggtggccaataaaccaacagtgt

SEQ ID NO: 936876 - DNA, 120 bp, Artificial Sequence
  ENSG00000248461_21 (sequence is synthesized)
gattcgcgtaggcactttgtagcagtagatactttgcagcagtttcctcacctgcacggtggttttatgggccgaatgctcactaaactgacttattcttcccggtaacctgcatacaga

SEQ ID NO: 936877 - DNA, 120 bp, Artificial Sequence
  ENSG00000248461_22 (sequence is synthesized)
cctcccaggccctggcgtgaaggtggcactgtgactagctcttgccgatggaatgggaggagtcagttagaaattttcatatggtcaaaatacccatggaatatatgagtggcagcagta

SEQ ID NO: 936878 - DNA, 120 bp, Artificial Sequence
  ENSG00000248461_23 (sequence is synthesized)
aacaatccttgaagttcttgcttgtttaacttgactgttggtgatgcccaatgaggccctgtctgctccaagcaaattacataaaaaagatgtgaataaaaactcatcaaatactaacag

SEQ ID NO: 936879 - DNA, 120 bp, Artificial Sequence
  ENSG00000248461_24 (sequence is synthesized)
agcctgtcttggatgttgaagatgattcaaccaggatggcaataatgtcagagatctcaggttcaggagtacatgtgaagtcaactcctcacttttaaatgctgcaaagtgagcaaacat

SEQ ID NO: 936880 - DNA, 120 bp, Artificial Sequence
  ENSG00000248461_25 (sequence is synthesized)
atggtgtatttgtgagtaacgaccaaattcatacaatctactgtaaatatattttcgtctgtgtatatacatatatgtgtatatatgagaatattaatataaattacacatgtatgtatg

SEQ ID NO: 936881 - DNA, 120 bp, Artificial Sequence
  ENSG00000248461_26 (sequence is synthesized)
atgcactgcaaaaaatacattctctctccatatttgtatgtatgtacatatgaccactctctgacccctaaaaatgaggcagttaaagaatatttgatgacaaagagaaatattaaaata

SEQ ID NO: 936882 - DNA, 120 bp, Artificial Sequence
  ENSG00000248461_27 (sequence is synthesized)
gttgaaaaagttttggaaacaatatcatatagtataatcccattttggaaaatttatatgtatacacatatatataaaacatgtgtagaaaaaatgaggatatataacagtatgtgacca

SEQ ID NO: 936883 - DNA, 120 bp, Artificial Sequence
  ENSG00000248461_28 (sequence is synthesized)
accagtggttatgtccatgcggtggaattattggtgatttgttttctttctgcttttttttttgcgtttcttcaataaacatgtattatttttatagtcagaaaaagatcccatgacaaa

SEQ ID NO: 936884 - DNA, 120 bp, Artificial Sequence
  ENSG00000248461_29 (sequence is synthesized)
tcacttttaaatgctgcaaagtgagcaaacattgactagtgtggccagacatagacaatggtgtatttaatctgcatctgagaaaactgccctaagataaggaatatgcttatcttccaa

SEQ ID NO: 936885 - DNA, 120 bp, Artificial Sequence
  ENSG00000248461_30 (sequence is synthesized)
gaatagacacactttgcactcagtaataatgcactaattgacgaatatattgacggagtgttggtttgcttcacaatctgctggtaaacatattcatttttgggtgaatttcaggcctta

SEQ ID NO: 936886 - DNA, 120 bp, Artificial Sequence
  ENSG00000248461_31 (sequence is synthesized)
agtgagcaaacattgactagtgtggccagacatagacaatggtgtatttactgtgtctaagatgccaattgaagactggaacagccatatgagtgtggggtattcctggaaacctgttct

SEQ ID NO: 936887 - DNA, 120 bp, Artificial Sequence
  ENSG00000248461_32 (sequence is synthesized)
ctctaatttttggctttctttgctacttagaagcagaagtggaagaaactaaaatcagcagaatgagggctgcatgcaggtagacacacttttctgaatgtgtgtgtgtgtgtgtgtgtg

SEQ ID NO: 936888 - DNA, 120 bp, Artificial Sequence
  ENSG00000248461_33 (sequence is synthesized)
tcttaggttggagaaaaatacctttcccctctacctcttggatattgtatgaactgtatctcaattccaaagccacaattcccatttttcctttgggatctgacaagaatttcgtcttct

SEQ ID NO: 936889 - DNA, 120 bp, Artificial Sequence
  ENSG00000248461_34 (sequence is synthesized)
gcagtgggaatgcatccactgtggacatgccagtctaccctagcattacactttgtaaaccaacacgatctgactgtagctgggacaacaacctatagtgacaatagtggcaacttacac

SEQ ID NO: 936890 - DNA, 120 bp, Artificial Sequence
  ENSG00000248461_35 (sequence is synthesized)
taattaggactagagagattttcaaactgatgtccattcatcctacgcccagcacctcttgtatcctggcatataagcacctcttctattagcaatttaacatgtatgtatgagcttgta

SEQ ID NO: 936891 - DNA, 120 bp, Artificial Sequence
  ENSG00000248461_36 (sequence is synthesized)
tcaaaggacacaggcacctcttgtatcccttgtggacaaactccttagtttttaatttaaaacattaagcaagaattaacacaataggctttttgcctcttcattgccaatcttcttcag

SEQ ID NO: 936892 - DNA, 120 bp, Artificial Sequence
  ENSG00000248461_37 (sequence is synthesized)
tgaacactctgctccaagttgtagttaaagaaatctcaaattcaatcttgggcatatttcctttggcttcacttgtgacacgtctctaaataaatatcagcattttgcaactttgaaaaa

SEQ ID NO: 936893 - DNA, 120 bp, Artificial Sequence
  ENSG00000248468_0 (sequence is synthesized)
aggttaacggcccttattcttctgtgtcccacgtctcaacagagccccttcctcctccacccaggggaggcccaactgcaccaggccattccactgcttcaggacgcaactgtgcagaga

SEQ ID NO: 936894 - DNA, 120 bp, Artificial Sequence
  ENSG00000248468_1 (sequence is synthesized)
tgctctgtcacctaggctggagtgcagtagcatgatatggctcactgcagcctcaaacttgtgggcttaagcgatcctcctgcctgccttctgagtagctaggactacagagcatcaaga

SEQ ID NO: 936895 - DNA, 120 bp, Artificial Sequence
  ENSG00000248468_2 (sequence is synthesized)
catcaagacaaaaatctcagtcttcgaggaactcacagtgtagcagaaaagacaaaggaggtaaacaggaggagcatgaataattcatcttgatgtaatcatgcaagactcctaagaaga

SEQ ID NO: 936896 - DNA, 120 bp, Artificial Sequence
  ENSG00000248468_3 (sequence is synthesized)
aacatatgcaaaagtagtgttttcactgtttaaaaacatcgtcagcagcatcatcatcattaactgcaccaggaagccatgactcctttctggacaaggtgcacttgcctgtcatccttc

SEQ ID NO: 936897 - DNA, 120 bp, Artificial Sequence
  ENSG00000248468_4 (sequence is synthesized)
catctctttcttcctccttgaagttcacaatacccagtccaggagcattgcagagaatgctaggtgtgtctgcagacttgactttaaaagaaaacaagttccttcaagtgagttcatcat

SEQ ID NO: 936898 - DNA, 120 bp, Artificial Sequence
  ENSG00000248468_5 (sequence is synthesized)
gatgggaatgataatttgtttgagagaatgtgtgttctttggcaaaggaactcctgttataccatgacagtaataatagcagtaataaaatcaccaataataaatttacttttgaattta

SEQ ID NO: 936899 - DNA, 120 bp, Artificial Sequence
  ENSG00000248468_6 (sequence is synthesized)
tcgactcacgacttccgggcgccctgccgctctgctttcagggagtccccacgccaccgccacgtggacgcagtagccgtggggaagttttcgcaatggccgccggaacggtcgccggcc

SEQ ID NO: 936900 - DNA, 120 bp, Artificial Sequence
  ENSG00000248468_7 (sequence is synthesized)
ggccaggcttgaagaattgtatatgcccaaaaggatatggggacttgactatgatccagcgtcaacagcacagtctgggaccgaaggggagatttaccatcaaacagacatgaataattc

SEQ ID NO: 936901 - DNA, 120 bp, Artificial Sequence
  ENSG00000248468_8 (sequence is synthesized)
agaacgtgcttccttaggttaacggcccttattcttctgtgtcccacgtctcaacagagccccttcctcctccacccaggggaggcccaactgcaccaggccattccactgcttcaggac

SEQ ID NO: 936902 - DNA, 120 bp, Artificial Sequence
  ENSG00000248468_9 (sequence is synthesized)
cacaccttcctacctgttccccgggcccagggcagcacccaggccgtccccgagtcgacccagcacctgggcgccgacctgcgtcagcagcctccaacccggcatggattagcccgggaa

SEQ ID NO: 936903 - DNA, 120 bp, Artificial Sequence
  ENSG00000248469_0 (sequence is synthesized)
ggggatgcagagcagctgaggctccgtttggcaccacccctctgagggtgccctccgaggccccatcccaggggctgcggggaagccgggcctggggaccccctcccaccctgggctgag

SEQ ID NO: 936904 - DNA, 120 bp, Artificial Sequence
  ENSG00000248469_1 (sequence is synthesized)
cccccaccccactgcctgtgctgcctgtccccggcttccaggtctctgctcctgcgctccaggcagcgctccacttccgcggcttcgcccttgacagcgccctgtggatcttccgattcg

SEQ ID NO: 936905 - DNA, 120 bp, Artificial Sequence
  ENSG00000248469_2 (sequence is synthesized)
gtaccccgaacccctgtagacgtggcctagggagccccggaccgccggcccctgcggctcccaaagccgaagaacttcttcaaggtgctacagcagaaagcaaaggggatgcagaggtga

SEQ ID NO: 936906 - DNA, 120 bp, Artificial Sequence
  ENSG00000248469_3 (sequence is synthesized)
aggtccacagccagttcctctactgattccctccaggcataaatgttcaatctaacggctttggttggcactttcacctcagcacttacctatgcctacagcaatgcgagtgggagagcc

SEQ ID NO: 936907 - DNA, 120 bp, Artificial Sequence
  ENSG00000248469_4 (sequence is synthesized)
aggaacccagtctccgagcgggacaccacggattgttttatgaaaatggcagctgggacgtggaggaagagccacctgccagttggactggagccacaagctgcactgtgaacctggtca

SEQ ID NO: 936908 - DNA, 120 bp, Artificial Sequence
  ENSG00000248469_5 (sequence is synthesized)
cttggtaccaatgccgtcagcccgtgggtatctgaggggacctgccaattggactgccaaattccccagtttgctcccagatattatagaaaattatttgtataaataatgtaaagaaaa

SEQ ID NO: 936909 - DNA, 120 bp, Artificial Sequence
  ENSG00000248469_6 (sequence is synthesized)
caaagatcagccaaatctaggtaaattctggtaaatatactatattcaaccttaaagcttaccaccattacatgcatggctatggtagtatggtatcaacatctaaactagtgaatctaa

SEQ ID NO: 936910 - DNA, 120 bp, Artificial Sequence
  ENSG00000248469_7 (sequence is synthesized)
cacaggtaagaattttaaaatgcccccagatgacttcaaggccaaatttctgctaaggtctccacaaaatggctattttcaaatatagcatattgtgactgggttttctgaggtactttc

SEQ ID NO: 936911 - DNA, 120 bp, Artificial Sequence
  ENSG00000248469_8 (sequence is synthesized)
ccccatactttttttgttctgggactgggggctgtggaagaaaagactgctttgcaatgctgcataataaatatggttttaaaagtgcaagtgttacaaatgtcttccctaattaatcac

SEQ ID NO: 936912 - DNA, 120 bp, Artificial Sequence
  ENSG00000248469_9 (sequence is synthesized)
actcctatataagtgaaaaggtaatctgaaattttggtggaaaattacttctgctgaaactaatcttaaggttggacttctttattcattagtttccctttgatattcatatcatcccct

SEQ ID NO: 936913 - DNA, 120 bp, Artificial Sequence
  ENSG00000248469_10 (sequence is synthesized)
taacttactcctctctcacaccaacatgcacccccccaaggctgtcgtaaagaattatctttaaaaaatcttataagcagctacaacattttcattccagttatcaaagaggtcattcat

SEQ ID NO: 936914 - DNA, 120 bp, Artificial Sequence
  ENSG00000248469_11 (sequence is synthesized)
tcatggttctgtaactagaacagaagtattagaaaaaggataaaatctattgtagttgtacataaagaatattacttccaatgttatatagaactgtaaattaaaaataaagtaatggaa

SEQ ID NO: 936915 - DNA, 120 bp, Artificial Sequence
  ENSG00000254594_0 (sequence is synthesized)
gagtttgttgccaccttttgccatgtgaaaacgcacattgaagggagcatctttacaaaatgatccctcactaaacactgaatctactggagacttgatcttggaatttccagatttgtg

SEQ ID NO: 936916 - DNA, 120 bp, Artificial Sequence
  ENSG00000254594_1 (sequence is synthesized)
aatttgcatttcacaatccaaaaacagtaatgccctttgaagaaatacagctctcagtaacagcacagagtctgctagactgtcctgtcaatgtcagtggggttgcctagattgattatg

SEQ ID NO: 936917 - DNA, 120 bp, Artificial Sequence
  ENSG00000254594_2 (sequence is synthesized)
caaggccctgaagatacttctttagagatccaaagatattcaagctctctttgttcctgcatctgaagaatgggttaagaatagcacctaccttcggactgctttgagaataaagtattt

SEQ ID NO: 936918 - DNA, 120 bp, Artificial Sequence
  ENSG00000254594_3 (sequence is synthesized)
aatgtacagccctcagaagtgtgcctgccttagagcaggcaccatacaatccattgagagctattgaatagagcaaaaagatgaagtaacggtcttctggaaaatctgtatgcacatata

SEQ ID NO: 936919 - DNA, 120 bp, Artificial Sequence
  ENSG00000254594_4 (sequence is synthesized)
ggcccctggatttctccaggcactcattagtgtgactgctaatccctctcaaggccctgaagatacttctttagagatccaaagtaattttctggtattccatctaatctatattctaag

SEQ ID NO: 936920 - DNA, 120 bp, Artificial Sequence
  ENSG00000236028_0 (sequence is synthesized)
gattctcctcggggctccttcctctccgctcccttcccaaccaagaaggacacgcagaactttgctggagagatcaatgtttctagaacaccctgaaacaaaagtcctgatatgtgcaaa

SEQ ID NO: 936921 - DNA, 120 bp, Artificial Sequence
  ENSG00000236028_1 (sequence is synthesized)
gttttctccctacttggaatttccatcagcacctgggttggtaccaaactcaggacgtggtggacacgctctctgactctgtatttcaggaagctgccaatcaatagagatttaaagctt

SEQ ID NO: 936922 - DNA, 120 bp, Artificial Sequence
  ENSG00000236028_2 (sequence is synthesized)
ctgacttccgcatatccgaataccaggtaggaaacatctgctttggagtaagagaaggccccagtacctgctttttctccggaaccgtgagagggagccatggggaggagaccagaattt

SEQ ID NO: 936923 - DNA, 120 bp, Artificial Sequence
  ENSG00000259572_0 (sequence is synthesized)
cacactcaggcctgtgaccacagaaaaagtagccagcccaccatccctagatgattttgcagtctttgcacaccagtgtggccataggcttgttttctcctggactgagcctgcagatcc

SEQ ID NO: 936924 - DNA, 120 bp, Artificial Sequence
  ENSG00000259572_1 (sequence is synthesized)
gatatccttcaaaacaggaatctgcaggcagatgctgaaaccatgaatacagagggacaactatacgctgacatagttttatgaatgcaaacagccaaggagagcagatgttgagtggtt

SEQ ID NO: 936925 - DNA, 120 bp, Artificial Sequence
  ENSG00000259572_2 (sequence is synthesized)
gccagagtgaaatgaggaagccctgctgccagcttcccaccaaaaagcaggtgcttagaccattttatttaaaaccagctctttgaatgcactatgtgctgaataaatatcactaaaata

SEQ ID NO: 936926 - DNA, 120 bp, Artificial Sequence
  ENSG00000259572_3 (sequence is synthesized)
aacaggaatctgcaggcagatgctgaaaccatgaatacagagggacaactatgtaagctcgttaacgctgacatagttttatgaatgcaaacagccaaggagagcagatgttgagtggtt

SEQ ID NO: 936927 - DNA, 120 bp, Artificial Sequence
  ENSG00000259572_4 (sequence is synthesized)
gagtgaaatgaggaagccctgctgccagcttcccaccaaaaagcaggctccggccctgaacgcaggagagttgctaaagaagttgctcacagaggcgggagagagcaggctactggtttc

SEQ ID NO: 936928 - DNA, 120 bp, Artificial Sequence
  ENSG00000259572_5 (sequence is synthesized)
gcatcagcaacagaaagaacacctcaatcccagcattctaagcaagaattgcaaggctcagacacgtcaatgcccactgctataactgacaaggaagtggaatgtcgtgtttggcttcaa

SEQ ID NO: 936929 - DNA, 120 bp, Artificial Sequence
  ENSG00000259572_6 (sequence is synthesized)
ccaacgagggctggttggagctttgaactactatcacaccaaaaaaagaggcttcacttggagtgctgccactggatggggcctgacttgtttatccggaaagaagtgacttccctggga

SEQ ID NO: 936930 - DNA, 120 bp, Artificial Sequence
  ENSG00000259572_7 (sequence is synthesized)
agaaggttgcatttgtgaaagcttgtgcagcatttcaaggctgcattcaggggctctgacctccagtgtcagccttccaaggagagaatggtagtgtaatcatgactggagagcaactgt

SEQ ID NO: 936931 - DNA, 120 bp, Artificial Sequence
  ENSG00000259572_8 (sequence is synthesized)
tccagataagaatattttggcagattttaaaagcaactattactggtgttgattgacttaaaaatattttaaaaatataacatgttataaacctcttcaatatcaagaggcaggatataa

SEQ ID NO: 936932 - DNA, 120 bp, Artificial Sequence
  ENSG00000259572_9 (sequence is synthesized)
gaaagcttgtgcagcatttcaaggctgcattcaggtatcagaaaactgaagcccctactcaaaaaccttactagtcaagcccatgcctatgtgtgcacttatacaatcattctgcctgaa
